United States Patent Application Publication US 2015/0240253 A1 - sequence listing, part 22

SEQ ID NO: 101717 - DNA, 1136 bp, Zea Mays
agaaaacacatttcttattaccatgccagtttcgctttgctaagttgtccttagttagtaccaccccttttataagataccacatgaagatcttaattttcaaaggaacctttaacttccacaaagctttattgtaaaaaacttgtggattgtttagaagggcaccatacatggattttacagagaacaagcccgaactagtcaagttccatttgagtacatctttctcattagttagctggatgttaactaagcgggaaaccaaagaatgccatgaaacaagattgtgtcctactaatgctcttcggaaagaaatgtttaatggtatagtttcaaaaacattagccatcgtatcactctttttgcatactaaattataaagggaagggtattggactttaaagggttgattccctatccaaacatcttcccaaaatctaatttgttttccctctttgagaataaaagacccaagacctagaaaggtatcctttaccttcataagtcctgaccagaaatgagagtcacctggcttcctggacacttgagatatggtcttatttcttagatatttcttcgtcaaaagactttgccagagtccgtcttcattaaacaacttaaaaagccatttgctaagcagacacttattttggatctcaatgtttttaattcctaacccgccttgttctttaggttggcaaatgatatcccatttagctaacctgtattttttcctatgtccttccccttgccaaaaaaatctagatcgatagtagtctattttttcaaggactcccttggggacctcaaaaaaagacaacataaacatgactagacttgtcagaaccgaattgattaatactagacgacctcccccggacatcagctttcctttccagctacaaagcttcttctcaattttattctcaatgatcatccaatccttattacccagtttcttgaaatgcatagggatacctaagtatctaaaaggataaatcccacttctacacccaaacagttgaaggtaactatcctcttgatcctttgcatggccaaagcagaaaagctcactcttgtggtaatttatcttaagacccgaaacttgttcgaacgccgctaataagagcctcaag

SEQ ID NO: 101718 - DNA, 656 bp, Zea Mays
tcgagatctaatgtgtgggcggaggaggcaaataaatagtgggaggtcggggacgctgcgctctggcctatggacatgagactgaaatgtgatcggtatgctatcaggaaagacgaagttttaatccaaacaacatatttggtatagaagttttggagctgaattcttttctgttggggatatagctgagtaaaaaattagattatagaataatatagtgatgtgcaaaaatcaatgaattggttctgggtcttatacactatctagagacatttctggattttaccatgttgtgttgctgtttgacgacaggccgaatcgagatctaatgtgtgggcggaggaggcaaagaaatagtgggaggccggggacgctgcgcgctggcctatggacatgagactgaaatgtgatcggtatgctatcaggaaagacgaagttttaatccaaacaacatatttgttatagaagttttggagctgaattcttttctggtggggatatagctgagtaaaaaattagattatagaataatatagtgatgtgcaaaaaccaatgaattggttttgggtcatatacactatctagagatatttctggattttacaatatataaatccaattgttaatgctcatggcctattttagtggaaatggaa

SEQ ID NO: 101719 - DNA, 475 bp, Zea Mays
gtctaccccgctggcaggcaatgtgccccttcagcatttaatgtgccctatccactccactaccaggcagcgaccaggccgtctcacaagcgacgtgcctatccgttctgctggcaggcagtgcgcccatgctacagcgcgcactgtgctcgtcatcactcgtacgtggccagggaagcttcccctgcacgccaatactacgcgcgttgtggatattagggcgcaaggagattgcactggcgactagcattagttgctccaagcattacgtctgttatgtccctgggcccgcatgtcggggctcaacacccttgtatgtgccccccttcagctataaaaggggaggcacgcaacgttacagactcaggctcactcagacacacttagacccagctcaggctcacaagttcatacaagctctcaagcttaatacatcacacagtggagtagggtattacgctccaacggcccgaac

SEQ ID NO: 101720 - DNA, 389 bp, Zea Mays
cgaggtcgagattctttttaaggggggtaggattcgtaaaccctagtatagagtactaatgacctttgtcattgaaattaataaagaagctctttggatgaggtgatttatgcacgaggcacattttattttgaataaataccaaataaaaacacataaacctatgcatcatgttggtcttctttttggttgtgcattaaacacaaatttgtaattaagacaagtctagatttgaattcaaattagagcactaaataaaatgggagaaatagagttaaagaatggtggatagctaataattataacaataaataagtaataattatttcaaaaaggatgtagtatcattcatagtagaattttatttgatacttgaaagtatgaagttc

SEQ ID NO: 101721 - DNA, 1116 bp, Zea Mays
gtctggaggaggccttgccgcattgaggacggttgcttctgggcagtaggggtggttgctctggatcattgccattgtgagctaacctggccgccctcctcgcccttccctcctccattactttaatcccctctcctctccattactttaatcaccacctccgaattaaaaaaaccccaattaacaatcaatcaggtaagccccagcacggcagcacgtaagcgctaatagtctaatcacaaaagagggattagccactaattaagtatgtcgctttgcttttggttggcatcgagggcacagtgaggcgccgtgtcgcatggacgggctgcctcctctcgttcctcgccattgtttaatcagcctcttctccgctggtacgcatagatccagcacatgctagctaaggcaggctttcatcagatcagatgagctgatgagcatgagctctcgtcgacaaacacccggcccttggcttggctcctctcttcggcctttctttttcatctgacaagtgacaagtgacaggaagcttgcttggctgtgatgtttacttgtatttaggcctttagggttccaaggcaggagaatccggctgtttcgtttcatccccgcactggagtctccttctcatagatcgatgcagcttcattcgtagtatatagagtattattatttttcccttgccttgtatcttgcgtgtgtaggagtaggctacaagcggcatcccatgcatctcgtctttccttgcagctctatcctactactagagattagagacacatcagaggtgcattgggaaatggtgacatggattctccacctgtcgcagctgtagcaacattgccggcagctgttctgctgtggcctgtagctgttactgcaatcgtgttggggttgcagtagcagtggcagcagaacaaggtagcctgtgtgtatgagagagagacacacacacacagagatggtcgccgttcgtgtcctccggggggtgctgccggccggcctgttttgcagctggacgtgcagctgcactgcagccatgcgtttgcagatttgtgtttaaggttcatgctacacactgtggaactgttctacgccactggctgtgccaag

SEQ ID NO: 101722 - DNA, 394 bp, Zea Mays
cgggatgaatagaatagcgactaagatgcacttcatccaaaatttgctggcggagctcttcattctttggcacaactatgtggttattgaaccatacaatgccttgatcatcctttctgaaacatttggcttttccgacctctattttctcacggatgtgcctcacaccctcatcattattttgtgcgtcaattattctttgtaagatgactgactcaatcttcaagtgatttgaagttccatgctgaatcattcccaagtttagattctccatttcctggcataatgtaatgtcagaagtcctcattgttagacaatggcaagaggccttgcgactgagtgcatctgccactacattggctttgcctaggtgataatggatctctagttcata

SEQ ID NO: 101723 - DNA, 408 bp, Zea Mays
gtccttgcctcaccgattccctactccgttccaccgggcgtccccggggtccgcacccaagacgcctccccgttgtcctcgcttcctccctccaacgcctgttgcctgtctcactccacgacatggatttggaatggtgaatccctcactgaggccccgaatcccgcaaccaatgccgccttcttctccccctcccctctgcacgacattgcctccccagccggcggctgaggtgcagcgccaagtggccaagtggcgccgccaatcccccatgtgatcacatccctactcggcaacaacctcctttctcgcaccgctgacaccgcgcatcatccacatccacgcctctgtgccagtagcagcaccgtcggctcccgctgccagatccaggtatccagccacgcccac

SEQ ID NO: 101724 - DNA, 526 bp, Zea Mays
gtttgagttagtctctcatcaagatcagaataccatctatccgcggctacaaggctcacatacagtcagtaaaatgaataggcgacgaggccgagtgtacacaaatgactaccttaccagcattttgtgcatcctaggaagcctttagctcaacaagctatttccaaagcacgacaccatcagactattgcaaagaggataacttctcgatgatttgaacagatcgttccttcaactcactaccagctaagcgcaatgaagaagcgacctgattcatcacgttctgcataagatgagattactatccaaataaaatataaaccacctgcaaagaaggatgcaatagacctggtctagagatgtgcagtctatcagttccacaccaaacaacagcatttgcgagtgcaaccgttgcagaccatcctggtttcctgatagagctaagacaatcgacttcatcactgacagagctaagacagtcgacttcatccaggagattatatttcagcttggggtactaaatagc

SEQ ID NO: 101725 - DNA, 391 bp, Zea Mays
atgtccccctttggcgttggtgatctccctgtctccctgtgtgcaagtgcaacactggaagtctacaatcggtgctggcgtgctacactgctgcctgtgtcgactgtgtctttgtctgtgtgtgcatgagccatatccctgtctctatttggcgttggcgtcttgggctcttggatcttggcgaattgagattggcgatgtccctgtctccctgtgagtgtgtgcaaccggtaatagcagtagcactactgcagagaacctgaatgtatttttctgctgccagcctaccagtctatgaactatgatcaatgtgaatcaaaactttgtattcaaatttgtgagttagaactttgtatggctaagtgagattcttcgtatgtttttcaaaaat

SEQ ID NO: 101726 - DNA, 652 bp, Zea Mays
cccatgcaagggaatttctttcagggctaagtcttcaattaatcttttgaacctattcattatagctctgttgaaatgattggtattcttgtcagaggtactgtagatgagattgaagtccccagccaacatccaaggccctaaacaagtggtcctgatatctcttaattcctgcataaatagcagcttctcagcatccccttgcggcccatacacacaggttagccaccatgcagtcccattctctttacaaaactgaaccgacacactatggttatcaattctgctctgcccagtcgatttaagattgtgtctccatgcaaccaaaatgcccccactaactccaacagcagggaggaaaatgtattcactgaaattagaacccagcatggaaagaatggtatggtaggagatattctgcattttagtctcctgtagataaacaacatccaccctaacagtttcaacaaaatccctcacagagtcttgtcttacagatgagttcaagcctctaacattccaaacaaggatttttgaagggtccattaaagaattacagcaagggagcaaccagcacaagaacctactcaaggctccaaaacagaaggagcactccagccaaacaaggctgcaagggcttcgacatgacact

SEQ ID NO: 101727 - DNA, 453 bp, Zea Mays
ggccttgaaagcaaaagaagggagctatctgaccataaaaggaactttcaaggtcagtctagcaggaacacacgcccgaacaactcgcagggttctcagtttcactctagaaaccagggtggaaaaaattatcagatgcaacgctctggacaacaaggccagagatgcaatcaaagtcagaaccagcaaaggaacaactctcagaccaaccaaaggtctggtggtagttcacagacacgtgaaggtggcgccgtgaacacacatgccaaaagcaacaacgcaccagtccaatccaatggttgtttcaagtgcggtgagtttggccattatgctaacaactgccctaggcgcaaccaacaaacacctcagaagaacagcggacagagaacagaccagaacacccccgctcgtggatctgcgcaaaacagaacgccgcagaaccagaatagagga

SEQ ID NO: 101728 - DNA, 654 bp, Zea Mays
agtgaccccgtaagcttctggacatccttgatgcgggccggaggcctcattgcctcaattgccttgatcttctctgggtttgcttcaatgccccggtgcaaaaccaggaatcccagcaacttccctgcggagacaccaaagacgcactagtccgggttcagcttcgtgcgtgttgcccgcagcttgtcaaagaccagggttaagtcttccactagggtcgaccctctcttagtcttgaccatgatgtcatcaacgtatacctctaccctacccctaatcaggtcaccaaaagtcttactcatcgcccgcacaaatgttggtaaggcgtttttcagaccgtaagacattacaacataatagtaaagcccatctactgttacaaaagcggtatgcttcctatcttgcctagacatctagatctgatggaaaccatagtaagcatctaggaaggacaaaaggtcgcacccggaagtagaatccacgatttgatatattcgtggcagtggatatgggtccttgggacaagccttattgaggttggtgtagtcgatgcacatccgaagcttcccgttggccttgggaacgatgactggattggccagtcatactgggtgatggacctcttcgatgaagccagcgtccagcagcttccgg

SEQ ID NO: 101729 - DNA, 379 bp, Zea Mays
caagtacccgactgtcgggccttggtcatcctcatccactcgtcctctcctgtccaggcctcagccaacgcccacctcccgtcgcacgtcgccctcccgcagctttccaattctccacgactgtgagatggagtctctgacgggatctcttccaccacatgcaagcagtcgagatgttgtccctggccaaggattcagagcaagctactgctcggcagcaacacaatgtggagaacaaagaacgtgaagagatcccgcaactactattcaccgttatgattcccagctatgatgtctgaagtctgaactgctactgctattcactgttatgaagtctcaaactgttatgttgaacaattgatttgttatgagtgatttc

SEQ ID NO: 101730 - DNA, 388 bp, Zea Mays
taaaatggttcgctaagtcttatacggtgattagccaacttatgttaagtaggaatcgattgtgtaagtgattgtgatatatatgttgtgtctcggattgcgataataataggcaagccgacgtgtaggttatttagcgggctatgtcgttgctctagttagccgaattgttagatgttttgggttaagttcgtggtcacgatgaattgcttgttgtagtctaaatgcgtatggttatggtcgcggatgaaaagtagtagtgctcatgtgatgtctacgctaaaatgcaaactattgggtgaaaaacgcttcgatatggattatcgtagagaatgcgttgttaattgagtatggtacttctagtgctcgaaatgacacggataaaaat

SEQ ID NO: 101731 - DNA, 376 bp, Zea Mays
cgatgaaggtatggagttaataagaaacataccatacaccacgtcggcatcctcaggaactgattctgctgtcacgtgattaactcttcccttactctggttttgcggagtcttgttctgtgcacatccacgagcaggtgtgttctgatcagctctttggttgttgttgctttggggtgtctgttgattgcgccttgggcagttgttagcatagtggccaagttcgccacacttgaaacaaccaatgggttggactagagtagttgtgctgttgtttttggccggtgtgttcacgacgcttccttaacgattctgctaataaccactagacctttgaccggtctgagtgttgttcctctggtggttttgatattgg

SEQ ID NO: 101732 - DNA, 1592 bp, Zea Mays
cgtttcagcacccctcgccactcaaccctgactagccttgccaggtgaaggcatcccccaattgtaacaaccggcgccgcaggcggaggcatcgttggcaccttttgtgctagggagtgccttcgcctcacgtcgagggtccacaagctgcaacggagctttctgcttcttccacgaagactcctagcagtccttgtccatcatagctcttgcaacagcgccaatattccacctgtaaggaaaaacattaaaagacagagccagacaagacgtaaaattatcctcaccgggagccacgggaatagggtcttttctgtgcaactcacccccggttactttcagcttccgagaagatgcctcctggaggtcgggcgaggtcatgacctccctggcttggcacacgtctccgccagttcaacaacaaatctgtctgaggcctccgccaccctagatgccttcgccaaacccatctttttagcctcaactcttctcttttttctcaccgccatagccacgaccttacctttagagaacccctcatccacaccaccatgtgtcgccatgccctttctcttgcgatcatcaatatccccagcatcaatagagccctcctcaggatacgggtcgtactgaagattgttcaactcaaagacacgattcagcctgacattcgaacctcgtatgtcccaacttttcagcatctccgtcttcgttgaatatttccttacaatttttaccacttctgcctccacctccctgacaaaatccatagcgtctcgacctcgtagctcaacggtgaaagcaggactcagcaccattcgatccttcaaaaaaggcatcgagcgcagctttacctcacccacctcccagtcgtgcaccggaggccacactccataggcaataaacacctccaccaagtcacgcctgctgctcgccttggaggtgcggtgaagggcgtcttcgttcacatctcctttcttcagcttaaactgcgggaaggcgatgtagcaatgcgagcacagtatggacggaggcagccctagaacaccttcggcatccttcaatgtcacataaaactataaatcccatcaattcctccacttgttctttgaacatggaatgagttccacaacttcacccatagtctttgtagtcctcggagtgaacgtaaatgaaccaaactgcataatcttaccaccaacaaccttcttctttagtagagacaatagttcttagcaaagacctcaactgagggctcacctccatatgtagtcgctgcacacataaactaccccaatgccaccatcacattgggtgtaagctggtgaagttggacttcgaaacgctgtaggacttcgacgacaaatcgatgcacaggcaagcaaagaccagtagtgaaaaatgcttcaaaaataaccaactccccgtctggctctaggacctcgtcggctcccagagcacgcccccacaccatccccaaaataccctaagcgttgcatctcatgcaggcggcccgaatagatcctcgatgtgtcgaattccactgtgtgccctaacaacaaatccacaatcatcactgaatcgctaaccat

SEQ ID NO: 101733 - DNA, 297 bp, Zea Mays
atgaaaatcgtgaaaagcataaccaaggatagagttaaggcaagactcacaaagtgacgaagtggagaaaacaatcaagggtaagataggtaaggttccaacataagggttgaagtaaaaattcattaccgaaggaagttacaaggaattaacaagatcaccaaggatgtgcaaaataaaatgaccactcatggatcactaagaagcaagggtggtcaagggcatgttaactgaaatgccttaaacagacattggggtatgaaaataagcatacataaaattatgagagtatgcaag

SEQ ID NO: 101734 - DNA, 276 bp, Zea Mays
caaggttcgggcggaggttgtggaattgcgtgctaaatgcgcggcacgccactatcttgatggtggttctcccgcccctgtagggattcagcacccttaccgttcaccgccccatggtcgtttcgactatggtaccccagactacaggaccaggatagatttagatccatagatcgatggagtcggagtttgtaataatgcttgattcagtgtcttagtctagccagtcttagttagagttagtttggttatcttttgttggatgcttgtcatgat

SEQ ID NO: 101735 - DNA, 319 bp, Zea Mays
gttatatatagcagtgtgggcacatacttgtaaatagcaatgtagaatttcattcactcatgcatagtgctcccttgacaaaggaattgaacattctcaatctcatcacaatgaaataaggcgtccaataggcatgataggtatcaagaatagcagcacttgttgttagtatcgtgtgctctcttttcaccccttaccaactcatttttacttccatagtatttggctcaattttacactacgcataataagcctcacgaaatgatcttctatggtatgacttacagttgttggtagccagccacatttcaaccaacaa

SEQ ID NO: 101736 - DNA, 328 bp, Zea Mays
aatcattaaaggatcccgggattcggatgataaagccaacatgattcataagaaaaaggattaccagatccaggtgaaaggagaggtagtcacatgagatcgaattaggatgagcaccagaaagtttatgaagattcgggacaggttctatggaaggaaacagggcttggacatggtttgcgcaactagacaccaaacgatgtttttttacacaacaagtgcacaaggagacttgggttggtctagccgtctagcggtcaagctgtgggggtctataagttgtgtaggtgtaaattcaagggtagaacactcaagggctagaaaatac

SEQ ID NO: 101737 - DNA, 386 bp, Zea Mays
cgatgcttaagaggctcagcaagctccgggagtagtgctcggtgagttcttagttgaatttactcctgctactgtactttttgattcaggagcatctcattcgtttatagccactagttttgtggaaaagcatgacattccctctacacacctagaaattcccttggtcacccgaaccccagggtcagaccttctatgccagctcaaatgctcccaagttagaattcttttaagtggggtagtgttcttagcagacttaaccgtcttgccatcccaagggattgatgtgatcttaggaatggattggttaaccaaacacaagggcatcataagttgcgcaaataagaccgttctcctcactgaccaccaaggaaagtcagtttcat

SEQ ID NO: 101738 - DNA, 572 bp, Zea Mays
ctgtttttaccagtgcaccgtacgcgagggtgtagacgaccaaaggtacggtgtctcccgtacgtgcagcaggatccccacgtttccgacgaagactttttctctctgatatatttgttgtacgtcgtgcagcctgcagggcgtttgaagacttgttggctggctcgcatcgcactcgcacccaatcaaaaagctagaggacgcttctgacgcagcgaaggcacatgcatccagcctcttcgtcgtgaaaaacgtaaaagatcagatagaaaagaaatcaggctagcagctctgaaagcgaccgtttcttttcccttccattttcttggtgacgaaacacgaccggttctctagcctcgtgcagtcgtggtgcatcgcggccggtttatttggagttgggcgtttgaccaccgagaagtggactgtggccaaaccagctgatcagaggccaccactgacatcgagcatcacgcataataataatgcattaattaatgcccacctgtgggaggctgggggctggccggctgggggatggtgctcggctgaagtgaggccggctccaatccatc

SEQ ID NO: 101739 - DNA, 428 bp, Zea Mays
tttagggcgaaatctgacttgagatccttcagcaatgctgatactgcttttgaggaagagctgactactataatgtcatctacataaaccaacaagaagatgctaacaatgcctttattaaatatgaacaatgaagtgtcggccttagagggacagaaaccaagttgctgcagtttgtcactcaaccttgagtaccaagctctaggggcctgtttcagaccatatattgttttatccaacttgcatacatgatgtgggaatttactatcttcataacctggtggttgtcacatgtagacatcctcctcaagaacaccatgaagaaacacgttctttacatctagctgcctaagacaccagcctctagacactgctatagaaagcaccactctgatagtagcagctttgacaacggggctaaaagtatc

SEQ ID NO: 101740 - DNA, 551 bp, Zea Mays
tctgtcggtgggctcaaatttttttgcatcatcattgttttttccaattctggctctatggccatatcatccttggcttcagctggcccgactgtaggcaccttcggcactacgatcgattcttcaatgatctgaacggtgggagcagcttgtcctgcttcagcagttgaagaggtcccttcgccaaattcaggcactatgaccggttcaatgtatcgcggccggtgggacaaaaccttcattttcttgccctttggcacagtagtggtggccggagtggtagtttttctcttctttccttgccttcgcagtgggtagtgataattagggtatatgaagccaattgcatcaaacaccctgttcaatcttttcttgccccgatccccaaaggttgtggacaaggcatcatcttcggccttggaatatgtcccaagcagctcgtcgctagtagcttcaatgcatttcaaccagtcatcatttggttcgtcaaacttctctccaaatctgaaggtatatttcaatcgaactaggccaccttcgctggattcagc

SEQ ID NO: 101741 - DNA, 733 bp, Zea Mays
gcttgatccaagatagtcggctccttggcctggagaggaaagggttccttcaccccaaggaggcctcccaatggatattggagaagaaggatgatgtgccgctgccccaggacgacgaggtagttgtgctcgcgcctttctacgagcgtgggttcggtcttcctctgcatcccttcgttcggggctgctcttcttctatgggtcgaagattcagaactttcatctgaactccttgcacttggcgtgctttatcaccatgtgcgaggcgttcctagtgattgacccccactgaaagttgtggcaatagttcttcagtggtagggtgaccgcaggccgcagtgactagccgcatgtcggttcggtcaacttccaactctgatctagccggaaggcgtgatactttaagatctcgctgcccacctccgtgaggtatgaggtcgaatggttctacatcaagaatcaaatcgacagtgccctgtatttcatcgatcgagagtcgtgtcgacggacgactggaattgcagggcggagttgagcctgaagggtgaggtggaacctcttctaatggcgctcaagacactgaaggatcaaggtccaattggtgcgagattgatgcgcgtcttcatgcaccaccaaattcagcctctggtggctcaccggaggccaatgtataagtattctagcgccaacgatcatgactgctactcctctgagccactcgtgttgtccgaga

SEQ ID NO: 101742 - DNA, 618 bp, Zea Mays
ccggtctcccctcctctgtgctgcttctctaaaactccaatggctgtacgctcgcggctcgcctgtcactgcaacgctacgctacccgccaaaacgaactacctccaaccaaaaccaaaccaaatccaatgcggtgcgatgatgtgatgcgaggtcgagtggagtgtggagcgatgaccgatagagaacgctgatgagctagcagcaaaaaaaagaaggaaataaataaatgtgggctgcaacgcggaaggaagcaaacagattatccggcccacgtggttggctcgaacccaaattaggctcggaccagagtaggccttgggctgagctttttggggaacccatcacagattcggtccagtagaatgaattgcaaatttgcatgccaagatacatgttgcaggccgatatgctgattcggtgtcagtaatccaataagtgctgatgacacgttataaaatatattgccaaacgttaatgttttttctccgtctatagtagataaaaatataacatatagacacgtaagagatggtgagataaaaggttgataagtgttcacccctaaaatatagccatcaggtttgaagagcaactataagagactagcccgatcat

SEQ ID NO: 101743 - DNA, 1287 bp, Zea Mays
cagcaatatgcataaaggttataagtgtctagaggcatccactaaccacatgtacatttctcgtgatgttgtttttgatgaagtctttcccttcatagaactatattctaatgcatgtgttactgcgttcagagatcaatcttttgccttccaacttactcccttcatccaactttgaaaatatggtggattttgatacagtacagccgatcaatcattgactatttttaatgatgaaaattctggaggatcccatatttgtatgaaggatggctcagggaggatgctaatgatgaacactaggttgaatctagtgatatttcagctataatgatagaatctacgttgcagcaggaacctaagttgatttcaggtgatatacaacagcagtctggtgtcctaggagcaaaatatattagaagttcaaaagactagcacaccacttaaatgtcgacctaaggggcagcaatctcaagaagcacctccaaagtcattccctaggccaacaacagtatcagaaccaaaatttatagcacatccaacaacggtctacacagaccaaaggccccatgcaaagctacaagatggcaccgtgaaaaaaataaagtatggatgtgtaacttctactggagaacctcaagatttgtatgatttaaaagatacaaattggaagtgtgatatgaatgctgagtttaaagcactagctaaaacaagacctagcatttggttccatctgaaggagctaaaaatataacacagattgcaaatgggtatacaaaatcaaaagaaaggctaaaagtactctagacagatacaaggctagattggtagcagaaggtttcaaacatgtatatggcaaagattataaggatactttcagccatgtggttaaagcaactactatcagaatcatcttgtctattgctgcgactagaggatggtccttgagatagtttgacgttcataatacgtttcttcatggtactctcgaggaggatgtttacatgaaacaaccaccaggctatgaggacaagatgcagctacgctacatttgcaagctagacaaagccatctatggactaaaacaagcaccctgggcctggtactccatgctctgtaaatggctactgaaattgggtctctgttcatctaagtctgatactcttttgctcttttttagcaaacatggaattaggattactatgtttctgttggtatatggatgctattattgtggtgaaccctccacaggatgttgttttagctttgctaaaaaaatctaagaga

SEQ ID NO: 101744 - DNA, 632 bp, Zea Mays
cttcatcgggcaccgcttcccagacacttgccaaagtgttgcccgaaaggccctcaaacagctatgccaaaactacagcagagaggtctttgaaactcctcttcattatttcccacccagcaataaaaatacccccacctggaggaaaagacttcaggctctgtcagggggagaccccaccgaggatgaccccaccattgtctacatggccggatacctccacaccctcgatacccactacgatgatctctcctcccactgcacccacctaaactcccgggtggaaagcctagagcagcaagtcaaagagcttaagaaggagaaggcatctctccaagagtgtctcgacatagtagaaggcgaggaggccaacacccgtgaggcctatcgaaccttaaagatggactatgataagaagcttaagaagctcgcctccacaaagaaaatccagaagaaaaccacgagccaaggatgccagacggaaaggaggaagaaagctcccccagcaacagctcccgccaggatagagaatttgttcgatatcgaggatatgtccctcgctagccttgatgatcttctcaaggaatttggggacactctggaaaagaaatttggtagtacctcagggaacg

SEQ ID NO: 101745 - DNA, 840 bp, Zea Mays
gaccttcgacgctctagacaactaccgaaccgagttcctacgcttcgaagtaactcgattcgagtgcgggtacaacaccatcatcgggaggctgggactggccaagttcatggccatcccacactatccatacatgatactcaagatgcccgaacctcgaggcatcatcaccgtctgggccaatttccaaggagggacatagtgctatcggggggcatccagaccgcccacatcaccagaccctaggtagcacccccaacgatgagcgctgacgcatcactaagggatgacctcacaatcccagcgatgaagtatctaccagtaccaccatgcggccgtttgaagaaaccaagaaagccaacctcggcttctccgacgaacgcaagatggcgatcatacattttctgcaggacaaccgggatgtatccgcgtggcaactcatgtacatgccaggagtccccagagagctaactgagaacaaattgaaggtgtatcctcaagcaaagccaatccgacagaagctgcgccgctttacgcccgacaaaagagaagccatacaggctgagttagctcgcctagtagcagcaagattcattagagaagtagcgcaccccgagtggcttgcgaaccctgttcttatactaaaaaagaacaaagttgaatggcgcatgtgcgttgactttagtgatctcaacaagcattgcccgaaggatcccttcgggctccctagaaaaggccaagtggtcgactctaccgccagctgttccatgctctcctttctaggctattactcgagatatcaccaaatcagtctagcgaaagaagaccaggtaaaacatc

SEQ ID NO: 101746 - DNA, 317 bp, Zea Mays
tttttttataaaaaaaattaaattatatatttgtaagcacgcaatcccctgattcgtattcctaaatcaagtcaagtggtacacgctgggtgggctagttggtttccatgtcgcatccctctcaacaaccgtcgtcctcggataaacggatagcgacgctgatgataagcctctgatctagccgcgaacgacgtcgtttagatgtccaatctccgtgccttttgaccaggttttgcccctcacgccccacctacagcgactcgtttcgacattggttccggagatgccactactcctttccctcccgtaccttcagg

SEQ ID NO: 101747 - DNA, 391 bp, Zea Mays
atgtgattttaatatgatcttcaagccagaggataagaataactccaacatcaataggactttgatgggtaatttcaggagcctaattaactccatagagccgaaagaaactcctttgattggtagaaaatttacttggtcgaaccagacaggaacccaccctagtgaagcttgatcatgttttctgcactactagttgggaggagtttttccctgattgtttgttgtatagcaacgcccctgaatgctctgatcattgccctttaaccctcaaatttcgaaaggattgtagggggaagcgcagattttcactttgaaggtttctggcccaaactccctggattcattgaggtgttgggtgattcctagaatcagccaatgttggcatcct

SEQ ID NO: 101748 - DNA, 399 bp, Zea Mays
gggggcggcgatttttccctgctgctcgtgctactcgtcttgctagttgtcggtgggctctccgactgtgtttttgttgctgcttctttgacgcttagtggtggggcgggctccccggtggcgatttcctgctctcgcgctggtccatgatgagttgttgtggagggggaggtggctcttacaggatccatggttgctgtcagcggagaatttgtggtgaattgggtggctctacagctccagcccgcggcgatggggctctggtgtgtgttgacacggttgattcggtgagggagctcttcgtgtatctctctgtttttttgctcctcgtttttgcaacatgtgccgcgtgggttaggcaactagagtttatatactaacctttggagtaaaaaccgg

SEQ ID NO: 101749 - DNA, 417 bp, Zea Mays
atgatttgaagcagaagtaatggtggtgtggactgaagagagatgtggctgcacatgtggctatgtgcgatgggtgtcaaagagttaaggccgaacaccaaagaccagctggactattatacccattaaagatacccgaatggaagtgggaagagattggtatggattttattactggattgccacgcacctcgaaaggatatgattctatatgggttattatggatagactgaccaaagtggctcatttcattccggtcaagactacttataaggtatctcaattggcagagttatatatggctcggattgtgtctttacatggtgtaccgaagaagatcattttggatagaggatcacagtttacccccagattttggaaaagttttcatgagaatatggatgcgaagttgaatt

SEQ ID NO: 101750 - DNA, 390 bp, Zea Mays
tcctaggggcgaaggccgctgtgcagggagcagggggcgccgaggctagggttagggcaggggcggtggcttgcttgttgggcctaatgggcaaagggcggttagggttatgttaggttagatttgtaacaccccaggtgttacttaggattttcactcaagactacacaagtaagccatcatcacatgtgacttaagttgggaaaaagtacaccaaagttggagctcatgatcctaagtaagtgcaacccaccttaaaagtcataccttggcttgttatgcacatataatggggagaattgcccaagccctaattcaaaccccttttggacaagtggagcactagaagtaagcatgaacaaaagggtatgaaaaccacatgatcatgac

SEQ ID NO: 101751 - DNA, 664 bp, Zea Mays
ctcttcattcctcagttgcgaatccaacaagccactagccatcacgttctatcccccatcctatgtgatcaacggaatttccctgaaccggtttcttccgccgccgtgaagaactcttccgaggccagcactcctcgggttagtgcatacccaattgattcgagttcttgcttgttttagccccctgttgctctcagagccggccaattggagtttacctgagtctcatcaccggaacacccctctgcgccgtagaacgccgccgcgacgccctctttgtcgacccgcctttctactcttgcccagcccaaattctagcgtgtacgtaaactctggtgaacttgtgaagcttacccaagcttcaatttagtcagccatactttcggttgtccgaaacgcattgatccattcaaccatccgcactgtcaccatgaactggttgattcaaagtcccgttagtaaaattgattgaggggaaatacgcgggaggagttcaatccgatgtctgccgctcgagagtaccagtctttgcgccatccggccggtctaacctcgctggtgttcaaagctccgccgtgcgacgtcgtggtcctggcgcggtaaagatatagaagtgcaggggcttttctgcgaatgtcagtgagacgttaaatagtagcaaagg

SEQ ID NO: 101752 - DNA, 352 bp, Zea Mays
ggctcccaacgatggagcacgagctgcccgcgacggctctccattaccgagttggccacactgtgccctaggcaaaccgaattccaacctaacggaagctacacgatgcaagggcaagggtgaacgcgcgaagaaggttctcaccatagatggcgcccagcagagctcgtcgacgagggggcatgacaacggcggaaatccaacctccggcgagcaattccccaaggaccgcgatgcctccacgcgaattgatgccactggcgcatgcatgcatcatagcgaacaccctgttacattctcccgtacccgaacgacgacgaacacagaaatcagtggcggcggcactctcttc

SEQ ID NO: 101753 - DNA, 838 bp, Zea Mays
gagttaaagccatctctgaggtccttaggagtaacctcagccgatctactccaccaagcttcaaaattgatatcttccatcccgggggcaagggcggacaggccgacacgttggaggagaagataccaaaattgcctcgcgaggacacaggaaacaagcaagtgatgaatagactctccttcctggtcacataaggggcaagaactaggatggggaagacccctcttagcgagccggtcagccacccaacatttattatgtaggaccaaccagaggaaaaactgacacttaggcggcgcccaggtgctccacactctttcaaagcccgccagggaggtagaaccacataacattatctcataagcagatttggccgaatagataccatcggaagagaacctccaataatgtttatctggaactcccgattgaagatcaacgtcagccacaacatctgccagcaaaatgaagtcaacaatgacctcccatgttaccactccccttaaatccccaatccatgatgagctgcacagagcatcagccactgtccttcgcttcaccagccttttaggaaccaaactaaaaatatgaggggccaagtatgtagtcctctgacccaagatccatctgtcatgccaaaaaagagcttatcacatcatagataagcagctctgacttcccatgacaaacaggagccaaagcccctaacacgctacacaccatcgttgccaagcttatcacaacacagtgatgtgcaactgcgacttcccacgacgaacatgagccaaaagccctgacatgctaccaactgctcgcaacaagtccaaaagaaagtgaa

SEQ ID NO: 101754 - DNA, 1016 bp, Zea Mays
gtgaatactagcaggaacacaagggttgcacactcaagtagtgagctatggctaaaatctgagggcaagcgaaaatcttcactgaacacagccctttatggctgctgaaatgggcagatgtcactagatttggcaaccatgcagtggggaggtgttttcccatgttgacagcagtgcaggagctccactacatggctcacatgcccccataccacacaggtttataaacatacaagggacattgaacttggtccatgccacaagccaaaatatccacttgacataactaatgaagtagcaaatatgaactccaccgtggcaggctcaaatgagttcaaaagtgatattttctgcaggggatatgagtccaattcactcccccaaagaaccagcagaccacattttttatgcacccaaaacagttcaaacattgatattttcagtggagctgagatctctagacctttgactatgcatcccatccatatcctatttcataccatcagatgaacacagcaggggaaaaagatcttcttcagatatttttgaaccaaccctgaactgccactacctgactgaacccttccttctacctcaatgctctcgccaattccacaagtagcctgaagatccacatcaaagaatgttgtttactaaacaaccctctaacactttgtcataggtaccttagccttatacctcctagatccaacacaaaacagctccaaaatctggagaaccacactgaacccaaaattacagtcaactgaatcaccactacatcctacaggtctgacagagacaatttaggtgcattttactcccagctttgcatagcacccaacctatctctctgtaggaaacttgtgcccctaactttagtctttaaacctgctacagaactttagtccaaaactacttagattaggcacaaaagggctctaaacccagtatcaaacactgcactcgggtttcagtacctgcaacaactcagaaagtgaaaacctgacaatcca

SEQ ID NO: 101755 - DNA, 492 bp, Zea Mays
gctgccgcagaacattgtaatcttcccatgtggtggcatcatctggaagcaaactccaccggatcaacacctgtggcacggcacgattccctttcttgaccaaccggcgatccagaatctccaaaggttggacattgcggctactcaaatcagagtaagcaggcagattagaaaaaacaggagtgtaatctggaatgaatggtttcaactgtgagacatgaaacaccggatgtacttgagccgacgcaggcaactccaaacggtaagccactgctcccacacgctccacgatcttgtaaggtccaaagaacttaaatgcaagcttcggacaaggtctactgaccacggaatgttgcgcatacggctgtagtttgagcaacaccatatcgcccacttgaaactgtcgatcagtgcgaagacgatctgctcgcagtttcatgcgattctgggctgcggccagttgctcccgtaacatggctgtaaactgtgctc

SEQ ID NO: 101756 - DNA, 930 bp, Zea Mays
cagttccccatatcctccaagcgcgtgcttgcctgcagcaacagatcgcttgtcaactccattggctttaatgggtgcaccttcacaaatatttgttgggaagtcaaaagccttctgcattgccaaaagctcttttcctgaacacaaatatgccctttcaattttaatcccacgactctcccattgccatattcccctcctcctctcccagtcaattgtttcaggtcttctcctcaaagctcccccttgtccactctgtcctccgatctctctctttggggcatttcccatctctatccctcgatttactcgccctgctacgccattctggatgtatgaccctcgatagctactccctcaacattgctttctatgccactgcccgcctcccatctgtttctgttggtgcccagcttcattccctttctgtcaaacttggcttggtttcagatacatttgtccttaattctcttatcaacatgtactcgtcttgtagctatccaacaactgcaagacaagttctcgattctgctccccaaggagcttgtgacacagtttcttggaacacaataatttctggatacctacgatgtgggatgcctaataaggctctgcaggcttttggccagatggtcaaggagccagttagactggatgatgtcacattgctgaacgcactcgttgcttctgccaaggcaggcaaagcgaaggtcgggaggctgtgtcacagtttagttgtggtgaacggggctggaattaattgttatatgggatcctctctgattagtatgtatgccaagtgtggattggttgaggatgcccgcaaggtatttcacggaatgcatgagagaaacgtcgtttgctggacatcaatgatttctgggtacacacagttgggtaagtttaaaaaggctgtcgatcttttcaggg

SEQ ID NO: 101757 - DNA, 366 bp, Zea Mays
caaatttttcacgcaatccaagggtttttcgaagcatctttccttggattcgcgaagctcctcaatatttttctctagcctagcttgtgtccattcattgatctctttgctagcttttgcaactacatagttttcattagcctcggcgagctttttccgaagttcttcaacctcggctttttgggcttcggcctgagcattgtatttagtttcatcttctttcattttactcaccaatgaaatcaaaatcttgtctttctccaaaccttcgtttctcagctcaattacctctgagcgaaggttgctgagagctattgagcagctttcgtcttcggcattcttttgtgccctcaaggcattgctaag

SEQ ID NO: 101758 - DNA, 597 bp, Zea Mays
gcagcgtggggcctaggcgccattatttgagctgcgccaacccctggccttcatagcctgggtctccgcacaacttgtatcattgtgccctgcaggtggtctacgcaatcatgcctagccttgatagatcatgaatgcaccgcaggccgaggggcacgtgggccataaatgcaccacaatcctaggggattgtaggtcatgagtgcgctgcagtccgaggggttcataagtaatgagtacgctgcagcccaaggggcttgtaggtcatgagtgggaggtggactgatgcctctaccacggctcggcgccaagcatagttaatgcggccagtcacttacaatgggtcagtatcgggccaggcgagggatccactcgagtggtttcccttcaattcgcctgccacctgtctagctccgccatgcccgaccctaggctcggtgcctcgaggtttgttcgggggcaggtgcttctagggcagacgtttccttcctcctcgtactgaccgatgagctttggttgccaaaggtatcttcccagctcccttgttgaccgatgccccccagaacaggcatattaccccgacaatattataaaaat

SEQ ID NO: 101759 - DNA, 426 bp, Zea Mays
gagacatctctatatattcaattggcacagatgatcaattggctgatatttttacaaagccattggacgaaactagattttgctcattaagaagtgaaatgaatgtgattgatctctcaaatgtggcttgaggttgaacacacatgtgtagtattgcatttcgcttctaaatatgctctctaggctatttattgggtatttttgatgaatttttcattctagtttgatctaagtagtttgatatgaaaatgtgtattcctcaaatacataatgtgtatatgcatgcatactaacccttggattggtcgaaatgtccatatatgagcatcaaatcagatttgtaattcaaattcagaaagtggacaatgtttgaagaattgagtatcaggtcgcggaccgtccgcctatggaccgcagaccgtccgc

SEQ ID NO: 101760 - DNA, 626 bp, Zea Mays
gcctgaatgagttgtgtggcatgctgaaaacaatagagagtgatgtaaagaaaaccactggtagtagcagtcatgtgacacggtccatgacaagcctaactttaaaacgaagggtaaatctcagaagaagaagggcaaggctaaagatacaatctcccagccaaacccaccgcccaagggttgtcaaagatgagggttttagtacctagaggaccatgtcattggctcactcaacttggttgttggttgtgggtgagagattgtggcctagtctatgcagatattgaagtcatcacaaaactcaaggaagggacatctgatgaagtttgtcccattgttagtgaagatggagtttagagcccccaaagcagtaaacgattttctgaaagaagctagctcctgggcaatggtcatactaaacatcggctttgcctcgattcacttagtgaatttggtgatggagaagggcaagcgggggaatctagacgccttcgcaagagaaccaaccttgtttgagtccaatacgatgaatgaccaagtgatcggtatggtttgtagggtttaggttgtctgttgggtttgtcacacatataattgagcagccttcacagctatgtgtcaccaac

SEQ ID NO: 101761 - DNA, 371 bp, Zea Mays
ctatatgccaaattctccaaatgtgatttctggctaagggagatcaagttcttgggtcacaccattttgcaggatgagatagcagttgaccctgagaaagtacaagaagtgatggattggaagcctcctaccaccgttcggcagattcagagttttctgggattggcaggatactatcgacgatttattccggatttctccaggattgctaaaccaatgactgagttgttgaagaaaggagtgaagtttgattggggtcagaaatgcgaagattcctttcacaccttgaggcggcatctgacaacaacacccgtgctagcacagcgtgacaacaccaaatcatttgatgtgtattgtgatgctacgggcac

SEQ ID NO: 101762 - DNA, 669 bp, Zea Mays
agaaaattggaagatgggccgcgcgggtgttaaagggatagtgggccgaattcgagatcagggcccagctgggtcggtttttgttttattcttttctatttcttttcttttctttttgtttctttcctctttattttcaaattcaaaattcaaattctatttaaagttcaagtttcatgataatttgtttcacctcaaatgttcaacttgaacatggtatggtgattatttatttatttctaaattttatttggttttgtatagtatttctctttctatattatttcaaattcttccaatttgcacttttgggttaaatcccaattctcaacctattattatatttttatcccatttactaggttatttaaatgcacaaacaaagatccaatatgatgcaatggtttatttccgggttgcaatgagtatgggcaaaaacacatagtgggatctactcttttcagattgtttacagattgggtattacaagatgcatgtattcatgtttgaaacgaagcttcttcgtgttcaacgaagcactttgtcgccgaagccggactatttctgttcatattatcgtttgtgcttcatgtcatgatgatgatgatcctacgaatgtctaatgaatgtctgtatgaatgcaatgaatgatgtaatgtaatatgcaaa

SEQ ID NO: 101763 - DNA, 328 bp, Zea Mays
caaatatgaagccctcttgttcggtttagaacttttaaattctatgggagtaacacatgtaaaagtatctggtgattctcagttggttgtccaacagattttagaaaggtatcaatgtttagatggtattttgaatgattgccttgaaagatgttgggacataatgcgctcttttaatgaatttgacattcgacatatatgtagagttgagaattccagagctaatgacttagcgcagaaagcttcaggttatcgggtaacacgagggaagttccatatttctgaaaacccggtaatcagaggcgtgctgagttcccaggttgcggac

SEQ ID NO: 101764 - DNA, 313 bp, Zea Mays
cagagacacctgccaagtcgtcgctcgcaaggcattgagggccctgtgtcagatctatgaagaagaagtggccgacaccccgctcagattctttccgccctttcagagaaaccgtccagtttggatggccaggatgcgtgcattgaaagggaagcagctgcttgaggatgaccccacagtcgtgtacctcactgcatacctgctcaccctagatgcacagtatgatttcttggctcggcaccaccgtcagatgattgcccgagcagaagaagcagagaagcgcaacagtaagctccatgtggatctcaccaca

SEQ ID NO: 101765 - DNA, 362 bp, Zea Mays
aatgttcaacatagccatcatagttctcagtcttcgagcatgcaacacacttctttcagaccaccagctccgagaggcagaggaggaagaagtttcagtggaggaaggtttagcaatcaacccagaaagttgtaatgtcttttgtgtggtgaggacaagggccacacaacaaggacatgccaggtcacaatttagaaacaaagagaaattgctgaagccgaggcacggcagagtcagccgaagcaagtcctccacactgcttcgtgctattctccatacatcctagaatacgtaggcaaccaacaacctatggcttttgttgcttcgacaagccattcccgcgcctcctggcctcagttgcc

SEQ ID NO: 101766 - DNA, 578 bp, Zea Mays
cttatgggaccttcggcgacgaagcaggcccccaacaccagcaaagcgaataagtttattttcttcctccccaatgtagcctagttttttcatcataaccaggtcctcttctattacgatcgattttctgaattcattatgactaggttttgatgggcttagaatattgttgtcttcttcgatttcatcgtcactactgtcttcaactacaatctgctcagctttggcagttccacctaacagtttctttcggcacaagtagacctgatcgtctcatcacttcagatattggcgctgtttctatcacttcagtttcatctccctcgcgggacaccatagcagtggatcttactcgggccatttcaagtgttttggttccttaagacgaagctaatttcgaatgacgaagagcttgtttggaaagcgcaatccagaaagcttcggctttggttaaaatttttaacagcacaacagtgtgatggcaatgaatgttgtggtagctcctcaccaacctgtctgcttatatagtgctgtaggagaagaaggcgaacagccagaccatctacactgactgaacg

SEQ ID NO: 101767 - DNA, 408 bp, Zea Mays
tggtacttctgatcctcctcggtgccctcacaacggagttgctccagctacagcccatgtcgcggctctgttccgaccgcccttcatagatgggtcacgacgctctccggcagatttcactccagcggccaagttcttatatcagctcatgagacggatgctactgcccctgatgggttatagggaggccaccactcatatccagctctggcaccttggtgccctgatctcccgttcagaatttgatgtggttgattttcttatatgtgagatcgaggacacggtattggatggtcttcgtgcctggtgacagctgtcatatgctcattatctttgctacatcttcgcacagctgatccagccaccgcagttccagggcactcttgaggcctcacgcctacactttgg

SEQ ID NO: 101768 - DNA, 497 bp, Zea Mays
gtttggagtgaccaaagggagcgacattgaacctaaggatacttggtggtggaccgaggatgctcaaaaggcaataaaggagaagaaagaatgttataggagcttgttccatgacaggagcgcggtcaacatagagaggtataagatggcaaagaagactgcaaagcgagctgtgagtgaggcaaagggtcgagcctatgatgatctttaccgaagactaagtacaaaggaaggggagaaggatgtctataagatagctaggatttgggaaaggatgatgagggacctcaaccaagttaaatgcattaagcatgagatggatcaactcttggtgaaaggtaactagggtggcagaggtattttgacaatcttttcaatggtgagaatgagactatggacacccaattggatgactcctttgatgatttaaatagatgttttgtacgcaggatccaagaatcagaggtcaaagaagctttaaagaggatgaaagggga

SEQ ID NO: 101769 - DNA, 392 bp, Zea Mays
tcaaggtgcagattgcttcaccggctgcgcagttacctagcgaagcgggcggaggtggcaatttatagtttccatcgtcggtggtgtccaatttcccgaggttgtgctggcgaccggagggaaacatggatactggtgctcgggataggtggctttcaccatggcgcttcctccggcgatcaccaaatcccttaacataactaattgtgacgtggtacagaacctagacacgcggcgcacgacagtgatcaaccaacggcggtgagctcttatccgatcgaccgatgagcaagtgggtacggcgggcttagccgcaaccgagctcgagtcgaccctatgccaatatttttacctcaccgtagttatcccctgaccgtggtgcacgaatcgcg

SEQ ID NO: 101770 - DNA, 675 bp, Zea Mays
gaagtcttttccaaaagactctccgtgcaaaagtcgcctaagggtgcagccggaataataggcgcgcaaaatcgaagtcttttccaaaagactctccgtgcaaaagtcgcctaagggtgcagccggaataataggcgcgcaaaatcgaagtcttttccaaaagactctccatgcaaaagtcgcctaagggcgcagctggaataataggcacgcaaaatcgaagtcttttccaaaaagactctccatgcagaagtcgcccacgggcgcggccggatcaacgaaggcgcgcagccttatcatacaaatagcagttacatacacatcaagggcatcatatattacattggctcaaccttcaggatgatacccatctccctgtagttgaacagcattatcctcaattcctcatcctcaaaaagatttcgcagctccccctcacctacactcaccccaatcggcaaggacaacaattctcgcttaccagtcccgtccacgcgaagacgaccactctccatgtcactacgataacgcctaccactttgcgacaattcactcactctccgttttgccaccgcccttcatcgcctatacccagcactcgcgctcgggagctcctcgaaaccctccgcgcgcggcgaaggctccgctacatccacatccaacgctgcaaaataa

SEQ ID NO: 101771 - DNA, 770 bp, Zea Mays
ggtggagcagattaatcagcttttcttaatcattgcccaacttaaattggttaacacacaagtcacttaaaacaccatattttaggaggtctaacatagagacattaaaacatggtataaaactatataagacttacactgtatactgaaggacctaaagcacttatgtgtatatcttagcggattgttcttcaattttaacaaggaccgacttgtgcacgctacttgcctccaataattattaggctgtgataacactcgtataagacctctaatcgatcaacaagacatttatttatccaaaggggcatggaatgcaatatttgacaaggcaaggcgtcgacccgtcatacaacagaaagcatgacgacaccgacagatgctatcaactaatcgttttaaaatattaaacttacttctcgctttaccactacaccaccctttagtcacatgaccatcgggagcgtccttcacacgattatacaatagcaacctaaacgtcgggtcacacaatacatacacatttcttagttgcgagtataaccatattacggcatatacccgcacacctcaatcaaatatcttacgccaccaccactataatacaccacggcacacccgcacatatgtgtccccatattacgcacaagacatcaaccgcaccagtgactctaacaggattaatcatactcctcattcgcatcgactatcacaatcgccgatcatatgcataaaacaaatacacttttcacgtagacacctatcgatgc

SEQ ID NO: 101772 - DNA, 479 bp, Zea Mays
agctgatgtccagatcgctgcatgcacatgctttgcaatattctatagatcgataactactaatttgtgttagccaacaaggatatcacgattcacaaagacagttgaagtgacaactgacagaacccggcttgcatgcatgtgcgctagagaacaatagctagtgtggaataatgtagattgttctctaataatccgaggttgcgtctcatgcatgaggcttctctcagcagaggaacacgtacatgcaagttccgctcagatgccgactgtacaaatcttgtttccggatcaaatcttgttgtgggctgatgtcactagaggttctttagctggagattcagtggctttacctattggattagcaacatgctgaggaaggggacaagcagcaccaaaactacctttgagatgaatggaatgaccaggaggacaacactgatatctagtgtggttcagtgagatcatctgcatggcac

SEQ ID NO: 101773 - DNA, 539 bp, Zea Mays
acgacctggatcatgttccacctgtcctggcagaaactgggaaggatgaagcctctctgcagacgcggtcaacaaaccagttttcctagcctccgtcggacggggatgcggcggcctgagcatgaatgactgagggagagcaaacaatgcggcggcaagggttgtacacaacagcgagttctcaaggaaggcgggagcgagagagggaggacgcgtgagctatttttaacaacactcttccataaaaaccaacatttcactgttgtgaaataaaagttgggtcagccccgttctttagcaaaaggctcccagttagcggctacaattccactaaacaacctaacaaaaagaacaggaaaatcaagttaaggaaagagctccctgtggaaaatcccacggacttctagtcatcattcaataaaggtcaagaactactgacattgaaacaaaccatcaaagtcacacaatcactcattttttctctctcaggggcttgtagattcaaggaagcagttcacagactaacaagtaaacatgcc

SEQ ID NO: 101774 - DNA, 273 bp, Zea Mays
ccatgtatcccaactgaagaaatgtgttcgattgccgactgagatcataacagaaccagaagtggagatagagccggatctatcatacaaagagtacccttccaaggttctggattgcaaagaaagatcaactcgggctaagtcgatcaaaatgtataagatccaatggagcaatcactcataggaagaggctacttgggagaccgaggaatttctatgttcgaacttccccgattgtgtacctaagggaatcggtacgtaaccatgcccaac

SEQ ID NO: 101775 - DNA, 426 bp, Zea Mays
atgtagtagcctataatcttagctgagtggctaaaaccaattcgtccaatgtcatgttccttaacccagaatcaattttgaataattcagtggttcgcaagaataggaatgttagaagcctgtgatgtttgtacactcgagcaaaagattggaaaaaatctgtatcaactctccactcaattttgcacctatcccagtaaaccctcttcaccccttttacctgcctagcactaactggctagagaattacaaacaccagaatgttagcatagcctagccctcacaatatcttaaaaggtagaaatgctctgcgacttgcactacaactttcaactacgtagcaaacatcactgttttacgtttaaacctttaaccaaacaaaccactccatatggcaggaagcattatgtaaaatcagtaacctgg

SEQ ID NO: 101776 - DNA, 756 bp, Zea Mays
ctgggatctccgcagtgccaacatgcattcgccgggggttggttgcttgcaactgagggggcatggaaagtgctttgactctgctgactgaactgtgacggggtgggtccagctggtctactgaagcttggtcccttgggtggaaatccaaaggatcgagtcttctggtgtcggtcttgctgttgagcccggaggacttggaatttccttttgagatgccctttttcttcctcctttgccctttcaacttgcatggccttgttggagaggtgagagaaactgaggaagtcttggctagccagaattgtcttgagttctggcctgagtcccttcaggaaacgggccatcttcttgccctcggtactgacgtcatctggcgcgtagcgggctaactccgtgaacttgtgcacatattcactgacagatcttccgtcttgagtcagttcccggaattcgtcttccttaagctgaacgagcccctggggtacatggtgctcctggaaagccgtataaaattccgcccaggtagcatctctgatggtgacgttgaaggtatcccaccaggctaaggccatcccggaaagttgatgggcggccagttgaacacgctggtttttcgagcatccaatggcttccagcttccttttaatcgtgtgcagccaatcgtctgcatcgagggggttgctagatccgacaaacgtgggaggcttgagcctcaggaaatcccccattctgtcttgcggtcttccaccattc

SEQ ID NO: 101777 - DNA, 337 bp, Zea Mays
gcatgttccatcataaaaagtactcttaccaatatggttgtgaagcagtatgaactagcggacacatttgctgagttgattgatgatgtccttcgcgcggagtctggcgacccagacaatgctgcggaagcgcctcaaacagctaaacctccagatatatctcagcatatgtcgtcaggttaccttccgtcattgtcattttttcaatttatgtacttaactctatgcatttatcagttcttgttgtttaaatactacaaccttttaattacagaggcacacatccataagggtacccagaatacttcggacctgactatgccatattcacaactga

SEQ ID NO: 101778 - DNA, 416 bp, Zea Mays
ttcttaagttgagacacatggaacacattatgcacatctgatagagtagcaggtagctcgagttggtatgccatctccccaactcgcctaaagatcaaggatggtccaatgtagcgaggggacaatttgccctgactttgaatctcctcattccacggagtggtgacaccttgaggtacacataatattcttcttcaaattccagtggtcttcttctattatctgcgtagctcttttgcctggtttgagccactctcaaattctctcgaattatacgaacttgttcttctgcctcttgaataagttcaggtccaaagaactgtcttcccctagtctgatccaatatagaggagtcctgcatttcctgtcatacagagtctcgaatggtgacatcttcagactggcctggtaactat

SEQ ID NO: 101779 - DNA, 389 bp, Zea Mays
cttgggatcagcctgcatgctccgttgttccatggggtgagcaatcaatgacgagggcactgtcgtctgcctcgtcgcgccaccgtgtgcgatagctagaggttggggaaggtgattggtgccgtagagaggttcatgtgtggcgaggattagatcaggggagaggatcatcgtgggccgttgatcgattgatgatcaggccggatcaaaccagggtaacgtttcggtccagggaatcttgtatgttagatcgcgatcatgcggttatgcgtcgttcgcgggttcataatgcgctagatctattctgaaccatcgggcgctgatccaacggctcagattggcacgtaccccttcgctgcgtaaattttacataaggaaccctatccttt

SEQ ID NO: 101780 - DNA, 337 bp, Zea Mays
tcacggtggcggagaacagatttggggagaacgagaaattagagaactatggtggctaatagaaggtgggaatgattgctctagctttgtgataaaatggtgtagcagaccgggccatcaatttataggggcgctaagcggtggccagtgaatttggtctcgcacggtggcggccggagaaggaagaggtcattggcgcaagagctgcgtgtcttttaccgtggcagactcaccggcgatgagtcagtgatatagagtggcttacgacgacgtggtgaagcctcatggcacgtggcattcgatcgattggcggccaactccagtgacttattgaaag

SEQ ID NO: 101781 - DNA, 381 bp, Zea Mays
tatatacctggaacgatagcttattagtactttgtgttcaaacaaattaaggcttcatcaaacgtctcgatctgtacgcatttgtatctgtactaagtggaacgacggcagcttgcaattaaagcatctgcattgtgttaaaccctgcagcgtggttagcagtttagcactgatcgatagttaagtcatgtcactgcagatagagataagcacaggcagaggggcaggcatggtggggtggagcagattccaggcacgcgcgcatctctgctgccgtcgttcacgcagcttctgaacgtgaggaattaggtcagcagagcaaaaagagcgcagctactagtcttctcctctcctgttgttcctctagacctctcgctctct

SEQ ID NO: 101782 - DNA, 307 bp, Zea Mays
gtcgatctcctacatccacatctagcaacaaagcgacaactcgactaacgaggctaaagttatggttattgactgggcccaaggggccaaccccatcacatgcccatgaatcaaggcgctcgatgtgctcataggcttcaaccttaacctaaccaagaccgagtagatttttgatctgctcctcaaggagaagcaacttaagttgttaatcgatcactagattccatcagctgaagagtttaaagggtggaagtaatgcaagtggcacaactctaccatgcacaacacagagattgcaatgtactac

SEQ ID NO: 101783 - DNA, 586 bp, Zea Mays
gcccgataccataagaactatatttttttactattatatatcaactaattaaaataatttaatgtatctccgaaaaatttgtacaataaaaaagtaagatcatcaaattattttcctcaaaacaaataaatacagtgcatattagaaacaaataattgtcttgcctcacagcctgatcccttgacggtttgacccttgtcgtgcgtagtgggcagtgtgttgtgtgattccctagcccctacgtttgtcggtcgctcggtctatgtgcatagtgcacttcgccggtcctgtactcatgtgggtgagtgctgaggagagaggacctactctcgctggtcattgcgcctgcacgtgaggaggagatggatgattgccggatcgcgtgacacgatgcacgtacgacatgtgaggatgcatgacagcagggtgcgacgacggatatcggttagaccctaactacgttacttgcgtatttgtgtgtgccgtgccgatgctgtgtgcgagtgaaacgggcacaagctgtgctcttgagcccgacctcctgactcccgtgtggtgtatggggtgaggcccctgcgaattgggg

SEQ ID NO: 101784 - DNA, 482 bp, Zea Mays
ttcggccggttctgccctagcttcgacagggtcggagcgactgggctcagatgcggaagaagacccctcaataggcctcggcactttggccgtttcaatgcgtttggggcgatgtgttaaaactttaacttttttcgacctcggcgtgctagaaatcgccaaagcagcagtctttcttttctttccttgctttcgcgaaggataacagtaatctgggtatacaaacccgatgacatcaaatactctattcagcctctttttgcctcgagccccgaaggccattgtcatagcatcataaagccttcgagtaggcaccaagcaattcatcactggttgcttcaatggcatctaaccagtaatcatttgcctcatcaaactggctcctgtatttgaatgtgtacttcaggtagaccaaaccaccttggctagacccagcagcagtttccttcgacatctcccacccacttgtgagtagccacact

SEQ ID NO: 101785 - DNA, 575 bp, Zea Mays
ctgggtataggcggcgaagggaggtggcgaaacagagagtgagtgaattgtcgcgaagtggtaggcgttatcgtagtgagatggagagtggtcgtcttcgcgtggacgggactggtaagcgagaattgttgtcctcgccgattggagtgagtgtaggtgagggggagctgcgaaatctttttgagggcgaataattgaggataatgctgttcaactacagggagatgggtatcatccgaaggttgagccaatgtaatatatgatgccctcgttgtgtgtatgtaaccgctatttgtatgataaggctgcgcgccttcgttgatccggtcgcgctcgtgggcgacttctgcacggagagtcttttggaaagtacttcgattttgcgggcctattattccggctgcacccttaggcgacttttgcacggagagtcttttggaaaagacttcgattttgcgcgcctattattccggctgcacccttagacgacttttgcacggagagtattttgggaaagactttgattttgcgcacttgttgtgctagtctggctgcacccttaggcgacttttgca

SEQ ID NO: 101786 - DNA, 289 bp, Zea Mays
caccagcatggggggccagcagcctcgccggtgttcttcgtgagctcgtccacttgcaggcgtccgggaatgctgctgtcgccgaatgtcttcgtggagctgtaaaaattccaatgcctctagctagctcattcatcacacacacacgcatacagccatacacacgtagtaaattgaattaatctgttcctatgattgcatgcagtggatggaatggctcatggcatggactgaaaaggagacggaagaagcgtcacacgcaggagatacagcgctgctgctagctcgc

SEQ ID NO: 101787 - DNA, 708 bp, Zea Mays
cagaaacaaccaataaataaacttgcacttgttaggattgcaatttcggcagttgactttttcatatttttgctctcggcagactcatttaccaggttctatccttttttttctgtctaacagtttaatttccattttcaggtcaatcattttggtacctttgtaagatatttttttaacctccctccacctggagaccgaatcaatgcaagaatggtgctcactacacttgattcagcagcctactatgcaatgcaagcaccacaaggccccgtgcatataaactgtgcttttagagaaccactagattacactaatcaacattggaatgttgattgtttgctaggtttggataagtggtttaaaaatagtgaaccatatactaaatacgtaagaatgaaaacagtttctgcattgggtaattactcttgctcagtaatggaggtcctggagatcatagagaaggcagaacaagggcttcttttagtgggtgctattcatacggatgaagatatgtgggctgtagctttactagctaggcacctatcctggccagttgctacagacattctgtctggactgcgattgcggaaagttgtaaattcattaccagggcttgataagagcattttgtttatagaccacattgatcaaattctgttgtctgagtctgctaaaaactggatacgccctgatgtcattgttcag

SEQ ID NO: 101788 - DNA, 952 bp, Zea Mays
tgcgttgccacgagatatggagcatgagagcggcgtctaggttacaaatatattttttgtttatttttaaacattaagatatatgttgtctgttggttagttccaaatttctacagcatagggtgtgggttcaagtacttattctgtactattttttgcggacgctggatattaggagggtgataaattagccagcttgtttacggatccaacaggaacgggcagaattagctgcatattaggagtatcagtttttttcgggcttattgcttttttaggtctctcttcgttgccgctcgccaaaatacctcggtattcgtagcgctcgtctaattaccccacttaaacccctttcctagctaaaataccccactgcactaattacctgttataatggacatttatacccttacaccgtttcttaacgtcacgttcccgtttcttcattttctctgccgtgtgacagatgcatcatgctgttgcagctgcgtgcgcttgtgctactgtccaaccattcttttaatagaacaatgcatgctacttcagcatatcctttcccagcactaatcacctttaggtgtcccagtcctctagacttagcattcaactattgaattatggctggcaaaatcaccccactcaacctctcacttatccgtctccttttctcccacaacaccataatcttttctctaatcttatcagctaattcaactactggaaggtctttatgatctttcacccagttattgaaacactcggccaagttgttatttatgtagtcacatttaatatcacgatcaaaagtacatctcatccatttgaaaggatggttcctatgtaaccaagcatgtacatcaggatcaacttgcaaaattggaccaagatgactattaaaaacttcagttcgatatgctcttgcagcagggtacatgcctctatagctgttgcc

SEQ ID NO: 101789 - DNA, 783 bp, Zea Mays
cggttttaagccatctaaaggtgatacatcactctttatatttaagaaggcagaactgaccatgtatgttcttgtctatgttgatgacatcatagtcgctagttctggttcagaggggacaacaaggctacttcaggcactcaagtctgagtttgcactaaaagacttgggtgagcttcattatttccttggtattgaggtatcacatatgaaagatggcattcttttgtcacaaggaaaatacagtaatgatatacttagaaggacagggatgttgaattgcaaactgtgcagtactccaatgacaaccatagaaaagctatcagcttatgcagggaatccccttagtggtgatgatgtgaccaggtataggagtgtggtaggagcattgcagtatctcactcttacaagaccagatatttcatttgctgttaacaaagtttgtcagtttcttcatgcgcccactactgatcattggactgcagccaaaagaatactgagatatatcaagcacaccttgcatatgggcttgaaaataactaagtccatatcgactcttgttagtggtttctctgatgcagattgggcaggatgccttgatgatagacggcccacaggtggttttgctatttatcttggaaggaacttggtctcatggagtgcacggaaacaacctacagtggctagatccagcactgaagctgagtacaaggcaatggctaatgctactgccgagattatctggattcagtccttgttacaagaacttggcatacgatctcc

SEQ ID NO: 101790 - DNA, 423 bp, Zea Mays
ccacctacccgtgttgtctttgcaccaccgttcccttctgtgtcaccaagatttgtcaccacgcagggaggccaccgatgggccacacaacgtgtgtcgctggagaactccagtactgcctatcgttggcgatagggattatctacatcctctagcaggcaggattgcttgctcggatatggcgatatatactaaagtatgcttgtgcggtggtttcggttacacctgccttttgtgcgcatgtcaggacgaaggtgtgcccgtaatatcacgctcgcatttaatgtgagcgttgttatactcatcccttcgtaaggcgacttccataccgactaccggggtaggtattataacctacgacatcggcttccaaaaccagagcttgctggcatcgggtgattggccgcttatacagtctcttgt

SEQ ID NO: 101791 - DNA, 349 bp, Zea Mays
cgtggctgaaggaagaaaatccgccgtttgtgaacacatgaaccacgcatgctcgggcattcgtggggtgttctagtgcgtcattgtaatccctaggagcatcagcaaccgtcaaatcctccattgaagtctttgcgctcgggcaatcgttcgccggagcgaggtttcggccaaggtgcgggctcctccgtagtcagaacacctcgcagcacgatagtcggtaagaatcccttccctatgttcaccatggcctgttcttcatcttgtgtgctttgaattagtgttcggagcacgtcaagtgtggcaatgccaccctccggcgagacccccgccgcgatcaggggcggcg

SEQ ID NO: 101792 - DNA, 441 bp, Zea Mays
aaaaacaacatgttgggcttgctcttcagtgtgcaccggagccgagtcatccccgtggggattctcaagacccgcacggtgttcagcagtgtgatcgctgcattggtcttcaatgtgcaccggagccgaagcctctccgaagggagcctcaaggcccgcacggtgtttgacacttggaactgagcacaaatctctagtgatactctgctgcccaataggattgcagtccgtctgatcagaaaaacatcatgttgggcttgctcttcagtgtgcaccggagccgagtcatccccgtggggagtctctaggcccgcacggtgttcttcgttgagatcgcagcaagggccacccacaaaattgtccagctcagaagagttaggattcgtttgtttggaatccaagcatctgggtcctagtctttctttggctgaacgacgttgc

SEQ ID NO: 101793 - DNA, 302 bp, Zea Mays
ctccggcgggttttcccaggcttaacgggtgcaggactggacgcggatgtcggggctgtgatgattgctccttttcaaattcaaagtcaatttcaaattcaactgttgggcggccttggtctcgtaggttgcagtggcggactattctgcgtaatgggcccctcaggcctgggcttggtcttggaaggctggatttgtcgggctcagtttcctcagcctttctctgccttttttgtaaagccaggggacatttggaattgttctgcaaacgtaaaaaatcagaatttggtttccctctctcc

SEQ ID NO: 101794 - DNA, 420 bp, Zea Mays
tttagaaccctagccgccccatccattcaatcaacgattcgacagaaaataaccatccaaatcggttcaaatttttgcacaatattcacaatgagtaacacttgcaattccaccaatcaaatttttaattccactgcccattctagatcagagagaaaaccctaagaattcccaaagttgaataaatcacacaaattccatgagattttgaaatactgagatgaagacatagttgatgaacttccaacaatctcctggacagtccgtgcgcaagttcgcttcaccgtccgctctcaatcgacaagagtcactttttgacgtgtggagtgtgtgtgtgagagagacaagcgttgaaagtgacactctgactgcctctgcctgacttatctacctgtcgcggacggtccgcgaggggtcggt

SEQ ID NO: 101795 - DNA, 574 bp, Zea Mays
gctatggccattgattttcctcaatgggctttggaggcaattgataaaattagaaagggttttctttggaaaggccgcaaagaagtcaggggaggacattgtctggttgcctagggaagggtgtgcagacccctccatttgggagggttaggtatttctagtttaaaggaactttgctgggcccttcgtatgagatggttatggcttcataaaactgatccagaaaaaccctgggcaaacctccctatccaagttccaaaaaaggcaggagctttcttctccactgttttggtctctgaggttggaaatggagcaaacactttgttttggacagataaatggatcttgggatagaatttgtgtagtctgacgcctagattatttgccatcattcctaaaaggattgcaaatagaagaactgtgcttgaggctctttccaatagaaaatggatatctgatataaagggtgctctgtctgtgggagttctagtggattatttgaatctttgggagcttctttcagaaatagtgttgcagcctgaagtggaagataagcatatttttagtattgcgg

SEQ ID NO: 101796 - DNA, 464 bp, Zea Mays
aacagcagagccatcggcagcaacaatcggccagcagcaatcgcttcctctactccgctcaggcgctcagccaccagccggtccgccgtccagccgcaatcgacaatgccgcacgcagaggagagagaagccaagggcggcacggcacatccgcacacatgcaccacgtccgtgagtccgtgacggcaagctagccagctagggttatatttgaggctttgggccaagcacactgcacacatttgggccacacacgcatttgggccaagcacaaaccggaatacagacgggattattccggataaaatatgggaaccgttaattcggtcgggaaacaactattactgattccgttcctgttaccgtccatatttcccgtatttttcccgtttcctgtttttcccgaaaatacgatatacgatcggttaacgcggtatacggcgccggtcggtacgggattttcc

SEQ ID NO: 101797 - DNA, 669 bp, Zea Mays
agacgaggggcacatttgcatgaatatgcggctgaaggggtatcggtgatccacatccacccaatcagaaatcaagggttgagatcaccaggccgaagggggtatagggttcatctgatctagcccgcttatcgcagagtgtactgccaccaaccaagcggtatcctaatctaatccggaccgatcagctcgagatcaatgacccacgtcaaccatcaccaaatccgatcggagctgcggttccaagatccaacggttcattgctatttccccccatcatcagactcgtccatcctatcttcgacagctagcaccatgtctccctccatccgttcaccgcccatggcaacgacgccggttcttggtggtgaccacaccagagcacgatcggtccatcagcctagtgcaagccccaacgcgcgagtcggtgcaaagtaacatgaagatcataacgatctcatgaaggtggattccaccagtaataacgcggtggtgaagccggcgcaccatgtggggcagcaccacgacgatgcccataatggtgcacgacacactggtatgctcgtgtcaccgaatcctaaccgaaggagtactatacatatggatgaacaagcagaagcagctacaggattctcaccaaagtttccggcactggactcagagtttccc

SEQ ID NO: 101798 - DNA, 995 bp, Zea Mays
ctcaaatggtgccatcttgatgctaggctggtagctgttgttataagcaaactctgccaatgcaagatgatcttcccaggtacccttccaagacagaacacaagcgcgcaacaaatcttccaaggtttggatcgttcgctctgactgaccatcagtctgaggatgaaaagcgacactaagagaaagcttggtgcccaatgcactgtgaagactctcccagaatttggatacaaatttggagtctcgatcagaaacaatggacttaggtaccctatgaagcctgattacttccttcatatacaaggggaccaaatctaaagctgaatttgtggtcttcatgggaataaaatgcgcagacttagtcaagcgatccactaccacccatatagcatctctaccccgaggagaacgaggtaaacccaccacaaaatccatggtgatatgctcccatttccactccggaatttctaatggctttagtaaacctgcaggccgcttatgctcggccttcacgcgctgacatacttcactggcggccacatacttagaaatgtcaaccttcatccgcttccacctaaagttttgcttcagatctcggtacatcttggtttcgccaggttaaacggtgtaaggcgttttatgagcttctctcaatatatccatcttcacctctgatttctgaggcacacaaaggcgaccctgaaacgaaccaaatcattctcatcgatggagaactcccggggtttaccatcgccatccctcttttgaacttcttgcaataaacgatcctgctgctgagccgcacacactctctccatgagagaagattgaataagtatatgagtctcctcactagcggtgccaacatagcacaaggcgatccccaaacggtccagatcagcaatcaactgcaaggccacttttggaaccccggacctgctaagggcatcagccaccacatttgccttccccgggtgataatgaatagacaaatc

SEQ ID NO: 101799 - DNA, 354 bp, Zea Mays
aattattcgatctcaagaacagccaaatttggagcatgttaaaactttttgtttcttgaagcaaatgcaaattcgaaagtcaatctcgtctcgcaactctcgtccagacttatttattcggactctcgatagttgttacgttatccaatcggtgtctgaatccgctttctcgatattcggtctatgtccaaatacatagtctgaatccgcattctccagcggaatctctattgtgccaatctctaattaattcttatgcaaatcaacttcttatctctatatcatcattcatctctatctatcaagtgtattctaaagatttctcaaagtttgaaccaaatgctcacatcaaaa

SEQ ID NO: 101800 - DNA, 624 bp, Zea Mays
gtgaaacacgtggcctgcgaaaggcggagagaaaaggaacacccaacgagttttaatataagaaatgtagcaaaataacttagttgttctcaatggagaaggggagaaaatttgtacaaatgctaggaattttgtgcagtaatatttttaggacttctttgatttaaatcatgacaatttaactgaaagcagtaactaaagtcttatttgaaattctgtaaaaagaaatatactgcaatggcttcggatactcgatggcctcatgaagcatggatgccttgtcaatctgcagatcaagaaagcacaacagcagaaacatattttttaagctcatacccagaacgaacacaacccctactaggagtgaaaacaggtggggtaccgaatacggatactgattcaggaccattttacggatacatatatgtatattttttatgcaggacgaatatgaatactacccggataaatacctggtaaatactcagggactggcgggcggatacgggtacctcgctaccgggtatctggtaccttttcaccggcctagtgtttcacggtttcaatatttgacactttgcattgccagtccatatgcggtcatgtgtggcccatggcagaagc

SEQ ID NO: 101801 - DNA, 346 bp, Zea Mays
agttaacgcttttgtggtttctatgacagcgtctagcacgctggccattctccttctcttgggagttgtggcaggagcctttgtcaccttcggcaattctgcctctaccggtgggctcagaatttttggcagcatcactgttttttccaactctggctctttggccacaccatctttggcttcggctgacccgactataggcatctttggcactgcagtcgatccttcggcttcagcctcggcgggagcagcttgtttcgattcgacagtggaggaggtcccttcaccaaattcaggcactacggtcatttcaatatatcgtggccggtgggtcaaaaccttcatt

SEQ ID NO: 101802 - DNA, 576 bp, Zea Mays
gttctctatcgtacgagtgtgagtggtgttaacaattggtatcagaagtaacttttcttggctaggtgaggttgtgtgtcctggattcttcaacccaccacaatcatcttacgtgtttttgtcgtcgccaaatcctcatgaatccggatacgcaagtgatcctggatgagatttcacgacggttctcggagcatgaggctaaatgggatcggcgcatggcggagcaagaatctcgctgggatgtggcgttctctgactttaccaaacgtcaggagcgccgcgttcaggctctagagaagaacgccgacgtggttgaagattagcgtactttcatgaaggagatggtggatgatcttcgattggaagtgggtaagatctccaaacattgggaacatgctgtggtggataattctacttccatggcgggggttcttttccctctctcgttcaattgtaacccctacagcgagcattgatcagcagggtgttgatagtgcaagccgtcaaagactgaatgtagggatgttctgcccgaaccaatataaatcttgcacccaccatgcacaccgtccggag

SEQ ID NO: 101803 - DNA, 495 bp, Zea Mays
gtatttcagcgttgatgaatgagtctattagagcaggtgttggttgcgtagtgtcagtggagacccaaaatataatatgtgaatgaggaagacctcgtttttgaaattcagttgtgtataaaattgtaaaaaaatattggaacatgtgttaggataacttaaaatacatgaatgtgaatgatgtacataaaaagtatgcaatgtgagatagcaatgttagtgtacctgcggtacatggaccaaaaattgatccatttcttatatgatgtaataactcattgagtttcatatggtaaacacgaacaatgatgtcagatctttccgaaggggtttgaccaggctaagatagactttcaagtatctcttgccaatttggattgcatgtgaacgtgaggaaaaaatctggtggtccatgaactcgacaaatagcaatgtcgtcatgataattttggatcatgtagcgtctacctcctgtgtgtgatgctggtaatatta

SEQ ID NO: 101804 - DNA, 307 bp, Zea Mays
aacttcactgtgtgttggcatgtacgtacagtactcagtactggtgctgcgcgattacggaggttcaggacgaatttagttggctgtcaccactcggtttaaagtttggcaacgtacgtacgtatgagatgcaaccgaattaatttgtgcaacgtaagcaagacacaagggtgaatgtgtattactagcgaaaaaatcttaaaagtctaacaacttttactcttaaaaaatatagaaattaatgacttgtagtttataaataaagcaaatactactatggagtatatggatccttgttgctcagtcg

SEQ ID NO: 101805 - DNA, 742 bp, Zea Mays
ggtagctgtaatgcttcgtttgtggggattgtgaggtcatcccctgttggtgtgttgtcactcgacgccgtaattgccatagagggtccgaccacaagggtcgtctgatagctccctgaaaacattcggcaacttcctggaagtcagctcagatggtgataataccctagggtctaggcatcttcagtgtcatgtatggatagtgtgggatgaccatgaatttggccagccccagcctcctgatgatggcattgtatccacagtcgaaccgagctacctcgaagcgtaggaacttggtctgataattgtctggagcgtcgaaggtgactcgcatgaagaggtgtcctaatgggtatgccccttcagtcggtatgatgccgaagaaaggagtgttcgactgaatcaggtcgacaatcggaattcctagggcctagagcattttggggaaggtgacattgatgctgctgccaccatccaccagaacctttttgactcacctctcttgagtcacagggtcgacgagcagagggtacttgttggggtgatcaaagttgagccactagtttgcttggctgaatgtgatggcatgtttgaaccaccgatatggggccaaggcactgttggttgcaaccaagatctgccgattggacactgacctccctatcaatgcgtgagaaggctccaccaccaccccaccctgctgctgcggttgatcttgctcaataggttctcctgggggaag

SEQ ID NO: 101806 - DNA, 313 bp, Zea Mays
gaatgatatgttacataagttcgaggggtcagatggaacgagctagagtcagattatgtcacataacttcttgtcctccggggttctcgttggccgaaagacttcacgaacaacccctccttccttcattaggatggtgtagcgacgccattattgtcgtaaaacctaccattatgctatgtcttgtcttgtggtggtcttctagatgtcctttgatgacttctttgtgatagggtggttgaactggtgtttagcgccacatcctgacatgttacacctacgtcttgacacaccaactcttgtgccatcattt

SEQ ID NO: 101807 - DNA, 518 bp, Zea Mays
ggttccatcagagcatgtatgtcgtctccatcgagccttgtatggtcttaaacaagctcctcgtgcttggtttgagagatttgtttgtcatcaaggcttgtggtttctattctagtgatcatgatcctgcattgttcattcatgtttcttcacgaggacgcacgttgctattactatatgttgatgacatattgattacaggcgatgatccagaccatattgctcatgtgaaggagtatctgagtaaggaatttcaaaatgtctgacttgggggcactcagttatttcttgggcattgaggttttgcagactcaaaatggtatttatctttctcaggccaagtacatacaagaccttcttgatcgttctggtcttagtgatacttgcactgttgccacgcctatggatcttcacttatctcttcgtccgactgatggggcacctttggaggatccatctcgatatagacaccttattggcagcttagtttaccttactatcaccaggccagatattgc

SEQ ID NO: 101808 - DNA, 392 bp, Zea Mays
cttcagaccactgaaacacttgttgtttttgcaacaacctagtaagaggtctagccataataccataatctttcacaaatttcctgtaatagcctgttaaacctaagaatcccctcaactctatcacattcataggttgtttccaggacaacatagcttcagttttactagagtctgtggccaccccatctcttgaaatcacatgccccaaatatttgagttcatgcttcacaaaagtgcatttcttcatcttaaagaaaaactagtgctctctcagcttggccaacaccatcctgatatgctgataatgcacttccaaactagggatgtagatgagaatatcatccaagaaaaccataacaaattttctaagaaaagtctccaacactgag

SEQ ID NO: 101809 - DNA, 477 bp, Zea Mays
gtgcctgggacctctgctctacaattcctggtacgtgatgctcatacgtgttcacctggacccactgtaccatctgcgcgtatcggaacatagtattaggtttcaattcactgaatggctatcaccggtgaggggcgcggccgcaggatgaatcgccgccgggatagattgcggcggaggtaggagacgcgacctggtccgttgatctgggacgaacggataggattagatctaggataacggttcggtttagggttgttgtagccgttcgatctatatcgtgtgggcgagattcggtttggggcttttaaatcaggagcgccagatttagatcgtgcggtggtcgatcggtaccaattcagccggggataagtctaatcctagcggtcgaattctaatcggacgacttgaagtgatccataccccttcggagtgcgcagtttgcagaaaggaccttataattttaacgaatcaacc

SEQ ID NO: 101810 - DNA, 517 bp, Zea Mays
agacaaaatcttattctctctggttaacaaagtcaaagaagatgaagctagcttcaaagcccaggccgaagcccaaaaaactgaaattgaagaccttcggaggcaactggccgaagctaaagaaaaatgcgcactcgtagaggctaaccgagaaatcagcgaatattggaaaaatcatttagagaaaaacgttgaagaacttcgcacatccaaggaaagatgctttgaaaaatccttggactgtgtgaagaaaataaaaactagtttcgccaacgtgttccgaagaaaacttcatacgaggcgaccccgaaggcgttattgaatggataagtggagaggccgaaaccttcaaataaattttaagtgatcgcggggatgtttgcgcgttttccggtgcgtggggaatttcagtcatcttggagaaggcgggatgcgaccatatcaagaccatggcccaggctgaagctgccttctccgtagatgatataaaggatccttcagctgaagcaagcttgat

SEQ ID NO: 101811 - DNA, 377 bp, Zea Mays
gccgcgttggccaggccagggtagaagctctccaggtttatgccccccaggatgtcgaaagcttgggcgatgaggtcccggaatatcctgtcccgcccctccactctgaacgacctccctgccacggcgcggcacaccatgtcgttcgcgaacttgctcaggatctcgctcatgttcactgcctccagtccagctgccgctccatggatcctgtcgatcaccagccctacctgcttcggacgcatacatacatatggatcatccatacaacgcgagaatagcagtgatcaagagcgcgcgatagacgggaataatcgattgacacggtcggcgtcggcggccggatcacctcctcgtggcgggcggcgcggtaggac

SEQ ID NO: 101812 - DNA, 299 bp, Zea Mays
attctcaaatacctgctacaaggagctgctaaacttgatcagtgatgtacttccgaagaatcacaagatgtcaaaggacatgtatcagtccaataagttgctccctggtctgggtatggactacaaaaaaatcgatgtctgtgacaataactgtatgcttttctggaaggagaccgtgagtgagaagaagtgtattgtatgtggtgagcgtagatttgtagaggttgaaaacgacgatggtttgaccgtgacgatgaagattgcacgtaagcagcttcgttacatgcctcttatacctc

SEQ ID NO: 101813 - DNA, 272 bp, Zea Mays
ctcggtagctcagatgagtagaagataccttaaaagttcagctcaggcaacttgcagcacgaccttacttgaacaggatctgttctataggatcgtactgttgcatccttgattaataaggaggcaagtacttaaacctggttgatgagtaaatgacctgtgggccagagcgtgattaacggccaggattcagtctctgtgctttgtctggtgctgtagatgatcgttcctggtcaggagcccctggctaagggtggcccacaggttgtctg

SEQ ID NO: 101814 - DNA, 791 bp, Zea Mays
cctataggcacagtgagagcatagttctcatctactatataacctcgaactcaagagcaattccatcttagcagcacataagacatagggtattacgcatctcagtagcccaaacctgtatatatcattgactcccaacatgctacgcacgaaccatcgagctatcgtcgacttcgtcgaccgcaaaatcattatgtagtatatctcatagtgtgttgctggtgctaaacaccgagaaaagcatttgcttccaaagactctaaactatgaaatatttgaactgttaccggttaggagctcatatggagtcttcttgagaagtcgatgaaggtagagccgatttatggcacgacaagtagtgttgactgcttccaccccaaatcgatctgaagtcttgtacttatcaagtatggccttgccgcaacaattagtgtttgattcttcctttctatcgcaccattttgttgtggtgaatatagagtcggaaatccatgcttgattccttcttcaagatagtccatcacttgtgtattttttaattcatttccattgtcgctccttattttctagattctcaaattgaactaattttaagcccttttcaagaatttcttgagagttcattgggtttcacttttatcctgcaagaaaaatacccaagtgaagcgtgtataatcatatacaataatgagaccatactttttaccattaatgcttaagtaggccaccagaccaaatatccatgtgtaggagctctaatggccttgacgtcgtcatgatgttcttggtgg

SEQ ID NO: 101815 - DNA, 340 bp, Zea Mays
ttatagatttatcttgtactaataagcacacttatcccactctacagaaacaaccatggtctagcctaaaataaatagatctgatctagttatattcaatctaatctagaccctatccaatataacatgatacaatctagtgtgagttacttaatactggtacaaaggataagaccatactctcaattcacttaagactaaattggtgacttaaatcaactcggccatacccagtaacttgacctacaaaagcaggttacataactaatcccatctagcatatagctacctactaaaccctctacccatctgttacctatagatctatcttaacctctta

SEQ ID NO: 101816 - DNA, 357 bp, Zea Mays
cgccaaccgccaacctcatatggtagggacgtcaatcatatacgatgatgaagacctacaagatgacatagacctcgacatcaacactgaggagcagctgctactcataagtctttgcatgcgcaacaacaacctctagaaacagtggacgcccttgcagccaagagacagcgtagcgaaatccaaacaaagattcacaaccttatccaacaagagaaagagcgccttttggcccttgaacaagaaattttagagttacaagcctagtaggcaccacctcacccctcgcacagcagagcaagacatggcaactttggcaaagtcaggcagaccagaaagcacgacaccttccaagcc

SEQ ID NO: 101817 - DNA, 432 bp, Zea Mays
gtcgtcttcggaatatctgaaggtcgaatcttgagctggtgataacctaacctcagatctatctttgagaacacgctggctcctctcaactggtcgaacagatcttctattctgggcaaggggtacttgttcttgatcgtgacctcattcagagctcgataatcgatacacatccttctggtgccatctttcttctccacaaataggacaggggtggcccaaggcgaggtgcttggccggatgtatcctttctctgacagctcaacaatatgcttcttaagttcaaccagctctggtctagatactctataagctcttttaaagatgggggcggttccaggaagaagctctataacaaactcaacttttcgctctggtggcatacctggtaagtcctttgggaacacatctgggaactcggacacaaccttg

SEQ ID NO: 101818 - DNA, 796 bp, Zea Mays
gaaaccgaaagccaccccacaggcccgcccacatctccctccgtcccacttccccggctatagagttcagtttctctccccactttccccatttttaccgcacctctctctttctctctcctccggtcctccctcaaccccagcagcttcgtctcccctcccctctccccagaaatcggaactagatagatagatcagccctatctttgcctcctcccggacgactcggcgcaaggtcgcagcttttctctcgatctttcgcgcttcctctttttgacgcttgctccgcatggggttcctggagatctttggggcggttcgctgctgagatggttcgccgcatcacgcgctgctgtgactctcaacaggtgggcttccgtagactttccactttcttactccgatctactgtacggagcagccggggagtagtattcactaaccttctctgccggctgagagcgtgagctcggtggaggagtcctgatctagccaaagattggatttttgtggggttgattcgaggtgttttttttcttgcgcgatttggtggtgtgggcttccttcctttcattttcgtagcatctatctttatattccttccgatttcgtgtcacttctagtccatatctcgcactagtgatgacttgcttgactagtttcttgactggtttcctctgtttatcatcgtcgcttcagttcttccgatccgacgagccccggtgatggacggcacgccgatctctgcgtcctctacggcaggcgtcgacgttggcgcggtggcgaccggcacgcc

SEQ ID NO: 101819 - DNA, 392 bp, Zea Mays
aaactctaatccttgaaattgaatccggattcttaaactttgtttcaaattctttcacgcttgcgttgcacgtctctctgtggcgcgtggcaggtgctaaccggtgtctagactgcgcacagcctctcgcccacgtgaacgttgcgtgacattgcttccaaaaggatcacaatttcgatgccacatcgatctcgtgtatttatttcgcggaatgtcgagtctggtgtctgtttaaaattttacggattaagagaatatgaattcggaagctcgacccactcttacgatttttatcccgaacaaattaattggaactcgacgatagaagtgatgcaaaattaaatcaggccgagataactataaccgaacagagtattcgtaattaatctgtt

SEQ ID NO: 101820 - DNA, 341 bp, Zea Mays
ctcagagagggagccttggacgaaagcattgttgacatcaagctggtgtatagcccaagtgcccaaccacgtgagagagccaatgagggaactatgcgaactgtagctggtttgacaacgtgactgaaagttttggagaagacaatactagggcgttgggtgaaatcacgaagaacccaccgtgctttgtaaggttcgagagaaccatcagccttgaatttgtgcttgaaaacccatttgtctgtctcaatattggagtgtggtggtcgaggcacaagatcccaggtgttatttgccaagagagctaagaactcttgctgcatggcagcatgccaatttga

SEQ ID NO: 101821 - DNA, 494 bp, Zea Mays
gtccgaaggatgctccgcagggttcccagtcgtgggggaagaatcggaatctcagctggcggttgaagactggatccggaaaacctgatggcaaagatgacatccctgtccccactcccggcgatggcggtcagccaggtatcctcaaaacccccctcctaccattctgaaatctgagaatgaactggtgcgtagggttttttttgccaaaaatgcggtatggatggccatcatgctagggagtgttttaaatctttgtggtgcgacatctgtcgcaaggagacccacaacaccgctcggtgtgttcttcccaaacagaataaacccagtatgcctattgttggtatggcggcagatgggctagggttttactcttctcatttcgccaagccattatccaacaaacctaaacgcagttttattggcttggttaaaatcgttgagggtttgatcacggccgaggatctggagaaggatttcgattttcactttcc

SEQ ID NO: 101822 - DNA, 324 bp, Zea Mays
tgcagatctcctcatgaatatctagccctcttggattcccttgcttctctacatatcccaaactctatttcacctcatatttgtatcagccactattgtttcagttttcctggttgttgcattgtattagaaggggttgttaacaagtggctcctacgcacgatgccctaagactgtcttcaacgcttgcccctagctcctccccttagtgcatgtaggggctacagggtgacgctaaagcgtacatcgcttgcccctaacgcctcccctatctgcgaaaatgctggtgtcgggaatagtacaccgctatatctagaagtagca

SEQ ID NO: 101823 - DNA, 318 bp, Zea Mays
ggcgggaaacgattaaagtattttgatcgtcggtcggtccaccgttcagtcagtgtaagcggtatggcggttcgccttctccccctgcagcactatataaacagatgggttagtgagaagttaccacagagcattcattgctaccgcgccgttgtgctgttaaattttttaaccatagccgaagctttctgcactgcatttccaagcaagcgcttcgtcacctgagatcagcttcggctcaaagaacttgaaaacacaaatggccagggtgagatccactgctagggtatctcttgaaggagaggagaccgaaaccgg

SEQ ID NO: 101824 - DNA, 452 bp, Zea Mays
acaagcttgatctgaaaaaatgttgcattgggtttccttctctcagctgctaaggtggtgtcctctgcaggcatgaacatctctgaagcggccagcgctggtgtcatcaagtctatcctctgcacggtaatcactaaccaatttatttgaattgcctgctcccgattgccggttagcatggttgattatctataatgtgtcttgttgttgactgctgactgtgactctgggttgcgagatccccaggctgcacgccccgtgccccgtgctcgattatttgcctgacgacagaaaatgaaagctagggggttaccatgatggcatttgtttttctcccttttttggtgaatactaggtagtttttccttcatataattgtgccactagcattgatctgtcatataagtactcagtcaaatactattggatctcggagtgctcgacaactaggg

SEQ ID NO: 101825 - DNA, 1361 bp, Zea Mays
gatctttgtttctgaataaatgtttcaagcgtggtattataggagcataccacatcaccttggcagggattctctttgtgggaagttgtccgtcgccctcaacatcaccagggtcatttcgcctaatcttataccgtgatggatggcataccggacattcatccaaattctcatactccttgccgcagtagaggatgcagtcattatgacacgcatgtatcttctggatttctaattccagagggcaaaggacctattttgcttcgtatgtagtggcaggcaattcgttatccttcggaagcatcctcttctggatagatagtaactccccaaatcccttgtctgataaaccattctttgccttccattgcaacaattccagtacggtacccaactttttctgcccctcacaagtcagataaagcaacttcttgtgatcctctattatgcgctcaaagttgatcttctccctttcactatcgcatcctctctttccatcaaggatggcctgaccaagctcatcatcatcaggctcatcttctgcctgtacctcttcttcagcttctcccattgcagtatcaccaaaggcatcataacaccgcgttctccatgcttagtccaacaaatatagtttggcatgaaacccgaccgaaataggtgtttgtgaagcacctttgagcaagaataatccttctcattcttccataggacacatgggcagcaaatgaaaccattctgcatgtttgccttggccatatttatgaaatcatgcacacccataatgaactctagtgagcagcggttagcgttgtacatccattgcctgttcatctgcactccatgacatacaccacatcaaaaaagatccaagatatacatcaatcaacatgattatactctaaaacatgaatttagtgaagcctacatacaataatgtacacaatcccaagtagcactagacaaactaaacctacaattcacttcagcaaaaaaggatttcacgaccaattccaactaaatagatagatcatcgatcggcttcttctactggctcactacctcatcatccatactttcactgtcaacagcctccttaacaacccgcttgttctccaggcacactgcctcatcatcttccacacctacactctcatcggccgccttagccgcctgcttagcaagatactctttgacatgggattcatagttttcctcctaataccaaccactacatgaactagtgccatcccactgaaattacaacaacaaatgagaaggaagttaatcaaaatcatcacaaaaattggctacaaaccataaacaagcacaacccagaaaaacaactcacattgcgaaccgaa

SEQ ID NO: 101826 - DNA, 930 bp, Zea Mays
tgattctattggtggtaggatcaagacatcggtatcccttgtggtgagcagaataaccaaggaagatgcagagggcagagcgcggggcaagtttgtggggagcagtggccgacaaattggggtaacacttacagccaaaaacacgcagatgatcgtacgacggggcactgccaaagagagcaaagtgcggagtggaaaactgcagtgtcttggttggcaagatgtttaggaggagagttgcagtgtgcaacgcttcagcccaatatgaaggaggcatgcttgcctgaaatagaagagagcgaataatatcgttagtggtacgaataatccgctcggcgcgaccgttctgcgaggacgtgtagggacatgacatgcgaaagtgaatgccatgtgtgaggaagaaggtgcgcatgctggagttgtcgaactcccggccgttatcactctggatggccttgatgcgtgcgctgaactgggtggacacataggcgaaaaagttagacagggtggaaaacgtgtcagatttaagccttaaaggaaacgtccagaggtgatgagagcagtcatcaagaacaactaagtaatatttgtaaccagagacactaacaataggagaggtccataagtcacaatgaataagatcaaagttgttggacgctcgagacattgaagaattaaaaggaagacgaacatgtcgtcctagctgacatgcatggcacaaagactccaagcttttattacaaccagggatagccgaagtgagtttggagagtgcctcgcgaccagggtggccgaggcgacgatgccacagagaggtagatgtggagctggcaacaagggagtgagccacgggcagcttcagtgggtaaagcggcccggagctattgcacctgatgatcacgttccgcgagagaagatccttcacagaac

SEQ ID NO: 101827 - DNA, 598 bp, Zea Mays
cggatgtgtcggccatctgctgtgcacgccattcctctgtagccaatcggttccagcgattttgttatcctaaatcacagaatcgcaatagtgctccaggggaaaaaaacaaacgagagagagaatccgatagcgttatcttcccagcgacaggtccatgtggatgtggcctggcctcccatacgtctccaactgtgtccgtgcggctccacgctccagcgaccgaatacgtacagctatctaccatcctggtcaagctacagctgcgtacttgacgtgcgtgctactacagtctaccggactgtctgtgtttggcttcgttagctattcggactgcaagatgtagacgccacgccttgtgacttccgtaggcttgaccggtgacggtgacggactgcttggctacgctagctacttttacagctgcaatatataagagtatataataattacgagctttagaacggtttttcaaatataaaagattgttaagatcccgagtctatatatataataaatacagtcaagacataatatatgtagagagtcgtgtaaagatgatctttccgtgaagagatggtctcttaatttttttcgg

SEQ ID NO: 101828 - DNA, 286 bp, Zea Mays
attttttgaatggacaggtcctgcatcctactagcgtactctgaagaagatgtatcacctgacaccgatttagatttcttgttcgctgctttagctctgtccctaccaaccggcctttttccagctgacttgtctgcatcaccgtgcaccctgttggagtcctcttccaagccgtcgccttctagatgagcttcagtcccaagttgtgttgggttaccccatttgggctcgtccttcatacggccccaacagtgcatgaatccaaacgcatgcccttcaacctccg

SEQ ID NO: 101829 - DNA, 359 bp, Zea Mays
ccagaatggagtcagaaatctgctgtaaaaatttgagctcaaacggagcaccgagcgaaaagttatgcccgttttatgaaaggtatctcaagttatggttttccagggcacaaattggtaggaaccgtagcggcggctatagagcacaggggcacaaacctccctggtataagcaataggtaagcgccagatgatgaaacaaagaggggctgcaatgcaatgcggcttgcaacctaatctagggctagcgtggtgagaattcacacaaggcggctagcgagggcaaatcgagtaatgtggtgtatcgacttgtaatctgggtaaggtggatgggatagcggcagaaacaaataacagcg

SEQ ID NO: 101830 - DNA, 871 bp, Zea Mays
caaacacctccctggtcacggcacgctcgccgttcatcccggacgaggtctgtaccggctatggccggcgataactgcccggactaaccatcggggaggcttcactgacctaagatggccccggaacacacattaatttgacccgaacgcactgagaatggcatgtccacatgcacggcggacaccgagcttgggagcacatgttcccgccaaaccatggtcgattagagcgaacggacgccaccatgagctttgcaagcacgcagaggcatggaaacaacactttaattggataggaactcactagagtggcccagccacgggcgggctgttctttgcgatgcggtggaccaatttggggggaaacggcgtcgcggtggctctggttgaaattggggttggggattgaggctactcggccgtaagaagctgtgctttcaccgtgcgcaaatgatttgggagaaggtggagggggcggtgcgaatttgacttcgatctagtcactgtgtttgcgatgatcatccttcgccgtgaacccaatggctatttatagccgtggcggtccggcgatcacctcgcggctgaggatagtatcgcaatcgcatgtcgaccacgtcggtagaaggtacagtgagggagaactatggcatgagcgccaccgcggtggaattcactgagtcacggcggccgccgatgagtaactccggctgggccagggagatggcgccacgtacgggttatccctccccaacgttatccacaccataccgcccacgaatcaggacggcggtggaactaattttggcgcagagaggtcaccggcggtgagcaagccgcgctggcaacctgatccacattggctactgtacca

SEQ ID NO: 101831 - DNA, 680 bp, Zea Mays
cttgggggtttctcaaagttggtcaagagggtagatttttatgcttgagttgaatttgcccaaaccatttatgtgttgtttggttcacgaatggtaatgtaatctcaaggtacatgatggtatttagatttttatgcaagaggcaccaaagtagtgatatcaaggttctgatgatgaggaatcattttcgaggcttagcttctgagcggtgtgacatgatggcatttgcttcttggccatagacatggcctcaacgcggttagaggcgacaaagatgatgcctttgagctctagcatcttgaggatcaggtacccatagtggctagtcaccataaactgaataagcatatggcatccaagaatggagttgtagggaaggtggagctcaaaacggtgaaatccacatacttagtgttgaggttctccttagtgccaaaggtgactaccaacttaatagagtcgacaaggaacatcatccttagggagacctctatgaatgggcatgtggacatgagcttggtgcatgagatttagatctcataagaggtgtacatcaacaagacattaatgttggccccactatcaacaagaacatgtctgagcttggcgttgttgatggtgggggagactataagaagaatgatcttagagactgccatgttgtgaggcgagttggagga

SEQ ID NO: 101832 - DNA, 779 bp, Zea Mays
attatggctcggtaatcggggtacacgataagtccatgcaacgtgcgcaactggcgcaattgtggctcgatgatcacgacagacggacagtgcctacagggcatgcgaaaaatacgtgactcggtgatggcggttcgactcaaccggagcggtccgacaaaacgagagtgcgacatagtaatcacatgacgcagccaagttcgtacgacacaaatactgcatcatgttgccagggctcagccaatgccataactcaaccgattaataacgtagcctgatcggcatgtctgagtacccactatacaatttaatcgctcgacgtgagtccaaaagctcaacacatcataaatatttagagcgatttaaaaatacccaacatagccttcacatgcaatttaattattttctgttaattatttgctgccagaaataattattaatacagaaaaaataaataccaaaattaatgcatgagcatcaccacggaaggtgcaaaaggcattttcctattattaaacgtgcattttgtactaattatttactggcagaaataattaattacgctagaaactgcaacatgtttagtctttttgttatttgcaactggaaatatagaacaaataatatggagcatgtatataaattcaacaggaacttatgtatataaatagtacccgtgctttatatggtaagttaactttgaaagccttgacaagaaatttacgtcaacttagcaataaggcgcgacagagagcgcatgcggtataggtccagtgaat

SEQ ID NO: 101833 - DNA, 329 bp, Zea Mays
cttttgaatatgtcttgagtaagaacctctcccaatacttcggttggagaagtagtggtcaaatatgtcttttgaatatgtcttgagtaagatatctgagaaacttgtgagtgaaattcatatccggtacattaaaaccaagtcccttgagctcatttactatctcatttaaccagttaaacatgtcgaacacactttcatcttccttcacgagaaattactcaaattttcccttgcatacatacaactttgcactcttcacaattgtagttccttcatggatttccattagcttggtccaaatctcatgagcggttgtgagatttttt

SEQ ID NO: 101834 - DNA, 575 bp, Zea Mays
tgagagcttgtgctcttaagcatggtggcagttgggacaggagtttaccctacgcggagttctcctataataacaattatcagaccagtttgaagatgtccctatttgaggcattatatggaaggaagtatagaaccccgccgtattggaatcagactggtgaaagacagttctttgggccgaagattataaaagaagcagaggaacaagttcgaataattcgggagaacctgagaactgtacagtcaaggcagaagagttatgcaaatacccaagaagacaactagagttgaggaaggtgatcatgtgtacctcaaggtgtcaccaattcagggtaagagaaggtttaaagttaaagggaagttgtcaccttgctttattggacccttcaaaatcctaatgcgagttgggaaagtggcttatcaactagagttacccagccatctaacagatgtacatgatgtatttcatgtgtcccagttgaagaagtgcctcagagtgccagaagagcaactaccgatggaggaactcagtgtgcagggcgatctgacctacatgtaataccccaccaagat

SEQ ID NO: 101835 - DNA, 324 bp, Zea Mays
ttggagcagccgaagcagcgacgtttccagaagttgtattctttctcttctgcccccgtggcgggtagcggtagtcagggtacataaatccaatagcatcaaaaactctatttagcctcttctttttttgactcctgaaggccgcagatagtgcgttatcttcagacttggagtatgctccaagtagttcatcactagtattttcaacacatttcagccagtcatcgtctggttcgataaattggtctccaaacctgaaagtatatttcaatcgaaccataccaccttcgctagggttagtaatggtttcctctgacatttccc

SEQ ID NO: 101836 - DNA, 306 bp, Zea Mays
caaaatttctactcctacgtccagactcaatttcacattcagatacaatccttgcaatgcgataacggtactgaatttaacaacaatgcactgcgctccttcctcacgtcatggcaccacctatcgtctctcatgtccatacaaatctcctcaaaacggcaaagctgaacgatccattcgttccatcaatgatgtccttcgtacccttctttttcaagccgagcttcctcctaccttttgggtagaagctctcaacaccgccacatacctcataaaacgtagaccatccacccctctccagtttgc

SEQ ID NO: 101837 - DNA, 509 bp, Zea Mays
tgctgctgcgttgcgatctctttccacgtgatggaactccagcccttcaaatttgtcttctaattttcggacagctgtgtagtacttgcccatagaatcagtcgagcaatcccaatctttatttatctgacttatgaccaccagtgaatctccgtataccatcaacctcttaatgcccagtgatatggcaatgttcaaccaatggatcagagcctcatattccgctgcattatttgatgctgggaatgataactgaagagcatccttgagttgttcacctctaggggcaatgaagaggattcctgcgcctgctccctgcagtttcagcgagccatcaaaatacattcgtcatacttctgtagcctccgggttgtcaggtacttgttgctcggtccattctgatacatagtcgaccagtgcttgagtctttattgctgtgcgaggccgaaactcgatgtcgtgagctcctagctcgcaggcccacttggctattcttccgatggcttctt

SEQ ID NO: 101838 - DNA, 551 bp, Zea Mays
atggcttgtataatgaggttgtgtgccttcgcacattcggctatgctcgcgaaggcgttacgtacttggtctggtgtatttgttatgttggtctggtgcgtatgtagtcggtctttgcgcggacagtttggtgtagtcgttttcgcacttgttaagcttcgtccggctgcacccttaggcaactgttgcacggatagtcttcgcggaagactacgatttttcgcacttgttgtgctagtccggttgcacccttaggcaacttctgcacggatagtcttcgtggaagacttcgatttttcgcacttgttgtgctagcccggctgcacccttaggcaacttctgcacggatagtcttcgtggaagaccacgatttttcgcacttgttgtgctagcccggctgcaccctgaggcgacttctgcatggatagtcttcgcggaagactacgatttttcgcacttgttgtgctagtccggctgcacccttaggcgacttctgcacggatagtcttcgtggaagacttcgatttttcgcacttgttgtgctagcccgg

SEQ ID NO: 101839 - DNA, 376 bp, Zea Mays
caaggacgagttgtgatgctcatgtttagtttattgtcaatggagaggagatatggagagtgttgaaagtatctaggccccaagttgagttttagtaattaatgaaaacacaagattattgtgattaactggtgttttacataaacaagctggcaagttagatcataatgaaagatggttcgcttatgtcgtattcatacatttattgatggaaatcatttgtcaatttttaaaggaagagcaagaaagttaagaataagctagttttaagtgtatatggagttgttgtacaattagagtagtgataggaccttatttttttctttagtaatactataaaggaggcatcaaacaaacaacttgacctaggcaagta

SEQ ID NO: 101840 - DNA, 640 bp, Zea Mays
tagaatttggatacaaatttggagtctcgatcagaaacaatggacttaggcaccccgtgaagcctgattacttccttcatatacaaggggaccaattctgaagctgaattggtggtcttcatgggaataaagtgcgcagacttagtcaagcgatccactaccacccaaatagcatccctgccccgaggaaaacgaggtaagcccaccacaaaatccatggtgatatgctcccacttccactccgaaatttccaatggcttcagcatacctgcaggcctcttatgctcggccttcacgcgctgacatacttcacaggcgaccacgtacttagaaacgtcaacattcatccgcttccaccagaagttttgcttcagatctcggtacattttggtttcaccagggtgaacggtgtaaggcgttttatgagcttctctcaagatatccatcttcacctctgatttctgaggcacataaaggcgacccctgaaacgaaccaaatcattctcatcaatggagaactcccggggtttaccatcgccaaccctctttcgagcttcctgcaataaacgatcctgctgctgagccgcacacactctctccatgagggaagattgaataagcatacgagtctcctcactag

SEQ ID NO: 101841 - DNA, 678 bp, Zea Mays
aaatttggtgtctctttctcaaactaaaacacatgagataataggtcacaggtgtatgtgttgagcaaagaccctgagtaacacctgaggtgttacacttttatattaaaaattaacgtctaggggtgtatctgtaaggtcacagggacttcgatgtaagaatacccaaccatcgagggatggtgagtttattataataaaaccgaggggctcatatgcaaacatttaggccgaagaggtatggatgaacgagagccgttggatttaaaggctacggcctagattagatctagcacaagcccgaatttgtaggagatgatgagcacacgatcaaggatcttcagttccaatttcattagcacaagattgcattgggtccatccacccgaggatccatggtcataatccatcagggtgaagcggtatccagccttcaatcctaccccttcgatcgagaatctatggctatttcttggttcggccgaaacactacgaccactcgttcaccaacgttgatccacgaacacacgaccacaacacatctcccccaaccctggtggtccagaacgacagcacacgcatgcccggcgacgccatcgctgggaaactcgaattgatgcatgggcacaatacttccctaacccaagctagctacacgacgctacgaactccacgaat

SEQ ID NO: 101842 - DNA, 1365 bp, Zea Mays
ccgaggtcttagtgacctgttcagaaaccttgaagcatctgtaagaatagcaaagtgggcagccgagctctccggctataacatcacctttgaacctagaactgcaatcaaatcacaagtcctcgctgacttcatcatcgactgaacagggtctttaatgtccaaccaccaaagcatagagatagtttggacaatccactgtgatggcgcatggtgccatgcgtgggcaggcgctatagcagtcatcacgtcaccttcaggcaccaaatatagatacgccgcatgccttagcttcacactcgagttagataaatgcacaaacaaaataacataatatgaggctgccattttgggacttcgaaagctcagagccctaggggtaacaacctgcacagtcaaaaccaattccaagattgttgccggacagattgagaaagattgcttagcccaagagctagtccttatgcaatacttatcagccgtgcgaagcctggagaagcagttcaaagggttcaaacaacaacatataggacggagcaagaatgaagaggccaacatgctagcaaaagcagtagcaaaaggcgaccccataccctcagatgtattcttccaacgattggcacaccagctgtgagaattcccgaaggtctacaaatcacagatgatcccgaaggccaaagaattgtaaacctaataatgacagaagactggagagcactcgtaaccctctaccttcatggatactattaccccaccgactaggccgaggccaagaggttgaagcaccgaagccgtgatttcacagtaatagaaggccatctttataaaaaaaggaataagtcaacctttgctcaagtgcatcacagtggtcgaaggcatcaaactcctccgagaagtccacaagggcatatgcggttcacactcaggacctagagccctcgccgccaaggtcatgcgccagggattctactagccaaccatcatgtgcgcaacaaaccatgtagttcgctcgtgcaaagcttgccagaagttctcacctcgagcgggggcaccttcacagttcacaaagctgatcaccacacctggccgctacaacgatggggcctcgacatagtcggaccactacccataacgcaaggcaacctcaagttcgccttcgttgcagtggagtacttgaccaagtggattgaagcaagggttgtatcaatgatcacggtgaagacaacacaaaagttcttctggaaaacattgtctgttgcttcggagtcccctccaagttgagagtggacaacagagaacaatttgacaaccatgacttccaggaattatgcgcttctattggcacgcgtgcagtcttcacatcag

SEQ ID NO: 101843 - DNA, 564 bp, Zea Mays
tgggagtcgggcaatcctgaccaacctcttgacaccgaagactgccttccaaagtcgacgatgcacgagataccgcccgggatacctctaaatccacgtctggagcgtcagagcaaacattcatcatatcatcaacagtcggttccaacagcatatctttaggaatgacatcctcaagggcccgatcaaaatctgttatagataaatcctgaaggctaacaagagcagacagagctggagaaggaatatcactatcccctctactacctctgtaacaccggctattcttgcgaattagcggaacttcttcttcctcttcttcgtcctcatcaaaaatgcggacaaaagatggtgcaggatcacacccattggggttagcttcaataggatcacacccattgggttcagattcaacaggatcacacccattgggtttagcttcaacaggatcacacccattggggtcagctggtgcacggatacattcgttggggtcagctggtgaacggtcacacccattggggtcaacttcagcaagtacaccaccagtggggtcaacttcag

SEQ ID NO: 101844 - DNA, 479 bp, Zea Mays
tgcttctccaggaatttctagatctattttccaattagatttcctgcttctaagttcatttgtgtgttgatctttcagatttaccagcaatgtctttttgatgcagctgagcagctggaattacaaatacagtgtctgtgctgcgctccgggatcaaaacaatgagcaagagctatagcttctgcactaatcatcgaaatatgtcgtctaagtctttgttccaagctctcacaaatttgtattttgtaagctgtgcaactttagatgtctaagatctgttgtctggagctcaactttgtaagcccagctggaaacctaatgaatgcatgaagtgagaatgctcaggaatttaagtattaccatcgtgttacactaacctgactcaacaagccacatgctatcaagacaattgcaccacaaatcaccaataatcattgcatgagcaaatgccaccttctatacaatgaaatcgaacagca

SEQ ID NO: 101845 - DNA, 1040 bp, Zea Mays
gggttatactggttcaggctcatgccctagtttagtgtagtgttgatcattatattgctggaaaactgtgttatacagtgaggatttgtattctactgatgagtgtggcctgttgcccttgagtggcatagtccttataacgtctctagtagggtcgtgcacagtcatactcccggtatggtgtactgcatcatccgtctggtatacgggtccctgtagcgagtccaaaactgacgtagtggcacttggcaggtcccacaaggtagacttacggtgtgcctcggggtcatgcgtggagtagcttcatcttctgtcatgagccttttgttatcttttgagaattttacatttctaggtgcgtgcaagtgcatctgctagatgtagcctcgagcctccaagtaatttatgtagattgtttgggggtttatgcgcttcgtgtgcagtttaggtacagacctttcccacgatggtcatcacctgctgagcgtgtgtccatggttactgtctcttgttcaagatcaaattcctgggtgcgcgcaagcctatctgctagatgtagcccccgagtaatccatatggattgcttaggggtttattcaatttgtgtgtgcagtttagggacagatccttcctgcgatgattgtcatgcactgggcatgagcccatttagtgccagaactggacgtagttttcaaggatgatcctttgagttggttgtcttccaagtgtttgatccttaacattcttgcatcccccctcagaaggccttttgaggtccttttgaggggagggccaccctcctctgacctaatcgacacggggaaggaggtcatcgaggtacgaacaagttatccaagtgagatctgaccaccctcaggtaggagtctcggcgagtggtcccactaggggggctcgaccggctaggggcatctcattgagtccttccttattcgaccatgtatcttccctttggtcattctttctgaccaaagagtggccctatggccacctcgtcagccaggttaccacagaggaatgtg

SEQ ID NO: 101846 - DNA, 316 bp, Zea Mays
gttaagaaaggtatccttcactttcattaactccgaccaaaaatgtgaatcaccaggcctatgtttcactttcgacaaaggatatctctctggatatttattacgcaacaattgttgccacataccgtcctcattaataagcttaaaaagccatttgcttagcaagcatttattctgaacatctatgttctcaattcctaaccctccttgatccttaggttggcataggatatcccatctggcaagtctgtatttcttcttatgattcccaccttgccaaaagaacctagaacgaaagaagtctattctctcgaga

SEQ ID NO: 101847 - DNA, 499 bp, Zea Mays
aggggcctcgggacaagaaacctgagacacagtcaatagttacaatgaaccgcgggttgttttcctaagatttcagggtttctttagtaatatgccgaggcgaagaggtatggtttgatctcgggcgttggatcagacttggacgcgccagattagaacgatgtatacgcgaaccggtaaggaatcgcgtccgttggatccgccagatgcggcctggatttaattacccacgattccatcctatccactggtgactagatctacggtcaggatttctcgttcgaaggggtaagctatgccctaatccgaacaacagatcgcacgatcgacggcacacgctgcctcttccttcccttgccgcgcagctgcggtggagactaatccctacccgacggcgtacgaacaccagtggcagcgccatggccggcgactacaatcgctccctctaacgccctatactctaatcaactggttgcatcgagtagcgctaagaaaaacg

SEQ ID NO: 101848 - DNA, 439 bp, Zea Mays
gcttggtgcgccatctagaagatgatctccggggtgtagaggccttctcagagcactattctattattgagagggatactgccgaggcagccatgcaagatacagcatgacgggcactttcgtagtattgctcgttgttcagcggggtagctgatggcctcgacctaaagtaccaccctcgtcgtttgaccgacagtgctggagatgtgattgccttgccagttagtgagggcaatcctaggctgaacagcatggtcaatctggctgccgtgctcaacacagagttggaccacacccttgacgagttgggcaaggttcgggcggaggttgcggaattgcgtgctgagtgtgcagcacgccactatctggatggtggttctcccgcccccgtcgggattcagcacccttaccgttcaccgcctcgtggtcgcttcgacta

SEQ ID NO: 101849 - DNA, 1448 bp, Zea Mays
ttcggacccatagttattggaagacatggataaattcataccaagctgaacttttccgacacaatcttgatcatcaagatatagaggccaccacctgatgatttcatcctgctgcttttcaaatttgtccaaatacaaactccttcagtgactacagaattatcatgaaacatttgcactaaactcatgaatttgtttagacatacttgagtatcagtcaatgatgaaacttgaatttttgcacggcctatgacaaccctattgttgtcttgtacttcaacaagaataacatccccctggctctctagataactaaaacataagtgataacagacggttcaagaatactatctgtttcatagttccaatgaaagaatgaatatgcaagtacatcacagaacaacgactaaggatgtaacttacaagagttgagattcaccagtccctggcttcaaatattgtggagaaattgaatctctcttatgacctttgcaagaactttgcagttctagagtgcatgtgaacatttctgaaagcatagagccatagacactgtgttactgtcgatgtaaatattactgtgactggggtttgctataggaaaacaaaaactttcatattaaccttccggcaaagatgtagatgatgtggatgtcaacatcgtaacctggctcttcagaatcttagaaatctgtctgacatactcactgccagcttgcatgtagagatttctaaaggatgatgttgctcgaagctttggtctttgaggtacaacccgtatcttttttactgttaataaaaatatgttagtgtaagcttgctttgtttttcaaacattgctacaagtttacagttcggacattccttattgtaatatgctagccttttcctgaagaattttccgatgtaatgtttcaaggcgagtaatgttgatgactgaaatgattgcttatacataccttcaatctcaatctgtttaacaagtttccttccctttatagtacaatttccatccttatcatacatttgtttaccatcaacttgactattgtgttttggatgaagcaagaagttctgtattctgttcataaaaagaagcacataagttgtgtgctaaaaggcaaaaatagtgaagtaatactagattactcagaacatgtactcatgcataagctgttgcatacccaaaggcacttcgcagtaccatgcactcatcccgaaggaagtctggagcttccatgcagtttcttgcccatgcattcagacataacctgaagcatgcatcatatgcaacaaaggattgccatgcattttggacactgacgagagcaagcaagcaataagaacaggaggcagacaacaacatcttcaaatgaataaggttaaagataaatcaaaactcacttaatagtgaagctcggtatctgagctaataagttattctcaac

SEQ ID NO: 101850 - DNA, 433 bp, Zea Mays
ctcgtggccgcgttcgtgcacctgtccacacgcaagtaacttgcccggccccggcgtcgactcaccactgctactgctgcggaaggttttcatgtcagagacccgtaataatgcagacaacagcatgttccgcctaagatttgtacacaactctctgcttccactgcttgtatagaattcttgctcaagattacaagtcgaggccagtggtcggcgatagaaacagcgagtattattttatcctactcccaccagttcctgagcgtcgattctgggccgcgtctgaggctgtgagccaaggataaccaaatcgtctggagtaaaaaaaaaatccgtacccacccgtaaaaccgatcgatttgcttaaatcaaaactggacaaattgaaaccgattttccgctaaaaaactaacagtaaacagtcaaaacccgc

SEQ ID NO: 101851 - DNA, 405 bp, Zea Mays
agagaggctcccaaaggggaggccacccgaggggacagtgcgatcatcccacctttctttatgtgttccctttcatccatctgctgattaatccttagcttattctctagggtgctggccgcctctcttgaggtgcaaaggcaccatggcttggtgcctcgagtagctaccttgctgacccctggagtggaccaaggatgctctttttgagggatttaattgtggctcattcggccttagaggtggctaacgtggatgtgcggtgtccacaatcatgactagcgactcttaacgacccggggcaggtaatctatcatagtctggcctttaggctctcgattctttctagattcctgactacctgttagcttgtcgcagttcctaggcccgaagcgtggggctttt

SEQ ID NO: 101852 - DNA, 288 bp, Zea Mays
agatcatggaatctatttttataataaacttatttgaagatacaaatgttgttaatattttctacaaatctagtcaaacctgagaaagtttgaccggcatgaataccatagtgacacttgctttgaaaacggagtatggggtttctgagaaattcaaatgaggtgacatcatgtagtatgtcaagctcaacttatcactgggtctaaacgccagtgcatttaggatccaaattggggctgtttgggaaggggagattcattgcaactaaatcgctaggaggatccctg

SEQ ID NO: 101853 - DNA, 385 bp, Zea Mays
gttagacaccacaactaaagctccctaagcatgctctcatacttgaatttaaaatatgtcctctcatgagatgcaagcctaagcaacttatcctggttcgtcaaagcagtgttaaactcttctgtcacagcggcaagatcattagcggaatgtgataccttagaggaaaagacattgttgatgtcctggctatcgtcgcccatcgcatcatcaccaagggccatggtacaaaggtcgcctctagtgtcagcgaggaaacagagtacattcagcatgtcctcaacccgcctgttagtcccctcatcactcgaggaagacattgcatcgttggattcgtggtcgaggtcactgagggaggcgaagaaggcacattccttgatattcg

SEQ ID NO: 101854 - DNA, 492 bp, Zea Mays
cgtgagaatgcgatcatgtgatcggatgtcggcgattttttattattcctacactctgaatttgttatgttttctcggatggcacttcaaaaattatggcgaccaagtggcattagtgattagtctgagttgcctttggttgaccgttgctcatcctctcttttatatttgtccacatgatttgttgatatgccaattcaatgtctcttttgtatgaactctttaattaacagttccttcacatcttattatctctacttaaggtgtttttttcctcctacctcaagatgctattctagtgcttgccacctgtcaggtgtttgacatatgctcaacattttagttgccttgtttgttcgatgataacttctggtataattcttgatgttaccatttctgtagcttcattatgatatgttccatgaagtgtcaacaaggcttactcattgacttttatctcaactgcaatcaccttccccatctatagttaac

SEQ ID NO: 101855 - DNA, 413 bp, Zea Mays
agcgggcgtcctgcgagcaacgaaactcacgacaacggaaccgttgtctcacccaagatcacgagctggaactgacagaacacaatgccaggaaccggtgcgaccacctgcctctttcgcaaaacctactacccgactttgctcaagccatgcaaacctgtcgggtttttggcctagatttccaacggccttcctcgcacacccaacaaagaaggttattggcagatcctcacacaagtagccaatcacctactcccgcctgctcacccaggagatgacatgcgctatgtcatcaacagtcgacgggatgcatggaggaacatcaatgcttcacatgatcatcgtcaagagagcaagctaaggcggcaggaggagtacaatcagaaccatagtgcaccatcgcaagagcggac

SEQ ID NO: 101856 - DNA, 342 bp, Zea Mays
aaaggatggaaaaaaatcaatacaaaaaactcgtccgaatggggaaatctgacaaacaagatctcccttaccatccaaaacaagatctcccttaccatccattcttaaagcgcacttcaaaattgtcctcaaggaattgcaaaactaagagcaaattaaaatgcaaattggaaagcaacacaacatccttaagaacaaagttctcgttcgccaaaatggtgccacatgatacaaccttacctcttgaattatcctcaaaagtaatgtactccttatcgatcatagggtcgacgttggagaacaatctagtgttttcagtcatgtggcgcaaacaaccggaat

SEQ ID NO: 101857 - DNA, 576 bp, Zea Mays
gctcgagacgctgctcgggataactctaaccccacatccggaatgtcagtgcaaatgtccatcataccaccatctgttggctcggacagcagatcttcatgaaccatatcctcgagagcctgatcaaaatttgttatggacaactcttgcagaccaacgagtgcagacaaggctggagaaggaatatcactactccccccactgactaggtagcgccgactatttttccgaattaaggggatttcctcctcttcttcctcatccatgtcaacaatacgaacaacacacccattggggtcagctctggccggattacacccattgggatcagcatcatcaaggtcacacccattggggtcagcgtcaacagggccacacccattgggttcagctccaataaaaagttccactggcacatcctcagcagtaggaccagaagggccggcatcctgattcaaacatgacactcgctgaagcctcctctttttcttcttcttcccctcggcaggagcagttggatgactggccgggcgaaggcgctttgggcgagcaccatcagatttttgagcagtcaag

SEQ ID NO: 101858 - DNA, 778 bp, Zea Mays
gaggtttggggttgggtactatgggtgcctgtggcgcgttcgtgctaggatttcgcctaggatgcacacgatttcttgccggtgtggcatggcacggccaggtccacctttgccgtcgccgggttgccccggaaatttaatctctggtaagatctcatcccacgcatttgacatgttctctagatcatgtagccgccttcagattagggatagtgtcttgcaccatcgaacgacgtggctccggctatccctccgtcgtggaggtcggcggcgccaccgttgtcggctgtcgggagcggagatgcgtcgggccatcgattacctggtgggcggtcgagattagatttggttgtaccggttcgttgagttacttgttggcctttggatccgtgggtaacaggtgggattagaaacgttataccctttcgtccaaatcgtctgcgggctgttgatcttggatcggtcgatcgggaggcagtcgcagtcatctgatgtctccgccattgatctcggatcgggcggaaaccagtgcgtactggttcgatgagagttgatctaatctgggtagtccgactttgatcggacgattggaatccctacgtggcccttcgtcgttgtaatttatctaaagagcccctgggtttaatgggaatcaacccgccatcctcagcctgtgtaaagtaattacaaccgagcctagaactttgcaccctagcccctgtaatgtctagtatttgtgtccagagtccagagtctttagagaagttcagaattaaaa

SEQ ID NO: 101859 - DNA, 899 bp, Zea Mays
ttgaagtgatacctcagtgcagaaagccactccggcaagacctcgtgcacccgcctgagcacatgccagccacttgtcacaatcacaacaaaatgaatgtcccaccatgagccaagttaccctaccaacctcaggatgttgcgactacactgtgacgacgttgccactcacaatacgccgatcaagactccctccattataaactgtcgttcctccgcctataaatactgatgcccttaccagggaacctcacagtccagccaccatctcattgtcgcctccacatccgaacaacgcgtgccttactcttcaaaccagagaacaagccatcactgtcaatttgagacgtaggtgagcatgccatgatcttcgaccccttcctccctcgaagtcattcttaaactatagaagttatgaccttagcatcgattaagatagctttccccatggccatcacttgcctattgaaaatatgcaaggaaaacctcgcttaaacaattgtcatataataagcataaccaagtttctagaagcttctacaatattcatgataaaccttgatcataagcaagacaactttctaggaacaactatgaaaaatcatgatgtacatagccttctagaactccctacactaatcatgataagtcatgaagcatagatatttttagacctccctagaactatggtgatgtgtcatggtgaggtgtccccccatgtaaggtggaggtgacacatgcatgttgaggtgtccccccatgtaaggtggaggtgacacatgcatgatgaggtgtcactcatccatggctcctaggtgcctatataaggatgtgcctcctcttgccatgacataccatcccaccccatccacacacattcaagggcaatgtagaagtaaa

SEQ ID NO: 101860 - DNA, 501 bp, Zea Mays
atctcgacatcatcacacgctaggacgatgactcaccccgtaagcagcctttgacccataccctgggcgctgttacaaccactatggcatgggcggcctctcccttgggggctcgggcatacgaacaacccctcgagcttggcctcgactctatacaggaagtcagcaggcacaaatctactacacagtacgttgtcacgtagatgccatgcagctcttcttcgaatacaagacccggcttccctaaagacgctccctttggtgtataaatagggtcgtggtccctccatggatgggggatcgatcgacatcgacgacatcaacatgcacacgacactcatagacgaacactcgctctcccattctgtcttagatattggcacttgcctcaatcatctctagggacttgaggacttcccctctcctattgtgcttgtaacccccctactataggcaccacggtgcgagtaatataagcctcatcctctctgctagaagtag

SEQ ID NO: 101861 - DNA, 356 bp, Zea Mays
ctggtcttcaacagtctacgacgatatcgatggaaacttaatcccgaaaaatgtgtcttcggagtaccagcaggaaaattgctcgggtttattgtcagccaccggggaattgaggccaatccagaaaagatcgaggctatcatgagaatggaagcaccacgatcatagaagaaagtacaaagacttaccggatgcatggcagccctaagcagattcatatcaaggctgggagaaaaaggcttaccgttctataaattgcttaagaaggtagacaaattccagtggacttcagaggctcaggaagctctagatgcactgaagaaattcctgacaacaccaccagtgctaaaaccgcc

SEQ ID NO: 101862 - DNA, 649 bp, Zea Mays
tctcaaatggttttctcaatttcttctcccataaataaaagggatagaagatggtgacgttaaaatcagctttccactttaggattttccgagctgacaagcttcatggccagcgtgatgctatccagggcgtcatataccttctcagatcttggatgcgacttatcttcaaccaggaacttgtgcatcctaccatctaactcaataacgctgtacccagcagatttcttatgatctttttcctttagcagcttccacacccgggcaacaccgtcccatttgccacatgacgcgtatatatttgaaaggatcactaggttagctgtattgtgtggctccaggtgcattagtttttccaccgctgtttccgctagttctaagttgccatggaagctgcaggctccaagcagggctgcccagattacggcgtcaggctccattggcatgctcgcggtcagactgtcagcttcttttaacagaccagcacgccccagcaggtcaaccatgcaaccatagtgctcgattcttggcttaagaccgaactcccctctcatcgagttgaagagcagcttgccttcatccaccaagcttccatgagtacaggccaaaatgactacaacaaatgtaatgacatctggttttgcccctg

SEQ ID NO: 101863 - DNA, 373 bp, Zea Mays
caactgcgagcaatagctagcggcatcaacatactcagactgtttgtgcgaagacgaggaaaccaacaaagaccccaaaaactgacaagccccagaagcatacttgcgctccaagcgacatccctcaaaatcagcatctgagtacccacacaaagatggaatggaagaagaagagtaccacaaaccaaactccggagtgaagcgcatgtacctaataatctgtttcatagcctatttatcagaagtgtgtggggaagcttgaaaacgagagcacatacatactgcaaactgtatatctggcctcgtcgtagtcaagtacaggagagagccaagcatgctcttgcactccttatggtccacgggctcatcgtcc

SEQ ID NO: 101864 - DNA, 787 bp, Zea Mays
ccagaatagcacaataagtgcgaaaaattgaagtcttttccaaaagactatccgcgcaaaagtcgcctacgggtgcagccagaatagcacaataagtgcgaaaaatcgaagtcttttccaaaaaactatccgcgcaaaagtcgcctacgggtgcagccggaatagcacaataagtgcgaaaaatcgaagtcttttccaaaagactatccgcgcaaaagtcgcctacgggtgcagccggaatagcacaataagtgcgaaagatcgaagtctttgcgagaagactccacgcaaaagtagcctatgggtgcagccggaatagcacaataagtgcgcgcaaaatacgcctacgggcgcggtcggatcaatgaaggcacgctatctcatcatacaaatcatagttacacgcacaacgagggcatcacacattacaacggctcaaccttcgggatgatacccatctccctgtagttgaacaacattatcttcaattcctcaccctcgaaaagatttcgcagctccccctcacctacactcgccccagccgacgaagacaacaattcccgtttggcagtcccgtccactcgaagacaaccaccctccacctcaccatgacccctatcacttcgtgacaacccgctcacccttcgcttcgccaccgcccttcgacgcctacgtccagcattcgcacaaggatatcctcacccatcacacgcagcgaagtctccactgcagccacatccaatgctgcaaaatagtctgagtcctcatccgaagacccctctatcca

SEQ ID NO: 101865 - DNA, 348 bp, Zea Mays
cttttatgaaggggtaatatgcactaagcacaacccttaccaacttcaaaaattagttttaattaaatggtgaaacatccacacccgacgaatgtataagaagatcaaacacctcacctcaaagcaccacgaaacaagtagttctattgaaacaaaactcctaatcttcctaaaccttattcttgccatcatgaaaagataatcatgtaatctaacattctttgcagcccgcaaaagggagaaaatctacagaactaatggagcaataaagccaacaagaagccaataacattctgcgcggcataggtcatcgaagaaatgccaaaagctccacaaagagcactgaca

SEQ ID NO: 101866 - DNA, 537 bp, Zea Mays
aagtgtatgaggtgtgttggataagtgtgtggaatgcatgagtggtgtgcttaggagtagaggtaagtgatgccctccaccgtgctaaatgtagacaagtaggtagttaagtgggataatagcagtagggtatgttttgtgagtgatggcttgcttaagggtagatactctgctaggttggactaccttgtagaggagaaggtgatgggttgtatgatttcttaagtagtagtcaggaccgaccaagaaaagatagactacatgttcttggatgacgtagactaccttatgacactgacttataatggaaagtaaaccataaaggatattaaaataagcatgcatccctaagcatcatgcatctcctgcactgtgcattacctactctcatgcctgcatacatgcatcatacaggatcacaagaggaagtgccagtaggagctgtcgaggagctgatgaggcttctattgaggaggttgagcctaaagccgaagcccaagagtgccctgaccaccgccctagctcattcgagaaagg

SEQ ID NO: 101867 - DNA, 744 bp, Zea Mays
ctcgggcaggatagtaccaggcgggtgaaaagatcggagggggagtggatttggtcgcggggtgaagcttatcaaccgcgtctgtcgccgtgcgacgtggccggaccaccggtatcgccgtggtactccggcaacctcacttatgccacaccatagctctttaccgcatggtagtaactgtggcatgcctagactcaccattttagaaccgttgcaccggcgaacgccacgactgagccgccattgatctcccctcttttcggccgccagcgcgccattccaaattcaagagccaccaccctcagacactataaattaagcatgccatcagctccgctgagtcatcatgaagccagagcacccgctactgcctccaattagccaccagagagttccaatttctttctctccccaaatcagttttccgcacccatgaacacctcgccgtggccagacgtctacatgttagctcatgctcttctgcgtgatgttctagcctctctcatgtcccctgatactcatagaccttttgaattaaactagatcgccctggggaacccagaacatgtcggtgtgttcttagtttccgccattgtcgtggatagtgaattcccaacctggaattgtgcaattgattgaggggtaatgatcgttaggggttgaattagatgtcagccgagctaggggtccggtcgttacttattttggccggtatagaatcgccggagggcatgttcaccggcg

SEQ ID NO: 101868 - DNA, 658 bp, Zea Mays
gcgcttcgggccagcttgtatgacatgtgaggcctgacccccatgtcatagggtggaaaccctggtgcgcatcgggggagaccttgcccgtgacgcttcggggcgcgagcagggaaatctgcctttaaaaaggggttcacccctcgagtagcagccatgacttgcttctcttccactcgcggcgtcctttcgactccgagctctctacgcccctttgccttcaaggtttccacttcgcgttgccttagttttccatggccttgtgacttcatctcgagcacacccagactgagtgagtgctcgaaacggtataccgcctgcttggatggaatgtgccggtatttgccgggaggacttgtgctggggtctctcctctcggtgacatttccgctgaagagtttgtgttttttgtttccaaactcccaacgggttggctctaccgatcccatctttcttcgtgcagctgttggaggggcttggcccccaggctctacccgtggtgtcctgcttcatcctttatgcggccatcgtcgcctacctccgtgggatgtccatggaggcgacattatttcccgcttcttcctccagcattcagggggaaggatgattagcagcctcgtggaggtgggcagcgggctgagccacggctccatcccac

SEQ ID NO: 101869 - DNA, 502 bp, Zea Mays
aatagcttaggcacttccagggttcttgtatcgaactagaatcagcctagctggtttgtaagctagctagttttgctggatgaggtgttcgttgtagctctgtttcactagtatgagtttgtttttgttctagtcttttttgcttggttgctctgtctctcgtatatatttgattgcatctcaacacctattggtgtttgcgtgttctgaaggagcttttagtgctttggttccttttgagggctctaggggtttctcgagatcaacgtcaagatgggtttgaggaaatcttttactagcacctatttcacgctcccctctctagtcgccttgcttggtccatcatataggatacaacccacaactatgtctcaatgcatagggatgaagtttagttggcatatagcagaacacagtgaacaacctacaaaggaaaacaacatccaggatagttatggtgccaccagaaaactctagtgcacctcttaggtgctactctaag

SEQ ID NO: 101870 - DNA, 501 bp, Zea Mays
attcatgcgactcaagcaaggaggagatactgtcatgcaatatctcaacaaattcaataatttgtcctagtatgcaattgatcaagttaatactgacctgaaaaagaggatttgcttcatgagaggcctcaatgaccggcttcaaagaaaaatggccacctaccatgatctcccctacatcagggctgtcaacacagcgctggcagtagaagctaagcataaatgcctgggaaaatcgaagggaattggaggtgacaggtccaatcaggggcctgaaaagcgacaaaggttggtaatcagaccttttaatcaaaatcgttcttcacctcgtccaccctcctaccccttcaaatagcctgtcttcatccgccctgccactgcccccacttcaacaagtcagctgagtgcccctggtgctcgtttccccgccctccctagttcctcaattggttgcttcaattgtgggaagtctagacgttttatcaaagactgcccatatcc

SEQ ID NO: 101871 - DNA, 716 bp, Zea Mays
caaacctataaaatttcaacagactcagaccgcgcatgcctaggaccgcgggttgattacccagaaaggcaggggctctttagaaagaaagccagggcgaaggggtatcgttgattcagagccgtccgatccgattcggatggcccggattaaatcgtggttttaaccgaacgtgatgtggttcgtcagatctccatccaacgacccacattataatctgaaccggtgtatgcgattgaccacccgatccaataccaagggtctagatttaaagtaacggaggggatccctgtcgtccgttccaaatcaacgatccatatccagttcgatcccgatcttatcacgaccctcaattctcgatccaaaggccagggcatccccacacgtccccctttgatcacacccgttcaaacctaatcaaacgaccaaaagtttgtctcctacccgatggtgagctacggcgagcagagctctgcacgcggcggcggtgctgccggagtacgccccaacgcccctattctctaattgtactcgtgctacatctcgattgggcactggcgagactggggaaggcactcttaccggtaatggtcgaggcagagggtctgcccgcgatgcccgatgactccgcgatgacggcgcacgtggatgggggaattccccggtcttccgcacctcggtgaggcacgaacggctttctcgcgctccggtaaatc

SEQ ID NO: 101872 - DNA, 404 bp, Zea Mays
caatttgaaaaatagttttactaaggttggcgcattctcctcagagcagaactctatccgcggtgattctgatggggttatccagtggattaatggcgaagtcaaagattttgaggagattctcagtgatagggggacttctgcgcttttgttggtgcccgtagggccatgtcggtccttgaaaaggtcagttgcgaacatgccaaggctgtggtcaagccaggattctcgctctcagctaatgatattagaaacccttcagccgaagtcactgcactagatggaaagttttattccgaagtatggctgaaggatggccaagaggtagctgacgaagctatcaggaagaatgagaaagagtctcatgacgccttggaagaggccagaagaaatgaagaagctgc

SEQ ID NO: 101873 - DNA, 397 bp, Zea Mays
gttgcctagagggggtgaataggcgaaacctgaagtttatcactaaacactaaaatcaaaccctgagaagcaattcaatcaaagtgagggagatgtgttcttgcaaatgtttctcttatgattgcataatttctcgggagcaacacaaatgatttaaaatcaagcgcaagcaagtgaactttagagagacagagagggaaggaatgaatcaaattccaatcaacacaacacaaaagacatatgcgatttggttcccaaggtttggcttcgaagaacctatgtcccaattgaggattccacttaggacatgtgtttttcaaccctttccctctcttaagcaatcacctagatctcctgataatcttttctcaaatcaagagaccaaagtctcagcgag

SEQ ID NO: 101874 - DNA, 371 bp, Zea Mays
tgttactgcatcatgggtagatgcgcataacctcccaataaccacaatgacaacaccaatacaaattgatttgtcccatggaaaagtctgaactaacataatatgcttgaatgtaagggtggaaataacggggataaagttccccgctaacttgaaaatgatgggtactcatgggatagatgttatcctagggataaactgcctggataagtaccaagtagttatcagctgtgataagaggacagtgaagttggtttccctattagggaaagaagtagagactgagctaatcccgcccgagtcaagaaaaggagattgccactagatgactattgatagcaagaaggtcaacccactcgaggccatcaagg

SEQ ID NO: 101875 - DNA, 354 bp, Zea Mays
ctgctgcagagggcgaggccctaaagaagtctagcgaagctaccatagcgcagacaactgctgaagctgaaccatcagtccccgccgaagcaaaatcttcggaggctgccggagaacctttaatgttggaaaaagaaggtggtgctgaagaatctgaatctcctgcccccagagcgtctatcgaagaattggaattcatagtgcgacatgcttcagggaaaaattatcgaatgagcaaattgccgaagcgcaacattatgccaaggatttgaagtaccctcgagggtccttggtgtatagtggcgatgacgaagatgacttcctttattgtctgccagacaataaggagataca

SEQ ID NO: 101876 - DNA, 406 bp, Zea Mays
gaaacaatgacacggatggcgagatcaaacctgaatttggctagccacggcgggaccaaaaccgtgtggtgttcttgagtaaattgggggaaatcctaaattgaagctctctagtgattgattgaggacaatacttggtggctgggggcgtgatgatcctacggacccgatgatgcgcttaatttatagcaagcaagagcggtggtcgggaatttgagcgacgacgcgcggcggtcggaggagtggaaggttactagcgcagcagattggtgtcctattaccgtggcagtcattccggcgatcaatagagagttacaatgggtcacggcgatgcggtggaggtgccaaggcacgtggcacaaggtcgtgaagaggcagtcacctgcgaggttatccgaagtgaccg

SEQ ID NO: 101877 - DNA, 418 bp, Zea Mays
ttcatttctcaccttgtttgtttcttttggcagccttggaggccgagctagagaagttgcgctaccatatgggccagcttctggactacgtcggggcctacgacacttccctagtggagtgcctagccattgctccatgttgcattcgagatattgctgattttggcgttcatcggggagctacaatggcgctgcttatgggggaggtctgctccggttgtagtctctgggacatcgtgggccctccttcacccctttcagacaaagggatggaagacctgctggagggttttgacgagatgtctagtcatatcatgcttaggttgtccgctcatgacatcgtgtgtggtgcgtgttgatcgcgatgtatcatgcctcgacgtcacttccttaaagtagtaattaagtaatctccaac

SEQ ID NO: 101878 - DNA, 501 bp, Zea Mays
cgcgggtggatggtggtgtcgaccgtgggctcggtggaaaggatcgacaatcggggcggcgaataattgctcaccggcaccgccatcaggtcgcattccgccatgggcggtagtctccatgcgacaagctctggtatgaaacccccttcctatggattcgctttgaacgtagggtcgtgtagccatagtggatgtggggaatcgggcgccgagccgctaggcagaccttctccggcgtgtatcgccgtcgcggctgggggtgaactagggaccctgaccgtcgtgtggaagatgagccctatgtcgtcgatctgggattgaatggtgaagattagccggcacgttgatcatttggtggacgatcgtgatcaaaggagaaaaacatttgtccttggatcctaccgtcaccgttggatggcgtttgattggtcctgattggaagtcggtacccttcgattttgtttaaatcatggtcgtgtgttctggatcgtgtggtgcggg

SEQ ID NO: 101879 - DNA, 508 bp, Zea Mays
atgacttaaagcatctgccaccatattagcctttcctaggtgataatgaatttctaggtcataatccttgatcaactcgagccaccttctctgtctcatgtttaactccgactgggtgaaattgtactttaaactcttgtgatcaatatatatatgacatatattccctagtagataatgacaccaaattttaagggcatgaactgttgtgaccagttccaaatcatgtgttgggtaatgttcctcatgccggcgtagctaccttcaagcatacgctattacttgtccttcttgcatcaaaacacatccaagcccaatgcctgatgcgtcacaatatacatcaaatggcttctcaatatccagttgggccaaaaccgatgcagtggtcagcaatactttcaattgttcaaaggactcgttgcacttgggagacagtcaaacttaacatcatttttcaataactcggtaataggtttaacgatcttggagaaatccgggataaacctac

SEQ ID NO: 101880 - DNA, 362 bp, Zea Mays
gctgggggtgtggtgatgaggaactcacagggagaggttttggcggcagcagcacagttatatgaacacatccctgatgcgctaacgagcgaagctttggctgctcgtgatggcgtggtgttggcccagatgcttagcatggaaaaagttattttagaagttgacaactctgtcctggtggctcttctccggtcagatgagggaagaaggagtgctatcgcaggtttatggtaagaaaccagagagacgagtgtggttttcatatcctttgatgcatgcatccttcgttaatagagagggaaatgaggtagctcacctttgtgcaagtaaggctatagagttggctcctattttattttggc

SEQ ID NO: 101881 - DNA, 599 bp, Zea Mays
caaaaactgaaaatactaaccttacaagaaaagctcactcttgtttctctagaatattttccatgaagtggggcaaatgaggagtagtctcctgcttgtaagttcgtaaacagttaaaccaaaaagagaaaagaaccaaactgagaatatattaaacaatgaaggaccatcgcagactcacctggacgttggtgggtgcagaatggagtcaacggtcgatggtgggcgctggatggaatggcgacctttttaatgagggcgagcgcgaaatttgggggatagttgttgtgattgcttgaccgagatcgtgctttccaatttggtgacgtagattgtgctttccaaatttgtgggtgcatcgcataggagaaggcaatgctggagcctagagcacgtaggggaacacgatgctggggctaggcgccattgaccaagcttccaaatttgtgggtgtagcgcgtaggggaaggcgatgcggggtcttgggcgccattgtcgcgcctgccaaatttgtgggtgcagcgcgtaggggaaggcaaagcagatctgggcgccattgtcgtggcttccaaaggattggtcgctggtgcacatagggg

SEQ ID NO: 101882 - DNA, 868 bp, Zea Mays
aaaaaaaagccagagagagagctgtgattcacgagttaatgaagaaatagccatagcgaatatctgagccaatcacaccacgcctaaagctctagtgttcggttgcggagctagttagctgggatggagcggctccattgcaaagcagcagcggctccatatatccgagatattaccgtttaaacatatttttctttttttaattaagccactctattctatacagaaccaatataaataataaatttaaaagtatagttgctccgtcctacgatactctataaccaaacactagaggtggatgtgattgaacaagcctctctataagttggagaaactagtttcacaagtcgtggcgcatgttgtttgcaatgatacagttaagcgtcctcagatcagtagtagtactgggacacagaggtatcttttcttctttctttttcgacattatgcagacgtgagattttgagagacgaagagtgctagctttatcctacaaaatctggttctaccgattttgtaaaatttcactcgcggatgagaatacgggtatataattctaccgaccggctagccgcggacgcaacaactcacttgttgataggggtagtgctgctcgctgcccaacggtagtgttcaaactacacgacagacgacagtgccgctgaaactccgaggtagtgccactccatgaaaggcgaagtatcctgtgcacataaaggtttggtgcacatagcgcacatataatatcttagtctctaatcttcgatcaaacggttgcctcttccacctcggcattttatcagaaaacaccctccacctcccctgaagctccctgaatctttaacaaaaaaaaccccaagctccc

SEQ ID NO: 101883 - DNA, 296 bp, Zea Mays
caaccgtctccaccttctcaaattgctgttcctattgtacatccatcgtcacctcatcaaacttcacatgctgctcctcatcctctttctgaccctcattctcctcatcctcatggtggcccaccgtctccgccacatacatcgcccttcagggatccaccttctccacagccatctccacgaccatcaaagaaatctaaagtttctataccaaaagtagtgtccccgtatgataagaaaaagaagagtaaatccactgctggcactgttcgttttttgaaagggattggacggag

SEQ ID NO: 101884 - DNA, 888 bp, Zea Mays
aattgagtgtctttgagaccttctttattgatgacatatctcccgttttacagagtacattgtcgtcccgatagcctttgaaatttagctaggggtaaaacttcctgaggtgctctatattctaggagttcccaatttctgtgccatccatctgagttagacgatatgatcctggccgagtgacttctgcgattatgaatggcccttcccataagggtgacaacttgtgtcgtccctcccccgttagaattcggcggaggacgagatctcctactaagaaggatcgttgtcgcacggccttgtcgtgatagcgtctcagagtctgctggtaccgtgctgattgaattactgcgttcagccgttcttcttcgagtacatcgatgtcctccagtctagtagcttcggcttctgctatgctttcgaagaccaacctcggtgccccgaacttgagatcggcgggtaatactgcctctgacccatagaccatgaagaagggagtgtttccatgtagagctcggctaggctgagttcttaggctccaaacgacgtagggcaattcccttatccacttccctgcgaacttctcattcttttcgaagacccttttcctgagtgcctccagtatcatcccgttagctcgctcgacctgcccgttggccctcgggtgcgctaccaaagcatacttgatctgaatgcccttttgctcgcagaaatcgaagaattctgaacttgtgaagttggatcccaagtcagttatgatattgtttggtattccgaacctgaatattatgtcttgtatgaatttcacggccttggctgaggttaaggaagcaatgggtttgaattctatccatttggtgaacttgtcgattgctaccagtacatgag

SEQ ID NO: 101885 - DNA, 355 bp, Zea Mays
tatttacaaatcttttaagcagtagtgttttgttcgtaacaaaagattgcaccatcactctaaaggaagtagttgacacatctacggcccgtctgatcttcatcaagaaaacaagaatctctagcaccaaaagtaaagttgcacatggccttagacaagaatatcttgcaggtgtgtaaagatgaaatagcaaccaaatttatgatatgttcttttgcagggtgtagtggggagaacaaaaggcatgctgctcagtccagcaacaacaattcagtagagacttgtatgatagctcaagggagattgggtcataacattcataacccgcctgattcgatggctttgcgcggacgcg

SEQ ID NO: 101886 - DNA, 1043 bp, Zea Mays
gatctccgagtctatccaaacccatcgtgggcggctgaaaccttgcgtgggttgttgggattttggtgtccggggaaaatctcaacaaactccatcccttccgcggttgttgcgttccctccccaggtatttaagccgaccgtgcccaggcccctttcccatggatacccgacgcaccgagccccgccatcacaagaggaggagagagaaaatattaccgccgtcgttgaccttcgcctgcgctaaggattggaggctagaagcaagtcacgggttcgctggcggttgtgcggcctaacgcatgttccaattgagctcgtggttgaccgggggatggccaatcgatcatcgggatccatggtgttgcttcggtccgcacttctccacggccgggtgctgctgcacctacaacttcggtgagaagttccccatggtgattgtcttaatccctaattcgtgtagagcacttcggacgtgagtttgacgctcggttgtgcgggtagtgtagcctctgcaatggtgcgccgccgccgtgccctgttcctggctgcgagttcgaccggagatagaagaagccctctgcgtcgtgtatctcgtgatggatggctgtaactggatccatggttgggacatcctcggtcgttgatgcgtgtatgggcgaaccggatcagtgctcgcttaccgcttcggcgggatttaatctggggcgttggtgctcgatcggacgactggcgtcgcttaccggttcgcgatggggcccggatataatctgagccctcaaatgtagatccaacggctgtgattgaagcgtaccccttcgcggaacaaaattgcacaagagcccctgaagttttaaaatatcaacccgctgtccattacagctatacactgtgtcttgagattcttaccccgcagcccctgtattttacagaatttgatgcccagtccagagatttataaaattcagaaaagggattagaaaatgattttaatgtgaaaataaatgatagaatttgtctaattcatataaaattcatatgaag

SEQ ID NO: 101887 - DNA, 522 bp, Zea Mays
ggaccagaattttgagggcatcaaccatgacaatctttgtcatgaactagacaactttcaaggtttcctctacgacgaagcttccccattgacactagagctacagatgacaccctggacactgctatacagcccccacaatgccaatgtatgatggcctgactgatccaaagcaattcctcatgagttacgaagctaccatatcttcatatggtggtaactcagcagtcatggcaaagtccttggacatggcagtcagaagtgtgacccagacttggtactcacctcttcggccaaggactatcacttcgttgtcgaagctcaaagaaattcttctcactagcttttagggttttcattcgaagcccgttacctcgtaagacttgttttagtgcacccaggagttagatgaatatattcagtcgtttgttcgaaggtttctccagcttcgggcccaggcaccagaagtccaggatgacatcgtcatcgatgccatggtcaaggggcttaggcctggaccag

SEQ ID NO: 101888 - DNA, 373 bp, Zea Mays
ccttctgctaccaatgtggtagaatttctaaaggtaataactgaatccttgcctatcaagctaagtccactggcgccacatctgacgaagctttttgagaagaagaaagagccttcgatagcgaagaaggcagctgggccgaaaaaacgaagaattattactgtgacagaagctatcgaagagacacctcgaccagcttcggcttcaaaagcaccagctgttgagagcgatataactattgaaactgaaccggataaagctgcaactgccgaagctgaactggctgaagatgcaaatctagaaagcacactttctaatattgataagatacttctagacatggccacagaagaagccgctgaagaaaccacag

SEQ ID NO: 101889 - DNA, 446 bp, Zea Mays
gagcttttggcatttcttcgatgaattgtgccgcgcagaatgttattggcttcttgttggctttattgctccattagttctgtagactttctcccttttgtgggtgcaaagaatgttagattacatgattatcttttcatgatggcaagaacaaggtctagaaagattaggagttctgtttcaatagaactacttgtttcgtggtgctttgaggtgaggtgtttgatctttttaaacattcatctggtgtggatgtttcaccatttaattaaaatgaattgttgaagttggtaagggttgtgcttagtgcatattaccccttcataaaagagtgttgttttaagacattgatgttgatgtatagctgcatccaaattcgatggtgtgaaaattgtagtgttgattgcatctatgacttgctttgagcttcattgcatgttgtttca

SEQ ID NO: 101890 - DNA, 635 bp, Zea Mays
catcttccttcccctcttgtgagaatcttcgggctcaaggatggttgatcgggctgaagatgaccttcgtcatgcgctgatcgtaaccgttcttggccaggacagttttgacttcgtcgcgaaggtccgggatgcactcgcctcaaggcttggccttgaagctgatgtgctccaactccagcgtgctgcgtccaactctttcctggtcttcttcccctctgaggatcatgtcgttcgtgcctacaatggaggaaaatctcttttcattcctccttttcggttgcaccttaaaaggtggcgtcgttaggagttggccgctggcggtggagtcctgccggtgctcctcgacgttgagcttagtgggcttcctgcgcatctttggggaattcatacggtggagcatcttctctgtgcgcactgcttaattcaagttctacacccagattcggtggatgggctggacatgtctatattgaagctgagggcatggagtttctctctggtgtgtctgtcttctgtcttggatctccatgttgaagagtcgtcggttattacagaggatggatcatgtctccctcacactttggtttaccgtgtatcaatgaaggttggaggttcagatgacttgcgggttc

SEQ ID NO: 101891 - DNA, 780 bp, Zea Mays
attttctatgacaatattggaatagtcataagaataaatcgtcataacattctcaacatcatatttatgatgatattgcctgacaatgtgcatatatcatagacatatgatgtattttgttttaaaaatattattatccatgtcagcacgtgtggcccaccattaagaacatgtactattttaaaaaatactaatatggcctttactatatgcaactttatatttccatgtgtatattaccctataactttgtaaaagtttggaactatatatgattataatttgataaaaccttgatgtgtgaaatactttcaattgtcatatttgatttagttccatctaaaaaatctattccgcgacaataataaaatttgatgccaaagaaccatccctcaacgccatgtgccattaagttgagtcacaaccacattagccccactgtgtgcggcctccacctacagtcatctacctataaacatgatcgaaccatgcccaccacgaccaccaccatctaataaacaaaatcgatctcacctctctcacaacctctcggcaccttccccatctctagcggcagtagcctagtccctaagcctctccatcctgagatcaagatggctcaagaaagaaagggttcacaatgcaatgaattctcctggtaattttgaatgatacactctttccacattgacttagagggatttgcaatttttgccataaccggtagtggacttcgctaattttttccatcgaccaacaaatcgtggacatagatgaacc

SEQ ID NO: 101892 - DNA, 444 bp, Zea Mays
ttggtttcctagttgtccgttccttttccatcatcaagcaaggccccaactaggtgcaaggttagatacatgactcaaattcatgattacaatagaagtttggacccacaggaaaagcggaggaaagcgtcacgtcgattcaagaaaagaaataattggatgagaataaatccttcctttacaactaggtacatgtgatttgtgtaacgaacaccagagactaggtttacaagggtggcccctaccagattggaccataaatggcgctagagtctgggaataggcaagccttacagggctagatcacaatttatcttatcgcaaaggaagagtccattctcatgttgctttgtaagtagaaggtacaaggctaacctaactgtccgagtactactgcaagtccaattttaagggcaagcagtggcacgttatgccttgaagata

SEQ ID NO: 101893 - DNA, 607 bp, Zea Mays
ggaactgagaacaatagctagcgataccaacatactcagcctctatggtagactatgcaacgttagactgtttgtgcgaagaccaggaaaccaacgaagtcctcaaaaattgacaagtcctagaagtagacttgcacaacaaacgacaacttgtaaaatcagcatctaaataaccacacaagtatagaacggaaaacgaagagtaccacaagccaaactcaggagtgaaacgagggtacctcataatctgcttgactacatgtccgtgagaggtgaatggagaagcctagaaatgagcgcacaaacacactacaaagtgtaagtccggtaacgtcgcagtcaagtataggtgggagccaatcatgttcctgtactccttctagtccacgggcttgctgtcctcatcagcaccaagcgccatcatgtggacatgggcgttgaaagaggcttggccttgtccatgtcgaacttcttcaagacgtcctttgtatacttaccttgatgcacaaaggtcccatattgggtctgcttgatttgtggcccaagaaggaagttcagctcacccatcatgctcatatcaaactccttgcccattgtatctgaaaac

SEQ ID NO: 101894 - DNA, 422 bp, Zea Mays
cctgccaagtcgtcgctcgcaaggcattgaggaccctgtgtcagatctatgaagaagaagtggccgacaccccgctcagattctttccgccctttcagagagaccagcccgtttggatggccaggatgcgtgcattggaagagcagcagctgcttgaggatgaccccacagtcgtgtacctcaccgcatacctgctcaccctggatgcgcagtatgatttcttggctcggcaccaccgtcagatgattgcccgagcagaagatgcagaggagctcaaccgtaagctccatgtggatctcacctcagctcaagcccgtgcaactgccttggaaagtcgtgaagtcattgttgttgaagccctgaagcaagccaaggatgagcacgtccagaagttgatggaggcctacttggtaacccataac

SEQ ID NO: 101895 - DNA, 308 bp, Zea Mays
cggtagcgtctggagtagttctcctgcaggaccgggtcgctcatctggtgcccatccttggtgtcgccccagaagccgccaggcggattcagccctgccacgtacgtgatggtgactgcgaaggtggcgagcagcatcaggacctcatccagttcttcgcgttcatagccatgcacattggcggcactagtgtcattattttttgcagtgttatggtcatccctatgcttcttgcgcggcagcgccagcacgccgaggtaccagcagaaagcggctacgacgtaggcgaagacagcgcagaccagcag

SEQ ID NO: 101896 - DNA, 351 bp, Zea Mays
ggcggttccaggaagaagctctatggaaaactcaactttccgctcaggtggcatacctggtaagtcttccgagaacacatctacaaactctgacacaaccttgatagtctcgagtgaatctgcctccttgctatcaatagccatctgatgacaacctcctttccttggctcaggtgagactaactcagctaccgcttcttctcctagtggggacaccaacttaattatcctcttatcatagctgataatttcttggtacttatctagccaattcattcctaggatgacatctattccctgagtacccattactatgagattagcgagaaactctaccccccttatttccac

SEQ ID NO: 101897 - DNA, 787 bp, Zea Mays
ataattatagctattagtgctataggagaatagtccaatgtattgaaaagagtacaatgtatatactacacatgggttgggtccaaggcccataggcacaacacagtctaatacccccacagtcaaaactctaaccacaatagatgctgagactggattgaaactccaaaaacaccaaggagggtaggtccttggtgaagatatcgatgaactgaaaagtcatcgggatggggagaactcgaacatccccaatggcaatgtccttataaacgaagatcaatctcgacatgcttcgtgcgctggtgctagatagggttgacgttgtcgtagtaggcaagggtactcccggtgagtgagttgtggagctcctagtggagttggtagagccagcatgcttcagccaccccattggccacgacgtggtacttggcctcaacactcgagcgaaagaccactagctatcatttggacgaccaagagatgaggttttcccaaggaatacaacataacttgaggtggatcggcgtgtgtttgggcaccccgctcagtcaacattggtgtagacgacaagctcgctccaagaagaactccagtgtagaaggccatagtcgagagtaccgtgaaggtgtcgaaggagccgcttcacaatggtcaggtgtgactctcatggatcatgcatgccgagacacatatgttggacaccataggagatgtttggcctattagacaatattgtttatggtgtgtgttatgggcatagaatggcctaacccattagaccctttag

SEQ ID NO: 101898 - DNA, 628 bp, Zea Mays
atggactagaagttttgtcaatatgaaagatgcacatggactgaaagttgtcaatacttatttcatataaatccatgcctgagaaatatgtttaacacaagattagttcaaaaaatattttcattctgcttcaaggaacacacatagttctaggttattcttgatttcttctgaaacttcgtcagaactccatgttatccatgactaagtcaaaacgaatagacctgaactattaaactagcgatgtttcttaccagaccatacagtgagagaatatgaacagtgtcaatagaagaaattcctgatacaagagcatgcagcataggcatatgctgtacatatcgcccttctgatccagaatccaaagggaggaatgtcgataacaacttaagcaccatttgaacaacatgttcctaagcagaaaaactaattgcatgcaaacatgttacattcttctgtagaacattactacaatatggttcttttaaactgaatgctacctgaatgttccaaccacgaagaagtgatgcaccacacaaaatctttgaagctgccaacttttcctccggtgacccacttactgcaaaagagtacaatttctccaactcttctacactaagaattaaga

SEQ ID NO: 101899 - DNA, 667 bp, Zea Mays
gtcgcatacatctctcagaattgtaaatacttatagtcactgaattgactcgggatagtcctttgacaagtttggtatacactgtaagctaaatggtaaaagtcggtcctgaatggacacatgcctagggtttatgtagccgaactacactgaattccaccctttggcatgcttaccattatctacctctgatctaccagaagtgagaagagtagacaaataactatgaaatcccacattaccacagagcttgaagtgaaattggacattaatatgtcattggtccttggcgccggaagatccataattcttgaccactaagctattgttgatggtaatttgtgatagaaatatgaagatcttatggagaccagatgtattctcccttgtcttgatgactccttcgcatgagatcagtattatttgttgttgaagactagtcccagacgaatattggtatttctttcgctcttgccaagcagttatctccatttgctttgtcgaaagcgtaggaatcagatgatttttcccagataaaatgaattattggccttgtctgttctattccaaagcttctctttttgctgagcaatgaagagatcgaaataatgctttgtagaacaagttggtatataatatgaggagaaatgtttgccctgctggcagc

SEQ ID NO: 101900 - DNA, 360 bp, Zea Mays
aggcggctgtgccaatcacggacgacaaggatggagatagccgggggtctgccgaggcaagcaactgagcacgtccaaggcgtgagaagcgtggcaacgtctgtattactgggctgagttggtcgtgtaagggttagctgggccgagctgccgagaaagtataaaggatacaactcaggcaattgtaaggagatcgaaaaacagaaaacaaaatatcaactcgttgccatcacgagaccttcttccccacgtctccaatctctgctgcttcccctctttcctgctctatagacttctagaaggtgctaacatttggtaccagaggtcagcatcctagatccgcttggaatactgcctcgg

SEQ ID NO: 101901 - DNA, 608 bp, Zea Mays
gtcaccctgagttaagtaagcgtgcaagtcaatcgtcgatgaactgagtatctttgaaaacctcttttttattgatgacatgtttccactttacagattacatcattgccccagcagttttgagatacagctagggataaaactttctgaggtgttctatattccaggagttcccaacttctgtgccatccatctgagtgagacgatacgatccgggccgagtgacctctgatactatgaaaggcccttcccataagggtgataatttgtgccgtccctcccccgttagaattcggtggaggacgaggtcccctatcaaaaaggaacgttgccgcacagccttgtcgtgatagcgcctcagagtctgctggtaccgtgcagattggatcactgcgttcagtcgttcttcctcaagtacatcaatatcctccaacctggtggcctcggcttctgctatgctttcgaagatcaatcttggcgccccgaatttgagatcagcaggcagcactgcctccgacccatagaccatgaagaaaggagtgtttccatgcagggctcggctaggttgggttctcaggctccaaacaacataaggcagctctcttatc

SEQ ID NO: 101902 - DNA, 671 bp, Zea Mays
caaggttcgggcggaggttgcggaattgcgtgctgagtgcgtggcatgccactatctagatggtggttctcccgcccctgtcaggattcagcaccctcaccgttcaccgccccgtggtcgcttcgactatggtacgccagactgtaggacccggatagatttggatccctagatcgacagagtcggagtctgtaataatgcttagttcagtgtcttagcctaagtcagttttagttagagttagtttgctcagcttatgttggatgcttgttatgatgaacatgtaatgaagttggatctttgtaatgattgtcaccaaggggtgggtatctcctgcaacttggtgtagttattaataaagtcagttatttagttgggtaatccctttatctccactttcctctttatctgagaagttgtcagtaaagatgatcaaatgttcagtgctatgaagatttccgtataccttttcttatgctaaaagactgtagagtcagatctgatatgtgtgtgattcctacagatgtctgagaacaggcgtagaggtgcaaggcgtgctcagtctgaacaacaggcagcccaagaggaagcagcccagtagcagcagttgctgccgccacccccaatgaccattgagcagatgttcttgatgcagagccaggcagttcagg

SEQ ID NO: 101903 - DNA, 350 bp, Zea Mays
gcggttttggacttgcggagagggttcacgtggcttcatataagaaatatatgtactatcttcagctggtggagcgagcgagtttctgtataaccacgtgtcagacaagcaaaggctgcgaggcccggaagtgcggagagagctcgaaaacgcttgaggttttaatattctaatatccttttgtaaaaaaccactattaagatgtcactctcaaattgtgaaccatgtgcaacaccgtctgtgaaagactgttgccgtaaaaaagttattactatttagttctacaaagagagacctctatagtaattggtaaaaagttgtttaagatttttatcactcgtaattgttcc

SEQ ID NO: 101904 - DNA, 355 bp, Zea Mays
gatgcagtggtgaccaaagcctgaggatgcttagaatacatcctgtcctttgtcatacggtgaagctcaactgatcaggtcgttaccccttctgcatagcaatatgccatttatgacccgcacgtggcaagtgatgactatggttaaatatatatgatttcagaatgacaaatcatgaatcagttccctaaacaaatggtgtcccttaaaaagatggcctctctagacaagcatcaaaatctaaattccttgtgtgcattatttcaatatctgcaaaggctcatcgatggtgaaattctagtataaccatatccacccagctatgtgtacagtgacttattaccctggaaataac

SEQ ID NO: 101905 - DNA, 667 bp, Zea Mays
tgatttctatgagttgaacttgacgcatctaaaccgtaattccattctgcaagtttccattttcgtacatctgtgcgaggcctttctcgggattctcccccacttcgatctctggtaatatctttatcactgtcggtccgggatggctgggggacaacactggcttgttggtgatgcaagtctagagcttcgctggcggaggaaagcagagtaccttgacattcctcttaaggacaatatcaaggggtggcgcctggagtggttcatcatggaaaacccctgcaaatctctcccccctcggtcgggcaggcaaccaaatgtccgcacacctagctggatagaatctccgacctcttcggagataacagaggccaaagtactgcttgctgagatctgctcgctgaaggatgggggtctaactgctgaagctgtagttgctgatttcgttttcaagaacatccaacccttgaaggacagagtttaccccgcttacttatatagcggcgtcaatgattccacccgggttatgaataggaggattcccactgaagatttgctgagccgattcgacatgattttgaggggcagagtctcaaatgctggtgctcctgtggcatactctacgtggaacctgccaccacataggccattctctgaattcgtctcc

SEQ ID NO: 101906 - DNA, 381 bp, Zea Mays
aacggccacttcggtgagcttcaccaacaaacatggacactagaatgctagatcagaggcgttgaaccataccgtgcccgcttgatcgcatgaggttgctatgtcggcgacatggtcaccaggctcgcgaaagcactgagcaagaaacttgagtaaaccttgggtataattttggggaagggaaagtgatagcactacacagatgtgaaccacaatgatccacggtgatcttggctgggcttggagatgacaaggatctttcccctgtttgctctttatatggacagagaaaagatcaagcaatggctggatggaagtacaacgaaggatactctagagggttagcaactgcatgagcgtgagtgcgcggctcaatcctag

SEQ ID NO: 101907 - DNA, 378 bp, Zea Mays
cggatactacatataatgaggcgattcaattaatttcgaatcaattgaagggatgtagaaggggcggggcgaacctgatggacattagcggctgaactatgtaaaagaatggggggaactcgaaagactgagaggggaaacgaaccagggaaggagaacgacggcggtgaatcgatgaacaacggagattacggcggtggaagaggtgggggcggtcgtcgatggcgatcgcaggagcgaatgacgacgacggggaggaactgatttttttagggtttgggtggacccgagctgaattaattgaaaggtgtctgttgtgtgtggctcgttgaccatattagctcggtcggcccgcgggggagcggcgagggactgtgg

SEQ ID NO: 101908 - DNA, 434 bp, Zea Mays
ccgcgagggagatgaggctgggactactgagacagctctcatttcagagatgatgaagcgttctaggttggttgtgcaaaaagaaactatcaccaaaggtgctgctgataccaaagctaaacagaccgttgccgaagttgatagcgaaaatgaagatgaggatgatgacaacatcctaagcccgagcaaacccagccatatcgaattcaggagatccacagttaaggcaaaggatctagttttaatgaagaaactaggatactttggagagaatgatgacgaactggttcattttgctggagaggaggtgattccagagccaaaagtggatgaagttgtagtcttcaaaagcttcttcagggcaggacttcggtttcccctttatgagatggtcggtgaagttttgaagaagttcgaaatttacctacatcaac

SEQ ID NO: 101909 - DNA, 449 bp, Zea Mays
gtgtgaccttgatgatgctgaacccaatgggtgtaccatccgcattgttgatgaagatgaggaagaggaggatgaaatccctctaattcggaagaacagccggcgctacatagccagcggggagagtagtggtgttccttctctagctttgtctgccctcattggtctgcaagaactgtctctggcaaactttgatcagactcttgaattcatggtcccagagggtctgttgtcagagccggtagatggtggaatgatggaagtttgcgctgatgtgcctgatgccgggttggagttatcccgagtggcgtcccgtgcctcatcgaccttggagcgcggtcttaagggtcaggaggctggtctagattgccctgctcccatggaagtggttgaaggtccttcagccttagaggtggctgttacagagagcttggccctcaaggatggcg

SEQ ID NO: 101910 - DNA, 776 bp, Zea Mays
gagcgtcggaagcagcttgttttgcttcggcagcggaggaggtcctttcaccaaattcaggcactacgaccgtttcaatatattgaggccagtgggttaaaacctttattttcttgcccttcggcacaacagtggtggccgaagcggcagttttcgtcttttttccttgccttctcaaggggtagcagtaaacaggatatatgaagccaattgcatcaaaaaaccctgttcaatcttttcttgccccgacccccgaaggctgaggacaaggcatcatcctcggctctggtatatgtaccaaccaactcgtcgctagtagcctcaatgcatttcaaccagtcatcatttggttcctcaaaccgatccctgaatctaaaggtatatttcaattgaactagtccaccttcgctggattcagcagtagtctccttcggcatctcccagctgtccacatgtggccatactctgtaggctatgtgctgttgaattatgtctcttgtgccaatgaaagcacagacattgctaaaagccttctaacacgcttcggcatcacttccagtaaccactttcggccttcaaaggccgaagcgagaccagatggggcactggataatttccttaatatcctccctctcaatcagattattcttaacataaaaccattcctccatccaggccccgtgccatctttttcggtatgtcggaaccggatagcttgcattagagcgagcaatgaatccgtaacaaccgaagttgttgtgatactgctccttgcc

SEQ ID NO: 101911 - DNA, 459 bp, Zea Mays
cagctctaaatggtcgttggaatggtcacctcccctcagctacaagtgttgatgggcataattggatgtttccagtggcttttggtttcttcgagtcagagacaaaagacagttggatttggttcatgcaacaacttcgtaaggccataggagaccctccagttttagccttttgctctgatgcatgcaaaggcttgacatcagcagtaaatgatgtatttccaaatgctgaaaaaagagaatgctcatatatctgccggttgtatgattggtaagtttgttgggtgtttagtacctgatgtggccgcgcagttcaggctcgtggaggagtgctccttggcgcgaatgtactcgcctgaaggcttggcaacgatcgacaccgacaaacgactgaaagccgaagccacttcggcctcactgtccaactcgacatcgacgtcgaggaccaggcgtttcttc

SEQ ID NO: 101912 - DNA, 608 bp, Zea Mays
tcttggacggatttggcgtaccacgccatgccaccatttggtgtgtaccataactagtctctaccatttactatgcaggccacacctatatttggctcgtggttatacgattttcatggatggttgccccttaaatcggtccttaagattcatataattcaggtgataaacacaaacaaggaaactaccgataacctcagactagccttgagcatgggccacccgacttaacctgcccaaaaattctgatcccaccgacctgaccaatgcaacagattggcacaagctatagtttttgacccacaataattcacgggccacccatgggccatgaattttgacacaaatcccaatccaacccgaaaaccctgacctaacccaaaaaacctccgacccgactcattcaacgactcattcaacaagaaggcacgaatcaacccagtctgacctaacactaggcacacgtcgggtgtgggccataccaaacaacccatagatcgaacttacccgacccgacccgaggtttgaagagatgtactccggacatagtttccaaacttatggtatccccgacgtagttttcgagactgttagtaataccgaacaca

SEQ ID NO: 101913 - DNA, 880 bp, Zea Mays
acagaacatgcgagatcaaaccatccacgttgtctcttttttgttcgccgtccaatcccacatcaatggtggagatatcctcagtgagcactatatacatcttgagtcgtcgtcttaaatcgtctataagcctcctcatcgtttctcctacgaccccatggccctatgtacgtccgcactgtgtccatcctccatgatctcgctgtcttcagacggccagcgtaccgtcgagctcgcgccatcctgtctcgtcatcattagagacctccatggggacctctccaagtccctcttcgcgctacgcctcaccggcctcatgccccttcacggcctgcggggcctaccctcattgtccatcccgacatgctcaatcacttcacgaaacacaacacaacaactctctctgagctatggttgtctggatggaaatgtatgctaggattgcgacgaattactcctatcaaggaacctcgtatcggtaactggttaagataacgagttggcatgaactaggtcgaaccatatcatttggctggtgattcgtgagtcatgactcacgagtaagaatggcaacagacgcgatttatctgcgcatccgtaggtaaaaaccttgtgggcacagatgttgaggcggaggctgaacatgacctcaatcaaaggacgcaaaggctcgacgcctcgacccctcattttaactaaccatacttgcacaagtccacgtgcgaccggggccttcgctatatagcaacttcgatggggccttcaacttaacagttaacgagaccgattacggggaagacaagcatccggacgaaggcccaagcgcgggacaagcatcgagatagagaacttcgccatccacggcttaagtgccctcatc

SEQ ID NO: 101914 - DNA, 584 bp, Zea Mays
gtttaccaagtatgctcacttcattcctttaacatatccttacactgccagttctgttgctcaagtcttcatggtcaatgtgtacaagctccatggtcttccctcagccattatctcagatcgggatccagttttcaccagcaagttctggcagcatctcttcaaaatcattggcaccaatctaaaactcagctcgtcctaccacccccaaacagacgggtagaccgagcgtgtcaatcaatgtttgcacttgtcccaaaaagtggaaggattggttatctgcagtagaattttggtacaatacaagcttgcactaggctctcggttgttccccatttcaagcattgtatggtagacaacctaggacccttggtctcaccatccatgacgcagcgccaaccaatttgttagcttggttgtaggaacgttcagtgacacatgagcttcttcgtcatcatcttctgcgcacccaagcccgaatgaaatgacatgctgataagcacaggtcagaacgtacatttcaagagggcaattgggtatatctatggctcgaaccatatgtccaagcttctgttttgccccgt

SEQ ID NO: 101915 - DNA, 756 bp, Zea Mays
atcttagaaagttttacccttagcaagacctcaaaagctatcgaatcaacattgtactctgtaattggagaatacatcatcgataaaagattccattctcaaaggcattcaaactgtcggttatcaattgacttcaattcaattagactgggaaccaacatgctcacttgactaagggtgaccactataccctattaacggagcaatcggcttaagtcggcgatgacttaagatggtgcaacatgctcatgcttactcgacttagggtgaccactataccctactaacggagcaatcggcttaagtcggtgatgacttaaaacagtgcaacatgctcgcgcttactcgacttagggtaaccactataccctactaacgaagcaatcggcttaagtcggcgatgacttaaaacggtgcaacaagctcgcgcttactcgacttaggttgaccactataccctactaacggagcaatcagcttaagtcggcgatgacttaaaacggtgcaacatgctcgcgcttactcgacttagggtgaccactataccctactaacagagcaatcggcttaagtaggcaatgacttaaaacggtgcgacatgctcacgcttactcgacttagggtgaccactataccctactaacggagcaattggcttaagtcggcgatgacttaagacagtgcaacatgctcacgcttactcgacttagggtgaccactataccctactaacagagcaatcggcttaagtcggca

SEQ ID NO: 101916 - DNA, 401 bp, Zea Mays
tgcctaatgcatgttacatgtttatgcatattgatagttgtggcatgacgttttttttattgaaaacttaactcaggatcatagcatgtgtggccccatttggcaaggctccagttccaagaaatccgtatgtggatgtggatctgtgacctgtggggtacacctgagttatttggttgagctgttatctttctattctagttaaaaaagtgtctcgactttcttgattttagcataggaaatccagatccgagtttgagcctagagctctcccagtatgaactttgttggttttaaactggaaaggtgccccaagttactagatgacctgatctagcttaacaaaattctttgtccttgatggactttcttataattaaatagtaggtatacctactgat

SEQ ID NO: 101917 - DNA, 806 bp, Zea Mays
gcaaatttggttaaatgaaggatacccaagcctccgcactcttttggccttgcggaacggagccaatttaccttgcatttacctcccgtaatttgtgcacacccagcccaaaggaattttttccttctcgagacaattaaattcaatatttccttaggagcccgtaaagcagagagaaggtagattgtttgggaggtaatgactgacttaactaaagttagtctaccaaccatagagaggtttttcccattccagccactgagcttgttcgaaattttgtcaattaagaactgtaagtcgctcttcttcagtctggatgatgagagcgggaggcccaggtattttaaggggaaggtagcccttctggccggcatattccttaggaccacgttgagatcaataccttgacaacagataggcacaactgtggacttatggaagtttgtcaacagccctgacgcctcaccaaatagcccgagcagctttagtattgtctcgacctcctcttttttggtgcaataaatgaggccgcatcatcagcatacaatgagagacgaaggcaaggcgagcgacccctgattttgctgagaagtcccgtctctgttgtcaagtctaaaattttctgcaatgggtcaatggcaagcacaaataacaatggtgagagtgggtctccctatctaagtcctcgaccatgagacaaggagggattcgagaccccgttaacaaagaccctttaggtggatgttgagagggtggctgcaatccaatctctccaccgagaagggaagcctagatgttgaagcagc

SEQ ID NO: 101918 - DNA, 837 bp, Zea Mays
gacccttcccctttctatttcttcgcaaggtgaggtccccgaccgaggacagcggagcagcagctccggtgagcctgtaccggccaagatacgcaatgaccggcgctctagagtggttaacacctaattcgacccctaataaccatttcctctcaaccaatttcaacgttctagcccctaatctctctgcccacggtgacagagcgatcaacggataccccaaagcgttcccggtgatcctatgtgttctagctcaattggccgggtcgagaagcatcacaagcacacaaggatgctaaaacaagaacaaggagggcgtgataggacctgtgaagggctgaacgtggcgagctcacacacgcggtgttcttgaccgattttggggaaatctcaaattggggcacgctggtggacgatctggggcacgggttggtgtattgggtgtgtgactacctagcggagccgctggcacgctcaatttataggacccgagggaggtggcccatgaatttgagatggcgcggtggtggccggagagagggactgaatcactggcgcggtgaccgtggctgttaccgtggcaaggccttaggcaatagaagggctgtgtattgtgatcaattgcgacgtgataagatggctgacggcgtggcataaccacgaggaacgatggcacgacggtgagggtcgcgtggccatgtcgccggtaagtggatgagcgacagagtggctactgtgctccaagttcatccacggcggaatcttttcacccggggatcgttatctccgtttaactgggcgtgaatcgcggcgccggcgtgaatccgagcgcaagat

SEQ ID NO: 101919 - DNA, 387 bp, Zea Mays
cgcagtaattcaatcggcatggtaccagcagactctgaggcgctatcactacaaggccgtgcgactatgatccttctcagtaggggacctcgtcctccaccgaattctaacgggggagggacagcacaagctatcgcccttatgggagggaccatttatagtagcagaagtcactcggccgggatcatatcgtctcactcagatggacggcacagaaattgggaactcctggaatatagaacacctcaggaagttttatccctagctgtatttcaaaagctatcgggacgacgatgtactctataaaatgggaaatatgtcatcaataaaaaaggcttcaaagatactcagtttgttcattgacttgcattcttacttaactcgggg

SEQ ID NO: 101920 - DNA, 335 bp, Zea Mays
gagatacgtggaacacattatgcacatccgatagactatccggtaactcgagttggtatgccatctccccaactcgcctaaaaatcaagaatggtccaatatagcgaggggataatttgcccttaactttgaatctcctcattccacgcagtggtgacaccttgagatacacataatctccttcttcaaattccagtggtcttcttctattatcagcatagctcctttgcctggtctgagctaccctcaaattatcgcgaactatatggacttgttcttctgcctctcgaataagttcaggcccaaagaattgtcttcctccagtctgatcccaa

SEQ ID NO: 101921 - DNA, 273 bp, Zea Mays
gtaggctattcaaatggtgctggtagtgtgttttgggggatttgttaggttggtccaggtgatggaatctccaatccaccctattagttacttacttttcatcacaacatggtatcaaaaacaaggtaacataagttagaaggttcagaccttctccctttagttacctcttctatgaagggtaactcaagagtgaagatataaaatgataatgtggatgaaataataatgtgtgatagagcaataaacagcgtggtgtgacactcatctcgt

SEQ ID NO: 101922 - DNA, 610 bp, Zea Mays
ttccaaaacaacatctaaaacgctagccattctcctcttccttggagtcattgttgtagtcgttgatagcttcagcaaccctgccacagttgggggactcagcagttttggctattcttctattgtttcctttggccctggctcttttaccgggtcggcactagcttcgactggcatggcaggaactgtttccgtagctaaggggacaacttcgacactttcaataaacttcacctaaaccttttctagcagatgtagcttcgacctacgggtcaggaccttagctctcttcggctttagtgcaccgaaagaggtcgaagtggtagtttttctctacactccttgttttcgagcaggaaaacaatagtcaggataaacaaacccgatcacatcaaaaactctattcagtctcttttttcctcgagcaccgaaggcaatgatcatggctttgtcctctgctttcgtgtagcctcccaatagctcatcactggttgcctcaatagcctctagccaatcgtcattcggctcatccaattggcttctgtattagaaggtgtatcttagataaaccgggccaccttggctggagccagcagcagtttcttttggc

SEQ ID NO: 101923 - DNA, 315 bp, Zea Mays
gtagttagtatgtaatgtagtgttggatcaaggggtcagttggccgactcatgatgtgtcggtcttccttttgtaatgatccctgtcttatggattaatgaagtctgtttcatgccatttcgctgttgcgtattctgttcttttgtctgacgttctgttagcttagagatactgaccgaatcctgctactctgctgtgaccaaaactctcccgagccaccggcttgtccttctgcgcccaactcagtgtgccaacctgtacttttgtcgatgtcctcttggcccctgaaccctagttccaggtttttccttcgcc

SEQ ID NO: 101924 - DNA, 366 bp, Zea Mays
catgactacaatcacataacaagaaggcagtagaatagattagggttcaaacacatgtcacaagcacagatcacaagaacaagcactagattaataacttaccaaaggcggagcaccagatcggtccctcaccgctacaatcacagaataagaaggcagttgaataaattagggttcaaacacagatcacaagcatggatcacaagaacaagcactagatttagaacttaccaaagccggagcaccatgtcagtcccttgtgactacaatcacagaacaagaaggcgctagattagggagcacaaacatagatcacaagcacaaacacaagattagcaactcaccaaagccagagcaccagatcct

SEQ ID NO: 101925 - DNA, 382 bp, Zea Mays
tcgatattttccacccagcaacaaaaatacccccacctggaggaaaagactccaggctctgtcaggaggaaaccccacagaagatgaccccaccattgtctacatggccggatacctccacaccctagacaaccactacgatgagatctcctcccactgcatccacctaaactcccgagtggaaagcctagagcagcaggtcaaagagcttaagcaagagaaggcatctctccaggagagtctcgacatagcagaaggcgaggaagccaacacccgtgaggcctaccgaaccttaaagatggactatgacaagaagctaaggaatctcgatcccaagaagaaaatccagaagaagaccaccaaccaaggatgccaaacagag

SEQ ID NO: 101926 - DNA, 428 bp, Zea Mays
ctagcttcgtcaaattgttaaaaacatccaaatggccagagtgcgatcaactgcaagggtgcctcgtggaggagaagggaccgaggtcactgagacagcgccaatttcagaagtcatggaacgatcaggactagttgtaacagagagagctattgacgaaggtactcctgatgccgaagctgaacaagttgttgctgaataagaaaatgttgatgaagttgaggaagattacagtattttgatccccacaaaacccagccatctatattttgagaaatctactgtgtccgaagacgacatgcccatgatgatgaagcttcgctactttgggaaaactgaaagaaaacttgtccgatttgccggagaagagactacccctgcgccgaagaatgatgaagtagtggtttttaagagcttcttcagagcgg

SEQ ID NO: 101927 - DNA, 822 bp, Zea Mays
ggacttagaaaattctaattttccttttatgctcaactctttggtgaaccttttggggtttttctgaaatatttttggggtcactttcttactatcatttgtagggtattaagtgtactacatcttttataattggcccaagtcatgatcatgtggctttcatagccttttgataatacttacttctagtgctccacttgtccaaaggggtttgaattagggtttgggcaattctccacattatatgtgcatgacaaccaaggtatgacttctaggatgggttgcacttacttaggatcttgagctccaagtgtggtgtacttttcccaacttaagtcacatgtgatgatgggcttacttgtgtagtcttgggtgaaaaccctaagtaacacctggggtgttacagtgtagcactgcctccgaaccatagaccatgaagaaaggagtatttccgtgcagagctggctaggttgagttctcatgctccaaacaacatacggcaactctctaatccactttcctgcgaacttctcattcttgtcgaaaactttctttctgagcgcttccaatatcatcccgttggctctttctacctgcccattggctcttggatgcgccaccgaggcatatttgatctgaatgcttttttgttcgcagaaataaaaaaactctgagcttgtgaaattggatcctaggtcggttatgatgctattcggtattccgaaactgaatattatgtcttgtatgaattccaccgccttagctgaggttagagaagcaatgggtttgaactctatccatttagtgaatttgtcaatagca

SEQ ID NO: 101928 - DNA, 526 bp, Zea Mays
gctatgccaggctttagttcaatagagaattccacatcatgctctggcggcaaacccgataactcttttggaaacacatccggaaattctcgcaccaccgggatattgaccaactcttcgactaccacactataagcccttctcagaacttcttctagagaaaacaactggacctttaactaactttctcctaacattgtatttatctgaatagtctgttttttgtgtcaataatggcttcatgttgagctagccaattcatacccaggatcgcatctatgtcctggcccttcagcactatcatattggtggggtaggtatgcccacccaattctactggcacatgaaatgctacttcctttgtgcctaacttaccccctggagattttacaataactcccatgtttgtttcttgaattggaacatcatgatccacaataaaagttctactaatgaatgtatgagatgcaccagtatcaaaaattactttagtaaaatgatgggcaacaaagaacgtacccatcag

SEQ ID NO: 101929 - DNA, 831 bp, Zea Mays
tgccccaaacatgagatcggcaggtagcactgcctccgaaccatagaccatgaagaagggagtgcttccatgcaaagctcggctaggttgagttcttaggctccaaaccacatacggcaactctctgatccactttcctgcgaacttttcattcttgtcgaagacttttttcctgagtgcttccaatatcattcctttggccctttccacctgaccattggctctcgggtgtgctactgacgcatatttgatctggatgcttctttgttcgcagaaatcgaagaattctgagctagtgaaattggatctcaggtcagttataatgctattcgatattctgaacctgaatattatatcttatatgaactccactgccttagctgaagtcagggaagcgatgggtttgtactctatccatttagtgaatttgtcgatggcaaccggcacatgagtgtatcctccctgagctttcttgaagggtccgatcatgtctagtccccagcacgcaaatgaccatgttacgggtatggtctgcagttgttgtgctggtaaatgctgctgctttgataagtattggcaaacttcacacctctggactagctcggctgcatcactctttgctgttggccagtagaaaccagacctgaagaccttcccaactagagtcctggatgctgcgtgtatcccgcattgcccggcgtggatctcatctagtagttgcttcccagtagccgaaaggatgcacttcatgaggactcctgttgtgccccttctatacagtgtttccccaatgagagtgtagtgagctgactaccttgcgatgcgttctgt

SEQ ID NO: 101930 - DNA, 367 bp, Zea Mays
tgggtggtggtggtggtagcggggtctatgcagcttgtgaatggcttgccgaagcaactgatgatgtggactgctggttgcccacatactcggggatgtatggggaatagcacgaagtagtatgcaggacctgcttcggctgattgtgtcgtgcttcggcttcagctattttcttttgttattgtatcgtgacttggcacgtccttgttttatgtcctttgtcttctccacagaataaacaaaacaaccttcttggttggtagctgaaccttccaccgaagcttcttcctgctctgcctcttggagctggtggactgaaggagctttgttatgtttctgatgtctgagagttgtcttgatgtccttg

SEQ ID NO: 101931 - DNA, 470 bp, Zea Mays
ctaaacattatacatcaatgttcgagacagggcacttccttaacctgctgcaggatgttctgcatgcattggaaacctacgtccgacccatgtatgaggccaggcgagtgtgcgagccttctcgggcttgctactacatcactcgcattcatgtcagggtaatggatgcaggtgataaagggttcaggactctatcagctcatgagtctctgacaccgctatccacctacgctgcttcggtcagcaatgctgctaggcgaactctgtggtccctcatgagctgaagaagattgcctcaacaccctagctggtgtggtggcaggtcttaacaccgacctggatagtgctagcctggacctctctagggtacacttggaactggaggatacacacataaggatcgcagcctggaagctcaactagaaggaaggaatccccctgaagttcaagtccctgccatggcattatcc

SEQ ID NO: 101932 - DNA, 551 bp, Zea Mays
gccaaaccaagaatcatcattttatgtgaaccaaattgagcatgagcatcaaattgacttaagaatgaagaatccaccaagcctatacttaaaagtatcatgaacaaaacaaatgggtctttcaaaaaggtaataatgttgcaaccctaataaaaaccctaagtaagccctatgtgaaatattcaagaaaatggggaaaagggtatgaaaaatttaaaatcatggcttcagccaattataaatattgaagtatattcattaagcaacaagaaaggttcagaaagcttggccaaaataactcaaataaaaccccaaatgaagcttctcatatggggactcaatggggaattctgaatttcagaccttgagccaaagatcaagtgtgttcaccttgatccctaactcaaatcctaatggccccactaacaaaaatgtgcctaactaacccctctgtcgtgtgccagaagatggcattgggacgcgagccctagacacgacaaaaccctagatttgcctcaggtttgagcagggagacagaccggatttccggg

SEQ ID NO: 101933 - DNA, 455 bp, Zea Mays
cttgagatcaacttcgtcttaaaatgcgcgaacactgaaatggccagagttcgatccactgctagggtgtctcgtgagggggacaaggccgaagcgaccgaaatagcaccaatatcagaagtgatgagacgatcgggtcttgttgtgccagaggagtctatggccgaaggtacctccactgctaaagctgaatagatcattgctgatggaggaagtgagaacgaaggtgaagaggacaacaccattctgagcccaatgaaacctagccatattgaatttggtaaatctactgtgacggcagacgacatggttatgatgaaaaaattgggctactttggcgaagccgagagcaagctcgtccggtttgccagggaggaggtagttccgcagccaagggaggatgaaattgtggtttttaagagcttcttcagggcagggcttcgattccctcttca

SEQ ID NO: 101934 - DNA, 384 bp, Zea Mays
cgattattacccagatagaaccattccctttttgcgttcggggcagtccgattacgaaatccatgcctatgtcttcccacttccattcaggcactgggaggggttgcagtaggcctgtaggcttctaatgttcggcctttgttcgctggcaggtgtcacaccgggccacatactgtgctatctccttcttcattcctctccaccagtatctggctttgaggtccaggtacatcttggtggttcctgggtggatggagtaagctgagttgtgggcttcattgagtaggacttctcatgcctctcccattggtacacacagacggttcttgaaccaaaggactccttgttcatctgtcctaagatccggaagttgctccttgcgag

SEQ ID NO: 101935 - DNA, 481 bp, Zea Mays
ggctttcgagccgttgattccacaggaactgttaggattacaatggaacgtatcggttggggtagagtggatctgcatcgctggatggggatcgaatgtgtatggttctatctcagagattttagatcctgatcgtcggtatggagttgagcggctgagatttgtttgccttaccggattcggggtgtgcgcagatcagtcgttggatcgtggacgtagagttgggaccagatcttgtgctcattaaaccatggcccttgatctcagatccggtgagccatgttgcataccggttcacggggattaggtgtcgatccgtgctgcccgcatcagatcgaacgacttagggtgatcgataccccttcggcaagaatatttgctaaagaaaccctacgcttttatatattcaacatgtgatccacataagtgaatagaccatcacagtttattccaaatctatgcaaaaccgaccatgcctttg

SEQ ID NO: 101936 - DNA, 513 bp, Zea Mays
gtccggcacaagcagagcagcaaaaaggggcggcgcatacgaaacacgcaccaattgtcggcgtgagcagagaagcactagcacgggcagagcgtcatcgttgattggaaccggtggaggagcagagggactatgaaaagaaagaacgaatcatttgggtggaggactcatttgtgaaaagaacttgacgtgcaggcggtggtatgcaaaataacaggactctctatttcatacgcgagatgtgttctagacggccaggatgatgagtttgcatggtttcacttgggtcttggtttgcaccagatacggagccatcaataaaatgatacaaacccgtagaccttttgttgcattctatttttgttgccacattaacaagttagattgcattatgaatacattgatcccttctttgcaaacacttagataactcatttatgtatccagttattgcatacattaagtgcacaagcaaaataaactcaaaggtttaaattctccaagcataaaatg

SEQ ID NO: 101937 - DNA, 607 bp, Zea Mays
cgaaatagtgacacatctaggagcagagggattggcgaagatcgaattccgcagcagggcaccgaaccgaatcgccacgtccagctgctggggtcaccggtctggtggagttgaaggccagggccatcgccgtccccgtcacgtctaaaacagatacagactagtacgtagtaactactagcgaccaattggatgcacagaggttgacatcgttgacatattggcatgagcaagttggcagctaccttacctgcggttatgcttcacatccagagagaaaatttggtaccagacgtacgaacacgaaactcattagcacataatgaaacttgttccgcaaataaaatttgcaacaaagattttgtcgtcctttaaaaaatccatgcatatgatctgtgggctagattcaaatgttcatggctcctacatatcctgtatcaatcggtatcaagatctgtgcatgtggatcaagtatattaagtattctggttctagtacttccccattgcaaaaggccgaggtggttttgcgagatcccaaagtcagacgtagaatccgccatggtctgacgagaacccgcagtccgcgggggtggcacaggtattac

SEQ ID NO: 101938 - DNA, 541 bp, Zea Mays
aggctgttttcggctcatccccttctttaatccgtatctggtggtaccccgctctatgatcgagcttagaaaagataacagccccactcaactcatctgttatctcattgaaaatgggcataggatacctgttcttcactgtatatgcattaagtctgcggtagtctacacacaaccgccactcaccatcttttttcttgacaagaagaacatgtgaagcaaatggacttgtactctgctgaataataccattgcccaacatttccttcacttgtttttaaatttcatctttctactgtggtgtataccgatacggtcagagtcgaaaaggttgagctcctgggattagtggtatagcatgatcaatccacctcttgggcggtaactcttttggctcatcgaacagatggttaaactggttaaccaaatcagccaccaccataggcatgtcagtgggttcactaagtggtacgacttgcaactccagtaactgctcaattgcatcttgtttgacaagggaatcaaactggagacaatttag

SEQ ID NO: 101939 - DNA, 521 bp, Zea Mays
ctgtagaagagggtacccctgattcagggtaccgacagtggcccccgggcccgccttagaggaggatgtgagtctgcaggtggggtcagagtctgattggtggttggcctgctacacctgcgcgcctgttgatgtaattactatcggcccgcctatggtcatgtcgtctgccacgcctattcccatggctgactagcccgtgacctccgtacttaatgttactgttgggccatgcgcagggtgcctcgattcgctgcactggttctgaaaaacttatctttttagacttccgcgacggcctcgagaagacgtggcattggcgcaagcggcggtgcgatttttccgcacccggtaaccggcgcgccggttgcatgacatgtgggcctgggccccgtgttggaccgccgattgcagcgaagctgagggggcgctcaaccgcggggcggttgtacgcttcttgcgtggcggttcgcctttttgaccgctggttacggcgaagatgaaggggcgcttaaccgtgg

SEQ ID NO: 101940 - DNA, 593 bp, Zea Mays
taacagatgggataggattctaactatgggggacagatatccccgggtccactcgggggtgaaaactctacatggggccacattacagtcaccccgcagggacgccacgtcgtgggctgggcaaagagaacagcagaaatgggccgacctaggaaggcgatgggcccacgctcggattgctcatggcttgggcggatcccgttgaagttgttcgcctttctcgcacccgacatcctcaaacgccgaagatagctcggagcggagacgtcgggttttcctcgggatagcaaattttgttcgctattagctaggagataagctggaagagtgtgatcagtgtgtacgcgggaagcgccctacggtcgtgtatataaggcctagggggatcgccatcactttcatcgtgttagcacctcaccactcggtagacaccacttgtaaaacacctcccacatacaaagtcatcccaggaagtagagtattgcgctcctcaagcggcccgaacctgcttaaactcgcttaattctctctttctcgtgcccccgacacgaaccattgagttgcaatccatgacaccgtcctacccaaaagca

SEQ ID NO: 101941 - DNA, 691 bp, Zea Mays
ggaaaaaagagaaaaaaaatagacgaaaaagcaatgcggtagtagtataaaggagagatgagaggaaaaggagaagagatatattcaagagatgaggcaaaaggggaaagaaataaatgaggtatccacgtgttagggcggatacagatagtaggtttggtactctagtgaaagaggtgataaaacacacgctaccttgtaaagcaggagtgattataaaccgtaaaggagtcattgcaagcccgcttgcccgttccttcatcttccttgacccacaacacgatgagatggagatctagtatgatggtatacctcgatggcgtggagccgaatatctatctaaattcatcatgctcgtctgcatgttccttcatctatcttgaccgacaacggatgatattgagaactgtgaaatactttaacggtgtggatgcagatctccacctagactcatcacgcatgcctccccttgatctacctcgatctatagcaagacgaggtggatattgtggacaatgacatagctcgacgtcatggaggtggatcttcgcctcggtttaatatgctcgtgtgctccttcatctgcctcaacctcaacatgacgaggtggagatcgaggatggggacatacgtcaacaacatggaggcggatctctacctctgatccaccacatccccatgcttcttcgtc

SEQ ID NO: 101942 - DNA, 588 bp, Zea Mays
cgccagtgccttcttcctcatctccgaccgccgcgtgtctcgtccaaattcgcggccaccgcccgtcctctctataaattgagcccgtgactagctccgtgaggtcgtcaggtaactagccaccgctaatcggccacaatcatccacccatgtgctcgaattcggagtttcccccaaatccgatttccgccaccgtgaaaccaagctcaccgtcgccagccatactccggttagcccctcccctctgctcccttgtttaagcattcttatacgtctacgatgcttgccgagccattgaattgaactaagagccctctggtcgccgggaacacgaccgtatagtcgccatactcacggccaccgtggccagagctccatagttgatcaatagcgcaattatgttaggggaaatgatcatggtgaccccgatttcatgtccgccgctcggagaacccagccatagccccaatcggccggtccagggcctcgccggagtctctctgcgcgcgtcgccgtcgtggaccgcccactgcgaagaaatagaacctcaagggcctctgtgcaaagcgtcagtgacacaggaaaaca

SEQ ID NO: 101943 - DNA, 371 bp, Zea Mays
ttgacgataggatcgaattccatcgtgtagctataggtttacgtgcgtttataagtacatataaacacaataatctcatacgattttttttctatctatctctatccgcgtaatgattggactactgttttcagtctaccgtacgtaccagcaattacttagtgcctaattcctagctaacttccaaaacttaattacgtgtgtgcatatatatgcatcatcatcacatcacgcagtactgttcgtcacattattcttatgcaccgaacagtagctatatattttgtggactgattggacatgtaatacaacacagaccatatacatgtcacaccaaacagtagctataggtcgatggtccatgtgaccac

SEQ ID NO: 101944 - DNA, 366 bp, Zea Mays
gtaaagtagaactaattatttgcatgaagcattaggagcaaaattgattattggcatggagcctcagaagcaaaaactaaaggacaacagataccttcttgtcagcctttttgtttagtataaggttatctcaatctagtcaatgctattaagttggaagcaacaatcaagtgaggcaagaagaagcacacggaggagaagggctcacatgaatagaacaaaatttaattaatctctcaggaggaagacgaataaagtgatgcagagaggtaggagcggatgggtggctggtgaggcatagcagcactaacctagcgcaacattgacctagcttggtgtagcgcacacttggtggtgagggcatgg

SEQ ID NO: 101945 - DNA, 603 bp, Zea Mays
ctcatgtgcttctttttggagttgggcatccttgtgatgtttcctttttgaaatacctgacaattcatcgtttggcagtgcatctgctattagttgttcttggggagaccattgactttttatgccagaaaataaaatccggttcttctgttttgtagtttcactttcgttcgtactgatctggcgacaaggaattccatagtactcaacaacaacatgttccaagatcatttctctattggtgtgcatccttttgtgtttgttcattagttgtttcacttctagtgacgtttcgacttgccaacacttgttggtatgaggaggtgagttgagatgctttctgtattatcagagcttgtgcatgtaacatcttctctaagtcaactattgagggtgatgttgtggttgatgtcatatggttattggtagtctgctcatgtgctataatttctgctaaatcaacttgttggagtctagctaccacttgagatgttgcttgtagaaactgagcatgtgccttcttgaactgttccatttgatccttagctggaggagttaccaacacaatgtattctttgcacttagtgacatcatttgtagttg

SEQ ID NO: 101946 - DNA, 733 bp, Zea Mays
acgtcatcgtgcgaccgaccatctcggtcgtagagtaggtcgtctgcgtgccgaagaaaatggatcccgccattgccctccatgcgttcgtgcatccggtcaaagcgagtgacacaaataaaaaaacatcagctctatctccgcacaccacccctcctcctgcatggctacatgcaacggccatgcatgcctgctcggcagtgtttaaaatagcgggctaacccatttatccccgaccttctccagcggctacaaaaggatatatcgggatatatctgtagctaaatgttgtagcggttttcactagacagtacacagtagacacttagacagatcctcccatgatcccaattcccagacctcacactagccgctgattgcaacaagcaaagcagcccaaaatacatttatctcacaactagccgctgattccacaaacatccaagtcattgatctcgcaactcacattctcacctacaatttaaaatgcacctcgaacaaaaatagctagccgctgattgcaacaagcaaagcagcccaaaatacatttaccattcacaaatgtaaacagctagcaaaacattcaccagaaaataatatgcacattcagtcagccattcagcaagcaaaacagctagccgctgattgcaacaagcaaagcagctagccatgcacctacctcacctgttcacaaacaaagcagctagccgctgattgcaacaagcaaaacatt

SEQ ID NO: 101947 - DNA, 486 bp, Zea Mays
ctcgaagtagagcttgaagactttattgtctccagtacatccagaacattaaccatcctttttcttttgggggtcactgctggacctttctgggtttgtggcactccaacttctgccggatgacttaaaatttctgatatttttgtcacttcatctttcggctcttcaattttttcagccttcggcgttgtagtcagctcttcagttttctgcgcgggtgtaggttctttggcttcagtagccgaagaggcctcgccgacaaactcgggcactatggccggttcaataaagcgcggtcggtgagtaaggactttcacccttttcctcttcggcacaggcttgcttggagcagctgaagcatcatctttcccggaagttgcatcttttctctttcgcccccgtagagggtagcagtagtcagggtacacgaacccaatagcatcaaaaactcggttgaaccttttcttctttcggcctccgaaggcc

SEQ ID NO: 101948 - DNA, 571 bp, Zea Mays
ggaacacaagttatgaagcgtcttacctcgctcttacaaggttcttaccagcactgcaggtggcaaatggtggctggtgtgacagcccaaagagcgtgggtgtgattgcaaaggagtacctattctgctcgagagaaaggtggagctttgggaaggctcactattatatatttgtggcacacaaatcagcaacagatagcaatgttgaataagtgtccaaagtactcgtcctatctgttggcatagagaatgttgtccggggtaataattaaggatacctgaattaaagctgaggcatctacccgagagtccctcacctcggatagaactctgccttgcccgaggtcaccgccgctccgtctgtctcacccgagccattctcgggcagatgagatagcagcacacaaaaacagggagggaacacccgcatttaatgcgcgtacctaccccacgccgcggcagcagcgcacagtagcggacaagacagccatcacgtctggcgcaacaatatgattacgtctacgctacagtgtgcgcatgccgcctgccaccctccgatgggacacctaat

SEQ ID NO: 101949 - DNA, 722 bp, Zea Mays
atgtttggaagtataatttgattggctctcattcaccccctctaatcacaaggcgtgtatgatggtttactggtttgatgctcataaatctggatggatagtttgggaattaaaagacaaaatttgtgcttcactcattcccctctcgaaatataaaaatgttcccttttctgtgattgggagctacttgttggggatttttttcttcgattttgggctacagtttctgtgaaatacctagactgattttggtgctatgacagggtgggaagttatcttcactatcaattgattgattttaatagcaaaattttcccgttgcatagtttaacacgcttgatagctcagtgatcaagttgaacattattctttctctccaagctttacaaaaaaaaattgcagcgagatagctcattagcactgacacacgcactgtttagctgttggattgagcttatccatatgctgcgcttgctttgccaataattcgacactaaaataacctataggcgatctttttgctctttatgcaagtatgtatattctggtgcaccctgctttctgtcccgcttttctgtatttgagattaaattagtcccggcgggtgggtttggtcgtttgttgccactagcaaaacataagtatgttatctgagagccagccggggtttgcaaaataaagctacggatatatttaaaggtaatcaggaagctaggccaggc

SEQ ID NO: 101950 - DNA, 590 bp, Zea Mays
taaccctgggttgctgtgacaagttggtaaagctttgggttgtgaaccaatttctgttagttgtggatagcctatcattgtctaggttgtgttaacaaaggggctgaataggatgggtgcaggtcagggtatgaattcagtttggggtaggtccaaaagatcccatcctactttgtgttccagttgtttcttggcagtacggaggtatagatagatgtggactcggggttaactaaggataggttcaaacctcaaatatctaaagttcaagaggttaccgatgactcggctacctgtatgctttcctgtccaaacaccatgtgcatgcaagctctggactcagcacgtatgcatcgcgatatggacaaccactgcaaagcctccttgctctatcctgttgccgaggccgacagtgtactgaaccccgttttcatgtgatccttagccccgtcgaccggtggttcatcaaccatgttcacatgtccatagtaaacctggtcaagtcgttcatcctacatgaacccatgccttgttgctaatgtcttcgggtctttgctcatagtgtttggtcgaccttgctaatgtctgac

SEQ ID NO: 101951 - DNA, 274 bp, Zea Mays
agggtatgagtacaacaaagaatgaagctaaggccaggctggcgcgtggcaaatatgaggttacgaccaaaaggcgggattagtagaataccactcccgaaatgagatgggaagttggagattctagataacagacataatgtcatcacaaggtaggatagagtgatgagaagggtaaaggagacgacaaacaaaacacaacaaaggatagagttaaaactcgcaggtggcaaagaagaggatacgaccaaggaaaaagttggtacagtacaat

SEQ ID NO: 101952 - DNA, 434 bp, Zea Mays
ctagcgtgggcatttacttatataggggctccaataaggattaaggggaagtttgtgcgttttttgatacctcggtaaaatactaacacgttaactagagtttgtgcgcttcttgatatcttttgatatctttatgacaagttagattggctaattcacttcaccccctcttatcaccaccggatttatccccaagctttctatctaaagaaatagaggagaccagttagattactatgtatgcaatctatagaggagttcctttctaaccaccttcacatcgttcttcaaaacttggttggccaaggcatgaaagcctccttacgttctatgatgcacaaagatgcgccaacatgattcaagaaggaagctagaccattatgtgaagattgacaattgacttcggtggactgcgttgaacaaggctgaatccc

SEQ ID NO: 101953 - DNA, 1255 bp, Zea Mays
ttagcagcgctaagtgggctgttagcagggccctttaacagtagaataaagacgctaaaggccttttagggtaatatgtaataggaggttatttatactttaattggaatgaaatgagaggaggttgtgatcaacattatgttgatcagccgccgtccctgccctagttattctcctctcctgtcgtctttccctaggccgtgagaaccacaaccacctttcatcgccaaccgctcagggagcggccacccgccacacacagctacaacctaaggagaagagggcataccaatctggtatcaaagatgccgggcaacaatgacaacactgccagcgaagtcgcatctgctgtgacaacaaaccccccactagtgcagtcctagagcagaagattgacaccatgacgaaggccattgtcaatctcgccaccagggtgtccaatctagagatgcacgtgacataaatcgatgggcacacactcccatagtgtccgccaccagcaaccatccagggtttccttacggtctcccaagttatggcagcattccagagacacaggcgccatcgacctccaccatgctagagccagctacagctccaccaccatccaacccattaccaatccaccaaatccccatgccccactcgctgtcacctcttccatcctttccaccatacataccacagcagccattacaccacatcccaacccatcccaccctgtagtattttgacgcaggagctccgcgacactacaagatgaggtttccgacatttgatgggaaggaagatcccctcgaatggctgaaccaccacgagcagtatttcagaggctagcgcacgctcgaggatgacaaagtgtggctcgcctcctatcacctgaagggagcagcacatacttggtatttcatggtggaacaggactgtgcaacggtgatatggcctcaattcaaagagctctgcaatgagcaccttggtccagcactacgcaccaacccattaggcgcattggcccgtctttgtttcctaacaaccgcagatgattaccaagagcacttctcgtcactgttgtgccacacctctgcgttggcacctgaccaacaagtgcagctcttcacggcgggattgccagagcagattaaaatcaacgttgagctgatgaacccacagaatttgtagcaggcttctcgaccagcaagagcatatgaacatcgttcttaggtcattaatggtgctccatagcagcagcaggctg

SEQ ID NO: 101954 - DNA, 500 bp, Zea Mays
atgagtccaaggtggcgtaaacaacagctccttcttcctcgcagggtagaggacgtgttttctacatcgcctgactgctacccctcaatttaatactagtacaagttattactaacgacgatatcacacggtgggtttatttgttacatatttgcatgcttattacaatttaagtgagcggaatatgttacacttgcttgagactcatcatagagcatacgaaactcatgtcaagaattataatacagcggcgcccacaagcgtacatatagttcagctattgtataaatatacttggctccgaggtaggccaggcagcacaacacacacaaccgataagccagctaggtggcatcgtcgtcttctttccctgagctactgatccaatctttggtttgaattgttaatcacaagctcggtcatggctccgtccagcaagctagtcaagacgaactcactcccgagccaccagcgtagccttgtccaaccgctcggatctc

SEQ ID NO: 101955 - DNA, 488 bp, Zea Mays
ttaattctgtctcagtttgcgcttttgaagcttcggcagtttgccctggagtagagcttgaagtctttattgtttccagcacatctagtacgttgatcatcctttttctcttgggggtcgctgtaagacctttttgtgccttcggcactgtcacttctgccgaagggcttataacttctaatatctttgtttcttcgaccactatctcctcaatattatcggccttcggctcaactagtttggctgaggatgccttcggcattgcagtcggctcttcaatcttatgcataaacgcaggttctttggcttcagtagccgaagaggtctcaccgccaaattcgggcactatggccggttcaatgtagcgcggtcggtgagtaagaaccttcacttttctcctcttcgacgtgggctcactcagagcagctgaagtaacatccttcccagaagttgcactctttctcttctgcccccttggcgggtagcgg

SEQ ID NO: 101956 - DNA, 309 bp, Zea Mays
ctatgttactttttctcttctgaaatcaagtgcttcaagtttttcttgcctattgtcggatgggtctttggcaaaactcaacaccacaccactctttctttcctggggcaccctcgacgggaagggggtcttaggacaatgtaaccagagaccccagtgatcgaacctcaggaaagacattgagcatggcagccttaccacagtattatctagaaacggacctatgggatgggggaacacgaacgtatggaaccaccagggaagttggtcatgactatgaacacctatgcctcgaaggctacgacaatg

SEQ ID NO: 101957 - DNA, 769 bp, Zea Mays
ctaatctggaagagcattactatcatctcaggctagtgttcaccaagctcagggagcacaagtttttcttgaaatacaagaagtgtgcatttgtgaaacaagagttgaagtatttgggccatgtgatttctagggaaggagttgccactgatccctccaaaacggcagctatgttggactggcctcaacctaaaaatatcactgaattaaggggtttcttgggactcacaggctactacaggaaatttgtgagtgggtatggagtgatagccaggcctcttaccagattattgcagaaacaacatgggttccagtggtgtgaagaagctcagaccgcttttgaggctttgaaggtagctatgtccactactcccgtgttagcattgcctagatttgatcttccatttgtagtggagactgatgcatgtgatctgggactgggggctgtgcttatgcaacaaggcaaacctatagcctatctcagcaaggctttaggggaaaggaacaggcacctgtccatatatgacaaggaattcctagccttgatcatggctgtggaaaaatggaggcagtatttacagaggagtccttttgtgattaaaactgatcacaagtctttaacctttctgggggatcaacaactgcagtctgacctacaaaggaaggcaatggctagattgatgggtctgcagttccaaattgtatacaaaaagggcaaagaaaatttggtggctgatgctctctccagggtgggaactgtgatggcatt

SEQ ID NO: 101958 - DNA, 691 bp, Zea Mays
cacgggtgaatcggtactcagcgtggtccctcggatctagatctgacggccccggtttaatgaaccccagagcgatgaccatcatccgatcccgatcggacggttccagttacccctatccgaaacgctacgcagtcaccacatccgggccatcaaatggagatccaacggcttcgatcacactctagagaaacattacgtgggttccaatctcgaccctcaatcttcgcatcaaaggccagggacattcttatttctcgcgtcaaactcggtcacggcgtccatctaccccgccggctgataaccgcggcagcgccctccatttactgcgacgcgacgacccgccctagagtattggttgtgttagcacacagatcacaggcggattgaagaagagaaagaggtaggcgagagagatagcttgggttgggaatgagacaacagagagctcctctgtattcagtttctcagtaatttaatacccctgcccaaagcagctatcgtacttatactacgacatatggtccacggaccagtgaatcagtgacgtagcgccacatacaagagactcattcacctttcctaacattaccctcttcttaaaattcggcttggcctcaagccgatgtgtagcattacttccaccaggatcccaggaaaattgcaagcaccgaccaaaagtaacaggaac

SEQ ID NO: 101959 - DNA, 549 bp, Zea Mays
gtctgaaatcagggttatagacccaactttggggctgtgtagctttcaaaatattgagaattcatattaggtcaccacaccaaatttgtagagcagttaaaggagaacaactttgcttaagagagtgagcatagttgctatgtagaattctgagataaatgagcctaaagttgggctgtcaggctgttatggtctgaattttcagactagcagtgaactaacctcgacttcaagctaagttttgagcatgatccagtggaaatctacctatggttgccatagcaagtttgtagtgggtatcatactctacaagtttgctgcaaggattaactcgtgttaccacaggaatttgggagaaaatcatgctccaatttgatctgtcagtcaggctttccactgaatccggtgcactgttcatcggttttcagtaaaatcgcgcggtggataagggttggctcgccgacgataaggatgtcgccgtggcttgggtaagacgtcggcggccacggcaaaagttaccggcgacgtgtcaaagtgtcactgaggtgg

SEQ ID NO: 101960 - DNA, 1016 bp, Zea Mays
ttgagattcccctcaaggatagtattaaggggtggcgtctagagtggtttatagttgataattatggaaattctctcccttcctggtcgggaagacagccagatgttcgcactccgagttggactgagtctcccacggatcaggaagtggctgaggcaggtgtgttgctggctgaagttggactgctgaaagagagaggtctaactgctgaagcggtggtcactgactttgtttttaagaacattcagccactgaaagatagggcctatccggcatatctgtatcgagggctggccgactcaactcgggttaccaataggagaattccttctgtagacttggtaagccgacttgaaatgatcctcaggggtaaagtttcaaatgttggtgctccagtgacatactaggcctggaacctacctcctcccaaagccttcaccctttttgtgtcaaatccgcttgtgactgatagcaatttgggccttagagtgcgaccctctgatgaagaagtcagtactttggttgcttcgctcggggaaattcctgatgatgaacggcaggtttattttgaagtgcctctgaaccctagtgatgccgacataaatgacatgcttgatctgttagctgaggattcatccgatgctgctcctgatggtacgttggcagtggtgcccctcccagaggttgatacaactttggatgtcccgaaacctgttagtactcgcccgaggcgtcctagccgaaccagtcagcctgagccttctgctgacaagcaaaagaaaaagagaagacgcctccggcgagtatccagttttgatgaggacgccagtaccttagctcctgctgctaaagaaatgcctgcgactggccttaccgatgctgaccccaatgggtgtgcccagactgttgctgatcccaatgggggtgctgcctgcgttgccgctgtggaggatgaagaggaagaagatgaagctcctttaactcggaaaaacagtcggcagttcatcgccagcggt

SEQ ID NO: 101961 - DNA, 901 bp, Zea Mays
caagagtccaactgaatcattgaaagagcaaatggcataatcttgctaggaatcacaaagtcgctggttggatttttgaagggaaaattgaaagaagaattcatcaaagttgtgtggaatcataacacaataatatcaagatctactggtttcacatcgttcaagctcctttttggggacgaagctattacttcccgaagaaatcaagttggggtcaacaagagtcatagcttcggctcaagagcatgacaacgagaaagttacaaaggattcaatagaagagtcaaggcttgaagcaatagagcatataaggaaatatcaagaagaaaccataagatggagagataggaaagtgaggctcaagagcatagcactaggacatcttgtgctctaaagggtggctaacctagatacaacaggaaacttacaagtgaagtgggaaggcccctttctggtcttagattcaaatagactaggctcatttagatcgaaggacataaaaggaaatgacattccaaggtcatggaatgttgatgagcttcgaagatatcacgtctaagtccatgcttcagtaccctttttccttacaagagaggataacgttttttaacgggatcaaagagataatatttgcacaaagcataccaaaaagtcaataaaggtacatttccctaaagaagcaatcatgcgaagcagtatcctcgggtgtagagaatcaagatcgaagaagggttcgactttcaagagcccaatacgaaggtaaagctttatcaccaagtaaaggtgaaaaagctccaaagtcgttcctaaaggaatgtatagctaaaagttttatcaccaagtaaagttgaaaaagctctaaagtcattcctaagggaatgcagagctaaaagttttatca

SEQ ID NO: 101962 - DNA, 336 bp, Zea Mays
tgtgcttggttaaccaatccattcctaagatcacatcaatcccttgggatggcaagacggttaagtctgccaggaacactaccccacttaaaagaattctgacttcggagcatttgagttggcatagaaggtctgaccctggggttcgggtgaccaagggaatctctagaggggtagaggggatgccatgcttttccacaaaactagtggctataaaagaatgggatgctcctgaatcaaaaagtacagtagcgggagaaaattcaacaaggaactcaccgagcactactaccggagcttgctgagcctcctgagcatcgacgtgatttacccgtg

SEQ ID NO: 101963 - DNA, 413 bp, Zea Mays
aaaagatccaactcctcattaggtccttcatttgttgttcccgatggtccggctcccattgcagcaacgtcggaaggcacgtctgggtgcagtcaagcatacaatacatgtacttcttcatgtaaagtattacagtacacttgcaggctgtcgagggccgcactaagctctgccacacgagctcgagcttttgcttcgcggtcccaagcgatcgaacatgagttgacagcccaatcaatggttgaatcccgttctgagatctcgtattgcaagcggctgacgtcagctgataattcagctatacgctggttgtcctgcgcccatgccctattccggtggcgtagctttgatcgaagttgttccaccttggcttccaggtctccaattgggtcgttgctaccactactactccc

SEQ ID NO: 101964 - DNA, 651 bp, Zea Mays
atttgagattgccagacaagtctctcatctttggtccatgacttaaaagtaaagttgccctctaactcaaggcccaactttggtacatagatcccatggccaaagcatttttttaacttaggagtggtttacttgcacttgatctctcactaactctaaaacttctctgactctcaacaaaacaacacaccacatatgggttgaatttttgacctagtaaaatgcattctaggaatatcaagcaagatgacgaggatgcatatgatgtcatgccaaagttttagttctcgtaacactaggggtgttacactccacactggcacgaatcgcggcacaggcgtgaatcgcggagcggagaacgtcggcagcgaggttcactaaatctggcatctggttcagtcactgtaccatcatcgcaaactcctttcagtctgtctgaccgagcaacttgcagggctttgctctcaaatgttttgtggcaactcactcacctgcctgtatcaaagttgttgccctatacaactttgttacaaagaccttgctcaaacatccactgaatccccccgcaaatcgatctcaaagttcatccaatttcactgatggtcaagattcagtcttaaggttgattggcagtccaacttcatgtctatt

SEQ ID NO: 101965 - DNA, 491 bp, Zea Mays
ctaaggtagaaggcggctagggtaggaaggcaagagtgggaagtaaagaaccgaagcgcccctctcgaatgaatttatagggacgggcggagtcgccgagacatgggccgagccgtcctgagtccaaaccaggaatgggccatgtcacttcgaattccatgcgcacttgcgctgcaatggttggcatgcgggccaaagcgtcgtggcacattaaatgtccactcttcctgatgtcagccagccaacgccgcttcacatgacgcatcaaaaggtgtttcccctctccctctctccctctgcctcctttttccactacttcacatgtagcagaagaaagcgcctccacctcagacttcctccctcaagaaggaagagaagagacatcacctactgctcagtggtttgaaagtcgagccctcggtgaggctcgggagaccgccctagaacacatgggctccaggcccgttactgatgagaggttcaaaggttgg

SEQ ID NO: 101966 - DNA, 811 bp, Zea Mays
gtcggcccgggatggctgggggacaataccatctcgttggcggcacgagtctggagcttcgtcgcgagaggaaaacagagtacctcgacatccccctcaaggatagcatcatggggtggcgcctcgagtggttcattgtagaaaaccactgcaagtccctccccctcggtcagggaggcagccagatgtccacacaccgagctgggtagaatctctgaccccttcgaagataacagaggctaaggtacttcttgccgagatttgcttattgaaggacagaggtctaactgctgaggctgtggtcgctgatttcattttcaagaacatccagcctttaacgtacagggcataccctgcttatttgtacagtggcatcaatgattctacccgggttacgaacaatagaatccccactgaagatctgatgagacgactggatatgatcctaaggggcagagtttcaaacgccgatgctcctgttgcctattctgcctggaacctgccaccgcataggccatttttcgaatttgtgtccaaccctcctgctcgtgatggtagtctgggtcttagagtgtgaccctctctcgaggacattgaggctctgattgccccacttcggagtcttccggatgatgagagatagactcattttgagatgtcagctagcacagacgatgcggagatagatgctgtgcttagtttgctggctggggaatcatctgactcaacccatgccaagccaatggctatcacagctggacaagaacttggtgaagcggtggagactcggaagcctgaaggtgctcgcccg

SEQ ID NO: 101967 - DNA, 1172 bp, Zea Mays
gtgccctgatcgggggcaaccctatccctggttgtggcccccggtcacaatgctatattaacgatggcagggccaacacgaaagccaatgctggtcatgcttccgtctaaccctaaccaccacagtccaaggttctgatcaccttcctagcgcccaagtgactgaaaccgcccaatccatggcactagtaaagcccagtgcccctactgcactggtcaccgatgtgccatcccaagctcctaacagggaggaggactccaggacgttgatgcttccacacccgatgtgatgacgatgcccaccctccagctcagccctaaagatatgtgtcagggaaaagacccccgggggccctgaggcctatcagtcagagagagtattggggaaaaggtcttcggactaccagagcccattggtcagtaggagggtaaaggagttgtctaccctggaagcattcgcccccggataaaccctgaggcaccgagcccggggacgggcgaggcagagccagagaggggggcggacaaaccgagaggaagccactcgagtggattcctcgcccggcccaagactgatctgccataaatgatcggtcgcatcaactacgcttggcaccgagccacagtaggagagcctcccactaatgacttacgaacacctcggcttgcgacacactcatgacgtattaagcctaggcctaagtacgttggtcatctacaggacccgcaatacgacgagtcacaccaagacctaggctacggaggccaagggtcggcgtggtgcaaaggcagtaatgatggcattggggctccatgctgcctgtaccgactgccataaaggacgcaaccagggaagcctagacgaccaggacgcaaggtgacaagcacgatttatctaggtagaacgtcttgttttaccagggctcggtagctccttctaagaggagtcagtaaccaacccccgccatggtctataaaaggggagggttggagacagacacgaaaaggtggacacacgagagacaaagacggactagaggactcggaggaccacggaggccggagccgaggagcgaaccaccgcgacgtccaaggcttagcagagagctctagccccgtagtccttagattcagccatgcataagagacttgggagctcttcttccctctctc

SEQ ID NO: 101968 - DNA, 1277 bp, Zea Mays
agataatttgtggcctgccatagacttgttttatggtctatttggttcacatgtatcatggcttgtttggttcatttacatgtgtggatttcgggtccccggatcatggttcgtccaagggttttttaagaagagtcgggaggcacttttcatgaggcttttacccgtccgccacatgtgtgtggggtgaaccccgagtctctattcaatgcagagatccatttaagggtttcgtctcatatttgagtttactctttcccgcacatcccctttgtgaagatgaggagaggtgtgttgtaccacgcttccctcggtgggctagcaatgacgctcattgagctacaaatgggtgatttgagttaggccctagttccctttgtgggatccaagcatggggtcgcttgtgaccgtcctcatattcatgggcaccaactcatatagttaccgactctctttgaccggaactgatggctcgctgcctctctcttcgataaaccattagtcagacattccctggactcgaacgcaagctggtgacgcccttaacactcgtgtgtcatcgtcctggtcgctagtgtgcccatcattggccgcccctcactatgctttcgctggagtggccgtgagcccttcgcaaaccagccttagaactctagaatccacaactaatttgtgcatcgtggagtttttggtcccttccaaaaggaaaaagcataggtttggggtcttaccgtagttggtcatatggtgtgcgttccattttccgtgcagagacaattcgaagggtagcttggtctgttgcattggtcacgggcaacgtttgttccctttggtatttcgagcgtgggaaggtggccctacattaatcagacaaaaaagtagaggtgttaatacgaccatgcctacggaggggacataatttgttttgacatgaagggtgctactcggtgttgctaagggcagtctgccatcttattcacttcccttagcccccgctgatcccgacccctagagccattgccctagggttggaaacagcatcgaaggacgattgggaaagttgaggtcttgctaggggtagaatcgtcatagctgctcgatattccatgcattggcgagcatgctttcctcgtccttcaatttgtaggttcccggtcgaagcacctctccgattataaacaaccctcctagggtggagatagcttgtgtcgatttttgttgctctataaccacctgaatacgaggtcccctacttctagagttctccctcatatgcc

SEQ ID NO: 101969 - DNA, 473 bp, Zea Mays
ctcgatagagattgtggagtcatgacaaaatttgatgcatttgtgtttagctgaaactacaggtcacccaaccaaattactgggatgctgtgctgaaagggccattgtgtaaaccgtgagttgtatgacctgtctctgttgtcagtgtcgtcatcctgaattttgttattacaatctgaatttggttgttttgtgtgcactggtagtgttgggcgacttcttttgaaatttggggatcaatctaggaagagggctttaagtttcattcatgtgcttttctctgtaaacttaccacaccttttatgggttatgttgtgcaggcctcgattgaagagcttgtaacttcatctttgcactactacagcagtggcagagggatatcacgtttagggagtctacaaatgaccaacgacagtggtgagccttataccatccatttctttcctttctgtttcatcttgcaattgttatta

SEQ ID NO: 101970 - DNA, 620 bp, Zea Mays
ccagcaggagcagcgtcagaagagtcctcagccagcaaatcaagcatagcgcttatctctgcatcactagggttcaggggcacctcaaaatagacctgtcgttcatcatcaggaatctccccgagcgaggcaaccaaggcactaacttcttcagcagagggccgcactctaaggcccaaactgccatcagtaacaggaggattcgacacaaaaagggtgaaggctttgggaggaggcaggttccaggccgagtatgccactggggcaccaacatttgacaccttgcctctaaggatcatctcaagtcggttcaccaagtccacagagggaattcttctgttggtaacccaagttgaatcggccaggcctcgatacagataagccgggtgcgccctgtctttcaacggctgaatattcttaaagacaaaatcagcaacaacagcttcagcagtcagacccctctccttcagcaatccaacttcagccagcaaagcacctgcctcagctacctcctgatctgtgggggactcggtccagcttggggtgcgaacatccggctgtcttcccgaccgaggggggagagagtttccataattctcaactatgaaccactccaagcg

SEQ ID NO: 101971 - DNA, 359 bp, Zea Mays
caaggaacgcgccctcgacgacgacgtgctccacttggccaagaagcgaccatagccggtccaccaaagacacctcaattggaggcagcggtgaaaggtgggcgcacacctagccaacgaccaggcgaaacccctaaagcttggcactttgctcggagagcatggtggtcacatcgaccaacgaggcaatggtgccatcacgagcaagtgaaagctctcacactcgggcctcagtcgttgccttcatttcctcggctatcctcttggcgtcatcagcctaagaaagcgcctttctgagctttgagggggaagaaaggataaagcaaccaaagacaaaaaggtatgggagtgcagaaggg

SEQ ID NO: 101972 - DNA, 284 bp, Zea Mays
ctcttattgctgacatctttgctctcgaatccataaccagccaaccctaatcccctctccttggatcatggatgtggtgttctgtgtctcggtattcctcataggcacctcaggtgctctggctacataagtgagcttcttttcccaataatcccctcctctcccacatatgtcgatctcctttcccatgttttgatgttctttacctgtgccttgtaggtatcagtctcagtctcatgtcgatgtcatgtagccattgaggaagtgaatttgttgatgagggc

SEQ ID NO: 101973 - DNA, 397 bp, Zea Mays
agagggagcgggccggctggccaccagaggcctcctttttgcttaaccgcacgcgccacctcctggcctagcctttcttccttcattcccttggcttgcctggtgtatctactacctctattcttcttctattcctcatccccgcttccctcctctgttgggcgtcttcctgctcccttcagccctcacctcccaaaaacagacaagactcgacagcaggtcctaaaggtaaacacaacaccttcctatccacctgcttgctaatggtgtaatggtggtggcagcggccgacgatttagaacaacaatctacggttttctaccagttcttctattttattctgaaatttttagactgtcacaaacctttatgaggctctggacaactgtgatggaat

SEQ ID NO: 101974 - DNA, 535 bp, Zea Mays
ctggataccagtatacctaagggaaaatcagttgtacggtccctaggaggtagtctctacggcttgagactacctgcgtctggattgggacctagacctgcacacaactttggctttgaagtgttagtagcacacccataggacccatcgtctgatatctgccatcctttgactcatgcaataggacctgcaggatttagtctgggaagccaagccgtatgcctggaccccttgaatcacagttccaaatactaggacacccgtcgcagagtggtggagcgtgcaggcttagggtacaagaccatgctaagcagctacacagctccgggccaccccaggagacgtgtgtccattctctagaaccgaaccctaagttgccggacccataggactatagttccaaatactagggtgcccgtcccaaagcggtggagcgtgcaggcttagggtacggaaccaagctaagtggctacacaactccggaccaccccagggagtgagtgcccattctctagaactggccccaggctgccgg

SEQ ID NO: 101975 - DNA, 773 bp, Zea Mays
ctcctcgacggcaatggatccgccgtcggacccgaagccgatcatccccctcgatgagatcgtcagcgacttcgagggtgtgctcgcggcagactcttgcctcactgccccagcgcaaggtgtgccaactcgaacttctccctcaccattgcagatgtgaacaactcctggttggattcaccgctagagcccgaggtaatcccagtgttccctcccttgttccctcccttgttccctctttagcatttgcacttggtaaatgagttgtatttaatcagtgaaagtgatgacgaactgccattgatttgaaaacaacagaaacaatacaattcaaccaaataaaattgctaacaaacatagtttgttcaccacttaaaacaataaagaactggcatcaagatcctatttcaaatgacaaagtaattttaggatcgacgaaaaatgcatatcatacatcacgacgcagaggtctaggagctttcttggcagcctcggtgttcgccttctcagcttgaacaatcatctccaaagccgtcgcactagcaacgaaggcggctttgcgagcaacgacccttgcacgcctggctgcagcgagcaaatcgcttaatcgtccgcgaccacaggacctttgcccgactccatgacaacggggaagaagccacaggcggcgaggaatcaaatggggagacgagcagaaggggaagaaggaagagctcaggtggaaccctagcgtacctccggtgtgggacctggactgttttggaagaagaacg

SEQ ID NO: 101976 - DNA, 1246 bp, Zea Mays
gccttttatcttcttccccttcatctccgcgatttcttgggggtcggggtctgaatccccgccgtgtgttgcgattgccggagtggggtttgccactttgagcggttgcacggccggttccggtgtaatctccgctcccctttgggcgttacatctggttcttgcctcgattttgcgttgggattacgggtacgggtgcctaccgaaggggttggggttggtgaggaaatgactcgttcgatcaggctaacgcgtctttatgcggtattgtataaatttccttctgtttcttgcgcactagaccgcactagtggagattgattgtgcgtgcatggggcctttgatgatcaagtaaagcagttgaaacagcgtccccttggtgttggaatcatgcgaaagatcatggttcgcccctccaactggcaccttccggcttccgggccttgtactgttcctcagcttaacaagtaggattgctcgaatcatgctgttcatgtgttgttcagcggcttggaattcggggggcgtgcttctgtactgttcttgactcttgtggtgttgattgtggaagcggcgtgcttgatgatgcagacgtcgttcccgtggtgttttcttgtgtcctgtccttgagcgagcttcagtggtccccgcacgtcaaattttacaggccagggattttgcgagctgttgtgacggtttcctgaattatgatgggaaaagttgcaacacgtgggagaccctgcggggagtgaggacaaggtcaaggttttgaagctgcgatttgtccatgtgtaatgctcacatttttcagatgcaactgttgcatttctgggtgtgttgtctggtaaactagctacttgctcatctcattggcatgccacttaatacacgacgtgggaggctcgaacccttttcagttatggttttgtagttctcttttgcactccatcctcagtttatctcacataaatggtagctgtcatgttaatctgattatcatgtcaattgtcaagtcattatctatttatctctgaataattgtctgacaacgagccagactaatatgagtgagtcctttcttttgctgtttgtttatttacttcatacttagttgatttagcataaatgtaacctgttataatctcattggcaagccacttaatatgcagcgtgggaggctcgaattcttttcagttatggttttgtagttctcttctgcactccgtcctcagtttatctcacataa

SEQ ID NO: 101977 - DNA, 594 bp, Zea Mays
tcccagctcgctggcccacttggctattcttccaatggcttctttgttgtgaaggatgtcccctattggaaacccgctgactactatgactttgtggtcatcaaagtagtgacgaagtttgtgagcggttagaagtactgcgtacagtagtttttgaacttggggatacttctttttagagggtcccagaacttcactgctgaagtagaccagatgctgtactagatatgtgtgtccttcctctgcccgctcaactaccaatgcggagctcaccacgtgagtcgtgcaggagatgtataacaatagatcttccgccggatgatttggcgtggctcggcgtggcggcttgagtactggtggcgtggtcaggaactttttcaatgcttctagagcttcctgtgcttctgtggtccactgaaacttgtccaccttcttgagcaatttgtagaacggtaggccctttttgcctaaccatgatatgaacctgcttaaggctgccatgcagccagtaagcctctgcactttcttctatgaccgtggcgcttccattctcatgatggcttcaattttttctgggttagctttgattcctcg

SEQ ID NO: 101978 - DNA, 428 bp, Zea Mays
tttttctgtaggggaaggtgaggttgatctgaattggcgcttcaacgatggagcatccatgaaatcgtcgtcggacagtgtggatggagcagaaggaggttttctttttacacgacaagctaaagcctttctgcgaaaacgatgaactggtgttggttgtggctcattctgcttctgattatgtggattatcatcttgatgagctgagctgctagatcttgttcgtctggaaatgtcaatggaaaaaacctcctgactggactcaatggttagtctttttggattacttggagggcgatcaacagatctcatgattaaacactgaataaatctgttgaaaaaagttgtttttaaatacagtgatttatgcatgaatatatgccaaaaaatctaatttttactataactatctacaatgcatactacat

SEQ ID NO: 101979 - DNA, 296 bp, Zea Mays
ggaatactcgcagcccctggatcgtgatcctgcggctcgggatggaatcgctcgtgattaagtgcccatcgcagaccagattgcgtaccggttcgatgtcgtcccaatgtgatctgggccctccacatctaatcgggcggccgaaatcaaaacatacccctttggcttagacattttgctaaagagaccccgactaaaacggaaattaacccgccgtcctgcgcagggagtcctgagtctgagtacttctacgtagaagtccctgttgttctctggttttatgcgcccagtccaga

SEQ ID NO: 101980 - DNA, 433 bp, Zea Mays
agagatccagtggatccatttattaccgaaccccttgtgtctcaagatctctaagatagcagcatgctccagtttatcaaatgtcttctcaaagtcaagctttagaatgaccatttcttttctggatttgtgacacagtgaaatatattcaaaagcccaagctaagcaatcctggatcgatctatccttgataaaaccatattgattccgatgaacgagctttgtgatcactagctgcaggcgattggctaagatttttgttaaaactttgatactcgtgttaaggagggagatgggtctgtagtcaccaacagaatcaggagagccatttttgggaatgagtgtcacatatgatccgttgatgctatgcatgcagagagatccttcaaaaaatttgttgaataggtcatagaaatcaggggcaattaccggc

SEQ ID NO: 101981 - DNA, 882 bp, Zea Mays
gaacaatgttcctcttcctgaaggtgatgaagtggatgttttcaagggttttatgaaggctggccttcagtttcctctgcataaaatgctggttgaagtgttaaattgatttgaaatataccttcatcaacttactcccgaagctttaatgaaagttggaaatttatttgggtgataagaaactaagggttggaaccggacgctcattgtttttacaacattcacgagttgtcttatcaaatgaaggccattgggaaggagcagtaccataacaacttcgaacgttataactttgtgtaccggtctgacgtgaggtgtcttgtgccaacctttcaaaaaaaagtggccgggctcatggatgaagcaatggttttatgttaaaaatgattagagtgagagggaggatgtgaagaacgtaatctagcatcccatacgatcgcgcttcggcattaggagaccttcgatcgcgggtggtaacaaacctcaagcacgtctgatggccttcaacatagtgtgtagctacattggtaccagagatttggtccaagagcatattgctttcaaggtatggccccttgttaacgattgggatatgccgaaggaaaccgctgctggttctagtgaaggtagcctggtttatctgaaatacacctatcgttatagaagtcagttcgacaagccagatgatgaatggcttgaagccgttgaggcgactagtgatgaattaccgggggcttatacgaaggcagaggacgaagccatgaacactgccttcggtgctcgtggaaagagaaggctgaacaaagttttttatgtaattggatttgtctatcctaactactgctttccctcacgaaaacaaggaacaaagagaaaaatcac

SEQ ID NO: 101982 - DNA, 567 bp, Zea Mays
aattttcgtaagttatccacattccatgagtgctctaggtcttcgccggatggtgaagcgagcctgtaggcgttgggggatgtttttgtcttgacgatgaagggcccttcccatttgggtttgagcttgccccgggactctgttctggtggttctggtgaggactaggtctccttcctcgaattctttggggatgacagtgttgtagcgccatgccttcatatgcgcttggtatttatttagtgcctctagggcaagaacacgatctccatcgataaggtccttagaggttgactcattgacattaggagtgattgtggagctcgctcgtggagatccatgcttcagctcttgcggcgtcattgcttcgaatctgtacataaagaggaaaggtgtgaacctggtcgctctggattctgttgtgttcagtgcccatatgacttcgggaagctggtctgcccattttcctttcttgtcgttgagtagccttttcttgatggcactgaaaattttgccgttggcgcgttcaactactccgttggattgcggatggtagacaaaagcgaac

SEQ ID NO: 101983 - DNA, 571 bp, Zea Mays
cataaattaaaagatcatttaatgaggagacccttcgagagatttaaactttaaagtgttttctttacaaattagaactagtttccaaagtgagataaatagtaatattaattttttaggtattcaaactattttattgcatggtgaaatacgttacatgattttattcatttatacatatttaggaacattgatttaaatagaatacctaaaataaacctcacataacatgttgacatttctgagtactgcattcatgtttcagttcgaattcgaaaacccaatttggatttgaaataaaaaaatcatatagtaataagaaacataaaagaaaaaaaggaagaaaatgcagaatcatgtctgggccgaatctccatttcccaacccagctaatgcaaccgcacagactcgaatttctccccagccggcccaacactccgcgcttgcggaaacacccacttacctgtggggacagcaccactacccctcaaccgtagtcgctattatgtggggttgttgatgtcagcttcttcctctcaatcctggtaatacgaaaacaactcgatctgtg

SEQ ID NO: 101984 - DNA, 580 bp, Zea Mays
gatatgattgtttcaacggtttttgtggaggtcggtgctatattttcctgcaccatggggtatggaatgatcgaactatctttctgttgcattggtgttgaattcggcggtggtgacttatgacacgattaacggcttaagatcggctcatcacccaacttaatgtcgcgtcgatgccaaaggaccaactcgttcatttcctcctgcaaagttatgatcccctcaactggaaagtctatctcccaatcttcacaaccactgtctgtgatctctagaacttggaccacaacatagtgtggcgagacaggattatcatggtagttaacaagtcctggttttaccaaaccagtagcagcctgtttagtttttgtcctagatctattcattggaatatgaagacaacaaggcttgtcctcaacaatatcgtctacagcgtacttggtgcccgatacgaagtcttgcacagatcctacgctgctagggactagaggtggactcatgtggcctgacttgagttcacatgatatgcatcctgtttttttcattttcttcatcacgtcattaatagccttttgtaccc

SEQ ID NO: 101985 - DNA, 374 bp, Zea Mays
ccagtttgcttctagtttttgttgaaaaagttttaacttgcctattcaccccccctctaggcaactttcacttcccttcaatgttaccgaagtctatctgtttttgcttattaaacctactattggttcagtaatggattgcatatactaaagtagtcctggaacatcacgtcattgtctctgcacctttacataattatattatgcttaaagtctaccacatttgttatttcaacatgaaccacaggttgccctgaatacttatttttgttgcatttttattgaccttactgctagatgttggacttgggtcctaatacagaccaacagtaactagagtagtagtagatggacaaccattgatttgattactg

SEQ ID NO: 101986 - DNA, 310 bp, Zea Mays
gaaaacacaagacgagacgatcgagaggtcaaacggcgtgaaaacgacgtttgaacgataaatagtgacataggaggtttggaatttgaattgaggcacgaaacgacatggaattgagccgatacttcacgaataggtttatataggtgaatatgtgtgaagagtgtgctaggtttgaatttaggcgaagaaaaagagatttgggcacgcggctcggaaatgatcgctcgaaatggggaattgagtgaaattgaagcctggaaactcggattggcgtgaaatttggcaaacatgttactggaagtgttgt

SEQ ID NO: 101987 - DNA, 581 bp, Zea Mays
cgagaggtcctgctcgaggaagctcacaactcagcctactccatccacccaggaactactaagatgtaccttgacctcaaaaccggatactggtggagagggatgaagaaagagatagctcagtatgtggcccggtgtgacacatgccaacgaacgaaggccgagcaccaaaaacctgcaggcctattacaacccctccccgtgcctgaatggaagtcggaagaaataggcatggattttgtaaccggactgccccggacacaaaaatggaatgactctatctaggtaataatagatcgcctcaccaaggtagcccatttcattctagtaaaaactacctttggaggagccacccttgcccgaatttatctcaaagaggtagtcagactccatggcatcccaagaaagatagtgtcagacaggggaacccagttcacctccaaattctggacaagccttcagaaagctatgggcaccaagctagatttcagcaccgcttatcaccctcagacagacgggcagacagaaagagttaacaaagtcctcgaagatctattaagagcatgtgtgctagcattcga

SEQ ID NO: 101988 - DNA, 375 bp, Zea Mays
gggatatactcacatactggttgccattgataaattcacaaagtggatagaatacaaacccgtcacctctttgacttcagcaaagggagtggagttcattcaagaaataatgttctggtttggaatacctaacaacattattatagacctaggatctaacttcactagctcagagttctttgacttctgcaagcagaggagcatccagatcaagtatgcatcagtggcacactcaagagctaatgggcaggtagaaagagccaacgggatgatactcgatgcactcagaaaaaggtgtttgacaagagcgagaaactcgtaggcaaatggatcggggaactaccatatgtggtctagagcttgcgaacgcagccg

SEQ ID NO: 101989 - DNA, 430 bp, Zea Mays
tcattccgaaggttgaaccaatgtaaggtgtgatgccctcgctgtacgtgtgtaactatagtttgtatgatgaggctgtgtgccttcgcgcatccggctaggtccataggggcgttgcacacttggtctagcacgtttattatgtcggtccggctgcgcctatagtcggtctttgcgcggacagtttctcgatgtagacttttgcacggatgtaatgtgccttcgattttgcgcactcgttgtgctagtccgactgcacccttaggcgacttttgcacggatagtcttttgaagaagacttcgattttgcgcacttgttgtgctagtccggttgcacccttaggcgacttattgcacggagtgtcgcacgcgagggtagctagcgctgcccctcgcggtgactttgtattggtcgaaatgccgaagaccg

SEQ ID NO: 101990 - DNA, 832 bp, Zea Mays
taggtcatcctactgctcggaggtggaaggattccctcaccctctacggagttgcgcgcttcgcatggggatccacaagaagccggagtatgtctggaaggaataccatgagaacggaattgagaaatgttctatggcagtctacctgggagaaagccgaaactacccaaatcaccctcccttccaagtcaccgccacttggcaccgctttctagacacttgccaaaatgcttcccaaagagccctctgccagctatgccaaaactacagtagggaagtctctgagacaccccttcgctacttcccacccagcaataaaaacacccctacctagaggaaaagacttcaggccttgtcagggagagatcctaatgaagatgaccccaccatagtctacatggccagatatctccacacccttgacaaccactatgacgaccttttctcccactgcacccacctaaattctcgtgtggaaagcctagagcaacaaatcaaggaattaaaagaagaaaaggcgtccctccaagaaagtcttaatggcggaaggcgaagaggccaacactcgcaaggcctaccgaaccctgaagatggattacgcgaagaagttaaagaagctcgcccccgctaagaaaatccataagcggacaaagagctgaggatgccagactgatcgaaaagaggaagcctcgccaccctgcctccctctaggatagaaagcttgtcagacattgaagagatgtccctagttagccttgatgatcttctcaaggaatttggggacaccttagaaagggagtttggaagcaccttagaaatcgctcgtgcgtag

SEQ ID NO: 101991 - DNA, 693 bp, Zea Mays
gcttgaagggcggggattcggtcattaccttcagaatttcggctacttcggcggcagagggcgtcgaaggagcttcttctcctgtctcacctaccttcggctcagaagagggcactgtgtcaagctttcgctttttagaaattgttgcctttggctctggtgctgtttttgttttcttcaaaaaaaaatcatcttcttttactaaccgagcaacttgcctatttaggatgctgacaatcccttttcttttcacttctttggcccctttgtcaagcttcttgtaatccgggtattcgaagtttaatgcatccatcacccggatcagccttcgtttcggccgggtgccaaaggtagcaatcattaattggtcttccttcttggtatagttgccaagaatttcgttacacatggtttcgatcatttctagccactctttgcatggcttcttgaactgttcctcaaatttgaatcgataagggagccgaacaagttcgtacttccccctcctttttcttaggcattccccagccactagatgtcgaacatgttctatttgccaagtactcttgtagtagatctctattgttgatttcggcagctaccactctgaattccagctcggccagctggcatggggagccaagttgcatgtggcacaagggccttgtcaccctgaagcttaatttcattgga

SEQ ID NO: 101992 - DNA, 419 bp, Zea Mays
caaggcctaagttgtcctcgtgccatatctctctgctcctctattcttcttcctcacgtctcctcatgctcctcagatccctactcctcgtatcaaacaattggtatcagattcactgatctctggccgtgttcggtgacgacttcacatattccatcgattgggcgcgagcaacggatctggtcaggtcaaaacgaggattgcggcgacttgctgcctgtcttcattttcccttaattctgatccatacttggctcgatttgtggcgtgaattccgatctggatcacctgcctccgcacaaccactacaccagattccagagtcgtcaaggagccatgaaccccgacaccaggctcctcatggacgagatcatcaagcgcttaattgagctcgatcaccgcttgaaggaacaggaacg

SEQ ID NO: 101993 - DNA, 454 bp, Zea Mays
agattattgatgttctaggaatgctcgaagtcttcgccgtttggcgttgcgagcctgtatgcgctgggggaggccttcgtcttgacaatgaaagggccctcccacttgggctccagcttgcccctggactctgtccgagctgttcggacgagtacgaggtccccttcgctgaattctcttgggatgactgcgtggtcgcgccatgcttttgtctgggcttgatatttttttagagcctgcagagcgaagacgcggtctccatcgataagatccttcgaagtaggttcgtccacgtcggggccagctgacgagactgttcgcggggatccatgctttatttcttgtgcggtcatggcctctgatccatatagaaggtggaaaggggtgaacccagtcgccctgcactcagtcgtgtttagcgcccagaccgcttcaggtaacaaatcggcccacc

SEQ ID NO: 101994 - DNA, 406 bp, Zea Mays
agaaatcaaggaggtctcggaaaaatggagaaacgggcagggcaagccctcggatgaggaaaggcacaaagatgacagcttcgtaggtgtcctctgtcagaacggtcaccccgagccagatttggcaagaacacaactctttcggcggcaaaaccccagtttccataagatgcaagagatcagactcagaaatgatagacatgtggttaccggcaaatggaagctggctattgggaccaatgggcagaatgattggagcagcagcactctatctcttcctcttgggggccatcgcaatctctcgggcggagtgggcaggctcgagaactcagaaaacagagaagcggcggaggagaaaagtaagatttagggttcggaactcaagaagacatgtcggtataattat

SEQ ID NO: 101995 - DNA, 375 bp, Zea Mays
ccgaagaatatggtcaacatcagtttaactggtatttatcggtattatcattctgttacgttccttggtgcgtttaaagccatgtgtctaccgcaggcatgctaggctgctagctcttgttggtgttgttggggtctctttctgtcgaaggtcctcagaacaaactaattgttttaattcatctaacaaagtgtaaagtgtactgcaggactaaacaccgaaagtaaaatagcgaagcaagggatacaaagaacgatgtaaagcttcgacaatcatcatgatcatagcttcggctcaaactaatttcgaaggactcacagtaggccaatttaagagtaggacaactttatccttagtacctgcattagagcgaat

SEQ ID NO: 101996 - DNA, 362 bp, Zea Mays
ggtttttctggctgcacccttgggaaacttttgctcggacggtgtctttatggaagacttcgcaccctgtgggtggtgtcgcgcacttattgttctttttctggctgcaccctttggtgacttttgctcggacagtgtctttgtggaagacttcgcaccctgtgggtggtgtcgcgcacttattgtgctttttccggctgcacccttaggcgacttttgctcggacggtgtctttgtggaagacttcgcaccttgtcggttgtgttgcacacttattgtgcttttttttggctgcacccttaggcgacttttgctcggacgatgtcttcgtggaagacttcgcaccctatgggtggtgtcgc

SEQ ID NO: 101997 - DNA, 570 bp, Zea Mays
gcataaacgaaaagttgctgggaaggcaaagcaataacggtcgtcaatatcctctgctattatgtttgtgcttgttctaatagcccctttttggtctggtccaagagagcttcttcacatttaggatgataaactcgatgatatcttagctataaatctaaacataaagtatcatttgttttgtgccggacaggaagagggagagagcgcaagtgatcttggcttcttccagcttggatgtaatgatatatcagtaagtaactaccgacagaataatcagtaagtcaacagaaaggaaaataaatgttaaagaaggtcccaaaatattcaaaccggggttacaacacgttgaacaacccatcccccctcagtccctctctttgttggcaatgcatctacctttcaaatcaaaagggataacacttgaacaaggtatacctgtaaaacagcttgacgcccaacacatttatgctgcttgaccacttccagaagtatacaggtatcaagcatccgaactttgtctatagtgactgacacatatttgcgtcaacagaatacatagtatggttg

SEQ ID NO: 101998 - DNA, 459 bp, Zea Mays
ctcatcacttcatggacaacatttttaaacttcatggattcccttcaactataattactgatcgtgatcggattttcaccagtgcattgtggaaagaaatgttcaaaattgcaggtgtggaattacgcttcacaacagcatatcatccccaatctgacagtcaattgaaacgcgtcaatcaatgccttgaaacttaccttcgctgttttgctcaagcatgtcctactaagtggaagaaatggctttctctagctgagttttggtacaataccagctatcactcatctttgcaactcacaccttttgaagtcttgtatggctatcctcctagacacttgggagtggacttcagagcagcctgtgatgttccttctctgcaagtttggctcgacgaaaggaaagtagtagttcaattggtccagcagcagctagctcgtgcacaacttcgtcagaaaacac

SEQ ID NO: 101999 - DNA, 381 bp, Zea Mays
cgaatgagagcatacaattctttgtcatatgtagaataattaagaacaggtccatgcagtttctcactaaagtaagcaatgggtttacctccttgcaacaaaacagcaccaataccaactccacttgcatcacattcaagctcaaaagtcttaccaaaattaggaagttggagtagcggtgcgtgagtaagcttctctttcaaaagtgcaaaggaatcctcttgtggctgcccccaatggaacgaaatgcccttcttggtcagctcatttaaagggacagcgatggtgctgaaatccttcacaaaacggctataaaagcctacaagtccaagaaaactccgcacttgtgtcaccgtcgaaggcgttggccaactctgaatg

SEQ ID NO: 102000 - DNA, 662 bp, Zea Mays
gttagaatggaacaaagaaaatcctagagccggaggcatcggcgcgctatctgatggtggagtattggcagaagcaatatggagagcagactcgagccctaaaggaggatcagagctcatgcccaaagcaacactcagagagacttcaactccgatagcaggcagtgaattcccagcatctgggtcactgacctctaaagtgaccggaccgacaagagcagtaggaggactagtcaccactggttcctcagattgaaccagtgacgatccagcatgaacgtccatggaatcagccgagcaggagccaagcttgacaccctcgggggctgggtcaccctcgggggctgggttgtctttagtggcacccacagggctgaagcaccctcggctgtatccacatgagccgggtaaccctggcttgccacgaaagtaaccgacgcgtccccatgaactaggccccctcaaaggtcgaagaagtgcgagaaactgtttgggttatctcttgcctgactggattactggctgaggggatgtcattcgggacctctatacgaatgacagtaccttcagtttcaggaagctccaataaaagatccttaggaataatctcctccagtgcatggtcaatggcagacattgtctacctctggagactaaccagt

SEQ ID NO: 102001 - DNA, 500 bp, Zea Mays
cacatttctgaccccaatgatttggcttagagaaagaggggtttttcttttgtgcttcccacatgagtgattaatttgaggattttgtgggacctttttgggaaaaattccttactatttcttgtaagtatttaaatatgctacaactttggtgaatgggtcaagccataatttggtgatttatatagttctaccactaatcctttcttggtactctaatggcttaaggagggtagtcctagggtttgagcatttttctcaattggaggtgcatgaaaaggctagggtatgacatctagtatgcctaacacttggttaagacattgcttctcaaatttggtgtctctttctcaaactaaaacacatgtgataataggtcacatgtgtatgtgttgagcaaaggccctgagtaacaactagggtgttacacaaatcagtgacctactagggctacggtgcttgcgcaaatttggacagaggcaatctggaatggccggtcg

SEQ ID NO: 102002 - DNA, 406 bp, Zea Mays
aagcgtttgatctcatcagaaagtatttgtcttcggctcccgtattaaaagcgccacatgtaggagtatcattcagattatacattgcagctgaagataagtttattggagttgttctgacacaagagaccaagaagttatgcttaaacctgttttatgcatgcaccaagtgtagatgttatttgttgtctagtcattgcaccgtttccggtcaaaccgatgtgatcaaatatatgttgcaaaacccaattatgagtggcagaattggtaaatgggcttatgcactcatagaatatgacttggcttatgaaccattgaaatctatgaaaggccaggtcgtagcagactttattgtagaacatcggattgatgatactcataaactagacatatcatacctcactgt

SEQ ID NO: 102003 - DNA, 479 bp, Zea Mays
ttttgtttttgtaagatatttttgggaactatcaataaaacagctcttatctgtgcagtatttgtccttgttttgtgtggttttaccaactcctctcctggtacttggcccccctaggatgtaggctcgacgcgtcgaggctggataccagcatacctaagaaagagttggtgtctcgacccctaggaggtagcctcgactgggacctggacctgcacatagcttcggctaggaagtgttagcagcacacccgttaggacccatcgtctggtatcagccaacctttgattcatgcaacaggacctgcaggatttggcctgggaatccaagccgtgtgcccggaccccctgaatcacagttccagatactagggcacccatcgcagagtggtggagcgtgtaggcttatggtacgggaccaggctaagcggctatacggctctggaccaccccaggggatgtgcgtccattttctagaac

SEQ ID NO: 102004 - DNA, 380 bp, Zea Mays
aaaaaatatagaaaattttccatcgattacgtagaaaaaattatagagaaacaaatccactaaaacattggcaataaaactatcaagaaactaattatggagcctgggtgggtctggtcacagtaggcaatggcaacaagacgctcttttggaaatccaattgcatcactgggaggttatcttgtaagagcagtctcaacactcaatgtcatttagttttttatagcattaatagaactaccacataaacaatttggtgacatgacaagaaaattaattagaaagaggaggaaatggttttctcatgagaaattaggtctacacacaacgaagacacaagaaaccattttttggtgttgggtagggggagtaagcatcca

SEQ ID NO: 102005 - DNA, 1060 bp, Zea Mays
cccatagaaacatttggaacccaggaaaaagagtggttccaagtggtgctgctgtattctgaattttcagattggaaacagtaactaaaactgaatttcagtgttttgatagcagttttgaagtctatttgtggctattctatagggttttaggctatggtgtttgtagatgaaataaagaccatatgatagtgaataattttcagtaagtgggtataacatgattctacacgaaaagtggagtaaaactggctcaaagttggattgtcaggtgactgaaactgagttatattcagtgtactgaagactgaatttcagtgttgggttatctgtttggagctctgtggtaattaatccatggagtatgagccctactatatgtagcaaagttaaagatcatctgaagtatagcaagtttcatgtagagagttggcttgatatggtgtaggatttagagaaaaaggggtggcaaaaccctctgtcagactcagtgtagtgttgttcaaacttctcaaactgaattttcagtgaatttgctcctttttggtgcttcataaatattgttctgagtatattcagccaaggagtgttatactaaatagggagagctataattggagagtaattttggttaagaaaggtgggcttgttgttgaaaggaattgtgagatactagtgactgaaccgagaagagtgggatggaacagcaggactgatgaagttggattcagtgcctgggttggtaactgaaggagaatctcactgctgtggttgcacttgtgtgtatagttggagatatggatggagtacaatgataaggcctagaggcctcacttccaacagaaattatttactttggatctctttgagcctatccacaaccacaagtggagtccacatttgttttattcgctatccgcagaattagaccgcacaggtttttgtggtctcactccttcaaaaatatcatgttttggactatctatcggcagtaagtccttatctgccctttctcctgtttaagtaactggacaagggatatttgttggctatgtttgtg

SEQ ID NO: 102006 - DNA, 512 bp, Zea Mays
ttagcttgtccaatgctacatatgctcatgggccggagcaagtacgcaggggcgcggaaccgaagacaagccgtagagttcggaggcccaactccttatacacaggctcagagtgggttgtgtgacggcagtgggccggtgtaagctgtgtcgttgtgtcgccatatggttggtcgatgtatatgagacagggggaaaacattgcagcaactaagaacacgcaggtttcctccgtatctcctccgcatctcccttcttctctaccaactcttccaatcagcatagctgtggtgctgacaattggtatcagactaccgatcttgggtctggcggagtccgggtacttcacacggcgggcaaaaatggcggacgcagcagatccgggcatcgcaacggctttggcggcgcaatccaaacaaatcgactcccaatcgaagaatatcgctgcacaatccaagatcctgcaacaactctgcgagcgattggaagctcaggaccatcgctggcattcg

SEQ ID NO: 102007 - DNA, 526 bp, Zea Mays
ttagtaccagcgtcaagacaaccaggcagctcgccttcctgcccttgtagccaaccagaacaaccaagcagccccatcgcaagtaggaggccgcacatgcttttattgtggagaacaaaaccactgggagaagaactgtccaaagaaagcagctcatcagtcgccagcagtcaataccccagcaagacaaggagcaccacaacaagcactaggagaccgtggccaggcttacaaccgtggaaaggtgaaccacctagaggccgaagcaatctaggatgcttaggacgtggcagtaggtatgtttccagtcgaatcccatccagcaaaagtattatttgacactggtgccatgcattcttttgtttctacatcttgggtagaagcacataacatccccatagaaccaatgagtccacctttaagagttaattcagttgggggaaaagttcagtccgataggatttgtccgaatctaagggttgaaataaaggggatagacttccccgctaacctagaactaatggat

SEQ ID NO: 102008 - DNA, 370 bp, Zea Mays
ttacgattacatacacacagcgagggcatcatatattacattggctcaaccttcgggatgatacccatctccctgtagttgaacaacattatcctcaattcctcaccctcaaaaagatttcgcagctccccttcacctacactcgccccaatcggcgaggacaacaattcccgtttaccagtcccatccacgtgaagatgaccactctccatctcactacgatgacgcctaccacttcgcggcaattcactcactctccatttcgccaccgcccttcaccgcctatacacagtactcacacccgggagcccctcggaacccaccacgcgcgacgaaggctccaccgcagccacatctagcgcaacaaaat

SEQ ID NO: 102009 - DNA, 697 bp, Zea Mays
atagattctgcacttctgcagaataccatgatttgccacattttcaagtacattgcattgtgtcttcagtcattacgaaatgaagccatccttgatcagctgctctaaaaggtttacatttcaagtcacagccttcagcgtctctgattcctacttgataaaaatgactgatacaaatttcttcatggttttacagcctgacactgcatatggaggcatccagcataatgatctcgtctcctttatagcaaaagaccaaacttaagtcagttgtagatacagatgctcaaggatgctgtaaatctcatcggaattagggtggctggactctcccatcaagaactcatgaacaacattttccacttcaagccaactgcaccctgctgttttctcaataccctttcctctcattgattgccacacagtctcaacaaattcccattgctgaccacgagccaacgtgttggcaaggagtacataagttccaggattcctgggttcaatagcaatgagctctctcgctgcaaccttaccgacttcaacattgcaatgcttcctgcatgcattgatcaaggctccccagacacctgcatgtggttccattggcattgcccgtgctaattcgtatgcttccttaatgagtccagctcggccatagagatccaccatgcatgcatagtgatctggggattgctca

SEQ ID NO: 102010 - DNA, 771 bp, Zea Mays
aaagaagaagagacaggcagggaatggtgttgtgcgctagacaggactacaggagaggagctggagccagtggcgcttatatagccacaaaggaggggctcgacgaacggcagcgttgaccgccgcttaatcaccaataaattaatgtccacgccataacgtcgggaggaaatgtcacgggaaacggtaatgggcgaggagaacgggaaatggccgagcgtgggtgtgcgctgcgtgcagctcgggcgacgtgtttcctttatgaagaaacggcgacaacgttcgctgtatttttatttttcaaacgtacagaatagtgacggctgagttatagtatagcatgaacagtgtccgggggtggggcccatctgccagccagtcacgaggggtgaggtgctgggagtgcggtacatgagttgtggtcgagcggccaaccaggtgagtcgtgagagcgtgaggttggatttatttgttttttatttcaaaattctttttttcttttctatttttttaaataggtgtatctaagaaatagatatacttaaatatatttatatactttaattattcaaaaattataataaatccaataataatataaaaatacacaataaataaactctaggaaaaatttctattatttaaattaatgggacttcaacagattataaaaaaatctttgcagtacattacaaacaaacatcgtgctccaataacaagtgcatcagttacttggtagattttaattatttatgaaattgttaaactcgt

SEQ ID NO: 102011 - DNA, 536 bp, Zea Mays
taataattgagcggctaggaaaatatggagagagaaaaaaaaattgagttctgaagcttttggaccttgcttccggagaagtctggcaggtgcgtttctgatgtgtatctactgtcccaactgtcggttgtccaacaaatttcttattcagtttctgttcgaatcattgctacatgctcttttcatgtgtcgtgtgtggtctgtgccggaggaaactaccccatctcctaggacttgaacagttcaaatgtttgacggcgaccgatcctgctagtgatagcggtggaggtgcgaccacgttgagaaaagcaatctccagatgaggtagagatccggcctcccggccttggtcggtcagatatgagatctgatcgagatgcctatcgaaggtgaccccggtagttcatggtcgtctcgtagcagcaccaggaatggtgattcgcgagatcgtttgatgtgatgtcaaacaaacatgggaaatcaactagagtgcttgacgaagataaccagcgcaacagcgtggttttttgctattt

SEQ ID NO: 102012 - DNA, 649 bp, Zea Mays
agaatctattcagtttaggttcaagaatcctatagtaattttgaagaccattgtctggtgaacaattcttgttaatggagattaacatgttcttaacaagaatcaagagaaaaagggattaaagaaagccggttcagtcgagcacggaagatcgacgacatgggaaatatctgaaggaaaaaaatctgtgccactgtagaatccgaatgtgtccaaacgaagaggagacagagatggctggggtaggatagctctgaaccaatgcacaacttgcggattaggccacgtcggggcggggatatttcaacggcagccactgtggctcggtatctccgtcgcggtgtcactcgtgcctaattctaccacactgtgctccttggttacgtggtcgccatgcactaacatcgtgcctcgtgatcgcgggtagctagctaggtcgccatccctttaaattgtgccatgactcacggtgaggtcttcactgtcttccgttgtgattggtagaagccaaaattcgcggtgtcccttcctcatcctaaactggtagtgcacgttgaacttgtagttccttacggccgtatagccacagcgtgactgcctatttccgctagaattcatcacaacacccatttcccccatcgaaccccgc

SEQ ID NO: 102013 - DNA, 331 bp, Zea Mays
tagttttgatggctactttgccacctctcacaatcctcatgactcaatcacaccaagtattaccaaaaccttttttctccatcatagtatagaggaaatgccaatttactttgtcataagctttttcaaaatcaatttttaaaaccactccactttgatttttcctcttaacctcatgaagaatttcattgagagagatgaccccatccataatgtatctgtttttaatgaaaccatattgagaatcacttatcacttttgtgatgcaacccgcaagcctattattcagaactttggaaataaacttgtaacacacattcagaagacaaat

SEQ ID NO: 102014 - DNA, 392 bp, Zea Mays
gtttgctatagagcttcttcctggcaccgcccccatttctaaaagagcttacagagtatctggaccagagttagttgtactcaagaagtagatcgatgaactgtcagagaaaggttacatccggccaagcacctcgccttgggccgcccctgtcctgttcgtggagaagaaagatggcaccagaaggatgtgtatcgactatcgagctctgaatgaggtcacgatcaagaataagtaccccttgcccagaatagaagatctgttcgaccagttgagaggagccagcgtgttttcaaagatagatctgaggtcaggttatcatcagcacaggattcgaccttcagacattctgaagacggctttcattaccaaatatgggttgtatgagttca

SEQ ID NO: 102015 - DNA, 356 bp, Zea Mays
aataattgcagtgagacagatttcttttgcaggaagaataaatttcattcccaaatatgaccagggacatcgtgaattactagtcgggactcgggacaagatcccatctacaattcatattaacccaacctagatgtggctctacaaggtatggacctagctgaccaaaaataattgatcaaaaccaatgctatatacaaggaatttgttttcctcaatctaaacaagaatttaagaatttcaacagtaagcaatacaagaccatatatttgattagggcttcttcaaatagtatgagaaaccaagaaacaaattgcaaattttgtgaaaagaacagaaaacgaaatgcaaatctt

SEQ ID NO: 102016 - DNA, 458 bp, Zea Mays
gaataagaaaggcgttacatttttttctgttttccagtccatgaataaatctgcctgagttttgaactaagaaatgttatccccgttcatttgtaggtggtaccagtattttaaactaagaaaaatgttatctctattccacccacatgaacacgggacaaactgatgccattcctaacccatgcctgtgaaggatctagataactttgcctagtatccaggtggctacaaatggcactgacgacatttcaaatgaacgcaacattgtagatttccacagcaagctacagaatgagcatagattgctacctaggacaagacaacaatctaaataagaacggcactcccaaaatcctagtagcagcattcactcttgacacggttgagcatttcaaggcagcacagaaacatccatggaagcacaacatggactgggtccccgactcccccatggagac

SEQ ID NO: 102017 - DNA, 390 bp, Zea Mays
cccccccctttaggcgactttcatattccatgtatcccaaataaagatatgtgttcgattgccgaccgagatcatagcaaaaccagaagtggagatagagccagatttatcgtaccaagagtacccttccaaggttctagatttcaaagagagatcaacttgggctaaatcgatcaaaatgtataagatccaatggagtaatcactcagaggaagaggctacttgggaggctgaggaatttctacgttcaaacttccccgattgtctacctgagggaatcggtacgtaaccatgcccaaccgtcccccagccctatgaatctaaatataagaaaaatgatcttaacataaaaagagttaattgtaagactaaaactaagaggacttcctt

SEQ ID NO: 102018 - DNA, 364 bp, Zea Mays
aaatatggatttggcccatgttctaattaaatcataaggaagcctaaaattgtgcaacagtaggcaaataaatttttacccaactattgatgaagtagaccaccagataaaatatgaaacctatttaaaaatgtaaggtaacacccattaccccctaccccatgaaaaggccatataatccaagaatttctacccccttttcccttaagcaaaaagttgccaaatcctagaatgattgctcttgcacaaagaagaagataggaaaaattagaaatttgttgtttgacatttttcaagtataatggtagtagaaagaacctctttgaccaagaactttagaaaaatcacagtaaaatgacgaata

SEQ ID NO: 102019 - DNA, 472 bp, Zea Mays
ttggtcgcatgtactacgtgcacccaacagctggggagctatactatctacgtatgctcttgatgtttgtttcaggtgcgacgagcttcgttgatataaggaccttccaaaatactgtgtacgcaacattcagagaggcgtgcgaagcacgtggtttgctcgaaggtgacaacgagtggaaccttctatttgatgaggcaatagtctctgcctcggcgtttcagcttcgacaaatgttcgttaccattgtcgttcattgtcctgtttgcaatgttcgtgctttgtttgacaaatattggatctacttcaccgatgacatacaccgtggtcttagagaagcccttggcaaaccgcactacacagctccacatgaacaactccttacgttgcttttgaggaagctagcagacacattcgctaacagtggtgccaacatagctgattatgaccttccaatcttatcgtcctgttg

SEQ ID NO: 102020 - DNA, 292 bp, Zea Mays
taattattacaaaccaggtgttcattacataaattaaaggtgctgctaagatgagaatccttctccccctttttggcaacaagaaccaaaaaaggagagagccaccaatccaaagatcaccactgaggaggaggatgcggagcaaagaaatgatgcgccaggtgagatgcaaagtgttcttccccagactgatctgggggaggaacacttcctgaaggatcctggggcgaaggatgagaagaggattgacccggatccccctggtggggaggcggggcaaactgctcacgat

SEQ ID NO: 102021 - DNA, 454 bp, Zea Mays
ttcatattgggccgaagccataaacaccgcttgtcatgcatcaaataggctctattgtcacaagctcttaaagaaaactccctatgaattgcttattggtagaaagccaaatatctcatattttagagtattcgattgcaaatgctatattttgagaaagggaagccggctctctaaatttgagaagaaatgtgatgagggttttctacttgggtattcatcaaatagcaaggcctatagagttttcaacaagactcatggtattatcgaagaagcatatgatgttgagtttgatgaaacaaatggatctcaagatgaaaatgataatcttgatgatgttggtggagttcaattgagaaatgctatgaaaactatggctattggtgaaataaagccaaaggaagatgatgatgatagtgtggttgtcattccatcctcttcaactttaaatgag

SEQ ID NO: 102022 - DNA, 636 bp, Zea Mays
gtagcatgtattgaatgccactcatatacatgttctctacgattgaaacaaggtacaaaaaattgttatatgggacatcgtagattcctggaccccaaccgtccatatagatttgatccaaattcatttgatggtaaagttgaggaccggccagcgcctagaccactttctggggaggaagttttattgcaaacagagaatatgcacgcagtgcatgggaaaggttgccaacataaaaagaaagcaaaaaataaggaaggggagcctagtgtcatttggaaaaggaggtctatttttttaggcttccatattggaaggatttaatgttacgacataatttagatgtcatgcatatcgagaagaatgtgtgtgacaacattgtcaacaccatcctaggcattcaccgaaagtccaaggataacctgaaatatcgtttggatcttcagtccctaggcatccgaactgagcttcatcctgttccagtgggtgacaagttttatttaccaccagcatcatatactatgagtgcgtctgagaagacattattttgtgaactactaaaaggagtaaaatttcctgatggttatgcatcagatataagaaacaatgtggacgtgaaggagaagaagcttgttg

SEQ ID NO: 102023 - DNA, 857 bp, Zea Mays
gcggatgagaaacgacatgtagacaacggattcatgggtatctttgtcggaacaatgacctcatgacagatctgccaagaacagagttcctttggtggcaaaaccccagtctcaatgaggtggaaaagatcagattcagagataatagaccagcgaacggaagctggctgttgggatcgatgggcgggatgatcgcagcaacggcgctctgcctcttccgcttgggagccattgcaatctctcgggcagaacgagcgggcccagaaattcaagaaagcagagaagtggctgaggaaaaagtgaagttagggcttggaaatcaaaaaggcacgtcgacacgagtataaatgggtttcttgggtcgggcattacctctaaagtgccagatcaccactcggaaaagtaaaagcctcaatcatcactcggacattacctctaaaatagcagcactgtcaaacgcatgaaaaactttcaagcacgcaaatgaaaaccaaaacaatagagaatatttggagaaactgcatccttgattcatactagagggggtaacacagactcgaagccgactcattatgagtcaacttcttccaccctagctactacattacattaccttactacttacactataccacactactactacattattctacttctactactactgctattatctatactaatatttaaaccagtgccattatgccactagccttgccgccgtcactactgccaccaccgtcgcccttgccgccatcgctactgccaccaccatcgcccttgccgccgttgctgctgccatcgtcaccatcgcctttgctatgaattttatgttggttcaaattgggttggaa

SEQ ID NO: 102024 - DNA, 1450 bp, Zea Mays
cgcgtccttggcgcgctggctgctgcgggccacgttgaggacgcgctcaagctgttcgatgaaatgtcggagggtggtgtgcagcccatcccagtgacgtttgccatcatggttcgtgcactagcacacgccggaatggttgataggcttctggagatgattgggaggatgcggaacgaggtgtgtcggcctgatgtctttgtgtacactgcactggtgaagacaatggtgcggagggggtatatggatggctgcatgagggtttgggacgaaatggaaaaggatggggtggagccagacacaatggcatatgctactatggtcgggggactctgcaaggctgggatggtggaggaagcagcagaattgttcaaggagatgaggagcaaggggttactggtggacaggatggtgtatgcatcgctcattgatgggtatgttgctgttggcagggttggggatgggtgtaggttgttgaacgagttggttgatgctggctaccgtgctgacctggggatatataacacacttattattgggctgtgtggcataggtagggaggataaggctcataagttatttcagattgttcttcaggaggaccttatgccaagttctgatactgtttcaccgttgctagcttgttatgccgaaaagggtgaaatggttacattttttgggttggttaacaaactggcagagatgggcttgtctgttgttgaaatgttagtagattttatgaagctccttgcaggaaaggatggtagggtattgaaggctgtggaagtgtttgatgcattgagacaaaaacagtattgtagtgttggcatttataatattcttattgaaaatctgctgaagatcaaggataggaagaaatcacttttgttgtttgaagaaatgcaaagctcagttgattttaaaccagattcatgtacatatagtcatatgatcccatgtttcgtggatgaaggaaatgtcaaagaggcctgctcatgctacaacaccatgatgaaggaaaattggataccaagtatgtcagcctactgtgttcttgtgaaagggctttgcaagatgggggagatcaacacagccatatcacttgttaaagattgtcttggaaatatagaaaatgggccagctgaatttaaatacaccttgactattctggaagcttgcagatcaaaaagaccagagaaagtcatcaatgtggtgtatgagatgattgaagtaggttgttcaatggaagaaattgtctattctgctatcatatatggcttctgcaagtatgcaagttcaactgaggcgagacaggtattcactatcatgagagatcaaaatatcttatcagaagccaattttattgtttacgaggacatgctgaacgagcacttaaagaaggccactgcagacttggtgatatctggattgaagttttttgaccttgaat

SEQ ID NO: 102025 - DNA, 538 bp, Zea Mays
cagtaagtcacgatgggcccccatatccagccttggtccgatccaaagacacgacctctccatgcccattcgacgatgccttctaacaccctgcgaagactctccgacattttgtttcgatacccccatctttttcgccccacgggtcacttgggaatgcaccgatcgaagtcaccgacgcttcacagggggcgacctcaacggagactccactacagctaaatccaatgctgcaaaataatctaaatcatcctccgaggattcgtcatctatccaagaaaaagtgctccccaactttccaccctccaaagaccacgacccaacatcatattccctagacgcattactactaagaaacaccgcatttccatgcatcaaaatatcatcatttgtgtcatcatcagggtttgcttgcgcaggcccagacgccggaacctgcgcatcaatcgatcttcagtatcacacaaaacgaacaatgccaatctattccctattacactttctcaacctacaacgaagcgtctgccgtcacaggacc

SEQ ID NO: 102026 - DNA, 510 bp, Zea Mays
aaacgaaggtcttgaaaaagacaaaatcttattctctctggttaacaaagtcaaagaagatgaagctagcttcaaagcctaggccgaagcccaaaagattgaaattgaagacctttggaggcaactggccgaagctaaagaaaaatgcgcgcttgcagaagctaaccgagaaatcagcgaatattggaaaaatcatttagagaaaaacgttgaagaacttcgcacatccaaggaaatatgctttgaaaaatccttggcctgtgtgaagaaaataaaaaccagtttcgccaacgtgggcgcctactctaccgaagaaaacttcatacgaggcgaccccgaaggcattattgaatggataagtgggggaggccaagagcttcgaagaaatcttaagtgatcgcggggatgtctgtgcattttctggtgcacgggggatttcaactatcttggagaaggcataatgtgatcacatcaagactatggcctaggccaaagctgccttctccgcag

SEQ ID NO: 102027 - DNA, 532 bp, Zea Mays
ctcttccatgtcattctcgggcggttcaatctacgacaccacattgacggcactcccccacgcctagccgatcccctctggatccaagaggatctaactgtcttgatgtggatcaatgccactctggcagacgatctacttgatatggtgatggatgatgatatctctgcgtgtgaagcccggaacagaatagctaccttcttcctcggcaaccgggcaagccacgccgttcaactggaacaagatctgcacaacctcgaacaacgcgacatgagtgtcgccgcattctgccatcgcctgaaaaccctagcagattccctcgctgactgcgatagaccgatcgacgatcgttctctcgtgcatcaattgattcgaggtatgaatccaaagttccatgtccttaagaaaatgctccctgcattgccctcattccccaccttcatggaggcacgagatcagctcattgtggccaagaatactcttgcttcgtccaagtctccatcaaccaaatcggcgttgaacatcaccgatt

SEQ ID NO: 102028 - DNA, 416 bp, Zea Mays
gtaatcagctaccgtaccaagtggccgattgggtggacaagttagtggttctatataaaagctgatgagaaaaagagggaaaactgatgactatgttcatgagtccgatgagattaagcttcagaatgacaaggcccttatgccacatgcaacttagctccccgtgccagctggccgaagttgaatttagagtggtagctgccgagattagcactagggatctagtgcaggaatatttggcgaatataacgtttccaacctctagcggctgggggatgccaaagaaaaaggaagcggaaaaagtttgagcttgtccggctcccttatcgcttcaaatttgagaaactattcaagaaaccatgcaatgaatgactagaaatgatcgagaccatgtgcaatgagattcttggcaatta

SEQ ID NO: 102029 - DNA, 579 bp, Zea Mays
ggcgggtagtggtgctcgaacgagggcatcgactagggttagggctgaggctgaggcttccagcaggagacggtggcctcgctcacccatgcggtgtctcccagcaacgcacgtcgagagcgaggggaggaagaagagcgaatgtacggtgtcctatggcggtggcggcgtggagacacggttggtgggaaggacagccgcctggctggctacctcacatcttctaagcccgagggtgtggcagagctctgagctcagttaaccaaagttttggattcggagaccgtggacgcgtgtcgcgacaccgactgaggccgcacccatgaaacacgagaagcacccaaatgtgtcttctttcaataaaagagatccattggaattgtaaatgacagttgactaatgttgcgtatcttttcagtttcttctgccacggtttactatgtttcttctatgttatgtaatgatgacatggatcatcatagtatcagatatcattcatagcagggtttagcttgataagggaaataaatatttataaaatatcttcgattaattcgttccctcgattatactctcttt

SEQ ID NO: 102030 - DNA, 549 bp, Zea Mays
ctccatcccatcaacataacttttcctaccaccatccttggaaccctagattggttgatcattgtgtcttgaccatcatgttcttattagcacattgtctagattcatcatgattctccttttcatagagatccatgtcatttgtatcatctgccaatacaacaccccatcccatatcatggccacgaccacaaccttacattccacctcttggttttctttctctcctgctttttctagcactagattgagctaaaattgaccaatagtaaattatcccactcacgattcttcttatgcaaaccatctttgcactctatcacatcctgacaaatgaagttacaaaaatcaaagaagtttggaagcttctcatattgactataaatctcctcttctctttcattatgattggcatgacctaaaccatgggtttcccaatatctacaaatactcttgaattaagatacattgtcaaatttattttcctgtcgtttaccatcattaaaatgggaggttatgcaacttcccttgtcactctctttgccaaat

SEQ ID NO: 102031 - DNA, 470 bp, Zea Mays
gttgccttattttttattccatacaacaattgaaaacaagtgaccaacgttggtgcccacctccagtgatttcacgaccacatcaacagacaccatgccatcgaagaaagtagcgacaactagctccatccttgcatcgatcaatcccaatcaagggaacaaagctatcattagagaggcaaggatccaaaataagaaggccatcagctcgcctcctcgtgaagaagatcttgatgaagaaatcagcaatattgaagccattcaccagcaagtggagaagcacagggagaagatgcttcatctttcagaactccaaagaaagattgacgaagcaactaaagaaatgtgcaacatcgaagctcaggaaaacctgaacaacttcagggatcaagattacgatggacgagattatgacaatgatgatgaagcttctccattgacaccagagctgcaagctacaccatggccac

SEQ ID NO: 102032 - DNA, 383 bp, Zea Mays
ctaaatttcaacggactgaatttggcacaggttttcttgcactccgtcagcctcattgctggctcgacgtagagtcacgagacgccatctcgcgacctagctagcaacttacttaggcatcttgcattcttgcttatcagatgagtctcccatgctactaatcagtaaccaatactggaatgtggccgtcaaagccatacatacacacgaagatgctttgatatacgaatgctgcagtcagccatactgcccccgccaaagtctgaaagcgtaggagccatgtgcgtgcgcgtgattgaattcagggatcagctgtccctctcatcaaagaaaaaggaaagacatcgtatggcatgcatcttggctgttcagctcctagaaac

SEQ ID NO: 102033 - DNA, 528 bp, Zea Mays
cggaccgtccgcactgctctttttagcattaaacatatgccccctgccttttggtgaaggttgatgaaccaaaagcatatgaactaaatctgatgtaagtcatcggcttttcaacatggagatcattcaataaagcaccaatgtataaaggccgtttcagattgtatccttctcggccatgaccatttggtcaatggatcaaaaggaatagaatggcggtgcccccaatctggatagacaaagggactatacatgtaccatggattcatcattataccatttcatgtttgaacaggataatataacgatgatgagtaaacgggtggaaagtaccctggcctcataggatgaataggcgatgcttgtagtgtcgcctttcgggtcgttttgtttactcgtttcgtcttagcaagtgaccgaggtttcttcgttgaccgatcacgtagaacggtcttcttgctagtatccttggagagcaactgatcaaaagtagggtcggctttgatcagccgaccatatgtgttctgc

SEQ ID NO: 102034 - DNA, 575 bp, Zea Mays
tacatttgtagatccatctacacatcatcatgatggggatataccattgttaacacatgtggcctcactatttaagccaccctttggagatggattccactgagctccagtagacttcacactagttgtgaagatcatccatgcaattataagaagtacactactaccaagaatgggatatggtgaggtactcactaaaattcaataattcctcctcggtgacttgatctcacatacaatatttgatgttgttgactttatgatatgtgagatagaggacacattcttggatggcatcaaagccaaacgttaatttccctatgcacactacttagttatatcttctctcggttgattaaccatccaaagtgggcactcatattggagaactctacaagagcttattaattttatagacctcggtccaccatcaacacacgtctaggtgtgtgagctcttagtcgcagagatagagatatattagagagatagttgaggagagagtaggagcaaaatgaggtaactcgttaggtacatcaaatagagctttagaatctctttaagataaagtatgc

SEQ ID NO: 102035 - DNA, 566 bp, Zea Mays
aaggtaatcggaaatttaataaaggaaaaccaaggtaaaaagacaagtaaaagtttcatactgaattgagcagttttctagcttcatctccaaccaactcacgcccgcccttagcacaaatttgtgtaatgaatatgtttcctatgcttcgggcttcagctcgcatatcaactatatctgacgtcgaaagattgaaagttggtttgttaaccgtcttggcgtgagtgcatccagccttcataaatgcagcagttgttcctcgagaagctaccagggcacagaaatcttcgtgcccacttataactttgtcgagggcttcaactttgttttcaatatgattaaaggccccggggatgtcttcggccgaaggagtaaccttttcacaagcagctccaaccgagttgaatatccccttaagccggtctgcgcactgggtggcaaagtctacacacttgtttcgaagatccttaatagattcgctcagccttgtattcttttcagcttcagcttcgactcttgatttaagatcttttgtctcttggtcgaagcgccgtgaactttcatcc

SEQ ID NO: 102036 - DNA, 311 bp, Zea Mays
acccagaccactatcaccagcaggaggattggacatgaaattgaaaaaggacttaggaggtggcagattccaagcagagtagacaacagaagcaccaacatttgatactttgcctctcaagatcatgtctaatcggctcaccagatcctcagcaggaattctcttattggtaacccgagtcgagtcggtaacaccactgtacaagtaagctgggtacgctctatccttcaggggctgaatattcttaaaaataaagtcagcaaccacagcctcggcggtcagacctctctccttcagcagacagatttcag

SEQ ID NO: 102037 - DNA, 669 bp, Zea Mays
aatcagctatcatgttaggccaataaaaaccagaccttcgcaacagccacttcatctttggagctgattgatgggtaccacaaattccttcatgtacttcagctatggctaatatagcatcatctgggcccaagcacttaagtaggatgtcgttgactgttcggcggtagagttcatcactcatcaaaacatacttgaaagttgtacgcgcgaatgttcttatctgtcctaacattgggatttcgtaaataattagttatgggcgtcctccaatcacttgcatcggcttcattatcagtcgaatcgattaggagaactttcctggtaaccccggacggtccgacgtcttcacgcggacggtccgcgacctgggaattggccctacaccggttatcagattttcagtgttgtgaaatctccctcgctttatccgataacctgatgcatcttgtgccaaattgttagctctatgattctcaactctagagatatgtccaatactgaattcgttaaaagaatggattatgctccaacatttttcaaggtaactatttagagtaccatcaaaacattgatattcttctaacacctgttggacgaccagctgagaatcaccaaatgcctttacatgttttactcccatacaatttaaaagttccaagccgaaca

SEQ ID NO: 102038 - DNA, 331 bp, Zea Mays
gtgtttatctcttgtttatttgtgctgcaattcaattgaatagatgttgcgtatgcgaattggtagaggtgttgtccagaaatttagtgggtgggcgaacaacagtagttctagcagtttctgggaatttttcgtgggtaattagtgataaaaagtatgggaatcatgtagagctttgtcatacctttccaacgagtacttatgcgctcaattcggagttataaattaggagatatcgctgtttgaatctaggtatgttgctgtccaaagaaacagattgcaggggtttatcttgtggactgttttgggctaattagatgttagaatttaa

SEQ ID NO: 102039 - DNA, 381 bp, Zea Mays
cagctttccgggagcaccatgtgccccaaggattggtacagcttaaggaggacgagttccgagaattgactcaagacggaagatctgtcagcgaatatgtgcacaagttcacggagttagcccgctacgcgccagatgatgtcaatactgagagcaagaagatggcccgtttcctcaagggactcaggccagaactcaagacaattctggccagccaagacttcctcaacttctctcacctttccaacaaggccatgcaagttgaaagagctaaagaggaagaaaaaggacacctcaaacggaagttccaggttctccgggcacaacagcaggaccggcaccagaagactcgatcatttgggtttccacccaaggggccca

SEQ ID NO: 102040 - DNA, 580 bp, Zea Mays
agaaggagaagctggcggagaagggagtgagacccacctccccgcacctccggaactaccactagatttggcccaagttctagccaatcagacccgactcattgaagtcctcactagaagtctggagaaccagcgcccaggtggtaggagaccataggacaggatgggagaatttatgagactcaaacctcccacattcgctgggtctagcaatcccctcgatgcagatgactggctgcgcacgatcaagaggaaactggaagccatcggatgccccgaaaatcagcgtgttcaattggctgctcatcaactttctgggatggccctagcatgatgggataccttcagcgaggccgtcagggatgctacctgggtagattttgaaactgctttccgcgagcaccatgtaccccagaggatcattcaactcaaggaagatgaattccaggaactaactcaaggtggaagatctgtcagtgagtacgtgcacaagttcacagagttggctcgttacgcgcctaacgatgtcagcaccgagaccaggaagatggcccgttttctcaaagggctaagaccagaa

SEQ ID NO: 102041 - DNA, 407 bp, Zea Mays
atttgctataggatgaactcatagcccgttgaactagatggcaaggaggatgttcaaatagtagaagatgaagatgatactgaagttgttgactcgggttccaagagaaagctcacttcagttgtttggaatgagtttactagagtaaaaataagaggtgtaataaaggccaagtgcaattattgttttaagtatctttctacaggagcaaacattgtaactaaacatcttcatgaccatttgaaaatttgtacattgaaaaagattaagatggctggaaacaagacactttcacaatcttctttaaggtttggttcctcaaaaacaggggcaattttagtcgagaactatacatttgatcaagagacagctagaagcgaactttgcgcgatgatagttctacatga

SEQ ID NO: 102042 - DNA, 489 bp, Zea Mays
caggagatgacccatggcggcggcataacgacgaaagtcctcatgcagtgcctcgttctggagcctgtgcatggactcctcgattgcccggtcgcggcacatggcaaaggcgccaaaaatgcccttggccagacgaataaacagtccccgaccttgaccccgtccctagccctgacctctacctctcccgctgcggtccatcggacgtgaggcagcgacgacgcgagaggactcatgctgaggaggtggctcatcagaagaagcagggcctctagaccctgtgggagcccgctttgtacgagcagctgggttgctggaatcaacctagtatggtacatagcgggagtgtttgacaggcttctcgaagcgagtctggttgaccacttcgatcatattcataataaagggtgcatgacaacccttgagtggagaccaggaagcacaaaggatgtcttcccaaatcatatcaaacacatttatgcaagcaag

SEQ ID NO: 102043 - DNA, 666 bp, Zea Mays
ctggcctctaaagcgactccttgaccgaaggctggggctatcgccatgcaacaagagtgtggaggagaagaccctacgtgaacatccatggaagtgtgggagggagaacccactcgaacaccctcgggggctgggtcacagcttgcactacccatccgagccggatcatctccggcaacaccctcgagggctgggtaagcgccagcaccatccttgagggtcgagttctctgcagcagccacctctaaggctgaaggtccctcattcacttccatgggagcagtgcaatccagaccagcttcctgaccctcaagaccgcgctccaaggtcgatgaggcgcgggacgctgcccgggatgaccccaacccggcatcgagcacatcagcacaaacatccgtcgtgccaccatctgccggctctgacaacagatcttctggaaccatgttttcaagagtttgatcaaagttcgccagagataattcttgcagaccaatgagggcagacaaggcaggagaaggaacaccactactttccccactagttatgtaacaccggctgttcttccgaattagagggatttcatcctcttcctcatcatcttcatcaacgacacggacaatacacccattggggtcagcttcagcaggatcacacccattggggtca

SEQ ID NO: 102044 - DNA, 637 bp, Zea Mays
gggacgaatatatgtggggtttttgaaaggataggtagttgaacagtaaggaacgtttgtagaactagcagtcctgattaccaccttctggcgcttcaccgtcgactaagaaaactctgacctagaacctttccatgcctgcttcacattttgatgtactcgtgccttttcttccatagttatgccacacttattgcccgattgaaagtaagatcatagcaagtggccatcttcttttgcaattttgagttgaggcctctcataaagcaatctcttttcttgatatccgtgttcacatgctcaatagcatactgagaaaggtggttaaaattactaatatactgcatcacagtatctgccccttgcctaactcacataaattcctcaagtttcatttgcaaaatcccatcaggaacatgatgagtacggaaagcttctttaaattcaacctaagtaacctggtgatctggacgttgtatggtgacaaagttggaccaccaagtgctagcggctccatgaagttgttgtgcagcaaataaagacttcctttagaattgtctcacggaggctgtcaatctcaggaacacatcctgttctttaaccatattgtgccttgctcatcctctgtgaagtctgg

SEQ ID NO: 102045 - DNA, 484 bp, Zea Mays
tgccgggcaatgtggaatacatgcggcgtccaagatactagtcgggaaggttttcaggtcaggattctattggccaacatcgaagagtgatgcagccgagttagttcaaaggtgcgaagcttgccagtacttgtcaaaacaacaacatctgccagcacagcaactgcagaccataccagtgacttggccctttgcgtgctggggactggatatgattggacctttcaagaaagctcaaggaggatacactcatgtactggtagcaatcgacaaattcactaaatggatagaattcaaacccattgcctctttgactttagctaaggccgtggaattcatacaagacataatattcagattagggataccaaacagcatcataactgacctagtatccaacttcacaagttcagagttcttcgacttttgcgaacaaaaaagcattcagatcaagtatgcttctgtagcacatccaagagccaac

SEQ ID NO: 102046 - DNA, 282 bp, Zea Mays
gtatgccccaagtagctcatcgctagtagcttcaatgcacttcagccagtcatcatttggctcatcaaacttatccccaaacctgaaggtatacttcagtcggactaaattaccctcaccggagtcactgatggtctccttcggcatttcccagctttccacaagcggccataccctgaaggctatgtgttcttgaatcaaatctcttttaccaatgaaggagcaaacagtgttgaaggccttctgacacgcttcggcggcgtcatcaatttctaccttcga

SEQ ID NO: 102047 - DNA, 394 bp, Zea Mays
gcgaaaggttgaggaggaacattgatgataagagctttagtgataggaggaggagcgtctatcttaggaggttcagtggtaagaggggcatcaacggatggctggtatggaaatgaaggaggaggatagagatgtgaaaatagaggttatggaatcaaggaatggggacaagcaggaacgtcctcctatcgatgatggacgggagaaatatcattgaagaagacatgactcacacctgcatgggtctcgggatgttgtgaagattgcgtagtgaacaagtcgatgaacgtaccaaagttcggactccaccttggatctatatcaaaacagattgaaagaatacaaatggagagggcttatggatcaaagagtgagagatgtgaataaacccaag

SEQ ID NO: 102048 - DNA, 332 bp, Zea Mays
tgaatctgcctaggattgctccgtagatgcaggaacgattatccccttcggttccaactgtcaaggccgatcttgctgcctatggggtgattcaccagcgtatgagcctggcatcaattgcttttcaatcccgcgcttgagcaaagcaacgatgtcttctctgaagggtgcaagccatgatccacaaccatccatagagaggggggacagaacgcattgagtgtcaaaggacaaggcctcctgcgaggaattgggccacgccatggacgaatcgtgacttccttgcagtggtgcatgattggttttttcttggatgtaatttgtttcctggc

SEQ ID NO: 102049 - DNA, 504 bp, Zea Mays
aagagtacaatgaaagtgaggatgatttgttggattctcaggagttggatgaattcatcaaggatgatgaatttattccttcccccgctcaagagaaaaagaaatcgaatataaatgttcctgatgatgctagcaagaatgctggagttaaaaaaggaggtcctatggaaggtgatgtggcagaaggagttagaaggagcagcacactggaatctacagaggaaatgaaaattgctgataaagctgctgcaagagctattgctaaagatgcttttatcaataaaggtatgtcttacaatcctttctctgttcttaatactgataatgctgttcttatggatgtggctcatagaattggtgttgatttaggtcattcctttaatgattctgtggaaaatttaattctgattaaatctttagaactgtctaggaaaaatttagttgttcagtctgttaagattagtgttgataattccaatgttgattacattgcttctgatgtag

SEQ ID NO: 102050 - DNA, 667 bp, Zea Mays
taggaattgccgcttttgttgccgaagctaaaggcagagtttgttcaattgcttgcattacattcacaattcgtcgtttcttttatccttcagccatctcttctgtagccgagggcgtttccttcctctataaaagttttgtcagttccaatcctagagggcttagcagcttgaatggcggagaatcagtcattacctttaaaatttcaaccacttcggcagcatttggcgacgtaggggttctctctactgcttcgttgaccttcgattcaatagagggtgtttggtcaagcttccgcttcttaattgttgcctttagctctagcgctgtttttgttttctttaaggccttctcatcttcttttactaagcgggcagcttgcctacttaggatgctaacaaccctttttcttttcacacccctagcccctccatcaaacctctcacaatctgggtattcgaagtttaacgtatccattacccggttcagccttcgtttccgccgggtaccgaaggcagcattcattagctggtcctccttcttcttatagttgctaagaatctcattgcacatggtttcgatcatttccagccattcattgcatggtttcttgaactgtttctcaaatttgaagcgattggggagccgaacaagctcatacttttt

SEQ ID NO: 102051 - DNA, 700 bp, Zea Mays
ggaagaggcctatagatactcagagatgagtaggggcttcagaggaagacttcaccctagacatgtcagaacaatccacaatcccagctcaagtgacgacagaggaaaccacgctcaaggacatcagcaaagctcctagtcttcacagatgcaacaaagttcttagaggtcgctagctccaagaggtagaggaggaagaagctttggaggaagattcagctcccaacccagaaggttgttctgtttattctgcggggaggataaaggacatacaacaaggacgtgccaagtcacaatccaaaagcaaaaagaaatagctgaagccgaagcgcggcagaatcaatcgaagcaggtctacatactgcttcatgctattctccatacattctagagtacgtgggcaaccagcagcccacaacatcagttgcttcagcaagtcattctcaagctgcatgggccccgctaccatcaccaccacctatggcaccaactttgacccacaatcagcagtcagaagggcaccgccaagcacagcaacatctcgacacacgtgaagactctgaagctcacatggtcaacaacactgtgcccgagtcgaggcacatttactgaaattacacaggggctcaattagaaaaattttcatacctaatgtactctttacttgtctgtatttatatttctctcttttgaatacaat

SEQ ID NO: 102052 - DNA, 658 bp, Zea Mays
ttgtgaatttgtcaatggcaaccagtacgtgagtatagcctccctgagctttcttaaaaggtccgatcatgtccagcccccagcatgcaaatggccatgttataggaatggtctgtagatgctgtgcaggtaaatgttgttgctttgataagaattggaaagcttcacatctctggactaacttggcagcatcactcttcgttgttggccaatagaaaccagatctgaaagccttcctgaccagagttctggacgctgcatgtacttcgcactacccggcatggatttcatctaacagttgcttcccaatagccgagtgaatgcacttcatgaggactcccgtcgcacctcttctatacagtgtaccccctatgagggtgtagtgggctgactgccttgcgatgcgtttcgctgctgccttgtcatccggctcttcttcattttttatgtacctgatgataggttctctccagtcattgggattcgactctagttggtccaaggtgttgcattcttccatttgatctgagaggatacttggttgtgatatttcttggacgaagatcccgggtggagccagggcccgactggatcccagctttgacaacgcatctgctgccgcgttgcggtctttccacatgatggaactccaatcctt

SEQ ID NO: 102053 - DNA, 452 bp, Zea Mays
cagaaactaattgaaagggcggaaactacccccattgtctcaaagactgcttccgctatgcttgttgaagtcattgcagacccggctagagtgccagaatcagaaaaggtagtaggcaaggtgctagaacagcctaagaagatggtgacagcgctgccgaagctgtcagctaccataggaactccaaggaagaggaggatggctagtgtcttggaatttgttctagaatctgtgaaaacgccgcctccttctgccgaagcttctggcagcaaaactgaagatgtcacagggaggatcactgccagtacttctgctcgtgccgaggcaggaccttcggaaaatgcaccagaaaatcttgtgaaagaaagccttccagagaaaccctcggcgcctgctcccaaagcaccttccaagagtgatttgaatttcattgtgcgacatgcttcaggaaa

SEQ ID NO: 102054 - DNA, 295 bp, Zea Mays
agcagacgtcaacatcaagaacatgaagggagaatcaagcgactaaggcttcaatgcgggtgtacgacaacttgagaagcaaagaaaatgggctgtcaagcctcacgtgcgtgcgggttagtccgttagtggatagagaggggcccacgaagctgattttagcccatcatatctttcacattttttataatttacagtaaatatatatgtcagtaccctggaacaggggtacccgttactacagtatgaaggtgcgttgtccatgcggctatccttagtcgtgtggcgaacagta

SEQ ID NO: 102055 - DNA, 628 bp, Zea Mays
gcctgcatggatgctctactgtcagggagagagctggccgagcaatggagcaggtgaagtcctttgtattttctggttgaggtggaatgttgtatcgtgcttgtgatttctaacatgtcattttttctattttcggccctaagggatgaggaggttgaagattttggagggttggaggactcattagccactctggatgtcggcattgagggaggtgtggaggagcagtcttcgcacatgggtgctggcgttggagagccagcgttgtggagacctcgcgtctctaacacctcatgtgttaactatagagtttaacccaacacccactcctaaaactattatatcatgtagattattatggggaaagatcaacaccttcaatgaccctaagtaggtactaacccaccctaaaagacctaccttagccatctcatacaaatcaaaacaagggaagtgaccaaaccctatgtcacccttgaaaagcctataagaagcactaagcaaaagtgatgaagaaaacctatcaaatgcctaaatcatgaattggaccatcaataaaggttgtagctaactaattaacctacaaaagttagtaaaggtgataccccaaaaagatcttgcaagattc

SEQ ID NO: 102056 - DNA, 279 bp, Zea Mays
gttcataaaaagtcagtccatacaaaagaaattccatggaagaaaatatagtcagtcaatgcctcctagccttacccttgcctaaaatgtcggtgcctgaagtgtaatgttgtggagagcggtgccgcctacgctgctctggctaggatggttgtgtcgaaggagcccaatagagctatgaactcgatctcgtcttgatcgtcatcaaagccaaactgttgtccggtggacgttgttgttgtgtgggtagacgacaggacatgcacgtcatgtgatacc

SEQ ID NO: 102057 - DNA, 463 bp, Zea Mays
cggcgtctgtctcttcagattcattggcagaaccagttgatgcccctaccctcccgtgtgctgcggttgagaagctggcgacgcctggtgttctggccttgtgtgatgttgtggttctcgattattctcctaatggtgcctctgctgatttggctgctgagttgagggaggattcgttgttggtagtgagttgtgttgtcagtgcttcttctgctagatggaatttgaagccgcctgtttttaaagtctactccaggaggttgagaccatctattttggatgatcaggatggctcgttggttcagtcgggtcttgataattctatggtgatttcttcgcccttgtgcgagttccatgtttggtcactaaaccggtggatgccttgctaccaactccacagattccaaaaagaaggaagaagcatctacctagtaattttataccaaggcagagcaggagggtg

SEQ ID NO: 102058 - DNA, 506 bp, Zea Mays
ctctggtaagtcgctccagcgtttttgaggccaaacggcatggaggtatagcagaaagccccaaacggggtgatgaatgttgtttttcctcgtcttcttttgccaagctgatctgacgataaccggaatagcaatctaagaaagacaacgcagaacacccggcggtcgagtctaccacctggtctattctgggaagtccgaagggatccttcgggcaatgtttgttgagatccgtatagtcgacgcacatgcgccaatccactttattctttttgagtacaagaacaggatttgctaaccactcgggatgtaacacttctctaatgaatcctgacgcgaccaagcgagctagctctgcactgatggcttctctcttgtcgggcatgaaacaatgtaatttttgtcggatcagcctcgcctggggtaaaccttcagtttgtgctcggccagttctctcgagactcccgacatatccgcaggttgccatgcaaatatgtctcggttat

SEQ ID NO: 102059 - DNA, 360 bp, Zea Mays
cccttcttcaatagttcagtcattggcttggcaattctggagaaattcggaataaatcatcgataataccctaccaatccagaaaactccaaatttgctgcactgtggtaggaggttcccaatccattacttcttgtaccttttcaggatcaactaatatcccatcctgagaaattgtgtgacccagaaattttatctcctttagccagaaatcacatttggataatttagcatacaactgatggtcacgcagcctctgaagtacggtatgtaaatgcttagtgtgctcggcttcatttttggaatacaccagaatgtcatcaatgaaaaccaccacaaatttgtccagctctggcatga

SEQ ID NO: 102060 - DNA, 479 bp, Zea Mays
aagttgtcttggatgaacctccccttaatgaatgcactttgattcggggaaaccaattcattcaaccttggtgccaatcggttcgcgaggatttttgtaatcagttttgcaaagctgtagacgaggctaattggcctgaagtccttaatttgctcagccccttctttttttcggcaccataataatgtaggcagtgttaagcttccagaaattgatgaatctcctgctccaaacagctgaaacagctgccataacatcaccctttataatgttccaacacactttataaaaaaggccagtgaagccatccgacccaggggccttatccgagggtaaacctctgatggtttccaggacctcctgttctgcaaagggggagtccaagaccgccaggttgtgtctaggaaggccaagagcttccaggtcaattgttgcatccctctgtccatcctgcccaataagatttttgtagaagaggt

SEQ ID NO: 102061 - DNA, 936 bp, Zea Mays
actgaatatatatatggtgtggatcccaataattactgcatgcttatttggtcgtgaagggcgggactggacgtgccacgggtggaggtgaggttccgcaacctgacggtgtccacggaggtccactacggccgccgggcgttgccaacgctcctcaactacgtccatgacattgccgaggtatatatggaggatatgattcgtctttttcttttcttttttacgtgctgggtagggcaaagcgcggatcttctcatgattttaatttgcttgctcggatagcgactgcttcatgccaatgccatcgtgtgattagactgtccacgtcaggacgacctttgatcagcaatagtcctgtgacgcgttgttgccagtttccctttgcacgctatgggtacttaaatctcgtcacgtgtgcagttacggctgacagatgcaactagcaattttgacatgctcacagttttagtttatacatgacaactgtgtacccttttttaatgttattattattacaccagctgcgaccggttgctaatacgtagtaccttctatcctcgtgcagaggcttttaatttgctgccatcttttacgtcctaagaagaccaagctcactattctggatgatgttagtgggcttctacagcctgggaggtgagaaacgatacttgttactgcgcggggctctgcatgaacgcaaactcatctcacacactccgaataacttaaatttatatccacacacgcgcgcgccagaaaataattcacttcataatcctttagtgaaggattgcaagcactcatttactagctagtagtgtggaatttgtaataggtaataactgctgatgttgttttcttgttttgttttgttttgttttgtgtggagaaagaatgacactgttgctggggccaccatcatctgggaaatcgacg

SEQ ID NO: 102062 - DNA, 307 bp, Zea Mays
tgggaatcaggacatcgagttttaatctgattaaactgagggtctcttatgcaaaaatgctcggcgaaggggtatcggttaatcctgaccgcccaattttgatcccgtgtctcggaacaaatctgccctaatctgaaccggtatgtaatagcatccgcaggattgggtatcgacggctttgattttaaacacccggatctattgacacacatctaatccagatcagacggttcccattgattccattcgatctggcgcaaggttttaatctacactgttgcataggcgatcaacggccctagaccca

SEQ ID NO: 102063 - DNA, 712 bp, Zea Mays
gaggcttgagcagcagaaccatcaaggcctgatatttttcttcgtggttgatggttaggaacaatttgatcctgcatccaatctaaggtaagttgcttctatgaattcgttcgttgttattgtaatgtagttgcagcaatatagtattcattgttgaggttatgtttttagttttaatggatctagttgctctggtttgatcgattattgaatctgctgttctgcagttattttacctctagactagaacttcagtatcaaatgtaaaaaatctgtgatctagtttcattgaaggatatatgttatgtgcttcatcaaaaaggttagattatgtagcacccgtcatgacactttccgaaaaggcagtagtgctagcgcaaaacaatcaggaaaacatcatttttgaggctgagttggccttttgaattgtctcttttgttttcaacgttttattgcttcttgatagtttagtttttttttcggatgaagggtacttagttataataatggatggttacgtgcaaaactcttgcagaggccagaatataagtgctgctccgtaagctgttatatcttgtgtatacgaaacgcgcaggtctcttccgttctcgtctatcagtgggccattatctcacagatgtgagaaacgatacaaactcaacatgacataaagccacaaacagtgtatcgctcccatataataccatctcgt

SEQ ID NO: 102064 - DNA, 1005 bp, Zea Mays
atgaggcggaggcctcccttcacagcagtgtgcgggcggtgcacattcagctgcatgacacacatcgtaagtttggggcttaggtatttacatttattttacgatgttggtgagaacccgagcgagggctcgattcttccatcggctgtagcctgtaggatgaaatcgaaaatcttagcctcgttgttgaaggcctcatgtcgtactcagcccaagtgacacacgaacggaccaccaatgcttttgcgcgcaaggcctgccatcatttcaatcatttcgggttcccggctttgaaatgtacaaggtcgaagatgttgatatgcaaaggcctgctggcgtgctgtttgacatgatgtgggagccgcatggcattggaattgtacgtgaacgcgcgagccaggatgtggagaaggtgattgctgctatttttcccctgctttcgtactttccttatttttgtccgacacagatgttactcgcggagatcagagtagtggagctaacgcgacgaaggctactaacattgaaagtagtcaggttgtttatgtttttagtgtgacgacttgtgtaaaaacaaagcattttttcttgaccaatgcaatgattggtgtttgtgcaggttctgttgctagggcctatgcagcacattttgctggttattgatggtacgatggagacagaagttgatgcaatttttgtttctccgaaccgtcgtagtccatcagtggaatctattgaaatttatatgttgtttgggttagaggagtccttaaatatcaaggacaaattagtgtgttttgcgcttcttgatgaagtgtcatcggctcctcttgcaatagaaaaaggggagcccttgctggctaatcgttccgacttcggtagcggggtgcccgctttgggagaaaatattgaagggcaagtgccttcgcccagcttcagggaatatcatcgcgctgacttcgtcagccatgacagaagccgggacttcgaagtatgcaaaaactt

SEQ ID NO: 102065 - DNA, 271 bp, Zea Mays
caggaagggaggatgaattgatctacccgccaatccacacgaccggagagtaattagacaacaacaagaagaagagatgaatcctccaaatcctccaccaaccagaactgatccagcggttgcagcccagatgcagatgatgcagcagatggttgatactatggcacagatgcatgcgcagatgcggcaggaatgccaagagatgcgccaagaaaggcaagatatgcgagatgagatgagtcaggagaggatggggtgacaacagcaagcc

SEQ ID NO: 102066 - DNA, 488 bp, Zea Mays
aaacaatatgtttatgttaaaatccaaaattgtcctactcaacatcaatagcatacaaagcatagttcataagacacactaacgtaaacttcaaggcacttattttgaaaaccttgggcacctttgaaatgcaagctctttgcttggctaatcattagaaatccgatatggacatcatatagactacaaaatcgcgggtgggcgcacaacccctattgtccctgtgtaggtgcatgctggagaccacacacttgctcattgttgaatgttgagcttcaaggagcatctgggggcattggaagttggatatctctcaagcagctgcagccaacatcctaggctatctcaaagatagttaaagactggtggttcacaactggccaccttcttgggacgcctataaagggagtacagtctatgctccttctcacagtttgggaactttgaaatgaatgaaactcttgtatttttcatcgaatggagagaag

SEQ ID NO: 102067 - DNA, 359 bp, Zea Mays
ggccttcattctccccatggaagcgatagaaaaaatatatttggttgtacttgacctaatcctttcaccatcttgatagcatgagaaagtgttgattttgaaatagtcatggacagtcgattcggaggatctccctaaaatcatggttagggccaacgacacttgtgtggggctgccatgaggtagtccaacctgtgggagtgttagttcttatatgtcatccctgtacttctcttttagcctttcaagcaagatggaaaaagcgagtgatgttagtgcactccttgtaagctaatataccctgcttttttctagtcaaaccacccatgaatctagaattgtagcctcttcattttcta

SEQ ID NO: 102068 - DNA, 571 bp, Zea Mays
ccaattctaccactcataattgggttatgcaacatgtatttgatcacatcggcttgaccagaaatagtgcaatgactagacagtaaataacatctacatttgatgcatgcataaaacaagcataagcataacttctcaataaaagtgtaccttgtttcagcatccaccaaccttcggcttagatatgtcaccacatgcttcttcccctcagtttcttgtgtcagaacagccccaatgaccttatcttcagctgcaatgtataatcgaaatggtactcctgctcgtggtgcttttaatacgggagccgaagataagtattttttatgagatcaaatgcttcttgctgttctgcccctcaagcgaattcggcattattcttaagccaaagaataggggtgaacgcatcaatcttcccggctaggttagaaataaaactttgtaaataattcaccttgccgagaaacttttgtacctcgaccttataggtcggaggtcccacattctgaatagacttgattcggtcagggtctatctctataccatgttcatggatgacaaatcctaaaaactt

SEQ ID NO: 102069 - DNA, 442 bp, Zea Mays
tccgcgtcgtcggtgtggtcacgatagtaggccagggtgctccagcatgatttccggtgtgcgtgcatggcctcacttggtacgataggagcatgaggcgcagacaatcgctcccggtgcttcaccaccgtcacggatccgcggtgcgctgtgggcagactgcggctcgactgggaccattgtaagaacccccctatccggatccgccaccttctcaatttcgtttagcgtacaatactccagagaaccgtgtaccgtagggcggtgcggatttgtcggccatggcgcgccaccgtagtgccctgcgtagccgccggaatttggccagggtaggggggaattgggatcgacctttggattctcaaggaacgacagattttttttatctggagcatcatttcggtgatgtgcggttttgatccggtcgggatgtgaccgtccc

SEQ ID NO: 102070 - DNA, 312 bp, Zea Mays
gcagttgtgggtgagcgattgctcgccgtcacgagctgtcaccgcggagccgctccgcagcatgaacaggatccgagcacatccaattcccttaagtgatagctctgtgtgatttgctagaggctccgctacctagatttcgagttgggggtaggaatcggggctctggtccgcgattgggtgttcctccggcgatgctccgccgtgtgggtggtatgcgccaccgtcggatgcgccaggggggaagacaagtcatcggccgcggattcgtgaatggacggttaggattaagtccatcatacccctttggtc

SEQ ID NO: 102071 - DNA, 688 bp, Zea Mays
ctcgacccaaggagatgaatactaaacaacggagttatgcgtagaaagagcgcaaatacctcgggcatggaggttgagcatactcgaggagctagatacttggagctaactcaaatgaagggcacctaaaccccggataagcaggaatgcatgtcgtggacagattcagataaagttagatagtcatgacgacttgtaaagggataacactctggtcatctatataaggacaagggggtaccactacgaacgcatctcagatctcatctcatcacatcccatcaccacttcatagctcattagccttctcatagcaaccacaccaccactagatcaacaggagagctcaccctccaccaccgagagcctcgataggacatagggtgttacgcattctagaggcccgaacacttataaacccttgtgtgatccgacgtgcatccacacataccatcgagtcgcaatcaacgacgccgtcctactcaaaagcatcacgtggggaacctcgtggtgcgcagtcgggtcataaacaacgacatgcttcccattatttctttgaagttgaaagttgaaacaattcttattcaaaagatgtatgcaacatcactcggtcgttggtgtcccaaaactggatcggagtgctcgtaacaccaagtgctatgttagtgacaagatgggttcatcgtcg

SEQ ID NO: 102072 - DNA, 411 bp, Zea Mays
gactatgcgcaagtgctagctattcgtatgttatcggcgttcatcattaacaccattaaaaagacgacaatattttatttatttacgcaacccaaacacgatatcacaagtacacgcatttactacgctcaccttaatcattcatttgttctcctactgaccacacaagagcaaccaaaacaacgtaagtttaaataggacctaggcatcaatgtctatgaaactcctatatcacaatcaactagagaagaaacatataaaacatgacacacctgcattattaagcttagtcatggcaagtctatattaatttagtgctaaccaaccatttttagaccaaagggtgaactaacaattaaatgggcacatgcatatttttaggacagcagcacaacagttactagttttaat

SEQ ID NO: 102073 - DNA, 294 bp, Zea Mays
cccaatataagtcatcatcaaagaatggtggaataagagaacttcgaagatgtaagttctaaggatgaacctttttcatgtaatcttcatctttagaagtatctatttgtcagccacatttatcccaaatatttatatagaatcgcttcacgacattgaatacatccttcgaatgtttctttatctcttccacatccatgccgaagtcagccttactgattgtcttgatatggtcgcagcctgccttctccagcatagaggccatgccgtgagatcctatcatggcgcaatagt

SEQ ID NO: 102074 - DNA, 381 bp, Zea Mays
tacacttctaggaattcataatgtgaccattgcgtacgacacaatgtggaaggagaagtagaaggcactaaaggagtagtttggaacttaggagcatagcttccaacttttgttctcatggcgggaggctatactagcaaagtcaccagacaacatcgtagagattgatgtgactaaggaggatgggaagaactatttcaaccgtttcttctgtgcactaggtctatgcatcactggttttcgtgatggttgcatgctttacctaagtgttgattccactgctcttaatggaagatggaatgtgcatctaacttcagccactagtgttgattccactagctttggcctagatgcaaaactgaatgtgtgtgtgagttctgt

SEQ ID NO: 102075 - DNA, 670 bp, Zea Mays
agaggagagctagaccgagtaagactgttgcatcatcggtaacgcgacacacagggagcattgctgaagttggtgtccgaggccatcgctccattgactgggtttgcttgtgaagccatattggtgtcgcataacaaagcgcaccacaccactacctagtgcaccaaatatcatccatatatgacaccatgtaccatgggtactagaaaaaaatcaaagagagaggagagcataggactgggactgttgcaatagaggtatagcacaacggtatacacagacacacaatacaaagaggcctgggccgcttgatcataatgtcctacatccttcatatggtgaatgtttaggtgtaagtgcgggcataatttacgtacttagatgatagctgagttaatgagtgggaacaacccatgaattctagtcgtcttctttggtgtctctagtcaccagtcatccctctatgtgtcagctgagattcaattatcccgagggcgagagcctgattctaggtactagacctagttgtcggatcaaatttgttcatatgttgctctacacctttttatagcacaagatatgatagagttacatccatgcatggatgacaaacctctccaaacaaaggttcaattacttatatcttgtcgtagttgttgtgtcatacgtg

SEQ ID NO: 102076 - DNA, 380 bp, Zea Mays
atgacgtttaaattgctattatataatcgtgtgaaggatgctcatgatggtcgtgtgatttaggggtggtgtaatggcaagcgagaagtaagtttaatatttttaaaacgattagttgatagcatctgtcggtgtcgtcatgctttctattgtatggcggatcgatgccttgcttggtcaattattgcattccattccctttggataaataaatgtcttgttgatcgattggaggtctaatatgagcgttatcgcagcccaataattattggaggcgagtagcgttcatgagtccgtccttgttaaaattgaagaacaattcgataacatatgcacataagtgctttaggttctttagtagctatgtaagtcttatgaag

SEQ ID NO: 102077 - DNA, 811 bp, Zea Mays
cagcagccaagtacttatttgagcttatcagacggactcttctgccgaggatgggatacagggaggctaccacacatatccagctctggctccttggtgccctggtctctctttttgagtttgacgttgtggatttccttatctgtgagatcgaggacaccgttttggatggcattcgtgctcgtcgacagttgccatatgctcactatctgtgccacatttttgcgcagctgattcagcctccacagttttagggcacacttgaggcctcacgcctcggctttggatcctaccgtccagcgcctgaggatcctgtgccagcttctgctccagtttttagcactcaggccgaggatgctgctcaccatccgttcgcagctcaggatgcggcagttgatgatgatgatgatgacgatgattttgggattccgcctcctcctcctatgcctcctcgctcacatgatcatgaggctgggagttctagtgctacccctgctgccccttctgctgttgaccctgcacttgcttcgattcttcagaccctcactcagcagcaggctcacttggcaaccgagcagacccgccaggcagcagcccatcagcagttatccgagaggatgctctcgatgtttcagaccatacaggacagacaggattcccttcagcagcagcttcttcaggatcgggctgagagcagggcattcatggctcttatgctacagcattctagtgtctcggttcccccggttcagtctgcaccacctcctccgcttcaggctcctgttgtgccaacacttcagtctggaccctc

SEQ ID NO: 102078 - DNA, 627 bp, Zea Mays
gttttaatttacagtggtttgttatattatgtcttcaagattgagaaagtatccatcaggtagtgagaagagaaaaaggggaaacaaagtccgatgaattcattgaaacacagcgaggagctttggatatttttttaagactaataattctactgcttcaagtaatgaattgacaattgttgctgtggaggaagaggagcctgccattgggaattctgaagaagaacaaggaggaaatgttgatcccaatgtcgatgataacaatgtaggtggccctgagtaatttagcgggtgcaacatagtctgctaatgctgatgagccaccattttatacttacgatatttatgatccaaaaaatgggatagacttgataataatgcaagagatatattagctgtgaaagggcccataagagtggaaggtctggaattccctctagatgatgcatcaaggcatttttcttatgcccattatcatagaaaattatgcaatggggagatacatgatagaaaatggctattttattcaaagaatgatgacagagtattttgcttctgctataagatctttaagtctagcactagcaagagtcaaaactcactagcccatgatggatacaaaaaaat

SEQ ID NO: 102079 - DNA, 435 bp, Zea Mays
ccgtactcggaggtccgggttgagtgtacaggggtccggtgctctctcgtggaggtccggacccactgatggcatcctagagtatatcacctcttctggtcatgtggcgtccttgggaccgctcatgtggtagagttaggtgttgttcaccacgcggccagagatagctgcacatgcacagtgtcttcatactgtagtaaggggtacccctgatccatggtaccgacatagtccattaagcttgtgaaactctctaacttgtctttcacgaaataattcccccccccatttgttgtcctcttccatccacctttttaccagcaaaattctacttcgtagcatacccttgcctagcaaccttatgcctccctttctccaacatctcctgctgtaattgggctaatgatgcaaccttatctacaatggtaggttgat

SEQ ID NO: 102080 - DNA, 1074 bp, Zea Mays
atatcaacaggtaaaaaaagtgttctattggatggggttaaaaggcggatgtggtccagtttgtacaacagcgtgcaacttgtcaaaaggcaaagagtgaaagaactcatccagctgggttattacaacctttgcctgtaccacagggtgtgtgggaagatgtgactatggatttcattgaaggtttgcctaagtcggatgggtttgatacaatcttagtggtggttgacagattttcgaaatatagccatttcttccctttgaaacatccttttactgcgaaaggtgttgctcaagtctttctggacagtgtggttaagttacatggagggcccaagtcgctggtatctgacagggataaggtgtttactagcagtttttggaagaatttgtttcagctgatggaggtcaagctgctgatgtctacagcctatcgcccacagactgatggccaaagtgagcgtgtcaaccaatgtctggagatgtatctcaggtgtgctgtcaattctcaacccaccaaatggaagaattggttggctctagcggagtattggtacaatactactcatcatgctgttttgggttgtacaccattcagggtgttatatgggtatgatgctcctctgttagcccttcctagactcatcaatattgaggacccagatgtcactaagtgggtcaaggaaaggaatgctttttctgccatgttgaaggaacagttggctagagcacagctgcgtatgaagcaatatgctgataaaggcagaacaccaagagaatttcaagtaggagaatttgttctgttaaaactccagccatatgcacagaagacagtggtgaatcggccttgtcccaaatcgtcctttaaattttttgggccttacaagattgcagctcgagttggggcagtggcatataagttggaattgccacctgatgctcaagtgcatccggtgtttcatgtgtctcaacttaagccgtttcacccgtgttattctccagtttacactgagctccctatattggttgatctgtctcaaggggatgttgagcctgagcaaattttgaatcgac

SEQ ID NO: 102081 - DNA, 460 bp, Zea Mays
tccattatttgggatgtctggttcgcacaacgacatcaacattttgcataggtcgtctttgttcgcacggctagctgaaggtcaagctccacgggtcaattatacccttaataacaacgaatatacaatgggttattatctagcagatgacatatatccctcgtgggctatatttatgaagaccatacctgaaccacaaggtaacaagaagaaatattttgccactgcacaagaagcttgtaggaaagacgtggaaaaatattttgggattctttagtctcgtttcgctatcgttaggggccagctcgtttctgggacgagcacactcttggactaatcatgagggcttgtatcattatgcacaatatgatagtagaggacgagcgtgaggacgaagatgatttcaattatgatggggtgggagaaaagctgaagatttctcgtgacgaaacaccagaac

SEQ ID NO: 102082 - DNA, 546 bp, Zea Mays
tcttcttctcttttgtcttatctatgtcaagttggaagtatgtctttatgtctagagaaatataggggcatttcttgacattcttccctctatgtgcaagatgttccttcaatcgggtaccacccccaccgctctttgtttctttacaatacttgcacttaaaacatgtgtcaaccttctctttgtgctgtcacaataggtctgtcatgtctcttacagaacataaacatataattgattgagcatacacatttaacaataactaatccataaactattgggcattcacatttaacaataaataaatcataacacatttaacaataactaatccataaaccataagtcatcacatatgtaacaatactaacatataacatatataaatctgaaaccctaaatccgaaaacatattatcgagacgaaatctaaaaccctaaacgccacaaaactaaatctgagcaataaatacgtagtatagaactaaatatgggtattgaatccggtttaccggaactaaaacatggtttaccttctccaatcgtg

SEQ ID NO: 102083 - DNA, 683 bp, Zea Mays
atttgtgcttaatgtagccgttgttctcggaggtaatgcttgagtaacgacttggaattgttgagtcgcattttaagtccgcctgcatattcgtagagaaaaaatggctgatttactgtcagtatctttagaggtaatagccgaatggtttttttgcgacgccggcgttttagaggtaacagccgagtccttttgagccacatcagcgttttagaaataacgggcgagtgattactggtgacgtcagcgttttagaagtaacaactgagttatatcgagtcatgtcggtgttttagaaataacggccgagtgaagactggtgacgtcagtgttttagaaataacagctgagttacatcaagccacgtcggcgttttagaagtaacagccgagtgatgactgggcacttttagaatcggtgcatgaccctagaaaaccccatttgtaccgcgccatcgcatgtctctgcattctgagccctagccttactttctgcttccagaccttctctgtttccctttgatctcgcttccgctcagttcaccgacgagattgagatggtgcccaagcggaagagtcagaattccgccgctgtgattattcctcccatcgatcccaacagccaattacctttcgcaggtaatcatatgtccgttgtttccgagtcagaccttctccatcttg

SEQ ID NO: 102084 - DNA, 780 bp, Zea Mays
aggccaaacctgccgaaacatcgcccatatcagaagtaatgaagcgatcaggtctagttgtgccaggggaggtctgacgaaggtgcttccaatgccgaagctggacaaactgtggttgagggtgagagtgataatgaaagcaaagaggataacaacattctgaacctggcaaagcctagtcatcttgaatttgaaaaatctactttaacagaagatgacatgactatgatgaaaaaactgggctatttcagggagtctgagagcaagcttgtttgatttgttgggaaataggtaattccggagccgagggaggacgaagttatcatctttaagagtttttttagagcagggcttcggttccccctaaatgacatgacaggggaggttctaaataactttgaaatataccttcatcagctgacccccaatgctattgttagacttagcgtcttcatatgggctctccgaagctaaggaatggatgctaatgccaaagctttttgccgggtgcacgagctacactaccagacgaaggctatagcagatggccttcacaagaactttggatgttataattttgcgtatcggaaggatacgaaggccccggctattggctatcgcaccaagtggccaatcgggtggactaatgaatgtttctacatgaaagctgatgagaataagagggaaaaactcatgagtatggtaatgaatcccttgaagctgaacttcggcatgactcgacccttgtgcaacatgcagctagggtccccttgccaattg

SEQ ID NO: 102085 - DNA, 469 bp, Zea Mays
gtagcgttagagttgtggagaatggcccttaacgggaaggaggtcaccaccatgaccctgtgtgcctgaaaatagtggcgcaacttcctggacgcaacaagtatagcatagataagcttgtgcgtctcaagatacctggcctttgcctcatggaggacttcgctgacatagtagactggcttctggatggttcggacccctacggttggtcccgagccctcaaactctttaccttccatcaccatcgtggtggtcggaccaccaccttctcctaggggaactttttgactcccctagggatgttgtgccgtctttcaacgatcagcaccatgctcaccacctctgtagccgctgcaatgtataagtacaacggctcccctggctctggagctactagtatttgtagggacacaaggtgctgcttcaactcttgaaaggctcgttctgcctcctcggtccaagagaatgg

SEQ ID NO: 102086 - DNA, 388 bp, Zea Mays
ctttcttgagatatatgtttattaacggtggacaggttaatacactccctctgttttaaattgtaaagtattcgtgcaaaacactaatagagtttgaaatagcaaacatgatagaagaagggatagaaaagctgcataagacatccttatgtggtatttggatttcctaactaaaatttagtctctgtcacatcgaatgtttggatgatagttagaaatattaaatatacgacctgtttgtttggtattataatatgactagattatataatctaacttgtttaaaataagttaggaagattgtaatcctaaacaaacatgctcatagtctaattataaaactaattacatagaagatgaataaatgttaagacgaatctattaagtc

SEQ ID NO: 102087 - DNA, 516 bp, Zea Mays
aatacttttctgatgaaatctgatgatttttagaacctgaaaatactttccactagcgttcctcttaaagaatcgccagtgaaaaaataacaatggcggctggctttaggaaccgcctatgaaaacggtgaattaacactagcggctggctttaggaaccgcctatggaaatcatttctacgggcggttctttgaaccgccagtagaaatcgttttacttatatgcgcctcaatggtttcgccgctccagacgctctagtactgtccctgctctccattctcgctccagccaccgacgttccacctcgcgcctccccttcattgtcgttgccggatccgccctccctccgtcgtcctagccgaagtgaagtaggcggcgggctcggccgtcgactctacacaccgcgcgccagacaccaagacgtggatctaggtcaactgcttagttccttcattttactattgctatctgccctcatgcctccattttaatttattaaatcactcttctttttc

SEQ ID NO: 102088 - DNA, 678 bp, Zea Mays
ataggccaaggagggggtcggccaatggtagcttccttaagaaggagccgtcgggcgacggtaaagctgagcattctatcatggggtaaagccacgtgtgctcgtgggccccgagattacctggcagtcttgtattctttatggcggatggcgcaggcagcgtgggtcccgacctccatcatttgggctatgctaacccctggtcttcgtagcctagggctcagtgtggttcgtcgtgttgtaccttaccagagatctgtgcactcatgcctagttctagtagttcatgagtgtgtcgtaggttgagcagtgcgtgggccataaatgtgacatagtcagaggggttcgtaggtcaagagtgctttgtgacccgaggggctcgtaggctatgagtaggaggcagaccgacgcctccgttgtggctcggcatcaagcgcagttaatgcgaccgatcacttatgaggggtcggtctcgggccaggcgagggatccactcgagtggtttcccatcggtacgtctgccccctgttagactctgccatgcccgaccccgggcttagtaccatggggcttgtccaggggcgggttcctctagggtagatgctacctgtctccttcggggcggtgcccggttgctagccacattccttgggcacgttcgctaattgatggacccta

SEQ ID NO: 102089 - DNA, 484 bp, Zea Mays
cttcgtcgcgtctgatttggaggcctaaggcacactgcattaatggattggcggcaggctgcaatgatgctcctgctgcattagaagttgctcctggagacttagccaaggcctctttgccttcggtcaccgggcccactcaatcttccggtaaaggcgccttttcgttctctgtcatgggcacccgttcggctcccatccctaaaagagtttcgctcgactttcaattggcttcggttgctgggtcgactgctatactcggttgcaggcatcttctcgtttctaacgctggccacctctcgcgtactgttgccgagcaaaccctcttgccctcaccttctcgatctcatcagttcggtggtctctcgttgttgccctcgtctctcttgcaaatggccaacttcccggtggatcctcgtcccttcctcccgccggagatcgtcattgaaaatgctcagcctgctagtggctaccagcctccctc

SEQ ID NO: 102090 - DNA, 340 bp, Zea Mays
aattgaaccccttctgtagtccattgttacctctttaactgcctggtaggctggtaccactagcttgagaatctatgggttgatggttgggctgcaatggagacaaaagcaattttctgcaacctgcaaaatggtgaactagattttccaggcgaaaacacatgaaatcaataggtgctgtgtggtcttctcttcttcatcagaaggggcaagcagctgggtgggaagtcctcttttagtgatccggtccgcatttcaagaacggttctttactgcaagccaaatggagagcttgcagcaaagaggagcccaggacttccaaattcgtttccatggagca

SEQ ID NO: 102091 - DNA, 656 bp, Zea Mays
atgaaccacggctgctaactccaagtcatgggtgggataattttgctcatgaggcctgagtgcccttgatgcgtaggcaatgactcggttgtcttgcatcaaaacacaacccagtctagtgctagaggcatcacagtacacatcaaatggcttgttgttgtcgggttgcgctaacacgggtgttgtggtcagatgctgcctcaaggtgtggaaagcatcttcgcacttctgaccccaatcaaatttggctcccttcttcaacaattcaatcatgggcttcgcaattcgagagaagtctggaatgaatcttcgataataaccggccaattccagaaaatttcgaatctgacggacagttgttggtggcttccagttcattacctcctgcactttatctggatcaacagctatgccagcttgatagatagtgtgacccaagaatttgatttcttttagccaaaaatcacattttgatagtttggaataaagacggtgctctcgtagatgttggatcactacatgcaaatgaccggcatgctcttcatcattctttgagtacaccaatatattgtcgatgaaaaccaccacaaacttgtccagttcaggcatgaagactgaattcatcagatacatgaagtatgctggcacattagtta

SEQ ID NO: 102092 - DNA, 874 bp, Zea Mays
ctgaggttctcccggagagtccatggacgcaaaaaacgaaaagggtaacctcaggttgaatatttattatttctaccaattggtctagcgttctcgcagacggtccatgggaacatagaccgtagaggctaagtgtttatactttatgctgagtgggtgatctcatggatgaaccgatgatctcgtgcacggtctgcaggaacatagaccatgtgttttgaagatcttgaaaacgaagtctcatcctatggtatgtgcatgcgcaaactctgtttgttgagtgttcctagggttccatagatcacatctaataactagttgaacctaaccacatttcatctaaacgacaaaaggtgcatatgggatttttctaggtgacgaaccttattccttgatccaccgtgcaaaatgtggtttgtgctcaaaaataattcatccaggggagtaggatatgtttctaagctttttgtatgagtgtaacaagctttatccagcccctccttcccctatggcttctcttcttgaaaactactgctagctccctcttgcttgggagagaaggctcttccttcttaatatctaggagcttgtggcattcttctacttgatctccatggtcttttgttgtggatgatctacaactcttcttctcctctccttgtgctcttgagtgtgttctagatagagagggatgaactagagaggggaatgggagagtgaatgagtgagagtgctattggtggtgaaggtgtgcatgaaaatgggcagttcactatcggaatccagctctttgtcgagtgccttttgttgggcactcgggaaacaattatttgctgagtgctgcacacagcaaagtcacactctcactaacgac

SEQ ID NO: 102093 - DNA, 523 bp, Zea Mays
gtcagcagcaaggaagactataggggtgaataccagaagggcgcggacaaggacacagaacagaagaagctaaaagaaaatgtgctgggccgtcgtgtgtcaaagcccagtgggcgttacccgtcggacatgtggtctgtgtaaggaggggcgaggaagtattttagactatggttgtctctgtgaaccctgagatttaagaaatacagaacccttctcctatcatcttcttcctcccgagctacttccttctctcctctgtaatcaccatagttggtagctaacaggatggccggcttgcatgaggacagcacctactccaatgttgctagcatctgtttccaagataaacggcagattgaagtttggtaatgataatacaggggccgacactaatgcttctttcagagctgtaaacgaagattcatgagaaggtgtccaaacaaacaagactcctttctttaaaagtgacgtggtcgattttgcaatcactccaaaatttctcacgaaccgtcgataatac

SEQ ID NO: 102094 - DNA, 277 bp, Zea Mays
gttccctaaagagttaccaggcatgccaactgaaaggaaagttgaatttgccatagagcttatcccaggcaccgcccctatttccaagagagcctatcgagtgtccggaccagagttggtggaactcaagaagcagattgatgagttattggagaaaggttacatcagaccaagtaccacaccttgggcagccctcgtgctatttgtggagaagaaggatggtacgaagaggatgtgcattgattatatagctttgaatgaagtcactgtcaagaac

SEQ ID NO: 102095 - DNA, 422 bp, Zea Mays
ctcaacagtctaacgtatttatataaatttagtatatggtttctcagatttcgattgaaattgacttgtcgacactaatcgcttccacttacttcattaggtaccaacatctatctacgacagttatcctaccacgagacgaagcatagaatgtcttctagtaaagcattaatttctttaaacaaactaaatcggcacgacaacatcgtcagaacttactagctagctagataaaatacttaacctagttttcgcattataatctaatcacgctacgtatacaaattttccaacacattctttatagaatttgtacctcaaacctatatttcaccacacctcacgactacttcataattacggcggtaaccaagcagcatacaattacgacctttatcatgcatcaaatacacccacgacgc

SEQ ID NO: 102096 - DNA, 422 bp, Zea Mays
atgtatatttcaagtatactaacccaccctttccagcactttgacttgaactagcgtcaacgtccttcggcatctcccactcattgacgaggggccatactttaaatgctatgtgctcttgaaccaaatccttggtgcaaatgtagctgcacacaacattgaatgccaccaagcaagactaggacatatctgtattcatgataactggcctctttattccaaagtgggatcggataggccactggatcacgtccttaatatcacctctcttgaccaagacattcttcatgtaaaaccattgtttcatccatgagcccagccactttttccaaaatgttggcatggggtgcctggcatttaatctgtatatgaaggtacaacagccaaagttattgtggtactgctccttcccagtagccttt

SEQ ID NO: 102097 - DNA, 573 bp, Zea Mays
gtgttttgcgatgtttaacaccttgtgtgatccaattattaacccttttgtatataagagtttcttcagaatatatcaattaatgtatcctgattatggatattatgtggatattttctatctatgaatggcccctgcactttgaatcgcttatgtcattgttagcaatcacataatatttttcttttctcttagatttaatttgtatagtcatgtaatcattcatatattggtacaacaggatttggtttagcttctcactttgttttttttaaatgagaagaggcagacaacaaattatagtgaaggctcctctcatcccccgtcgcttggtggatcacccccacgaaaccagcctagccaaagacaggtatgtgcatgatgtcattcttggtagcctatcatcatctttggctcaaagtgcttctatagttaaatggatgtagtgcaagttttatttttattttctgctccagttgttttctatgctacttccttggtattagttcaccgtgcataagtgatctgcagcaaatgttcttcttcctaaccaactgtatatgctcttaattg

SEQ ID NO: 102098 - DNA, 877 bp, Zea Mays
gccttgagtatatggttagtgtgcttggatgtttcgttagaaaacacttttcggtaccgaatactgttattgttttcctgttgttagagttcaacggtatctacaatcgtaaaagtaagtgcatcatgatggttttgaatttttttcgtggggcatagaaatcgccctgggatgaatagttgcgaacgtgtcgaatgtgccgcgccaatttaagtcgttgtcagcttaaatcgatcgttccgctgtcaggggtatagtgatcaccggcctaaaccgattgctccgttggcagggtattgtggtcacccttagttaagtaagcgtgagcatgttgcaccgtcttaagtcatcaccgacttaagccgattgctctattagtagggtatagtggtcaccccgagttaagtaagcgtgagcatgttgcaccgtcttaagtcatcgccgacttaagtcgattgctccgttagtagggtatagtggtcaccctgagttaagtaagcgtgagcatgttgcaccgtcttaagtcatcgccgacttaagccgattgctccattagtagggtacagtggtcaccctgagttaagtaagcgtgagcatgttgcaccgtcttaagtcaccaccgacttaagctggttgctccgttaatagggtatagtggtcaccccgagttaagtaagtgtgagcatgttgcaccgtcttaagtcatcgccgacttaagccgattgctccgttagtagggtatagtggtcaccctgatttgagcaagaacgcaaaacgaagaattctcgaagcctctttattgatgatgtgtttcccggtttacagaatacattgtcgccccaatagcttttgaaatgtagctaaggataaaacttcc

SEQ ID NO: 102099 - DNA, 500 bp, Zea Mays
ataaagtttttgttttcaaaggcattcagattcttgactctcagctgacctcgacttgactaggcttgaaatcagcacgcttactcgactcagggtgaccactataccctattgacggagcgatcggcttaagccagcgatggcttaagtcggtgcgacatgctcacacttactcgactcagggtgaccactataccctactgtcgctggcttaagtcggtccgacatgctcacacttactcgactcagggtgaccactataccctactgacggagcgattggcttaagccagcgatggcttaagtcggtgcgacatgctcacacttactcgactcagggtgaccactataccctactgacggagcaattggcttaagctagcgatggcttaagttggtgcgacatgctcgtgcttacttgactcagggtgaccactataccctactaacggagcaatcggcttaagccagcgatggcttaagttggtgcgacatgctcg

SEQ ID NO: 102100 - DNA, 739 bp, Zea Mays
ccaaatgttggaacttgccgacacgtggtctagctaatccaaacagtgggagtatgaggatgatttgatgcttgtcaacacagtgtattagggcaacaatgtttttcagcctcctgcaatagggtacaatgtgggggtatttataggtaacaggggacggtttcaccatgtcaaatacagttatacccctaattacctacgttatccctgtaatattcccatctcaagggttattacagaccattacagtgtgattaggtattacacggacggacacaccattaactctacccacatagtggcttacaagtgggaccatgcggcctagggcggttttacacgggcccaacgtcttaacaacgcactggtggcgacgtgaagccttcgtactccacgcgccaggtcttcggtagttggtgaggccttcaccattcctggctctaacggggaccggcaaggccttcgcttgcttcgtacgctccctctgtcttggggccttcgctccatcagtcttcgtctgcctttgcttttcctccatcatgatttgtccgtcccgaaacagtcgatcgagggggtggtacgccttcgctccaacacatttcatattacatttttctgttggaagtctattactaattacattgtgattgcttatggaaccaaattcaatttagatgtttgctaagtttgctccctagcttgggcatttctatgctcttattgatcatataagtgtatg

SEQ ID NO: 102101 - DNA, 599 bp, Zea Mays
tcggtggctgggtgggtgatgaccttgcggggctggcggagggctcaatttataggaagcaagagcggcggccgggaattttagcggtgacgcgcggcggtcagaggaagaagaagagcactggcgcagtggattcgtggccagcgccgtagcaattgctccggcgatcaacagggagccgctaaggcttacgacgatgcggtggaaagttagagccacgcggcggacaacggtgacggcagtcaccggcgttcttatcggtttctactgcggtgaacatggtacggcgaccggaattgtttatcggccggagtttatccccggcgacgtacaccagtgttatccactcaccccgagcacatgttggaccagcggcggcatgaatcgcggcggaaatcggtcgtcggtggtgagtctgccgcgctgtcgttctgatccatttgggacactgtaccatcgcgatgctaattcagtgtgtctgatagccaagatttagggccagattcctctcaatttcctatggcaacatacccgagtctctgcagcaaagttgtagagctacataccagctacaaatcgactatagggattaaactcag

SEQ ID NO: 102102 - DNA, 478 bp, Zea Mays
cttggatatggtgctagaaacgttaaaatccgatgtagcagcatatatttgatggttcattcattaacatgatggaccctaagtcaagttatttgctgaaaatcagacttactcgtaatcctaaaaagcatagaaaggacttttcatactttgaatgcagcaatgttgtagatttcgatttatgcaatttcaaggatcttgttcacgaaattgttgatcagtacccacatggatacaatgagacaatgcatgttttttactatgatgttgcccaaaaaaccttcccacaaattaaaacagaccaagaactcctgaaaatgtttagcaaacatgttgatagcaaaatagtgctcatgaccattacatacactgagcacaccgatgttgtcctagtcccagagtggtgctacactgaagaagatatcccatgcataccttctttggcttgtccatctctaccaccagtgagccaaataac

SEQ ID NO: 102103 - DNA, 469 bp, Zea Mays
attcttaactctaatatcatattatttgcgttcgtttgtgtaagctataacctatctggctagtttataggttgtgggccctagaaagtggggtgggggggggggcagggcgaccaaccctcgatcctaaaatttaattagaccaggacccctaaacatcaacaattgttgcaccttgttatatctggattaacaatcagaaaatattatagaagcaataaaagcatatatggattaaaaccaaacgaacaaggtgacgaccagtgcgcctagccgatgatatggccagctatgtatacgtcgatcgactgtgagacagtttgcgcaccatacgcctgtgcatagggttgaaaacagacggataaaatttcgctccgacccataccgttttcaacatttgacctgaccgttttcgtatttacgaaaaaatatggaaacaggatggaaacaacagatggtttatttcgtc

SEQ ID NO: 102104 - DNA, 292 bp, Zea Mays
ctctggtgctgatctgttcggctaccaccctgaattctgccacaacttgttggcatggtgaccccgacgtcatgcgacacaagggcctagtcaacccgaagcttaaactcagcgggctcatcactagcgttttcaacttctccctcttcttctcatcggcctagacatagaaccactcacttttccaaccggttggccacttggtgtgatagctaagcaccggggccttcatatccttgcaatatgcgaagttagaacagccaaagttttcatgcagtccgtcttctctggt

SEQ ID NO: 102105 - DNA, 455 bp, Zea Mays
gacgaggtggatagatgcaatgcagctctggattccggcttttttggtggataaggttgcggggacgaagtagacctggagggtgcaaagcagaagaagaacaaagcaaacccgcgcgacacgatcactatgctccatgctactacgtcggttgcacacgtacgcagtgtgtgcgagtacggagtgccatgcacggataaaaggcctagtgattctatcccagctttacagtgctgtcttaattaagccttttctttcaaataggtattttcaaaaaaaaaattactacaagatgcttatttacttctcccaccgtcccacgacataggaattaagatgaagttgaaaacactagtttctctcgtatttctctctgctatcttccctactaaagccgctctgccagatatttataaaataaaatagattcggccctatcagtaaagttgtttttt

SEQ ID NO: 102106 - DNA, 349 bp, Zea Mays
ttcttctctcttatctgtaaacgtgaggtagaagaaggggttagccatgctagatcccactctatttcatcttgtatagttgtgacccatgtggtccatcgtgtggcacattttcgaccgatagaatggtgccgcacagtttaaatccgagaaacactagttattcaatataggttgcatggcaagtctgtctcgactcgttttggtcatatcgacttcataataagctcgagtacgttttagtaatattatttcgtcgcaacacatgctttcgttaattatttagttaatcgtttatccgaggtttatttgaacgacattctagttaaaattaatgtatggttttaaa

SEQ ID NO: 102107 - DNA, 328 bp, Zea Mays
gaagctaggagccagaagagaaaggctactagcccaacacttcatgaggaggaactggaccaggagatcagggacttagaagcgattcaccagcaagtacagaggaagaaggaaaaaatgcttcggctggccgacctctagaggaaaattcacaaagtagctgaggagatgcgtcatctcactcaggacgaccaagaccgaaggccccaacacagggagcttcatcaagagagcccaatcaatgaagataaatggtacgacaattttcaccgtggtaactttgctttcgatgatgcttcttctttggcagcagaattgtaggctaccc

SEQ ID NO: 102108 - DNA, 624 bp, Zea Mays
tgtggtacgggcactgggcgtcgaggatgtcgtccaatgttcgtttgcctccatggggtgcccctcgggcacgagagacgggtggtccagcggcatggacttcttcacgaggcctcttctccatcgcttgtcggtctgctggttcgtgtcgcatcgtggtgcagatggagcaggcttcgttcctccgatgaggtcttgagcccattcgtcagcggtgatgtaaaggtctgcctccctgaacagctgctcggaagtggtcggtgccttttgtagtatggctcggacgaaggccgagtcattagatccccggtagaagtcttcgatcactgctgcttccgcgaccttaggaatttgatttctcatggtctgaaacctcttgaggtacgatcgaagagtctcatcctcttggcgcctgatggatttgaggtcccatggctgtgccggtttgtcggagagggattggaaattggcgataaaacaccgactgaagtcgctctaatcgtcgatgcagtgccggggtaggtgtcgtagctattgtagtgcaccttgcccgaggaccagtggcggagctatataaaattaatatcccgggccgttctataaaacttgaaggttactttaaac

SEQ ID NO: 102109 - DNA, 445 bp, Zea Mays
gtaggttgagaaagaaatgaactattctttctctcagttctctccaattctgaaggaggtttaagtttccaaaccagccaaggaggtttaagtttccaaaccagccatgtggctctgataaattggcacctctgcagacaacgttaaccttgcatactggaaattgaagtaggttgagaaagaaatgaattattctttctctcggttcttttcaattctgaaggaggtttaagtttccaaactagccatgtggctctgacaaattggcacctctactgacaacgttaaccttgcatactgcagagcgaacatatattacaggcatgccattctagaaagcatttttggtgttctgttctcatctggtgccgcctcagcattaacacgtactttgtcaacgcagtcattagcagtcccggtatacgcaaacacctgtcgttaattc

SEQ ID NO: 102110 - DNA, 477 bp, Zea Mays
ctcccccattaggttgagtaatattcttctactgttttaatatagtgtcattttttagctgcacagtactgacaccaagttctatcctcatgtgtaaataccacagtatatggttttcattatcccttgaacatgaagcatataggtaacttagtcctgtataggttttcagcgtaacatgatcaacgtaccatcacacacagggaacttatttttacttatgaagtctctaaattcataaattggtggaatgttatgtgtctattgacgatgggtttacaaatatcctcgaaagatactggaaaataaatagaaatgtgatgtgctctctgaattcccttggcacatccaagttattatgcttatccaaatagcaactcttcagagctcttgttgtcaccaggtattcaagtagttcttttgttggcagtgtcagtttcctgtacgcatttttcaggttaaaaacttgtatggtca

SEQ ID NO: 102111 - DNA, 2234 bp, Zea Mays
ctgttttaaaatgtatgaagatgttgaaagcaagacatctcatcaatttgatggaaccagaatacgatatttaacaagatgcaatgagccagatatctatcagtgaaaaataatcatcaacattttttctgttggtaattagaaaagcttgagactgggtttctacatacatgaatttataataaggaaaactttatatcagttatctgaatgaaacatctgagatgcaaagtaggttgttcctctttaagattggcacatgctcagctggtgtcaatggtggccccatcaatcttaaataaaatacagttcattttctattcaaaataaaaatgactggccaacatactgcaactgcaattcatttgatggccccccatttcacattctagatcataattgacaactgaatcagctttcattcacatgtcaagtgcactgcacacaaccaacctggcaagatagtgaataactcaacctatcctagagtatcctctactggccatggatgccattaaatcataattgttgatctaatcacaatcttggctacaaagcccatctgcccttgactgcctattagacaaaaggcctcccacaggaattagtccggaacttattgttcacatagtaaggttgcagctactcaaagaattcttcgttattcaagtggctgcaataacttatccaagggggtgtgatctgtatgtctgatgagggctattaaaccatccaaagttttatatacctctttccttttcttgtgccttgtgtctttagccaaaaactcatgtacctcatttcctacctgaatcaagctactaccaggtgttttctcaactccgcaatcacgcattgttctgcgagcatccatcacactgtcccaccttccctctagggcactacaatttgaaaccaacacttgataactagaattaaaaggttccatttcaactatctttgtgctgacatactctgacaactctgcatcaccatgcgtaatgcaagaactaagcaaagttacccaaatgacaaccccaggcttaagaggcatgctttcaataaatcgaactgcctcttgtaacttaccagctcgaccaagtaggtccactatgcatccatagtgctccattcttggaacaatgcgacagtactcaaccatttgattaaagatgctccaaccttcttgcaacaaacctccatgagcacaagcaccaagtgcagcaacaaagactgtatcatccagtgtgactccttctctgcacatatcattgtagaccaatagggcttctctaaactgtccattataagcaaaaccagatatcattgttgtccatgtaatggtacatcttgttttcattttattaaaaactaaatgtgctcttcctacatctccacattttgcaaacatatctacgagtgcatttcctaatgcaacggttatatgagtgttgcttttactaatgtaagaactgatccagttgcagtattcaacactgcctagctgagcgcaggctgagacaacacttactaatgttgcttcatcaggcatgaatcttccctcaagcatcatctgctgaaatgtgcacagtgcatcatcatacctcaagttgtggttgtaccctgtaatcattgcattccacgaaaccaaattcttatcaggcatctgatcaaatagcactctagctgaatctagttccccaatctttgcataagcagagaccatagcagtccaggaaactacatccttccgatccataatatcaaaaagtgaccatgcagattcaacattgccacttgttgcataccctgagatcatgagattccaagagatggcatctctgatcggcatcctatcaaacacagcacgtgctgacaccatgtcccccgccctcgtgaatgcagcgacaatagtgttccaggagacaacattcctctctggcatcgcctcgaacaactccatggcccctgctgcgtctccattcgacatgtacacaccaactatggagttccacgaaaccacgtctctattagccatttcatcgaacacctggcgagcgattccaacatcacccgggtcgctgcacttgtagtacacgttcaggagagcgttctgcacgaccacatcggacccgaacccacacctcacgatctgtccatggacgcaccggcacaggaacagccgcctcaaggattcgcacgcgcgaagcaggaaggtgaaggtgaacccgttg

SEQ ID NO: 102112 - DNA, 400 bp, Zea Mays
cacagaggatgcagtaaggaagttggtgctctctgctatggccaagatgtttcgtgggtggaagactgagatgaatagggattttgttaagaagaataaggttcctctgtccaagaaaatggggaaaatcactcaagctcagtgggaggaatttgttcgtcagaagaccgaactgaatgccaaagaactgggtgaaactaattctcagagagcgaagatgaacaagcacccccattgcctagggtcaaccggatatcaccataaagttgtgcagtggaacaggataatcgaggaagctatagctaacggcactttggacccaatattaaaagatatcgatgagcgagctattcgttggatcttaggtcgggcaggtttgactgaggacggcaaacttttg

SEQ ID NO: 102113 - DNA, 479 bp, Zea Mays
cgattcttctttggagccggcaggaacaagctatcctggctcagcggtggaagatgtcccttcagcaagcttcagcaccctagctgtttcaatatatctaggccggtgcatcaaaaccttaatcttcttgcccttcggcgcagcagaaatggtagaagtaacatcttttcttttctttctctgctttcgcgagggatagctataatctgggtatacgaaaccaattacgtcaaaaactctatttaaccttttcttgcctcgcccttcgaaggccaaggtcattgcatcatcttcggcattgcctcaatacaggtcaaccattcatcgttcggatcatcaaactcacctctatatctgaaggtatatctcaggtagaccaagccgccttgactagacccagcagcagcttccttcggcatctcctagtcattcacaagaggccacactgcgtaggcaatgtgctcttggaccaagtctct

SEQ ID NO: 102114 - DNA, 684 bp, Zea Mays
ctcagcagatcagactaaattaatgtttgtacatcgaaactaacagtgcaatggactgcaagggtcaacattgcatgtaggccctactcatctgttgaatgtttcgtgttggattttcctaatcagtctagccagatcatctcacggaatcaaatcagcatataatccataacataatagaattgttaaggatgtaatgaactacctcttatcattcgtgaaacagggggggctctagattttaggttatagctgacaacaccgttcatgatgagcacatgaacatatgtgttggaaaacacttctaaaatgtttcactaatcggtctagtcagttcatctcacacaataaacttagcacagaattcagaacggagatgcttttgtccatctttcagaatgaacatgtgtatcatggactacccaatatttttatggagtaggaagaactgtacattctttaggttataaataacaacacatgaacgcatatgtattagaaaatacatctgaaattgttgaggcaaatgcaaattcacttcaaagttttcagcacatcagccgcctaagccatattcattggctgaacttttcacagaagatttcctgaaggctaaagcagtttcatcagaacaccacacaatttaatttgtaagaattcagcacggaatgtggctggcacctt

SEQ ID NO: 102115 - DNA, 622 bp, Zea Mays
gagaaacttagctctgtatgttgccgagtaatttggaccagatctgagtgacggctggtttgatccaagtccgatgtggaagacatgctgcttcttctttatctctggtatttttctttgagtaaagaaacgactcggactatggcagcacttccttgaaccgtacgtaaaacggcctctgcaattgcctacttgctcctcgtgaggacaggatgcctccgttgattggacttcagtttgcatgcgaatcatgaatgcgacttgaattatgacagcaggaaccaagaaggacttcagatcggcattaacaggaggacaggagcagatgggtcttttctgcaggataggcgtcaaacccaaacgccaggaagaacagatgtatcccgctgcctcgggagcagcagcaaatatgtagaacacgcgcggatggcggcgatgcggtgaacatcgtcggcgatggtgatatcaacagggactgaaaccctaatttttaatctcctgatgttgatgatgttggcagagttgatggccatggagctagctaatgtcggtgtcgcctaccccacggtgggcgccagctgtcgaagttttatatcgacaatgcaccacggggtgtaccacg

SEQ ID NO: 102116 - DNA, 425 bp, Zea Mays
tggtgcctcacccctctgacgccaatgtggtcaccaggaagtggatcttcaagcagaagctaaatgcagatggttccttggaccagtacaaggctcgctaggtacttcgaagcttcacctagcgtctcagggttgactatgacgagactttcagccccatggtgaagcttgccaccgtccggatcgttctgactctagctctctcaccggcttggccgatacatcaggtcgacgtcaaaaatgtcttcctccatgggactctggcggagacgatgtattgcactcagccggttggttttgtgtacttcgctcaccccaacatggtctgcaagctcaaccaatccctctacggcctcaagtaggcgcctcgagctttgtacagtcattccttgctcgcacaaggtttagtcgaggtcaaggcggac

SEQ ID NO: 102117 - DNA, 519 bp, Zea Mays
gcggacctgaggatggctgaccacagtggagtgtctcacggcggcgacttcgaccgatttggaggaaataccgaattcaggcgctacggtgggtaatcgaggcgaggagcggtgcttggggtttgtaacaagctaacgaagcaggctggggcatcaatttatagtgattaacagcggtggatccgaatttggggatgaaagctggcagccgaagcaaggtgagtcaccggagttcgcataacgtgacattcactgggcaaaaggttacgaccttcacatggttatcctccccaacctgcaaccacatggtagaatagcttaaggcatgtcgtgaccgagctaaatggcagcacgacgatggcggtcacgtggacacgtcaccggtgcaagtgggtacggtgaagccggctcaatccactcccccactgatcttttcacgtccgcggtaatatcctgcccgagttgaacacgaatcgcgacggacagcacagattgcagcgcggagatcgcgggcggcga

SEQ ID NO: 102118 - DNA, 359 bp, Zea Mays
tgtcagatctatgaagaagaagtggccgacaccccgctcagattctttccgccctttcaaagagaccgtccagtttggatggccaggatgcgtgcattggaggagcagcagctgcttgaggacgaccccacagttgtgtacctcactgcatacctgctcaccctggatgcacagtatgatttcttggctcggcaccaccgtcagatgattgcccgagcagaagatgcagagaagcgcatctatcagctccatgtggatctcaccatagctcaagcccgtgcaactgccttggaaagtcgtgaagtcattgttgttgaagccctaaagcaagccaaggatgagcacgtccagaagttgat

SEQ ID NO: 102119 - DNA, 290 bp, Zea Mays
aacaaccatgtgatggtgattggttgacatgcttgagttggatctttgtttgagtgcaatggtcttatggaatgatggccataagaacatataaaaatttttaaacataagctatttcccccctagaatcttttctactcttcactcctctaagatgttcacttcccaaccaatcaaatggtgaacgctcgtcaaggacccaacaacaaccggaaccagcgtggtcaacaagtaccaccaccaccgaatcccaacatggagcagttcattgccgcccagatgcagattct

SEQ ID NO: 102120 - DNA, 438 bp, Zea Mays
gccggttaaagaagactctagagtacccacatagacatggctatgggcacgtgttgcactgcttcagtctaccaaggatccatgaatagaggaacctaatgtgttggttcaacctggttttgacagcaaaacacaagcagctgagtcacccctttcaagataaacttcagttctgcattttcccccttctctccttttggtcagtgaaaatatatccaacgtgatccattttccagctctccaggtctcaactcgttttatctacaacacagcagaaatatctagagagggtggtgaggagagatatttgttttccagacgtctgaagccttaccgaactggttcagttctgttgcagctcaatttcatcacttctattctccattttccaaacaaggacaaacctatatccctcaagcaattttattccttaactat

SEQ ID NO: 102121 - DNA, 391 bp, Zea Mays
gttgggccagccaaggctgaagataataaggccaaagagccacaggtagaaagagtgacaaaaatgccagaaatcctgagtccaccgggagcggcaggtttgccgaaggtgcaaaaaacttctgctgcaactcccaagaggaggagaatggctaacgtgctagatgctgtactggagactacaaaggcgctgagccctgctcctacaaagaaagtcactccaactgaagccaaatcgcaggccgaaaccgaaactaggcaagcagaaaccgaagctacacaagttcaagctgaaaccgaagctaggccttcagtgcccaccgagacagagcctaccgcacctgaagaaaaggcgacagagcaaattgctccggaaaagatcgagactcctg

SEQ ID NO: 102122 - DNA, 583 bp, Zea Mays
tgagccgccacggtagatgccaccaagctctcgcgacagtactcttctcactctccggccgccaccatgccaaaccaaattcactggccaccgcttagcgccactataaattgatggcacggtctgctgcgttaagttatcaccaagcctgagcacccgctcctgcctccgattagccaccacaactctccaatttcccatttcccccaattctattttccgccaccgtgaaagaggcctcgccatggccagctcgtctcaggtcctctcatgccctctgctctttcgtttcagtgttcttgtgtgtccctgatgctccccgaccccgccaattaggctaggaccccttagattgccgggaacacgtcatgctgtctgttgtgcccgctgtcaccgtggacagagcgagttagagctccgttagtgaatttaattgtggggaaactcttgttagggcttgaattaggtttcagccgaagtagagcaccggtcatcgagtgatccggctggtatgagctcgtcggagctcggttctccgccgtgcggcgtcgtggaccgtgggttgtaaagagatgaaagcgtg

SEQ ID NO: 102123 - DNA, 430 bp, Zea Mays
ccaaaaaagtccactgccatcaaaggtgtccagcttcatgcccatccattgcatcagagagaccactgacaggaaggggcacctcagccccaccacctagagcagcacccgcagggacagcgcccccaggcactcctccacctctggcaccctgagcagctccagtaggggcaacaggaatagcttgcctcagaatggccaactcctgctgcatggcctgcatcgcggctaacattgccgccggactcatagaatccccactaggatcttgcgggctgccatgagccctacgaggcggcataactgtagccacaggggtaagtaaataagtaaataaaattggcatagcaactcatcaaataatgtcaagctagcactgacaatttcataatatatcaatagtaaagcaagaaacccatcctatatgtgc

SEQ ID NO: 102124 - DNA, 284 bp, Zea Mays
ttccagtacttcaagtggttgcaagttaattagtagactctctatgtgatgctagatgtctaggtagactttcgtgaattgtggtgctcgggccgtcgagatgaagattaagtcggtcgatgccgattaagtagttaaaatgattaatgaaatagtcatggggttaaaactagaaactagtgttctcgcacccgtttgggatgttgtagcccaatttcacctggttatggtcgcaggtaaaaattagtggtgctcatgtgatgtctaagttaaaatgtgaacta

SEQ ID NO: 102125 - DNA, 437 bp, Zea Mays
ggcgtgcatgccttgttgaatcttaattagtcatgttatttctttgttgattcccatttgcactgatgatttattttaggtcgtaactgcatgaagctagtaactaatggtcccttgttgattatggccaatgcaagagggtaattatttactatggtttagttgagcatctagctgtccctgagattgatgaacaaacgatcataaggttttgaatcacgactgaatcatatgggagtatatatcctaacgagacccacttatatctagtcaaggccttgattttttgctttattttatgcacattatatgtgtagatgtcatttaagcaattgggtacatcggatgaatggttgagcagaggcaaacccacccaccaggtggtctatatgggccacgacacaccccaaaaacatagaacggcagttaccttagtg

SEQ ID NO: 102126 - DNA, 749 bp, Zea Mays
gaggcgcgaggaggaggaggtgctgtgacaactcatcgagcggtgcgacaaagaggaggaggaggaggtgcagcgacaattcaaggaacgacgcgaaaaggtgagggaaaagtacttatcatacttcacggtggatcatcaccagaaaatcatccgtcaaagggagatcgatatgacatctctcctacctccgcctcaagctcccattgtaagtacctagatccatattttgaggctttcatagaacaatgagggaaactgttaaaagaacacgtagatgaatctattaaaaaaagggacgctttcatatcaaaaaccaattgcccctacttttccctcgcatgagtctaatacggaaccaccaacgtcaaacacatcggctacaaatgggtctcccttggcctagccatcgtatggtatgccgatgcacacgttcgtgtcaccatcacaaccgccgctgccaggcatgcgatcgactctagacacaatcgaaccatccacgagtcatctcggacagtccaaatatatcacgttaccatctgaatctttcacgtgattccgataacaacttcaatctaggtgtcgaacttttttagaacatctgaatcttttcttataacacgctcgtaaaatttgaacatatataggaggtgcctttttcaacgggtacaaaattgtgcatgatatagccgaaaaacatagtaccttttctaattggaaatcatgtgacattccagccttaaaaccgc

SEQ ID NO: 102127 - DNA, 614 bp, Zea Mays
catctttatagaaagttcaagggtttatctgtaataaataggactgaactgaaatgattttatactgaatgtggaccacatgttatttataaaagagtgcagatgctcataaacaatactgctacgacgaaaaggtatgggttgatatgcgtcgttggatcttcagttgatagcacatattagatctttagtttaagtgaaccggtacacagcacagaccgttggattttagatcttcggtcgtgatttaaaatgactacgatctaatctaacccgtctgttgatgtatcaacagccctgatcaagtgatcgaactgataaccgctcatctaatcatggtcgaacgttcttgatatgatggttgacgccgcgtcttgttcatccatccaccgggcacgacatcaccacaatctgacggtggagcacccgccagaattaggcatcgggctctttggtgcccgaatcatgaatcgaacgtcgctacatgatgcccgcaacatgttgaattaaatggggggagttgattaccgcgatgattccgcgaagttactcgaccatggagcagcgtggtcgaaggcggcgcttattgctccgccgagcaattacctagatcc

SEQ ID NO: 102128 - DNA, 590 bp, Zea Mays
caacactagccttacaggtgatagggacattttcatttggaatttacacaaaagtggggtattctcaacacgctctttctatagggtattgatttgtgatggtcttgttccacgtaagtgcccaatctggaagattaagataccacttaaaattaaaattttcctgtggtacatcaaaaatagagttactctcactaaggataaccttgcaaaacagaattggaaaggaaatctaaactgttgttcgtgtagttctctagagactattgaacatcttttcatccaatgtcacttcgcccgctttatttaaaatacaatacatatcacctttggaattcaacctccctctagcatctccgacatgtttggttcttggcttgctggtattcggccaacatttagaaatcagatttgtgtaggtttatctgctatttgttgggctatatggttgaatagaaatgatatggtgtttaattgcgccaaggctaacactttcatgcaggttattttcagggcgacatattgggcacgttcttggtcgctgctgcttagagacgaggacgcgaggaccgatctgaacaaggcatgcc

SEQ ID NO: 102129 - DNA, 444 bp, Zea Mays
acagtagcgggggtaaattcaactaggaactcaccgagcactactcccggggcttgttgagcctcttgagcgtcgacgtggtttactcgtgctctgccatgatactgggtcttgctctactggctattggtggagggtgccttggaggcgggtgctggggcattcttggggccattcactgagttggagtaagtaggcccggatgtcttcaacttggggcaattattcttgtagtgactggggtctccgcagtgccaacaggcattggctggaggttggttgcttacaacggagggggcctgaaaagagctttgaccctactgactgaaatgtgacggagtgggtccagctggcttgttgaagcttggtcccttgggtggaaacccaaaggatcgaattctttggtgcctgtcttgctgctgagctcggaggacttggaatttc

SEQ ID NO: 102130 - DNA, 378 bp, Zea Mays
caaacttctccaaaacatccgcaatcatctcattcaaaggaaatcttaatcctgctttaaagaagcttttaaagactaccacctcatccttttctggcttcggagtaatttcctctccgccaaagcgaatcatcttctttttggcttcactgaaatagcctaacttcatcaacttaggcatatcatcttcggtaacagtggacctcccaaactctaggtggctgggtttagatggcagggcactataatcatcttcagattcaccttcctcagcaccaacctgctcagcttcagtggcaggtgcaccttcgtcagaaacatcctccggcactaccagccccgaccgtttcatcactttgaaaatcgaagcagtttcag

SEQ ID NO: 102131 - DNA, 391 bp, Zea Mays
ggctaatggtggaggactgcattcacaccgttaactccaaatgtgtctgagaatgctctttgcagttaaagttgcatctctcaatgggattaacggagttcttttggcttgtttgagagcaaatagagtagattagcaagagaattagccctttaacagcaacttcaaaagaacgtgtaaactaaggtttttcttggtcaaacaactccctcgttcttccaaaaaaattcgcgtcctacatccgcagcctcctctcactcatattttggtgtattctctcttcccaatccattcttcaacgtatcggatcatccataacctcccgatgactgtatagattccgctacatgttatatttagataaactgttagagtacccatcataattcac

SEQ ID NO: 102132 - DNA, 1260 bp, Zea Mays
catagcgcatccctcgaaaacctacaagcatactgcaacaccttccatgaagaggtgcacgtattgtatgatcggctgcacccaaaagtgcctctagaagtggcagcaatgggagctggaccatctggaacagcaaatggagggtctgatgggggaattgacctttttggggcccctccatctatgaatcttgctgatgaacggtctcctgaagcaggcagcggaacaactaaggatgaagaggattagagtagtatagtttaagcaatgtactcatgtaaaataaataagaaggttgagttgtaatactgagtatgtgtaattattactgttccgcaatgtaataaagatggtgtgttggcatgtaataattccagatgttttcttcctcagatgccatcgcgaacccatgctcatgatggggcaggtacatcccgcagcggggaggacactcccaatccgccacctgtacctcctaccctggccgaggctatcgctgccttggtcaacgccaccaccgacaacacgggctttctgcgtgaaatggcgggaaaccaatttcaacgactaggaggaagaggtcaaccacaaggaccacgcgacaccacctatctagagttctccgagacccgcccaccgctctttgtcaaggcggaggaacccctggaagctgacgagtgggtgcgggtgatggaacaaaaattcaggctaatccgatgcaccgagatacagaagcccctatttgccgctcagcagttaagaggccctgccagcacttggtgggcaatcttttccgccgtccagcctgcgggacatcaagtcacttgggaagaattcaaactggcatttagggaacattatgttccggaaggagtgatgcaaatgaaactggaagagttcatccgactaaagcaaggggtggattctgtgatgcagtatctcaataaattcaatcacctctcccagtacaccattgatcaattggatacagacttgaaaaagaagaattgctttatgaggggactaaatgacagactccagcgtaatatggcaatgtgtctggacctcacatatagcagggctgtcagtacaacactgtcagttgaagccaaaaatgcgggacaagaaaagtcaaaaggatatgcaggtgaaagatcaactcagggacctaaaaaggacaaggttggtaatccgacctttcaatccaaaccgttcttctcctcgcccacctacatatccattcagacaacccgtatttat

SEQ ID NO: 102133 - DNA, 729 bp, Zea Mays
gggcgcttcaggtggtatcggagctgttaggttggccgcaggacgtaacccttagcctgatccaaaagtttttgagtcaaaactattttctaaaaaaatcttgctctcatcccttcatttcaaaaatgcttttcccctttccttctctcagaagtcagatggaggttcgttgccaaaccagcttttgccagaatgaagatggtttccccaagttgctgagagcatgcatagtttgcctcggaatcaggagccagccagagtatgatggtcgtgaattcgtcgagcatggcacaaagaagtgtgtcgtgactgtatacattggatcgagtccgcaccatgtggaatggagtgtcactgctgctgggcacagattcaaagacacctgccaagtcgtcgctcgcaaggcattgaggaccctgtgtcagatctatgaagaagaagtggtcgacaccctgctcagattctttccgccctttcagagagaccgtccagtttggatggccaggatgcgtgcattggaatggaagcaactgcttgaggacgaccccacagtcgtgtacctcactgcatacctgctcaccctagatgcacagtatgatttcttggctcggcaccaccgtcagatgattgcccgagcagaagatgcagagaagcgcaatcatcagctccatgtggatctcaccacagctcaagcccatgcatctgccttggaaagtcgtgaagtcattg

SEQ ID NO: 102134 - DNA, 380 bp, Zea Mays
cttcctcccatctcagccgatctcttccttttgtcgtagtacattcattgtgtatactgtgtggatatgacttcttcagaaaatcttttgaaaattcttggcaacacacccaatgggtgtgcccaaggggtgtcttggtacgcagagtgtttaccacactgtcctggagtagtaatttgaggtgatcgcagggtgtaatcatattgcttgagcaattgaccttggtccaaacggtgtcatgttacgcgaagcagcgcctgttgcctgactcattttcaggcggtttgaattgcttattgaatacttgcgactgttcggcgagcgtggtaggaagtggacagtcacccccgacctctataaatagcctgcttgccccgttg

SEQ ID NO: 102135 - DNA, 779 bp, Zea Mays
catgaggcctttgcaccatggccctcggtgatgatgcagtgggccacgatggccaggacatcggcgatggctctgcatatgaggtatcacatttcgccgatgacctcgtcgttgaggtagaagagctgatggctgctttggctagtcaggataagtttctcaggctttctactcgtgagaggaaagattttaaaattcaagtatgagagcacacttagagagcttgagtttgctagagcttaaattgtggtgtccgacgagattgagtgtgatggaagcgccctacacatgtcgaacatcaccactttgcagaccaagtatgccatccttctagatgagcacgacgagttgacaactaggtctagcttgttgggtgcgtgtactgattgtcctagcttaaaggctgagctagcaaagagaaacactaggataaccttgattgggaaggctagctcagtgagtgtatctacacctacgtgtgtgcactttttgagggtttacagtctgctctcgagtgctgcagacacgacaagacaaggaccaaaagaaaacacatacttcgatctgccctgagatgggtgtcatgcagtgagctccagttgggcatgatggttagctagttcaagaggggaactggtggaccaaggttaggctttgctgctaaggatgggagtgtcgcttgctttggaaaggttggtgagtgcagtggccagaaaccttaagagaaaccttcagccaccacaaacttgtctagatcactccaccaaaatctgccaccg

SEQ ID NO: 102136 - DNA, 327 bp, Zea Mays
cagaaactgaaatccgccattcttatccggtttgttgcgattcgatgcaatctggggagttcgccgtaaatagatgcccgaagtttgctcggtatttcccattgcctcggtcatcttccatctcgcctacggagcttcaccacacgtgtaatctcggctgctattcttgtcatcgaccagatcagaaatccgatcaaaacaaactcgcgaagttgttgggattcggcatccgcggcgtataaaagtgccttggacttctccacctaggccatagctccagtaggatctccaccaaccctctgtgtgcctcggccgtgcttgcagact

SEQ ID NO: 102137 - DNA, 409 bp, Zea Mays
cgggcagggagattgagcgctcgacccggggaggctaagaccagatgaccgagtcatgcgctgatacctcggacagggaggttgggcgtacccgaagtgctagatattcggagacaactcaggttaagggcaactgaatgtcagataagcgtaaatgcatgctgcgttaaaaggaggatttaggtagagttgtatggcgatcacgacttgtaaagggataaacctctagtcatctatataaggacgaggggtaccccaacgaatccatctctcatcacatctcatcttgtcaccacctcatagcccattagccctctcagagcaaccacgccgccactagatcaacagaactcactctccatcgcccacgtctcatttataactcgagtacaccagtgatactcaaaat

SEQ ID NO: 102138 - DNA, 545 bp, Zea Mays
cactggtcgactgccaacagaattgccaaatattccttctcataggcagataatcccatatttgtcattcccagggccttgctcacaaatgccaatggatgaccctcctgctgcagaacagcccccactccagtaccagaggcatcagtttctatggcaaatggtttatgaaaatcaggcaacgctaatacaggagctgaagataacgcttgcttaagagactgaaaggctgattcctgaacatcagtccacacaaagacagcatgcttcttaagcaatgaagttaatggtttggcaataattccaaaattctttacaaacttcctgtagtagcctgctaggcccaaaaatcctcttaattccttgcaagtcacaggtactggccacgacacaacagtagacaccttggacggattagtagataccccagcttggctgataacatgtcccaaataagcaatttcctgtcgaccaaaggtgcatttggacaacttgacctgccaagaatccttgagcaacaactgtaacacctgctcaatatgttg

SEQ ID NO: 102139 - DNA, 776 bp, Zea Mays
tgaagccacatctcaaactgctgtccgtttgtagccgtgaaacataccttgattcacactgtccttcatagctggccccacttgtagacgatgatgtttcagagaagggtagggatcatgcacttcatcttccttctcagactggggtgcatcgtacgtgcatacctacgtcttacattgcatcatatcgacccacagacgttacaaccggtattgattatgttggagtcgaaacgttcggtatcaactattatactccctctgttttaaagtagtaatcgttttaacttttaattaaacgagtggcgatatatatatatatatatagggtgatggtaatgggagccctgggcttccattagtatgggaagccccagtcaggtatatctacgcgcgctcgatctggttctggctcgagcggattgcagcgtaaaacgtgacctaaaacagcgtaaatgagtacgaaatttagcgtaaatcttatatctgttttgtaacagcaaacggggcctaaaattacggcgtaaaaatcgcatgcagccgatcgtgcgcgggttctggctcaggcggattccagcgtaaaacgtgagctaaaatagcgtaaatgagtacgaaatttagcgtaattcctatatctgttttgtaacagcaaacggagcctaaaattacggcgtaaaaatcgtgtgcacccgatcgtgcgcgggttctggatcgggtggattttagcgtaaaacgtgaaccaaaacagcgtaaatgagtacaaattttatcgtaaa

SEQ ID NO: 102140 - DNA, 293 bp, Zea Mays
taattcttgcggtgtcatgcctttagatccatacaaaaggtggaagggtgtgaatccggttgcccggcactctgtcgtgttgagggcccatattactccaggcagttggtcgacccatttgccctttttgtcgtcaagaagccttttcttgatggcggtaaaaaattttccattgtcacgctcaacaacgccgttggactatgggtggtacaccgaggcgaagacaggcttggtgccgatgaaaaagcagaaatctctgaagtcttggttgtcgaactgtttgccgttgtcga

SEQ ID NO: 102141 - DNA, 314 bp, Zea Mays
gcttttcccgcacccgaaatccgactcgcaaagtgtatgacttgtggacccaggcccccgagtcataaactgggctgcttggatctaggtgtccgtcgcacgtgatcttctgcggcgattgaggggcacacggaagggtttccctgaacgaggactcaggtttccttgaaaaaggattcaccccgcgtgcagcagttacccttttgcattctcttccaatcgactgcgcctcttttccttcgtgctcctctgcacccctttgccttcatgctcttatgctctacacccgcgccgccgcacaagccatgacttcg

SEQ ID NO: 102142 - DNA, 352 bp, Zea Mays
gtgttcaaagaaaacaatataaataaaaaaagaagttggttatgttagttatagggaaatgtatatttaatgagtagagggatatgtagggtaaaatttagggggaacggttgcgggactagtaaatataggggagggaatcttgaaaaatttagggggaacggctgcggacagcctgagcgcaaatacagagagcagtagcgtgcagcagggtgtgctacactgctaccccttcctgtatggctctgtactacagtccgctatataaagcgtaacatattccttccgttgccggtctgtttcacaacacaaatacatattgatagttggagcaactctaaacgtgtgtttg

SEQ ID NO: 102143 - DNA, 434 bp, Zea Mays
tgcgccttcgtcccgtctgcctgcacaggttggctacggagtggagccaattatgctaatgtgtgtaggaatcggttatgttgacgtgcgcaggagttatgatgatagacccaagttgtcgcctttggtcggtagtttgtcattactctttatgtggtcaaccatttatgatggggcaatcccgggcctggtgtgaaatccactcgagtggcttcctctcggtttgctcgacccccttctagctccacctcacccgaccacgggctcggtgcctcagggttactcgagggcgggtccttccggggcaaactcttcctccgtccttcctctgacttgtggtcccctaggggtccagggatcttatccccgacgcttgttgcttagcttgcaaacaaacttgatacttcgaacctttgactataggtaacacagaa

SEQ ID NO: 102144 - DNA, 519 bp, Zea Mays
cttaaaacaaactaaatcctaaattagaggttagctcaatatgatcaatatgtagaggataaaacttaaagagcgagggagacaagaacaaatcgcaaagtaaagaacacaagagacacacaatttgtttgccgagttttggttctgaataacctacgttcccgttgaggtgtcgatgaggtctctcttgaccctctcaagtgatccatcagtcaaattgagccctcaggttcactaagaataaagatagagtctccgcaaggcactccacaaagtctagagcctcttgctagcctttacaataagtatcacaaaaatcaagaggaaaaacactgcaacaacaccaagaaatcagattgctcaagtacactctctaaaatcactatcttagcttagatggagtggttggatctctcggaatgacgtggatgtgttgtacaagtgcatgtgagtgttgctcagctctagaggtgatttttatgtcgagtaggctggttggatgtatttatagaccaaaac

SEQ ID NO: 102145 - DNA, 711 bp, Zea Mays
agctatataggctggaagagaagatatgtgtgtgggaattaggtggcatgacaaaattaaagacgtacgatcaggaataattatcttatgtttatgtagtgatcatccatagctagctatatcatatacgtatgcatgttattgggatatgcatgcaagcattgcattgcttgaaggtgagggcaggcatatgcattcatgttctcctaataactcaaggccacatgccaccacacatgattccttaaacaaccagcacacacctcttaatctatctatcatcgatccaagcacaagcaaacacgtctcaggcgcactagtaccctttaatcatgcatgtgtgatgtgtagtgggctcaccacaccaatcctttgccagcctgtcgcctcagacgatataaaataaacaacatgggttaacaggctctaatgtgccagcatgttccccggtggggagctggttatggtagacccaaggtgcttcaatcgattgaactaatgagatgcattgcacatgtaataataatctccatgattttagggcctgggtgccttgatttgcagccatgttccccaactcccaccttcatgacatatgtcaacgggaaccatgatgtgtattatacccacgatcacccgtagagtacgtaccaacatgagtacatgacacatgtacaaagtgccagccgtcgatacatcggcacaacgatc

SEQ ID NO: 102146 - DNA, 498 bp, Zea Mays
ctattatcacctgggtcaccatttggcctgttgatttttgtaaacgagaaaagaaaatgggaatcatggtgcacaagttaggtctctaggaccgaggagcaacacaaaatggcatattgtacataacaagtaagaatcatgtacataatggtgacacctgagaaacctatctagggaatagggccccaattttgttaccatatgattcctctaaggataaaacttatggaggtgctctatgttccacggattgagtagcagatcactatcctatgtggccagcttgatgcattattggctagacatgtccatggctcaaaagggggtctcctaggtatagcttattcatacctactatatcaaggatgtgctagagcacaaaatcccctttgatgagcatttaatctcttacgtggtgtaggtgacaatgatgtagagtctattggtaatcttctactaagagcaaagattgtcatcatcgttcatcgaggaagtttg

SEQ ID NO: 102147 - DNA, 304 bp, Zea Mays
gtttcgggtcgctgatcctagatcggatggccagggtaggtaccggttcattaagtgaattgatctaatggttaccgtgggatggtgatccttcggccgaaatccatggatacctctttggtcgctactctttctaaagaacccctcggcttatttggaataagctcgcggtccaccattatgcaaagaatattgcaggtaagtcccattatttacaccgagcaccctgtacatttaggatattgtggtcgcagtccacagggcattaaatcctgtaaaacacattggaaatattgattttaat

SEQ ID NO: 102148 - DNA, 540 bp, Zea Mays
gaaacatactataatttatttctttgtgcttcttctaatgaactatctattagcaatgtctgtcatactatataaaatactaatatattagtcatcacataaaagcacacttgttaatattggcgtcacatatacatatatttgtgtcccaaaaagcaccagagtgattcgatatagtttgcaacccacactctctactcaccactaaacactccctccattccagtcatccaggtaatatagattaccttgttaagaaggctcaaagtgttgtctcattcgtctccgtgtggacaaaaacgcttcatgtaacgagagatatattaagcaacatcctcgcttgacctggatcagcaaacaaaaattctcagcggacaactgatgacatagaaaaatgtgtatctctaataaatctgtgaaaatgtaagaacctaagagagaataatgggagccgacaaagagtatgaactacgaagctacaagtacaaactttgcccaaaatctgaatccaggaaaccctagacctcagatccagttcac

SEQ ID NO: 102149 - DNA, 563 bp, Zea Mays
atagaatcatggtgccgggaagtattgggcaatcccacgataaaatccatgcaaatatcctcccatttccaagatggtatgggaaggggctgtaaagtgcctgctaccttcaaatgactggccttgactctctggcaggtgtcacattcagatacatacttagcaatttccctcttcattctggtccaccagtataaggatctgaggtcatgatacatcttattgctgccggggtgcatggagaattttgaaaggtgagcttcatccaatatcttctttctgagctcagggttcttggggacaactagtcggtctccaaaccatagaattcctttgttgtcctgatggaagcatttgtatttttctgccttctgttcgatcatttcctcgataacctgaacacccttgtcaccaatctgtgccatgactatttgctcttgtaaggtgggctccactgaaatataactcaaggcaccggaggaaacgacttctattttcatcttgcataattcatcacatagggtggtgattcttgcatccatattcatacaattgcactgggc

SEQ ID NO: 102150 - DNA, 465 bp, Zea Mays
gtttggggttcctacaaagaagaggccatcatttgcatcttcggaagaaaagaaccctttctggcgacccggttctgtttgtttgtttgttcgttggttcgttctcatcctcctctcagagcaggcgcgcgcgcgggatccatcaaccatcatgttgttgtggtctctagcgcgcttgtgtctgcttgcatgttactcgggcgactgttgctcacatgtacaaggaacaccgcgtgctttggacggtgctcttaaattgagcgtcactcaactgcggccgctgtcttcttgcacgggagcaatcgtggacagaacgatgtgaagtttcagtgccacgcctgtaggctggctggccttgatcgatcggagttctacgcttaggtactggtgccagctgccagagagcagctgttagctagctagtactagtagctaccgtgccatctgttttcaacgcaagccgca

SEQ ID NO: 102151 - DNA, 304 bp, Zea Mays
catgattcggaccaaggttgagatatggatgggtgttggcgagatggtaatagagggtaacatcagtgcttcaaatatctgcgcctagaagggtgtagagtttatccacaaccgatgacctctttgcctacttgccttctgtatggcgccgccgaataaaatcatcgtgtccttgcatgatggcacacagctgctttgttgtctcgtcctcaagtgtcgtggtaacgtcctggagagttccttgtgaggataagctctggcaggacggcgtcgactctttcttctgctttccggtgccaacagc

SEQ ID NO: 102152 - DNA, 321 bp, Zea Mays
gccaagctagcagagttgtacatggcacgaattgtatgcttacatggtgtgccaaagaagattgtgtcagatcgaggatcatagtttacttctcggtactagaagaagttgcacaagtccttggatacaagattaaattttagtttgggcttaccatccacagactgatgggcagattgagagaaccaaccaagtgctagaagatatgttaagagcttgtgctcttaaacatggtggaagttgggataagagtttgccctatgcggagttctcttacaataatagctaccaggccagtttgaagatgtcaccgtttgaggc

SEQ ID NO: 102153 - DNA, 512 bp, Zea Mays
ctcggaccactattgtttgccacagcagaggctctttctgcctatattaacacacgcggcctccatggaggttaatacgcttccacagattatcatatggtactagagcctacctctatccactgcccagaacaatcgccatgatgaacctcgtcacgagcggtctcctgtcctcggcgctaggccatcctgtgacagagaaattaaccaagacaaattataccctatggaagctgcaggtattgcctgcaatccgcagcgcccagcttactgggttgatcgatggatccaaaactgccccggccatggagatcgagggcattgacaaaaacaaggagccgaatccggcttatgcaacctggctggcacaagaccagcaagttttcggctacatcgtcaactcgctctccaaggagatgatgaagcagatctctcactgcaacacctcggcgtctctctggaaggcgctggaggaactctgtgcgtcgcaaaccagggcgcgcgcagtgaac

SEQ ID NO: 102154 - DNA, 638 bp, Zea Mays
caagaagctgatcaaacgcttcagcagacagaggagtgtgaaacatctcattcggcaaagccaaccttgcttgatggatgttgacatctttgaaggaggcaaaagaccagagttccgagaatcttgcagatttgcacaaaccatcccaattatcgtgccacagtagtgtagtttttccatcttcaatctccactcgggctaaatccttaaacgcgccttgaattttgaggatatctttccaccagaaggaaccaacgggtttaactgaaggtagagaattgttgtaatggttggcccaaataatgttaacccacggaatgttggctctattaaagaatttatggaggcatttcataagaagagctttattttgtaactcaagatttatgacacctagcccgccctgagcttttggtttgcagactgctttccaagccacttgaggtggtttttttgcatttatgtctgctcctctccaaaggcagtgcagtctgaatttatcaatctgcttgatcaccgtttttgggagcttgagggtgcacatgaaataagttgggagagaggaaaataccgcattaaccatttgtaatctgccagcctgagataaaaagacagaagttgacacaagtcttctttcg

SEQ ID NO: 102155 - DNA, 529 bp, Zea Mays
cgttctcccagctggccgccaggtgcggactccatgggccatataaagtcgtgcccgggtctcctgttgtgtggtgagtggaagccgagggccgccgcggttgcaagaactgggctgtggtgcacgccgaagcgaaccatgggctaatagagcgaaggtagtgcttggagttcgaaggaaagtttgccagagttcacgtctcgtggggaacttcactgtgtcgacgatggccagcctcgtcgtcgattgtgtcgatggccagcctcgtcgttgattgagcatcgcggccaagtctgttgtgaccgggattcttcaacacgttccacctcgaggtatggatccaaatgctagcagcagcatctctcaactacttccgcgtgatgcgatggtgctgggtacgtagatgtgcttccgctctctgctgcatgccgttgtaggccatcctattgcctctcacgccctaaaaccgggtctccggctaaccacctagcttgcggacaaactctcgccgacggaggttcaccatgcc

SEQ ID NO: 102156 - DNA, 387 bp, Zea Mays
aggtccttgtagcattagcttcattgttgtttccatgtctattttaggtatgacagagtaagtgccgaaggatacctttgtttgaagatggtgtataggcatcgcatttgcaaagacgaagccataggctttgactcggtagcatgaatgtgtgacaaaggaaccaacgaagacagggtgaaatcttcgagacttgatcaacaagactacgaagggaaagacaacaatacccatgtttcatagtctatatgtattggtctgaggacatgattgtaatttttatgaagttgtacctcatgacgataaatacaggaacaattccatacataggggatacttttttgacaaagacgaactaaaacattttgcatgtgaagttgttttatc

SEQ ID NO: 102157 - DNA, 2454 bp, Zea Mays
gtgttataccaaaactttgctaaagccaaccactgcctccatttgtgaggatgatcatggactgcacacctaagatattgttccaaacactgattcaccctctcagtctgcccatctgtctgaggatgatatgcagtagaaaacagcaacttcactcccataagctgaaacaaatgtgtccagaaataacttgtaaacactttatctctgtctgacacaatagttttaggagccccatgaagcttaaccacagtgtccagaaacacctgagctaccccttgagcagtgtatggatgtttgagggaaataaaatgagcatatttggagaatctgtccaccactaccaaaatagtgtcaaaaccttcagatttaggcagcccttccacaaaatccatagaaacatcctcccaagcacctgtaggaataggcagaggctgtaacagtcctggtggatgcactctttcacttttagcctgctgacatacttggcactgccccacaaactgagtaacatcattcttaagtcccttccaccaaaccattttttcactctgtgataagtagcatgcactcatgaatgccctccaacagcactgtcatgtaaagctgtgatcaacttagtccttagagcagagttgtctccaatccaaatcaccccattcctccttataattccctgatgcaaactgtagccctgctcattaggactttgaatcaaaagctgagtcttcaactcttgagcctccatatcagtttcatatgaatttaaaacctcctgaacctaaagaggttgtacctcagacacttgggataaggccatgagataactcactctggacagagcatctgccacagcattttccaccccctttttgtatactatctgaaactgcaaccccatcattttagacatagcctttttctgaagtttagagtgtaattgttgttctaccagaaaagtaagggactggtggtcagtcctgatgatgaaaggagctctctgaagatagggtctccatttgtccacagccaaaatcaaagccaagaactccttctcatatatagacaagtgcttgttcttttcacctaaagctttgcttagaaaagcaataggtctcccttcttgcatcaaaacagcccccattcctatatcacaagcatcagtctccacaataaaaggaatatcaaatctgggtagagccaacactggagtagtagtcattgcttgtttcagagcctcaaatgcctgttgtgcttcttctccccaactgaacttgttttgcttttgcaataacttggtcaaaggtttggctaagactccatagcctttcacaaactttctgtaataaccagtgagacccagaaatccccttagttcagtaatattctgaggtataggccaagccagcatagctgtagttttggaagagtcagtagctaccccttctctggatattacatgaccaaggtactgcagctctggttggacaaaggaacacttcttcttcaagaaaaactgatgttccctgagtttagtaaacaccaacctcaaatgacccaagtgttctgccagacaggagctatacactaatatatcatctagaaaaaccatgacaaacttccttaggaaaggctgtagtatagcattcattgcacattggaaggtagcaggtgcattagtgagaccaaagggcattaccctgaactgataatgtccctgatgtgtcttaaaggctgtcatatactcatcctcctccttcattcttatttgatggtaacccgctgtcatatccagactagtaaaatactgagtccctgctaactcatccagtatttcatctactaggggcataggaaatcgattcttgatggtcatgtcattgagttttctgtagtccacacaaaatctccaacttccatcttttttttgaaccaacaagactggagatgcaaagggactcatgctaggcacaattagaccagaagctaatagttcagagacctgcttctctatctctgttttgtgcaatggtgagtacctgtagggccttgagttcacaggtatatgtcctggtaccaaagaaatatgatgatcataatctctggaaggaggcaaaccagtagggacagcaaaaatatcctcaaactccaccagcaacctttgtaactgctcagggactactgcttctttcttatccaccacttgctccagcataaccaaagcccaaacctcattgcctttcaaccatttattcacttgtagaatggaaatttgtggaacctccttctactgacccgcatctcctcttagctgaacagtcactcccttgtccacaaatgtgagcacattctgcagtcaatcacattgcataggactatgctttttcagccaatcaaaacccaaaatcaggtcatacacatccaactccaataccctaagagtagtagtatagg

SEQ ID NO: 102158 - DNA, 291 bp, Zea Mays
cttatctataccatccaatcaaatcacagccatattcataaccttcactaaatctaccaacaaattacacttagatttaacacaccatcaaaactaaagattcagataactggacaatcccttctcccctacttaaatacaatgagtaatattatttagatcgtccctatgtctcctataaccttgtcgccccagcctcctcctcctctcacttgcgctgccgcctccatcgacccctcacctctctacaatcatagtgttagcatgtgctatatgttagtctccactgtt

SEQ ID NO: 102159 - DNA, 439 bp, Zea Mays
cctcctctaaaaggttgtttcccagaacgggtttgctcaggttttggagcttgttgagaagaggtatgggaccatggaagctattgttggcaagacgaaggatacgaaggaaggtcaagtttccaagagaggagctgatttggccagccaagctttggccgttgagattgagctccgtgactcgatatggtcgagtggaactgcagttcacaccatgccaatggcagaagtggatgctggtgttccaattgctcaaggctccgtgcggatcactggtgatgcccttcttgaactctagcagagaatgaaaatcttggctgttgttatgatgcgtcgagcaatggactttgtccactgcatgacatagcagtagcagcagtactacaagcatggcgagtttcgacggctgcttccaatgactcattaaggcacgtaattg

SEQ ID NO: 102160 - DNA, 313 bp, Zea Mays
aacacttcataaaacgagtactctaaaatattgttatttcttaaacctaaagggaaagcggccactaggaatgataaaaaatgagagaccataatgttaccataacttaattatcaatagtataatggggataagcaaatatgggtaggaatggtgatgaaacaagttcaagtcacgaagataaaaatatctaaaaaagatagttttacatgtataaactagatgggaggataatgagagagataaggttactatggtccaaatctacttttatgtttctatattaattatacaattgtagcaagcagattga

SEQ ID NO: 102161 - DNA, 502 bp, Zea Mays
gtgtgcttgctggtgataggaaagggggaaaatggcgccgcgatggctctgggtggaattgggaggtgggattggggctacacggccgtaaggaactatagcttcaccatgcacaaccaattttgagagagatggcagaggcagtgcgaattttggacttcaatcaaactcactggtgaagttgtgagtgtctcactggtgttcatggcactatttataggcacggcggtccggctagctatccacggctatggataacattgttagcgcatgtttaccacgtagggaagagacacagtgagggaggagcaaggcatgggtgacaccacggcggaaagcactgagtcacggcgaccgtcgatgaatatcttcggcgacgcccgactgagctcgcgggatgatgccacgtccaaagttatcctcccccggatcgattccccccactggataactcgagctcatctgattcaatagtgtcgtagatcttttccccgtgttcttc

SEQ ID NO: 102162 - DNA, 346 bp, Zea Mays
agaaaattaagcagaaggcagggtgatcactagatagatacaaagcatgtttagtggcaaaagggctcaagcaacattatgggatcgattatgaagacacctttagtccagtggttgaacctactacaattcgacttgtttttcaattgatctaaaggatggtgcttgcgatagttggatgtgtagaacatgtttctccatgatgttcttgaggaagaagtgtatatgaggtaacctcctaggtatgaagatatcgctaagccacatcatgtatggaaacatgacaaggccctttatggtgtaaagcaaatgccatgctcttggtatgctagacttagtgataaat

SEQ ID NO: 102163 - DNA, 873 bp, Zea Mays
agaacagtataggttaaaaataatgcattgtagccccacattcacaaaattaaagaacatataacatctcaccatccatgggcctttccgcctgtgcttgcatacacatccacctcgtcaatgtgtccatgctaccaattgtagtcttcaccataagtcttgaccattactataacgtactagtattaaatgttcttacatatagcctaccggtttatttatcggtcgattgtcttccctcatagagacttgaggaggagccacgtaatggttccttctatttcaccgctacacttgcccactgttgatcctttagtcaatcctaatctagaggtagatccaccacacatcaggtcctggtcctgaggtagatcctccagtcggtcatgacttacctctagctagttcggagcttggtccttagcctccgctgatcggcccctagctagtttatcaagccagttgccaatgttgtaatggtaaaaagaaaaaaaatggcaagtggagaatctgtatagatttcacaagcatcaataaagccagccctaagcacaacttcccactgatagacaagatagtcgatttcgctgtgggctgtgaagtcatgtcctttttaattgcttctctaattaccatcaaatttacaagagagatcaggacaaggtcaagacaagcctcataacacccattggcacatactgcttcattcgcatgcccaaaggccttaagaatgcgggctcaatattttctagaatgatgaagaccatcctagaaaatcaaactggccacaacatcatcacatacatcgatgacatagtcgttgctagcaagaataaagaacacctggtagaccttgtagaaatattttcaaac

SEQ ID NO: 102164 - DNA, 467 bp, Zea Mays
aagaggaaccaagctcggcacccttgggggctaggtcatcctcaggaccaccctcgagggctgggttatccttagcaacaccttcagaagctgaagcaccctcggtcatatccacaggagctgggtgaccctagccaacaatgtcaagagctgatgtgtccccatgatctagactgccctccaaggtcgaagaagcgtgagaaaccatctaggttatctcttgcccaacgcgattaccagccaaaaggacgtcatccgggacctctgtacgaacgacagaactttcaacctcaggaggctccgataaatggtgttcagggataatttcctctaatgcatggtcaatggcatacattgtcaacccctggacactaactagtcctgataaagcctgcattgttatgtcactgctcctactgctgcgactgttcttgcgaatcaaagggacctcttcctcctcttcatcc

SEQ ID NO: 102165 - DNA, 588 bp, Zea Mays
atcgtcgtcccaatagcttctgggatgtagctaggggtaacacttcatgaggtgttctatgttccatgagttcccaatttccgtgccgtccatctgagtgagacgatatgatcccggccgagtgacttcagctactatgaatggtccttcccatagaggtgacaatttgtgtcgtccctcccccgttagaattcggtggaggacgagatctcccactgcgaaggatcgatgccgtatggccttatcatgatagcgcctcagagtttgctgataccgtgctgattgaatcaccgtgttcagtcgctcttcttcgagtacatcaacatcctccagcctagtagcctcagcttctgctatgttttcaaagaccaaccttggtgccccgaacttgagatcagcgggtagcactgcttccgaaccgtagaccatgaagaaaggagtatttccatgcagagctcgactaggttgagttctcaggctccaaacaacatacgacagctctctgatccactttcctgcgaacttttcattcttgtcgaagactttctttctaagcgcctccagtatcatcccattagctctttcgac

SEQ ID NO: 102166 - DNA, 574 bp, Zea Mays
gaagcattcttcacggctggtcttcgactgcatgcacactgattcattaccgaactcctgaagcgcttcgaagttcggctccaccagctcatgccaaatgccatggtggcgttggcgaagtttatttgggcggaggccacatatggtggtgagccgtcgatggaggtttttgcaaagaattattgccttcactcgcagaagaaagttatcggtggcaagattgtgcagttaggcatgtgcatgttcacaccgaggaccgggaagacctcgggcgatgttgtggaactcatgtcgtgtgctaagaacaagtgggggaactagagggatttttggtttaatgtggtgatggaagacacggagggggttccagggttgcctctgactatcctatgctcgcactgttatgttgccttcccctagtttaaagtaaagaagggggatgtgaacgaggacgcccttcgccatgcgtcgaaaacgtgtagtggtcacgatttggtagaagagttcatcgcttatggagtgtggccgcttgcacatggctaggaggttggcgaggtgaaactatgcccgatgt

SEQ ID NO: 102167 - DNA, 572 bp, Zea Mays
ctgcctctcgcggtgacttaggagtggtcgaatgccgaagatcgtcgatgcggtctttttcgacatgttgcatcttagtttttgcgggggatttttgcagatatattacatggctccgcctcgttaaaaacctcaccacccaggaggaaaagagtgcggggctaaataatactgtttggtgaattacaagggcgcgtaggccctgaggatttaaacaaaaaaattgcggagattgtcaatattccaggaatggtctaggtcttcgccggatggcgttgttagcttgtatgcgctgggggacgcctttgacttgacgatgaatggaccctcccactttggctccagcttgccccgtgactctgtccgagtggttcggacgagtatgaggtctccttcggtgaattctcttgggacgactatgtgtcgcaccaggccttcgtttgagcttggtatgtgttgagggcctgcagggcgaagacgcggtctccgtcgatgaggtctttggacgttggttcgtctacgtcaaggacagttgatgcacttgttcgaggtgacccgtgctttatttcctg

SEQ ID NO: 102168 - DNA, 611 bp, Zea Mays
gcctggcgtctgatgtgatggtgaactgtgcagtagattcatgcctgctgacttctcgtagagagccgaggccgagatcgaggggttgtccatacgcccgaacccccaagggagaggccgcccatgccgtagtggctgtaacaacgccagggtatgggtcaaaggctgcttacggggtgtgtcatcgtcctgcgtgtgatgacgtcgagattccctgcagcactcatcgagatcaaagcacccgtttggtggatgcagaagtctttctgaggcgttagccgagccgtccctcgacgtgtgctatagtcgggcggagtggttgtcctgtgggattcacggcgtagtcggtggccaaggtcaagctctggcgaggcgaagaactcgctcgagggctgagcttgacgtcgagcgaggggggggggggaattgcccgaaggctggacccagggtcgggcgatgcggagaggttacgctcgaatcctgtccgctcggtttgtcgtattaggcgtcccatcggagggcgtcagacggtgtgcgcgcactgtttgtgtgggcgtaatcataccgctgcgctggacgtgatcgctgtcttgtccaccactatgctccgc

SEQ ID NO: 102169 - DNA, 464 bp, Zea Mays
cttcaggtaccctgagacacttcttcaattgtgatacatggaaaacatcatgtacatccgcaagatgatcgggtagttctagttgataggcaacttctcccactcgctttaagatcaagaagggtgcaataaagcgaggagacaactttcctttaactttaaatcttctcatacaaaagatacacgtggtcaccctccttaaactcccccttatcatttgctcgagcagtcttctccgggtatcagcatagcttttctgccttgactgtgcagttctcaatgtcccccttatcatttgcacttgttcttctgcctcttgtataattttaggcccaaagaactgcctttcaccagtttgatcccaatacagtggagttctgcattttctgccatatagagcctcgaatggtgacatcttcaaactcgcctggtagctattattgtaagagaacttgtgacggaac

SEQ ID NO: 102170 - DNA, 628 bp, Zea Mays
gtgagttttccttccctacctgttggtcatggtcacgtatggttcgagcgggatcgtccgggcggaagttagggctcggatggcgagcacggaactgctcgctggtgcggctatggtgttcggccgtgggggactagctgggaaagaaaagagagaagagagaggggaccagtgaggttgaagacgatctttggggcgtggatttcaggattaacggcttagattgaaggtacctgccggttggatcctaacccttggatcgtgatcgcatggctcagattggtttgggtatcataaaatcgagagcgttcaaataacatccgatggtcggcgttgcataccgtttcgttataagatacgatctaatccccatcgtccgctgtcgatccgacgtctcagattggcagataccctttcgctcagacacaattgcataaggacccccgagagaaacagaaatcaacccgccgtccttgcgccagtagtctgagtctcggtaatctttatagtttagtccctgcacttcccagaaaatgatgcctagtccagataattaatgaaaccaggaaaatcagttagaaagtagtttttaatacatatttaaatgcagaaacttgtttaaattgta

SEQ ID NO: 102171 - DNA, 709 bp, Zea Mays
tctccctcgcgcgcgcactgggtaggctggtcttcgggggtggcttcaacgggctcggcccaatgcggcgaccgggaggcgtcgtcgcggggtgaagggtttcctcccgatttcattggtgcccattcttttccacatcttgcgtagtttctttctcgcctctggtctcttccgtgctcatcgcgttctagcttcagtggtggttggttttattctccttttcgcccgcctagggtagtcgaggagtggcccctcccgggtcgttcttctgcttctcttcggatggatccaaagaaccgaaaccctaactgggagcgttgggggcaaaaggatgctcctcagggatcgcaatcgtgggggaagaatcggagtcttagctggcgattgaagccggccgctggaaaacccgagaacaaggaagacatcctaacctcttcttctggtgatggcggccattcaggtatcctcaaaacccctcctcccaatctgaaaaaagagaatgaaattgtgcttcgttttttctgccaaaaatgtggtacagaggggcatcatgctagggattgcttcaagtctttatggtgtgacatctgtcgcaaagaaactcacaacacagcgaggtgtgtcctccccaagcagaacaaactctgtatgcctattgtaggtatggcagtggatgggttagggttttactcgtcgcacttttccaaac

SEQ ID NO: 102172 - DNA, 315 bp, Zea Mays
cattgcttcaatagttgacttgggaatcttcattgagcctagaaatcttgcaaggtatggtatggaaacatctcgacaaatctagaaatctcttcattgagcccacctagaaatcttgccatggttgacttaggatcttctctatttacagtctgcactaacaacaactccatctccttaaagtatttgtcaactgatctcttcccttgcttcaacaattgcaattggtttcaaagatcatgctgatagctagaaggcacaaatcacctcatcattactcgtttcatctctgcccatgtattgatatgtctcaat

SEQ ID NO: 102173 - DNA, 666 bp, Zea Mays
aagccctggtactatgaaaagttttgagaaaattggacccaaaaatgggctgtcagactgccatatgtctgaattcagactgacagtgtaattaagaaatctttgagctgggattcgagcatgatctagtaagaatttatgagtgattgctatagcaaaattatagctggtataaagggctacaaaattgccacagatggattggtgagtgtttgcacaaaaattcgagatcggggcgctgaaacctgtcggtcagatgctttgaataagaattcccgtggtacaatgccctgaacatatcccctgtgcactgaatgtcgccaccgacgatctccacggttggattcacgccgccgttatgattcgtgctcgccagtgcccggataacgctcccaggtaaaagatcctggtgacggataaactcggacccgatcgacggggaattcaccgcacccactcggattactgtcgaccggattggtcctcactggcgctggccgtttaccgaccatgcgccacgtgcccgagcatcttaccacatcgcagttagtcgcgttaagcgtatccggtgatcgccgaagagcttgccacggtaattgacaccaatcgcgcacgccagtgacctcctctttctctgaccgccgcgcgtcttcgtccaattccctg

SEQ ID NO: 102174 - DNA, 740 bp, Zea Mays
ctaattctcttgggcactgcagcaaacagtttgggagcatggtcctctaacctttttccctgcagccagcggtctgtacagaaaagggttgagttgccatttccaatttcagtgattacaacaatggaaaagaaacccttcattgtttctgggatctgcatagggagcaaggtccagggtttttcagggtcagtttttgccatccacaaccatctcattcttaaagcccagccaagtacttttaggctaaaaattcctagccctccaagctcaagtgaacgacaaactcttccccatgccactaaacggtgccccctctaacatccttcctcccacgccaaagaaaacccttcctaattttatcaatagctttaagtgctcctggaggcaagtcatcagccatggccagatatataagcatccctgtcattacaaattgaacgtgcacccttcttccagccttggtcattaagttcgccttccatccaggtagttgatctgctactttatcaagtaggggctgcacctgatttctagatagcttcttcagggataaggacaggcccaaatatttgcaggggaaggaggaaatttggcaagggatttgctcctgcaggactgctaactcagcctttccacaacggatggggaacacactactcttctgaacattagtttttaaaccagatgcctctccaaacaactttaggatgctgagcacaacttgattttcactttca

SEQ ID NO: 102175 - DNA, 517 bp, Zea Mays
tggacatgcattgtagattgtccggtgtgcccataatcggtttttaaaaaactctccttgcccgagccagtgcccaggtcctctcttcacccgctgctctctctgtctctggaccttcctggcgatttccccctctctcaccgccggggatcaccggtggggatctcatgcgaggtgctcctgcttctgctcctccttcccccctctctggtgagcatcctcatttctttctctgtttccattcaatgagtatctccctgatggtctatgcagtgaagtctcccaccttttgaaaatctctcaaattttatgaaatcatgtgtttacaactgtgcttgtgtgtccctagagctcccctgcaggtttatctctccctttgggaggtttcaaaaactcaaacaaccatttcaccgtcgtttcaaaaccttgcgcaccaactgctcgttgaaatgcccaaaccactcaaatttgctcaaatcgatcccaactttttccagcaccctcatgacacatccag

SEQ ID NO: 102176 - DNA, 361 bp, Zea Mays
ggtaaatctccatttgaagttctatacggtcatgctccatctcactttggcttggacaccgccgaccagtgcactgttccggatctgaagagtttgatgcacaccaggcaggagatgttgcaacaagtcaaaatgcacttgctacgtgcacaacagaggatgaagcggcaagcagacaaaggaagatcagagcggacatttgaggtgggtgctcaagtgtatctgaagttgcaaccgtatttccagacctcagtagcagaacgcaagggccagaagctggcatttcgcttcttcggcccgtttcagattgtcaagaaaatcaatccagtcgcctatcatctcgccctgcctgctaacagtg

SEQ ID NO: 102177 - DNA, 341 bp, Zea Mays
aaatcccacatcaccacagagcttgaagctagattagacattaacatgtcattggtcctcgaagccagaagagtcatatgtcttgaccactagactattagtgatgataatttgtgatagaaatataaagatcttgtggagacctgttgtatcctctctactcctgatgatttcttcttatgagagcactactatctgttgttgaagcctggtcccagacggataacggtcttgtttcgctattgccaagcagttatcaccatttgcttaatcgaaagcttagcaattaggtggtttttcccagataaaacgaattcttggccttgtatgttctattccaa

SEQ ID NO: 102178 - DNA, 471 bp, Zea Mays
aagattatctattttcttgagtgaagattatctgaaacaagtataaggttatagccaaatttgaaaactggtgcggaagtatgatatgtgttccatttaaatttaaattttaaattatgttaaaggctacaaggttttgatggaaccggtcgtattgaaccgtgaaagagccgcagcggaccgcctaaaacggatgcctatgtaagttattatataaatatatttacacaaaatttgtctatcaaagttatgaccgttatttagtcgtatgtttaatatagcttcagattgttcgacgactaccgtgatgaagatttttatgggctaccgcggaaatacagtattgtcgctcgggtagaagttaaattcctgattgaaccacgttttcgtgatagacaacatttcattttatctgacatcaatgtaagccaacaattctttaagtttcatttttaaaggtacatgatcttc

SEQ ID NO: 102179 - DNA, 395 bp, Zea Mays
ggaccatgttgtcaatactttgctaggaagacatcctaaaccttggaaatactactctaaaatggtatcaacacatataaggacttctggtagcgttgagaagaaatccataagtatgcagaacgaccaaggagctttggcagggatttgagacatgtacaaagcatccataatacatggcatgctgaggaaaagcacatgcaaccccaagggttagcccaatcctcaagcaatactctgtagacctagtagagcaactttcaatgtggaccacaaccaagaggggaaagagaaggacatagttccggaggaaggcattcacaaatctctcaaaaacgaacactatattgtgtcttttgtggagaagataatgggcactctaccaagtactgcac

SEQ ID NO: 102180 - DNA, 287 bp, Zea Mays
tgtcggcgtagtcatccgttgtccactgctggcgaagcttacaacgagtcgcaccctggtaccaagcttggtaccgcctgtagtcactgttgttgagcaactcatcgttttcatgcacattcttcgcagtcaaataccactcttcaataaatgccaaatgatgttgacgaaagtctgttatcttcttttgctcccaccggtcaaatctacgcacagaccatatcatttaaagaacacaaaagatttacaaatgcttgatgttacgaagtcaactagaataattgaat

SEQ ID NO: 102181 - DNA, 611 bp, Zea Mays
aagaaaaaaaaaaacagtagcctgtccaccaacgatgctcgctgcgaggactgaagaggacgtggaaggacaaacactgtcgttggtgctgctggctgctgaggtattaatcatagcacgtacgtacgccacactgacagtcgtagttggtcactcatatcctgtcgcggatcggaggaccatgcacactcacccacgcatcgtcattttctgaggtatcgatccattggacggttaggaggcttcttgtgtaattttcccccccccccccggaaacctagcaataacagtcttgagcgagacactgtaaaacgtgttgtaccatatatgacaagattttggttcctatagcctctaacagtattctctgcgttctctaaatataaaatacattgttcattctctatagacatagactctctaccatctcttttatctattttatattcaggaccgtatcagcaaattctgaagccatatacatattctaaaatggggcctctctcttactagtcaaggtcatcggacatcggtgaacgaaatatcaaaaaactacataatagggcctctcttactagtcaaggtcatcggatgtctgtgaacaaaatatc

SEQ ID NO: 102182 - DNA, 404 bp, Zea Mays
agaagaactgactcaagctttaattatgtcaaagttccatgttgtatgatacccaggtttaacttttccatttcttggcatagtgtggtgtcaggggtcctcactgtaagacaataacaggaagctttgtgactcagtgcatctgccaccacattgtcttttcctgggtgatagtggatttccaagtcataatctttaattagctcaagccatcttctttgcctcatgttcaattctgactaggtaaagatatatttcagacttttatgatctgtatataaatggcaagtatttcccagtagataatgacaccatatcttgagggcatgaacaactgcagctagttccaagtcatgagttggatagtgctcctcatgcaggcgtaattgtcttgaagcataagc

SEQ ID NO: 102183 - DNA, 723 bp, Zea Mays
tatatccaaagcttctttcatggccgggttggcttcggaattatacggctccggtggtggtgaaaggctagccgcaataaagaaaatgttggttaacttcgaagctaaaggcgaacaacgaagctaaacctcaataaaagtacctataatcctagcgcgttcaatagcttctttagcccgtttggcctcttcttgaatgtcgtgagattctttctcattctttctaattgcttcgtcagccatctcacgaccgcctttcattcagacatcggagtaaaacctcccgcctagcaaagaggcttcggtcaaggggtccttggtgtcatctgctgagaaaatagattccaactgggttgcggccttaacatgttcacaatcggccttctctaaaattgccgcgacccctcgtgcaccggcgaaagcgctgaaatccccatgatagctgagtatttcatcaaaagcttcggcatcttcgccgatccactggataacccctttgggatgaccgtgaataaacttctgctccgaaaagtatgctaccacctttgcaaaactattgtttagcttcctggcacattccaaggatatttcgtagtatctctccttggaatcctggagctcttcaacattcttttgcacccttgacctttccatttcacttatttccttcttagcatttgcaacttcaaaattttcattcatttccacaatcttcttctttaa

SEQ ID NO: 102184 - DNA, 674 bp, Zea Mays
cttcaaagctaaaataaaaaacaaaatgttctgattgacttgacaaggaaattatcttgttcatttagtacgtcgttattcaatactcaccatcacaaggtaatatgttattgtcaggaaggtaaacttagtccatactaagaggaagatggatacagagatttagttcctatgattgatcatggaccatatgacatcagaatcaactcgtgtttttttccatttcaattgaaatgaaatgtgagcggattatttctcctacaagtttacaagagaactaaaacatatagtacctgaatgttacacagacacaggaaagttcaagcaattagaaaacattacttaacagaatagataagtgggactacacccgcatcagtgtcaaccacaaaagggacaacaaagaacaaaaaactggaaagtagaatgaaaatggataaacaggatacccatatcagaattgcttacttagaaatgtagtgcatgtttagaccatggaataggaactcaaatcgttaggaatttagatccaaatccagctagaatccaaaaactacagagaactttcctttttcaaacacaccatgagtgggaactggtaaaagaccatattctgaacacaaaattttacattggacagagtcaaacaagtgagcaatgatgcaactaacaaa

SEQ ID NO: 102185 - DNA, 323 bp, Zea Mays
tagagccatcaacctcttgttggtcacctcatcattattatccatcattagattatggtagtcaccgatagcttgatcatttgcctagcaaacctgatagcattcaggttaatctctatatgcaaaacaacttgtccctacacaagctagaccagacctattcaccaccaaattccgacaccacaaccttcactaaccacagtaactgtgtttcgagcttcgcacagaggtaaggaacctaatcgacttatcgtttcccttatttactcatttactcatgtgccattgcttgcaagagtaagatgagcagctttgttgccaac

SEQ ID NO: 102186 - DNA, 711 bp, Zea Mays
ggctggttgtgcaggaaggagttattgctgaaggtacctctactgctgaagctgaacaagccatgactgaagttgagagtgataatgaaagtgaagatgacgatagtattctgtgtccaactaagcctagtcatgttgaatttgggaggtctacagtaaaggctgaagatctgattgtgatgaagaaactaggatattttggagaaaatgatgatgaattggttccttttgctggagaggaaataattccagagccgaaggaagatgaagttatggtattcaagagcttcttaagggcggggctttggttccccctttacgagatgataggtgaagttttaaagaagtttgagatctatctccatcaggtgaccccaaactctattatcaggctcggcgtttacatctgggttctccgaagccatggaaagagcactaacgccgaagtgttctgctgggaacatgagcttccgtaccagacaaaggcaagggctgacggactacacaaaaacttcggatgctacaactttgcataccgaaaggatacgaaggcccccgtgataggctaccgcaccaagtggtcaactggatggacgaatgaatggttttacgtgaaagcaaacgaaaagaaaagggaaaaacttatgagcatggtgatgagtccgctgcgattaaacttcagcatgactcggcccatgtgcaatatgcagt

SEQ ID NO: 102187 - DNA, 330 bp, Zea Mays
cttgtcgggattgtatcgtttgccatttttgtgccatgtcatctgtttcgcggattcctcggtcatgtatagccgctggatcctaggtatgaacggaaggtgccgtaggattttcatggggatgtcaagctgcctcttctggccatcagtagagtctacctccatgaacctagaggatttacactttggacagtactttgcttcctagtattcttttctaaataggatgcaccccttcgaacaagcatgtatctgctcatatggcatcttgattgcacgaagaagtttttgtgcctcgtacatgctctttggtagaacatgaccctctgg

SEQ ID NO: 102188 - DNA, 388 bp, Zea Mays
gcagatattatgaggcatcttcaaaaggattttcgaaaagacttatctagaaactctcttcccttcttacttaagtattctgaagagtctattttaaagaccaggtagtaagagtgcaacatatagaaggtgtgaatcaactaaggttgattctgtaattatacatgcatcatgctaagaactatactaatcaaattttcccccttagaaaatgccgccgcgcacaaggagaacagcgcgcaaacatactggaccgattggtgtgccgtgtcaccagctggccctaagacatgatagtagtagcggaagtaacgatcctataggggatctcgaagctgaagtgagtcggctccacgcggaactctgccgcaggacgactatatgggtc

SEQ ID NO: 102189 - DNA, 385 bp, Zea Mays
tctcaggtggtgaagcattggaccggtctgggaatatataagaatatcatcaatgaacactactatgaacttgttgaggtagtccatgaaaacactgttcatcaagtacatgaagtaagctggcgcattcgtcaaaccgaatgacatgatcgtgaactcatacaatccatacttggtgatgaatgccatcttcggtatatctgagggtcggattctgagctgatggtagcctgacctcagatctatcttcgagaacacactggctcctctcaattgatcgaataaatcttcaattctgggcaggggtacttgttcttgatagtaacctcattcaaggctcgataatcgatgcacatcctcttcatgccatccttcttctccacaa

SEQ ID NO: 102190 - DNA, 306 bp, Zea Mays
tgctctatggcagtctacccgggagaaagccgaagctacccaaaccaccctcccttccaagtcaccttcaccggacaccgcttcccagacacttgccaaaatgttgcccgaaaagccctccgacagctatgccaaaactacagcagagaagtctttgagacccccttcgttacttcccacctagcaacaaaaatacccctacctggaggaaaagacttcaggccctgtcaggaagagatcctactgaagatgaccccaccatagtctatatggctggatatctccacacactcgataaccaatatg

SEQ ID NO: 102191 - DNA, 589 bp, Zea Mays
gtcatgcatgcatcaaatttgaaccatactaagtattcttcccctcttatagagacatggcatgcacaaagactacccttcgaaaggcggtcggaccttagggtgtacctcggaactagttggctcctcgacatgagggaagcagtagcgggagtaatgatcccataggggatctggaggctagagttgaatgtctaatgatggaactacgccatggaggctaggagcgtgtgagtgatagtcgccgcatcactaagttgtaagcggaggttgagtgtttgcagcgggagattgtggagcgggatagggccattgactgggctgtaaattcacgatctatagcctaggattgtgaggcgactacccgagcctgggtggaagagctaagcgtagccctagaaaatctgcaagtgtataataatgctctgcacgtgctgtatgactagctacatccgaacgtgccaccggaggttgtagcgatgggagctagtgcaacaagaacagatggcgaaggacctaatggggagctagatctctttggagcccctccttccatgaacctcgcggataatcgtcctcccaaagctag

SEQ ID NO: 102192 - DNA, 426 bp, Zea Mays
gccaagcaattctctaaggatttaccaatatcttctcctctatgacctttaaccaagaagaatcctatgattttttatggagcttccaatcattatcaataaaatgcattgtcacacacatatagttttggttcgtgtttgatgtccatgtatcagttgtggggctagctctagcacaattttccttcaagaaattattgagcttttctttttgcacatcatacacttccacacagtttctagtgacagttctcctagatggcataacaaaacgtgggcatgctttagctagaaactttctaagaccaggacgttcagacaagacaaaaggttgttcatcctcaattatcatttcagcaaaactattctttaagtcatccatatcaaatttccatgttgaaacagtaccaacactactattgccag

SEQ ID NO: 102193 - DNA, 428 bp, Zea Mays
atgtcctaggcgatggcgcgagaatgagatgtctgcgaagacaatgatacaaattgttgtccacgacatcttagctccctggagccaaacaaagaatcaaatattatacccatcctacctagtgaacaatagcatcggtacaatcacaaacatatgagatgacttaaaaatcgaaatgaaatactctcatcgtccatgagcttgtccgcctgcgctagcgtatgctacccttagttcaattggttggctcctccagtcatcgtcctgcccatggtgctcaaccatctactcatatgccgcctggagaaaaaacatatcaaatatcaatacataaggtgatgcaaaagaagactacaatataaaaaaactcactaggcaatcgatagctatctgagtgcacaacccatcaggattatgaggatcagaac

SEQ ID NO: 102194 - DNA, 581 bp, Zea Mays
ggcctgacacgtgttagtaccggacccttgcttatgccagggcatctcctgtcccgagaccttgttgtggcctggaccttatttggagggatctggacccctgttcaagggacccggtatgcttactttggagtcccggaccgtatcgagggtccgcggttgtacgcacaggggtgtggtgctctcttgcggaggtctggtctaactgacacatcctgggatgtatcaccttttctcgccacgtggtgccccttgagccgtccacgcggtggggccaggtgctgttcaccgtgcggctagagatcgtcgtacgggcaccgcgcctccatactgtagtagggggtacccctgattcagggtaccgacagcgatggagatggctggctctggacaatcgccgatgatggtaggagatggcggtcatcttggtccaaacattgagggagtagttgatggtaacttaatggttacaccacctcctgctctactggggcctataatcgacgcttcaagcatggggtatgaagggcaacaacggattcgaccgccaatgtccaatattagctccagggagatggata

SEQ ID NO: 102195 - DNA, 625 bp, Zea Mays
cttagaagaagacacatgaaggaacaaagaaaaatagagcactgagcaacatcaaatgtgtccaatgacgcaccgaataaaattatggatacgagtgttaacgtacagaaggactgccaaaacaatgtacactaaacaagtaggcatgcaccgagcatcacaccagacgaggcaccgaatacatcactcaaagatgcttgcaacatgtttggaaagatccaaaaggcaccacatgtgtttgatgtgtcaccagataccccaccgaatagagcaattaaggaggatgcacaagaacccaagaaggtctataatgcacaaaatgtgtttggtgtaacaccagccaaaggatcagatgctcatattcaaacaattcgtaatggctagtactaatggatacctaatgtttacgtattggacatgtctgttgactgcattggacgtatctagtgagtatgcaaattttttgtgtcatttccatttgctattttaggacttgggggctatatataccatcccaactgacaaattaaaatatgtgggagctaagaaacaccacaagagagttagggctcacctctaatagctccagacacccaagtggtcaaagatcacatgacaattagca

SEQ ID NO: 102196 - DNA, 553 bp, Zea Mays
gtctcgccgagggtctttgctaccaaccttttcaggccaaccgttcgttacgacgaggcctaccaagagggtgggcaaccctcaagcactggccctttgacaccagagttggtcgttattgtggaaggaacgtacctcccaatcggtcctgtagatgattggagaacatcgtatcgtagcttgctaactaatggcgtacctcctcaagatgaaacaaaggcatgaaggcttcatcgatgggccaagtctttcgccgtgattggggaagatctctacaaaaggggcatatcgaataagacaattatgcatcctgattgaatagggaaaacaactcctggaagacatccacagcggaacctgcgggcaccacgctgccccgaggagcctcgtggagaatgctttccgacagggcttctactagcctaccatggtatcgtatgcataccaggtggtgagaacatgcgaaaaggatgccactgttatgcgcgacaaacccatctacccacgcaggcgctccaaaccatcactatcacctgtccattcaccgtctagg

SEQ ID NO: 102197 - DNA, 357 bp, Zea Mays
accaccaaaaactcacaggacctaggatattacacctcttagtggcctgaacctgtataatttgatgtattttgttgtgctctgcacgaaccattgagctgcgatcgacattgccatcctcccaaaaaaacattgtgtggtacaccccatagtgcaccgtcggtaccaaacatcgaccgttgacgcgccaggtagggggtgtgacgtcaattcctgacagctccatggtcgtcgtcttcaacatcgtctttaactttaccaccgggaagatcttccactttggatccctctcctgcgtcgccgatcgaaggggcgctctgcatcgcatcgtggacatacagaaagacgctctggggc

SEQ ID NO: 102198 - DNA, 676 bp, Zea Mays
ttgctaaccaaggtaggcgtcatctcagagaagttgccagagagtaccaaacttgtcaggttcttgtggtgtccaatccatgagaagactgggcctagctcactcacttcgtcaaatgtgagttctaacttacatagagaccccagtgtaccaaatgaagaaaggaaatccacagaagctaaattcccactaagcactaactccttcaatgacacaaagttggtgatagatgttggtttgacttgttcgatgggcaaaagactggtccgagctagcatcaaactctctagacaacttgcattggaaaagtttggcacatgcccagtgagattctgttataggacaaatcaagaacccttagattcttcgattgaaagggtctggagggcaaccacccctggaggttgtcattcgaaagctgtagcgtagttaaattgagaaaatccatcaagaactctggaaatcgaccagctataccatagttgttttggaggttgagaacaaccagggaactgagtctggagagtgatttacaaataggaccagtcagggaacacgtggccatgctaagtatctcaagatgaggaacatatgtagcaagagctgtgcaccaatcttctcccatgcttgacaaatccaatttgtcaaggtagagctctcttagattgctgaggtt

SEQ ID NO: 102199 - DNA, 538 bp, Zea Mays
ttttagttctgtagttgcatcaagtgcagctaatgttaactttagaagaacttggtgccatggatttgcactaggctattatcaacttccacattcctttgcgatgaacttgctgcatgttggactactctcagcatctgtcatgattgcaaccttcagctcagggacatatgtttttgttactaatttgctaaatcttggttgatggttggactattctctctctcgctctctctctctgactgatcttcatgtttgagagtaacctgcttatggagacttgagacagttttgtcaattggccagtctcttttgaaacgcagaggtgatatgagatcatttttgtatgttcaaatactgtcaacgggccatgattattggatacctttctttttgtgcaagttaaaggacacatttgtatctccatgcattactgtaatatctatggcagaattagcattaaatatgaaccaggtaatgtaaatatgatattgatcgattattattacagttctattttattttaatcaatcatata

SEQ ID NO: 102200 - DNA, 309 bp, Zea Mays
aaagtgatggcactcactctgtcatcaaagaaagagaccgctgaaagcgatgctagtatgtggacaaatatgctccatgtctcctatattcctccaagaatcaaaacctaaccatcattaccacgtgagcaaaaattgctaccaacacaaaatttagattgcacccacattactaatgtaaggaaaaatcaagtgttattgcttaccaacacaaaatggacacctgtagatagcaacttttgcatttttagctgctatagcgtgggatctgttataggatgagctcatgttttcaatcagatatgtaag

SEQ ID NO: 102201 - DNA, 284 bp, Zea Mays
acgccaactagattaagttactgtgcaagggaaaatacaatacttggcataaggttagagaagacctgtgaagcttggtcatttgcagtatgtttatcacgttaagcaaaaagcgtattacgggcaggttctcagcaccttgcgtgccaccagacttgagcattggtcgttatttatcttccatagaccgtgtatccgttcctccggaggactcttaattatcttgttgctgagtgatgacagtcgttagaatagtttttgtcggtatcaacttacaaactcat

SEQ ID NO: 102202 - DNA, 1079 bp, Zea Mays
gtgatagtggccttgaaggtataaggtgataggtgcctgccagtgtttgatcattatcagatttacaattcggcgcccgtcaaggtcttgtgttatttgcaggccttcagggtttcttacagctggtgtaccaatcgtgtgaaaaaacatgtcagatggtagaggtttgccttttgctgttgctttagccaacatgtcagcctcttcattcttgttccgttctatgtgttgcaaggtgaatcctttgaattgcttctctacacttcgcatgacagagagatattgcatgaggactagctctttggtggagcagcccttttcgatttggccggtgactatcttagaatcagtcttgactatgcacattgtcacccctagggcctagagtccgaggatgatggcttcgtattctgcaatattgttcgtgcatttgtctaatttcagtgcgaaacggagacgcatggtatatctgtatttgagtcatgtgggcgatgtaataattgttgcagcgtcggtgcccgcttgacaccacacaccgtcgtagtggatggtccaaatagtctccatgcaaagctgttgtggctccgaaggccctatccaatctactatgaagtctggcaagacatgggatttgattgctattcttggctcaaaggtgatgttgtaaccggagagttcggctgcccatttggctattctgacagatgcctatggatttctgaataggtctcctagacctcgatctgaggtgattcacactttgtgcacctcaaaatagtgccttagcttgcgcgaagccatgatgactgcatattctatcttttgtaactcattcatgttgcatttagaggtggtgagcacttcggagacaaaatacactgggcattggtgggtcttgccttctctgcacctttcttgtaccagggttgcgctgggtgatgttgcaatgtagagtagtaggggtagagctgggtctaggatggttagtgtcgcgagatcagataaatattattttaaggactcaaaggccgcagcttgctctgggccctaggtgaagtccttggctccgtgtagcgttt

SEQ ID NO: 102203 - DNA, 549 bp, Zea Mays
tgtactaacaccgctcgaaggaggaggcatggcaacgtaccgaggacgatagtgaccaactgtcttcaagtgtgcctgcgtggatgagactgacgtcattctcaccgccagtaggacaacgacggcgacgagagaagcaacaacatcagacaaaaaagcacgagcaacagtactttggaaagcgaaataatgcatttatagccaaatccccatggtgaacagtgtcaccatatattttctcaacagtcacatctagcagaccccacaaggcggttcaccagatgatcgagggcaacatttgtccattttaaataagagacttcaggattggcccattaggatgaaccattccctcgggagggctactggtggtgcgaaagccaaaccagacctcgatcaacactacgaaggcttgccccctcatcttgactaaccatgcttgagtgcagactagggacaatcaaagccttcgccaagtttgacttcaatggagccttcgattaggcaactaatgtcgaccatggtggaggctggtgcctaggcgagggc

SEQ ID NO: 102204 - DNA, 482 bp, Zea Mays
tgggcgtagaaggctttgcgcaccggactagtttatcagaaaagttgtttctggaaagaagaagataagatgtagttggcatataggaccaccgtccggtgagcatcggacccatagtagacccaacggtcggatgggatgcaccatggtcaactgatgtggcgttgaaagggaaatatgctaggtagccatttctatttgttttggtgattaagtatccaacacaccaccttggactaactatcttgacgtgagtatgagcacaggctcaattggaggcaaattgatggcactaagtccaaacgagcttaattggaggctaggaagtgcaacttgtggtaaaaccgtaagaacattaggttgagtgttttaataagttgcatatgcctaatactatgtttctagctcttcactttgagctccaactctattatgtgagaaaaatgcaatttggatttaggttgagctaaacagaaggccag

SEQ ID NO: 102205 - DNA, 574 bp, Zea Mays
ttttgcttaggcaggacacaacgagatgtaacgtgggtctccttgcgacagatgtcacaccataatgcgttaaagcaatttctagcatgatgcccttcaactccacatttctgacagaaagcaggacgaacaagatcgacatctttcttcagaggtaaaggagaaacgatagggttacctgtttgagttccttcgccgggggaaggggacaacagaccctcttgctgctcagcttttccgagtgtaggcttcaatttccaactgaggtttcttggcctgttccaagattgaggcccctgcggattttctttaggaccccatcgatcccattgggggttctgaggattcttgctcttcggatccatcgcagaatctttcaaagggcttcgaaaaccaccggatcctagacgaggccactcctcttcaaccaccggcgggcgaaaggaagaaacacaccaccctctgctaaaactagaccgcgacgagaccgggagcgaccagagatgtgagaggaaggcggcgcaatggggaaacgagtgcgatccgatgaaatccaaaggaaaccctaacctgg

SEQ ID NO: 102206 - DNA, 342 bp, Zea Mays
ttttaagaatattcagccactgaaggacagagcatacccggcttatttgtatagtggtgtcaccgactcaacccgggttaccaataacaggattcctgctgtggacttggtgagccgactggaaatgatccttagaggcaaagtatcaaatattggtgctcctgttgcatattctgcttggaatctgccaccttccaagtcctttttcgattttgtgtccaaccctcctgctagtgacagtggtttgggtcttagagtgtgaccctctctcgaagaagttgaggttctggttgcttcacttggtgatcttcccaatgatgagaggcaagttcactttgagat

SEQ ID NO: 102207 - DNA, 609 bp, Zea Mays
cggaaatcagaccatatggcagtttctggataatctatagtacgcgtcaattaataaataattgtccgaaaaataaaccctaattattagttagcgcaatgctggtgtgacgtgattacattattgacgtgactgtatgacgtgactgttacatatatgaatattaattttccgtgcatgcggcattctctcggatcaacggcggccttgactacccaaactctggcacgtagctacgcatcggatccggtccaacgccacgactgcttccaacggttgctgtcatgccctgctgccaaccaccaacactcatcgtctccagcgagcgagctgcactatgcactgcactgcatgggaaaccatataactgcaccccagcaatccgtccatggcacgcacgtactaggtcagccctagctagctgcctttctgactctttcaaatggtccagtgctatggtatgcatggtacggtgtgtggtgcatgaatggtccagtgcattacccgcattaacttgctgatgttctatgggtcggaattcgatcgagagagaaaaagaaacgtactgaaaggtcattaggccctttttctctacttttgaagaatctt

SEQ ID NO: 102208 - DNA, 337 bp, Zea Mays
attttcctgtggaaatgaataattgtgtcatctacagtatagaaaggtaggcataagttacgtatcaatcctttgaaattgtccatgattttattgcactttagcgcatactaatctatcactagcaaagtgattgatctaaactaaacatcaacttatttagcaaatgggaaacctgatttttgtggtgcagcttaactggaagcttttggtagctgatatatgagtgttatgttttcttcttttaaacttacctgaggagatgttttctatgctttgccaaaattttgtatataaaaaagggacagacccagtgttggtgcctcccatgtgattt

SEQ ID NO: 102209 - DNA, 295 bp, Zea Mays
ggtcggccgatggggtggttctgtaattaatagaagaagttctttaatttgaacccactagatgttttagtgcctaaaagttgattcttcttgccaatcgctagtacacaacaaatatggcatcaatagattgtgtgtaactaacacaattgtaaataacacacgcaagtctattttttgctagtatatgtgtggatgtcagccatcgtgctgttagttttatttgctggttttttgcaacctcctcgtgcaggggaagtcctgccgatttttttgttgataaacttgtgttaat

SEQ ID NO: 102210 - DNA, 598 bp, Zea Mays
cagaaatacattcaatatggatggtggaagggtataaatagcccaaccaccaaaaactagttgttactgggcttgctgcgcatgggcgcaccggacagtccggtgcgccaatggtgcaccaacggtgcgctctaaacgactaattctgacaactagttgttgctcagagtcgcaccggacacagcacaatgcatgtccagtgcacaacggatagttcggtgcctggctaaaaatcggctgactcgaactgcttgttctcgggttgctggtgctcttggagttttctcttgggtgctctctggcctgctgcccaggcaccatcgaacactctagtgcccccagggaagcaacacttctttcttttcttgggtttttctaaaccgatttcgattctaacttgtgagtgagatcttgagtgacacctagcactagtttagagtgtgaacatgcaccgacactacactagttatctcttggtcaaactactcatccacaacccctatttatagtgcagctaaaataaaaatagaagtcctaactctagaccacgtgtcccacaactccttcgacacttaggatatgaagagcttcatctttt

SEQ ID NO: 102211 - DNA, 737 bp, Zea Mays
gccgagtcaagaaggttctagcagatggtggaagcagcatcaatgtcaccttccccagaacacttcatgccttggggatcccaactgacgacctcattgagtcgaataccccattcttcggcatcatacggactaaagacgagtacctgctagggaacctcttcatgttggtcaccttcgacgctccagacaactaccggaccgagttactgtacttcgaggtagatcggttcgagtgtgggtacaacaccatcattgggaggctgggactggccaagttcatggacatcccacactacccgtacatgatactcaagatgccaggacctcaaggaatcatccccatctgggccaatttccaaggagctagggagtgcttttggggggctatctagacgaccctcatcgttggaccctcggtagcacctccaacgatggacgttgacgcatcaccaagggatgacctcacaatccccacaaatgaagcatctaccactaccaccttgtgactgatcgaagaaaccaagagatccaaccttggtttttccgatgaacacaagacgacgatcatcagttccagcttcaccgccaaatagaaagacacgctcatccgatttctgcaagacaacaatgatgtattcatgtggcatcccgtggacatgccaaggctccctagagacctggacgagcacaaactaaaggtgtatcctcaagcaatgtcgattcggcaaaagctg

SEQ ID NO: 102212 - DNA, 754 bp, Zea Mays
ctcgagtctgatcagtatgaaacaccagtaatttatgttgccagtcaatagccatgggactgtgagcttccaaccaatccataccgagaatcacatcataactgttaagaggtaaaactttcagatccaactgaaaacaatgtccattgatagaaattttgcaatctggaattttgtaactgcaattaatgatctgtccattggccaccctcacgtgtactggtttgcacaaaggaactaacggaggtcccaaatgagcccattgttcactaacaaatgaggaagagcttcccgagtccactaatatgatcacttttttagcaaataaagtagctgccaatttgatcgtttgaggggcctctgtaccttgcattgcatccaccgatacaaccatgagatcccctggtagctctccaataggatcaaagtgattggtcaccatttctgatacgtccagcatctgccataattcctcgactaaatgcagaggtactgttgtgctacaagtatgtgccggaccccatttcgagccacatttataacacaatcctttagccttcctgtaagccatcaatgcagaaaccttcctcccatcattgttgtgcctggaaaactctgtccctggtgatctatgaggtctttccccgccttgagtcgccacagcagaaataggcttaaatcctgaatttctgttgaacatagctgaatcttcagagccagttgatacttgttggcaacgtggagagagtacttc

SEQ ID NO: 102213 - DNA, 429 bp, Zea Mays
ttcttggaattcttcctcaattcgggctttggaagtacctctaccactgtcggcccgggatggctggaggacaacatcagcttgttggtggtgccagcttggaacttcgtcggggcaggaaagttgaatatcttgatatccctttgaaggacagtattaagggatggcgccttgagtggtttaccatggagaaccacaacaagtccctccctcctcgattggggagatagcctgacgtccgcacgcccagctggacagagtcccccacaacttcagagctagccaagtccagggtgctgcttcccgaaatatgtgcgctgaaagacaggggcccgtttgccgaagctgttattgctgattttgtcttcaaaaacatccatcctctgaaagatggagtttatatggattatctgtacactggggtcaatt

SEQ ID NO: 102214 - DNA, 381 bp, Zea Mays
tggtttgggtaaagccccagatttcacggaagatgatcaaggcacaatatggtttaaaaagagaatctgtgtaccggaaatcgaacaccttcgccaacttattttgagagaagctcatgattcggcttactctattcaccctggaagtacaaagatgtaccaggatttgaaggaaaagtattggtggtacggtttgaaaagagatgttgctactcatgttgcattgtgtgacgtgtgtcagcgagttaaggccgaacaccaaagaccagcaggattactacaacctctcaaggtaccggaatggaaatgggaagaaatcggtatggattttatagttggcttaccccgtactcgagatgactatgattcaacatgggtcat

SEQ ID NO: 102215 - DNA, 599 bp, Zea Mays
cacttcctcagcaacaggagcagaaggaccggcaccctgatctaagctagacacccaacgaagacgtctcttcttctttttctccccctcaggaggaaaagaggcttgatcggctccgcgagaacgttttggacgaacattgacagaattctgagcgtccaaagctttgtcagcctcagggatgggtaccaccaccaatgtttcagcaggagcggcatcagaggaatcctcagctaacatatcaagcatggcacttatctctgcatcactgggatccaaaggcacctcaaagtgaacctgccgttcatcatcaggaatttcttcaagcgaagcaaccaaagcactaacttcttcgacagagggtcgcactctaaggcccaaaccgccatcaccagcaggaggatttgacacaaaatgggtaaaggccttggaaggaggcaggttccaggccgagtatgcaacaggggcgccaacatttgacaccttgcctctgagtatcatttcgagccggctcaccaagtccacagcaggaattcttctattggttactcgggttgagtcagctaggcctcggtacagataggccgggtatgccctat

SEQ ID NO: 102216 - DNA, 719 bp, Zea Mays
gcccttcaagtttttttttcattttttgtgaacttggtctactaaacaacaattcatttttctgaaataccgttgcattcaatttggactttaaatagttggtagactgtacggcaagatgaagttttaagttaatgcccacttctggaaaatcattggagggaccactgttcaaatgattttttctgccatggtaaaaccgaatttcattaccacatcaacgaaattacaacgttcatcagttttagaattccgttgcactgtaactacttcccatctccatgtttctgatcaccaagggatcaaccagcatggaccaaaaaccaactaacaaactgatctaacagagttaaccaacaaaagaggaccaacccagctaaggcaaataaaacgatctctgttataggccaagagcctgacaagcagcacataggctggaaagggactattactgagaacaactatcctgcatgaggtatgagcagctgatcatcgtggttgcctttctttgcagcctgtttgtggaagaagaacaccattgccttcagactttctgctccttgcatcaactgcttctccatctccgatttctgcaaacgtgccaaataatcaaggaaggaacagatcatacaaataatgtccgtaggggatttgattctcttgtctctgaaacaaacaacatttgcatcaatgcttctttatgtcatgcttgccaatca

SEQ ID NO: 102217 - DNA, 1124 bp, Zea Mays
atgaattcttctaccactgatatgctttctgttgctagattaaacatcattggatcattggcgggtggctgagtctgacaagagactgactttccttggtggtctgtgagaaggactgtcttgtttgtgcaacttatgatacctttgtgcttggttaaccaatccattcctaagatcacatcaatcccttgggatggcaagacggttaagtctggcaagaacactaccccacttaaaagaattctaacttgggagcatttgagctggcataaaaggtccgaccctggggtttgggtgaccaagggaatctctagaggggtagaggggatgccatgcttttccacaaaactagtggctatagggggagtgggatgctcctgaatcaaaaaatacagtagcgagagtaaattcaacaaggaactcaccgagcactactcccagagcttgctgagcctcctgagcatcgacgtgatttactcgtgcccttccttgatactgggtcttgttctgctggctgatggaggagggcgccttgggggcgggtgctgaggtattcttggggccattcaccgagttggagtaagcaggtcctgatgccttcaactgggggcaattgttcttgaagtgactggggtctccgcagtgccaacatgcatttgcaaccgagggggcatgaaaggagctctaactctgctgactgaactgtgacggagtgggtccagttggtctaatgaagcttggtcccttaggtggaaacccaaaggatcgagttctctggtgccggtcttgctgctgagctcggaggacttggaatttcctcttgaggtgacctttttcttattcccttgccctctccacttgtatggctttgtttgagaggtgcgagaagctgaggaaatcttggctggctaggatggtcttgagttctggtctgagccccttcaaaaagcgggccatcttcttgacttcggtgctgacgtcatccggcgcgtagcaggcgaattctgtgaatttgtgcatgtattcactgaccgatcttccatcttgagttagttcccagaattcatcttccttgagctgaacgatcccttggggcacatggtgctcttggaaagcagtttcaa

SEQ ID NO: 102218 - DNA, 561 bp, Zea Mays
gaagattcaatcttcttgggcacgtcttctttttctaggaccggaacgacatccgaagattcttgttcaatactctgtctcgcttcagcagaccctgtttcaatgggcactaaaggcccagcttcaacttcagcacaaattgtagtagcttcgacagtctcctttgcaggagcaggagttgacgcccttgtcgattccaggactgcatccagcacgctggccatcctcctcttgggagttattgcaggagctttcgatgccttcggtaattccggctctggtagcgggctcaagaactttggtaaccctgtcggctcccctagctctggctctttggctacttttcctttggcttcggcagaacgcttcggcgcttcggccgactcggttgtaggaacctttgccacttcagccgattctcccttagagccggcagaagcagggtatccttgctcagcggtggaagatgttcctttagcaagcctcgacactctggtcgtttcaatgtatctaggctggtgcgtcaaaaccttaatcttcttacccttcggcgcaacagat

SEQ ID NO: 102219 - DNA, 559 bp, Zea Mays
ctggccgagcacaaactgaaggtctacccccaggcgaggcctattcgacaaaagttacgtcgttttacgcccgacaaaagagaggccattcacgctgagctggctcgcttggtcgcggctggatttattagagaggtgttacatcccgagtggttagccaatcctgttcttgtactcaaaaagaataaagtggattggcgcatgtgcgtcgactatacggatctcaacaaacactgtccaaaggatcccttcgggctccctaggatagatcaggtggtagattccaccgctggatgttctgtgctgtctttcttggactgctactctgggtatcaccagattagcctggcgaaagaagatgaggaaaaaacagcgttcatcactccattcggtgccttctgctatacctccatgtcgttcggcctcaaaaacgctggagcgacttatcagagagccattcaaacatgcttagccgatcactggggcaagcgtgtggaagcttacgtggatgatgtcgtaatcaaaacagaaaattcggaaaatttcattgaagatttac

SEQ ID NO: 102220 - DNA, 775 bp, Zea Mays
tagaacgtgccccgtgtccgtaagctataaaaagttaaagaggaaacaaaaaaaatccaaagatcgggcacagttcacagacagtttcacagaaaagctcaccagcaattcctatgttcattggtccatgcgaaaccaaacaattttgcacagcagaacagatagtgtaatggagaacaattatcataaaaattgatccatgcgagaacagagtctaatggagaacaattatcataaaatgttgatctatgcgataacagatagaaaacagaagcgatccccccaatctggcaacgtaaagggtagcacgactttttttttaaaaaaaacgagacagaacaattacgacgcgccgcgagcaaatggtttacgagttaatccagatccgtacaaaccaaacgaataatcaagcgccaaatcccttggaaagcgatggaacaagactaaacaaaccatgaagccaaaaccaaagtgaagaagacaaaactgctcctgattggaggtaaacaaccggacgagaatccccatacatgccagggggcagcagaggaatacggaaaccttacttatctacggaacgaaacatgactagtcgattaccccacccaagcccaactgcacaagcaagggcaaccgaaagagaacgcggaaccgccccgcgcgcgcggacgggagcgacccggcgctgcactgcagcgcactgcgacgaacgcacctcgcatccgagcgctgagccgacgagcctccgcgcgtagtcgacgacctccgcgcggcg

SEQ ID NO: 102221 - DNA, 1039 bp, Zea Mays
ccccaaaccatgagaagccagttgatggctcgatgaaggaatatcaactgaggcaatctgaagagcatcatcagggatcaactcaacatcaccagcaggaatcagaactctagcatcaggtgcatcggtctctaaggtgacttcctgatttgaagcacgtgctgctgtcatacaatcagaatgtggagaagacccgacgtggaaatccatggaggtatgagaaggggagcccgctcggacaccctcgggggctgggttgcagcccgcactgcccattggagctagatcaccaccggcagcaccctcaggggctgggttgtagctcgcgctgcccacccgagccagatcattaccggcaacaccctcgggggctgggtaaccgcttgcaccatctctgaggactgggttctttgtagcagccacctctaaggctgaatgattctcatccacctccatgggaatggaacaacctggaccagcctcttgactccaaagaccacactccaaggtcgacgatgcacgagacgctgctcgggataactctaatcccacatttggattgtaagagcaaacgtccatcataccaccatctgttggctcggacagtagatcttcaggtaccacatcctcgagagcctgatcaaagttagctatggacaattcctgcagaccaatgagagcagacaaagctggagaaggaatatcgctactctccccactgactatgtaacgccgactgttcttccgaattaaggggatttcctcctcttcttcctcatcctcgtcaacaatacgaacaacacacccattggggtcagctctggccggatcacacccattgggatcagcatcatcaaggtcacacccattggggttagcttcagcagggtcacacccattgggatcagcatcatcaaggtcacacccattggggtcagccccagtaaaaagttccacgggtacttcttcagcagcaggaacagaagggccagcatcctgattcaagcacgacactcgccgaagcctcctctttttcttc

SEQ ID NO: 102222 - DNA, 307 bp, Zea Mays
acaaattaaatattaacctcacgatattgatcctcagtcaaatatatctttgaggacccttcctttttactcaaggggcctgcttcttctggatgcttttgaaaatacaggtttgtagcctgaatttaatatccttcatccacttcatcacttctttccgttgcttagatttcagacaatagtcagcttttggtttgcctccgttttctctaagcactagggttggacgatcacatatcactgctaagtccatgtgtgccttgtcattgtctttcgttttatcagggaaatccatgcatgtatttat

SEQ ID NO: 102223 - DNA, 712 bp, Zea Mays
ccaggctggaggacattgatgtatttgaagaagaacgactgaatgcggtaatccaatcagcacggtaccagcagactctaagacgctatcacgacaaggctgtgcgacagcgatccttctcagtaggagatctcgtcctccgccgaattctaacgggggagggacggcacaagttatcgcccttatgggaaggacccttcatagtagcagaagtcactcggcccggatcatatcgcctcactcagatggatggcacagaagtcgggaactcctggaacatagaacacctcaggaagttttatccctagctgtatctcaaaaggctatcgggacgatgatgtattctgtaaagtggaaatatgtcatcaataaaaaaggggtttcaaagatactcaatttgttcacgactgacttgcattcttacttaactcggggtgaccactatgccctgctaacggagcaatcgacttaagtcggcaacgacttaaggcggtgcgacatgctcacgcttacttaactcggggtgaccactatgccctgctaacggagcaatcgacttaagtcgacaacgacttaaggcggtgcgacatgctcacgcttacttaactcggggtgaccactatgccctgctaacggagcaatcggcttaagtcggaaacgacttaaggcggtgcgacatgctcacgcttacttaactcggggtgacctctat

SEQ ID NO: 102224 - DNA, 538 bp, Zea Mays
ctactcaattggctagggcatctgctaacttagagtccaacaaggaaacaactcagaagcaaccaactgatcagatgttgcctccaaaaatgataaaacctcttggatgggatcgtaccaagaaacaaagaagcaatgctagttcatcatcatatacacaatgcctagaggttctccataaaatgtatttggaccatcgtgcttatgaatagaaggaggagctagttgaaagagctagaagcgataggcaacttgaaattttagagaggaaagaggtaaccgaagcaactagaagtgaaaggcagctacaactacttgagaaacagactgagcttcaatagaaatagactgagctccaagaaatgatgaggatgaatcagcaggaggacagggaggaaagatttatgagtgtcgattttgacaagatgcttccatgagttagggactactacatcgggaaacaaaagcagattagttctcagtccgctaaaagatcgactccatgatacaaaagttcaagtagttgtcgttttcgatg

SEQ ID NO: 102225 - DNA, 339 bp, Zea Mays
gctattgaaacaaaccatggaaggaaaacatgcacgcctcttcaactataatatagacataaaatccacttgaaaccaccctatttattgttaaaaataaggttgcacacaataagaaaacatatcaggtaaacatgtttggacttatctatccacgtcatcttacaaattcacttgagttctaccagtcttaagatttcatagacagtacaacattgcctttgctctatagagacaaaccaattgtatactaagatcaagttagcaagtagccacactagccaaaaaggggtgaggcacaaagcattgcatccatggaaatattacattgataagttg

SEQ ID NO: 102226 - DNA, 323 bp, Zea Mays
gggactttagcgacacccatggacatcaatgcaccgatcttcttcttaggggcagtattggatccattaaggtatcatagacgtttagagcttcataaatatggaaggagctaagaacgtcataggatgaaataagatttagtgagttgaactgtgacgacttggtatatggggattggcaccatggtggtagaaatagtggtgtccgacgtttaagcaggaataagaggaggaataaggatgtgtggtgggaaattaaaataatttccttagctatggtaccatgttaatgttgtgccagacaaggccttcttaggactata

SEQ ID NO: 102227 - DNA, 331 bp, Zea Mays
aaatgtagctggtttgtaactctacaactttgctgcagagatttgggtgagttgccatgaaaactttagagaaaatccaccctaaactttggctgtcaggagcactgaagaacattgccatggtacagtgcccgggaggataagcttcagaccctcgccgccgacgaccaatccgcgccgtgatttgcgctagggtcgggatgggcgcgtgacgtgcatctcctcgcaaagatcttcttgatccgggtaagatcgccgcgatggagcgtgatgattccggccgccacgcggccactaatcactccggccatatccggtcatcagcgccatt

SEQ ID NO: 102228 - DNA, 799 bp, Zea Mays
gtctgatgtcctggccaccggagctgacattgtgctgagcgttttcgcaggatcacgggggtctgtgatcgactatggtggttgggatctcctcgttggtgtggtgctgacgtgacggacccgctcgaccgtggccaggcatcccctcgacctatcgaccggtaatactcctatccccgggtcctcctaatctaggtcattgagttcatcagattcaggtttggtgtgtggtatttggcgcttgtaattgctcacttgagaaatttccccaccgtgggagcaccatgccgtgggccggctttatcccattgcctaaaccaattagtaagggttcatcggattcgccacattggtcgctctatcaccgcaagaatgcattggatttggggtcggggcatggcttgcctgcgaggagccgctgccctgtgcgcttgctcctccatggttgcggctgagggaagaagacgtgatgtccatttgatcataaagtgatggttaggattagatgacagatgtccatttggtgggactgattctagaccgttggatcgggtgttgatggataggattagattgagcataccttttcatcacattagaacctggatcattgatccttgatctgtgggctgagatttcaaatctcttcatagtctaatatggaccgcaaggaatggatcggacggttctggtgggtcgataccctttcggcccggctctattgcaaatgagtccctaaacttattacaaaataacccgccatccgtgtggttgtagtatgagtcttgagaatgtttcg

SEQ ID NO: 102229 - DNA, 305 bp, Zea Mays
tgagaagtataaatgtttccgccaaaatggaaagggtatattatggtttgaaagcagattggtggttcctaaaaacaaggatctcaagaagaaaatcttggatgaagcccatctctccaaattctctgtgcatccgggaagcaccaaaatgtaccatgatctgaagcctttgtattggtggaccagaatgaagagggagatagcccagtatgtatcagaatgtgacacctgtcagaggataaaggccagccacttgaaatcagctggagctttgcaacccctgtccatatcttcgtggaaatggg

SEQ ID NO: 102230 - DNA, 678 bp, Zea Mays
cgtgatgaactaactgatttggcttgtgcgcaagagcgagcacgcaggttcaacatctggaggatagcaatgggatgggattaataactacacgcagctttcgcattgaataaagttggtgttacaacacttcagaacagtagaagctgcaacctttttttttcctttctttcttgggacggtggacctgcaggatattttgaaggcgctaatgatgatgaagaggtcgtgatcaaggcaataaaacgacgccatttttccgtgcctgatggggaaaaaaatgacagtgtttgtgtctgttccagcagatctacaggccgttgccgctctagtgcggcggttggatgtgctgttttttcttctcccacgtacgtggtgcccagcaattgtcggatggtacggaagacccgagtggctccaaaagacagcgtagccggattaaagctgtatctcgctgattatggtctctctcatcttgggccttttactcataacctcactaaccctcttacttttggcgtcgtcagggcctgcgggctctgctgcaggttcacctgccacacatggagcctggtttacaagaggcaaagagtaagaggtggtttctgactttgtattttgcctgggcacgggcatcttcattcgtcgtcaactcgccattatcgtcgtcatcatggc

SEQ ID NO: 102231 - DNA, 637 bp, Zea Mays
gtttcaacacgtataccaccattgggatcaactacagtaaagacctctgctggtacttcttcgcaaataggagcagaagggccagcatcctggtccaagcatgacagtcgccgaaaccgtctctttttcttctcctcctcaacaggcgcagttgggcggctgacctagcaaggacgctttgggcgaataccctcaggcttttgggtgtccattgttttgtcaagctctagtataaccgtaacagccattgtttcagcaggggctgagtcagaagattctccagccaacatattgagtacaacatctattcctgcatcatctagactcgctggcatctcaaaatgaacttgcctctcatcattgggaagatcacaaagagaagtaaccagggcctcaatatcttcaagagagggtcgcactctaagacctagaccactatcaccagcaggaggattggacacgaaattgaaaaaggacttaggaggtggcagattccaagcagagtaggcaacaggagcaccaacatttgatactttgcctctcaagatcatgtctagtcggatcactagatcctcagcaggaattctcctattagtaacccgagtcgagtcagtaacaccactatacaagtaagctg

SEQ ID NO: 102232 - DNA, 629 bp, Zea Mays
gttctcctcaatagggggcatttggaggggagcaagagtgggactgtgttctttttgggatatatcagggatttggtagcatttgaagacatgaaattcttggcccattcaaaggtgtcaggctgcaaaaggcgctccataagaaagcactccactctctaggaaccaataccatctactcctttttagcacctcagagaaggttggcccaaagggcattcctttttttggccatgtaatcttcgagagctgtgtcggcctcattggtatcgtagacatgcacgtatccaacgtgaatctattccagaatagcatcctccccttgattttcaccaacattctcaggagcctagattggaagggcaagaactacatggatctcctcatctagggccagttgcagggggtgctcggtccccatcactttgtctaggaacatggggttgtgtgagtggattggaacaagagcatgaagaccatagttgtctgccgagcttccagtagtattgagatcttcaaggcccaagaccgggaaactgaattgctcttctggttccacctctggttcaactatttattcagccacatcttgttggagacattctggcgcattcactagatgccattca

SEQ ID NO: 102233 - DNA, 343 bp, Zea Mays
gagtggtccgactaagttagagtacaacatagcaatcacatgacgcaaccaagttcgtgcgacacaaataatgcgtcgtgatttcagggtgcagccaatatttagccaatgctataacttagccgattaataatatagtttgatcagcatgaccgggtaccctctatacaatttaatcatttggcatgagtctaaagacttaatgcaacataaatatatagagtgatttgagtatgtacatacatacaatatagccttcacatgcattctaatatttctgctatatatttaccacgaagaatagagcagaaagataatactgaaattaatagatgagcataag

SEQ ID NO: 102234 - DNA, 677 bp, Zea Mays
ccacacaacattgacgtgatgcacaccgaaaagaatgtcgccgaggcactttgggaaacaattatggacattcctgataagtcaaaggataacgtaaaggcaagagtggatctagcagcgttatgtgatagaccaaaccaagagatggagtcgcctagtggtggaaagtcttggagaaggcctaaggccgattttgtcctcagcagggcccaaaggaaggaagtactatagtggatcaagatgttgatgttccctgatgactatgcagctaacttgagtagggggtgaacttatctactctgcgagtcttagggatgaagagtcatgacttccacatatggattgaacggattcttccagtgatggttcgaggttgtccctgagcatgtctggctagcgcttacaaagttgagctagttcttccaccagctttgtgcaaaagagttatctcggaccgtgattgcagacttggaaagattgacacccgtgttactatgtaagcttgagaagatatttccacccggcttcttcaatacaatgcagcattttattcttcatctctcgtatgaggcacgaatgggggggcccgtgcaaggacgttggtgctatccaatcaagagatgtctaaagactattcgaaagaaatgtgtaaataaatgcaaaattgagctttccat

SEQ ID NO: 102235 - DNA, 272 bp, Zea Mays
gtgtgtcttggtatgtttagaacataatctgggtacccctaattatggtgtccgacagaactgtatcttggagggaaaccgtgctaaaaatattccttcaccaaaatatgtttcttatgctttttgcacttaccccgttgagctggtcaattgaaaccgtaaacatgggtattatgcaagttgtgtttccacgggggtctggtatggagtgctatcgccatcagcttactatacaccgagtaattaaagcaacgttaacacatgtattggcg

SEQ ID NO: 102236 - DNA, 611 bp, Zea Mays
ggccagcatgtcctcataagctagacctccctccaaggtcgacgaagcgtgagaaactgtctgggttacctcttgccgacaagatcacctgacaaagggacatcatccgggacctctgaacggacgatagaactttcaacctcaggaggctctgataaaaggttttcagggataatttcttctaatgcatggtcaatggcaaacattgtcaacccctggaggctaacaagtcctgataaagcctgcatcgggatatcactgctcctactgttgcggctgttcttgcgaatcaagggaatttcttcttcttcctcctcttagtcctcatcaagcacacaaccgccaactctagcatcatcacaacctctaatatcatccttgagggtggtactcgccagaccaccgccaaggaatgatgtcgagggatcacatcttgttctaagcatgataaccgccgaagtcttttcttttttttcctatcctcatcaggcgtagttggatagctcgtccggcgtgatcgcttgtgatgaacaccttcaggattctaaactcctttgtcctcaccaaggtcctacctaatcgcaatagccatcgactcagtacgggcagag

SEQ ID NO: 102237 - DNA, 337 bp, Zea Mays
gttttgacctttcagtcttatctttgtcaaccttcatttcaactggctcaatcgaaggtgccttcggcattatagccgactcttcagtcctctgcacgggaggaacagtttctcttgatttagcagctgaagaggcctccccgccaaactcaggcaccacagccggttcaatgtaacgcggccggtgggtaagtaccttcatctttttgcccgcagccttcgacacaggctcagctgggtggccaaagcagtagcttttctcttcttcccctgtccccgcagcgggtagcggtagttggggtagacgaagccgatggcgtcaaaaactctattcatt

SEQ ID NO: 102238 - DNA, 437 bp, Zea Mays
gcttggtggcaggaaccgtgggagcgtccatcgggtccaccaagacttgtgtgtcggtcgagccccttcgcttaggtcagtgggttgaatgacaagtcaagcaagccttagctttaaggtctactcaagcacttgtgtctgagtcgaagtgagtgtagagagctcgtccattattgagtttcctttttgggggatatacattaagtgtggtgtcaaacaagagatccaactagttgaagtgaatagtgagtggttttttatttaaggattgtatatagctacactaaactatggagtcatttgtttattgctaaaagtgtaaggggctgatagcgttaagcagtcagacatatataggtccttaatgcgagcttcaagattttcaccaagctgctagtcgataggctacttcaattgtagacaagattatcaacaag

SEQ ID NO: 102239 - DNA, 471 bp, Zea Mays
tgcctggattcctgcgctttctcaaggagggtaaggacggtctgaatgattgctagttgcacattaaaattgcctactgtctttcatctccagatcaatagtgctttagccgtgcgggtcatcttcacatgcagccgaagaatggcatcggaagaacgaacactagatgtccatgcttgctgaaccatctcattgaatccatcaatttttgtccaaaaagcttcaaatctaaaccccttatagaaactaaaggcagccataccttgcataactaaggggcaatgatccgaggtcatggacccaatggcctgcagatcagcctgggggaagaaatcatgtcattctgtagtcgctaagaacctgtcaatcctagacatcgtaggggcgtcctgttcgtttgaccatgtgtataatttaccgttgaggtcaagctctaaaagctgaaggtaatcaattgtgtggttgaactgt

SEQ ID NO: 102240 - DNA, 304 bp, Zea Mays
atttccctttcatgcacgacgaccgaagaagagatctctgtacgccattgcacttactgctccatgtagtatatatttaataccagattgcctggatccacttgtcagggcttagctaccttgtacatgcccctaggactatcaaagggagggcacacatgctacaagggacaagttcaactacacccttagcgatacaactcacagtggacatagcgtatgtgaataatctaggcccctaagtggtgttttggtaattaatgacaactgattgtggactaacaattcttggagaaataagaat

SEQ ID NO: 102241 - DNA, 654 bp, Zea Mays
gtatttttagcattttcagtaattttctagaaattatttagtcctggcagaaaaagaaaagaagaaagactctacagtattgggctcatttcaatccgagacggcccagcaaagacagaactcgcctgcgcgtgcgcccgtggaggacagtttgcacagagacccctggcgttttaaacaactagcaaaggggtcgcgacactatttatatgtttcactgacgtttacaggaaaccccttctacttcaatttcttcgcagtgtcaagtccacgatgtcgcacggcggataaccgagctccggcgaacctataacgtccgaataactcaaccaccagtgttcccgtgcgattgacaccgaattcgacttctactgaccctttcccctccatcaattgcagagttctatccctaaatcgctctgtccacggtgaccgtgcgatcaacggacaatccaatgcgttcccggtgatcctctgggtcctagtttaattggccgggtcagagagtactaggagcctatcagagcactgaaacaagtgaatagagggcatgaacggacctgagatgagccagccacggcgaggtgttcacgcggcggtggtttggccgatttgggggaaatgggaaattgggcggctctagtgaacaattgg

SEQ ID NO: 102242 - DNA, 431 bp, Zea Mays
aatttttgagggctcctatagcagcgtagagggcaagctccacctaccacatcctaggaatctggtcagcaacgtgtgcatgcctcgctcacacccgggtcatcctgtatgggcatggcatgcgtctttagttcctcagacactctggttggacctcagactaatgtcaatagaagtttccattacagtagggagggacaggtaccagacctaactcctccaaacacatataactccaccacccttggcctataaaagagagagggaggccccatatgcagtgatcctttttagaacatccttttctatacttgtacactcacaagctctcctgctcacaagatccatgtactcaagacataactattttccaagaattactcaatccactcaaaggggacataggtattatgcctcccagtggcctgaac

SEQ ID NO: 102243 - DNA, 298 bp, Zea Mays
gaaaaaggaaggtcactgcttcgacatctattggtgcaacgaaaacaaagaaaatgaaggtcttgacacgtaggccgaggcgcatcgaaacaaccgatgtgccgaagctaacttaaagagcggaaacgacctccctagccacaaaggctgcttctgctatgcctattgaagctattgcagactcggccagagagcaggaattagaaaaggtagcagagaagatgccagaacaacctaagatgatgatgacagtactgccaaagctgtcagctacaacaggaactccaaggaagaggag

SEQ ID NO: 102244 - DNA, 337 bp, Zea Mays
agtcgcttcttgtagcctttgagcaagtctccggtttgaaaattaattaccataaaactgagctattctgtttcggtaaggcagtagagcaggaacatcaatatcaacagattttttgttgtaagaaaggggggtacccgtttaattacctaggtatcccgatgcactacaagaggttaagaattactgattggaaaatgatagaggaaaagtttgaaaagaaactcagtggttggaaaggaaagatgatgtctgtagggggtcgtcttgttctaattaattcggtacttaccagtttggctatgtttatgttgtctttctttgaggttcctaaggg

SEQ ID NO: 102245 - DNA, 816 bp, Zea Mays
ctaatcgcaattcagcgcacaacacacgtcacaaccatagtgtacactatacacaggatatttacccatcacaaatatgaccatcgcagttcttttatgaaggggggagggcagcattttcgctcatcgtcgctaaagaacggtgatggcaacactcaatattacatcggctcctcctttgggataagaccagcctcccggaaattaaacaacatcaacctcaactattccccctcaaaaaggtcacataggtccccttccacgatactcgacccatacgtcgaatctagtagctcacggcgggcaacctaatccagtcgcggcccgcttcgaagacaaaacctctccatgcccattcggcgatgtcttcttacacctcgtgaagactctttgatgctttgtttcgacacacccatctttttttgcctttgcaagtctcctgggcgtgcaccgatcgaagtcaccggcacctcgcggggagcggaccgcaacggagactccgctgcagctaaaagcaacgccgcaaaatagtctaaatcgtcctccgaggattcatccatccacgaaaaagggctccccaatcccccaccctccgaagaccacgacccaaaatctgattccccgatacattaccactaagagacatcgcattcgcatccaccaaaacattattactcataacatcatcagggtttgcttgcgcaagcctgaacgtcgaaacctgcgcagcaaccgatcttaagtatgatacaacaaccaagactatcaatctatcccctattagatactctcaacctgcgccgaagcatctcccac

SEQ ID NO: 102246 - DNA, 555 bp, Zea Mays
cacagacctgtagtcctgctcacgtcccactgccctgcctagcacaatacttctccggctatggtctggaggctcgcaacattggcaccatgaccatcttcaaggagctaatcaaatcaatcccacagcaagctcaataaaaatctgttaggatgtaacagtgacaccaagaatcaggaacgtagaggggagtgaggacgcacctgcagacctgcttcggagttccctgatctgggtggcttgaattcgtcgttgatgtgtaattctaggacaggaaaggctggacaacagaggggatctaacctctgaagctctgcgcgttctgaagtgccaaagatgtcatcttagagaggggaacaaagtaagcgtggccaggacagatcacatatgcgcgggcgttgcttaccatggcagcttgtaagtcagggaagtgagtccagcgacgatctgaatccgatggaggcgcccaagctgatgtatgacagcggctcgaaaagagtcccgcacacaactatgaggtcctgactcctcactcctgtagaggtgaagtttgtc

SEQ ID NO: 102247 - DNA, 306 bp, Zea Mays
gttgataggcaacctctcccactcgcttcaggatcaagaagggtccaataaagcgaggggacaacttccctttgactttaaatctcctcataccctggatcggtgacaccttcaaatatacgtgatcaccctccttaaactctagaagtcttctccgggtatcaacatagcttttctgccttgactgcgcagttcccaaattctccataatatgccagacttgttcctctgcctcttgtataatttctggcccaaagaactgtctttcacctgtttgataccaatacagtggagtcctgcattttc

SEQ ID NO: 102248 - DNA, 760 bp, Zea Mays
ttgggcccttcaagaaagctcaagggggatatacacacatactggttgtcattgataaattcacaaagtgggtagaatacaaacccatcacctctttgtcctcagcaaaggcagtggaattcattcaagaaataatgttcaggtttggaatacctaacaacatcattacagacctgggatctaacttcactagctcagagttctttgacttctgtgagaagaggagcatccagatcaagtatgcatcagtggcacacccaagagctaatgggcaggtggaaagagccaacgggatgatacttgatgcactcagaaaaaaggtgtttgacaaaagcgataagctcgcaggaaaatggatcagggaactaccatatgttgtctggagcctgcggacccagctgagccgagctttacatggaaacaccccattcttcatggtatatgggtcggagacagtgttgccagcggatctgatctttggagcacccatattaacattcaaaaacatagctgaagcagaagcaaccagactagaggacatcgagatactagaggaagaacggttgaatgtggtcattcagtcggccagataccagcagaccctgaggcgctaccacgacaaaagcagtacgtcatcgatccttcacagtgggagatttggtcctccgtcgagtactgacgggagagggatggcacaaaactttcaccaccatgggaaggaccattcatcgttgcagaggttacccggccaggatcctac

SEQ ID NO: 102249 - DNA, 550 bp, Zea Mays
aagcaatcccacacgctagatcatgatcccacggctccgaggtcgtcacccatctccagcacaaccacggcggcgcacaactgaaccccggcagtggtccccgtcggagaccccagtccggtcaactggcaccaggctccccccggtctacaattagcccacaagagatgaccgcaaccatacctagggtttactacccccgtggcggcgtggaggcataggttctcgacatggtggagttccgcggtggaggaacgattccggccagccgttaacggcacagtgacacattaagcaactatcggtggggtgctacacacataatggagtgcaaggactcaatcacatggtaactcaccgagatgtatgtagcccagtgtcctgcccatggcgcgacgcaggtccgcggcatccggtgaccaatcgccattgattggtgtccatttccatcgagccggtggctgccgcatcatcagtacgacccggtgatcgcccgtagctagaggtaggcgcgacgaacgtcgagtggaggagatgaccgcggtgccct

SEQ ID NO: 102250 - DNA, 798 bp, Zea Mays
gcaattcgtgggctcaggtgagtaattggaggcacgagcgggtgggttggatgctggaatacttagagtcgagggggtgcttaatttataggactcttgatcggtggctcgtgaatttgaaggagacgcgtggcagccggagagggggaagagtactggcgcaagcgattggtggcatttaccgtggcgggctcaccggcgatgaccggacgtgctagagcgagtcactacgacgaagtatagcatctaggcacgtgtcatccgagcggcaaacggctaactccggttaacttatccacaacggttgtgacccaggtgggtacggcggccggagttcatccacgacgcgatatttccttacccctctgcattatctaactgcgccgatcacaaatcaccgcggcggacgtgaatccaggcgcatggtcgtcggcggtgagttctctgcgctggcgttctgatccggtcattgtaccattgaaacccgatttagagcgcctggcagaccgacttgcaatgcctagatctcgaatttttgtgcaacaacttgccaatacatctgtagcaaacttgtagcccttcataccagctacaattctgctatagcaactaccctcaatcgagcaatagatcttactgaaaatcaagccctaagttcatccaacttcactattactaaaagttcagacctaaggctgactgacagcacaactttgggcttatttttctccaaactttgtatgtaaacaaagcttagttacttaagcaaagttgttctcttattatagctctagactt

SEQ ID NO: 102251 - DNA, 290 bp, Zea Mays
gctgatcttccaaaaatggtgaagctgggctatcttagtgaggcaaaaaaggagctggttcgtttcggcggagaggaaactattccgaagccagaaaagaatgaggttgtggtgttcaaaagcttctttaaagctggcctaagattcccctgaatgagatgattgctattgtgttgaagaagtttggggtttaccttcatcagctgacccctaacgctattgttagattaagtgtttatatttgggcccttcgtagccagggagtggaaccgttcggtgaaggtttctgc

SEQ ID NO: 102252 - DNA, 1315 bp, Zea Mays
aaaacatgttagaaagagggctcagatgtttttaagtttcggtaataatgtatttgatgtgtggtttgttgtgaggataaatttttaaaatgcggattatgtgttgggaaatacatcgataggtgtctatgtgaaaagtgtattgttttatgcatgtgatcgatgattgggatagtcgaggcgaatgaggagtatgattaatcctgttagagtcactatgttgttgatgccttgtgcgtaacatggggacacgtatgtgcgtttgtgctgtggtgtattatagtggtggtggcgtaagatatttgattgaggtgtgcgggtatatgccgtaatatggttatactcgcaacgaggaaagatgtatgcattgtgtaacacgacacttaggtcactattatataatcgtgttaaggatgctcatgatggtcgtgtgattgaggagtgatgtagtggcaagcgagaagtaagtttagtttttcaaacggttagtggatagtatctatcggcttcatcatgatttttgttgtatggcggatcgatgccttgtcgtcgtaatctcgggaaattttcgaaaatgtgctggtgctttactgacggggttgtatgtacttgtgatgtattacaatagctgtgtgtcgtgcaagtatccacaaatggtgaaaggtggtgtatgttggtaattagaaaatggtcacttcgttagccaatagccaagcttatgccgtgatttaaaatatgggcaagttaaattgaaatctaggcgtgtggttaaataataataattttggcttgtgtagtgaggtggtgacatgtcgaagtagtcatcgctccctctatgtttttaagtcgagtcaaaatgcggggtactagtagtacgctaggcaggcggtgttccaaatagataaatcgggtgatgtggtagttgtcaagcatgatagaagttgagtcacttaggttataaattgatgctcgacatgtgaggtctcctaaaatatggtgttttaagtgacttgtgcgttgtccaatttaagttaagaaaatgcttaagaaaaactaattaacctgctcccacctatgtttttgagttgcgaagtctaaaatactttgctaagttttatactggttaaccaacttgttagatgactttagttaagctcgtggtcacgatgatttgcttgttgtagtctaaatacgtatggttatggtcgcggatgaaaagtattagtgctcatgtgaggtctaagttaaaatgcaaattattgtgtgaacaacacttctatatcgattatcggggagaatgtgttgttaattaaat

SEQ ID NO: 102253 - DNA, 336 bp, Zea Mays
gtttcatccacaacgaagcttgtggacaaaataaaggtaacaagagtaagttgttcccatacatttacaaagtttctaacattacaattcctgtaatagcaaaatacaggtgcaagtattctaggctcttcagggcaacatcttaagcttcggctccgtcttcatcgcatcatcatcctacaaaaaggtgtaagtacgtcagtacgaacaggggaaatgaccactaaacatcattgaaaggagtgttttagacatacttcatccaaaagtgctcttgcttcatctccagtgatctccctaccaccctttgcctagatccacttaataaatctattt

SEQ ID NO: 102254 - DNA, 444 bp, Zea Mays
atgataaccagagttcaaatcaattttagagaacacctgggcaccctcaactgttcaaagagaacctcaatacgaggtagcagatatttattcttgattgtcacttgatttaaagcacgataatccacacaaaacctcttgcttttatccttcttctcaacaaacaatactggggaagcccatggtgacctgctaggcctaatgaaacccttagccagcaaatcatccaattgtcgcttcaattccacctgctcttttggagccatccgatacggggccttatgaataggctgcgtacccgaaatcagtttgatttcaaaagccacaccgtgctctggtggaatgcctggaagctccacgagaaacacgtcggcataatcacacaccacacggatgtactgcacccgcaaggcagtcccactctccaccaccatggagaagaaa

SEQ ID NO: 102255 - DNA, 780 bp, Zea Mays
acaggcaagtgatgaccaaacaaagaaatgtcaaccgaaccaaatcaaaggttaggaaagcccaaaaattcgaaacacatccatcgcaaactccccgagccgatccttggccaagattgcatgcatcccctccttcatgagctcctcgagctgatcatcgtgaactcttcgagccgatccttggccattttagacatttttgtcttcaaatatatttcaatataaaaataaaaatatattttatgattgtgtcagtaatacttattcggtatatgttattatagtttacagattttatttctctacaaacgagaaataaactattcggagacagagagtaaggtaacgtaacaaaagtgaagaaaaaaagagggagctctcacagccgtccattccaaccatagacgcgtcgacgaccggcagtccgcggggatagggcacagcaggtgatatcacagaggtttcatgtgtgcccccgtcatgcgtatctgctccaactgtaaatggatcctgccctctgtaatatttgatgagtgaccctaacagagcacaacaggtaaaaccctaaaccctagtggagtgcccgtacgttgcgacgacacatagtaatatttgatgagtgaccctaacaatctattatcatgtcatggctactatacacaatattcacattgtaaatggaattacaagcatgaatataaaaagtaacataggagcaattcagatatccttagtcactataacttgtttttctacaagatggtcggagtaaacttattt

SEQ ID NO: 102256 - DNA, 293 bp, Zea Mays
gttgtttaaggtgtaacgccacgcgcgtattcacgcgacgttccactttggactcagtttagtcgacgtatgtcgtcgtgcgtttcgtcgcgcgatgcttaacgtctcttcatagttaatgcgaagtgtctcgttgagtgctcggtcgcgcgatgagtcgttaacttcttaatttgttttagagtgctatgtcgcgcgtctcgccgcgcgacaatccttttttatttatcttcacctgcttataatgattagacatgaaacatgactttactttacgctaaacatagtgtcta

SEQ ID NO: 102257 - DNA, 435 bp, Zea Mays
accagctcgatgacaacgacttcgagatcctgatcaaaggtggagtgatgcgggtgcgcgatggacagggaggtctccttgcaaagatcgatatgggcccgagtcggctgtacgtgctcgacctcaccatgcccccactggtctgcctagcggcatacacaggggaggatgcgtggcggtggcacgctaattcggccacatgaacttcaccgcgtcgaggaagatgaagaaggaaggcctagtgcgggggttacctgcgctatcgcaagtggagcaactgtgtgaagcctgtctcgccggcaagcatcatcgggcatctttaccggcaatcttctctagcattcaactgaaccattggagctgctccacggtgacctgtgcggtccaatcaccccaaccacaccgagcgacaatcgatattttctcttgctcgtt

SEQ ID NO: 102258 - DNA, 920 bp, Zea Mays
agttcgctcaatttataacgggcttaagcggtggctggggatttggacgaagatgcgcggcggccggagaaaataggagttactagtgcgcgtgattggtgtcctattaccgtggcaagctccctggcgatgaatggagggttaatgcgagtcacagtgatgcagtggatgtgccaaggcacgtggcgcaaggctgtgaggcggctgtcaccggcgaactcatccgaatccaccgtggctagctcgggtacggtggtcggagaaatttagtggtcggagcatatccacggcgggatatttactgaccccaagcgctatccaaccgatcctagcgtgaatcgccaacggcgagcacgaatccgagcacacagctcgtcaacagtgatgtgatctgaacttgatcctatccggttcactgtaccatggaacatctgacagagcgcctgacaaacgatgttttgggtagattttctcccaattttccatggcaacataaccaatgctctgcagcaaagttgtagcccttcataccagttacaattatgctatagcaacaaccatcaatcgagcaacagatctagctcaaaatggctctcaaacctagtgctagaccactgtcagtctgatttcagggttatgctcgactgacagaccatcttcaggtctgtttttctcttacttttatgtagcactagggcttacttacttaataaaaattgttctccttacatagctctataggtttgatgtgttgacccagggcaaaatccttatggtttggaagttacaaggccccaaatttgagctagttacactggatttcagacttagccaatagagttcaaataggactttttgcaaataagcccaattatcaaggtttaacttgaaaatccacatacttgtgaaccatagttaag

SEQ ID NO: 102259 - DNA, 578 bp, Zea Mays
aatatttttaatcattgtatctactggtcaagcaccttcatgaattttctcaagcctagtccacaatgacccaggttgaatcatgatgtcgagaggtgttgggcagacccacaatgaaatccatgctgatgttatcccatttccatgaaggtatagacatgggttgcaaggcaccagctgactttaggtgacttgcctttatcctctgacatgtatcacattccgacacatatttggctatctctcttttcatccttgtccaccaatacagggatttcagatcatagtacatcttggtgcttcctaggtgcatggagaattgggacaggtgagcctcatccaaaaatttcttcttgaggtccttatttttaggaaccaccaatcggtcttcaaaccatagtatccccttgctgtcttggcggaaacacttatacttctccactttctggttaatattctctttgatgatttgcactcccttgtcaccgagttgggccatatggtctaacaaggttggttcgacggagatgtaagtcaaggtaccagaaggaattacttcaatcctcatcttactcaac

SEQ ID NO: 102260 - DNA, 556 bp, Zea Mays
agttgactcaagttcgactgtgctcctaacttagaacctcgtagttcgaattaaaatttaataatgtgagttgttccattatagaattattgctgcttttgttcatgccgaagatacaatttttgctcctgtacaattctacgctcgtggctaggattataaaaatcaaggtctttctaaacgtgacgttatattttagttattaaattaggaaccaatctagtagggaagtaatcagatagaatatggataatactagtttgggtcgaataagaattaattagaagccgccacattagagatctcgcttgagagtacagattcagataaaaaatttggatatatggattgaacatcgagaaattagattcggacacggctcgactagcaactgtcgagcgcttggttaaatgagctttagacgagaattaaaaatcgagattgattttcgagtttgcatttgcgtcgagaataaaagttttaacaggctccaaatttggcctctctttctcgagatcgaattacatcatagatcggtgaaaccttcacaaataac

SEQ ID NO: 102261 - DNA, 937 bp, Zea Mays
tttgggtttgatattccccttactgaactctttccttccatcgagcaagtcaaccacttacaatttttccgttccctatactttttcaatgggaagccaacttcatatgcatacctactataaaattgatatgcttcatccacaccactgaatgtcataccaactttaggtaccaacctcggatcaattgtaacttcctgtgcaaataaataaaatatatatttatgtacatatatccataacatgtatgttgtatggtgtcctacataattttccatcgtatgcacaatataacatttcataccatctagttgcattccatcgtatacaatttaatctacaatactgaaaatccaaatcagttatatagtacttacatgtctctgcagaatcactggtgtgtcctgttcatgctcaccaatagtacgcatagtagtaatttgttgtcctccttgatttatggtcatcctcgacgcatctgatgtgttctgatcatcaaccctctgcgccctcaatgctgctggtggagtaattgcccctacggcagtcgctgtttgcatatgtgcacttgcatccgaggcaaattggttccctcctagttgatcttcctgcaccattgttacgatatccaagcatggatttgatcaatgaactgatgtcggcgttgtatactctctgattggctctttaccccatggcgccgccatcttccagctctggttacgcccttcagccagacacaccctaacaaatgattcttactgtctaacttttctggaagcttgggattctttccttttgcccatgcacatctccattatcgtggacgcgataatcacggcgagtttgcatgtgtatctgctacattataggatcgtgggcgcgctgatcgtgggcgtaacagccatttatgcaagttcgacgtaggtattatgct

SEQ ID NO: 102262 - DNA, 610 bp, Zea Mays
caagatcgtttgaaagtgacttaaaatatgcgcccggatgcgcgaagaagtgaaggagaaattcttatcacacttcaccgtggatcgacactagaagattatcaagtaagggaagatcaagcttgactcccttgtaccttcgctccatgatagcaatgtaagtaattccaatgataaccaatcaattaagtattttgtggaattacaacgggctcaattagaacaacgcatggggaaaatagaagaagcactcaaaaaactcacacatgcattcaaaaatctactattcctagttttccatgatgtgatgtcgcaatagaggagacctcgctagatgcatcagcaacatatgggctcacacaatccccaaccattatatggtaataccgatgtaatcattcctagggcagctgctacccttgcaacacctaattgatgcagaagtgcctctaaccatggccggacagtccgagtataatctcggatcatccagtaacccaccatggatcgtccggtaacatatcacggatcgtccggagtacaatacgcagaatggcacaatattgaaaatatgcattcccgcacctatcaccgagtactgtccaacaca

SEQ ID NO: 102263 - DNA, 363 bp, Zea Mays
cccgagggtcgtagaattgtaaatctaataatgaccgaagattggcgcgcacccataaccctatatcttcaaggccacaatcaccccactgaccaggctgaggccaagcgattgaagcatcgaagccatgacttcgcagcgatagatgggcaactatacaaaaagagaataagtcaacttatgctcaagtgcatcacaacggtcgagggcattgaactcctatgagaagtccacagagggacatgtggttcacactcagggcctagaggcctcgccgctgaggtcatgcgccagggtttctattggccagccatcgtgtgcgtagcaaaccgagtggtccactcgtgcgaagcatgccagaaa

SEQ ID NO: 102264 - DNA, 518 bp, Zea Mays
tgaaaaggttgtgcacctggcaacaatgcaatatggtgatcacaatccctggtgggcggcaaaccagttggcactgcaaatacagactggtagcgcagaagcagtgactgtagatcaccagacaactcagaaatgatagtctggtccttctcatttaactcagtcaaatggcacacctcaatcagagaacaatgtcctttagaagattgcaacccaaacaatttaacttgagtacccctgtaagggatgaccacccacttctcagtccaatgcacctccataggactaaactgctccagccaatccataccaacaataagatcataagtcacgagtggtaacacacgtaaagtggactggaactcgcactgccccaacgaccaaacagcccctaccaactgttgagtacactgcatttgacacccattggccacctgaacagacaattccttggtcataggggttaatcctgtaaggtgctgggccacccgggaactaagaaatgaatgagaactacc

SEQ ID NO: 102265 - DNA, 437 bp, Zea Mays
gtcgtggctacggaccccatcgtgttcgaggcgttcggcaagggcggcttccacgccagctccgaggtgctgctggagaccgccggcgggaaggggcgctggacgtactacaagctgctcggcgtctacctcaggaagcagcataggagaaaccaagttttctggaactactgatgctaatcagttcagcgactagggtagtgcttacattgtaatttttagtgattaaaatgtgcttgccattgccagcaactccatatatctaggagcttgcaacagacataccaagactggaagatgatttatactcgcatcaatagttctgtgcactgattctgaaatggtggtggctaggcccatgaggccgaactcgttgtccatgtgcacctcgtcggtgatgtcgaggaacgggtacgccggcagaaggcacggcgcca

SEQ ID NO: 102266 - DNA, 430 bp, Zea Mays
aacctgaatattatatcttgtatgaattccactgccttagctgaagtcagagaagcgatgggtttgtactctatccatttagtgaatttgtcaatggcaaccagcacatgagtgtatactccctgagctttcttgaagggtccaatcatgtccagtcctcagcacgcaaatggccatgttatgggtatggtctgcagttgctgtgctggtaaatgctgctgctttgataagtattggcaagcttcacacctctggactagctcggctgcatcactctttgctattggccagtagaaaccagacctgaagaccttcccaactagagtcctggatgcagcatgtatcccgcattgcccggcgtggatctcatctagtagttgcttcccagtagccgaaagaatgcacttcatgaggactcctgttgcgctcc

SEQ ID NO: 102267 - DNA, 360 bp, Zea Mays
gtgttcctttgtcttgctggtacatgcaatcaactatacttgcatcctcaccattcaaactttgaaggtgcatctgtagaccattcaatacattttcccaacaaaacttggttctgagacagcaaggaacttttcctcgtcgtaatgcttggtagaagactttctgatacttttcctcaattactccagtttttctttggcacttccgcctttctgtgttgttcttgttgatcagcagaataaagggaaaaaaacatactgcactactgcttctatccttgtgacagatatttgactatgatggtaggacatgaaggcaagtgaagttgaggtatccaccacataaactgccattcccag

SEQ ID NO: 102268 - DNA, 348 bp, Zea Mays
taatttggaaccagacttgacttattcagaacatcacattcgatttctagatcaaatggatataattactcgaaagaggactctcaagttttataaggtacagtggaaccaacacaccgaagaagaagctacctgggagactcgagacttcttagagaagaattttcctaagttttcagcttcttgtaacctgtaagatttatgtacttcattgtaaagttagaacaaaccccaccccaccccctgctctgtaagataaattaggaaataaagttgtgacgtgtttccttttccattacttaccctagagccttaaatctcgggacgagattcttttatggggggaag

SEQ ID NO: 102269 - DNA, 359 bp, Zea Mays
gcaggatcgacgagggagagtggaggtgtcccaaccatacccggcgcacagggaggatgcgcagaggtgcagcggaagagtgagaggggaaagactagtcccggtctcgtgataccatgaaagaggatggctgggaaatgattattggattgattattgagggagcccaaggctcagtacatataggcaaggatgtcccagaaacaggaaagtgctaatctagagaatcaggaaagtgctaatctagggacaccttgccaatcagatccaatactaccaaaaagggagagaggctgcagccgccactgcagcagcaccctctagggttgcagccgaccaccctcctgggccaaccgaac

SEQ ID NO: 102270 - DNA, 1241 bp, Zea Mays
tctgcgctgcctctcgcggtgacttcggagtggtcgaatgccgaagaccgtcgatgcggtctttttcgacatgttgcgtcggagtttttgcgggggatttttgcaggtatattacatggctccgccttattaaaaacctcaccccccgggaggaaaagagtgcgggccgaaatagtattgtttggtggattacaagggcgcgtgggccctgagggtttaaacaaaaaatttacggagattgtcaatattccaggaatgctctaggtctttgccggatggcgttgtcagcctatacgcgctgggggacgccttcgatttgacgatgaatggaccctcccacttcggctccagtttgccccgtgactctgtccgggtggtccggacgagtacgaggtctccttcgttgaactctcttgggacgaccgcgtggtcgcgacaggccttggtttgagcttggtatttgttgagggcctgcagggcgaagacgcagtctctgtcgatgaggtctttggacgttggttcgtctacgtcggggactactgatgtgcttgttcggggcgacccatgctttatctcttgcggcgtcatggcctccgatccatatagtagacgaaaaggtgtgaatccggtcgcccaacattcggtcatgtttagggcccagactacttcgggtagctggtcggcccatttacccttcttgtcgtcgagaagccttttcttgattgtagtgaaaatcttgacgttggcacgctcgacgacgccgttagattgagggtggtataccgaggcgaaggcaagcttggtgccgatggagaagcagaagtccctgaagtcctggctatcaaatcgtttgccattgttgactgtgagctcggacgggactccgaatcggcaaacaatgttttgccagaagaacttctgggcagtcttcgacgttattgtggatactgccctggctttgatccacttggtaaaatattcgacggcgacgaaggtgaacttgaggttcccttgagccgtaggtagtggcccgatgatatccagcccctagcgttgaagtggccatgtgtgggcaatcagcttggtgaactgcgaagggttgcccgagcggggagaaaacttctggcaagcttcgcacgaccgtgtgactcaattcgcggcgcagattattgcggtccaataaaatccttgatggatcaccttggcagcgagggccctgggccctgagtgggagctgcaag

SEQ ID NO: 102271 - DNA, 695 bp, Zea Mays
gttggtttgacatgtgcgacaaccttggcctggtagcggatgcgaggagggtgttcgacgaaatggctaccacaagcgtggtgctggggaataccatggtggcgtgctacgtcaggtcaggggatatgtaagctagctgctcggatgtgtttcacatgatggcgaaagggacccaatctcttggaacacactgatgatggggtacttgcggcatggggaagcatgtatggcaagggagtcgtttgaagagatgccggagagggatgccgaatgccaatagctagagaatggtgattgttgcatgctcgcagcgttcaatcggatgcgcctcgcaaggttccaacctgatcccgcgatgatggatgtgctgatgtccgcggtccgcctgtgcacaactttgttctttgtccgttccaagacaggtgcatgggattttgagcaaaaactgtgtcaaaatgaattttcatgtgccgaattcattgatcgacattctttactagttttcgaaataaagttgcattgcagaaaatattttatcatttgactgatcagatcagcagagaggcttcttgtttttccactaaaacattgcatagagattgatagagtgtcagatattcataacctgtttgtgtttcatatattttgtgatacaagcatccattcacctcgagaggtggacggttagatcttga

SEQ ID NO: 102272 - DNA, 766 bp, Zea Mays
tttatattgataattccagtgagtaatggacagcatgtacaatttaataagagctcgggggcctaatagaaagaaaaaagaccaatctgcaatataaactaaactagggtggatggtgggttaatttttaagttacccggggtcccttttgtaaatatggcttggtgaaggggtatgtagatttacattaatcgaaccgatattcaatcgtcgccgatggatctcaggtctacggaccagattttaaagagctaagatcttacgacgtcgtccgatctcgatctaacgtcctacgatcgctacagccgaaacgttgttgcacatcttattgccatcgttgatcaccagagcaacggtacccgatcgtcaccccttagatctagatctaacggctctcatgcaccaaagcgaacgggtacgacatcagctaatcttcaccgttcaatcccagatcgacgacatagggctcatcttcgtcccacccgccagcccgaggcggcgctactcacttcacaccgacgagctcgtcggagcaaggttatacggcaccccggcactccactccgtccatcaaaatctgaaaaagaacgcgaagtaaacgagggagtcgatggagaagtattcaccaactactggtgctccgaattatgcggaccatggagatcagcggcacggcaacgcggaggaactccgatgaggaatttcctactacagagcaacgacatacgaaggaaaatagttgatgcacatggtgaggatggagtct

SEQ ID NO: 102273 - DNA, 370 bp, Zea Mays
atcttcggtcggctgacttggcgtggctcggcgtggtggctttaacactggcggtgttgtcaggaactttttcaaagtatcaagggcttcctgggcttctgaggtccactagaacttatccaccttcttgagcaatttgtagaatggtaagcctttttctcctaaccttgatatgaacctgcttaaagctaccatgcatccagtaagtctttgcactttcttctgtgaccgtggtgcttccatcctcatgatagcctcgatcttttctgggttagcttcaattcctcggtggctgacaatgaatccgagcaattttcctgctggtactccaaagacacatttttctggattaagcttccaccgatatcac

SEQ ID NO: 102274 - DNA, 578 bp, Zea Mays
ggcaaagctgtgtaccatgcgaatgcagtatcagtaagggaccacgagaataaacgaatgcggtaggcttccccatcaaccaattctcccaagtgtgttatgaattggctaatatgttcgtgtgtgcttttcccaccttcaccagaaaatttagagaagtctggtattctagttccctgtggatatggcacggtgtcgaatcggtggctataaggcttccgatacgattgccctgtacctgacacactaacaccgagtttgtccctgaacatcctggctacctcatctccgatcctctccgccatgtctggcgaccatccattgagtttgtgagtggaaatctcaggttgcctgacatcactctgtcggctttcctcccaggggtgtttgaggtgtgtgttaggtgtcctattaatgtcaccagctcctgccctatacctctcaggctctcttgtggccgaacaatattcagccctatgtctatgaggtggtatggcatgattataatgtgttgctggtggggcaccataatgtagttgcgatgaatgtgggaactgtgtgtattgcgcaactctcgg

SEQ ID NO: 102275 - DNA, 433 bp, Zea Mays
tgtagtagccgagaccacccaaaagcactcccaacgcctgaccacaagagctagcagatagcagccctactgttggcaatccaataatcacatacgaagttttctttgaaattttctgagtcttgaattgacttctttcttaatttatagtttcaactcaaagtgaatacactattttttgctgaaccacatttttcctctgctaagtttggcatcattattgtatcataatattatcataattaatccattctgtaaactgactctagaaaatttccttgaatgatttcctaacttttatagtctaagctgcattatgtgcagaatattctctcaaattttgtgctgcagcctaacactgaggatagacatattttcagcttatcttcgaatggtagctactctgcaaaatcagcttatatgggtcttttcc

SEQ ID NO: 102276 - DNA, 468 bp, Zea Mays
cgaggtgtgggttcttgatagattaggttggtgctgggatctgttatcctactatttttctggattcttggttgtgtctgctctgccctgattgttgtagttaaattaaaataacgccaaatccatatttctatcaaattgctatgggagaaaccaatgtgatattacccactgtatttgatagtagatgtaaacgtaatgaccgtccaacagaatccacttttcttgagaaggatcgtcgtcataaagcactgttcggtgctttagcaattgagcttaatattatgcatgggcaacaacttgggtggtccgtttaatcttgataggatttcgcgcactcgtcaataatgcagtagacgctttaccaaactgggttcccctttgttcggcccgtcatatatgcctttccatgattcttgaaactagtatcactgcttgttttccttcccgccccttcccatcagctgc

SEQ ID NO: 102277 - DNA, 615 bp, Zea Mays
ttctcacccttcatcacggagccgatggcacgctcgctgcagtctcccttccctcacaccggttgataccgtgcggtggcgcacgacgaccaacagcagtccaacgctggcgagcagtactccccgccatgacacacctatcccaacgctgataggtgtagaagattgaggagatccatacaaactcaacagaggatgacttacaggcggttacgtgatgccggtaccagcccacgtagaaacgcgatccacggtggccttcctgctccggtgagcaattcgctccgagcccaccacgaactcccacgcaggtgccccatacacatcccacgtcacctaccgaagctcctggtcccttttccttagctccattgacggcgcaaccacggattgatcgccctctcaccctttccccccacggatgctcgatacttctctactaaccaccgtcactaagtattccgggacactaaggtcgacaggcagctccgccgacatatataggcacggagaggcgggtcgaggtccaccaaatcccaaccaccgcgatcgattcgcaactgcatctgctttctgcttaagctcggactgggatgactgacatcaggttcccac

SEQ ID NO: 102278 - DNA, 399 bp, Zea Mays
gttaaagatagcttaaaaagagtacataggtcgtttcaacaaagagctactatgtggcgtcattttaacacattgaagtctactgagggcaggggtggacccacgttgggctgagtgggggaacaacctcatgttgggatgtaagcgcggactcactccgagctataaactgggacacagaggttatactggttcagaccgaggtcctagtctagtgtagtgctgattcatgtattgtctaggagcatgttacgacgagtgtgctagtgtgtggaagaaagaatgttccgtccttttatagctcaagggtggactttaccgttgaaacttatattctactcgagggtccttggcttgttgcccctaggccgctctagccctcctagcgtcgtctatggg

SEQ ID NO: 102279 - DNA, 712 bp, Zea Mays
atcgaccgcgaggagatagcttcggacgtgtcacgattccatggacctagccagagcctagccgtagataattcaccggcggtcgtcgtggctcggtcatttacgccgccttgtcactcatgcctcgctcttccctcactgtgtctcttctttacgtggtaaccatgcacaaatgatgtaatccgaggccatggatcgctagctggaccaccgggcctataaatagccccgccacccacgacgaggtattcaccagttcaccagtgagctgggttgaagcataaattcatagaatcctctccacctctccccaaattagtggtgcacagtgaaaaagcagtcctttgcgaccgtgtagccccaaccgcacctcctaattccactagaacccgtcgcggcaccattttcccccttctcagtcaccgacgagcgaaaatcctccgcgctccgtggccagccgctcccagttctgctcctgctcttcttaatcgtgttttagcacccatacatgctcgtgatactcatcggctcaaccctctatgctcgaccacactcaattaaccgaaacacatggaattgtattcggtattccccgccaccgtggtcaggctaagccaggaccataatcacccaattaaagcttattctagggttgtctcgggtccgtgatacttgcccagtaagtaatttgagcagccaccaccgatcttga

SEQ ID NO: 102280 - DNA, 514 bp, Zea Mays
gtcggctatcagtagcttctcaaggaaggagctacggcgatgtggtagaacgggacgttctaccttggtaaagtcgtgtttgtccgcatgcgcctcggtcgttcgggcttccctagtcgtgttctttatggctagcaggatgggtggtgaagagctctggcatcatcattatcgtctatgtgcctcgccgacccctagcctccgtagcctaggtcttggcacaacccgtcgtgttgcggatcctatagtcggctaatgcactcaggtctaggcttgataggtcatgagttggccacatgcctaggggccgtaggccatgagtggaaggtgaactgactctctctccgtggaacagtgctaggtgcaattaatgcctcttacgttgggtcagtcctgggtcaggcgtgaaatccactcaagcggcttcctctcaatccgcttgttccctcttctagccccgcctcgcgtgaccctaggctcggtgcctcgggacttatctaggggcgggtccttc

SEQ ID NO: 102281 - DNA, 350 bp, Zea Mays
aaaagagaggatgtagaaggcggttgtaaaatttgtcgcagatcgcgtcatggccgagtgaaaaaagacggtcacgcgacgagttgcgcaatacagtgtacgacagaggctgagtcagacggatggtagaaagggttagataaaattagacgaaaatggttagagctggctcgcggaccagagatcacggggtggaaggcgaaggggtagacgaggatagacaaggattatgtcgacgacgcgagcagcatgccgttcgcgggaagaagtggttcgatgatctcgtgaaaaagagcacgagatcgggaacggatcaacgagagaaagagatatatatatattatcgagtt

SEQ ID NO: 102282 - DNA, 348 bp, Zea Mays
cccgtttcgagcgatcaattccgagccaagtgcccaaattccattttcttcgcctcaaatcaaaccaagcgcacacttcactcatatttacccatataaacctatttgtgaagtattggctcaattccatgtcatttcatacctcaattcgaatttcaaacctcctatgacactatttctcgttcaaacgtcgtttgcgtgtcgtttgacctctcgatcgccatatctctcgttttctgtgcaataatcctctgtgtatgtatttattcacatttcatatacttatgactatgtgactaatacgtgctcacctcttctgtcatttcagtgaccttgcctgcccgtgag

SEQ ID NO: 102283 - DNA, 664 bp, Zea Mays
aggatacaactggtatggtccttgcatatctaacaaagtggcacggggactgaacaaaagagcggttttacgccgaagttgactctgaatagcgtgatggcttcaaaggcgtgcctatgagtcctttaagaattagcttcggtctgaaacgaccgaagtgcaaattaaacgaggttgctaaagagtgctatgaagcctttcatacagttgttaggaaaattgggtctcaagatttgattcaagaggcacttgcctataacatttatctgactcggactaggtggaaactaccaaggaggtgaagtcaaaagatgaagagcttgttactctagcttttggtttcaaggaacaatcttcgtacaaagctcctttggctagatggcttaggttgatagaagaaaagtacaatgagatctatgggaactacctcactagggagcacgaagatatgtcatctgttttcagaagccgggggaagcttcggcttaatagagttatgaatgccattggttttgagtatcttgactatgaagatcccgctattaatactgaaactggggaaaaggaaaagggttgctaagggtgctgggaagacatcgaagaaaattattgaagctatcacagagaatgatgagtcagagggcgacaaagaaccatctccgag

SEQ ID NO: 102284 - DNA, 326 bp, Zea Mays
gctcatgtgattgttctgcagtggtctgacggagcctgcatgggtccatgagtccatcccgtcctcacgtgtaaatgtctcagagctccccggcctcaaccctgagtctgagtgcatcgatcatattggctgcacctgtacctgcagacgcagcattctgaacgatggtaacaggcatgtgccattagctggaggggaacagtgcaaccaacgatagtgtgatgtggcgccgagtcgctgtaaattggtagtgtccgtcctgttgatgttcacaagcacacagaagttatagctggcagaaggcggttggcatgtcaggatccgta

SEQ ID NO: 102285 - DNA, 1040 bp, Zea Mays
gccatgttctgagtcaggcagcggcagatcccaatgactggttagagccaatcatcaaatacataagaaatgaggaagaaccggatgacaaggctgcagcggagcgcatcgcgagacagtcggcccactaaaccattatagggggcttactagacagaagaggtgctggaggagtcctcatgaagtgtattcactcggctattgggaggcagctgttggatgagatccatgctgggcagtgtggcgtgcatgtggcgtcacagactctggtaggaaaagctttgaggcccgggttctactggccgacagcgaagaatgatgcagcagagttagttcagaagtgtgaggcgtgccaattcttattgaagcaacatcatctacccatgcaacagttgcagactattcctgtgacctggccatttgcatgctaggttttggacatgattgggcccttcaagaaagctcaagggggatatacacacatattagttgccattaattaattcacaaagtggatagaatacaaacccatcacctctttgacctcagaaaaggcagtggagttcattcaagaaataatgttcaggtttgggatacctaaaagcatcattacaaacatgggatctaacttcactagctcagagttctttgacttctgcgagcagaggagcatccagatcaagtatgcatcagtggcacacccaagagctaatgggcaggtggaaagagccaatgagatgatactcgatgcacttaggaaaaaggtgtttttcaagagcgagaagctcacatgaaaatggatcagggaattaccatatgtggtctagagcctgcgaacccagccaagccgagctttacatggaaacaccccattcttcatggtctatggtatggaggcaatgttaccattggatctgatctttggagcacccaggttaacatttgaaagcatattcaaagcagaagcaaccaggctggaggacatcaacacactagaagaagaacgactgaatgtggtcattcagtcggccagataccag

SEQ ID NO: 102286 - DNA, 442 bp, Zea Mays
gtcagggtcgcctccatggcggggaccgagagatcgtccttcggaagtgcgcctgcctccgtcaccagctgcttttgtgccactgaggtgttctcggtagcacttcgtcgaggcctgaaagtcggccttcaccgtgacgacaccttgggggaccgacatcttgagcatcatgtaggtgtagtgcgggatggccatgaacttagccagccctggctcccgataatggcattgtaggcacagtcgaaacgtgccacatcgaaacgcagaactaggtgcggtagttgtccggagtgccgaatatcatgggcaaggagacgtggtcgagggggtattcccccttggtcgggacgatgccaaagaaaggagtgtcagactcttatagctcgccgacagagatctcgagtgcgttgagagtccgggggaaggtgacgttgatgctgtt

SEQ ID NO: 102287 - DNA, 632 bp, Zea Mays
taggtggagaggagaggagaagagaaaagggcagggcgatgaagaaaggaagagaggcggtgattttctcgaattcctcctctccttttttcctatttatgcataggaatcgaagcgtctctttcgggtgcgggtagggtcgagcgagtcagtcatggcttggtctccacctcacgggaactccacggccagctcctgcaagccaagtaatggcgaagccaagctgccagagatgggggtagagagagagatagagaaacaagctagaagcggattaaatggtggtggaggggtgcccgctgcccggtcgtccaggccaccgggacgaggacgactaactagtggcttagttatgatgattagtacaggcaagtccccgttaaaagtaccgtcgctcttgtggctgcctggctcctgttatggagcgtaaactaatgcaactgggagggagaggaaccaactttttctttgcggtagaaaggatgggcgaggtaaaagatgacatgtttatctgtttattatttatattacctccgctgaaggcactcccggcctcctgggccaggaggaaatgtgcccgttggtgcgactccaacggctagccagagcgcggcagatggcggggcctcggc

SEQ ID NO: 102288 - DNA, 420 bp, Zea Mays
caacaacttcgtcgacgactttgttagcaatctttatcatgtccaaagcttctttcatgaccgggttagcctcgggattgtgtggctccggtggtggagaaaggccggctgtaataaagtgtatgatggtaaattttgaagctagaaacgaacaatgaagcaaaaggttctaaataaaaatacctataatcatggcgtgtttagcagcttcttcagctcgcttagcctcctcctgggcatcgtgagattctttctcattctttttaatggcatcatcagccatctcacgaccacccttcatccacacatcagagtagaatttatcgcccaatgtagaggcctcagccgaagggtctctagtgtcgtcaactaagagaatagattctgcctgggctacggccttaacatgttcacacccga

SEQ ID NO: 102289 - DNA, 396 bp, Zea Mays
cataaatgtacatatataagaaactatttcttaaaaatgcaaaatatttttcatatatacatacatatatacattgcatatggtaacacacgtactgtccacttcccgtctctttcagcatgctacaacacacgtactgtcaggatcttgtctacattctccacctcgtacggtaggtagtactgtgtactagcatgatataaataaactaatccagagtccaccagcctccctttccagttctagagatcaataatatatgcaagcaaactactatttagttgtgaatgacattagatatctacctgggcgcatttgtagaaacattatcccgattaagagtaaagatgttactaactgccctgatcacagatacaatatcaaatatctattcga

SEQ ID NO: 102290 - DNA, 351 bp, Zea Mays
agaagcaaccctctgaactttttcaatggatcacattgtttgtattttcaaaatgcttacaactctctttttcttcactccctcagctccttcgtcaagccttccgtagtctgagtactcgacgttaagggcgtctatcacctagtttagccttcgtttttcgagtaccgaaggcatctgtcatcaattgatcatcttttttgtaaagttcccaaggatttcattgcacattgttctatcatttccaaccattcggcccaggggccgctgaacgcgtactgaaacttgaatcggtatggcaaccgaacaagctcaaaattttccattcttccttcttcttcggcatccccc

SEQ ID NO: 102291 - DNA, 439 bp, Zea Mays
gtctcaggcgatgaacaagctacctaaggcggtctactgcgacgtggtaaggctttgaggcacgtagcctggccggataacagtgaactccgatgatgccagcgcaattgacccgacaggacacgatggcccggtccggccagcgaccggattcaccccccattggatattttcgccccaccccgatgttatctactcttctcgcggcatgaaactcccaggcgggcacgaattgtggcggcagatcaccggcattgagctcacggcaccggaggtctttatcgtcactgtaccatggcaatcttcatcagacactttgacagcgtgatttggagagcttcattctctattttttatgtaacaactcagtcacttgtctgcatcaacattgtcatccaaagaaccagctacaagtttgttataaagatcttactcagct

SEQ ID NO: 102292 - DNA, 409 bp, Zea Mays
cgtgtccagatttgcgctggtcgccgtgattcgtgcttggcacgcagaggatatccctgagaaggtaaaagatctcacgggggaagggatttgatcgcggattgaagtttatcaccgtggctgtagccgttgcgacgtggccggaccgccagcgtcgccgtggaagctccggtgacctcggttgtgccacgctatagcttgtactgtgtggtagtaatcgtggcaccctttggagtataatccttgagtcgttgcaccggtgaacgccatggtcacagccacccgtgttcttccctatctccggccgccagcacgccgtgaccaaattgagagccaccgaccccgaatcctataaattgagcacgccctcggctccgccatgtagtcaagcactcaacgcacccacccg

SEQ ID NO: 102293 - DNA, 779 bp, Zea Mays
atatgaacacatcaagaaacatattacatgactcattgaaaatctaaaagatcatgcaagagtccaagacataaggtagaagaatcctagaaaaagacatgtgaacgaaaaaagagaaaaagaacactccgctgcaccggagtgtccgaagaagcaccaaataaaccacatgataggactgttattgtaccaaagagtggctactgagaaagtgtaccctggacagacagatgtacactggatggggcatcagagaagtttacaatgtgtttgaggagacctacaaggcaatggacatgtctggtgtgccaccagatatcccaccggacagaatacttagagaaattgcacaacaacccaaaaatggatataaacctccagaggtgtctgatgtaacaccggtaaaaatattgaatgcttgtactccaatagtcgacaatggctagttccaacggttagctgatgtgtacgcaccgaatgtgtctgatgaccgaacgtgtttgatgactgcaccgaacatgtttagtgagtacgcagaatttttatgttgttttcaacggctagttttggacttaggggttatatacacccacccaactaactatttagaggtgtgtaagttgagaaacattgtagagagtataactctagacatccaagtgctcaaagatcacttggtgattagcatagatgttttgtaaagtgtttaggttcattagaccacttcgttagctctagcttcaagctttcccttgtgattagaagtgaggaacaaaaac

SEQ ID NO: 102294 - DNA, 594 bp, Zea Mays
cgagaggacaatcgaggggtgtcttgactttttggtgatacacctcttcatcaccttttcgcaaggaggaagagggggaaagctccatgctatcctcggtgggcaacgagtatgacatcttcgatgagctgttatcgggtaatccgagcggaggcccgagttccatttgacaggagttggctagtggtccggagacgtgccccaaaagtacctacgggtgattcgcctagttctggacccatttgatggggtccaagggctcgaaacctccctccaatggtataatgtcatgaatcgctcctaggggtgtcgaatatgtcttaggggacctcgggattgtagctcgtgccttggccatgtacggacgtactcatagtcattcctaaatctgtgctctggggtggttgtctaacccttccgaggggccaacctacgaacccgtgtcagtaaagggctcggagcccatgtgctctggggcggtttcccaaactctgccaagggctaaaccttcgaaccccctaatcagtatgtggcctcgcccctcttccttcatggggatggaagtccaaaggggcatcctctccctgcttcctg

SEQ ID NO: 102295 - DNA, 307 bp, Zea Mays
ggcaacactagactgttttcgagaagaccatgaaaccaacgaagtacccaaaaactaacaagtcccagaagtagacttgcgctccaaaaggcaacccgtaaaatcatcatcagaataaccgcacaaagatagaccagacggtgaggagtaccacaaaccaaacacatgagtgaaacataggtacctcgtaataggtttcacagcctttctgtgagatgtgcgtggggaagcctggaaacgagctcacaaaaacactgcgaagtctatgtccggccttgtcgcagtcaaatacaggagagagccaatc

SEQ ID NO: 102296 - DNA, 587 bp, Zea Mays
agaaggtttgcggcttgttgtggcattaatccggctgcggcttgtatagtattttgtctctatggattgtagctgcagccgtccgaacaactacagctcctgtggttacagggcagccgaacaagtcgttggtgcaaggtcggagcagtggcacactgatgctcaaggtggttccagaggtccactcagacagatgctagaggcttttggatgcaacatgcctcatcagggggaaagtggctcctaaagccaatgctgctcgctaggagcagggtgctccaagccaagaaacatcccagaaagggaaggaggtggctccgaacgagggtggatcaagcgaggatcgcaagaggtcacccgattgggaagactcctcgcaaatagtaacgataaggtcattaggaccttttgggggcacatgggcacatggcacgatcatgatagtttgacttccttgttagactttctttttttgtcgcatccttacatctattttctcagtcctatgacgtcagccccttgtagcaccccgaaaatccaaacctagaaaatttctcaaactcgctataattcaaaatgaattttaa

SEQ ID NO: 102297 - DNA, 479 bp, Zea Mays
acagtttccctaagctcttttcttttgctgaaattaaagtgcagtatttacatgagcccacggaacacggttagacaagctagttgtgatgctccatcgaagacaacgctagagaagattcgtcgtcgccgggggtgacatgagtttccaaggcccaggttgtcggctgctcatcatccatgaggacacggtgctactagagagtaagattgttgcttgtttcagcttcctcaggcctcctgtttctgtgactctccctgactgatgttgagaacatgtggtttgatatataattacaatgattgtcaaagcgattgttacgacgtcggctaggctactgttgagagagcctaaggtgtgtttgcttgagaagtgtagaagaatggagcggctccatttctattttttggatgttggtttcattagaagagcggaacggctcttgtagtctccatatgaaaatttgccataaatagttg

SEQ ID NO: 102298 - DNA, 337 bp, Zea Mays
cttacccctaagtatcatttcaagccggctcaccaagtccacagcaggaattcttctattggtgacccgggtggagtcagctaggcctcggtacaggtaggccgggtatgccctatccttcaatggctgaatgttcttgaagacaaagtcagcaaccacagcttctgcagttagacccctctccttcaacagtccaacttcagctagcagaactcctgcctcagccacatcctggtctgtgggggatttagtccagctcggagtgcgaacgtccggctgtctccctgactgtggggggagagaatttccgtgattctcaacaataaaccactccaag

SEQ ID NO: 102299 - DNA, 364 bp, Zea Mays
acgctgccttcttttatgagtggcctgaatttctctatgaagggtgggtatatcgtagcatgtatgctatttccctggatatagaaagatgtagattcaactttagtaagagtagaaacaattcaactagtaaaaagaaggcacattaggctctttattatcatattaaagggaaaaacaccgttgaagcaaactggtgaggatgtagattcaactttagtaagattagaaacaattcagctagtaaaaagaaggcacattaggctctctattatcatattgaggggaaaaccgctgaagcaaactggtgagatgcaacaataagctggtagaggttgttgctactttacctcttcgtcgagca

SEQ ID NO: 102300 - DNA, 383 bp, Zea Mays
agggttttaattagggtttcactactagaaaaccccccttgtatgtacgttttagttgtagcgcacacaaaagcgtctctacggcggtacataaagacgttatttgaaacaattttaacaacgcatcaaaatgttacggtatttgacacactttcaacgtgaagagatacctaaacacaatttttaacacgctattaaaatcgtattagaatgacacgaaattagacacgctttcaatcgtcagtaacctatagacacgttgcaaaacacgtattaaaatcgtctataggaaccttaagacgctttttgatatgcaattaaaaacgtataaaaatggcatagttagacatgctttcaatacgtgactaacatgaagatacgtc

SEQ ID NO: 102301 - DNA, 494 bp, Zea Mays
gaagaatgaagattttgaagtggctaaggcgaagcaggaaataagggagtggactagcgcaaggttgcaaaagaatgtagatgagcttcaggaatcaaaggaaagatattatgaaaaatccttagattgtgccaagaagctaaaagacatttttgcaaaggtgggtgcttactcatccaagcagaaatttatggggcgatctcgaaggaatcatcgaatggatcggtgaagaagccaaagcttttgaagagatccttagtgatcgtggtgatttcagtgcctttgccggtgctagaggggttgcaacaattttggaaaatctggttgcaaacacattaaagctggaacccagacggaggctgtctttaccgtggataacacgaaggatccttcgcctaaagcgactctgatgggcacaaaattttactccaacatttggatgaaaggcggccgagaactagccgacgaggcaataaagaagaatgagaaagaaa

SEQ ID NO: 102302 - DNA, 490 bp, Zea Mays
gtctctggccacggtgacatcggggaaaatcaaaggaataacgtgttcccggcgattcatgacggtctagttcaatccgaggggtcgaggagtttgaggagagcctaaggatgctagaacaaatgaccaatccgattgggggaagcgtgaaattggagctctcgggtacacgattggaggcaatactttgtggttgggtgtgtgattacactacggagctgacggcgcgctcaatttataagaagcaagagcggcagccgggaatttggatgacgacgcgcggcagttggagaaggagaggagcactggcgcaagcgcttagtggttttcaccgtggcgctccctccggcgatcaccggatcccctaacgtgactaatcgtgacgtggtaaagtgtctggacacacggcacacggcagtgatcgatcaacggcggcgaggtcttatcccgatccaccgatgagcaagggggtacggcgggcttagccgcg

SEQ ID NO: 102303 - DNA, 350 bp, Zea Mays
cgcacacggaatgcttcggtgttggccaattctcctaattgtgctaagaactggtctatatgctcacgcgtgctctttccttggtcacccgaaaactttgcgaattcgggtattctggtcccctgtgggtatgggagacggtcaaaatggctaccataaggtctccgatatgactgccccccggggactatactaactccgagcttatctcggaacgccctagctatttcctctgttactatatcgatggcagccggtgggagaccaccggctctttggtccaatatgggtgagtttgtttggatgttggtatgttgaattcctccccattggtttgggttttgcggcgc

SEQ ID NO: 102304 - DNA, 644 bp, Zea Mays
ctggtctgtgaaggaagacgaagaggctttgaaagtgtgcatcacgtcaatattgtgtggaaggagcaggtcgtcataataggggagccaagtcaagcccgagttatgtgtccacatatgctgctcaccatataccaaaaccaccttctagattggccacgagcccatttatctattgacaaatttcggcaccagtcatcattgcaggtgggcggtctgttactacgacacctttcgtaaagttcttgatgtctaggtggaatggatggtgagggagaaattgtcgatgtttatcgaatgacgaatatttgccacccttcttcaaccaaatgaacctaagagcttccttgtaaactgggcatgggaacttaccatgaacacaccaggcgctgaatagcccatacgctggtaagtcatgcatggagtactggtaccaaacatgcattttgaagtttgtcttcgtagctcgatcatacattcataccccttcctcccaagcacggatcaattcatcaatcaaaggctccatgtacacacccattttattcctcgggtgtccgggaattatcaacgacatgaatatgttctatctttgaaagcatacactagggggagatttatgggggaaacaaacacgggctaac

SEQ ID NO: 102305 - DNA, 341 bp, Zea Mays
cgtgcactatggggtaacccacgcagtgcttttgggaggatgacatcgttgatcatggctttatggtatgtgtaggaacacgtcggaacacaaagggattatataggttcaggccacctgaatgcataacaccctacgtcctatttggtgttgagtatttagtttgcttggagtacatgaattacaaatgattcatgggtcgcgatgaatgagatctcctatcaatctaatggtgatggtgattgtgaaagagagggatatcgagggagttttgtaggggcacctccgttgccttatataaccggctagagagatatctctttacagatcgtgaaagctta

SEQ ID NO: 102306 - DNA, 782 bp, Zea Mays
ctcctctccaacaccagttggtaatgttgttccccttctaaacatgtagaattacctcttgcacaaagaagagatcctagagtcaatgctagaaaacctccttctcgttatggttatgaacatgacattgctaagtatgtctcacactctagtgtctctcctgcatataacatttgttacatctctacaaacattgtctatttcgaaggattgtaggtgtgctaaacaggacccaaagtggaaggatgccatgaaagaacatctgctttcccttcaaaagaacaagacaagggaacttgttcaccttccagaaggaaagaaggcggtggagtgcaagtgggtctttacagtaaagtagagtcctgaaggaaaggttgacaggtacaaagcaagactggtggcgaagggatatagtcagacatatgggattgactatgatgagacctttgcacctgtggcaaaaatggtcatcatgaggactttaatctcatgtgtggccaattctggttggccgcttcattagctggatgtgaagaatgtatttcttcatggtgtaggaagaggtctatgtggaaattccacttgggtttgcaaatgagcagactgctgggaaagtgtgcaaacttaagaagtcactctatggcttgaagcagtctgtcaagggcgtcaaacccctgactggccggaccatggctacgtagctcgcaaccgtcgtccgtcttctccggtgaggataaccacctcaaccgcaggcttgagagaataggagtgtattagagttt

SEQ ID NO: 102307 - DNA, 372 bp, Zea Mays
agtacattatgttgatcgaatcaagatggcggttgatcaagtaaaattgaagcgctagaggacttagtgatttggcggtcaaggacttgaggtgacacatttcaagattgtggggagagcatatggagtaccctacccatgattgatttaattgtttgagcatcaaaaccatgagttgacaacatctagctttgtacctcaaaacttgggtggagttctagcgagaactgtaggtggcagtggcatcatcatgaagcttgcatcggtgcaaagcaaagttgtgagaccataacatctgcggggttaaattgtttggctctaattacctagggacaagttggaaatatgtaatatctctatcaataatgtaag

SEQ ID NO: 102308 - DNA, 453 bp, Zea Mays
gcaagtaggaggcttaggtgtgatggaccatgtggtggtgaaactagagcaagaacttggagttgatggaccaagtgcaagagtgaagaggaagcaaagttgtgatcaatgaaccaataaggccacgtgatgacatgaagagagattaagccaagtgttgatttgtttgttgatcaagtggcttgatgaagaatgatggatgaacttcatttgatgtaatgatcaaaggtagcatggttggctacactatggatgatcattatagcattgttggatacactactccttttttgctctctataaaatatgatggtcggtctagttttagatatagagcaccttaatggtgtgttgcttaagtgttatgcatagtctagggcctctactcatacatgattgctagggaacacatccaagtgtgtgagagcgactcctagtgcgctgtgttgagag

SEQ ID NO: 102309 - DNA, 605 bp, Zea Mays
tggctctgggatagctgattctgagacaagtggacactttttaggaagggctagggaaactgattccatatccgactgtagtagggcatttggagcattcgagaagagaaactttttggcccattcaaaggtaccaggtgacatcagatgctgaataaagaaatcgaccatgcatttgggattagaaccatgttgtctgtttcagcacttgtggtgtggttggaccaatatgcatccttttcctggtcatgtgctcattatatatgttggcattcatgtccatgaaatgtgacccatagtatgggggtaacatggggatgatcaccaacttgagggttcatattatcctaagcctactcattaactacttgttcaacttattgcatgtctccaacttgatcttgtacattggcctcaagattgacttttggaggaacatcaggtaatgccagaacagtagggacttgaatgacctagtcccctagcatattaatatcctcatccatgacaattattaggtctggtgggtgaaaaggcatgaatatctgaaaaccctaccccacagagctatcagagggcaaaaggtcttctatccctgaaagtta

SEQ ID NO: 102310 - DNA, 482 bp, Zea Mays
gtagcacccatgtatccacctatgagagttagttctattggtgggaggacccaaacagatatatttttccctagtgcaagagttcaaataagggggatagagttccccgctgatctaatagttatggataaccaggatgcgactatagatgtcatcctagggatgaattggctaacttagtatcaagccagtcttagctgtgacaagagaatgacaaagttagtgtccttatcaagagaagaagtgttagtgaagttaccaagtcaccgcccatattaagtaagttgaaccataagaagctttcaatgtagtatcagaattcccagatgtgtttcctgaggagttaccaggtatgccacctgaaaggaaagttgaatttgccatagagattataccaggcaccgcccctatttccaagagagcctatcgagtgtccggaccagaactagtggaactcaagaagcagattgatgagttgttag

SEQ ID NO: 102311 - DNA, 370 bp, Zea Mays
gatataggaatagtggtttgcaatttaactttcagtttctaattatttcaaaaataaaaaaaacctctctttttttcattagtgagtgattaggagagcatgagtatctatatgtatagtcattttattatgtaggataaaagatgggtaggttagggcaagaatagcttggggtaagaaagtttacggtgagaaagaactcaatgctgggtggtaatgcatctgaaggtcgagtttgacttctctccttccttgacgagttttggtcttctttggccttcatccttggagtcgccatccatatcaaggacatacggttaagatagttgtcgatgtttgggatgggtaggcccaataaggtttactttgc

SEQ ID NO: 102312 - DNA, 1008 bp, Zea Mays
tagccaatgccgttgccgccaaggctcctgtcgatgcctgtgcctgagtccttgctgcagctaaagccctggagaaggaacaagcagtcgtcgttgccctagagtgtgcggccaccactgctctcaagctagcttagcccccccatcgccttctttttagaggcagttgtgatccatgaggcccccatcgtcgccaacctccatgcacccattgtcggcgtccagaacatccaatcgcttgcctcagtcgttttggaccccctctccaactatacccgacggtggcgattagagaggtgcaccccggctattaatctacaaacctggacgactagatcactatgcggcctaggctgactttgggtgcctgacagcagcagtacaaacaatagcagcaaacttatatacaacaggcgttgttggctactgttgctgccccatatggcttacctcctagtttcatctgtcaccgccctagtgccaaccatgtagtcgcatcctgcactctgcagcaggtcacaacattgccttggaccaattcttgggatcaacaatctctggctaagtcatttagcacaatggctctcaaccctcccccattactgactcggtgatggactcaggtgcttccaaccacatgacacctgatgctggtatgtctccctttttcaacttcctgtttgcacatcttcatcatttttagcaatggatccattctccttgtcttgtctatcggccctatagttcttcctggaccattttatcttaataatatccttgttgctcctaatattattcagaatctcctttccatttgttggtttaccattgacaacatgacccatttggcctctctgtgaaggatcttcactctaggaatatgatcataaggtccaatagtttgggcccctctactccccgctccttccaccgtcgccgcctttgtcatctgccttggtcgctaccgctacaccttccatctggcatgaccacctcgatcatcctggc

SEQ ID NO: 102313 - DNA, 558 bp, Zea Mays
ctttgctgaagtattcataaggtacagatttggttctcaattgttgattaaactgcatcccttttccttccttaactcctgaaacatcatccacctccgcacctcctttgcctcctccaatcttccatgtgacgtatagatattagcaagcaggacatagttcccggtattacctggctcaatcacaaaaagcttcttggcaacctccttacccatctcaaggtccctgcagttcatgcaagcccaaaggagtgccccaaggactgatgcatcttgcttaggtcccatctggtgaatgaatcgctttgcctcagttagaaggcctgctcgcccaaacatgtcaaccatgcacgcatagtgctcattctgtggtgtgatcttatgaactcgagtcatcgaatcgaagtacctgcgtccttgctcaacaagtccgctgtggctacaggaagagagaacactcacaaatgtgatgtggtcaggaggaatgccattctctagcatattctcaaatacatcaattgcctgcatgccatgtccatgctgctgcagtgcagttat

SEQ ID NO: 102314 - DNA, 865 bp, Zea Mays
gcatataatcaatttcaaggcatgctcccaccatccttgtgcaatgcttcgatgcttcaacaaattcaagcaacaaacaatgccttgtcaggaacaataccccaatgccttggaacccataaggacctgactgtggtggcgttagcaggaaactggtttgaagcaagaaatgatgctgactgggactttcttgcaagtctaaccaactgtagcaatttgaaactcttagatgttaataccaacagtctccaaggtgcgctccctaattcaattggtaatctctcgacacggttggagtatcttaacataggagaaaacgacataactggaacaataacacaaggaataggaaacctcattaacgtgaatgaactttacatggcaaataatcttctcataggttctattccagcatctcttggcaaactaaagaagttaaatgaactgatgttttcaaataattctttctccggatccattcctgcaacattgggcaatctaactaaacttactatcctcacactcagtagtaatgtgattagtggagctataccttctactctcagcaactgtcctttagaagttttggatctttctcacaacaatctttctggtccgatacctaaagaactatttttcatatcaacactgtcaagtttcatggatcttgcgcacaattccctatctgggacattgccattagaagtgggtaatctaaaaaatttaggtgaacttgatttctccagcaatatgatttctggtgaaattccgatatctatcggcgagtgccaaagcttggaatatctcaacatatctggaaacctgctccaagggaccattccactttcactaggaaatctaaagg

SEQ ID NO: 102315 - DNA, 276 bp, Zea Mays
aggaatttgagtagcgacacataataaagccgaaggggaccagaagttgggaagaggtggattgggatgggcaaggccaccgtacaccagtcaacaccgtgattgggatctagtgtagattcttctactcggggatggtcactaaggtcggtaggaccatagcgactactgtttggagccattgagccttcaagccttatggctgcagtaggtctcacacagacgccgtgtgggaaagcttatgggttagttttctccctctttaatttttatcat

SEQ ID NO: 102316 - DNA, 664 bp, Zea Mays
cgaacttcagggtagatcgccaccaaaaggtcgtcgaggagaaggaagtaaaactcgactccctcaggcctccgccccatgatagcaatgtaagtaattctagtgataatcaatctgttatacatcttatggaattaaaacgggatcaggtagaacaacacataactgggataaaagaaaatcaaaaagctaacacatacaatagaaaaatctaatattcctagttttccatcccataatgtcattgtagaaacctcgctagatgcatcgctagcaaaagggcctatacggtcccaaccattatatggtactcggtgaactaatacctagatcaaccaccacctccaccacacctaatagatgcaacaacacctttgggcacgaccggaccattcgagtataatctccgactgttccgccctacatcggaccattcggtaaccccaccgcagaccaaccgacaccccaccggaccgtccggtgacccatcgcggaccgtctgttgtccagtatgcataatggcaccataatggtaacacacaaccatactctgcactacattagcactacatcccccaccttcggcttatacaagctagggcattccatcacctaagacggactaccacttaacacatagggaagggtttccatcaccacgcac

SEQ ID NO: 102317 - DNA, 296 bp, Zea Mays
gttcaggcgtgtgcttggagagcagcgggttatgctgccgaaatgtcgcggcaatcgtaggctacacgtcataaatcacaagcatcggcctacactcttgggtgggtttagggcctttacctaatagggagttcacctaattaagccacggacgatcgttgatgttttttacttttgtttagcctttgaaatggacggtgatcggagggtgatgtatgacgggtggagaaaggatggggcacatttgaatgaatggatgagtgtaacaaaggcttttcttgagcacgctttcaaag

SEQ ID NO: 102318 - DNA, 289 bp, Zea Mays
gttgattcaaagccgtccgatcaactccggacgcaccagattaaatcgtgaggggtctgaatcggtacgcgccatgagcagtccgatcgtgatccgacggtcgcgggcgaaacattacctagatctaatcctagcccttcaactcgttaatcaacagtcaggattcaatcggtcgaatagctctctcaggcaatctgatcacagccgcaagaaagggatccaacggtcggtgcctttctccctccctgcgcacgcaacagggcagaggcgagcgattcgcacggcggcg

SEQ ID NO: 102319 - DNA, 585 bp, Zea Mays
tctacaaatggtttcttcaactgaacaaataggcaaacaactttaaatatatgagttggctgagtctatataaccccaaggcacgaaactaatcgttgcccctccactcaacattcacgagtgtaccggacatgcccagtgcagctccaacagctagttcaagaaattgtccgttattgtataggtatctgatgctatgaccgatgtcccatcgaacatctccagtgagtataccgctcgaggtgtagggttacatacttttctaagtgtcctatccgataagtgtatagcctttcacacccgtttgcaaagctctctaggtgccctgtccggtacacaatggacacatcagtgttctctctgttcctaaaagggcaacctcctatccggtagcacatacccgatgcacatcagacatatctggtgcaagtacaacattgtcaacttgcttgattcaaacaatttttaagttgggtttgatctcgaacttctattgggcttccacagggcaacttcttcacaagtgtgcatcaccactaaacttacctaggtcaagctaacaatctttgccggccttaatagtac

SEQ ID NO: 102320 - DNA, 411 bp, Zea Mays
gaagttcttctggcaaaacattgtttgccgattcagagtctcgtccgagctcacagtcgacaacggcaaacagtttgacagccaggactttagggacttctacctctccatcggcaccaagcttgcctcgcctcggtctaccacccgcaatccaatggcgtcgtcgagcgcgccaatggcaagattttcactgccatcaagaaaagacttctcgatgacaagaagggtaaatgggccgaccaactacctgaagtagtctgggccctaaatatgaccgaatgccaggcaaccagattcacaccttttcgtctattttatagatcggaggccatgtcgccgcaggagataaagcatgggtcgccccgaacaagcacatcagcagtccccgacgtcgacgaaccaacgtctaaa

SEQ ID NO: 102321 - DNA, 724 bp, Zea Mays
tgccgggccgcccatttggcaatgtctaatcttagcacatgttctgcaaaggccaaaaattaaacaaaggcgcttgtacaagtcaaagtagtcccatgattccatctgtaatagaacatgaaacataataatatacaggatactacgcctgctacatagcctccgacagaagtgtccaaactaaaaggcatccattgtcaacattatcaatttattactaacagagtaacagcctctgcttttggtaccaataacatctaggctatttcatagtgttcagatagaccccacccacccagtctatctatttattggatgaagatgaaccgcagaagaactgaacttatcgagttgattggacaaattaaatcgaaatctcatgcctttagagttttagtagaacagttgaaggtagccgcaggtagccgcgacggagatctgaatgtcaccgtcacacccgaaaactcccctgcctcgcagacttgtaataaaatcattgaaaggtgaaaaggacttaactcaaagaaaaggcaattcaagttttagacttttataagcaaaagatcttagtgtcaaacctcccaggccacaatcttcgaacggcaacagaaacgggtttttaaggtggtgggtatgaatttaaatagccccaacagaaatggtcaaaggtttcctaaaacttcaccccaacaaaattgccgtctcttactacaaagcgtgagct

SEQ ID NO: 102322 - DNA, 1154 bp, Zea Mays
taagaatattcagcctttgaaggacagggcatacccagcttacttatacagtggcattactgactcgactcgggttaccaacaggaaaattcctactgaggatctggtgagccaactagacatgatcctgaggggcaaagtatcaaatgttggtgctcctgtttcctactcggcttggaatctgccacctcctaggtcatttttcaatttcgtgtccaacctcctgctggtgatagtggtctgggtcttagagtgcgaccctctcctgaagacattgaggctctggttgctcctcttcgtgatcttcccaatgatgagaggcaagttcattttgagatgacagcgagtccagatgatgcagaaatagatgttgtactcaatatgttggctggagaatcttctgactcggcccattctgaaccgatggctgttacgtttggacaagagcttaacaaagtagtggtcacccgaaagcctgagggtactcacccaaagcgtcctcgccaagttagccgttcaactgcgcttgttgaggagaagaagaagaagaagaagaagcggcttcggcgactatcatgcttggaccaggatgctggcccttctgctcctgtttgtgaagaagtaccagcagaagtccttcctgaggttgatcctaatggtggtgtacatgttgaagctgaccccaatgggtgtgaccttgatgaagctgatcccaatgggtgtgatcgtccagaagctaaccccaatgggtgtgaccatgcagaaattgatcccaatgggtgtgaccgtgcagaaactgatcccaatgggtgtgaccatgcaccggctattgtccgtatctttgatgaggacgaagaagaggaagaagaagttccgctaattcgtaagaatagccggcgttacagaggtagtaggggggatagtgatattccttctccagctctgtctgctcttgtcagccttcaagaattgtccataacagattttgatcaggcactcgaggatgtcgttcctgaagatatggtgtcggagccgactgctggcgacatgatggatgtttgctctgaaattccagacgtgggattagaggtatcccgaccagtatctcgcgcatcgtcgactttggaaggcagtcttcggtgtcaagaagttgg

SEQ ID NO: 102323 - DNA, 537 bp, Zea Mays
tatctttgtaaaagtagcatatctcaatttataagggagttcagatttaaagataagtctccttgcttttaggagaaggtcggttaggttgatctccatccttatctagatagtggctagataatatttctataacaaaccacacctccttggactataaaaagggggggtggtagcgcccatctagggtagatcattctatcacaactgcataggcagtagacaccacatcgcataggacacagggtattgtctcacattgagagcccaatcctatctaaagtctcatgtcctttgtgcgttcaccttcagttctcgatctcgtctgggtacctagtattggcgttatcgataacttcattgatgaagtagactagtcactggacctggtaagcaacatggtgagagagagccaactcaagagggttagggcttggagggataacaacctctatcaaaatatgtgcagactttgtcttcaccgctatatgctcactcaatacactttcaggagatacagtctcccctacttctagg

SEQ ID NO: 102324 - DNA, 293 bp, Zea Mays
ctgcccaccaactctctgggatggccttagcctggtgggacaccttcaacgtcaccatcagagatgctacctgggcggaatttgaagcagctttccgggagcaccatgtgccccaaggattggtacagcttaaggaggacgagttccgagaattgactcaagacggaagatctgtcagcgaatatgtgcacaagttcacggagttagcccgctacgcgccagatgatgtcaatactgagagcaagaagatggcccgttccttaagggactcaggccagaactcaagacaattc

SEQ ID NO: 102325 - DNA, 448 bp, Zea Mays
ctggtttacaagaatctagggtcggtatgtaattaatttgcatagggtatgggctacgggtttattcctaaaatccctagggtttcttacggaaaatgtcccagtcgaaacggtatcagccgaccaggaccactcgatccaaaatcaagggatcagattagatcctggtcaactccaaccggtacacaacgaccgccctcagattgaggatctacggtcaggattcgatgcaacaacactcggctcccagtcacccgatcagagatccacggtcaggattgatcgcgcgaaggggtacccttatgatctaatccgagccgttcaactcgagatcgatgaacccacgttatctcctaccttcgacacaaccaaacggtggcgccgcgccacccaagcggcagtgagttcgccgatgcaaacgaacccggcgcccgagctacaatcccga

SEQ ID NO: 102326 - DNA, 312 bp, Zea Mays
cgttttgtagggtaactaagtcgccttatatagatgacgatattatgattacagattgatgttctcccttatcgcttatcctgcatgctcagaaatcctttctgacttgtgtgcgatgcaaagcttctgtatagaaacgacctccacgatggtttggactccaagccatgtgtcgtctctgagtctgagttagccatacaacccataaaaccaaccgttcagcccacttaggccctttaacaacctatggacccaattcgtgttatgaggacccaggagatatatatccccacttagaccattttatttttg

SEQ ID NO: 102327 - DNA, 407 bp, Zea Mays
ccaggtttaacttctccatttcttgacataatgtaatgtcaggggtcctcactgtaagacaatggcaggaagcattccgactcagtgcatctgccaccacattggcctttcctcggtgataatggatttctaaatcataatctttaatcagctcaagccatcttctctgcctcatgatcagttctgactgggtaaaaatatactttagacttttatgatctgtatacaagggcaggtatttcccagcagataatgacaccatatcttgagggcatgaaccacagcatctaattctaagtcatgagttggataatgctcctcatgccagcataactgtcttgaagcatatgatatgactcggccctcctgcattaagacacaaccaagcccactgcctgatgcgtcac

SEQ ID NO: 102328 - DNA, 667 bp, Zea Mays
gtgaaggaccgtgccttgacaactcgccaagaggattcgcgctccgccacaagtccaccagcgaccatcttccccgtcaccatccgaattctggtgcgttaacctccccgtaagtctcataaccgcgtaacccgcgcctagctactacagtagttattgcctgtccgtcgtgggcctagtcaccggggtactcatcgccgtggaggggtgggggcaaccggcgagcatacaaccatgaggagagagaaaaggggatagaaggatgcagagaggaagaagacagccggtggtccgttgagtggtagatggacggtggagagagtatacggtgtctgggccgttggattcacatggagcggtgatgatttggttggtgcgtaccacttccgggcgcccatccgagccgttgattgagtgacgggtggtagagattagatcccgggggtgacgacaccacatccgtagatctgggatcggccggtccgcaatgcataccagttcacagttgatgctgatctaattaggaacgctcatccatgatccatcggccgaaactaaaccatactgtttcgaccccccgctttgcagaaagacccccgaagaaatcactaaacaacccgcggtcctgggcaagctcggtctgattctactaaagttttatagtttt

SEQ ID NO: 102329 - DNA, 350 bp, Zea Mays
ggacgaatgaaaacaagctgcttgaagggataggaaggtgggcgaggtgaagaacgattctgattaaaaggttggatcaccaacccagttcttttctcaggcccttgatttgacctttcacctccaaacccctttgatttcccatgcccgacatttttggcttccactgccagtgttgtactgacagccctactgtaggtgagatccaagcatgttgccattttcagttgaagcctgtcattaagtaccctcatgaaacaattctttttcttcagatcagtattcacttggtcgatatcatactgggatagatggttgaatttgttgagatattgcgtgatagtatctcc

SEQ ID NO: 102330 - DNA, 410 bp, Zea Mays
tgatgaggcgatcgggtcttgttgtgttagaggaggctggtgccgaaggtacctccactgctgaagctgaacagatcatggctgaaggaggaagtgagaacgaaggtgaggacaacaatattttgagcccaatgaaacctagccacattgaatttgctaaatctactgtgatggctgacgacatggttatgatgaaaaaattgggctactttggggaagtcgagagtaagcttgtccggtttgccggggaggaggtggttccgtagccaagggaggatgaagtcgttgtttttaagagcttcttcagggcagggcttcgattccctctacatgagatgattgcagaagttttaaagaattttgagatatactttcattcgttgacacccaatgcaatcgttagacttagt

SEQ ID NO: 102331 - DNA, 461 bp, Zea Mays
ggtctaggtacatcttggttgtccctgggtggatggagtaggctgagttgtgagcctccttgagcaggacttctcgggcctccccttttggtacacacagacgatttttgaaccaaaggactcctcgatcatctgtcctgaagtccgggagttgttccttgcgggctttctccacaagtcttgctgtctctgagtctagacgttgagttttgcatatgaggtcttctagcattggtttgacttctagactgtcgctgtttcccagacatgtatttagttgagctgattctttcttccaatcctctaaaaagttggtcccttttattccaaatggttttcgactgagggcgtctgctaccacgttggccttcccggggtgataatgaatttccaggtcataatccttgatcagctctaaccatcttcgctgatagaggttgagatctggttgagtgaatata

SEQ ID NO: 102332 - DNA, 275 bp, Zea Mays
ggagtcaaaagatagtaacacacaaacataaaacatgaaccatcaagagtatctctgaaagctcccttgtaggttttggtgttttggataacaacccaattaaaggtctgacattggtgttaagtgtttagcaggtacttagtgcaaagcttgtaaggctcaacacatgggaaaagatgttatggtccaaaaggctaagtgactatggattgtggacatcacaagtctagttgaaggatggtcaatacttatgtagaactcgatgtgcataactt

SEQ ID NO: 102333 - DNA, 436 bp, Zea Mays
cccgattaaattccggtgataacaagatcatgacttgattatccatcgcggcattagaagcgtgatccagcagtcttgcaccctctactagtaggtcctacaactatttcttgctcagccctgcccaagagaatatgagcgcactagcatgacaggcaacatcaatgggggatttgattaaaatgttatcaaaacaaattttgttcctcgctttccaaaggccccaacatatggctgaaacaccaaaaatatggatttctttcaagtatgacaactttgatctcaaccatgcccaacaatgatccatattaaaggggatataccgcgtatggatacaactggccacataaccccagacgactttggtgatggggcatgaaaagaaaagatgatcaatgtactcattctgggtgcaaaaacaacaactaccatcacc

SEQ ID NO: 102334 - DNA, 923 bp, Zea Mays
gcgtgatgcgatagtgccagagaatatcttctcttatcttgttggtaggaaagcagtggtgaatgaaaagcggttctgttcccttccgggtgaatggatgtgaaatggaaatagactaacactcacacaaaagagacaaggaaccagaaatgcttactactgaccagctcctattcctatgccaaaaagggattcgagtttcaggggtagagggaagctttaggaaaggatagatgcacacacaatctgataagcctgccgactaatctccctaacaaccggcgctggatacctgagacccagctggcacttctcttgatccaagcgttggtctagtttccatcggaaagttatatgttcttgttaggcggtagcaagcagtatctaatttctgtcggttcagttcagagaaataggtctaaataaaccgggcttgtcccgtagattgtactatcccccttgcccaacaggaactggagctcttgccttctatttcaattatttgcttgatggaaagcaataggcaatcggctagattgcacatccaacttgttcactgatttatgctgcaggcacttcagaaacctgagctgggttaggtagcggttccacttctcaagtttggagcctctaaagaattctccgcctcaggatctgggtcatagaattggagccattagaccttcctcttttctttcgaaaggaccttttctctaggaccgaacaagaagatccatactgtctacttttgaactatgtagctattgagaaatctagtgcggagccaatatcgtgttcatggtggccgacgctttagaaagagatcatgtccttctctttagttttaagcaatgtggtcttccctggttgagtgagtgagcccagtacctacagcctgatctaagcagtattccgaggggata

SEQ ID NO: 102335 - DNA, 470 bp, Zea Mays
aacatggaatatctctctatatctcgaacatggcaataatagaatgattagtgaaaagcatgccatgagatacttacaacaacttaaagcatgtagattgccatggtatagaaatgatgaatacacaatctaccatatgagaggaatttcttcaaggaatggtgacataatttaaaaacatttgaagtgcttttctatgtgactacacaagacacataagaaatgataatttaagatacttgcacttaaaagcataaatgttaccatcctttggctttcctccatgttgtaggccttgttgtttccgcacaggataattctttatttcctacaacatcaatactttccccgagatgatatgagtttaatacatagtaatttgaaaaataaccttgggtcaatcatggatatagatcattgaagattgatagcttgaattaataaagattgaattgactctctcaagcact

SEQ ID NO: 102336 - DNA, 290 bp, Zea Mays
gtggcccttcgcttcatcccctgcaaaagccgcggttgaagaccctgacgttggtacaagtcgaagtacccttcgcatcctgtacctgcaccaaaacctatttgatcttagctggattagtctgatcgattgagcgctcggtcttcactccaataggatggttgcgtgagatggatccaatcgcatgcacgtctaggtcattttttggcgatgtggagcgttcgaggggccatgaatccccgtcacttttagggctagattggaaacttaaatcccctctaggattacca

SEQ ID NO: 102337 - DNA, 359 bp, Zea Mays
atgacatggaggtggagtataggccagggaagatgaacggcgcggctgacgccttgtcaagaagggatgaggaaccaacagcagcagtgaatctgctgtccaccccaaccttggaagtctttgatacactcaggaaggaagcattgacagatccgcaagtccaggaactaaagacatagttggcggcaggaactgcaggagaagggtgggttgaaagagatggattgttgatatgccagggcagagtcttcgttccagataattcaagtgtgtggtgtcagttgttgatagctgctcatgcagtaggtcatgagggagtagagaagaccttgcatagatggaggagctcattccacaat

SEQ ID NO: 102338 - DNA, 551 bp, Zea Mays
ctcggattaatgtgctctggccatgctttcattgcgctggctctaggagagaagagcaaggtaggcgagaaagagagagaattgggggtggaacatgggctattggatttaagatgtaaggctaggatgcaatcgggcgtaactatggattggtgagctggttatttacttggtggagaagacgatccgtgtgccgtccgatccttatcatgtggatgcgattggcgaggaaggagtggttgctgtgtctgtagatcaaataatggacggacaagattgagttgttgtgtacccctttcgcccatttagatctggccgtagatcccagaatcaatggtcctaatagcgtaccggttcaatagggcttagatctaatccaaaccactcgctttagatcggacggccagaattgatgcatacccccttcgcggatgcaatttgctaaagagtccctggccaatgttaaaaccaacccgcagtcctggcgcatgcgctctgtgtcttaagaaatcttaccccgaggcccctgtgttctctagttatcttgtgcc

SEQ ID NO: 102339 - DNA, 451 bp, Zea Mays
aaaggcagttgtttgggcctgagattatacaagaagcagaggaacaagttcagcaaataagggagaatttgagaactgcacaatccaggcagaaaagctatgctgatacccggagaagactacttgagtttaaggagggtgattatgtttatttgaaggtgtcaccactccggggtatgagaagattcaaagtcaaaggaaagttgtcccctcgctttattggaccattcttaatcttaaagcgagtgggagaggttgcataccaattggagttaccggatcatcttgcggatgttcatgatgtctttcatgtatctcagctgaagaaatgcctcagggtacctgaagaacagttaccgatggaagaccttagtgttcaagaagacttgacttatgctgagtaccccatcaggattttggatactttgactcgagttacgaggaataaggt

SEQ ID NO: 102340 - DNA, 934 bp, Zea Mays
cggcgagctaatttgctccagccgcaaagcagcagagtgcggcgatgagtcaccggagtgacctccagctcaccgacggcgaggattcttaccccgcgacgttatccatccaacccgagtgtgaatcctggcgccggtgacacgaatcacggcgagactcatcggcggtgagatcttttggtctgacgctggcgttctgatctgatcccggtactgtaccatggagagctgcattcagatagcctgacagacaaacttggagccaagttttctctcgatttccaatgaccactcatgccaagctctgcagcaaagtggtagagcaatatgccatctacaacattgctatatggtgttgccacaaaaagccactggatcatgcttgaaattgggcttgaagttgatgtcagtccactgtcagtctgaaaattcagaccttaacagcctgacagtccaacttcaggcacatttatctcagaattcttcataacaactatgctcacactcttaagcaaagttgttctcctttgtttggtcaacaactttgatgtggtgccttagggcaaattcttactggtttggaaggtacacagctccaaagttgagcttataacctaaaattcagacttagtatagaactcaattgaggtctattttgcaattaagtccaaaacatagggtttggcttgtaaatcttcccaaatgtgaaccatgtgactttatatgctttaacatagtagtttttacactttagtccaaatgtgcactgtttttgcacataggcccctagggattggatttagggttttccagggttccaattagggtttttggtatcccaggggtataaatgtgattcaagttcattcttgggaacattttatgactattcccctaaagcctttaggttttctcaacttgggttaagttttac

SEQ ID NO: 102341 - DNA, 752 bp, Zea Mays
cgactagctacagctaaataaaataaatcgatattctagaaaataaaaaaatcaatgctaaaaggagaagcaaaatagggtgacgctcacgccagttacagtgtcatccacacgatacagtgtctagctagtttataccttccgtcccacgtctttttccacacaaaagcacaagcaccctcgggagtgagacacagaggcgggagccgagggaatgccgtgacgccgcgccggatcggtgggtcggttcccagtctggtttcacctaaaaactgagtccaacattgaataaccaagaactccttccgtttcgttttagttgtccctaaataatataaaattgaactaccgaaccaaacttttgaaaaaaaaacccgaacttttcgatcggtttggttcggtttacggctttcagtagaggatgtgcccatccctcgcatcgatgtagcgcatttgatgtgatttgtggacttgtgctacttcgatcttatgctgcggactgcggctatggcaggtgacgtattttcccattatttatttctttagattagaaaaaaatgaaaaaaaaggagaaagggttagaggaaggagatagaaatagatggtgggctgatacggtggtccgcacgtaacgaacaagcatacgtacaaacacgcaccttacctgagagcctgacgcgacaccactgtcgccatcggccacgcaacttgctccacaggaaacctagcaatccttttttttccccgcaaac

SEQ ID NO: 102342 - DNA, 430 bp, Zea Mays
tacaatcaaaggaaaccgcttcggctgcgaaggagaagtccagggggcagaaaaaacgtcggattgtgaatgtgatgcaagcaattgagcaaatgtcgcgctcagcattggcggcaaaagcagcatacctatcaataccgaagatgccaccagagccgaagctgaataactcgcaactacaatgtcagaattgacaaactcatatcagatgtggttgccgaggaaaacatggccgcatcacctaataaaggaaaaagaattgaagatgcctcttcggaagagaaagattttgaccttcaacacctgggtggccaagaactttccgaagaggataagacagagttaaaagagtttgctatatcctatggttgccagcccaggtctgtactcttcggcagggtcaacgaagaaattttgggatgcattcacg

SEQ ID NO: 102343 - DNA, 515 bp, Zea Mays
atcacagttcatgtaataaatatgttttggaaaaataggtaataaatttgtggaggacttacatgttctgtttgtagtgaggcccataacttgagttccaattacttggcatcaaaactgacggataattcttcagcaacactttgcatgacttggaacctttcctcattagtgaactctgtactgtcaagtttctgaatgaactgcaataatattgtgtgtaaagcataggaccacaaaagcataagacaattcaataacaacatattagcatcatattgcgtacctcctggctaacaaaatgctcaacaaaatttccatttctctctgtgaatatgtgccttaggtcacaaagttcaggtaaatcaggataccgagcaacaacaaatatcaggtttgagacagcttccctgaattctggggggcaatccctgtttggaaagaaaagaacacaaaacaaatgggttcattgtttgagcatcaggataacgcttttctgtttgcactcttcgcac

SEQ ID NO: 102344 - DNA, 500 bp, Zea Mays
cgaagttatagctgggcatagcgacttctgtgccctggcagcttctcggggcacaactgttgcctttttgaagtctggctgtgaacacgacaagattgttaacagacccaacttcagcctgtcaccagcagacctagataatgttcccaatctggctcggagtattgcaaatagatttataaagttagtatggacaaagggtggtcggagcaaagctagtgacgaagctcggagccacctcaagctggtaacaaaatcataccttgtgcttaccttttcctttgaattttgaatttagcttacaatacttccgtacagattgaccaagccgaagctgaagctacagagtaaaaggacgaagcttcagagatgatgtcgaagcttgaataatctgtaaaaatagctcaaaaaactcctgtaaaaacttgtataaagtatgatgtaacttgaggttcactttgtaatataaccttacttttccgtccatgtatgaaatgctt

SEQ ID NO: 102345 - DNA, 302 bp, Zea Mays
ctccttgtaacaattaattgagaatgcaaacttggacttgattgacattagccgggtcacgaattcgagtacggtcacgtcagtgtgcccgtgaagaggctcttctgacgctttaagtaggtcgaagaacttctgaacctccggtgtaggtgaatcatgatgatctggtgccagttcaggctgcagatcctcaagcatctggtccatcctatgaatatcatcttcaccgtcatcaacttctacttctgctgctcgttcaaggcgtgactccccgtggagataccagaccttatagcctggca

SEQ ID NO: 102346 - DNA, 391 bp, Zea Mays
taggatatgccgaaggagaccaccactgattctagtgatggtggtctggtccgactgaagtataccttcagatttagggagaagtttgatgagccaaacgacgactggctgaagtgtattgaagctaccagtgatgacctacttggagcttactccaaggccgaagataatgctttgtctgcagccttcggaggctgggggaagaaaagactaaacagggtctttgatgcgattggcttcatataccccgattatcgctttccgctccgagggcaaggaaaaaagaggaaggttgtcacttcggtcactacagttgtgccaaagagcaaaaaggtgaaggttctgacccaccggccacgttatattgaaccggacgtggttcctgaatttg

SEQ ID NO: 102347 - DNA, 583 bp, Zea Mays
ctgaggtcgtggaatgcttgttctcagattcactcctcgaacgtgtggtttcgttaacttcattgtttgccccccttttttttctctgggtgaattagctgtttgattgttaggtgactgggacactttggggatgctcgtgtttatgatctatatttattttgtttcacttggtgcatgtgtttgcatgtgaacatgtttattgtgctcctctttttggttcgcttgagtgaattgagggtcatgctttagggatgagttcgctttatctgtacttttgcgggctgttctcttttctttttgtttctgtttatgctgcttgagtgcatgactgcatggtgcaatcagaatcgtcagcctctatatttcataattacgcatttcatagagctccgttctcttagtagtactgcggagatcatgggtccgtttgtttgttaaggggtttccagactattggacccttttccactttattattacagaaaatcatgtgccagtggttgggatcttgtgcctctttttttctcaaatttatattttttcctgctagtcgtgtttaaattcctttgcttttcttgag

SEQ ID NO: 102348 - DNA, 297 bp, Zea Mays
atctcaaggtcataatccttgatcagcttcaaccatcttcgttgacggaggttgagatctggttgagtgaagatatacctcagactcttgtgaccggtgaaaatgtgacacttgttcccgattaggtaatgcctccatatctttaaagcatgtactatggctgccaattccaaatcatgggtggggtaattctgctcatgcggcttaagtaggcgtgatgcataagcaatgactttttcgttttgcatcagcacacaccctaagccttgcctcgaggcatcacagaagacgacaaaa

SEQ ID NO: 102349 - DNA, 385 bp, Zea Mays
caaaatctaaagcaaaagcaagaaggtaaggcacgagctttgttcccagcaatctctctaccgcctttggcccggatctgagtaatgaacctgttgcctatgctgctggcttcggccggaatgttaaccagttcagacaaagagagactgaagttgggcctattaacagttcttatatggttgcatccagccttaacaaaagtagtggctgtgccacgagaggccaccagcgcacagaagtctccatgcccctccattacttcgtcaaattcgttaatttctttctccacgaagtcgagggcccctggaatgtcttcgttagaataattcttttcgtccgacactaccccaactgagttaaaaatttcgcgcaggtgggcggagc

SEQ ID NO: 102350 - DNA, 624 bp, Zea Mays
ctcttgcggaccaacgagtgcagacaaggctggagaaggaatatcactactcccccactgaccaggtagcgccgactgtttttccgaattaaggggatttcctcctcctcttcctcatcctcatcaacaatacgaacaacacacccattggggtcagtgtcggccggattgcacccatttgggatcagcatcatcaaggtcacacccattggggtcagcgtcagccggattgcacccattgggatcagcatcatcaaggtcacacccattggggtcagcgtcagcagggtcttttcaggccgggcgaaggcgctttgggcgagcaccatcagatttttgagcagtcaaggtcttttcaggcccggggacagttgcaatagctatggtttcaatagggatggagttagaggaatcctcagccaacatgtccagcatagcacttatctctacatcactcgggtttacaagcatctcaaagtgaacttgcctttcatcgttggggagatcaccaagtgaagcaaccagagcctcgacttcttcgggagagggtcgcactctaagacccaggccactgtcgctagcaggaggattggacacaaaactgaaaaaagtcttggaaggtgg

SEQ ID NO: 102351 - DNA, 548 bp, Zea Mays
gtttgttatcccaatcaatctcccccctggtgtgtgctttcaaaggcagaatatattcgcgtcgttgataattcccggacacctggggaataaaatgggtgtgtacatggagcctttgatcgatgaattggtacgtgcctgggaggaaggggtatggacgtatgaccgagctacgaagacaaactttagaatgcatgtttggtactagtactcaatgcatgacttaccggcgtatgggctattctgtgccgggtgtgttcacggtaagttcacatgcccagtttgcaaagaagctctcaggttcatttggttgaaaagggtggcaaatattcgtccttcaataaacatcgacaatttctccctcctgaccatccattctacctagacatcaagaactttacgaaaggtgtcatagtgacagaccacccacctgcaacgatgactagtgtcaaaattcgtcaacagatagatgggcttgtggccaatacagaaggtggttttgtgggatatggtgagcagcatatgtggacacataagtctggcttgac

SEQ ID NO: 102352 - DNA, 410 bp, Zea Mays
gcgttggctggccatcgtccggtgagagaaggcattgagagagcgaagcgagagagagaaaggaagaaccaccgtagttgtgccaccgccgttcaagccccggtggtgaagagtaaagcaccgcccatgctagtggaggtcgaccgcggcatcgctcgattttgtgatgactcgatgtcgccgcaatttctcaccggaatccggaatcagccgagggttcgcgccacattggaccgacccttttcccatcgccattcgccggtgagatacctcctatctagtttgtcgtgctcttctctctctatttcgcggggtcatgcatgatttagatcactgcggcgaggtatgggcgtaatcacgacgagctagtcgacgggtggcacgcggcactgccgtgtgttgtgccaaga

SEQ ID NO: 102353 - DNA, 357 bp, Zea Mays
tgaagacaacctactcagaggcccagttagcagagttatacatgtcaaggattgtttgtctgcatggagtaccaaagaagatagtatcagatcgaggaacccaatttacctcgcccttttggaaaagactacatgagtccatggataccaagctaaactttagttcagcttatcatccacaaatggatgggcaaacagaaagaacaaacctagtgttggaagatatgctaagagcttgcgctctaaagcatgttagaagttgggataaaagtttgccttatgcagaattctcgtataacaatagttaccaggcaagtctaaaaatggcaacgtttgaagcactttatggacgaaagt

SEQ ID NO: 102354 - DNA, 437 bp, Zea Mays
gtcgatcattccatggaacactagattatgaatgtcaatactgtcatgctttattctggtatggtgaaaaatcttctataaattgccaaaccgaaaggcctcggtaccatacttgatgtaagagtgggaagattgatataccttcgtttaaagatcgacctgaaccactggcttccttggcaatcttcaatggtgactctagatctaggaaattcatgcgtagtatcaggcaatataactgtcgctttgctttcacatcaatgggtgcacaaattgacaactctattaataatgatggtcgtagaccgccgctattcaaaatatgtggccaagtacatcatcgtgttggttctcttttaccccttgatgattctgccccacaatttcttcaactttatgtgtatgacactgctaatgaagttagcaatagaatgaaa

SEQ ID NO: 102355 - DNA, 1108 bp, Zea Mays
gaagaaggagatagcacagtatgtggcccagtgtgacacctgccagtgaacaaaggccgaacaccagaagcctgcaggcctactacaacccctcccagtgcctgaatggaagtgggaagaaataggcatggatttcgtaaccggactgccccgaacacagaaagggaatgattctatctgggtaataatcgatcgtctcaccaaggtggcccacttcattctagtaaaaaccacttttggaggagccgcccttgcccggatatatcttaaggagatagtcaggctccatgatattccacgaaagatagtgtcagacagagggacgcagttcacctcaaaattttggaaaggccttcagcaagcgatgggcaccaagttagatttcagcatcgcttatcacccccagtcagatggtcaaactgaaagagtcaacaagatcctcgaagatttactaagagcctgtgtgttaacgttcgacagggattgggagtccagtttgtcgtacgccgaattctcatacaacaacagccatcaggccagcatcaaaatgtcaacgttcgaagcattgtatggaagaaaatgccagacccccctaatgtggtccaatgtaggggaaaggacactagaaggacctgactttgttaaagaagccgaagagaaagttgccctgatccgcaagaggttacttgaagctcagagtcgacagaaaagttatgcagacaacagacgaagagaactcagatttgaggaaggagatttcgtatatctcaaggtctccccgatgggtggtgtcaaaaggttccaaatgaaaggaaagctagcaccgcgtttcgtcggcccctaccccgtcattagcagagtgggacccgcagcataccgccttgagttaccagaatccatgtcagatattcacaatgtgtttcatgtgtcccagctccacaaatgcatgcaagtaccagagaaccacatcgaggcagaggcaattcagattcaaaaggatctccagtaccgagagaagccaatgaagattctcgactcagcagtccgaaggacccgcaactcagaagtgagactctgtaaggttcagtggagcagagatggagaagag

SEQ ID NO: 102356 - DNA, 302 bp, Zea Mays
tcgaaggtacctccaatgccgaagctgaacaaactgaggctgaagtcgggagtgacaacgaaagtgaagagggcaatagcattctatgcccaaccaaacctagtcacattgaatttggaaaatccacagtgaaagcagaggacctggttggtgatgaagaagctaggttattttggagaaaatgaagatggactgattcgctttgctggagaagaagtaattccagagccgagggaatatgaggttattgtgttccagagcttcttcagggtggggcttcagttccccctttacgatatgat

SEQ ID NO: 102357 - DNA, 610 bp, Zea Mays
agctgtacgccaaggtagaggagacaggcaaggagatgtcgcagctgcgtctggagcagatgggaagggaactgggagatacatcaggaggatcggaagaggaactccctaatcgagatcagaatcgcattcctcaacaaaacagacaggtgaagggggagcaaggaaagggaaacagagaagggcgacacccatttgatgctaacaaagaggtattgcctaaacttccttttcccaagtttggcagtggagatccagtggtttggattgatcagtgtttggattatttcactatctatcgtgttcccgagtcaatctgggtgtcagcagcaaccatgaatttggaacagaatgctgcccagtggtggagatgttataagcttagtcatggaattgggaattggcaggagtttgttgcagctgtgactgaacagtttggtgctgatgcctatccaaaagccttgaggaagttgttggctctgcgtcagactgatagtttggagacttatgtggatgaatttgaacgagccaagtatggagtagtagttcataatccaaggatgggtgaaccattttttgttactcagtttgtgcggggactcaagtttga

SEQ ID NO: 102358 - DNA, 482 bp, Zea Mays
cttcccttctgggagcagagcaagttcccatgttttgttcctcatgagagcatgtaattcttcttccatagcctccttccatcttggattctgttttgcacatctccagtctttcggaatggacacagtctgcagggatgcaatgaaggttctatatgcaggcgacacacgacagtatgacatgtagttagctatatcatactcaaagccaaagtgagatggaggtttgccagcattgattctatgatccctatgttgtgcaaggggtaaatcaacacgttcaagagaaggagcagtattacccattttaggtagaggcgaggagcttggtggagagagacctgaggagagatctaggactggagatgcaggtgattgaggctctggctgcatgaattgctccccctgatttttataccgccttctttgatacactattacttgtttctcattagtcttcatatcatctattctcacttctt

SEQ ID NO: 102359 - DNA, 355 bp, Zea Mays
ctcggcagaaagcttcagcatttggatccatcccttggcttccaagggcccagatgaagatgctgagcctaacgatagcgttaggggtcagctaatgaagataaatttcaaaattatccaaaacttctcatatcatctcgttcagaggaaaccgtaatcccgctctgaaaaagcttttgaaaaccactacttcatcatccttcggcgttggagtggtttcctctccagcaaaacgaataagcttcttttcaccttctccgaagtagcctagtttcatcatcatgggcacgtgggcttcagacacagtagatttctcaaaatcaaggtggctgggttttgatgggattaaaatgcc

SEQ ID NO: 102360 - DNA, 579 bp, Zea Mays
cgaaggttgcatcgggtgatggatgctctgaattttgaatacccagattacgatagaattgacgaaggggccagggggcgaaaagaaagagggttgtgagtattctggccagggaagccatccggtccgtcaaagaagaccaagaaactttgaagaagatgaaaacagtgccggagccgaaggtatcgactcctaaaaacggaagcttgctgaaaaatcttctgagaagacgaagacacaagatgtgctaaaaccaactgcaagcccttcgtcttctgctgttgaggtctcagaaatattgaaggtaatgaccgagtccttcccattcacaccgctaagtcctctagtgttggaactgaccagcctcttatagaaaaaggaagtctcttcggctgctgatgggagagacgggggccagaagaaacgacgcatgacgaatatactacaaacgattgagaaaaccctgccccggcttcgacaaacaaagctgccaaagcgatcgatgccgaagccactgctacagccgaagatgaaaacctcacaaccactctgtccgaaattgacagacttatatcagat

SEQ ID NO: 102361 - DNA, 476 bp, Zea Mays
ctagttcttgctagagctctagatggcaggttttgaccacccactcaggcttgggacgatgatcaggttcgggagtgttttgttcatgtctctccgcatcgagtacgacatggtactcctcccgcctacccctcctgaggatcaaggctcccgtcgtcgcccttctcgtcgtaggaggcaaagacggagcaactgcaatcgtgcccacggggaactttgtgtgcagaagatgcagtcgaaaatgatgacgacattgagtctctctcaagggacttggccggcgtcaacatttcgcccagagtgcttgcgccaaccttcctggcaccacctgctccaacgtgggggtcaccactcccccacgacgtcaagcaaagggtacggtgtcagcagcacctgccctcccacctgtgggccgggaggagccgaatgctccctagagaaccatccgtgttcaaccccatccccttccaaccgtg

SEQ ID NO: 102362 - DNA, 824 bp, Zea Mays
gaaaatctaccgtttctgaggctgacatgcctatgatggtgaagctaggatacttcggagaagctgagaagaagttgattcgctttagcggagaagaaaccactccgacaccggaaaaagatgaggtggtagttttcaggagcttcttcagagcggtattgaggtttcctttgaacgaaatgattgaagaagttttggacaactacgaaatctatcttcatcagctgactcctaatgctatcgttaggctcaccgtttccatttggtcactccgaagccaaggaatggatctgaatgccgaagctttctgccgagtgcacgagcttcactatcagacgaaggccagagaagatggtcttcatgagaattttggttgttacaacttcgcttaccgcaaagatatgaggactccagtggttagctatcgcaccaaatggccaactggttggaaaaatgagtggttttatgtgaaggccgatgagaagaagagggtgaagctcaagacgctagttctgagccctctgagcttaagctatgggttaactaggctgttgtgctgtatggacccgaggtcgccatgccgacaagctgtggcagaatttcgggtggtagccgagcagattggtaccagagatctagtccaagaatatctggcctataaggtgttcccaacgctaagtgaatggaacatgccgaagctaaagggaacaaaggagaagaatgaacttgtgcgattaccttataggttcaaatttgagaaacagttcaaagggccatgtcaagaatggttagaaatgatagaaaccatgtgcaacgaaattttg

SEQ ID NO: 102363 - DNA, 313 bp, Zea Mays
aatgacccgaaaaagatggtatagaaaatttaattttagcataatggttatcaggagcatgattgttattaccttgctggcagtgttggtgtggcatacccttatgtgttttgatgaagacggcgacgtaggcgcaaatctctggtggccgcttcatcataattaccttcttcatcaaacaccgcatcatcgagaagtcgtggacgaggaggtggtggtggcggtgcttgttgttgcgtctccaacacagcaagtctatcgacgatctgggacaatcgtcgatccagcctctcgtaagtctttccaaggttca

SEQ ID NO: 102364 - DNA, 600 bp, Zea Mays
gtaacattacgagctatcgctaaaagtcaataccattgaagttatcttatatcttcgagctagtatcgccctccgggcttcaatagcgtttggttgtacgcattccgagaagtccatgtactgcctattttgtaccaaggagtaattgttcatcaccattttcattgtggacaagatgccagagcagggagggagtaataataacttcagccatgcctcgcttgtgagctgcgatgctgtttccagttccacttgtcccccttctgacctctgttcttcagcgctgtatctacacgagaagatgctggacgtacagtgaaaataactgtgatctggtggtataggaggggctgggacgctgggtccacgtgcacgttgcagcgagtatgaattcccttcaagagagaggcgtgagtgtgaacgcccgaacgggaaaagaagaagggcccggatggctcgtacagacgcgtacagtaccctgctgtgtgcgtcgtttcgcagtgacaagggcgcgtcagcatttctctgcatgtgacggtaccggtacctccccagtttgattgcacgggctcaggcaaggtccggagaccctgctcgtac

SEQ ID NO: 102365 - DNA, 732 bp, Zea Mays
aggagccaagggctagagccagatgccagatgcttctgtaatattcatgatttatcttaccagacgaaggcaactgggaaggagcagtaccataacaacttcgggtgctacaactttgtgccccgctttgactctaggtatcccgtgccaacatttcgaaagaaatgtccgggttcttggatgaagcaatggttctgtgtgaaaaatgatctgagtgaaagggaggatgtgaggggcattattcagcgtcccatatggtcacgcttcggcattagaaggccatcaattgcaattgggaacgaagtgcaggcgcgtttaatggctttcaacaccgtgtgcacttacatcggttccagggatttggtacatgaacacattgcttacaaggtatggcctcttgtgaatgactgggagatgccgaaggaaactgctgctagctccagccaaggtggttttgtttatctaagatagacctttcggtataggagccaatttgatgagccaaatgacgattgactagaggttgttgaggcaaccagtgatgagctgttgggagcctacacgaaggcagatgatgaagccatgaccattgccttcggtgctcgaggaaaaaagagactgaacagagtttttgatgtgatcgggtttgtttatcctgactattgttttcctgctcgaaaacaaggagggaagagaaaaattgccacttcaacctcttccggtgcaccaaag

SEQ ID NO: 102366 - DNA, 326 bp, Zea Mays
gttggtttgatgaatttgtaatgtgaagtatgtgagttgtatgatgtgtgtgaatggatatctattatatgcttgatgttttgtttaaactggatgagaaaatgggaaaacaggatgctgggtttgcagcaaaacaggttaactcccgtcgactatagtaaagccgatcgaagggagttttagctgatgtgaccttaattaccatcgactggtggtatcaatgggagttattaccccatgcacggtaactcctgtcggctacaatgaaccgctagaaattaaataattctggaattgtaattcccgtcagctaggtacggacgaaa

SEQ ID NO: 102367 - DNA, 489 bp, Zea Mays
gtaattatcctacgaagctcacggtgtgctcaatttataggacttgggggcgatggctcgtgaatttgagttggcgcggtggcggtcggagagtgaagagagtactatcgcgagagctcggtggcatctaccgtggcggcctcaccggtgatgaaccagtagcagagagtggcttacggtgactcactgtgacgtggtaattgccgaggcatgtggcgttcgatcggcgggcggccaacaatggtgaattatctgaaccggccacaaagcagagggggtgcggtggccagccggaacagtgcccatactcaacagcggtgaagatctttctaccctggggtgttatccgggcctaagcgagcacgaatcacctcgccggcgtgaatccacgtgcgggggtcgccggtggccaggggatctgaatctgctgatatttttgttaatgtaccattgcaaactccttcagtcagtctgatagagcgaatgaca

SEQ ID NO: 102368 - DNA, 527 bp, Zea Mays
atgcaatgcaatgcggcttgcaacctaatctagggctagtgtggcgagaattcacacaaggcggctaacgagggcaaatcgagtaatgtggtgtctcgacttgtaatctgggtaaggtggatgggatagcggcagaaacaaataacagcgatggagcggttgaactacgatgaagacacgacctaaactagcaacaagactcgacacggacacaaactcaacaaagcaatctgaaacgaaattgcaaggctaaacaagggttctaggacagcggaatatatttttttgtatggcaattatctggagttataggatgaaaaccctaaactaaactagggtaagcctgacggtaatacctgagtctttgaataccacttgataggaacgggggtgcccgatcttctgtcaggtgacgataactatcgatttggtggagatgtcacacagacgatccggcttccaatcaacacgactagaaccccgcaatcgcagcaccacttctcctctggttatcaaccatgcactgc

SEQ ID NO: 102369 - DNA, 297 bp, Zea Mays
ggccagcttcttggacgaagcaatggtcttaaacaagagagaagatatcaaggagattattcagaggcccattatgtctcattttggtataaagatgctggcaattgtaatgactgaagaagctcaagcttgtcttgtggcttttaacgccgtgtgcagctacatcggtactaggtatctaatttaggaacacatagcctttagggtatgtccccttctaaattagagggaaatttcgaagattgaagagggcagcccatctaagcaaggggctaagaagggtggtttggtgaattt

SEQ ID NO: 102370 - DNA, 380 bp, Zea Mays
ggcttggtggcgtagccaggtttggccggtggctggaggaagaagatggtcctcggaccgtggatctgtgaatagacgaccgcgattagatccttcacatacctctttgcgctttaaatcgtgaccaccgatctggaaatcaagggctccggttgtataatggtgtgggtcgctgcggtccgttgatcatcgatcgggtggctatcactagataccgtttcaggtgaggttcgatctaatatgggcctctgacctaggatcggacggctaacaataaaaggtaccccttcgctaggttcttttacataaaaaaccttggaaaacctagaaactaaccagccgtcctcctcaagccgaaagtaattgcaactaagtcctgg

SEQ ID NO: 102371 - DNA, 521 bp, Zea Mays
cccacggtcatggagtcgtccaagagagggctggtcgggtgctggcacaggtgaatgactgttcttttgttgagggaggatgttttttgtttggtttctaatgcattgttatgttgttttaataggcgctaagggatgaagagattgaggacctcgctggcttggaaagcttaatggatacgcaagatgctggtgcgaaggcgaatacagaagagcagtcatcgcacgggagggtcggtggtactgaccctgcagcagtggggaccttgcattcgtctgccgctgagcaggtatcaaataggagtaggcctgctatgacaatacttttgatatttgttaatacaagtcggttgttgcgtaggttctggtgactgggcttgcgcaagcaaattttggcttcctggacaaagggatggaaatggttggggctgttgaatgtgttacaccattgtcttgttggagttcaacaaagtttagcaacgatggctctgaatttgactcatggtcgtcgtgtagcgaag

SEQ ID NO: 102372 - DNA, 517 bp, Zea Mays
cgcagaggtcccaggggaagaagtgcggtccagtgcggtcttcgccatcgcagaggccccaggtgaggaagacgtgcggtccggtgcagtcttcgcgacctggccgggcggtctcccaggaagcatgcggagatgattggaccgtggtggaatccaggcgttcgaggaagcagcgcgtgaagttggaacgtcagtgtgttgtgccgttggacctcgtcgggcgatgctttaactgcctcgcccaggggcacttcgccttccaatgtttgaagaggaccagatgcttccgttgtcgtgagcttgggcatcgttcctaccagtgtgtgagggccaaagctcctgtctggcggagaatttctgccgccgggtcgtcgtcgcggtacggtgatccttctcgacctgagtcccaaggctcggtctggaggaggatcagccccactgcggacgtctcggccagtgcttgctgtgggggcggttttcctcgacctgaggcaagagcttcggtctggaggagaat

SEQ ID NO: 102373 - DNA, 1055 bp, Zea Mays
gccagctccaggcgcaaacggtggaggaagaagaagcgcaaggagcgtgaagataagccggctttggagatttcggctccacctcctcccgagcagacgcttccggcgagtgatgagactgcttgtgttattgattggtcggttcagatgtctattgcggaagataatctcaagacggctgtggtgatcacagtggttagctctagagacgtcagcgctgacgagatcgcgttggttttggccccacggctggaaatggaggtgggaggattggttctccgtcagttctcccagtccagcttcttggctgtcttacccaaccatgtgcagctcgacacgctggtggatcgcttccatatcatcagagaagaaaacttcatgctctcctctaggcgttggacgaggttcgggggtgctgttggtaattccttgaagcatctcgtggaacttgagatcagaggtctgccgttgcacgcgtgggagacttcggtggtgcaacatttgatcaacccccatgcttgcatttcccaggttctgcccgacacgctggaaatcaggaatctggaagtctttcgatgccttgcttggtgttgtgatcctgaacatatcccatctaagaaggacctctggatcactgaaccagaccaggcttctgctgctgaagggaagaaggctctggtgtatccggtgcaaattcgttggggccctgttgatttgaatctcatacctggcgctccacagccgccagttggtgctggtgatcaggacaaacctgatacccccccttcacttagaagatgtggtgacaaccctccacccactcaacatgctgcagcctttgaagaccccgacataatgacccacaatcagcggcggccggtgcatgaccgattgggacctttgaggcgctcggattcccccagggaattgagccagccttgggttctggttgatacagaggcccggagcagccagccctgtgacctgcttgatgcagtggtgtgcagcagagtagggattcctccggctcctgcgccggatggggctctctgtct

SEQ ID NO: 102374 - DNA, 434 bp, Zea Mays
gtatggtctgcggcatggagaggtgggaggaagacaaccggtgaccgtcgatgcgtaatgggcggcctggattaattggattgtaccacttcgattggagcaatccaagccgttggattggctaaggaggggtgggattagatccgggttctggacccttggattcagatcgtgtggtccatgtcgcgtaacggttcacttaaagatgaatctaatctgggccgttcgtctgtgatccgatagatgtgattcatggataccccttcggccgtgcgaaggttgcaaaaaggcccttgacctttgtctaaactaacccgccatcctcacatgtataaagataattacacttagaccctgtttttcacaatttagcccctgaactctcgggattttgtttcctcggtccgagcactattaaaataaatcccagaaat

SEQ ID NO: 102375 - DNA, 356 bp, Zea Mays
ggagaagaacagggaactagagcaggtagagtttcttttcataaagcataagtctctgtccttacacaactagatacttaatactcatgcacaccgacagcctgtctgacaacctagacccactcaggtccactcacgaagggatttgggcgtcgtgcgcgacgtggatgattctggactccatcagcggcggtgttgtctgagtctctgttgctggccatctcctgaactagacgtccttcctccaattccttgctgttgacattgacgaccaccggtggcgggttgagagagacgacaaatcacaggtcaccaaccagtgtatggaagaccagatgcgatgcatgagatgactg

SEQ ID NO: 102376 - DNA, 350 bp, Zea Mays
gagcctcatccaagattttcttcttgagatctttatttttaggaaccaccaatctatcttcaaaccacaatattcccttgttgtcttggtgaaaacacttatacttctctgctttctgatggaggttctcattaatgatttgcactcccttgtcactgagttgggccataattatctaatcttggagtgttggctcaatggagatgtgagacaaggcacccgaaggaatcacttcgatcttcatcttgctcaactcatcacacatggtattgatgcgagaatccatcatcgcacagttgcattgtgacttctgactcaaggcatcagctaccacattggctttccccggg

SEQ ID NO: 102377 - DNA, 1068 bp, Zea Mays
ttagtttattagataaattttggtcaaacttgagaaggtttgactctccaataaagttggaatgagttgtaatttgggatggagagagtacagagtaggttaatatcatttaatttgattgaatatattcagcaagaaagctacaacaacgaagaacacagtcaagagggagaacatgtttggcacctaccaaaatatggaagtgcatgaatgaatagtcaagggtgacaagggtaacctgcctacctcagcttcaatttcatcataaagaaatctctgcttgagagaagttagtgcatgttgagcagagtcattgtacaggtcaaatggaatcaaaatgctttcgagaagaccagcatcttctgattcaatgacatggcccaccagcatccacgggagcgagcattcaattggaaactgtcaccaaggcataaattagtattagcctgcactattactctgttagtatttacaacaagctgcttaaaaaattctacatccgaattctcactactagttcctcccatctacaatttcattatactcaatagaggaaaacaaaaatgctcacctgaatgacacgagaagattcaaggtaaaattctctgaaccaaagaaatccaagatcagttagagtaccaatagtcgctgcatatataccaaaaaagggtagcagttaattgtagtctccaaagcaacaggataaacaaacagtaaatatgaatttctgaaattcagagtagtgaaatgaaggatagttgaatatatcccctgaatttaaatatgaaacatatgaaatgttaccacagaactcttaagtgcatgcgaattgctacctttaagactgactcagatcaagtacgcacctgtataatccaaaatatgcaagaaaaaactaagcttgtagaaaaatgtctctagttgtttaagatcttccacaggtatgccagagccactattcccaaatagtcctccaacttttctcagattaccaccagatacaagttcacatataagaaattgcaaacaatgaatctgtaaaaatattggtaaaagtacaacaataat

SEQ ID NO: 102378 - DNA, 566 bp, Zea Mays
gcaaaattcaagtacaccagaaagattctcaaagagtggcagcggtctctaccaaatattgataaaacagtgagacacattaagttgcttattgagttcattaacattattgaggaacaccgcgacctttcgattgaagaatggaatttccgggagcttttgcaagccaaaaatgctgatttgctccaaattcagaaaatctattggaagcaacgggcttcaatcaaatgggtcaccgagggagatatttgctctagattttttcatgctcatgcaacggtatagcataggcgtaattcaattgcgctgatctctgatgagagtgggtcaatcttttcagaacacgatcttaaagctaaccttctgtggaatgtcttcaaatgtcgcttgggttcttctgatttttcagaaaatgtttttgacctttctggcatgactatgtttcatgagggcttgcactggttagatgagcctttttcaaagcaagaaatcgatagcattgttgctgctctcccctcagacaaatcgtcgaggcctgatgggtttaataccaattttctcaagaa

SEQ ID NO: 102379 - DNA, 451 bp, Zea Mays
tagattcatgtccctctattaaatgttctagcatctctagggtctcttgtagcttgtagactcgattgattgaactagaccatactggattgccctgaacaccataggttcttctcggtttccgccgtcatcgtgagcaggtgtgctccggtccggattagtgaaattggttgagggattagtgtcgcagagggtggaattcggtgttggccaagttagggctttggtctttgagcatatcggccagtacgggctcgccggagggcgtgctcaccgtcgttcgcgatcgaggactcaagttgtgaagagaaagaattctaggggccttagtgcatatgtcagtgagacaggggaaatagtgtaaaggattctttgccagtattttaaatcaccagggacctctgcgcaagatgaccggcgcgggcgcgcgtgggtgctgatttcccctgtt

SEQ ID NO: 102380 - DNA, 654 bp, Zea Mays
aaaaaccgttgttggcacatgctcgttcagcatacgaaagcgtacgacgcatcctctgtctgcgatggtgtctgttagcggtggcaaccgttgtaggaaagtcgagtaaggacttgtcgcctacaaacggcgtgcacacgcatcttagtatgtgtatagagttgtagtagatacaagcagcatgaaaagcctgacagtcactaacctggccgcttttgacgaaccagctgagagtgcaacgaaatcgcataacgtgacgcatgtgtcggcatcgaagtggatggctgatcaagcgtgttcatgtgttcgatagtagctgttcaaagacataatgaatgtgtggttgtctatgcgaaagggaaagagacatattgccctaaataaaggctatattgaacccaaagagcgcataatattagtgcagactccgcgaaattgccctaatcctaggcctagggatagcctagataaatctgtttctctccaaaaaagtatagttcgaagaatttgatgttggtgatacagttgagaaagagatatttgaaaagtaatataagttaatttgtattctaatatgttggctgagccatattttctgcgatgaacctaatcttaggcctggggatagcctagataaatctgtttctcccccaa

SEQ ID NO: 102381 - DNA, 765 bp, Zea Mays
cgcttgcgttgcccatgtctatctgtggtcagacatcatgacgcgtgtggcggtgcaaatccgtgtctggacagctcgcagcctctcgcccacgtgaacgttgtgcgacgtcgcttcagaaaggatcacaatttcgatgccacattgatctctcgtatttatttcccgaaatgtcgaattttgtgtctgattaaaatttatcgattaagcggataagaatttggaacctcgacccactcctgtaatttttgacccgagtaaagtttattagaagctcgacgacaagtgtgttgatgcgagattaaactagaccgagaaaattggagccgagagcgtgcattcgcaattaatcagtttccccattcattaaggcgaagaaattaaatatgttccttagcagatacatttttgtccaatttcaaacttaagcaaaagttgtctaaatacaatcacccatataattttggtccgactaaattagaccacgtctaaatcctaatactagaactcggatttctaaaatttgcttttgccaatataaatgagattcagataaattcaatttggtttcgattaaattaaaccctgtcacaagtactgtcgacctgtatcattgtgatctgatccacttataccctgttcaaactctaattttagagctcgggtttatattcttttattgaagaaaatgggagaaagatctaatttctcttttactaatcatcagctctatctccagccgcttggggcttctaggcttttctg

SEQ ID NO: 102382 - DNA, 715 bp, Zea Mays
atcttaataagattctctcttatcttaatagattgatcttatcttaaaaaattttatctcatcttaatagatctaactaatctcaaaagattctatttcatcttatcatgaaagattcgttttatcctaaccactatatttatctgatcctaaaataaccactaggacctaatccaaaataatgagatcttaactagttcaatctagtcgtaccaacctaatctagattctatctaatctattatgatctaatctagagtaagttacttaatgatggaacaaaggattaagccatactccaaattcacttaagcttaaactggtgacctagatcaactcggccatacccaacaacttgacctacataacagatctatcttagcctcttgtcccaaacccggatggagacaccaaagaacaagactggaaaaggacaagatcaacctcgtcaaggaaggagagaagtcaaactcgatcatcagatgcattaccacccaacgaggagtttttcctcaccataaactttcttacaccaggatattcttgccctaaccaacccatctttcgtcctacataataaaatgaatatacatatgtatacccatactttcctaatcactcaaaaaaaagagaggctcttgattttgaaataattagaaactgaaagttaaattgcaaaccactcttcctatatccttttcttacaaatctcggg

SEQ ID NO: 102383 - DNA, 373 bp, Zea Mays
caaagaaccgccattatttcacacattgttaaccaaatctagggccagataaacattaaaacatctataggaacattccagatttaatctacaacatgtatcatacaggtgatcctaggaacatcctaccgagagttaatggccacacacacggacatggatcaggacctccaaagaagtccaaccaaagcaaaacgatgagactaagcatgtaaggcagggtgccaaatgcgtattgatcttctgagttgccacatgcacatgtgcggcttgcatgtcgtggagtgtttctaccattcaaggaatacacatatggtggtgtaaaatcaatctaacaacatgaagcttaagaacaaatatagactaaaactac

SEQ ID NO: 102384 - DNA, 685 bp, Zea Mays
atgtatttttttgcttaaatgttacgtaaagaaggatgtacgagtccggccactcaaactgtaccggatatgtctactccagcatcccagcatgagacgcagttgacagacacacaggtacatgaattactattaatacaacaacatattcgtgtactattacaaagttgccctgatgaagttgacattgatccactggttcatacaattataacgaaacagaccaaaacacctacaaccccagtggtaatgtttttttattacttgtattttccttgaaggtttgtattcatcgttttctttaaataacatataaccattatatttttttcagggtcaacatggtgacgctggcaagaacatgccgaccaacacaaacgtcactcctcaagcaacaccagaatgctcattcaacataccacatacagaatcttgctcgccgatatttgatgcgacgccgcaaataaatatatgattacaccccctcgttgtttttctatataattattagtagtttactaaacatctaatccatttataccataattgttagtctcccggcagtgtccacccggcggcacaaacaaatctccccgacagtggcccatgttttgatcagactccatctgaacatgtcagctcagtaatatacattttaattataattgccaaaactatgcagaga

SEQ ID NO: 102385 - DNA, 577 bp, Zea Mays
gctcaagggataaagggcagtgaagtcgaggggagagggtgtaccttttgagacgggatgcggaacggcgctcagggtgtttttcctcagaggggacatggtcatttaatgcgtctggacgtcttgcctgtcagcaaaccgttcgtggcacacgtgcgtgtgggattcgaaacaaccgtcgcccaaccattttcgaatcacaccttggtggctccgtccgtccaataaactaacagggaggggggcttcagaccattacctttgcttagccctttgccttctaatgtcgttttcgccttctgctcaaagagcccttcgtcttcctctcaccctttcgtccgtctcgatggtggaaaagatcactgtccttcctccccgcgacccatggcccgtgtcctccatcaccgatggggatctagaggcactgattgatgctggcctgctccggcccggaaccaccatcccgcagcccgagtggatcgcgtcgcacgatgagcaggtgccgaatccgcccgtgggctacatcgttagcttcacctcgttccgtgaacagggctttggagttccggcgagccgc

SEQ ID NO: 102386 - DNA, 501 bp, Zea Mays
atcattctatgcccatacattattctagttttgtctcaagtgtatgatacaattatcagtgttatatacttgaaacaggctcatttttttgcacagtcatggttcatagtctaatcatcttatgcatcacacaacgcagtgttatgcattttttcacatacatgtatgctaagtctatgtacactcagtttgctacagacctgttaatagcttatgacaaatgacacatacatttatgccagtttgcaagtatatttatgatactttctggaatttgtgaaataaacacaggaatcacatttacatccagatatatttttatcttatggtcttctactctctaccagatgaatcatcatctccgacatccaccgttcgttttttcgacgttgatgtctcattccattgtggggctgcagctatgattttgttccttgaaccaggaggccgtcctcgcttacgtccagataggttagccaatcgaaccctattatcctcgat

SEQ ID NO: 102387 - DNA, 408 bp, Zea Mays
gaaaaacaaggaagcggcgttgactcggtttgatgtaaccgaaggagagaaacaaggaagatggttgcggcgcgctagggtttgatgtaaccgaaggagaaaaataaggaagatggttgcagcgcgttagggtttgatgtaaccgaaggagaaaaacaaggaaacaatgttgactcggtttgtggcgtgatcaaacgggagatgtggcggcgctagggtttgaatggtggaagaacacaatgcaaccagcaacaaatgacgcgaaagcacacaaattcaacaatgcagattattgaaaaaaagtgcgaggctcaaaagggtgctgggataaggtctaacctgaatttttatgtggttttgtggactgtaggaaaaaaacactcgataaactcaccgatcaacctggaa

SEQ ID NO: 102388 - DNA, 1445 bp, Zea Mays
gcggattgtgttttggggaatgcatcgataggtgtttatgtgaaaagtgtatttgttttatgcatgtgatcggtgaatgtgatagtcgatgcgaatgaggagtatgattagtcctgttggagacacttgtgctgttggtgtcatgtgcataatgtggggggcacgtatgtgtgtgtgtgccgaaatatcataatagtggttgcgttagagttgtctgaagtatttcggatgcatgccgaaatatggttgcattcgaaatagggaaggagatgtgttgtgtgatgtaaaggctagattgattttataggttgtataaaaatgttctgttaagtgtatacatcgagtgtgttaaatggatcctacgtctctagagtgtagtgtattggctaggcgaagagttttggaatagaagagtatgaggcgtgcagttaagccaagatttaagtgcaaatcctatgcaatgtgatgggattcgtgattatatggggatatatttattgatgtgacgagtagtttagaaaatgctaatttgcgtggacgatgtattgttaagacatgagtgtcagagttcatatactagtggttacgctttttgtgcctattggtcattttattgtgattttctaaagttcttggtcataggggtgctttctattaccactatacttgaaaaatgtcaaacaacagatttctaatttttcctacctttttctttgtgcaagagcaatcattctagaatttgtcaactttttgcttaggggaaagggtggtagaaatttttggaatatatggtccttttcatggggtagggggtaatgtatgttaccttgcatttttaattgggtatcatatttttctctggtggtttacttcataagtagttgggtaaaattttgtttgcccactgttgcacaattttaggctccctcatgatttaattaaaacataggtcaaatccaagtcctaattattcaactcacttattgtgatgggttgggtgtttattatttttggagtagtgttctagcagttaggagtctactgaaattttcttatcatttttgcaatggtccttatattttttaatcatggttttccttgatttcttagtgcccaataaaataattaaccttggattagctctggactagggttctctgtatttttcctatgttctttatcccttaggtattctaggaaaaataggttcatcctctgtttattattttccattttctttcttaattttctaagttttgggcaaaaatagtttttaatataaattcttgatttattcttgtatactggggtgcttagtatttttaaacagtgtgtatgttgggtatgtctctctacaaattttcttaaccctggtatagaagtatttctattttctctggattaataggttttgggtattttcctaagttaaatcaaaactctaa

SEQ ID NO: 102389 - DNA, 691 bp, Zea Mays
ctcgttcactcgaacaaagccacgagagacaaccttacctcttgacttatccccgaatgtgatgtattatttacaaatcacaaggtcgaggctggagaaccatctagagcgtttggttatgtggtgcaaatagccagaatccatgagccatgtgttctccaggctccgtcttgcatcagcaataagacatggagcaaatggcacatcacaggggttaggatactgagaataatactagtgctgtggtatttggccctgaaaggtgttaggaaaaacaccaaacatccttggtcccatgaggggataacgataaccacgataaggaaactgtggttcactggggaagtaagaaccaaagcctctgccatagggtccttagccatatggcacatgaccagcaccccgccgggcatgaccaccatgtggtctcactgcttcaggcctaacaacaatatgcaaagcatctctaggcctcacatgacgtctatgaactgtaggatcatgaacacaatcaaaggtgtggttcatgttccctctgctcaactcataaccctaccgctcatctctcttcctcctaaataaaaaagtagcaaaatgaccctccctctcacaataatcacaatgaaatctcacctctctcttaggtggagtatgtttgtgggatttgggctttttgggtggttgaggatct

SEQ ID NO: 102390 - DNA, 806 bp, Zea Mays
ctttctcagataaagttatgaagagccatgcatgcaagtactattttgctttgcttctccaaaggatatgacggtaggtgcaacaagatcctccatttcattttgagaacgccaaatgctcgctcaataacattgcgaagagacgaatgcacatatttgaatacctccttctttccgcaagggttacatccttgtcgaaactcggccaagtggtactttgtgcccatgttcttggttgttaaggtaaaaaagatgtcacgataggctgatttcgcaaacagctggctcgccatgaaatgctctgcactcccctctggtgctccgcactctacaaccaaggacatggctttcttgatcgaatctgactgcacatcaccgtccactgccttctgtgtggccgttgcgttcttttgcattgtctcccatattcccttcatgatcctcaccatagggctctttgttttcttctgcggactggtagcacatatgctgctttgcccaactctttttctgccatcgacatctttttgtcaccacaaccacctttattgaaaatctgctctccaggaatacatgcagatgatccatcaacaaccacatgctgaaacatgatttcaaattgatcgatccattcaggggggcgtacctaagcttcttccactcggattgtccttgcacaatagtgtattaatgttaattaccttagttctaattaacaaaagtagtggatcaagagtcgttgtttttgtaaaataccaattaccttagtattggattcccaaaatgcgtcatcatgaaaaacagaa

SEQ ID NO: 102391 - DNA, 536 bp, Zea Mays
atttttactatcaatcatattgacaattacgtgagatagaacgataatagtacatccaatttgaatatatatgttgttttcacaatctgaaagatacatacacagttagcctcgatggtgattctagtcaggaggggcaagttgtgtgactggtcactagaaaaaacaaattggtcttgtgctccaatggtgattccaacttgtaaggacaactagttgtgcgactatacctacaactatatcatccatatcaattaatgctacaaccaaagcaaaagtagattcaatttactaggcatatcatctaaatgaaaattatcaagataaaaatctccgtacgacctagttttgataacactgtaggaaaacatgtatgctattaacttaaaatatctaccacattcaatcaagatggcatgcgagtagaggatcatgcttcgttaccactagacacatagtgcgacggaagaataagcgttgatgtagtggaagtagtaaaacgtcctcgcatatcaatagcatcaacacgatcacac

SEQ ID NO: 102392 - DNA, 469 bp, Zea Mays
cttggggcaatgagatgatgcagatcgaagagcatcggtggcgttgtggtagacccaagtctgttattgaactcatcccagatgattgcttctttacatcgatggtccgttatgagcgtaccattctgatcctcaagcccagttatggtgttaaacctaaaccgctctgttgttgtcgcatgaaagaaacccgtgttttcatctccaaatttggtccatctgacagtgtacctttgtctccaaaaaatcttttttctttccagtagattcagggtgtgcttcttcaaaatatttctgaagttgaactcttgtgtatataggggtctgatctcttctaatccatccaatacaaggagaacattgttgcaggagcttatggtgttattaatcgtagatagacgttttccccagtgttttagcactcatcgcaaaagcttgaatttagctgcaattcttgaggcgatattgt

SEQ ID NO: 102393 - DNA, 451 bp, Zea Mays
aatgacgtagagtcgaaggaggtaaatattggagattggaaaactgaacaactaatgcgtaatataaataagaaaaaaatctggattttggtttggctgatgtgtgtttcaatatgtcataccccttcatacatatagtggaaggtatggacccatttctagacgaaatgcaacagttcatatgagtttgttagggtatccacgcacgggataaggactctagcctaaattaatctgatcgcagaccgttcaagctgccataccgaaccgcctaggccacatgaccagaccattcggttgtccaagtgccaaatttggtgctcaacagatgctccttaacttttggtggagtttggtgagctaaaaacacttggtcccttacatattttctaaaagtacaacataatgtgagaatacctgctttctaagcatcctgccacatactgggatt

SEQ ID NO: 102394 - DNA, 364 bp, Zea Mays
ctcaatctataagatctgatctctctcttgtgcttgcgacatctttgtagatgtcccctgaccataaccttcttgtctttttgggattctttcctctttcgtcattaaattgctaccatctggcgaactctagtcctttggtattgacatgcccgtatccttgcaatcttgcatacaccaatgactgttcaaggcattttagttaacatgtccttgaccacccttgcttcttaataatccatgagtgatcattttattttgcacatccttggtgatctcgttaattccttgtgacttccttcggtaatgaatctttactttaacccttctattggaaccttacctatcttacccttgattgttt

SEQ ID NO: 102395 - DNA, 390 bp, Zea Mays
cttactctctccatacaaatatatgacatattttccgtccattcttaggctttgccaaataattgctacttaataagttcactatgtgatgcaaaatcgcaatcgtaagtcagcacttgtaaaaatcaatctaataacaccacaaaaaatatgcactaaggttgtccgcagtagatcatgtaaaatagtgaatctgcaatgtaaattactgtttgcagagtaaagtttgaaatagagaacatgataggggtaggataggatagctgctgaagacagccgaatagagtaattgttgttcgggtttggtgcggggaaggctggtttcggtttagcccttccctcatatcccactcatgtggtagcctccagcaatgggtctacccttttttt

SEQ ID NO: 102396 - DNA, 304 bp, Zea Mays
acttacgtgggtttgactaggtggaagtttaatatggtatttctaagttcagtattagtgcttgttttgtaccgtgtgggttttggaaagtggtaatatatggttttgttttatgctttgattatctggtggactgattttgtttgtgaagcaagtgaatagtggccctaatatggatagcaaatttttttagttcgcaattccaagaatccaagtcgttgttcatcaccagaacctatgctaatccatattcatgaacaaagctagtgccttccaaaaatattagtataatttcaatgactcc

SEQ ID NO: 102397 - DNA, 351 bp, Zea Mays
cgaaggcgttgtgtactttgtctggtatgttttgttatgctgtgctagtgtgattatagtcggtcttggcgcggacggtttgatgctgtcgtttctgcttttgttgtactagtccggctgcgcccttaggcggtttctgcgcggatagtcttcgcggtaaacttcggttttttcgcacttgttgtgctagtccggctgcactcttaggcgacttctgcgcggatagtcttcgcggtagacttctgttttttcgcacttgttgtgctagtccggctgcacccttaggcgacttctgcgcggatagtcttcgcggtagacttctgttttttcgcacttgttgtgctagtccgg

SEQ ID NO: 102398 - DNA, 809 bp, Zea Mays
atatatcattagcttattttagcgagatcgtagaaaattgaactctatgatatatatgtcatatcttaatagtatatgtcatgagctccatatatcgccagttgaacacatacatatctcagcggaatattttagagagtgcttgactgatataacatgacttcaattttacaacatctagtgaaaaggtctggctttgaaaatggtaagagcaaaggtttataggacttgcataactagtagaaaaaacaggctgtagtctcggtttttcagtcaggactacaaaaccaagattagacctttagtcttggtctagagaatctagactaaaggctctgaggctaaaaaatgttcatgcccatgtggctcgtgagacttggacccaagaccaattactaaatatagggaaattagaaaaattaattaaactctacgatatctatatcctatcttaatagtataattgaggagctccatatatcgaggttgaatacacacacatctttgtggaatactagagtgcttgaataatctaacatgacttcaattataacatctatagaaaatggttggtctagaaaatggtaagagcaaaggttgatcgggcttacgttactagctagtatgaaaatgtggttaatcctttagttctgctcgggagaaaaaccggaaataaaaggtcttccaaggctaaaaaaaatccctcggcacccctatgactcgagtgccccataccttatgcattgcctcactcgtagctttgcacccacctacacaactcatgcatcattggatggatgctttccttt

SEQ ID NO: 102399 - DNA, 738 bp, Zea Mays
cgcaaacgatcgcgccgagcgagccatccagccgcacctgccgaggggaagaaaagaaagaaaagacttcgacggtcatcaggcttggaactagatgctgatcctacaacctcaatcctcggcggtggcccatcgagcaccaacctcgaggatgacattggaggttgtgacagtgtcagagttggtggttgtgtgcttgatgaggatgaagaggaggaagaggtccctttgattcgcaagaacaaccgcagcaggagcagtgacatcctaatgcagactttatcaggacttgttagtctccaggggttgataatgtctgccattgaccatgcattagaggaaattatccctgaagaccttttatcagagcctcctgaggttgaaagttctgtcgtccgtacagaggtcccgaatgatgtccctttggctggtgatcctgtcaggcaagagataactcgggcagtttctcacgctttgtcgatgttggagggtggtatagttcacgagaacatacaggctcttgacgttgccgctaaggtcacccaactccgatgggtatgatcgaggctgcttcagcttctagtgtgccgctaaggataatctagcccccgagggtggtcctgaggacgacccagcccccaagggtgctgagcttggttcctctttagctgcttccatggatgttcacgttggatcgcccccagttcaatctgaggaacctatggtgacgaatgtgcc

SEQ ID NO: 102400 - DNA, 646 bp, Zea Mays
atctgttgtttataattttcaggtatatgatatgactgatattttctgtcgcgcgcatagtgaatgctttttatggtggtctacatggatatcatatgcgacaaaacattagataccaccctttgacaatttcttttgtaccatttgttggttgttttagcatgaactaggaaccgtcaactttgtagtcctacatagaggccactagaataataagtggacgctgcttttccagtggaaaacaagtcatggatcagtgcaaattgtaccctggagctgctttcagatgtcatacgctgttttcagcaatagtgaaactaattcgcagtatctcgttccagaaattgattgcgacgactacggatcatacgttctgctttgcatctcagcttcgtactaacaatagcgactggtgccggacttgaaaagacattgcctgataaatgacacccgcccatctacctcaaataaaagaaaaactttgcatgcaccaacagatcagatgttgctatccaataatttggggaagtgaaatcatgctacgagagagtctgctgctaaggtacagtagcaagatatcttaacactgaagttgttctataccttactgttagcatccaaataaagttttgcccatgtttgtcat

SEQ ID NO: 102401 - DNA, 511 bp, Zea Mays
ctccaagactccattaggccaacatagttgaaggcagactaaaggtcaattagtctagacctctcaccaaaaccaaaaagaaaagggtgagctagtccgtcatctggcttagttgatatatgagcatgtactattcttcacctttgtattcactaatctgtcatacacaaaaaggacatatgaaattaggcatatgtggttcgaacctctataaatcacttgtgtgctagtagctatagtgggaccccagatctagcgagcctccagcctatggccctcactctctaactctacaaacttctcatgtacctatgttaccctggtatcgttaatttgttacgcgatgatatttggcaagctaggttggtgctctttgctatgtcatgctgctatggtctcacttgcactcccacatgatggagtaattgcctctaacaccgtctctatcaactctgatcacgagtcgtggcatagacaacatcacaatcctactcagtcttatcctacgttg

SEQ ID NO: 102402 - DNA, 401 bp, Zea Mays
cgacagtcgtccaaggatccgaggacgacatgctagacatccctgggtccgaaggtatcgagacacttggacaagctatcaagaattttatcctttggcctcgaagggatgtcgaattggttgatccaccacgacagccgtcgtcacaggcccaaccgtctccgccttctcaaattgctgttcctattgtacatccatcatcacctcctcaaacttcacatgctgctcctcatcctctttctgaccctccttctcctcatcctcatggtggcccaccgtctccgccacatacatcacccttcagggatccaccttctccacagccatcaagggatccacgaccatcaaagaaatctaaagtttctataccaaaattagtgtccccgttcgagaagaaaaag

SEQ ID NO: 102403 - DNA, 1542 bp, Zea Mays
ccgggagacccacgacactggggatggcacggtgactgctcgcaacgctcgtaggctcgcgccgggtgcatggctgtttgcaggtcgtaaggttcccgatgctcgacattgacccgagtatgcttcggtagaccccaatgaagaggccggcctttgactagcaagagattcaatgtgtggcacactagcgcgttaaagcgctcttgatagtcttagatcgtgacatggaaggggagcctcaccaattcaatgagacgtttgtttggatggtcgggctgaaccacatatgataaagatccttgaatcgctcccatgatggcatgaccttatcttgttccaagccatagtaccatgtctagatcgtgcctgcgaggtggtaggaaagtgagtcaaacccgattgaattgagtgtatgctgcctacggaagaattgctcgcaatggttgagccagtttaggggtcatccaaaccggcaggcgcggtggcaatgtctacagtggagggcgacaagatggcaattttccccgtgggggcaggccccccgcggggatggtggggcggggacccaaatcttaacgaggaggggacggggatgaattttcactcgcgggatctgatggtgacccaaattaggagtcggaccttctctcgcgcgtggcctatggaggtcgaatccaacaaatcgtctaagtgtgacctcgtataaagatacaaaattctcaaatcactaaccctaaccttcatttccttcactaggttgccgctcgtctatgtgacaagcctaatttatatgtccatacaataatatttatatcaacaattgatccccacgggattgggtccccagcggggacaaggacggggatgaaatcctcctcgttaagcattttggggtcagggcagggaataggtttcggggatcggggaagggacggggaacactcggccctgacctgccctgttgccatctctcatggcgcccgtgcggataagaaaggtagctcctacggaaagttgatagcgggggtggcgtggaggaaagttgatctggtggatggaaagaggaacggacagggcagcggtggctgttgcggtgtgcatgacggtggccggtggtgcggtggtagtggggatgacgtggaggaaagttgatcttgtggagggcggcacgatggtggcagctagaaggacgggaacgtcgtcgcctcataccttggcatcccgtaggaagaaccttggtgcattgcactcataggggacacttgctagtgctctagtgacgacatgtaggtgcagagattggccagctacatagcaatgtccgccaaggccttcgtagacacttgttagtgctctagtgacgacatgtaggtgcagagattgaccagctacatagcaatgtccgccaaggccttcgcagtggtgttggcggttggtggtggtgggattagcggctgcttcatgaagttatcgtcacttgacatctatgataccagattgataggttctagaatgcgtaagttgtatggataggagtaagtt

SEQ ID NO: 102404 - DNA, 617 bp, Zea Mays
cttgcgagcattatatttagttacaaaagggtaggatcgataacaaaaggtggtgcaatgcatacaatggttgaatctcagttagtttcgtgtggttgcatatatcattcctcgtcttttggtctgtggaatctttgattatgaatgatccttgtttgaacctattaaatgaaaggtaggattttaataatcttgtcaatcattatgtagtgaagtacaattatgcagtgtgtaaaaatatatgcacgtgcagttaacatgcttgatggatatgaggaacctatgtagaagcttacctctttggaggagattgaagaggaagctttctctttatctttatcagtgggagtttcctgcaagcgttaaatagcaatgggtgagcggtacatacatgtatttaaaaggtcactaaaatcacatgatgttggttgttgatatgtccttttatatataaatatgcaatataagaaatactccttccgtcccaaaacatagttctttctagctcattttttccgtcaacattcatttaatgataatgaatatagacatatatgcaaaatacattcatgtattacttgatgaatgcatcattagtctaaaatgaattatatttt

SEQ ID NO: 102405 - DNA, 438 bp, Zea Mays
tgggtgtatatatgtatgtccactttattttgtaggatagaagatgcctttaaagcatagataggtttgggccggaaagaatagggtaaggaaatattccatccaagatggtggatcttgattcctttgaagatctggcttgaatcttatccttccttgattttatgaggtcgatcatcttcaatcttcgttcttgaagttgttatccgaatttgggacatgtattgaaggcagattcttaggtaaacaaaataggttaataggtggttatgagttaaataagtttaagcatagtctgtcttgttgttttgctcctagattggttggataagttatgtaacctgttatatcggtcaagtttggtgttatcatcaaggataatgggtattggtgttaccataactagggacatagttgaggcaggtgtgggtacatggg

SEQ ID NO: 102406 - DNA, 412 bp, Zea Mays
aaaaccctatacttagtaagttataaagccccatagttgagccaatgtcactaaaatccagacttaaccccaaaaaggttaagtggggcacttttgcacttaagtccaaatctcaagttttggattgcaaattctcatataagtgacccaaataacttaaaatacttatttgacttggtttttgcactttagcccaaaagtggactaattttacacttaggtccctagggtttggtttcagggtttcccagggttccaattagggtttctgggatcccaggggtataaatgtgattcaactttattgttggggtcattttatgacttttaccctaaagcttttaggttttctcaacttaagttaagttttacccctttaatcactatttagggttaagtcctttaaccaggg

SEQ ID NO: 102407 - DNA, 315 bp, Zea Mays
gggtagacttgataagtgtagttttgttcgagctggtagctggtctattttgtttccatggattctagcggttttctgatatggaatgtgaggggccttaatgatcgtgctaagagagactcggttaagtctctagtttttgacatcaaaccttctattgtttgtctgcaagaaaccaagttgtgctccatctcagattttgttattctttcctttcttggtctaggctatagtaattttgtgtataaccctacgcatgggaccagggggttttcttgtggcattgtgtgatggatccctttccattggtgcctc

SEQ ID NO: 102408 - DNA, 351 bp, Zea Mays
tcgttttggccgggtgccgaaggcagtaatcattagctagtcctctttctttgtgtagttgccaaagatttcattgcacgtagtttcaatcatttctagccactcttggcatggctttttaaactctttctcaatcttgaaacagtaggggagccgaacaagttcgtgctttttgctcccatccttcttcttgggcatcccccagccactagaggtcgggaatactttgtttgccaagaattcctgcaccagatccctagtgctgacttcggccgctaccactctaaactccacttcggctacttggcatggggagccaagctgcatatggcacaagggccttgtcattcc

SEQ ID NO: 102409 - DNA, 401 bp, Zea Mays
gtctcatacctgccctttaaaatcacctctcttccgtcttattctgagagctatactttacctatctttaccttggtcgtatgctcttctttggcttgcgagtttgtgacttcgtcctttgttgtgcttttgtttgttattgcccccatctatcccatctctcgatcttaccttggtgattaccctatgcccgttctctgaaatctccaatccctatcccaattggagagaggtgttttgcttatctcgcccttggcaatgtcctcttcttcaccgcatgcaggccttgacgtaactccattccttgtgtactcataccactagctcttcagttgccttcatcttttctctcatacccttgtcagtcatcgcctatgacccttgcaatatctatgtcttcc

SEQ ID NO: 102410 - DNA, 437 bp, Zea Mays
tatccgtctgtgctatgctctaggttgggattagttctgacctgcaaatttggcccccttgctgttaacttccgtcttgtatgaggtcaaaagaaagggaataagggatgctatcagacgacgtgaaatcgttgctcagggctgtctgtatgattgtagattaatagcacaaatactaatataaatttctctacaaaattgtaagtttgttttgatcatgattttcatggatgttctggtgtaaatttagtcttgatcccatgtagcagcagcacagaaaggaaggatctgatgctgttatctttgtttgctccgcgtagtgctctcactgctatgcaagtggtttcactgtgtccccttcggcctgttgcgtctgtctttctcctcttcacttcttcaagccttgtcccttcctgatttgacaattttgttttaat

SEQ ID NO: 102411 - DNA, 326 bp, Zea Mays
gtttatactcctatagttcatctacaaatttgatatggtgatccatagctaaattcgcctgaattccaaactacggaggctcaaatttggcatcgaacacaaatttagactctggattttatactaagtctgaaactcagaaataaacattacatttttgagccactgtttctcccagttccatgtagctttaggggtatgacctttaaccaaacttttacaccaatatatggtattccactttggtacataaactttaacccatagctgtatgtatcagccaccaacatgcttccaaagtctgaaactccacaagtattacaacc

SEQ ID NO: 102412 - DNA, 603 bp, Zea Mays
gattaagccaatgtaatgtgacttcactaagaatcgaccatttgctgacagcttccatcgaaatccatcttgttcctctgatagaactatattagcaagtcgtagaattagatcgttccacgctactaatttatgtcctatcagatctctatgccaagacaaatttaaaggtaaagtgctgaagacatcagccacactcacagtcacatgtttatgtcttacgatatggtacaaacaaggttattggtcctgaagggttgatgtacccaaccagatgtcctcctagaacctaacttgagaaccatttcttatagtgaaagtcccaaacctaaaaaagtcttgtttcactttcattaacccggcccaaaaattggaatcccctgatctccaataggcttgggagagtggttttgcattcaagtatttgttgcggatcagttgttgccaagttccatcagttgtcaaaagtctataaagccatttgcttagtaaagccttgttttgaatatctaggtccctgattcctaagcctccttgatctttgggctggcacagaatgctccattttgctagactgtatttctccttctcttcttgttgcca

SEQ ID NO: 102413 - DNA, 416 bp, Zea Mays
ctgaatcatgagcttctctcaaaataagttggcgcaagtgctcgatttcgggtacacagattctcttcttaaaccatactgtgccttgttcatcttccgtgaaatctggggctttacccaaaccaatcaaagttttaatttccttaatcttctcatcagattcttgtcctttacgaatctcttcttctaaagtagattcgacttccatcaccgttgcttctacattattgagcaatccaaggttgagtcgttctatttcccagcacaattcttgtgacatcaaatgagtagtgatgttattcacttgacccttatggctcaaagcatcagctactacatttgcttttccggggtgatattgtatctccaaatcatagtctttaatcaactcaagccatcttctctgtctgaggttg

SEQ ID NO: 102414 - DNA, 357 bp, Zea Mays
ttgcaatatggtctctggaatacgcgctgaggaaaaaaaatagtaaaactcaccggagatcccgtgcgccagccaccgattgatgtggaagcccgagcttagcgagggagcggcgacgttcgatcaccatcactcacgtccatggaacttgaatcaccaccgacgtgaattcccgacggcgactctcccttactctatctctctcttctgcgcaatccttgctcccacggacgcccgtggtctgccaatggtggtggtcgcgagaggcggaaagagggtagaaaggagattttgggccgtggcttcttaaataggcggtagtcggatcgagcgcagaaaccacccgcgcgactccgc

SEQ ID NO: 102415 - DNA, 518 bp, Zea Mays
ggttgcaaggcaccaactgattttaagtggcttgcctttatcctctgacatgtgtcacattccgatacatattgggctatctcccttttcatcctggtccaccaatacagggtcttcagatcatggtacatcttggtgcttcccgggtgtatggagaatctggagagatgagcctcatccaagattctcttcttgaggtctctatttttaggaaccaccaatctgtctttaaaccatagtattcccttgttgtcttggcaaaagcacttatacttctccactttctgattaagattccctttgatgatttgcgctcccttgtcaccgagttgggccataataatctggtctaacaaggttggttcaatggagatgtaagacaaggtaccagaaggaatcacttcgttcctcatcttactcaactcatcacacagggcattgatgcgagaatccatcaccatacaattgcattgtgactttctacttaaggcatctgcaaccacattggcattccccgg

SEQ ID NO: 102416 - DNA, 502 bp, Zea Mays
ctttatgtcagctgaagatgaagatgaagaagaagaatattttgatgatcgtgagcagtttgccccgcctccccaccaaggggatccgggtcaatcctcttcatatcctcctccccatgatccttcaggcagctatcctcccccagctcagcctggggaagaaaactttgcggctaacttggcaactcaattctttggtccgcctcctcctcattggtgatttgtggctgatggttctctccttttttggtgctagttgccaaaaagggggagaaggattctcatcttggcaacgcttttaatttttgtaatgaacaccttgtctgtaataattttatttgcctgactattgtgatgcatgtggtgatggcctagagacacaaacttcttaatgatgtgatgaccttattgtaatagccagtaccatttcatatcttatgctatacaatgatggacttgtttgtgtaatgctattctttttatcatcacatcttatataatt

SEQ ID NO: 102417 - DNA, 923 bp, Zea Mays
ggcagggtcgcattagggttgttgggttttgggtttctttttgtgatactgaagatcggttgctgctcaggttccaacgtccgggcctgcgcaagcaacccccgctgatgttgatactagtattttggcggcttcgaatgcaacaccctttaatggaaatgtgtctgagggttctgaaactgagtcgtggtcctcgtacggggatgattttgggagccctctttcatggattgaggagtcttagactacttcgctgcgttggatttggccgcatcggagtccccatcgcaatctgatgagcgcgaagagtctgctcccctggccagggcgatagccaaagatcaccacaggcgaaaagtggtgtcgaagcacaacgttggtgggatgtcacgaagtgggagacgtcgtcggatgggtatggagcgatcccgtcttcgactagatcagggtagtcaacgcgatctattgtcctcgacgtccgggacgtatattggggagggggacttgtggaatctatttgagggcgaagagttgaggatgatgttgtttaattttcgagaggcgggtcttattccgaaggcggagccgatgtaacattgttgttgtccacgctctcgtgttgtgatagtgagtgaaaacgctgccctcccccgcttcgcaatagagagggagggtgacaaaatatgatttgtattattcgtgcgatgtggccgatgggcctttcgttttatgtatgtaaactacgatggcatatcgcgtgctgcatttattgcgagattgtttcgatttgtaatcgtgttggcacgacactttggtgggataaagacttcacttcctacgggtgatgtcgtgcgcttcttgcgcatgcccggctgcacccttaggtggcttttgctcggacgtgttttatagtaaagacttcg

SEQ ID NO: 102418 - DNA, 657 bp, Zea Mays
tgccgagcccccaacgcagccgttttacgaatggtcgacggtgcggaccagagttcacacgccaccgcgagattctctctctctctcccgattggtgaatatgaggcggccatatctcgataggatggccaagaggggggaagaacatgggttttatatcaccatggccgagagttcggatgaggacgagcctggaaggattcatgcggccatcggtgttttgttgggatacggcgggggtttgttcagaggatagagatggtactaacgtggcgaccccacaagtcagtggttgaaggaggacaaggatgcacacggtgagcagctgcccaatgggacgcacacgtcaatgtattaggtgcgtaagaagctgctggtgtgcgcacagattctagattgagaggccgacatgcgggccccgcacaccagtgagagaagcagagcacggtgctagttgggtcaatagaattagtacatgggccgatggcttcaaattgtgcccaagcagcaagtattgatctttttcttttattctttttatttctctggctttattttcctatttttcggaattgaaaattttcaaatttagtccgagttgggtttccaaattcaaattaaattcacaattcaaaatctagcatgatatgtaatata

SEQ ID NO: 102419 - DNA, 608 bp, Zea Mays
gtaggggccggtacggaaggccaatgcctcctgccttgtttaaaccctagctaccacattctcttgggttccgatcacgctagcataccggtgaccgaaaacgttgctgtcgatggcatccatggagcctatttccccaccagaacaaggaccgaggagcccctgatatttccactaaccatgaacacatgaataggagaacaaccctggaggaacatagggaggcgggactcatgccatgggcaccataacgatgaccaacattgccatctccttcagataggaaggtatgtagcacatcaccagttaagattacccataggactattatcgaggtagagttcgaattagcattctaagcacttaagacgatctagacatatatacatgacacttcttcccctaaaagtatatatgcactttttatcaatctagtatgagatgggttcatgttgtgttcccctaaaagtaaatagttgtctacatatgtttaaatgtttggacaattggttcgcatattgtttagtttatagtcagtacattaaaagattgacatatctaaacagtcacacttataaaaaagtttaaccaatggcattaaaagggtg

SEQ ID NO: 102420 - DNA, 359 bp, Zea Mays
ttggacttgagcttgctgaaaagctcgtccatagtgagtctcatagttgggcaactcgatgatcgttgagacctgcacatccaaaacccttcgatctagagcacgtaataacttgagtgatctcccatgatcatcatagggcagttgtgccttgtttgcgcgcatcttgttcacaattaactagaatcgagagaacatggtgtcaatcgtctctctagccaactggacgaagttcttgtactctctctggtatgtctcaaagagtctagtctttacgtgatcattgccctcatggaatttcttgagggtggaacatatctcatgagtcgtacccaaatgtccaactcgctcaaactcag

SEQ ID NO: 102421 - DNA, 550 bp, Zea Mays
gtgccatgggccatggcgtcgctttggagagcctgaagccggtacagtgcgttcatgcactgaacagtgatcctcccaacttggtcgagatacatagcccacacgtccttcacatggttcacacggttgcaccacatggggtcatccctcttctcagcggggaagagtcctagtgggtgcatcaccatctccaagggatggtagccacagaaagtcatcagagtcttcatagctgccgcctcggtggtgtcgtccgacctaaatccaatagtctcgaagtcaagggaacgccaacccagctgtagggggtgagcctccagagtcagccaggctcggcaacgtggtacccgatgctcctcgtacagctgcactgtgtacaaaggggcatagggtaaccgacggagttgagcacctcccacaagatggaagggaaaccttcgtacgaaaggaaatcggaactgaaatgagtgtctcctccattggagggggtgggtgaagtcatctgtggaagaggatcatatgtaaaggttacggtagtggaaaggaaaaa

SEQ ID NO: 102422 - DNA, 691 bp, Zea Mays
gaataaggtgatgatgaatcaacttattctattctccaaacctctgtttacaaatcgtccgactaatcacgattaatcgcgattagtcgggctggtcgcctgtaagtggccgaccagggggacgacacgatttgtttttctggtcgtcctattcgtcgattaggcgtccaaatcgtccgattagccatctctggtcgaccagtgtgcggcgggctaggtgtactattgggcatcaccgtttttttcgcctagtagccgcataaatctgttggcaccccaaaaccctaaagcctcccctgtgcctgcgcccctctcctaaactttctgtcctctgccggcggcggctgctccagcctccagggctctccaccatctaccagctctggcgtctccagcagtccagctcatccttgaaggtcgtccctgccccctgctcatctacaaggcacaagatgagctcgtcatccgaaggtcatccctgctcccctccttcccccttgtctgcagttttgcattctgcgcagcagtacccatttgtctgcagttttgcagtctgccctgctcatatagtgttctatacttctacgttctattgccttacttcaatagttcttagcttcatagcagcgaccagtttatcccaccagtccagcagcaccaatgatcttattcttaccagttccaaacttcc

SEQ ID NO: 102423 - DNA, 678 bp, Zea Mays
gaagcgggttgtgaagtcagctaactcaccagtgctgctatcccagagggtcaccggatctgccaagactgctcggcccacactgtgagcgatctgcccgtccagctcttccttggtaagcctgaccgccttgttgtagaaggcatcctcctgtaactggatcgtggctgctccgttgctgtttgactcagtgaagttcagcttgaaggacagagaactgacaccggtgatattgcaaaacacgattaagtggaggagagccaaaaaccaagtagttgtgctccttgatctcatggttggtggtgagaaaactggagagagagagggagaagggaggaaggagaggcaaggagctgaaaaggattttcctatgcttgcttatgtaaatagtaactatgaactctcaacttggtcagttgtcctttactgcacagttcacacacaggcgcttcttgttattttgtctatcagttaggcgcacggccggcctgtcaatagggcatgggccttgaaaggacagatgtaggcgacacgagaagtagctcagatttggagtttatgttgattgtatcagaggtcgatgtaaaataatgggatgatgttgaactatggattagaattttcccgtaggacggaggatgctgaagatgctgtgtttgtatcgccggcattgccggc

SEQ ID NO: 102424 - DNA, 702 bp, Zea Mays
gttctatgcgagacggggaagtatatgtattgtgcaaaatgaagtttcaatctgtatagttaatattggattggcttgtatagagaggtggtgacatgccaaagtagtcatcactttctctatatttataagtcgagtcgtgacgatgcgtattatgtgtttgttaaattatgcttcgcatatagtgtatgtttgtgctcacaatttcgagtagacacttcaagtaagtcaagtaggtttgtgatacaagtgtgtaatggagttagttgttttaggataattattaaaatactcggtttgtatgataaacatgtatgcgttcatgaattgggaagtaaatgcatggtgattgtgagttggagattagtggtttacggttcgtatgatttggtcgaagtgcgaatatacgcgtaaatacgtatgtttataaaaatgttgtagtgtatgttgtgtctcggattgcgataataatgggctagccgacgtgtatgttatttagcagctatgtcgttgctctagttagccaaattgttagatggtttagttaagctcgtaatcacgatgaattgcttgttgtggtctaaatgcgtatggttatggtcgcggataaaaaatagtaatgttcatgtgatgtccaagttaaaatgcaaattattgggtgaaatgcgcttcgatatacatgtatactggatttgattatcg

SEQ ID NO: 102425 - DNA, 290 bp, Zea Mays
aaagcctgtcgttatgtgtcatcatgtcttgcagtggttcattcggtgtccttcattgactcccctgtgatggagtggttgagccgatggcagacgccatgccatgacaaatgaggcctataaaatgacataccaacccttgtgtcatcattcgtgtcacacgcctatgttagaatctaactcgtacgttcccacgctcggagtgttcatcgttgaacaaccccacaaatttcagatatacgcaatcgggcgaactatccgacctctaggttgtgcaaggcggagttttg

SEQ ID NO: 102426 - DNA, 462 bp, Zea Mays
tggtaaccatcgccggccatggcctccgtcgtgcggcgcggcgccactggttctgggtttgctgagaggggaggagagattgtgtgcttggctgggccgttggatgttgggctgacggctgggatcgaaggggggctgaaacgatttggttgaggtagtaatgaccgtagagatcgggatgggtggatgcgattgattgaggcgtgggcaactaccaaccgtagatcgtggatcggtcggtcagcagtgtgtaccggttcagaagggttggatctaatctgatccgttgattggtgatccaacaaccgagatccatccaaattccttaacagtgcgcggtttacaaaagagaccttcgggtttacaatatttaacccgccgtccacccagttcatagaaaataactgttgggtcctcggtttttacaaaacaacccttggtatttgcaaaaaggtccctggt

SEQ ID NO: 102427 - DNA, 541 bp, Zea Mays
ctctagagttggttcctcctctaacccctcaccttctaggtttgctttgtcttctttgttgtctatcactgaggagcaggtggagagcctcggggatgaggagctggcgcttgtgtccagtcgattcatgtggttccataacaattgctagaaccgatggcgtggtgagtcaaaggatggatgcttcaactgcaccgaccccgaccacttcgtcgccagttgccccaagaagggcaagtaggagcctagcccgcgtgaccatcactctagtcagcgcaagggcaaacaagagcacactctagcaagcacaagtctagggggaggttcgacaaggaggcgctaaagaagaagtgcctctagaaggcaaagatcaaggagtgtgccttcctcgcctccctgagtgaccttgaccacaactctgatgagttggcctcttcttcaagcgatgaggagctcgagacacacattgaggagaagctcaatggactctgcttcctcgccaacactgcaggcagcctttgcaccatggccctcggagatg

SEQ ID NO: 102428 - DNA, 443 bp, Zea Mays
acggaggtctccgcctcgcgtgagcccacctcggttaagcaagacaaacctagggcgagacttagctgaagtccaccggggacaacaacattcaatgtgcatacctaccccatgcagggttgcaggtgtacaggagcaacaagatcgcaatcctgtcaagcttcaccaactatgattacgcatgcgaccactgtttgcatgtcgtctaccaactcccgatgggacgtacaatacgacaagagtacatgcctcacagtattgagccaactccagtactccaggcagcccctgataaggctataaataggatagtttgcggcatcaggagggcgagcgaacacttcacggttttctgctccattacgatattggcactagcttcaatcaaccctagagacttgggattcttccatctccccctcagcttgtattccctactgcaa

SEQ ID NO: 102429 - DNA, 608 bp, Zea Mays
gacattgacgttaacgtcaacaatgtgtctgtgctgcacgcccaagtggtagccatactcaatgtgtgtgcctcggtgtcaactacagtcgacctcatcaggtcgtcctcctccaaattgttttgtcgcctcctcgcccgcgagtaggccctcgccgattatgacctatgcgaggcggcattctctgtcgttaaccaccgggttcgcagggaccttcatgtgctctcatggatctacggctctgtctcctctgagctcttcgatatcgtcagttcgtcaccacctccaccctgtccgcccacaccgcatggctcgctctcgaggagcagtaagtcgttaatcgacaatcgcgaaactcaggtcctcctcgttgacatcgaattatgcaccctatcgcagggcatcctttcccgctcacggactcccatgtcgaacttggtgagcggactccctcgtcgaatttgatgagcccatctccgaccgcctcctcgttaccaatgtcctccgtgacctcaacgaccgtttcgctcacactgcccctacctcaagcgccagctgcagctaccctccttcgccgaggttcactccgagatccaactcgagaagct

SEQ ID NO: 102430 - DNA, 745 bp, Zea Mays
cttgttttagcatgccccatcaatgtacaatgcggaggtatttaaggtaaccgggtaggtgggtgtgtcctcctaagtacagttatgcccccagttacatgctacagctttggaatattcccccttacgaggtcattacagcgatgttaagtgcagcctgatcaaatacaccgcaaaacctaccctaaggaggggcttacaaatgggcctgaacgaaagcagaacacagcctgggccccaccgttgggcagtgcggtcctcgctcgcgcgtggcacccttcgcactatggtgccaagtcttcgatcttgccgagactatcgctcgaagctatccgagctggcggggtcgccttcgtgaagccatgaggagccccctgttttaaatggtacatcccttctcttttatgccatcggcggttatgaccgaagacctcgaacccgatgccggtcgaagtaccctctgctccctgtatctacgatagtatctgtccaactgatgttaaagaaaactgatcgaggggaacagacagccttcacaccaacactctttatggtttttgttcttgcaaggttgattcaatcgatgaagttcaggttcctcgttgtgatgcaatcgatggggaagttcatgttcgttgtttgaatcacgcgtcacggtctcacttgattccaatctcactatgtccagaaagtcatctggatctccaatttcaacatgactagtactagtggtactagattgatg

SEQ ID NO: 102431 - DNA, 638 bp, Zea Mays
gacggatgggagaaggaggacgcaccgacgaggatccagaggttgaagcaccgccaccaagccaagacatagttaggactccactttgtagcccttagctccacctcctccacaacaagggacttgggagcctctcctccctctttcgcccacttgtaacccctactacgagcattgatcagtaaaggtgtcggcagtgcaagccaccgaagactggatttagggaggttctgcccgaaccagtataaatcttgcgcccaccacgcacaccatccggagcccagaatgcacacacaaatttacttgtcgaaactaggttcgaaacaccgacaacttgcttaatttagttacttgctatccaactttatttattctcaagatttagcaactcgatagacactctcaaaaagcagctgacggtgattttttcgtacatgtgtgcttatttttttcttttttctgcccaacgaggtagccaggttcaacgtgctcttttccccttttttgcaaagcaaggcaactaggtccggcgcgcgtaacagaagcttctcctccactatcgtccacaggttgcatcgccggaccgccgctcaccaacaagtggtgccaacaggccttctcctccgcccttaacgtcc

SEQ ID NO: 102432 - DNA, 1459 bp, Zea Mays
caaaaggagctgtaaccgggttagagtaatcatcaaggaagtcgaaggccgctggtgtgggtggattggaatcctcagaaaagggaaacaaggtttcataaaaaaccacatgacgggagataatggtgcgattggattggcgatcaaagcataggtagcctttgtggtggggggaatagccaaggaagacacaaagggttgagcgaggggataatttatgtggagtggtggcagaaaggttggggttgcatttgcagccaaaaacgcgaaggtgctcataggatgggttgcagccgaagagagcaaagtgtggtgtagagagtgcgagtgttttggtgggtaatatgttgaggagatatgttgcggtgccaagagctgcagcccaaaaactggggggaacactagattgaatgaggagggtgcgaatgatattgttgatggaacggatgacacgttcagccttaccattttgagctgaagtgtaggggcaagacatgcgtagatggactccatgggaggagaaaaaggtgtgggcttgaaggttgtcaaattcgtgaccattgtcgcactagatgctctggatagtgacaccgaactgtgtacggacgtaggcaaagaaattggttagggtggagagagtgtcaaatttgaggcgtaaaggaaatgtccataaatagtgggagcagtcatccaaaataacaaggtagtatttgtggccagacacactagtgatgggtgatgtccagagatcacagtgaattaactgaaaattacgggtggcgcgggaggaagaggtaggaaatggtagacggacatgtcgtccgagttgacaagcatgacatggatgagtactagtatttttattacaagaaattgcggatgattgcactaaatgagataaaacggcgtgaccgggatgtccaagtcgttggtgccatatggtagatgcaagaagagcagaggtcgggaaccgtagggggtatagtggaccagagctgttacatctgaagatctcacaccgagtgggtagatccttcacagagcagccaaaaggatcaaattcaacagagcaattattatcagtggtaaactgacggacagaaatcaaatccttaatgagggagggggaaactaaaacattgtgaagagaaagattatagggaagacgagtggtgccaatggaggtgacatggatgagatgaccgttgccaacgataatatgggtaggaagatgctgggaagaggagggatgagatattataccagcgtcagatgtcatgtgactggaggcaccaatatcaaaatgccactcttgttgaggcggttgctgaagagtgatagtttggaagttggtagcgagggtgtgttgatcccagacgggtgcgggcgtagaaggatcggcgtaggcagggggcggcccatatgctgcagtgggaactgcccactggccaagagctcc

SEQ ID NO: 102433 - DNA, 441 bp, Zea Mays
taacgatactcttcttacagggttgtcatagattacggtgaatacagtggaacctgtctcgatatttatgaatctttctcagaggggaagtgtcttgagaatgtgttcatgcagtgctttattgagtgtattcgtgatgattccaaaaatcgtcgtcgaactatgtcttctaacagattaatacttgatgtcaatgttggggtatgttcttcttcacaattattgtaattattcactgaatatactgacacactctctatattgtttctaggctctgctaaattttgaagagcaggaacgtcatagtaagaatcctcagccgtttgaccaaaatgtgttacagaattgcttacataacacactgcattcgttggtaaatctggataaatgcaaatcagtatgcttcagtattcttttttcacatgtacattagtatatttc

SEQ ID NO: 102434 - DNA, 523 bp, Zea Mays
gattaggaaagcatgggtatccatatgtatagtcattttattatgtaagacgaaagatgggttggttagggcaagaatatcctggtgtaagaaagtttatggtgagaaaaaactccttgttgggtggtaatgcatctaaagatcgagtttgacttctctccttccttgacgaggttgatcttgtccttttccagtcttgctctttggtgtctccatccgggtttgggataagaggctaagatagatctgttatgtaggtcaagttgttgggtatggccgagttgatctaggtcaccagtttaagcttaagtggatttggagtatggctttatcctttgtaccagcattaagtaacttactctagattagatcataatagattagatagaatctagattaggttggtacgactagattaaactagttaagatctcattattttggattaggtcctagtggttactttaggatcagataaatatagtggttaggataaaacaaatctttcattataagatggatc

SEQ ID NO: 102435 - DNA, 373 bp, Zea Mays
acttggctgctgtagtaaagtctgccggtgaacgtcgcgacccatctgtgaagggcgggcggaacagagccgcgacgtgagctgtacccggagccacaccgtcgtgagggcgacgaggagggtcagaagtgtcgtagcagagactgtgaaggcgagtcgtcgactcggggaatccaaatagctggcggatctgactggcagtaattgtgacatcctctcgctcaaagtggaacctcatccagtgatgatccgggtcaatccaaacagatgcgtaaaagactcgtacccactcctcaacatacctgccgctgatagtcagaagggtctgaaggccaggcagataggtgagatgcgcctcagagtcagcaccggc

SEQ ID NO: 102436 - DNA, 393 bp, Zea Mays
gcgtccggggcagtccggttacgaagtccatgcctatttcttcccacttccattcaggtatcgggaggggttgtaataggcctgcaggtttttggtgttcggccttcgtccgttggcagatgtcacatcgggccacatactgagctatttctttcttcatccccttccaccagtatctggttttgaggtctaggtacatcttggtagttcctgggtggatggagtaggccgagtcatgagcttccttgagtaggacttctcgggcctccccttttggtacacacagacggtatttgaaccaaaggactccttggtcatctgtcctaaggtccgggagttgttccttgcgggctttctccacaagtcttgctgtctctgagtctagacattgag

SEQ ID NO: 102437 - DNA, 472 bp, Zea Mays
cgagcccacgtccccacaagttgacgagatcagtggatcacaattagtagatacactcggtcactttggcctctaggccttgcggcagccaggcacccacgtcacgcccagacatgttaatgggctgactggtgttgggcctgtaactgcgatagcccggcactgtagtcgggtacccgctaaccgggtacccgtatccgacccggacttctcgggtattttccgggtagtagtcatcccgtatcctacccgtatccggctaatgtctaaccgggtactatccgtatccgacccgtatacaaaaatacccgtatccggtacccgaaaaatcgggtatttctagtatccgtatccggtacccgccgggtaatcctgtcatgttttcacccctatgatcgggcgactcacgataggaataggatggcgctaaatctagaccgcaggatcggaatcggatggatccggcttcata

SEQ ID NO: 102438 - DNA, 297 bp, Zea Mays
cgcaaacgacacacgtgaatggcgcgcgcgctcgaaaacggcatgtgcgacacacgcgaaatcggcacgcgtaacacgcaagaataactaactaacatccagtgccgcgacaaactagctaattagttacaacacgcgtcgcgaccaagtaatattactagcactaaattgatgttgatacgaagatgacgcgactgaaacgaatcaaaatggatttatgacgcataacccattgaataatcgacaatttgcagactataaacagcataatatacacgatctgctaaacacacatcg

SEQ ID NO: 102439 - DNA, 592 bp, Zea Mays
tgtcgagctgcaggacatcattcgtgagcgcggtggcacaacttgtcaggcctaggttaccattaaggagcactttctcggcaatcatgaagcccgtgtgctccacctcgatgttgtcttttggacttccatccagggggacttcttcgtcaatgagtactaccgcttgatgaacagcatgacaacctccctatgtgacctcgaggaacctatcttcgattgcacactcgtcctcaacctcctccgtggccccaacgagtgctacgatcacctctccacgtggatcactcgttcggggccattcccatgctttcacaaggtctgcaatgaactcatccttaaggagctcggtaaggggccgcttccacgctccaatgtcgcaactcctctctacaccacccttgggggctagacctcgtgctcaccctcctccacccacaccttggggtgctcatcctcgcactcgtttgtccctcccacctttggttccacgcgtcgtcccacccgcctgcgactaggggaggtgcggagtctgggggtggtggtggtcattatcggtggaagggcgaccgtggtggtggtggcccggagg

SEQ ID NO: 102440 - DNA, 923 bp, Zea Mays
caatttagaaggttgccgagtaacagatttgatgaactcttctctctacatagactgggaagcctcctgctcgccagaatgagaagaaataagactgggaaccaccccagctggagacatcagaatgtctgccacagccgcagtaggctcaaccaaactcaaattaggaacagaatgtgtaaaagttattgctgtgactggagacaccaaaccatctgccacatccccgataatgactgggccctgaccaacgtgatctgtcccatcagcagcaaaaccagtcgccgatgctggagaaatgatagcatctgctgcagccccaacattgccattctcaacgataccgtcaatcagctgtagcttttgatgtcttttcatggaataaactaacaaacttggcgacataagatgcttccttgttaaggaagactccatagggtgaatgttctgcaattcagattcaaccatgggaagacccactcccccggagaagacattaacgtcctgcaattcagattcagccatgggaattcgggatggagcatcagaaataataacagcttccgaacaagttccaccatccactggaataacctcttgacttaagactatcgggggagagccagtcaaagtatcttcagtaacgacagtagaactagtagcttccaaaaatgcatcatcaaccgcaaccgggagtggagacacaagagcagacgatgtcttaggaatccaaatagacacagatgacttcaacttcctcttgggaatccaaacttgcttcatcttcttgattgcacctttctcagcgttgaatacctccagggggcctagccgattaaggaccggtaggcgaggcatcctgactccttccttcacaaaggcctgcacgcgcggcccaagtcgctaatgaaccgacacccgag

SEQ ID NO: 102441 - DNA, 512 bp, Zea Mays
gccacaagtcaggagacgatctggtggcaccaagagcttctttcagatgcgcacttgatatggggtagagatcgtttctacaccggccttcaaacagtgtcctcttggtagcttgatccttaacaagaaaatgatttggataaaattcaaggtatgcatgatgatcagaagtaagacggtgcatagatataagatttttatcagtagtaggaacatgaagaacatgattaagtttcaaattggaattgggggtactaataatagcatgaccaatgtgactgatattcatacatgcaccgtttgctgcacggatttgatcttttcccttgtacttctctttcatggagagcttctcgagctcttcaatgatgtggtcggtggagccggtatctgtgtaccagtttgtgtccactccatatgaatgtgtcgcagtcgatgcactcctctgattgggataagactcctcatcgagcctgttgatgtgcatccgttgggtgaatgcccgatctttc

SEQ ID NO: 102442 - DNA, 338 bp, Zea Mays
gttcatttaccgtttcttaactgaatgccttaatcaattgctgtcctgttctaacaaatttggcgtcgaatggctgtagagtagggaatggaagttgtgttcacttggcaatgtgatcagaggagaataatttgtttaacatgattgctgaaacctcagctacgcttttacttgccacatatttgtttataattcagaatggctctggatgaaagccggtgttatgtcttttctaatagttctgtcaccgataagtagagtatgtccttgtttgtattgcttgtcccaacttttcattttctcagagaaaaatccagacattgaaaaatccaaccccc

SEQ ID NO: 102443 - DNA, 553 bp, Zea Mays
tgcgacttcccaaagtattggacatgggatgcctcagcccgatgttggaaatcgaggtctcgctgcacaaaaattggacgcatgtactatgtacatcctactgctggcgaactatactacttacgcatgctattgatgatagttaagggttcaacaagctacgctgatatcaggacgttcaatggtcaagtgtacgacacattttgtgatgcatgcgaggcgcgtgggttgcttgagagcgataatgagtggaagttgttgtttgacgaggcgatcatatctgcgtcgtcgtaccagctcaggtagctttttgtgaccgtggttatgttctaccctattggtaacgtgcgtgcattgtttgatacatactggctatcttttacagatgacattggccaacaacttagagatacattgggaaatcctaactacaacataccgcaggaacaactcatgtccctcctgatacgcaaactctcagatgcctttgctaaaagtggcgggaacataaatgactacgacctgccaaagatagatgtccaatgcgctttcg

SEQ ID NO: 102444 - DNA, 1029 bp, Zea Mays
gtgcactgatagagttgcctgcctttataaaaaaaatgtattattccattgtaccaacttggcaacttgcaggtcatggtattaggaaagagaagagagctctcaggagccaccaagtctcaatgtgaaaaggtgccatagtctgatccagcaaaaaaagctgttggcaaaggactagctccaatttttttctcagcccaagttcagatgggtttctgtaaaattccaatcatctatctttataatcatcttttcattttgttcccccaaatgaaattgatttcagagtacatagcaacagagaaagtagaaatgtcacattatgaatggaagtcaaaataacaacaaaaaaaactcaagtaaaggagaggattcaagtagacgggaatcatggtacaatttggtaaaaaacgaatccacactagaattcaataagaaagctagttttgcacattagtagttagcctcgcaggtcaagcacgcaaggaaaaagtaatgttagtgcgataagggaaataaaaggtgatgataagtggcatgcattgggaattttgtaatcatctactttagtgaaactgatatgcaacaaattaaccatacacatcttttaattgaataaacggctagtgcttaaccacctggacaaccatactttcatagggtgcctccaataaaataatgaataactgaggatgggaatatggttttttccttttccctttctgctccactttctattactcccaccccctaacgtgctccatccataaactctagtaatgtccattgagatgttactagaaaaatcaagttcacactaccaagaaaaaataaacccgaaaactacaatgagatgacacatcacttatgttagtggtgtacaggagacagataaaatgcatggcacatgtttctggcagatccacttatcagaaggaaaggtgttcccagttgcaaggggcagaacaggttcgaattcgtatccttgttttcaaataaaagatatatgagatgtgagaaacataacct

SEQ ID NO: 102445 - DNA, 323 bp, Zea Mays
agattatgtctaccagaaagtctcactaatgaagggtgtatctcgttttggggtaaaaggaaagcttgcaccccggtacattggcccttttcctatccttgaacagtgtggaccggtggcataccgactccaactactcgaaacattgtctgcagtgcacaatgtgttccatgtgtcccaattgaagaagtgtcttcgggttccagatcaaaccgttgaagtgacggatgttgccttagaaccatacttgacatattcagaacatcatatttgagtcctggatcagaaggacagggttacctaaaggagaactctcaaatttg

SEQ ID NO: 102446 - DNA, 474 bp, Zea Mays
gtgggattaggcaggggtgtgaggaagatgaacgtgcctggtctattgatgctttaccggatggtggagatcatgctgggaatacctcgtcgttctgttgaatcggaaccgtgggatgcggagtgaacgactgagatcatattgccagataccccttcgcgaataaatgtgagtcgtcgatccatgatcatgtgaatcccattagatctctgttattttaaatccatacccttgatatcagatctatgggccgctgctggatatcgttccagttgggtaccgatttaatcatggtcgtagaatcctgatcgggcggcccatatccaacgataccccttcactagcttcttttgcgattacgcccctcgacttttcctaaactaacctgcagtactgctcgggtatagctgtgtctgggaaaatgtatatcttggcccctgacctttctggaatttggcgcccggtccagtgaac

SEQ ID NO: 102447 - DNA, 318 bp, Zea Mays
atttcttcactggcttttgcaagtgcaaaattctcattagcttcggcgagctttttctgaaggtcttcaacctcgactttatgagcttcggcctgagcgttgtatttcgcttcatcttccttcactttactcaccaatgaaattaaaattttgtccttcaccaaggctttgtttctcagcttaattacctctaatcgaaggttgctgagagctatagtgcagctttcgtcttctgcattcttttgcgccctcagggcgttgctaaggattaagccctgtaagaaaaaagaaagaattagcacgaagatgaaaaacttc

SEQ ID NO: 102448 - DNA, 575 bp, Zea Mays
agttctaaaatcgattctagagactttcgaagggtgttctgggctgaagataaaccttgataaatcagaaattttcccgatccgttacccggaggagctgtggccaaatcttgtagaagtctttcccagtaaaatcgctaagttacccgggaaatacctgggtctcccccttcacttcagaaccgctaaaagaattgagctacaaccattagttgataaaatcaataaaagactcgcaggatggaaaggaaggcttctctcaaaggcaggtagagagacattagttaaatctgtgttatccgcgcaacctatttatcatctgacgatcttcccggctcaaaaatggctattgaaaaaaattgataagataagaagaagcttcctctggaaaggaagtaatccagaatcatgcaacgggggtcactgtctgatcaactggtctactacttgcttgccaaagtgcaaagggggattgggcattctagacctgaatcgttttgcgagagctctaagactaagatggctgtggtttcgatggaaggccaaagacaaagcatgggtgaatttgcagctgc

SEQ ID NO: 102449 - DNA, 607 bp, Zea Mays
tgtaggatacatttatatatacaacaaattagtccgaaatcaatcattttctttccaaaacaaccttctgtcatgtcattttgttccgcccaaattaccacaaatgttctatttacctttttgtgacacacgtactactaaatatccctgcgtttgggtcaacaacttaaatcatgtttcctatggatatcgttctctgactcagcaaactcaggggaatgggctggtagtgtggtaccagcaaagcaccttatcggaattcttgtacaatcatgcttggtgtgaaattgatgactactgatgaaactataaccaaacagaaggcagccggtaaatattagaagataagactgtgacagaatattccgctgaaattcagaagaataggactgtgacaggacaatgaattgatgatactgaggaaatggagcagccaacgggttgaattcaaccagtcatggtcgtattaaccgtcgaagcctccaatgctgaccagtgaggagataaagtgcatgcatgttctcgccacttgtcgatggggacaacatgacaaagacaagagatccaatcaactggaaacgaagagcaagaagagctagctacgaaa

SEQ ID NO: 102450 - DNA, 493 bp, Zea Mays
cagatttgtacacgtaatcatgtacaaaattcgccacacctcaaattttgtgcgtcctccgccactgctcgcccccacacctcgccctccatccacctccccaaatgacgtgccttcctggaattaaaaaggcagaagggaggccacacacgagaccaccaatcggacacacgcgagtacatccgacgcccaccatcagccaggtgatggtcgattacgagttcatcctgcgcaattctttcttagtgttgagtatgttgttctttttttctagacataggttacatgtttatttcagaaataagtttatgcaatgtgtttctgcaatgtgttgggttcagtcatacattggacagtcacaggtaggttacaggtttatttctaaaataagtatatttctgagacataggttacaagtttaccgatcctctccatgcaactggtctgttatgtttcattcgattttcagttatgtcatagtactaaactgcac

SEQ ID NO: 102451 - DNA, 347 bp, Zea Mays
tagtggagagtgccgactcttcgatacctcgggaaaaaaattggaggagtcttctaaactttgctttacattccgcacttaattcaagcactttacattgtgtatttgtttagcaagtatttgaagtattatcgtagcactattgtatttctagtattattatctttgtgctagttgttggggtgaagttgggctcttgcttagctcttgcttaggttttaattagtgttgatttttagaaaagcccaattcaccccctcttgggcatcgtgatcctttcaggaaccactgtgtcctatatggaaccaattcaagcaacaataaattggtattgaagcggttccgtt

SEQ ID NO: 102452 - DNA, 509 bp, Zea Mays
cgaatgctcatggatatcgtgttttcaacaataccactagtgttgtcgaaattgcggtagatgtgacatttgatgaatctaatggctcacaaggtcatgttgctaatgagttgacaggaaatgaagtaccaccctgtgaacccattatgaagctagccattggtgaagtgaggccacaagaaaaagatgaagatgaagaatttgtgacggaacctcctaagatattgggcccacctacagctgtccttgtcccaaggaatttagacagtcatgcagatgcacccaatagcttcataggacctgattcttgcatcttcttcaacctctcccaagagcgcatatccgatttcatagacattacacagatcgaagtaaaagcggaaagagttacaataacttaatttacattgataagttaatgtaacaatatagaaagagtgattattacaatataagggtctgagtgcttctacttattacatcacgggaaggtaaacacctcccataag

SEQ ID NO: 102453 - DNA, 714 bp, Zea Mays
acaataacctcttggtagaagttgaaggacatgttgatcacaagatttcaaggttttcagacaaagccaatcaccactcatgatctatttcaatgtacacaagatcatgatgaatacctgcaagattccttcgacttcgagctcatgcgccaatagtcccaaatgaaatagatacaaaagccatgatcatggggcttcgcttaagagaagcggctcaatactttgctaggaaacccccagtcttcacaaaagcttctttagaatatggatgagtatattagggcaaataatgacttccgtcagaggtgagaagaggcccagaggtatacgaagatgactaggggcttcgacgaaaggttctacccaagacatgttagaaccatacacaacccaactcagaacaaagacaaaaacaatcacactcagggacaacagagccaatcccagactataggaacccaacaatagcaatcatagaacacttcaaaccaccaggcccaagaggtggaagagaaggaaggagtttctgagtaaagtttaactctcaaccaatgaatatgttctgccctttctatggcaaagataaagggcacaacacaaggacatcccaagtgacaattaaaaaatagagggaaattgctaaaacccaaacatgacagaattaacccaagcaaatcctccacacttcctcatattactccccatacatcctag

SEQ ID NO: 102454 - DNA, 731 bp, Zea Mays
cagacgtcgaagaaagtagctcgcgctgaccatcctgatctaatcgaagacgagacctttccataaccattcggtgacgtcttccacttcgtgatgactcactggtgctctgcttcagcacaaccacccttcgcctccgtgaatcctctgccctcgcatcagccaagatcgacagcgcctcgcgagtgacaaatcgcggcggagactccgtcgctgccaaatccaacgcaacaaagtaatctaaatcctcctcagaagattcctcaacccataagaaatgactaccaaattccccttcacccgaagaccacgacccaagctcagatccctcagacacattttcactaagagacgttgcattcacaggcatcaacacatcattagtatcaacatcatcagggtttgcttgtgtaggcccggacgtcgaaacatgcgtagtaaccgacctttcagtatcacaaaaagttacacccaaaccctaaaatccctattgcatcgcttcaacccgcgtcggagcagacgccgtcgtagggtcttcgccagagccatcctgaggtgctaagtgcccttaaactcccgcctccttcgcgccacccatccgagtcatcgagctctcaagaccggcgagtcgtcaacttcttcttcattcatcatctgcgaagacaacagaacattccacagttaagtaaaaaaacatgcgccagtgctcgatcggccctctcctagacggt

SEQ ID NO: 102455 - DNA, 353 bp, Zea Mays
gccaagtcaagtctgtcgacaccgttcaccagtgacaaaactgatgtcaaaccgtgtcaaacgacctcagtttgaattcaaatttttcagagaggtgccttggatgatttgggtactttttgctatttggtccaagtggttttggtgccagcacaaagctgaacacctttgatctttggtccagggtggtttttgggacttagagaaattttgatggctctagtatgcttccctcttgatgtactaatttgaggttgttgttgggcctttttgcaatatttttcttactagattttgtagctttactaatacacttcatctttagtcaaggttcctttttatgttttgatcat

SEQ ID NO: 102456 - DNA, 520 bp, Zea Mays
tggccacgttcctcgctacgccaagatccggtgagaagcgcctcatttaatttcccattcttcgctggtcgcgtaggggcgtcttgaattgcggttggagtagtgtagggcgccgcggcgaagcccgttaatggcaccgccgtgcggctctatgcgccgtcgtctgtgtggtgtcagagttgggggaaagagagatgactgtggatcttcaaaggtgcggttgagatttgatttcaggggcaatgtcgtctcggtcgtagatcaaaggatgggcgaccaagattaacccacacataccgttttagatggtgcggtctggttcgtccgatccggatcgtgcgggtgggaatggatccagggttaatccaatgtgaaccgtcgatcctcgatccgagggtcgtgagtacgtaccggttcagcgtgatcacaatctaatctaggccaatggatcgacatccaatggtcggcattcaaccataccccttcgcatggcattcttacttatgagcccctcggcttt

SEQ ID NO: 102457 - DNA, 400 bp, Zea Mays
gaaattagagacggtcgaagtgccgaagcgacctatcgaaactaaggagaaaatgaccgaaaaaccagaaccaaggaggtcgatagagcaaccgaagattatgagcccgtcgcaagagacaaagttggcgaagatgtcaaaaattcttgcagtgactccaaaaaggagaaggatggccagcgtactggatgttgtcatggaatcggcaaaggtactaactcctgcctctacaaaagtacctagcaagggtgagaaaaattcgaaggaaactgccaaagctggactgccagcttctactgaagcaaatccttcaggagctactctgatcttggaaaaagaaagcgcacccgagaaggttaaatctcctacccccgaggcgcctgctgaagagctaaatttt

SEQ ID NO: 102458 - DNA, 435 bp, Zea Mays
gttgaattcttcttccttgctaggttatatagaagcttccttgctaggttatatagaagcgggaatcgaaattttaacgttcccaacccgacccaatcatcctcccaaatacgcacttgggagttgggaccatcatgtacctgaaaggtgatgggctattggcgctccttttcactgtcctcccatgccttgagctcatttcgaagggaaccatgttatttttttacttgatctccattcccacgagtcacatatcagtcgagaacagcctgttcaactaagttttgaccagtttttaatcttcactcacactgtgcacatattttggatggacacgactggaccagggagcagtgtgaggttgttttgcttacacatccagttcaaaaactgggtattaggtgtcataacggtttgtagcaaaaatgattgttc

SEQ ID NO: 102459 - DNA, 343 bp, Zea Mays
cccaaagctaaggatgatacggtcgaagaaccaaaggtggaagaaacagtaaaaatgccagaaatcctgagcccaccggcagaggcaaatttgctgaagatgcaaaaagctcctgccgcaactcccaagaggaggaggatggccagcgtgctagacgctgttatggagactacaaaggccttgacccctgcttctattaagaaagttgccgaggttgccaagggccaggccaaagccgaagctgagcctacagtgcacattgagacgaaggctatcgcgtctgaagacaaggctgattagcaaacttcagataccggcatgacaacagggcaaggtatggcag

SEQ ID NO: 102460 - DNA, 345 bp, Zea Mays
ggcaaggtttttattgtcttctgtaaagtcaaaacaaatgtgaaaattccaagatagttacaatttaatgtacacgtcatcagatgattctacaccatatatttgttcatttgtttgtttttgcattggtgttgtttagtactcccaccattccaaattgtatatcgttttaggtttgtcccaagtcaacctcgagctatgacctagttacagaaaaattgtacaaacatccaaaaaatcaaacaagattcattagttacagtggtacactatgaaatatattttgatagtgcatatttgatattgtagatgctaattctataaacttggccaaagttagacata

SEQ ID NO: 102461 - DNA, 510 bp, Zea Mays
gttggaatggacagtttgacattagtacaatagttgtcattgatggggtccgtgctgaaatccgcgcaccctattgtgacaagttctctgaaaaggcaaaattcaatgactactccagttacattcacaatattattgagctatatagaataaaatgggttggtctgccggcattttttacccacttggcctataagttgtcagaacctccctgcagacctttattgtgtagcccacaacaacttgagggctaccgacgtcgacttcatggattctgggattgtgtattgagtaccctgacgctgaggtcctcattggctagagctggattatattctgaaattcataggatacgccgcttggcaccatcggatgtgagatgctttgaaatcagtactgtcaagtactcgtcttaaatgtgattggagagagtcaatttcacaacatggacatccagtcctcaaaaaggttttaaggcacatccctgttgaagataaaatcaacaaaaag

SEQ ID NO: 102462 - DNA, 839 bp, Zea Mays
atttggagcgcgccgagcgtataaataagaactcaccctgaccacatttggtacgctgtttgtgccacttgctttgtttgctcaattttatagctcttgctcaccaacgcttgcttagtttttcaagtttcctgagcttcggttaaagagacacgttttcgtcattgctgaaggaaaaatgtctcaagacaagaaggttattgctgagacgaagctaaccgaagaggagaagctctttgaacataagaaaggtggtgaatccttatatagctgggtttttagaatcaatggcaaaatcaaataaagagaagataacaaaagagatattggagggcctgtctggagacactggtgacagtgacagctatgatgcagaaagtgggggtgaagattccgaagatcgatcgtggaggccaagccatacaaatttcggaaagtcgacaattaaacaaagtcatcttgacaatatgaggggaaggtactttcgagatatgtctattgtgagagtcggtggagacaacaacatccctgcccctgtggaagacgaagttgtgatttaccgaagtttcttcaaggctgggcttcggttttcattgagcaggtttgtagttgaaagtgttaaaaaccttccaaattttccttcatcaactgacccccgaagctatattgaggatgggagtctttgtctgggcggcaaggagccaaggtatgacccaagcgcaaaatgcttctgtagtatgcatgaacttatgtatgaaacgaaggccacgagaaaagaacagtatcacaacaactttggttgttatggatttattgcccgtcccaactcaagctaccca

SEQ ID NO: 102463 - DNA, 449 bp, Zea Mays
gcaaagtaaaatgaccgctcatggatcattaagaaacaagggtggtcaagggcacattaactgaaatgtcttaaacagatattgagatataaaggtaagcacatataaaaataagagtttgcaagattccaatggtatgagcataccaagacgaagagagtacaaattgtcaaaagatagcgacttaacaatagaataggaaagggtctcaaaagacaagaaggtcatggacatataaactgaaatgtttaaataggcagtaaaaatttagaggcaagtatttgaaacaagagaattgaagaattcagggatatgagtatgtcaatatcgaaggactagagtttgccaaatggtacaatttaatgacgaaagagtaaagaatcccaaaagacaagaaggttatggtcagggggcatctacaaagaagtcgcaagcacaagactgagatc

SEQ ID NO: 102464 - DNA, 303 bp, Zea Mays
tcgggcacctcagcttcatcaattggtatcagatttccaggttgatcggtgagtttatcgagcgtttttttcctacagtccacaaaaccacataaaaattcaggttagatcttatcccagcaccttttgagcctcgcactttctttcaataatctgcattgttgaatttgtgtgctttcgcgtcatttgttgttggttgcattgtgttcttccaccattcaaaccctagcgccgccaccatcttccgtttgatcacgccacaaatcgagtcaacattgtttccttgtttttctccttcggtta

SEQ ID NO: 102465 - DNA, 446 bp, Zea Mays
ataaacccttacacttctctcctttcacaacctgaagtccccgacgtcgagtggcgttgcgcagagctccagcgagcccgtataccggttgactcacgaagtgactggcgccatacttcgaccgagaccgaattcaaggtctaatgagcgtttccctccacttaatttcaccaatggctacctggtttgctctagccacggtgacccgtggacatcgcgaatagctgagcgcgttcccggtgattaagggggttctagttcaattggacgggtcgatgagcatcaagggtacataagaacgctcaaacgagggagcagaaggtatgagcagacctgaatcgagctggccgtggtgaggctaaaccgagcggggttcttgagcgttttggggagaatccaaaattggagctcactagtgatcgattgagagcaatacttggtggctg

SEQ ID NO: 102466 - DNA, 349 bp, Zea Mays
cctgcacactccaccactctgcaacgggtaccctagtatttggaactatgatcctgtgggtccgagcatacggcttggcttaccaggctaaatcttgcaggtcctattgcatgaatcaaaggatgacagataccagacgatgggtcctatgggtgtgctccaaacaattcaagaccaaagttgtgtgcaggtccaggtcctagggctggaccatcaatttcttctttggtaaactggtatccagcctcgacacgtcgagcctacctaccagggggccaagtaccagggggaagttgatgacgctacacacagcaaggacaaataacatacaagataaggtccagtttta

SEQ ID NO: 102467 - DNA, 2206 bp, Zea Mays
gtccctaataaaaaaaatctttggtggattagcagctattatgtgtccgttcccttgtgtggttaacattagctgttttcagtgctttccagtattgctaaatattactacatgcctttcattgacaaactgacagcatcagatagaatgcaagagtgggttatggagcatctccctccttccatatatattccacaatgtacatcatcatcggtccttctatcagaaacagttcgatactcatagtctaccgctaagcactctgtagttcgattgtagtttggtagtgtgctgttaagtcttggttgtaagttgcatttttttttttaaaaaaatcttcttctccacctacttttgttgaattttcagagcgagcaagtaaatgcagccataaaagctgaatccttgttttgtgatagtattgtctgtacgacccttgcaattgagtattttctggtactcgtttgacttatgttgtactggatatatggttgatctgtaggttgccactgtacagtgctgttcctattccggctttttgttgcgtgggtgatgcaccatgattttctgttgagcagtaaaaactaaatataattattttgtggcagtggtatagaaaattctggagtaggcctcattcggtttgaaatgctttagtgtagttcgcagatggaagcatagccccgaattccagttatattagaacatcactgattgattatttagagtgtccaaattgataagctaagagaaacacaaagaatattaaaactagtgctgcatggacatctaatatggcccaaagatgagctggctgataagtttggcacacttgcatgtatgactgtcatctgtgtggtggactgagcttcaatgtggacatgtacatggaattagaattttatactaaatgattgtgagtttatttccttttaatgattatgacattttccatcctaaggcctaagggcatactcgtgcctttgtctcttgtatgctttattttctttgtttgtggtttctcctaatatggcttctggtaggaaccaccgaactacatcgtgttcttgagtatttagcatgcttgtagccttgtacttgatgtctctgtttagttatttattcacaaaacgtggagaaatcttgcatgtattagcaacagcaaagaagtggtaaagaaagtgtatatcaggtggttgttgcaacttctttaagtatgtaaccggtaggtgtgaaaaatcgtatagatcctacaaaacttgcaatatgcactttattattgtttatttgtttatgcatttgtttttttactttcatgtttttaacgaactagaagggcattggtttcttttcacaccatgcaatttagtaagggtcccctcacctcatcatatcatttggaaacatagtttgttcatcttttctgatttgtcatgcattcttattacacagcaggatgtagataatgttaagttgtgaacctcttattttgaaagtgtgcggtgatgctttttgttgaatacgactaagatttgtgtctttttagggctggtttggctccttggaattgaatcagtttctatgaatcagattctaggaattgattcgtctaaaattgtaccagctggaaacggattcatttcattattcttgtttgggtgcaaacataactgaatttctggaattaaaatcaaaatcttgtctggctaacttggatcaagaattgagcccagattatctaaccagcacaatatatgagacacacgcagcacatacagacccatatagaacacaaagatcacaatatatgtatataatcacttaatcagcacaatatatgaggcccaatcaacacaatatatgtttagacatctaataatcaaattaaaacaagtacatcagtgagaggtaggcacaagcacgaacacgatatatgaaccaaacaacacgtgctgattacacatcaaaattaaaaccattaaccatttggtaagaaacacatattactctaatcacttcttaactgcttcagtagccacctctttcccctttgaactggtagagctatcatgcacttaaatttgctagcgtcagaggtgagaacgtcatacaggtcaagatcagtatcagattctgaaagtgtggaagaattggaggaatagtagttgattcatgaggggacgatacatgtatgtgtgtgtgtgtg

SEQ ID NO: 102468 - DNA, 442 bp, Zea Mays
cgattgtgtggtcggccacggtgccgccatggggccgcagagcgtcgaaattaggcacgttggggttgctcgcgagcggcgttggcgtagataaggtgttcgggaaggatcagacttcatattgaactaattaaatcagagtttgggggtatgtgggcgcggtatcgaggttctccggcgggcttcgccgcgttcgtgggcggcgccgccgtccgctcgaccgggaggtaggggagagtgtttgggccgttgatctcatggcttgcggtcaagattagatgaaaggctaggtcagtgggaaccgtggatttgttgatgagtggtgcagattcaatctgggtgtagcttggcacagtatcagcgatggcctttggattttgatagggcggttcagaaccctccttatctctttaaaaccgccgccgtcagatcgtgatcctca

SEQ ID NO: 102469 - DNA, 591 bp, Zea Mays
cggtgacgtgtcacccgagcattgtggaagcgggtttaaacagagcgttacgacagcataagacctatgtctaacttgcataaatggttgttacgctcacgatcctagaatgaagcagatacgcacgtgacctcgccgtgattatcacgtccacgataatggatatgtgcatgggcaaaaggaaagaatcataagcttccagaaaaggtagacagtaagaatcatttgttagggtgtgcctggctgaagggcgtaacctgatctggaagatggcggcgccatggggtaaagagtcaatcagtgagtatacgacgccgacatcagttcatcaatcaaatccatgcttggatattgtaacaatggtgcaggaagatcaacaaggagggaaccagtttgcctcggatgcaagtgcacatatgcaaacagctactgtcgtaggggcaattactccaccagcagctttgagggcgtcgggggttgatgatcagaacacattagatgcatcgaggatgaccataaatcaaggaggacagcaacttacgactatgcgtactattggtgagcatgaacaggacacaccagtgattccgc

SEQ ID NO: 102470 - DNA, 673 bp, Zea Mays
agccagtactccatcgacttcactcggtgtgttcatcgcacgggtgaagtcaggattcaggtttcacgtgaagagagggttctctcggtgtagccttgtatcctgtttagcttgctcttgagcctaccggcgatcacgtcggcgagagttcctcctttctctgaagactcgttcatcaggagtttctcccacctccaagatttcatctcgggacacaggctgcgccgggtcccgttccctagcttcgtgatgtcgctgaatattccggtgttggttcctccgtcggcgagcttctcgctgaggaggttcttccccaggcacggttggctcgtcgttggagatgggagataattccactcttccacagatgaagaggatgtcggggtagaaaggagttgctgtggtgccaaacttctttctgtccttctttgagggtgaaggtgccagaagagcagcttgatgggcctctatcccgcttgcttcttttttcctcgtaattcgtgtccactcttctgtggacgaggtggacaacggggttcttcgggtaaatgaattctcggctcctgacttgcagggagtagtctttgcccggggcgctggaggttgcgctatttgctgccttgtttcggctttctcagagattttcggggaaggcttcttctccggtggatcc

SEQ ID NO: 102471 - DNA, 636 bp, Zea Mays
gagcatgcgactgcggggctggctcatgcgccatccggatccgtggtctaggccacatctaaatggacttggaccacacttgccaccatgcttgttgcgcttggcatcatggcctttagagtccacaatcgcttactgttggggtttctaggtaggcggtgtagcaggggcagaaatgatagttggggagggtgcgagtccattggggcctgtggttgtggtgagcgccacggtgtgagctatcttcgtcatagccatctcctcgggctgtaggtcgtgcctcgtagaaatgtagggagggggttggtcctccgaagatgaaaactgagggcagtgaagtgctcgttgaagccacgaatgatgctggggatgagcgtgcattcagtgatgggcttgctgggctcgctgagcttgcagaggtcctatgtcatgcacttggagcgtcggtagtactcggagaccgtgatgtaaccttgggaggagcaaaattcttggttggcgaagagcacacatgtcatgcggttcccaaggaattatgaattgatggcgagctaggtggcgtgggtaccagcgccatgctcggagatagcgtcgccaaggtcattggaggtgctgtcggtgagccacgttcacatg

SEQ ID NO: 102472 - DNA, 585 bp, Zea Mays
gtcacaagcctcaccataaagataatgcctccacgactttagggcaaaaaccaccgcggccaattcaagatcatgacttgggtaattcccctcatgcttcctcaactgccttgagccataagcaatcactctgccttcctgcatcaacacacaaccaagaccaatacgcgaagcatccgtataaactgtgaaacgcttaccgctctcaggcaaagctaggataggggcgtccaccaacttgctcttcaatgtctgataactgacctcgcaatcgccagaccagatgaagagaacacccttctccaagagtctagtcagaggcttagcaatgctggaaaaatttggtacgaagcgccgataatatccagcgagccccaagaaacttcggattttagatgcactagagggtctcttccactccaccacagccacaacattcttgggatcaaccgcaatgccctgttgattaatcacttgccccaggaaagccacttcggacagccaaaaggcacacttcttcaacttgccatagaactgattcttccttagggcacccagaatgagacggagatgctgctcatgctc

SEQ ID NO: 102473 - DNA, 653 bp, Zea Mays
ggaggagtcaccaccatcgtcctcatccctgccatcagacacgggaggactaggcgcagcaggagcgtgaacctccgagaaccgcaactcaactggataggataacacccgtttcacaggagggacttcaacgatggccgacggcggctcaactacccagagttccctggaagaaggaagcttggacagatcggaacaccaagccaagcatctgaaacttgacagatccaacaaccccagcgtatcaggatgcacttgcggaacaccaagccaagcatctgaaacttgacagatccaacaaccccagcgtatcaggatgcacttgctgtatccaggcataagggcacaataggcgatcaacagtagacgtctcccacacatgggcagggatgccacgaagctccacatcaatcaaggacgacaacacacgaccatgagctccggccaaacgattccaacgtttgcacagaagactgagaccgcctccagaagaactgaccggctgccgaaggccaatcaaccgctcaaccagaaccaggtccggaagaaccaacaagaagctcgacggagaggcccgacggagaaccagagagctggcggcaacatcgatcctggcagcaagcaccgccgccacctcgccagcagagaccagg

SEQ ID NO: 102474 - DNA, 367 bp, Zea Mays
gcttcatccaaaatctgttggcgaacatcatcattcttgggcacaactatgcgattgttaaaccatacaataccttgatcatcttttctaaaacagtttgctttaccagcctttattttctcatgaatgtgtttcataccctcatcacttctttgtgcatcaattatcctttgcagaagaaccgactcaagcttcaagtgatttaaagttccatgttgaatcattcccaggtttaacttctccatttcttggcataatgtaatgtcagaagtcttcatcgtaagacaatgacaggaagtcttgcgacttagtgcatctaccactacattggccttgcctgggtgatagtgaatttccaattcataat

SEQ ID NO: 102475 - DNA, 504 bp, Zea Mays
agcaggatgaaatggcttaaacagaaaggcacgcaacacaattcattaaataataaaaaatgatatttttcgctggtccatcacatagccttgtatatatgaagaaaaaataacaagttacctactgatgagctgtttcgctttatgtagttggtggttgcagtagcggatggcctccgcctcgtcgtcgtcgcaaacacatcacccacctatactcgccaaaactctacatccacctgggatttgtcgtagacgatgtaatgcagcgagtatgtgtgcctctgtcatgtttagaaaaacatttagtgtgcatcatatcttctgcagtttttattagaaacatctagtaacaatattctattctctaattttatcaagaattgatatgttaaaatagtatgcagcagcctggcaagggaggaaagaaacaaaaatagaatggtactattaaaatgtacacatataaaaggataattacggaccagagaaaacatatctgttgtc

SEQ ID NO: 102476 - DNA, 875 bp, Zea Mays
catgatttgatgaccgacacttttccaggatctgtagccaccccattttggctaatcacatgacctaggtaatgaagttgtgttttagcaaaagaacactttgagaggttcactttaaaatgatgttggtccaatgtagcaaacactgctcggagttgatgtaagtgtgtagtccaatttgaactgtaaatcaagatgtcgtctatgaacacgaccacacattttctgagaaatggagacaatactgaattcatggctagttggaaagttgctggacccccggtgacaccataaggcatcactttatactcatagtgaccattgtgagtttgaaaagctgttttgtgaacatcctgaggatccatttgaatttgatgatatcccgaactcaagtccaaacttgtaaaccacaaagcaccctgaagctcatccaaaagttcatcaattattggcaatgggtacttgtttttcaccgtgagggcattgagacgtcggtaatcgacatagagtctccaatcccctgtctttttgcgagctaggatgataggagaagcaaagggactgctactcggttgaatcatccccgacttgagaaggtctgcaacctgtcgctcaatttcatccttttgggcaggattatagcggtagggacgtaaccggaacggtgttgctccttgaataagaggaatggaatggcaatgagatctgggaggaggaagtccacatggtttatcgaacaaagaggcaaattcctgaattaaactctgaatttcaactgggagctcatcctggggtggtgtttgatcaagttgattgacagtttgcaagtggagaacacaccataattgttcttgttgctgtagatgaaacagttg

SEQ ID NO: 102477 - DNA, 550 bp, Zea Mays
cgatgtgttgaatggcgctccttcctcgacgagtggtttgagtggattgagaggcttgctgatggtgctagtgtcctttccatcccccaaagtttggcagtcgtgcctcagttgctcgccgggggtcgtgcgacaccgtcgacctgcaccttacaggggccagggtgctctttggcgcgattcatggtaagatcactcctatcgagttcgtcgtagccccaacttcgtatagcacatgttggatcgcaatttggtcctcgggttggctagaaggcttttttcggcgacgcaaccgccgtggtctgggtcgctgtcacaatgggtgccagcggcatagcatcggggtgacttggaccgttagatccaagcgaacggttgagattagatcctcgtggaggttcggccggattgaatccaagttgtagatccagtgatgcgcgacgtagaggagatcttcattttattaaaccctaaatcatcggatctgaatctgatggacatgaatgtgtactagttaaaattaatgagattctaatttgggctgttgaat

SEQ ID NO: 102478 - DNA, 526 bp, Zea Mays
agcagatagtggcatgatggatgtttgcactgatgtgcctgatgctgggctggagttatcccgggcggcgtcccgcgcctcatcgaccttggagcgcggtcttaagggttaggaggctggtctagattgttctgctcccatggaagtgggtgaaggtccttcagccttagaggtggctgttacagagagcttggccctcaaggatggcgctagcgcttacccagcctcgagggtgttgccgaggatgacccggcttggatgggtagcgcgagctatgacccaacccctgagagtgttcgagtcggttctccctctcacacttccatggacgttcacgtagggtcttctcctccacattctggttgcatggcagcaacccaagcttcgagttaggaagtcgccttagaggccagcactcttgatgacagagttttgacccctgctgatgatactgatctggtccccactgatgcattgcgggttgttccggttggtgatccttcatcgagccatcaactagcttccc

SEQ ID NO: 102479 - DNA, 356 bp, Zea Mays
cgggcgtctaggagtgagcgggtgctcctgagatggctgagatcgacgatgaacaggagagcacgggacggagacgacgctagcaggaagagctagagggcgagagctcgctgggcagataaagcaagggagactgaccctaaagccaagctgggtcagggtaagaatcgtgcggcctcctggcagctacttgggccgcaccaaagaaacacagcccacgcgacctatgtcgtcatcacggcttgcacatttttatgaccatactggccagccaacatagcttctaccggcttataagccttccttctttagagaaagcaatcatggtcaaatgctcctgctagtgtcaaattgag

SEQ ID NO: 102480 - DNA, 276 bp, Zea Mays
cttccgtcggcaaggcatgcccacatattggcctcaaccgtggggacagtaatgggcgtaattagggtctagtctgcattgttttgtaataaatctactgtataatatattataagaatgtagcaggtaacagagggtatgtatgtactttaagccctggccccttggttactctataaatactcatgttcgaaaccgggatgggacacgcttgataagacattgattgccatagttcattgctcttctcactgttttgtctcaattgctcttgag

SEQ ID NO: 102481 - DNA, 608 bp, Zea Mays
cgcggtgacacatctatctacaactctcactcgtctggtcactttagaggccagtgacccatacgctaggagtctgccgcttgctgacgaggctaaggtccctccgagtcgtgcctttgatatcgttgtcgttgacatcccctcatcaagcaacgtatcaattctccctgctttgggccttcctttgttcctctccaatcttcaggtaaatcaacttccgtttttaccattcacgctggcaaactagcttttttgcttatcttttcataattacaggaagttcttggttctgtatctacccaactgaagtcctgtggggctcctgtcccgaccaagtttcatctttgatgcagtggaactctctactgcttcaaaaacatatagatgatccgaaggcgtcaaacattggttagtgaactttcttctgctgctttatcatatttggctcgatgatgctctgatattgaagagaagtatacccagagccaggccgacttgagccaaaactctactttcttggacggtgctcgctccctgaactcctctctaaatgcacatcttgactccgagaagatggcacatgaggtaaactttcttggctgcttctg

SEQ ID NO: 102482 - DNA, 488 bp, Zea Mays
aaaaccaaaaatcccaccagttcccccacttgttcttggcacacggcatgagttccacaacttcgctcgaagtcttcccggtcctctgtgtaaacgtgcatgtgccaaactgcacagtcttgccactggtgacattcttttgctagggaaggcaataattctttgtaaaaaacctccaccgatggctcactatcatatgtggccttcacccaaataaattttgccaacgccaccatggtgttcggcatgagctggtgcagctagactttgaagcactctaggacttcggtaacaaatcaacatgtaggcagtcaaataccagaagtaaagaacgctttgaagaccaccagctctccctctagttccgggacttcctcgacacctagagcatggccatgccgcctccaaaataccacaaatgttgcatctcatgcatgcggcccatggagatcctatacatcccaaactccaacctatgcctcgacaat

SEQ ID NO: 102483 - DNA, 660 bp, Zea Mays
ctaaagtcttcttcaagggttcaaacctaacttcggttcactaacttttggcaccagcaccctgaagaatgacgaaggtaagggcaatgaggaatatggtaagaaaaacgtaaaatagaataatagaggtaaagaactatactttgttaagcagatttcgagcttcgtttccagccaactctcggccaccctttgcccaaatttgggtgataaacctgttgcctatgcttcgagcttcggctggaatatcaactaggttcgatggcgaaaggttgaaatttggcctgttaacggcccttgcgtggttgcacccggcttttatgaaagcggcggccataccacgagaagccactagcacaaactagtgaccgtggccagttatgacttcgtcgaggacgtcaacctctttctcgacgaattcaagtgctccggggacatcttcggcagagaggctagcttcctcggatgcagctccaactgaattgaatatactctttaatcgagtagtgcattggcttgcaaaattaaaacctttatccttaagagttccgagtgcttcactgagattcaggttccttttagcctcaaccttgattgtcatgtttaaagcttcggtctcacggttgaattggctggagttctcttccaaaagcatctgag

SEQ ID NO: 102484 - DNA, 696 bp, Zea Mays
agaagctatcaaggattccattgccggacagcaggggcagggttgggcgtgcgctttggatctagacagcgttggcagattcttgcggggtccgatcgccggtaaaacttacctgctcaagttcatcgttgtagtagttttgtgtagcactttttagtttgggtaaatgattatcgaatcgccgggatggatgtctctggcgaggccctcgccgtggtgtgtgaacggcatcgccggggctcctggctgtgaaaggagatgaaaggggaatcacgcctcaccattggatatggagcaagtggtgagattagaggaagagtaccgcttcggccagattcgttatgggccgttgatggcgtgataatgcaatcgcagattagatcaaggcgtggggcggtgctgaccgttgatcttttctcggacgactacaattatgttagggcaatacctattcgtggatgcgtctgttccgtccgatttgggcgtggcgtgtgttgggccgtcgatcgtcgagtgggctgtcaagattaaatgtcaacataccgattcgcgagcagtagtgggccatacgatctaaatccaatgtctcgtatgcgtaagcagctgtctgaccgcgctatcttactaaagaatcccttcattttatagtaatagacccgccatcctcagcaataggaaatctttataaccaggtcc

SEQ ID NO: 102485 - DNA, 543 bp, Zea Mays
ggattatgacagtggacttatcctccatgcctgatcaccttcaacagttctacaaaaatttacaaagtcaaattaccgaacgccatgtttctaaatgaggtggttctttatcttcacagaatacaagttctgtattgacatgagagctagttctgaataaaggtgcttgtgtctagtgacagttcacctagttctgaataaagatgcttgtgtctagtgatagttcacatatttatgaatacaggtgcttccgtttagtgctacaatattgtttcgtatttgtttttccataacttttcaatataaatttggaacatcctttttattacaatacctccgattgtttattacaacaactaaaaaatacaaaaattggttgcaactgttttcaatactgatcagaatgatgttgccaaaggtgctcgacaaggtcctgttgcagctgatgatgagtttctttgtccctgatttttcgatgtgtctctataaattcgtccaaatcgggatgttgatcatgggaaggctgcgcattatcgccaccat

SEQ ID NO: 102486 - DNA, 283 bp, Zea Mays
gtggggtctgcccattggcgacctagtgaggggaaaagaagggagcaaagttagggctaacgggtgggcccatcttctcagataaagaggaaagtgtaagacccaaaaatgtatacaatgataatacaaccgatcttcttatttgtgtttcatacattcatttcaacacgagaataattgtaattaagaatgagtaaataaaagaaataagacatgaacaacttgtgcaccatgctggagtttattggattgtgtatttataaacaatggtaatatcgataaa

SEQ ID NO: 102487 - DNA, 712 bp, Zea Mays
gtattatcaaggctacatgaccaacacatgccaggcttagagccctcaagtgttctacaggccacacaatatcctcactcaccttgtcatcctataacattgcctttcatgctctcaatgtgttgtgccttaaatttatctgctaagtcattgccctacaacacaccttcaattttccctagggcgaggcccacatattgtttccacactacacctagtgtgccatcaacattcatacatccctttgtgggaccatatatgctacaattttgaatatcctgaggaggttgctaaatctatatctcctatttaagggatacttagccctctagatccctatgattggtgtctctagatcctatgcggttagttgccttagactgtgagggtcccgggggattgtatcgttcggtgccctaccgcacgataggccttgagtgcctatccattacatcccctatgatgtcctagatgattatctcgttaggtgccctaagcgtgagaatcttggacacttattttgattgaggcactaggacacaagggccctatgggctttcccgttaggtgccctaagacacaaggacccctaagtaattatctcattagggaggctagggtgtgagagggaatgagagcttatcctgctaggtgcctcaggacgtgagggccctaggggcttatccggttaggtgccccaagctgaggtgtc

SEQ ID NO: 102488 - DNA, 512 bp, Zea Mays
gtgacccctagggcctggagtgttcggagagaggtgacgttgatgctgctgccactatccaccagcaccttcttcacctagctttctcggatcactggatcgacgagtagcggatatttgctggggtgatcgaagttaagccactgatcagctcggttgaaggatattgtgtgctccaaccatcggtaaggagctagagcattgttcgtggccactagaacttgtcgatccttaagcttttgttgcctcctactttcttgtgctccgtggcctccgaatatgacgttgaccatcctgtcaacgcgagggaaagatccacctctccttcctactactaaggctacctatgttcgccatgctctcctcggggcgggggaggtggcaatggttggaacggtcagccgtgcccgacggagtttttgaaatctctgcagttctgtagggtgcgttgcatgtccttgtgatacgggcaatgggaattgaggatctcatccagtgtttgtacccctcca

SEQ ID NO: 102489 - DNA, 900 bp, Zea Mays
cacaactaaactgaaggtggcatcaaaatcaatcccatattgttgcttgaaaccattagcgacccaatgagccttgtagagattaatggatccatctaacttctatttgattttgaatatccacttggagtcaacaatatctaggctagcacgaggagggagaagatgccaagtcttatttttatgagggcataaaattcttctttcattgcataatgccataaaggatgctttatagaggtgacatgtgatgatggctcttcaacagaagttcgagtaatagaatatgtcatcataccatcactatgttgttttggccgtcgtagaatacttttcaaatgtgacgtcatcagtaggggcaatgattggattagttagcccatcgatatcaaggagtaccgccagattaagggttgctgctacatacgaccttatggggtgggcatgttgttcactgatggagaactcgcgggagacgaggcggatggagacggcaatgtgagtgacatgcctagaagatcatagttgatggatagagctcacaaggaaacacatgcaggaagatgttccaaggccaaggaatatggtaagagagacaaagaaaaaattataatttcccataacacatccttcttcctcttcctcctcccatgtcaaatgccactactaccacattggcactgatccccatacaccaagtcatcatgattcaactgactaaatccatttttctctaatggcatgctcgactctttttgtatctatgaagctagaagcttctcggataccttgatagatccaatgccacccatgagaagaagatcattgcattgacagtcatgggagatgttgaaatccctaatccgatgtatgctagatggtatgatcaagatcaacaac

SEQ ID NO: 102490 - DNA, 392 bp, Zea Mays
cgacggtagtgtaattatcaccagtgatgtctcttggtttagcctgccttgatatttcaatgtaagagggacagtgcaattcagtgcaagagagataccaaagagaagtaattttgattaattgtagatactacgcacaaacttataatacttcatattctaggctacgtaatacggtttaatggactggctctatcttgcaacacgattagcttgtttgcagtattttttcttcctccattccagctctaatacgatgtagttgcacttatgatagctagagatgtattgtaatttgtttgcataaatttctcggctcatgagcaactattgctctctataatgctttctcgtcattttttatctgtgtagtatatcttatagtagttaca

SEQ ID NO: 102491 - DNA, 468 bp, Zea Mays
aaccttgattattcttccccggagatctgcagcgtatctatttaactattttattttgtttacctgatcaagtttcttttagttattctttcccgatggagacgcacttgaaggaacaaagaaatttattggggtttgattaaattaattcaacatttcattttttttcgagaaaatatcattttgtgcagaatgtgcttagttttgatttaaccaagaaaatgtagtacattgttgttgtttctctctagtgatgagtcacttcctttgtatttataggtgactgataagccaagggcaattcatttacaaagtattaatggggacattaagttccatgatgttacatttagatatgttgatgacatgcctccagtagcagatggtgtgaatcttcatattagaccgggagaaataattgctttagttggaccttctggtggaggcaaaactactcttgccaaatta

SEQ ID NO: 102492 - DNA, 331 bp, Zea Mays
ggacaacaccacaccacacatcataccaaaagctggtattttccccatttccaatgtttttgctgaatcaaaggatactctttaacttccatcagccctttctagaattgcatgtcattgagcttttttctttaccaacaacaaatgacactttttaagatattttccctatcaatcctctgccaaagaccattgtaagaatcaagtctccaaagccacttgactaaaagactgatattcatacacctgaggtctaacaaacccaaaccttcctgatccctaggttgacaaactgaatttcaatcaaccaggtgatattttctagtattca

SEQ ID NO: 102493 - DNA, 695 bp, Zea Mays
ataattcatgaatattacagaatcacctggcatctggctctagcccttggctcctcatagcccaaatgaaaactcccactttaatcaaagcttcgggagtaatttgataaaagtatatttcaaacatcttcagtacttcaaccagcatcttgtgtattggaaaacgaagcccagccttcatgaagcttttaaaaaccactacttcatctgcttcgagaagaggaacaatgctttcttttccagctctcacaatggatatatcgtgaaaatactttcccttcatcccttcaatatgtccttgtttaacactggactttccaaaaacaacatgacttggcctccacggtcgatcttcggcatcttcatttccaccctccacatcaaagctatcactgtcactggaatccccagatagcccagccagcatctcattggtgatttttttcaacgttggtctttgccattgcttcataaaaaccagcaggtgtggggtctacaatatgcttttctccagccatttcgatgatgatcacagaaaatgttgaagatcaaaaaacaattgcgctcgcaaaagaagaaggctaaaatggcaatcacagcacaaagagctagatggcacggaaaatattcacagcgcatgcctcaatatatatacccagagctccattgatcggtgggtcccacgattcagaaca

SEQ ID NO: 102494 - DNA, 360 bp, Zea Mays
agcttcggtcttttctggtacaatatgccctgttgtttcatcttcagacgaggtaggcttcgtttcggtgggtgctgaaggcccggcttcagcttcggcttcaacctgaactttcaaagcttcggcaattttcttaggagcagggctcaaggtctttgtagtctctataacagcgtctaatacgctggccatcctcctcctcttgggagttgcagcagaaatcttttgcatctttggcaaatctgccccttccggtgggctcaggatttctggcgtttttatcactttttccgcctgtggctcttgagccttatcatccctagcttcggctggctcgactgtaggcaccttcggcgctac

SEQ ID NO: 102495 - DNA, 402 bp, Zea Mays
acattaaaacaagcacgcacaggtgctaaccaagtatccagaagacatgcatgagtcaaaagtaaaaccaatcccacccaaaagtttatggggcccactccagagcccagatctcccaccgtccgcttattgtttgtcatgcttatcttcatcggatgaatcatcagtactgccatcctccagatccttcctgccaaccctccgctgacccacaggtcccacagctgatttcttttgctttagtctctgctcagaaaggtcatcctcagacaggttgcaaaacctggagcccagattccgcagcaccttggaggatagcggggggcatcgaagttatgttggcacatgaggcagttcctttttgggcaggcccctgcctgaacccagcacgtgattctttca

SEQ ID NO: 102496 - DNA, 688 bp, Zea Mays
tatatagccttgggtggaggcgggctgacgtacgcagtgatcggcttgcacggatcgtaacagactcagccaataatccggggaaggagaaggttctagccccatggggtccatctgccgcaacccccacgcacgcagagaccaaagtctgagggcggaacaaacgaccggggtcaaggagagcccgaacagatcctgcgttccagccttccaggttgagcttatccagaggtggaagatgatcccggtatagcggacccacgcataaggctggctccaacaggccagctatcagaccaggcaaagctagtttagctgtccaactggtactgtagcgcctccaataaggcagctatcctggctaggcaaaatacatgggaggagagagaagagccaaattggctggcattgacacgccaggcatttccctctgacaaccgtcagttgggaccctgtgagagaatcgacgagcaggatgcttcggtgatttggcgcaaaagcaaatgggccagcagtcacagctaatttggcttccttgttgcaaactagacgcctatcgctgtccatgtaaaatgcagagggcaggtaaacagaaaaatggctgagcaatatggctatctgttgttggagccagcctaagcgacataaggaaatatttcgatgacatgctgtggtagtgacatcatcc

SEQ ID NO: 102497 - DNA, 294 bp, Zea Mays
ggcggcaactgctgcacgggtggctctgtccatccgtcactttttcttgccccatgctactcaagatagactgccttgcccttgtccagtctgaagagacgaggagggtcctggtcaactcctccccctgacggtgtgatgttcttcgttcgcaccatcactgactactgacatgttgcacgataatgagaaaaggtaagcaagagcagtgagcagtaggtaagtaaagatgtagaatggaatatctacctgggtacgtctcgagagataagaaccaggcaggacaggggtcac

SEQ ID NO: 102498 - DNA, 371 bp, Zea Mays
gaccgcattgacggtcttcggcattcgaccacaacgaagtcaccgcgaggggcagcgctagccaccctcgcgtgcgacactccgcgcaaaagtcgcctaagggtgcagccggactagcacaacaagtgcgcaaaatcgaagtcttcctaaaaagactatccgggcaaagaccgactacaggtgcagccggaccgatatcataaacgcgctagatcaagtgcacaagtcccccacagacacggccagatcagcgaaggcacacagtatcatcatccaaatcagttacatacgtacagcgagggcatcacaccttacattggttcaacctttggaatgatacccatctccctatagttaaacaacattatcct

SEQ ID NO: 102499 - DNA, 639 bp, Zea Mays
tacatttgaaggtaagtcctcaagaccggagaattggtaactgaattgtttctcttcattgttgactagaggaacaggtgcaggcggttgttcttgctggacctgttcaaccggccaaggatcccaaccatcatcagcattattggcattggcatcctctaattcaatttcaccattggggggatgttgaggtcaaattggaaattgggcacaggttgccccaatccaaaaaattccaccggaagttgatgcccattatgagggtacggaggtacaggttcttcatcctcaggcatgttaccaagcatgaactgctggactatgtcacactgaacagtccaggaaaccccatgaaacccttcagctactgaaaacacaataaactatggaacctcctgcagagaagtcacctgtgctctaacaagaaatctagtagcattagaaatatccggatcccacatgagcacccgaccaaaagaaccaatagcattctgaatgtgctcgtgtgaccagaaatccaagggaaacccaaggagcagcaaccaacattcatgattaaaaaataatgctcgttgattccaagccgcattgtgtctaatcacagtgaaagtaaagcccaaagcttgttgcggacccatg

SEQ ID NO: 102500 - DNA, 643 bp, Zea Mays
ggcatcgtgatcctttcagcgttttccagatttcgagagttcgagaactcaagtgacacgacacgtaaaaacaaacatgtagtcgtaagagcagtcgcaatggtgcacaatcagctctctataagaaatccatgttagcatctatcctatatggcaacaaattaaatgaataaagagagtggtgctatctatgaacttggagtaagcctatacatagaaaccgatgtggtacagagagtgtattaattattaaaaacagttatagatatctacgactatagacacaaatccatgttagcatctatcctatatggcaacaaattaaatgaataaagagaatggtgctatctatgaacctggagtaagcctatacacagaaaccgatgtggtacaaagagtgtattaagtattaaaaacaactatagatatctatgactatagacacaccattgtaaagatttactatagtatagtatatccatatttcgatgatatgaatattttactatagagggtgtgtatgtctgtatctacgctactgtggctgccctaaggctatccgcagcggttcttcctatatcatatttttatgtcgcatcatcaacattctatccactgttttttcatctcccgcaacgattcc

SEQ ID NO: 102501 - DNA, 484 bp, Zea Mays
tgaaagaaagaatagaactctcattgatatggctagatctatgttagcggaatataatgtgtcggatgcgtattgggccgaagcaataaacaccgcttgtcattcatcaaataggctatattgtcacaagcttttgaagaaaactccctatgaattgcttattggtagaaagccaaatatcttatattttagggtattcggttgcaaatgctatattttgagaaagggaagccgactctctaaatttgagaagaaatgtgatgagggttttcttcttggatattcatcaaatagtaaggcttatagagttttcaacaaaactcatggtattattgaagaagcatatgatgttgagtttgatgaaactaatgggtctcaagatgaaagtgataatcttgatgatgtgggtggaactcaattgaaaaatgctatgaaaacaatggccattggtgaaataaagccaaaggaagatgatgatgaaaat

SEQ ID NO: 102502 - DNA, 295 bp, Zea Mays
ctttgacgagcgtgccttatatcatgtgacaagaataaaaaaacagttatgtcttatatcctgcgacagagggaataattattaagttgtctaattcaccttccccttaggcgtcacctgtcaaccaccacctttgtactccacacctgcactgcacaccaagacaagaaacatgctgcaaacaccacactcatatcatagttagtctacatgaaaacaaggcctatcatctttttacaatcactcaccatactcgaacaacgtgggcagatatcaacgaaatcgtcatagaaag

SEQ ID NO: 102503 - DNA, 487 bp, Zea Mays
ctttggttgtgtgctagctagggtagcttagtttatggtgtctgggtgtggtttgtggtgtttgttgaataggcatggatatgattgttggggttccttgtggccgagtatagcgaggacgtctgctgctgcttgcttgaccctaggtaaaaccttcctcttcatctcgtcaagttgaacacgcttgtgttcaagagctatggccttgtctagcagtttctggaaagataggaatgagtgggacatgagctagtactgcagcggcccaatgagtccttctagaaacagttcttgcttcttatcatcatctgcaacttcctcaggggcatatctaggtagcggatgaacttgtcattgtactcgcttactaacatccctccctgcttgagtgagagaaactccttgatcttcattaaactagcaggaatgtggtagtttttgaagttggttgagaattctgcccaattgatggtgtcggcggcagcat

SEQ ID NO: 102504 - DNA, 614 bp, Zea Mays
aagaaattgaatgaattggataaatgcactcacttttaaagacaaatagggagaagcattattcatcttgatcaaggcttataaaatttgaaatagacaatttatgcctagtatcctcataatgaaaaagatttagaatgcttacaactacaccattgattgttttgaagatctcattatccaagtaggtgtcgttgctcttgatgtctccctttttcatttgagtgtcctccctttgtagttgattctttttctttccaaacttattgaaaatactcaagagagatgttaatagcacaagggagtaaaagatgaaggatgatttctttagattaagaaatataaacacttcatcatccatacgtcacatagacatgaagtaaaatccttaacattagtgcacatcaaaaaagaggaatatgcacctttgaaacattttgatcaatcataggaaatttattttttcatattgaatttattatcataactttgaaagcatatcaatatgagaataggtatagcaaaggcatgaattagattttaatggacaagtgcatttatgagaatgagattgaatgcacatctagctgatttaagtccaaataaagaatcta

SEQ ID NO: 102505 - DNA, 559 bp, Zea Mays
cccgatcgccccatagaagatcaacggtcccactaatctcctctgtctccgaccaagaataccagtgtcactctcatcgccattatagcgccatggctggcatccgaacaaccaacccttaggagccccatttttgttcaaacaactgctaagcgaagttaggagtatgacgaattatacgaaggacttcttaccgatgatcatgctatgatgccctcggtcctcggtgtctagcggctccttgtccgacgagatctagtccctgcgtcgctggtcgtcctctgctcttgaaactgacgtccatacgtccaacgcgctccggcgaagcacactggtacccccagatgcccaaccgcccatagcaacccaatttcccgcacggcggatctctctcccgctctactcggcggcgcagcgatggtgctctctggattgctcggtttgataggatgagggggtcgcatgcttcatatatactcgtggggcaaatccttggggtggatatgcatgacaacaaatcccaactaaacagtggatgcactgctgctcattgtcaaac

SEQ ID NO: 102506 - DNA, 389 bp, Zea Mays
gagggagtgggttatccagcgatgatgctggagctgttggattccctgaaggatgaaacagggactgttgtgggtgacaaggaggttgcggttggtgccaagaacacgaacaccatgcctgatgctcgttgcgacgatgatggcgatgattgcgtcattcttgacggtgaccctgataagccggttgccgttgcaaaggaggaggggggaccgccacgagatgcccctgaggatgaactgcagatagttgcggagaaaggagaggtattgctcttacgattactagctttaatttctccactgccgttatgggttgtatgatggtgtcattgtgagccgctagcgattgtgttgtcatcgtgagtcactagcgatagaatccaaagtcg

SEQ ID NO: 102507 - DNA, 540 bp, Zea Mays
cggacgaaaccaaggcggcagcagcatggcgattaaaattccagacgcggttttggttagttaaacaattgaaaaacatgctcattgtaactttagcaggccagacccaacacataagactatatacacatgtacattactttgggacccttccagaattggggtccagtgcagccgctccacttacccccctccaggtccggccctgatggcaacaccatgtagatcgatatagttagtaccttggatttatttatgtaataatttgttatgcagttataacaatctagccatagtagatatggactctcagtacgttctggaaaattaccgctccaacgatgcaacaatgaaccctcagtacgttcatctatattctcctcgtaatacatatggactcctttccaaatataatcaaccatgctccaacgataagtctgtcttcgtcctcgttgaagttttttcctttttgattatggttttgcttcgatgaccgattgctttcactcattttgtgtattgcaagtgtctacaaaattc

SEQ ID NO: 102508 - DNA, 467 bp, Zea Mays
gaagtcatagtcttcaaaagcttcttcagggctagacttcgattccccctttatgagatgatcggtgaggttttgaagaagtttgaaatctacctacactagctgacctccaatgccattattaggctcaacgtgtatatttgggctcttcgaagccaaggaaagagtgccaatgccgaagggttctgtcgagtgcacgagcttcattatcagacgaaggcaagagccgatggtctgcacaagaacttcgggtgctacaactttgcataccgaaaggacaccaaggctcccatgattggctaccgcacaaaatggccaaccgggtggacaaacgattggttttacgtgaaggccgatgagaagaaaagggagaagctcatgagcatggtaatgagtcccttgagactaaacttcgacatgactcgacccttgtgcaatatgtagcttgggtccccgtgccaactggc

SEQ ID NO: 102509 - DNA, 722 bp, Zea Mays
gttggatctagtgttgtgtgatttatggagagaaaaaaggcttccaaacttggtctgtcagacaagccaaaatggtgttcaggcatgaatagtaactgaagaagatcatattcatcccacctcgccaccgtctctccttaccgtgccatgcaagtgcatgttcaccacgtcacagtaagtgtggccgatggtgaaacacgtcccagagccctttgattacccgcgcgccatgaagaccaagcaccagtgaaatatcccgccatcgccccaaatagtatcatccaaaattcgtggcccgtgtaatcggtctatttaaattgagtgcactccctgcaccgctcctttgttacgcgctcagtatgccctcaaccacctcccaccattcaccatagctcccagtcaccggaattcaccgagaacggtcaccggcgccgtcatgaggagctccgtggacatcactcctccagttagttcatactcttcttgttcctgttttagtacccctctaacccctggttgctcactgccttgggtattttaacgctaccgcagtgaaactccgagaacgtcaccttgccgccactggacactgcctcagactgtcctgcatgtcgacgggctctcccttgcttcctccatccaaattcgtgcgagcacctcaaccctggtgagccatttgtacttcccaagtcggttaatcaaactctaccacatggcattgc

SEQ ID NO: 102510 - DNA, 401 bp, Zea Mays
gaggcagggagcgactttggggagaataatctaacgagaaggcttcgtctagatgcgacatggggagctggactggggtgggagtctcgatccgggtgcgggtatatacggttgcctctcttgtcactgggggccacggaatgtgggaccgtactgccagtgagtgtagtttgaattcctcggtggcgcagcagggctgcgtgaacacgtacgccatggttatacgttggtgtaccctggtcgtttgaaatgctacacttagactgttcagtgggccatacgctttgcgggccccagtcgcagtgtaacgtgaaacgggtgcgttttggtaacagttgctttccggggttaatgacatggcatggatcgggcacatagcaccttgccggcgtccatcgggc

SEQ ID NO: 102511 - DNA, 323 bp, Zea Mays
gtattctctcaactactggaaagcagcttctgaatgaggtccatgcaggacaatgtggaatacacgcagcatccaggacactagtcgggaaagtcttcaggtcgggattctactggccaacagcaaaaagtgatgcagccgagttagttcagaggtgcgaagcctgccaatacttgtcaaaacagcagcatctaccagcgcagcaactgcagaccataccagtaacctggccgttcgcatgctggggattggatatgattggacctttcaagaaagctcaaggaggatacactcatatactggtagcaatagacaaattcact

SEQ ID NO: 102512 - DNA, 769 bp, Zea Mays
cctacgtgagcaatctatcttcttgggcagtttctaacctgaggattaactctttagtaattgcaagctgcagtttcgtgtctccaaccttggttttgcgccacgccttgatgccttttgcagtgcatgctagcttgatatggaggcgttttagtggcgcacaggaggagcatacaggtttggaccatgcatcttggacgacctctttaaatccctccatctttacccaaaagttttcgaaacggaaggaggggctacatgttctcgtcagctctccctgtaggagaagcgaagtgtggtcagacatgagggacgggagggagtgcaggtagcaattggggaagagcatctcccattcagaagtgcagaagattctgtcaatccttgttagagttggactagcatggccattgctccaagtgtaacgacggccattgaggcagatttctttgagcaacaggctgtccaaagctgatttgaacgcccccatgagatgtcggtttaagtttctattatttttatctaaagtctgatagatgaggttgaaatccccaagcacaagccatttctcccatctctgtgacgctaggtttttgagctcctggaggaaattgtgcttctccgcaacagactgcgggctatagacccctgtaatccaccaaactgagttatcggccttcatggtgatcgaggctgagatagtgtgaggtgtggtgtagacttgtgagagggagaaaaaatcatcagaggctgctaacagaatccctcc

SEQ ID NO: 102513 - DNA, 875 bp, Zea Mays
ccggagagcagtgaatgggagccacactgcttttctgtgcgttgggttttagccccgaggcgtccccaaacaactccaatatcatggttaccaagtgcagatcactagcagccggtctcaagaacatcaccacatcatcagcataaagcgatatttggtgctgaatggaacgagttgaaaggggttggagcagtccctcatcagcagctttaacaattaggccattgagaacatcaataacaatgatgaaaagaagaggggatagctagtcaccttgccgcaggcccctcttgtgttggatgtattccctaggcactccattaagcataatttgggtagaggaggtcataagcagcccactgatcacatatctccatatagggtcgaatccaaccttttccaatacttcaagtaagaaagaccaatacaccgaatcaaaggccttggatatgtccagcttgagaagaattctaggctgttttttagcatgtagcaatcttatagtctgctgaactaacatgaagttgtcttggatgaatcggcccttgataaacgcactttgattcctagaaatcagcttgtccatatagccactcagtctgtttgccatgatcttcgtgattaactttgcgaagctgtggatcaagctaataggccgaaagtccttagcaaggatggcatcctctttcttaggtaaaagaatgatgaaagctgtgttgaggtatctgaaattccggaagtccttgttccagacagccaggatagcagccataatgtcttttttgatgattgaccagcaggccctatagaaacagcctgtgaacccatcaggcctcggggctttgtccggaggaagctgtttgatggtgttccac

SEQ ID NO: 102514 - DNA, 385 bp, Zea Mays
caatttcgatcttcatctttgtccaccaataatgttgttttagatcatgatacatcttagtgctttcgggatgaatagaatagcgactaagatgtgcttcatctagaatttgctagcggatctcatcatttttaggcacaactatgcggttgttaaaccatacaacacctcgatcatctcttctgaagcagttggcttttctggcctccattttctcatgaatgtgtttcattccctcatcatttctttgtgcgtcaattattctttgcaggatgactgactcaagcttcaagtgatttgcagttccgtgttgtaccattcccaggttcaacttctccatttcttggcataatgtaatgtcaaaagtcttcagcgtcaaacaatg

SEQ ID NO: 102515 - DNA, 672 bp, Zea Mays
ctagtgtccgaccgcacacctgaggataccctcgtggtgcttttggatagtacggtattgctgatcgtagctcgatggttcgtgcttcgagcacaagagagtaagagagagggacaagcaattttctgcaggttcaggccgctttgagaggcgtaataccctacttcctagggtgactctgtatacgtggtgtgttacaagtggcgtctcatgaatggagaggtgctaatgagatgaaaatgatggggttcccctgggccttatatacacgaccgtgggacactccctacgtacacggtgatcacattcttctagcatatctccgagctaatagcgaactaacttatcttatcttaaggaaaacccgctgactccatctcgatctatccccaacgttcgagggcgccgggcgcggggaaaacggacggttccttgagattgtgcataatccaacggacgatccgggcacgagcccattgccttcttgggtcggcccattttcacttgcgatatttgtgcggtccacgatgagacgagcttgtggggcaactggtccgtggccccatgcaagggtctttcgccttctagtggacccacgggatatctgtcccccacaagcccccaatctttgagttgattttgaaataatcgactcaaagcttcctggtcctg

SEQ ID NO: 102516 - DNA, 495 bp, Zea Mays
atcacactctaccccccttaaaaataattcgacattgaattccaatgcttctatcggaacgacaaaagagagatcagtgaatacaaaaactcacccataacgaaaagtttggggtacttctgtcgcatcaactcctcaagctcccaggaagcctcgcgctcagactgattagcccacaagaccttaacatacttaattgttctccttctcatgacacactccgaggactccaagatacgcaccgggcgacactccagagttagatcttgctgcacaacaatcggttcgaacttgatttggtggtttagatcccgcaaatacttcctcaacatagggacatggaataccgggtgtacccctgccatggattccggcaattgcaagcgatacgccaagctgccaacccggaccaagatagagaacggtccaatgtacctcgggctaagcttcccggagacaacgaaccgaatgactcctctagtaggtgataccctg

SEQ ID NO: 102517 - DNA, 312 bp, Zea Mays
atccgcgccacacgatccacaattaacggcttggatttaaaatatcggaatcacttcgtggccacccatcatccgatcgacggcccggatctaataaacacgagatcatgcgctacaacgtcagaaccgcccaatccggaatctacggtcaccatcacctttctcccgatctaatcttagctgatggattgagatccaacggtccaaccgttttcttcctcccctggctaccagagcggcggcacacagtgccccacggcggtgagcccaccggaggcatgactgccggcgctataaggcactaacccatca

SEQ ID NO: 102518 - DNA, 412 bp, Zea Mays
ccggctgttgatgtggtggcgcatgtcaccatccgggtgggctggtggaagaaggtggttcgccgctcgagtgaggatctatcggtagccctcattgtcgagcgtgcgacgtagatcattcgccatctgagccaacgcaccatcgagctgtcttggagtctacatggccaaactcaagttgcaggttgcagggaagaggtaaatgctcacgtgggggtctagcattactcccgcccaccccgcgttcatgctcttgggcgatgtggcgactctgacgatggacattcccttgtaggctaaaaccctgctcgggagtctccccaacctcggatgcctcgtctcgggaaacaggctgagttgggtcctgttcccagcggcgtggtgacgctggatgttgtggcagcagttctgc

SEQ ID NO: 102519 - DNA, 467 bp, Zea Mays
ctaagcatacaggcccaggaaaatcgaagggaattggaggtgacaggtccaatcaggggcctgaaaagcgacaaaggttggtaatccaaccttttaatcaaaaccattcttcacctcgtccaccctcctaccccttcaaacagcctatcttcattcgccctgcctccgcccccacttcaacaaatcagccgagtgcccctagtgctcgtttactcgccctccctagttcttcaaccggctgcttcaattgtgggaagtctggacattttatcaaggactgcccatatccgaggcagaacaaatccaataatcaacagaactcagggagttcaaatcaaggcaagggaaacatgacgaataattcagcagacaagaatattaagaagactgggcgaatatactacactcaagtggccactacaccggagggagagccggttatgatgggtatgtttcttgtggccaat

SEQ ID NO: 102520 - DNA, 622 bp, Zea Mays
cactgatatgctttctgctgttagattgaacatcatcgggtcattggcgggtggctgggcctgacaagagactaactttccctggtggtcggtgaggaggattgtcttgcttgcacaactgatgatacccttgtgtttagttaaccaatccatccctaagatcacatcaatccctttggatggcaagacggttaggtctgccaagaatactaccccacttagaaggattctgacttgggagcatttgagctggcatagaaggtcggaccctgggggttcgggtgaccaagggaatccctagaggagtagagggaatgccatgtttctccacaaaactagtggctatgaaagactgggatgctccagaatcaaaaagtacagtagcgggagttaattcaacaaggaactcaccgaggactactcccggagcttgctgagcctcctaggcatcgacgtgattcacccatgcccttccttgatactgggtcttgttctgctggctgatggaggagggcgccttgggggcggatgccgaggcattcttggggccattcaccgagttggagtaggcgggtcctggtggcttcaactggggacagttgttcttgaaatgactgggatc

SEQ ID NO: 102521 - DNA, 567 bp, Zea Mays
atcgatttgaggatgatatgctgagcttctaatcacggttgttccaagtgacttttgtagttgctcccagaaacgtgctaggaacagtggtcctctatctgacgcaatagttattgggattccatgcaagcgcactatttggtcaatataaatttctgtgtatttttgtcttgtgggtggtatgcacgggcaagaaatgagctgtcttggtcagcctatccacaatgacccaaatggaatcgtggtgtcgggaggtgttgggcaatcccacaataaagtccatgcaaatgtcctctcatttccaagatggtatggggagaggttgtaaggtacccgctacctttaaatgactggctttgattctttggaaagtgtcgcactcagatatgtacttagcaatctctctcttcatcctggtccaccaatataaggatctgaggtcatgatacattttgtaacttacggggtgcatggaaaatttgaagagatgagcttcgtccaaaattttcttcctgagttctagattcttgggaacaacctgtcgatcttcgaaccataaaacaccct

SEQ ID NO: 102522 - DNA, 523 bp, Zea Mays
tggtatgtgttttccactactacaaccctgaattcgcatggacaaaaacctgttagactcataggacaggaaatccaaccacaaaaataacagtaaacagctacacacaatgcaaacgatggggaggagagcgcatgatcgacaaatggcgagtctcaagggctatgcaaatatggctagcaatggggaggagatggtgagctggatacgatggcgagtttgatggggaggagatggcgagccggatacgatggcgagtttgaaggcgagactgttgcaagctaatatctggaggttttccatttctttaccgagcacagtctgtttagccagtctgttggtgatgctcttatatgggtactcattcatctattctttgccttcgcaataaggatttccattgagctgcgcttctatatttcacaattgttgacatgaatattttgcttatctctaggtacgtaccaaccgctttctcttttatcaacaccatttatgattatgtagtatttctttgcatgaa

SEQ ID NO: 102523 - DNA, 445 bp, Zea Mays
ccatccgatagttgcataaccctctgttttaacccataagagattttgacttacctgcgccatatgacccatcctatctcaaaagattataacataccctaataatacttattctaccatagtagatctatttaacttaaactagtctaatctagttatatctaatataacctagaccctacctaatctgatatgatctaatctaatatgatccagtctaaagtgaactacttaacaggctggttaatctggtaatatggattagacactgcttctacaaacatatcttaacctaaattaatgacttataccaactcgtccatgaacaacaacctaacctacaccataggttgtctagtccatatatccccaaaagcaaagttaaactctgctcaaacctacctcatgtaccccggctattctaactatatgtcctaaactctga

SEQ ID NO: 102524 - DNA, 1058 bp, Zea Mays
gttttaattgatggttttaaggtgttacacgagcctagtccatgccctaattgaactaatctaacctggaattccccggcccacgacgacgatggaacccaaagacaggccgagctgttctcgatgaccaagtgcggtagcgttcaattgatcgagtctacgagcaacaagagaccctaaggatgctagaacacgaaccagagaagcatgaaccgacctgtggatggatgtccacggcgaggtgtctcacgacggcgcggttgaccgaattgggggaaattaggaatttgggggctgtgggggctaatcgagagcgaggaatggtgcactggcttcgtaacaagctagcggagcaagcggggcgtcaatttatagtgaccagaagcggtggctctgaatttggggaggggataagcttgcggccggagcgaaggtgagtcactggagttcgctcaatgtggcatttactggggtagagtcccggggtggtaactaaccatctcgcatgacactttgcgacatggtaacatggtgagtaacgtggtgtattcggggtaacggcgaccatcacggcgacggcagcgcgaccacgtcgacgggcaagtgggtacggcgaagctgactctatccactccccttcggatctttttaccccctgcgactatccactcgccacagagcacaattcgtagcaccggtgcggatcacggcgcgaagatcaccggcggcgagattcactgaacgtggcgatcttgtttagtccactgttcaccactgaacatcgccccgagctgcttgacaaacaaggtttgggagcaatttactccaaaaattgtacagcaccaggccaagctcagtataacaagtttgttcactaatattagggcttcatttttgccacagtgaccctagtcttaactccactgaatcaatcacaaattgtcttcaaagttgaccaaatgtcactgaacttccaatttttagaactgaagttgtgtgacagcccgacttctagggcattttattccaatttctaggtagctctggggctatatcac

SEQ ID NO: 102525 - DNA, 606 bp, Zea Mays
tacagctcagtgaatctcatccatctctggccatcagcctataaattgagcccgggcacagcttcttcaccgcaccgcacaccccatcgcttgagtaatcggctcaattccaccggagaactcagaccgtccacaaatccccctcctccctgtctttagcgccaccgtgaagaatccctccgtggccagcactcctcgggtcagcacatgccaaattgcttcttgttctagtttgactctggccttctattgctctcggagccggccaattaaactttaccgaagcccacactatggaacacccaatcgtcccgtagaacgccgccgcgacaccctctctgtcgacccgctcttctattcttgcttagtccaaattcaagtgtgtgcataacctctggtgaacccgtgtagctaactcgtgcttcaatttgagtatccatgccattagttgttcggaacgcgatcaccagggtcgtttcgccgccgtgaccatgaacaagcttcaaattagttcaaatctctcaaattaaatgagggcttttactcagaccgactagtgatagatgtttatcaacctattacctcttgttcggaccaccctcaccg

SEQ ID NO: 102526 - DNA, 449 bp, Zea Mays
tagttggagattatgtctacctgaaagtttcaccaatgaagggtgtatcacgtttcagggtaaaagggaagcttgcaccccggtacattggtccttttcctattcttgaacaatgtggaccagtagcataccgactttagttacccgaaacattgtatgttgtgcataatgtgttccacgtgtctcaattgaagaaatgtcttcgggttcccgatcgaaccattgaagtaacaaatgttgccttagaaccagacttgacatatttagagcatcatgttcgagtctaggatcaaaaggacagaattacccgaaggaaaactctcaagttttacaaggtacagtggaaccaacatacagaagatgaagctacttgggaaactcaagactttttagaaaagaatttcccaggctttctagcttcgtgtaaattgtaaagatatgtacatttg

SEQ ID NO: 102527 - DNA, 645 bp, Zea Mays
cgtgaacacaccaggcgtagaatagcccatacactggaagtcatgcatggagtactggtaccaaacatgcattttgaagtttgcctttgtagctcggtcatacgtccataccccttcctcccaagcacgtaccaattcatcaatcaaaggctccatgtacacgtccattttattccccaggtgtccgggaattataaacgacatgaatatgttctgcctttgtaagcacacatcgaggggggggggattgattgggataacaaacacgggccaacatgtgtatggggaagtgctcattccatagggattgaacacatctgtggccaacacaacatgtacattacgagcctcttcgactttctcacggtgaatggcatcaaagtgtttccatgcttcaccatcagatgcgtgcaccatcttatcaggattgtatcattttccatttttgtgccatgtcatctgtttcgtggattccttggtcaggtatagacgctggatcctcggtatgaacgaaaggtggtgtaggattgttatggggatgttgagctgcctcttctgtccatcaccagattctacctccatgaacccagatgatttacacttcggacagtattttgcctccgcgtattctttcctaaatagcac

SEQ ID NO: 102528 - DNA, 588 bp, Zea Mays
caggcatgggatactcatctttaggagttgctctatttaaattatgaaagttaatgcatactctaagtttgctggagtctttcatctccaccggcacaatgttcaagacccaatcaacatacctacatggtttgatgaaatcagcttccaagaactggtgaatttcgtccttgatccttggatacaagtatggaacaaagggattcggtttctgcttgaatggttgaaatccgagatttattggtaaccgaagtttaactacctcttggattagacctaggattttaatataacgccaaacaaaacaatcaacatacgtaataatccgatcacttttccgctagaatcagatttaatgttcttgtttacaaaagtcgaccttagtgtaccaccatcacctaaatcaacttcctctaaaggattggctaaagtaaactcctatcctaatttgcataaatctataaactcctctatcataagaaaatatgttccctgatcaacctcggaccatccggccattggacctggaccgttcgtgagatcaccggactatctgtgataggtcactggaccgtccgactggatggc

SEQ ID NO: 102529 - DNA, 381 bp, Zea Mays
gaatgccaaagaggaaggatgaagggaaaattttgaacttgtccagttgccataccagttcaaatttcagaatactttcagtgggccctgtgttgaatggttggaaatgatagagacaatgtgcaatgagatccttggtaactatacaaagaaagaggatcaattgatgatagtcgcctttggtacttggaagaaacgaaggctgaactaggtaatggatgcccttggcttcgaatacccagactatgagagacttgacaaataagccagggtgaagaaaaagagaattgtaagaattttgaaaaggcaagcaattagatctattgaaaaagacaagcaaagggccgcttccaagaaacagagaatttcagcagagccgaa

SEQ ID NO: 102530 - DNA, 351 bp, Zea Mays
gagtcactgcactcatagccttccccttcgaggtgccctattttgatcgggtcttcacctttttccctcgatcgtccccagcatcagtagaatcccccattgggtaaggaccgtaccgcaaaccattcagttcaaaaactcggttaaacctgttgttggaacctcgtatatcccaggtccttatcaactctgtcttcgtcgtatatttaccaacaattttaatagcctctgactcaacttccctaacgaaggcggccgcatcccgccctcgcagatcaatggcaaaggcagggctctgcaccttctggccacccaaaaaaggcattgggtgaggcttgatttcacctagat

SEQ ID NO: 102531 - DNA, 346 bp, Zea Mays
ctcctctcccgtcctcctctcgtactcccatcctcctgagtcctgactccccctaggtctcgccattcatcattagtcagggtggtgctcttgccgcaggtcatcatcatctccacctctctgctcttcgactttatgatctagtgatgtgtaggtagaccttaaacactaacactaacctaactttagacccctaacccaatttgtcttgttttacttgcatgttgttgatcgattcgttgtgctggtgctatgcatgccattaaggtaccaaatcgatagggagagctagagaagacaatgaggttggggtgaccatggatgatagtgatatcgtgtaccctag

SEQ ID NO: 102532 - DNA, 422 bp, Zea Mays
tgcagtttgaaatgaaaaacagcacatcctaaaaaaggataaagaaaaggaaagtttcggtggatcaaccaaatttcttcattcatactctattctggcaagtaattttgtaccaaaggataaaggtatgtacaccagagaatattccaagtaaattcaaatttgtcaatgtgtgaaatgttctctctattattggaaactgttagccgttttccctcttctagatacggaatttttactatgcacctagacgcagtttacatatatatactttgttcaccaaaacagctccattcatactgtcgtttatgtctaatttggcaagtaattttgcatcgaggataaacgcatccataccagggtgtatttcaagcaaattcaaaatcgataacatagaatattttctctattttaacttataa

SEQ ID NO: 102533 - DNA, 323 bp, Zea Mays
aaacaaagagggtcttttagtggtggagttagcttaacttgcctatggggtgtatggcacattataagattatatatatggtttcatctcgttcaggtttagaattttcattttgaaagcaacattcaattcatacatgacttgagcatgctttctaaattgacatttttggtgtttacttgggccaaaaactaggattctagcatttttctgtcatgtgttgtttacaggtgaaattgtgttgttcaggaaacaaactttatcatccatttctcattctcctgactgcatttacatatattcattttccttttggattgtac

SEQ ID NO: 102534 - DNA, 647 bp, Zea Mays
ggaacaacacaataagtacgtaaaggtcgaagtctttcaccaaagactccgtgcagaagtcgcctacgggtgcggccggatcaacgaaggcgcgaagccttgtcatacaaattttggttacatacacacagccagggcatcatatattacattggctcaacatcatcctcaattcctcaccctcaaaaagatttcgcagctctccttcacctacactcaccccaatcggcaaggacaacaattctcgtttaccagtcctgtccacgcgatgacgaccactctccatctcgctacgatgacgtctaccactttgcgacaatccactcactctccgtttcgccaccgcccttcgccgcctatacccagtactcgcacccgggagcccctcggaaccctccacgcgtggcaaaggcttcgctgcagccacatctaacgctgcaaaataatccaagtcctcatctgaagactcctccgtccatgcaatcgaactcccagaatcattagactcaaaacacttagacacagagccaaacgaatcatcatcggcagccacggtcgaagccaccacaaaaatagcattgtcagtagcggttgcgtgcgcaggcccaaacctcagaacctgcgcagcaaccgaggttcagtatcac

SEQ ID NO: 102535 - DNA, 485 bp, Zea Mays
aaaaaacttgctcaactgtgggcaaagcctcaggtcggcccccttaaccatagttgtcgccataacccgtggccagcccagttgcgttcctttaaccatagttatcgccaaaacctgtggttatcccagttgcgttcctttacccctagccaacaccttatgttccatcaactctaaccgccatcataacccacggcgacacctcttgcgctccatcaaccctagcctcctctctatagcatctggtatcacagatgtcatgtttgaacgaaggcgacaagcaccaactagctccatccgtgccacaattgctgccaaggtgaggaccctagtagcgaacccaacaaagttgatggtagccatgtcatccctctaaacgaccctagtggtgtgggtgccatctgcgccagccacaaccatgctgccatagttcccctaagtcttgttgagctataacatgatgatcattttcatgccagattcta

SEQ ID NO: 102536 - DNA, 541 bp, Zea Mays
cgaggaccatggtttatcaggttcagttttaccgagccatagccatctcaatctcaaagcccatcccaaatctttgagacttgaaataccaaggccgccaagctcaagaggtctacaaactctgccccaagccactaaacaatgccctcctcttgcatctttgcttccacgccaaagaaagccttttctgatcttgtcaatagccttgagagctcctgggggtaattctactgccatggcaaaatagatgatcatgtctgtcatcacatactgcacctgtactcttctcccagccctagacattagatcggctttccagccagataattggtcagccactctgtcaataatgggttgcacctaggttctggagagtttttttaatgacagaggaagtccgagatatttacagggaaaggatgagaactcacatggaagctgtctatgtagtgttatcaattcctcctcaccacatcatataggataaacactactcttctgaatattagttttcagacctgatgcttctccaaatagcttc

SEQ ID NO: 102537 - DNA, 923 bp, Zea Mays
tttaagttcacaatttttgtaccttcaaactgttgtatgcaaggctgtccgcgaggtcatctttcgacatggcggagtggccaacctcgagcttcagaaatcccatacttttagccatctcccagtagacagatatctctttgttgtccgagagacagtataagaaatcatcttcatctgtaccattgaacaccaagacccccttcgggtatttcagttttcgggcatagtgtttggcttctacaatctcttcttcagatagcctttttcccgaagcatgtcgaataataaaatcaagattttcggacagtgcttcgagagcaggagatttagcttcttcggctacttctttatccatcgctatgccaatatctggagattcttgtttagccctttcctcagttacagcgggcttcgtctcagcaggcatcgaaggccgacttcggtttcagtatgagacatagcaccttcggcaaccttttttataggagcaggagtcaatgctcttgtctccatgatggtgtctaacatgctggccattcttctcctcttgggagttgtggcgggagctttcgcaaccttcgacaattctgcttctaccggcgggctcagaatttctggcagcactattgttttttctaactctggcttcttggccaccccatcttcggctttgactggctcaactataggcaccttcagcactatagttgattcctcaacgctctgagcggcggaagcagcttgttccgcttcggcagcggaagatgtctcttcaccaaattttcgcactgtggccgtctcaatgtacctcggccgatgcgtcagaaccttgatcttttttccctttggcacagcagagatggtcgaagtggtagtcttcctcttttttccctgccttcatgaggggtagtagtaatcag

SEQ ID NO: 102538 - DNA, 853 bp, Zea Mays
ctaacctagcatcacttcgacctactgcacctgcccccaatgtaagtaaaatggatgacatccaatctcttagaacttacatagatgaacaacaagagcaaatgcaacaagtaatacggggtatgcaagtggattataaaatgatggcgcgtgcatttgaaaaatatgtcattcccaatttcccatagtagcatttgctctagaaactcctactgtgctagaccatatcgggtgtaccgttgtggcatagtctggcacatacatgcatgaatatttgtgtgggatgtggttaggctgctcattgaagaactggcaatcctcaggacctccacaagtcttgtacacaacgtatgccgatgaagaggccaattgtgtttctagggcagcaactgaatacggtataggtggcctggtctggaaaggaatctcccctttgtgacttcccagtaccgagcctgttggagagtacagatgcttcatgatctcttgaacaatgataacaaccataggttcaaatgcattcatcaggctcttggagtgacgatggagtgaatgagcgaccatgtagttgacttcttgacgtaacaccctagtgtgttgttccgaaggtaacgagaggtcaacctcgtcaagagtgccctcgggcgagaaccccttccaccagatgtcatggttgcgggtgctctcgaaagagccgatgaggtcggcttcaaaaagagctttgatttgatcatacctcacttggtgttctggagccagctctttgtacgtgatgcatcggtccagacatgttcgtctgggcattcaccatctgggcaactaatgtcatagatgttgacgtagatggtcccac

SEQ ID NO: 102539 - DNA, 400 bp, Zea Mays
ggttaatgtatttcaaacttggtccaactaattttggttgtgcttacaattcgggcgacaggtttttcacctgccataaatttgtaatccctaaactacgaagttgcttgcatactgccttcaactctagtcgtctccaattaatttaggatgaccactgtccacaacaacaggtcattttataaaatgtagtagagtgataatagttgggtgcccaacaatgtgttaattcaaccaactcagtgtaatgttcattgtttattatgcgttctaaaactctcattgacataatcagagggggcattacttctgaacttagtatgcctcaagttcattcatagtgttaggtctatgggaaccctaattgtgttgctgtactaccccccaatttgtttgtcac

SEQ ID NO: 102540 - DNA, 443 bp, Zea Mays
cagcttcacttcactagctccaccaatttttttgccaaacacattcaatatattttgaagatggtggggtggagctgatgaagttggaactaatttatctctcctctaaacacgccttgagtcacgcacgtcttcaccttgggcttccgcccgcttgactccgaccccacgcagtttgtcctcaccctgtggttcttccacttcgcctacaaggcacagacaagggctcgtggacgacgccaacgggagcaacaatgtgtgctgtggtcgatcaccacccagggcgacgccggggaggagcagaggaggataatgtccccctaatactctcctaattatataagagccactaattctatcagccaaccaccatataaataatgtaaaatacctctcaacagctcctctcaatttgatttgtcccttctatacttaaatcctga

SEQ ID NO: 102541 - DNA, 317 bp, Zea Mays
gtcgataataccctgccaatcccagaaaactccgaatctgctttactgtggtcgggggtttccaatccatcacctcctgcaccttttcaggatcaactgatatcccatcttgagaaattgtgtgacccaagaatttgatctccttcagccaaaactcacacttactcagcttagcatacaactgatgatcacgcagtctctgaagtacagtatgcaagtgtttagtgtgctcggcttcgttcttggaataaaccagtatatcatcaatgaaaacgaccacgaacttgtctaactctggcatgaatactgagttcatc

SEQ ID NO: 102542 - DNA, 701 bp, Zea Mays
ccattagtttagtgattacattgtatccatttaaaccaaattctttaatcatcttatttttcatagcaagttgttcttcatcatcagtaataaagtcatcattaaacaaatgtaccttgtctccttttgccatgaggcaagttggagtgtaggagtcgtcgtgaaggttggtgaagagttgcgagcttgaagtagattggatggcgatgtttgccacctcttcctcttcttcagagctagaactttattcatcggagttccattcttcaccaatgtgggcttggccatatttcttcttcttgaagtatcctttgttcttgcccccctttttgaacttatcctttttgtactccttcttggcttcttgttcctttttgtttggacaatccgctatgaaatgaccggtttggccacattcataacattccctcttctttccttttctttgatacttatcatttttcctcacaatcttcttgaaagttttgatgaacatagttgtgtcttcatcacttgaactatcttcatcacttgatgttttgaccactttctttgtcttgtgatctttgttcttcttggagggatcttgttcttttgagatgaaggcatgagtgtctcttgtcttgattggggcttcttcagaatcatgttgttgaatcttagcaaatagttggtgaggtgtcatttcctcatagtcatca

SEQ ID NO: 102543 - DNA, 693 bp, Zea Mays
tggatatgaaggtgggtgatgtgaagaacgattcggattgaaaggtcggattaccaaccttgttctctttttaggtccttgcgttgatttttcacccgcatatccctttgacttcctgtgtcccacatttttagcttcgactgccagtgcggtactgacatccctgttgtaggtgaggtccaaacatgttgccatcttctgctgaagtctgtcatttagccccctcataaaacaattcttctttttcagatctgtatccacgtgctcaatggcataatgggagaggtgattgaatttattgagatactgcatcatagtatctcccccttgcttcagtcggaggaactcttctagtttcatctggagcactccttctgaaacataatgttcccggaatgccaacttgaattcttcgtgcatcggattagcccaaacttatgttccattactcgtacccattcatcggcttctaagggttcctctgccttaacaaagagcggtggtcgagtttcagagaattctagataggtagtatgtcgtggtccctgagggggaactcttcctccatgctgttgaaattggttgcccgctatttcgtgcaaaaagcccgtattgtcggtggtggcgttgaccaaggcagcgatagcctcggccaaggtaggaggtaccggtggcggattgggagtgtcctcc

SEQ ID NO: 102544 - DNA, 465 bp, Zea Mays
agaaaatagcagcgcgagattaagggagcaaggtctgatgcttatatagattagatgccatgtgcgtgcgtagttacgttggggttgggggcactgacggcacaggtacggtactctaaataaagcagattactatattgaataggaaaacaagcagtagcatgcacacatatctgtttgttaaatcgcgtggatattgtgaacagctagcaggaggcggggacacaggagagcagcacgctagggtgtgcgtacgtaaaagagatccaggtcacgttgggtagcatgcatctgcgatttcccaagagagcgagcacgagagcggtgtttgcttgagcgcccaggaaggtccggggcatatgccgcatgttctccaaactagtggccacatgcagccacatgcccgccctcagctcgctcgctgacggctcatttcacgcaggcatggcaagcaacatgcaccac

SEQ ID NO: 102545 - DNA, 517 bp, Zea Mays
agataacagtctaatacataaacattatgcaataacacttacgtattaatggaagtatagggaaacaagggagaacatggccctccacagacatctgattgagggagattgcagggctagtcttcatacttaacaaactcttggaacccttggtgattgccttcaacagcttcttcacatgagcttgggttgcaccaagggcaacatagagtttgtatgaaagcaagggtgagtacacaacgtactcaacaagtgtcatgtttggccaaattggactagatttatgtgggttaggatattaatagtttcttttaatattcatgtatttatcactggtataggccttgtttgagcatcaacgcatgattattaacccataaatcatatcctctttgaagaacatcattatcattaccattgtcaaaaccaattaccatatttatcttgtttgccttgatctttccatgcattaggagtagcaattatctagccttagtttagccttcatcaacctcga

SEQ ID NO: 102546 - DNA, 497 bp, Zea Mays
gtttgctggttttgtggtcagagtagaaacgaaggaaaatgctaaactgaaagctgtgcataagctgaagcagaagattggtttgtttgcttctcagaagcaagagatttgggacgctatgaatcttagagtaggaaagaagtggttggcatatggattgagaagaataaaagagagtgagatcaagtcgcttggccttagcacccctttgttggatcacattgcacaatttaggaaagagggaatgaagacagatcactggttcaaaacattgctaaaggtatggatgcaggatgtcaatgccaaaaatgagctaaatgaggatgttctcttatcaaaatacattgctgagccagcacttgcacaagaccttagggatgcattctacaactttcagaagcaagctaaggattacatttcatcagagactgctgcaacggaagcattgttgtccgatttgaagagtacctgcactgatggcagtgtcataaaaattc

SEQ ID NO: 102547 - DNA, 379 bp, Zea Mays
gggaaatgacctcgggatggctgggcacgtcgccgtagcatgtgagcgctaggttgaagacgcaagttgtgcccttgatcctgagatggacggctaggattagttgatatcataccccttcgccgcattaaaccggagccgcagattctcagatgagcagtcccgatttgaacgcgaatacctctttgcgtgatccgatgtggggccttgttttctgatcggacgactctaaccacccgataccccttcggcgcactagttttgcaaaagagaccctatagaatttcttattaaacccgccatccgtcagggaggtaacctgagtctgccagatttttgctagtttaaccctgagtttgtctgtaataatgtgcgcgac

SEQ ID NO: 102548 - DNA, 502 bp, Zea Mays
gaacagtatcataacaacttcggttgttatggatttatcgcccgctccaacgcaagctacccggtgccaacataccggaaaaggtggcctggggcctggatggaggaatggttttacgtaaaaaatgacttgaatgcaagagaagatatcaaggaagttattatgcgacccatttggtcccgcttcggcctccgaaggccgaaggttgaaattgacgaagtcgtcgaagcatgtcaaaaagcatttggtcctgtttgcttctttattggtacgagagatttggtacgagagcacatagcatacagagtatggccgcttatagagagctgggaaatgccgaaggaaaccatcaccaaatctagtgaaggtgaactggtccggctgaagtacacattcagatacggagataaattcgatgaaccaaacgatgactggctaaaatgcattgaagttaccagtgatgagctgcttggatcgtattccaaggcagaagataatgcac

SEQ ID NO: 102549 - DNA, 272 bp, Zea Mays
tacccggagaaggtagttggagtttaaggagggtgatcatgtgtatctaaaggtgtcaccaatccggggtatgaggaggtttaaagttaaaggtaagttaccccctcgctttattggacccttcaagatccttaaacgagtgagggaagttgcctaccaactagaactacccgaccatcttgcggatgtacatgatgtcttccatgtatcctagttgaagaagtgtctcagggtacccgaagagcaactacctatggaggagttgagtgttc

SEQ ID NO: 102550 - DNA, 593 bp, Zea Mays
catcagcaagaaggatagcacgcaagaaggactactacggaggatcagcatcagcttcttcggagcccacgtggtggcaacagctcgttcgtcgcatgcatggaggagctctgcagaggctatttgttgcgcccgcacggcgcacgcacaggaatcgtaggccgcactgttttgtcggcctccgagttttccagctgtggtgatgtagacgagctcacgagtctgctgctagtggggtccggtgccgttggtcgccctcatactgtgtggaccgtggtcgtctgtgttggctacagaacataaaaagatgggagagatttgtgtcacagatcaatgagatgcacgtctgccggtcaatgagatgccggtggcaacttgaatgctacgtctgacggatcataactgcacatagaacgtactatagaagcaccagaagacgttgccactgcaactgcaaccttaccctgccagcattggacttttcgtgacgagtatggtgtccgatccgaccgtgtcttggtttcctgtctgtggaatgtgtcttcatcatttcacagagctcgtttccgttagcggagtagttttcgtatccc

SEQ ID NO: 102551 - DNA, 1711 bp, Zea Mays
atttctgattcattgcagttgtattttatttcaatgccttgtcgtcgaacccttaagtgatccattctaattgttactggttaagggcttaaagtatcagctttagattgcaaaaattgcaaccggtaccttcagcttccatgttccaagtgccaaccaacaatttccatgtcgctgaactccatcgaccttgaaaactttgagtacttcttcatattcaacgtttatgcacataaacaacagactgccagcgaggacatgttagacatgtgtcgattatgcgtgcagttgggttaccttaccacttgagttgtattaggggttaggatagagctggagttgaattttatattccagggggccataaatgtgaggcaacctctgttgtaaccatgagatgaattggcagctagtttggatggcggcgagaccgttggatcgcttggatgccggtataactgcttttttatggggagctggtgaggcatgctagtagccatgccaaggggatgtaggcatatcgcaaacctagtgaggtgtgcctgttgtcatgccccagggatgtaggcatatcacaaacctcaataaaaaacattatgcctcggtgtcgttctcattcacatatttttctttggtggttatgcttcggtgctctttggtggttaatagatcctttcgggtttcgatctaaccgtgctctcaaacaggacatgttatgcatggttgctgtggagtaaaacagaagcatggggtgaaaggatattgattgactctgcatgtgatattttttttttcaaatcagtgactgcaagacatgaataatacgactgcaacacacacaactagcatgagtgggttacctctgattgtgcattacttattgcccaacatacattttctagatctaagggacctagtccctgttcatatatgctttgcacaacacaaaggttatatagactttacattcccaaattaaaagatcatggccatctactcacgaaaccacatgaaacaccaccacaccaggtgaattgcttgactaacttgcctactctcaaagcaaagtcattaccagcataacacatcacattcatacaattcagtaacaatgagttattcttctcacttgaaaacatgtgcggctgagagcacaccttccgtaaactttagggcagagctcctccaatcttctgacctgcctggagcttaccagcgatcattttcccaacaaattgatggcaaacgatatgtaattcaataaattcatacatttttataagttgttaattcgaacctcccctcctatatgatgaagaacataaaatgcaataaagtatgatgaagaacttaagataaccttctatttttataagctgtacttttctatttttagctgttcttttctatttttacttgtccctatgtactaaagcttaaagcatgtatggtccatattcttcgccttctgacccttccatttagtatcttgaacacataagatatttacatgtcttctggtcactgtctcaactaactctcttaagttacatgtaagtgacactacattccaactacccaaataaatcctagttggttcgactaacttctttactcttcatacccatcgatgatgtggtgactcttacagtgatttgaagttgagcgacttgctaattgacacacctggggaaccaggcgactaatcgcg

SEQ ID NO: 102552 - DNA, 1005 bp, Zea Mays
cctcaggggctgggttgccctcatcaccaccctcgggggataggtcctccttagcggcaacctccaaagctgaagctccctcggccatgcccagaggagccgggcgactctgatcagtggcttgagggccagcgtgtcctcgcaagctagaccgccctccaaggtcgacgaagcacgagagaatgtctaggttgccccttgcccaataggatcgcatgacaaaggaacatcgtctgggacctctgaatggatgatggaactgtcaacctcagggggctccgataaaaggttctcagggatgatctcttctaatgcatggtcaaaatcagacatcgacaacccctggaggccgacaagtctcgataaggactgcatcgagatgtcactgctcctgctgctacggttgttcttgtaaatcaagggaatttcttattcctcatcctcctcatcctcatcaagcacacaaccgcctaccctagcatcgtcacaacctctgacatcgtcctcgagggtggtgctcaccgggccatcaacggggagtgatgttgaagggccagcatcttgttctaagcatgataaccacaagagtcgtttctttctctttttcccctcatcaggcgccgatggatggttcatccggcatgatcgcttgcgacgagcaccttcaagtttctgaatttgtttgtcttcaccaaggttctgcccaatcgcaatagccatcaactcagtgcaggcagagtcggatgattccccagccagcatgctgagaacagcgtccatctcagcctcgtcagtactggtcggcatctcaaagtgggtctgcctctcagcctcgggaagaccccaaaatggagcgatgaaagcctcgatgtcatctaatgagggtcgcactctatgacccggactgtcatctcgaacatgagggttggaaatgaaatcagaaaagggactctatggaggtagattccaaacagaataagataagggggcaccagcatttgaaac

SEQ ID NO: 102553 - DNA, 1161 bp, Zea Mays
tctcaccatacacagccaaccgtatttaaccatgcctgacactgagccacagcgcggcgctggtccgcttcccacttatgacctacgagcacctcgagcctcatagcattcatgacctacgagccccttagactatggcacattaatggcccacacaccccttggcctataagacacttatagcctatgggactaggcctgagtgcacagacctcccacagggcactacacgacgagctgtgctaagccctagctacgtaggctagaggtcagcgtagccaaaatgatgacatctaggaccacatggcccccatgtcatctaccatggtaaatataagatagccaggcagccccgggcccccacgagtacgtgtggctccacccagggtaaaacgttggttttacccttgccttacgactccttcccaaggaagctaccactagctgacccctctgccatcctataaaaagggagaggctggcctcagggcaagggaatcgaaaggagagaactcttggggcaaccagacgccttcagacggacacgagcccataaggacgaataggaggaggagcgtcgatgtgctcgctgacagatgggcattcttgacatcaagctaagagatggaccactcacgaacaaagaccacaacaaaaagcatgcgaacagtcatcatgtgagcaaccggagcaaaagtctcatcataatcgtggccatgttcctgttagaaaccacgagcaaccaatcgagccttatagcactcaagagagccatccgagcaggtcttaaccttataaacccaattacacgtgatataacgaacacgtggtggacaaggtacaagttcccatgtgctagtgcgctctagagtagcgatctccatagccattatcacatgctgccattcttgatgtaaaatggcatcatgataagaggtcggatcaggaagagcagcaatcacaaaagctgaaggagaatactgatcagtaggctgacaaagacagtgactacgtctaagagacagctctagtgtagaaacggtagggaaaatggctcagtggaagaggacaagtcaacaggaatagatgattcacacatcaagagaggatgaagcagcatgagatggctcttcagacgaagacaccgcatcagaaggggtc

SEQ ID NO: 102554 - DNA, 377 bp, Zea Mays
gtgccttttaaatgaggagttgagtggtcgtagtgggaagctatggggttggtttggtgcaaggctactggactgtcccttttgcttgtgtcgagcttgaggattagtggactgaaaaataatagagatggcatggaacagcctggttgagagaaataggagttttctgtaggaagggaggtggcattggttgccctgaggtgtgggagatgatacatgttcaggcagatgtgattgcaacctcatgattgaactgcatatatcttactagtgtcaaatatatgggccgctgagcatgcagcataggatttgttggttattcttgatgtataaaggtacattgataaatgtcaaatcacaaagattccttggtttgg

SEQ ID NO: 102555 - DNA, 400 bp, Zea Mays
tgctaacaggctacaaaattacatggagaaactgatatccaaaaaagtgctttcatcaaagggcgcttcatcctagataatttcatgctggttcaacgaacaactagattcctcctttctcagaaacatccaaggattttactcaaattggacatttctaaagcatttgattctgtttcctggccttttcttctagaggtgctggagaggcttggttttgggcctatatggcgcgatgtgcttagtaggctgctcatgacatcatctactcagatcctcaatggggtgcctggtgatttcattacccataggagagggctgcggcagggggaccctttgtccccattactgtttgtgctggtcatggacattctcaatgcgcttattgtcaaggcagcgg

SEQ ID NO: 102556 - DNA, 577 bp, Zea Mays
aaaaaatatttgactttgaaaaaacttgacgctcttttgatttttgaacttatttttaatcatttttattttaaatatgttatattcactaaaatacgaacacctttggtcgtggtctatatgatatatggtctatatgacatatgagtctcccacaaacatatgaatggttattgtcgtctcttcgaccccctcatccctagttttggctcgctctaaataaaaaaaatacaaatcgacagcgacgcttggtggcaccaaagaggtcgataggctctcccctgtctgacagtaaatataattagaaaatgtaaaaaggttaaacattaaggtggagaagagagatgaaaaatgggttgtaaacttactggcaccttagacatagaaaccaattagttttgtgaagaaggcaagtgaagtcatgttttaatactgaagagcaggggcggaccgactttgggctgactcgggtccccactcaatttccttggtttagtggactttttaccttatttactgtagttacaaaggtttatttgttagcaacccttcatttaggtccccactcgcatttggc

SEQ ID NO: 102557 - DNA, 802 bp, Zea Mays
cgaaggatcgagctctctggtgtcggtcttgctgctgagctcggagaacttggaatttcctcttgaggtgacttttttcttcttcttttgctctttccacttgtatggctttgttggagaggtgcgagaagctgaggaaatcttggctggcgaggatggtcttgagttctggtcttagccctttcaaaaaacaggccatcatcttggtttctgtgctgacatcgtcaggcgcgtaacgagccaactctgtgaatttgtgcacgtactcactgacagatcttccaccttgagtagttcccggaattcatcttccttgagctgaacgatcccctggggtacatggtgctcacggaaagcagtttcaaattctgcccaggtagcgtccctgacggccgtgctgaaggtatcccaccatgctagggccatcccagaaagttgatgagcagccaaatgaacatgttgattttcggggcatccgatggcttccaatttcctcttgatcgtgcgcagctagtcgtcggcatcgaggggattgctggatccagcgaatgtgggaggcttgagtctcagaaattctcccatcctgtcctgtggtcttccaccacctgggcgttgattctccagacttctagtgaggacttcaatgagtcggggttgattggctagaacttgggccaaatctagtggtagttccggaggtgcggggaggtgggtctcactcccttctccgccagcttctccttccgctcctaggggaaaccctgctccaatcccggaggcggtaggcgtggttttatccgaa

SEQ ID NO: 102558 - DNA, 450 bp, Zea Mays
caaccttcgagcttttcgagaatatgcgcaaggaaaatatcccactagatgtcataacatggagtgctgtaattgtagggtatgcttagagggggtgtatccaagaggcccttgatgcattccagcaaatgattcttgatggttcagtgccaaattctgtcactatcatctctctattgtctgcttgcgcttccttgggagcattgtctcagggcatggaaattcattcatactctctgaagaagtgtcttttatccttggataatgattttggtggtgacggtgaatatgttatttgcattgaaaatatattttcttcaagtttgcgattgtgctacatttttctgcttttacttcgactatatgtcaatgtgccaccaaaaaaatcgtgtttcatcaacttatgatgagtccgctcaattgtttcttgaatataattttttgtagaac

SEQ ID NO: 102559 - DNA, 387 bp, Zea Mays
gtttgttgttgtttatttcgatgatatccttatttacagcaagtctatagaggagcatttagaaatttgttgttgttgtttgtttgttgttggtaacatggaaaagtgaacattttgcatgcaacgtgtctcgtttcttggttatgtggttactccgtagggcattgaggtggatagcagcaaggttgaagccattcaggactggcctacaccaatgatggtcacccaaattcggagttttcttggacttgcaggattttaccgccgttttatgcgtgattttagctccatcgctgcccctttgcacgaactcacaaagaaaggtgtgtcttttgcttgggaccccccacaagaagaggcgttcaacactttgaaagataagttaac

SEQ ID NO: 102560 - DNA, 390 bp, Zea Mays
ctacttctagtgcatgcaatctatatttcttatcataccattaaatcctctcccccttagctaatagtcacttaagatcatcaacaatgggatgacaactatgttcctcactaaaacatgaaatagcacatctatagaatattttgaggcacttaaggtggaaattttctctgttttgatatactcatcaatggagtcaacattgataccacacacaagcatgcatagagtgtcagtttatttctggtgggggagaaactgttgcaatttagtgcattggttctaagagtgaagtagcaggaatgctcacccaacctttccaagatttgaagaaagagactcctctgcatgtggtacctttgacaaaagtagagcgacggttacacatgg

SEQ ID NO: 102561 - DNA, 352 bp, Zea Mays
ggcaacgggtcggatttgggtcaggtggagcaaaaacatgtctgcaattgcacctgagatgtctacctaaacccgcacgtgatcgcacccacggtgcaattccaaatttgcacctaaaccattcgagtttcgggtcacccacgagtttttacttagtgtatacttttagacaataattcaactataagcaattaagtaccaacaataattgagttatatctacatattttaagccttttcacattgagaaacaacaaaacattttatgaatcattagccaagttaattgttcaaaataaatgctattatatcttaatcattttgtgtaaaataaagaatgaaccaaatttcg

SEQ ID NO: 102562 - DNA, 509 bp, Zea Mays
ctaattatacatacttattagtacaactcaacttccttatttaacttacataaggacactacttatactaccctactctaattatcttcgtccttggccgcgccactgccagcatcgggagaacgttcatatgcgaggttcatggaaggaggggcttcaaaaagatccaactccccatcaggtcctccactagctgctccagatggtccggctcccactgctgcaacctcaggcggtacattcggatgcagccagtcatataacacgtgcacctcttcatgtagggtgttacagtacgcttgtagattttccaaggatgcgattagttccgctacccgggtttcaacatttgcctcacaatcccaggcgaaagaacgcgaatttacgacccagtcaataggcgtgtctcgttctgcaatttcctaatgcaagcgattaacctccgttgtcagcttagcaatgcgacggctatctcgcgcatgctccctattttcatggcgtagttctga

SEQ ID NO: 102563 - DNA, 645 bp, Zea Mays
atgtctttaaatttaaacattccgagggtatgaattttaagatatatcaggcaccatgtgctggattttataaaatatcctggttagttttacttgtgaccttgtgagttgtagataccttgcgatgtaagttacgttttctactagatcttattgctctgcactatttcaaattttgtggagcggtccagacataacttagctctgcatgtaataaattacaaatcaatttgagaatactgtatagtgatgttgtgatattggattatttaaataaaaaagatgttcacttgcaccacatggatatattgtgagaaatctttgttttgtagaatacttgttggtggttctaccctgcggaatagctgctgcatataaatacaccggattactcaataaacaacaaccaattttatgaaaaggcaacaaatgcttagcatggagtgcatccattttactttttgtcgtcctgacaaagcaaagcatgcactagcactggtctgccatcattcaagcatgtatcatagtttaaatatttgatttatggttcagttgtaggtgaaaagtgtgttccttaccctaatcattaatagtaactcaacagtaatgaaatgtaaaatgagattctgttttccctacatcttt

SEQ ID NO: 102564 - DNA, 340 bp, Zea Mays
gtgttctttccttgatcacccgaaaattttgcgaattcgggtatcctggttccctgtgggtatgggtggtgatcaaatcggctgtcataaggtttccgatacgattgcccccagggatcatgcttactccgagcttatctcggaacgccccggctatttcttccctcactatatcaatggcagccggtgcgagaccaccgactctctggtcaaacataggtggggttggctggatgttagcatattgtatttcccccattggtttgaggtacgtggtgcatttccatttgccctatatggctcataggtttgatcgtttctttccggccttctaggtgga

SEQ ID NO: 102565 - DNA, 358 bp, Zea Mays
ggtgatcgctggtccggtggccgccactgaagatgccgcccgggagagcgtataagatgtcgtggagctggtggccgagcgcttccagcgtgatcctgttgacgacctgtagaaacaaatctagggttccgctaggtagcggctgtaacaacttttggtcttgtgtaatatactttaagaaccgttaatggagttgaaactagaacttatctgtatgttatttgcctttatgatgtgtagcactatcaacttctctctggtacttggccccctagtaggtaggctcgacgtgtcgaggctggataccagtataccaaagataaaattggtggcccggcccctaggaggtagtctctac

SEQ ID NO: 102566 - DNA, 391 bp, Zea Mays
tttttcctttttttaaggatacaaaatacaagggcattatcaagtagagagacaaagggttcaatatctcgaggtagatattgtccaaggatgacaataaaatggcaagaaaacaaaagtataagaattcaatagggagaaagcattatcaaggagaaaagtagaaaggcaaaggtttaatatatatcaaggtagatattgcgcaaggatggcaatacaatggaaaacaaaagtataagaagtcaagggttatatagcaatattaggaattagaaaaccacttataatataatatcgccattaccgatctagtcgaaaatcttaatactaaagaactatcctatcaacctagcaaagaagtcaaataatagatccaggggatccataacaa

SEQ ID NO: 102567 - DNA, 749 bp, Zea Mays
gaaaaatgtcaaacaacagatttcctaatttttctatattcttctttgcgcaagattaatcattcttcaagttggttaatttttcttatagggaaggggttgtaaaatttcttggaatatatggtctttctcatgtggcagggggtgaggtgtatttcatcacatttttaccttagtcttatatttttctcttgtagtatacatcataagtacttaggtaaaaatagtgttgctcactgtttcccatttttagtctttcttttgatttatttgaagtattggccaaatccaagttctatttgtttaactcacttactgtgatggtttggtgtggttaccatttttgcagtggtatgttagtggtcagcagtctactgaatttttcttgctattattgcatgtgcccttatatttttaatcatgacctttattaacttcttaatatctaaataaatctgtaaccttagatcagtactagactagggtgccatatatttgttctatgatctacatcacttaggcatactaggaaaaatgtggtcaccctctggtttctattttctatcctcttttccattttcttaaagtttgggcaaaaatagactttaatggatatatctggcttagtcttgtatactgtggtgtttattatttttaaacagtgtatctactaggtgagtgtctcaataatttttctcaagcctagtctagaagtatttctatttttctttgtattatttaggtttggg

SEQ ID NO: 102568 - DNA, 596 bp, Zea Mays
tggtacgcaacctaagccctcggatctcaatccaatggctaccacgcaatcggctgaaatcattaactatgctttggtctccatcgcccgatcagaatctgatggccacaagtcctccaagtgaaggggtaaccccatcaaatcagggccgttcatcaacgatttggcagccagggtctttcttcttcccccatctggtgccgagccagcgacgcaccgcggccgacggcaaaatctccaccgacgagtggtacccagccaccatggtgatcctatcttaatgccaaaaggtgctatactatgcacatgatgttgtgaactcggttacagggtactcaccaggcacgaacataatcctcatgcgatagtcacagcgatgttctctctctctgcgctctttcttcgataatggccgagatgatcgatggccaaggggtgcaagccggtcacgaatttatacaccaatacagagccgggcggggaaaggagaatttgttgggatttatttaacagaaaaccaagatctccggctctgctacactggtttctcccgcggagtctgctcgatccggtagggtgaagcatctggagaccag

SEQ ID NO: 102569 - DNA, 364 bp, Zea Mays
ctttgacaagccggcgcagccgtgggacctcaaatccatcatgcactagggcgatgaaacatttttgtcataccttaagaggttttagaccatgagaaaccacatccccgaagtcaccgagtcagcagtgattgaagatttctaccggggatccaacgactcggccttcgtccaagccatactgtaaaaagggccgaccacctctgaacaactgttttgagaggcagacctctacatcaccgctggcgagcgggcccaggacctcatcggaagggggagggggtggagcattcccacgcgttgacggggaggtcaacgtcatcttcggaggacatgggtcgcaggagaatagaaggcagcaaaa

SEQ ID NO: 102570 - DNA, 924 bp, Zea Mays
caactttggttgttatggatttatcgcccgtcccaacgcaagctacccagtgtcgacatttcagaagagatggcccggaaattggatggaagaatgattttatgtgaagaacaacttgacagcgagggaggacatcaaggaggttattatgcgccccatatggtcccgcttcggtctccgaaagccaaaggttgaaattgatgatgcagccaatgcgtgtcataaggcgtttggtactgtctgcttcttcattggtacaagagatttaattcaagagcatatagcattcagagtatggccgcttgtagagagctaggaaatgccgaaggaaaccatcaccaagtctagcgaaggtgaactggtccggctgaagtatacattcagatatggggataaattcgatgaaccaaacgatgactggctaaaatgcatcgaagttacaagtgatgagctgcttggagcttattccaaggcagaagataacgcactatctacagccttcggaggtcggggaaaaaagagaataaacagagttttcgatgccatcggcttcgtataccctgactaccgttaaccgttgcggggacaagggaaaaagaggaaaacttctgcttcagacagcccagataggtccgcgccgaagggcaaaaaactaaaggttcttacccaccggccgcgttacattgaaccggccgtggttcctgagtttggcgcaaggacatcttctgctgccgaaagaaaagaaactgcttcaactacacagagtactaaagagccggctgtaatgccgaaggtgcctacggccaaggaagttgaaatgaagattgataaggttgatgaaccagaaatttaagaaatatcgaaaatgctagatattttgagcgctcctacaagggcgacggtaccgaaggtacaaacgggttc

SEQ ID NO: 102571 - DNA, 361 bp, Zea Mays
atttttcgattctgaaagtgtgatttttctcaaatatctgtattgggttgagatatccaacccttttaccggcactagcattgggatttgtaccgtaaaggatctcttgttggtcatattgcattcttcaagactcccgtgcatgtcagacattgaaaatttatacaaatcactaataataacacatatatgtggaagtatgaatgacactgacaatggaaacaccgttacgagttgcacgtcgagtctttgaaggtcatcattaaccacatgttcttgaatgtaacaaaggccttttgccttaaaccaccaaaagcatggcctgggatttatatattgatggtgtcgatgccaactgaag

SEQ ID NO: 102572 - DNA, 465 bp, Zea Mays
atcgtcccgtaggtatttccatcgtctgtgcgcgcgttagggcatcgggtaggggatgggaccctgtaattccaccgccgctgcggtagaccggccgcgccgccgtgccatatgtgcgggggagggtgatgaggggtgtgtcgttggattcatgcccaacggtgtagattagatagggagataacgtttcggtggattggatccggaccatccatccagatcggacgggtgaaaagcaatcgcaggactttaaaatcgggcccgttcaattttgatccaatggctaccagtgcgtaccgattcgatgaatcctagtctaatctctgacgtcggttgttgatcgggcggacctgggccacccgtaccccttcgcgggtacatttttctaaagagaccccaagttttcgcagaatcaacccgccatcccactccactgtgcgctgggtctctggtttcttgcgccgg

SEQ ID NO: 102573 - DNA, 403 bp, Zea Mays
gattagtctggcaaaggaagacgaggaaaaaacagcattcatcactccgtttggtgctttctgttatacttccatgccgttcggcctcaaaaacgcgggagcgacctaccagagagccattcaaacatgcttagtcgatcactggggcaagcgtgtggaggcctacgtagatgatgtggtaatcaaaacggagaattcggaggatttcattgaagacttacagctggttttcaacagcctgagacgatatagatggaagctcaatcccgaaaaatgtgttttcggggtaccagcaggaaagttgctcgggtttatcgtcagccaccggggaattgaggctaatccggataaaattgaagctatcatgaagatggaagctcctcgatcacaaaagaaggttcag

SEQ ID NO: 102574 - DNA, 292 bp, Zea Mays
ctcagtcggggatgcccattctcggcttctcagcttcgagaataggatgaaactgcttcatggagggatacaagccttggtcaatgttgttcatcgtggtcgtggtagatctggacctagatatggaccttgtagttgtggttgtaatggttctggtcatggcagaggaggtcctagtcgtagtgcccagagaatggtgtcatcagatacaagaaagtctaacatcatatgtcaggtttgtgagaagactggacacactgctcttgattgctggtggagatttgatgagaac

SEQ ID NO: 102575 - DNA, 290 bp, Zea Mays
caggatataatcctagccgttgatgcacgatccatcgaccctgatgaccggataccccttcgtcttggacaatttgctaaagagaccccgcatttttcccaaaataacccaccgtccatgggaagggcataataattgccgatgtgccctggaatttccaaattgacccccgaactccctggttattgtgtgcatagtccagaactctgtgaaaataggaaaaaataatttagaaagtggatttctagtgccaaaataattctagaacttatataattcatagaaaattc

SEQ ID NO: 102576 - DNA, 927 bp, Zea Mays
cgcccctcgaggggaccaactcaagtatgcacttcaacttttattcccagcctccaacagcgcagcagagtatgaagccttgatacatgggctcaacattgctgtgtcgctcggcatcaaaagactgatggtgtacgtagattccctagttgtcatgagccaggtcaacaaagattgggactgccccaccgattcaatgggaaactactacgccacggtcatgaagatccaagataaattcgaatgcttagaattccaccacatagatatgatcgcaacgcagcaacagatgcagtgtcaaagctaggctcaagtcgggcacacgttctacccggcatctttgtccaggaaatatagtagccgagcaccacaacagggccagcagaggaatgtaaggcagtggagcaggcagagccagacctgaaggactgagggaaccaattatcaaatacatcaaaaatgaggaggagcctgatgataaggtcgttgccgagcgcattacacggcagtcagcccattatgctatcataggaggattgttgtacaggagaggggtcgccagagtactcatgaaaagcattcacttagctattgggaagcatttgctagaagagatccttgcaaggaagtgcggagtacatgtagtctcaagaactctagtggagaaggctttcagagcaggcttctattggccaacaacaaagaaagatgcagctgacttagtccaaagatgcgaagcgtgccagtttctagctaagcaacagcacctaccagctcaacaactgcaaactattccggtcacctggcccttcacgtgccgggggctggatatgattgaacctttcaagaaggctcaaggagggtacacccacttgctggtcactatcgacaaatttacaaagtggatagagtacaatccgagtgcaa

SEQ ID NO: 102577 - DNA, 532 bp, Zea Mays
cgagggtgctaaaacacgaataaggagggtgagtgcggacctgagagcggctagccccgacggggtgattcacggcggcgcagatgatcaatttgggggaaaacccaaattctacggctatggtggctaatcggagatgagagttagtgtcttgggttcaaaataacttggcgaagtagagtggggcatcaatttatagaagctttaggcgggggctccgaatttgggaggagtgtggagcttatctccctcgtgaggcaatcaccgaggctcaccgtggagcgcatgcattcaccttgcgcctgtaactatctcggggtgccacaatcacgacaatgtggtgaatcaggcgactacgtgtcccttgctgcgatcacgacgagcaccagcggcgatattttaccgaccgtgcgggcaagtgggcacggcggtgactcagccccgaccaagaccttcttccccaagatctttttaaccctcacggttatctactccttatcggcacgaatcatggcatcggcgtgaatcacag

SEQ ID NO: 102578 - DNA, 341 bp, Zea Mays
taagggccccctcacctctgaactcgacgctgaccacgtcgctactcttcacgctcaggccaccaggttgcacaatatccgatccctcatgtccatcatattggacccaacatcctcccacaacccttgttggtggagtcagatcctcctcactctttagcgatatgcacttgccgatcacatcctcaacgacctcgtcgccctgccgtatccttcctttgttgctgagcaaagggactgcttccactaccattcatttggtaccaaacacccttgctcaaactcaagttcttaaaatccatatccatgttgagaaaggcctctcaatttcttcgtttttg

SEQ ID NO: 102579 - DNA, 387 bp, Zea Mays
gtgccttgggtaatttggccactttttgttatttggtccaagtgattttggcgccaacacaaaggtgaacacatctgatctttaggctagggttggttttgagacttagagaaatttttgatggctctattgtgctctccacttggttaactgatttggggtttttgttgggcctttttgtaatatcttccttaatacatttggtagattttctaatatacttcatctttggtaaaggtttcctttcatgatttggtcatttgcccactctttcccctttaatcccatgtttagggtttaatggcttaagaggggaattagggttttggaatctttttcatgagtgagaatgtatgaaggctagggtttccttcttgttatgatcaa

SEQ ID NO: 102580 - DNA, 481 bp, Zea Mays
aagtgctgatgttggttgattcaggaagctcctcatctttcatcagtcaaccgttggcagccttgggtcctccattaattcctctgcctgaggctgttcaggtcaaagtggctagtggacaattgctggcatgtacccattatataccccattgcaaagtgagtttgccaggtcacgtattctctattaaccttaaggttcttccattacagtgctatgatatcatattaggcatggactggttatcttcccatagtccgatggagattcattggcaagatcagtggttagcttttactcatgatcaacaaagagtggttcttcatggtcagttggcagataattccacacccgagcaaatttctgtttgccagctgtatcacttggacagattgaatgaactttggtgcacgattgaattgcagcacatagctgaaaatcaggccaacaccagtctgccccaagagattcaggatcttat

SEQ ID NO: 102581 - DNA, 437 bp, Zea Mays
gtgacgatcgtggttaaacctcgattaatcatggctcgacgcgcgccggcacgttcctggacctgcgagctcccactcaaccgtgcgccgcatcgaggagcctctatgccaacaaagcgcacgatcctctcagtaccaccgcctcacccgaccatgcgggtgtgcatcagacctatttgaacggtcggcacaactagtttccaacgactctctaggcatcggaccgagttagtgtgcaccggacctctgatacagtgcagagcatctggcagatgcgggagatggatatcctcgggtcatcaagacacagactcgcttcatgggccacctgaaaacccccaacgagccatccgagggatgcatcatgggcctcgactagaggtaattgaacacgcattaaactcccatgcgtgagcaattaggccaacgaacgcttc

SEQ ID NO: 102582 - DNA, 424 bp, Zea Mays
tgacatcgcagggcattgagatggatgaggcaaaaattgttgccaccacgagctggccacttctaaccacggtcacgcaggttcgaagttttcttggtcttgcaggattctacaggcgatttgtgcgggatttcagcaccattgcagcacctctccacgagttgacaaagaatggagtgtcgtttcgttggggaccatcacaacaacaagcctttgatgccctcaagtcgaagctcacacaagcaccactgctgcaacttcctgattttgacaagacattcgtgctcgagtgtgatgcgagcggcattgggattggaggagtgctcattcaaggaggtaaacctgttgctttctttagtgaaaaattgaatggtccaactctgaattattctacatatgacaaagaattatatgctttagtacg

SEQ ID NO: 102583 - DNA, 778 bp, Zea Mays
cgcggataatgacccggggtaaaagatcttggtgttgggatgagctcagacccgaccactggattattcaccgtacccacttgttgtacgaccaaccgaggtgtcctcgctatagttcgccgcctttgtagtcgtgccacgtgcttaggaacgttaccatgtcacagtgaaccgtaagagggagtctgtccattgccgggagttttgcctcagtgaaagccacgttagcgctcgccggtgatttccccctctctctggccgcccgtgtgtcttccccaaattggatgccaccgttgttgatctctataaattgagcgctcagcgtgctccgttaggttgttacgcaccaagtgcaccagctctcgcctctgatcatccaccgtagcgtcccaatttcacttttcccccaattctgttttccgcgccgccatgaacatctcgtcgtggccagccatctactggtcagttcaagattctctgcttgatgttctagcatcccttaagtttcctgttgctcatagacccgtttgattgaactagaccgcacggaaacaccaagaacacctcggtttgtctccggtattcaccgctgtcgtgggtagatgaactccgggccggattcacgcaattcatagaggaattagggtcgccaggggtaggaataggtgtcgaatgagttagggcatcagtcgttgcgcatcctggccactacaagctcgccggagggcgcgctcaccgccgttcaccatcggggacctgggtctgctaagaaacaaaa

SEQ ID NO: 102584 - DNA, 557 bp, Zea Mays
aaaaagaaacatatcggcgtgtggacaccaattccgctgcctctgcacacgctctctgctgcgagctccacaaattcaggagatggaagctttatcggcggcgaccggccgacaagcccagcgcagctcgtagtcgtagcgccgcccccaaaatctcgtcgacgacacccgggccgccggaccgcagtcacacaccctgaaataaagcctcatcaccctcaccaaaaaggggcaaaattaaaggctatgaacccacgggggcttagcgtgggaggcattgaggcaatggctgcccccgtcgacgccgatcgaatccgccggtgaatccaaagttctgtcaggaaagaaaacaaacgcatgtgagcgccaccctttcgtcgcctcctttctttttttccctatggcatactactatgtagtagtgggctggcggatgacatcgatatcagaatcagatcatctttaccaaccaacagctggttttacttttgatggattccttttccttcggttgattcatctcctctcctcggctaagcaatcgcttaaccacacaa

SEQ ID NO: 102585 - DNA, 470 bp, Zea Mays
gcgggagttaggtgggacgaacccatctattcaattagtgccttcagaggagatcttctctcggatggatctgcgatgtggtgcgggatgccttcttaatctgcaatgcaggagagggatccaaagtgaaacacctccccaacaatgaaggtgaccggggtgttgaaaatgatacccatggagtcgtcgtggataaacgtcgcacccctacctggcatgccagctgtcggtgtttatgacccgactgcgcaccatggggttccccacgtgatgcttttgagcaagacaacgtgattgaatgcgactcaatggtacgtgcgagagcacgtcggatcacacaaaggtttatacatgttttggccgctagaatgcgtaataccctacttcctgtcgaggatgtgtatttgaatttcaccgatgtacacatattacaggtgagctgagggtggtgatgatgagttctcctgtcg

SEQ ID NO: 102586 - DNA, 644 bp, Zea Mays
gggggttgtaaccaactgaataatctgtgacacttggcccctcaagagcccacaaaatccagagaatccagaggggacaagggaggggttgaccacccaagggcaacaagctacaaggtcaatccctttgcccttgttccagagtgagggagcaggtaccataacaagattcgaggggttgtaagaattttacacatgagcagggccagggagcgctagttgacgggctactgccttatagcaaacaaatccgccaggtccacctaaatggtcacactagtaccattccaaaaggaatttgcagaaagagaagaaaaagcaatatccaagagcctttgagactagtagaaacaaagtctagaacccattatggggggagaccgcttggggtccagaatcaaatgcaattttggtctgaaaggaccatcggagacctgtggcctactagaagattcccccttcttcataaaaaccctagaggtagaacctgggccccttcgaaagaaaccaagactgtcatcagaagaggatgaggatgaattgtcatcatctttgtcgcaggtagctaaaaccatcttttgcgggtgaacgggccaagtcggccatgcattttggttctgcagttgtaaaaagtgttgtgctgc

SEQ ID NO: 102587 - DNA, 520 bp, Zea Mays
gcaagcttgtgaggggcagtggcagaaagattaggatagcaggcacacctgaacacacgaaggtgatcgtaagagggagagatgccaaagagagcaaagtaggggtggggtaaggcactgccttgttggggaggcggttgagcagcagcggccaacccctcagcccaatagtgggcgggaagggaggtctggaagagcaaggaagacatgacgttgttcgcgatgcggatcatgtgttctgcctgatcgttttgagaagaagtataggggcacgacatcctcagctgagtgccatggaagaggaagaaggaacgatacgtggagttgtcaaactccctctcgttgtcacattggacagcccagacgttgcgtccaaactgagtggaaacccaagcgaagaagtgagaaagggtggggaacatatcagacttcaagcacaagggaaaagtccataagtaatgtgactagtcatccagaatgagcagacaatatttattgccagaaacgctgagtacagggg

SEQ ID NO: 102588 - DNA, 307 bp, Zea Mays
gaaaaattagcactagtgaaataagatactatctttgttgttaagttgcgtgcaccgactgattcaacccgcaagcttaagctgccagaaagaggtggacgatacactttaacacccctactcaaaataaggggggcaaaggacttaagggttcggaggacttaggttgcctccaacaggccagccaaagagacgcacacttgaaaataaagggggcagaggacttgagttgccttcgaacttaagacctccggttttggtatcttgttaagttgcacacaacaacgagttcaactcaaaagcttaa

SEQ ID NO: 102589 - DNA, 330 bp, Zea Mays
ttcatgcacccggcaaaaagcttcggcattagcgtccataccctggcttcggagagcccatataaaaacactgagcctaacaacagcattgggtgtcaattgatgaaggtatatctcaaagttctctaaaacttcccctatcatgtcatttaaggggaaccgaagtcctgctctgaagaagctcttgaaaacgacaacttcatcctcttttggctccggaattatttcctccccagcaaaccggacaagcttgctttcagcctccccaaaataaccaagttttttcatcataaccatgtcatccttcgctatagtagatttcccaaactc

SEQ ID NO: 102590 - DNA, 453 bp, Zea Mays
atccagactagcctcgatatatgtgatcatagccgagttgttggggtctagctggacttactttgtgagcttggacctggcctataaagttactagcaaatatttcttgtgggaaggctcgagatctgcatttcttccttttcatgatgactatatgtgagggatttctttatcctgtcacactcagaccacttcaagttgcctttgacagtgattattccattagggcttgacatcttgaggattagatatggatagtgaagaatggacataaactttgcaagcacaagtcttcccaacagaatttctgtagttgtctactacgcgacctaccccataaattaattttcgaacaatctttgacactaacagtggtctaaggtcatcaacagtgtgatgacgactatgatcatctccaaaacataaaataacatcccaatataattgttcggg

SEQ ID NO: 102591 - DNA, 345 bp, Zea Mays
attctcatgaaaacttttccaaaatctaaaggtaactgtgatcctctatccgaaacgatcttcttcggtacaccgtgtagagacacaatccgagccatatataactctaccaattgagatccttataagtagtcttgaccggaatgaaacaaactttagtcaatctctctacaatcacccatataatcatatcctttctcggtgcgaggcaatccagtaatgaaatccataccgatctcttcccacttccactcaggtaccttcagtgggtgcagtagtccagctggccactggtgttaagccttaactctttgacacacatcacacatagccacatgtgcagcc

SEQ ID NO: 102592 - DNA, 430 bp, Zea Mays
atttgagaagaatgaatattagtctcctttgcaagtggtgatggaaaatgggaagggaatttgataggaaactgtacacaattaaagaagcgagttgtttctcatcttaagcaaaataataaaaaaatctctcctgtgtggaatgatctactgaagattaggcatatatatctaaaaggcagagctactgcagtaggtattaggtaatggcagagctaccagtttttggaagaataagtgccacctatcagatcatggagagagaacatgtggttttattttttgtctaacaaaattcccatggaactgtgatctctgaatgttggcagaatcgttagctcttttaattgttgagatcagagttcagaatatttgaaaaccccacaagctttgtagctacatcaccatcaacttgtgtggaaatagcaaa

SEQ ID NO: 102593 - DNA, 651 bp, Zea Mays
cggaggggtcctggctcaaatcacaaactgcctaccgtgcactccagacgcggagggctatctgcaggtactcacccaagtggtgaaccaccttatccccctcgctctcccaccaaatgatctacaccacgccaataacagtcgacgagacacacgtagctgtatcaatgcttcgcacaatcgcctacatgaggcggcgagaagagtacgaccgggatcatggtgcgctagcacacaaccgtaccaccaggaccgagttagcagtagcctccaccaacagtcagccccgggtcgatcgaggtagcacgacgcccgaaatcacttgactctccgggaccgttgacgtgatcatcgccgagaggaccgagggacgtgtggagtctccgcccttaccccctaactccaagcgatccaatgactgccaaacttcaaggtgtccaacgtcgacaattatgaacccaagcaagacccgggcggctggctagctgtctacacgaccgctgcccgggccgctacggcgatggaagatgtcttgatagcgtacatacccattgtcctgtggcaggacacgctgcaacggctccgacaactacctcgacattgcatcgacgactaggacgacatcagccgctggtttgtcgctaactttca

SEQ ID NO: 102594 - DNA, 692 bp, Zea Mays
aggggatgaacttgggtgaatgaaacctttttctaataattcttctatttgtttcttcagttcaactaaatctttgacgtccattctataaggtcttttcgagataggtgcagttccgggtaataattcaatagaaaactcaatatcacggttaggtggcatacctggtaattcctctggaaatacgtctgggtactcacacactaccttgatattttccaagagcttttcttccaagtgatttatcactgtcttcccttttgcatttgttgacatgtctgtgctaacttggactctttcgccttgcggacttgtcaacgtaattgttccgttggcacactgtatcactccatcacaactcttcaaccaattgcatccaagaatcacatcaataccattggatcctaggaccactaggttgactgagaaatctattccttgaatcttgagattaacatgggggcatgagtgtgtggccttcatgtcacctcccggtgaactaatatgtaataccttcttaagagggtacttaggtatgctatgtttttccacaaatgactcagttataaacgaatgcgatgctccagagtcaaataaaactgatgtgggtatggagttaacaaggaacataccatacactacgtcggcatccttaggcactgattccgctgtgacgtgattgacccttcctc

SEQ ID NO: 102595 - DNA, 358 bp, Zea Mays
tgcacggggttgatggggaggtagatcgcgctggcgttgtcgcagggtgtaagagggctatgaagctcctggagcagccgacggaaccaggaatccccatccatgccataggccacaacacgatactcagcctcaacgctggagtgggagacaacaggttgctgcttcgaggaccaggagacaaggttgacatccaagaaggctacacaaccacatgatggactgacgtgtgtcggagcagccaacccaatcagcgtcggtgtagacaaccagctcagaagttggagaaggccgaagaagaagaccatagtcgagggagccgcggagatagcgaagaatccgcttcgcagcagtgagg

SEQ ID NO: 102596 - DNA, 307 bp, Zea Mays
actaaaaactgaaaattagtgtttggtgcccagtttgatgtccttttgtgactaaatcatggggtgttggactaagaactatatagcaaagttggagcccataatacagagaatatgttttataaaaaggaatggactcagtactacataaaaagtggagttactgacccctaaagatgggctgtcagacgtttggaatttttcagataagaaatagtgaacatatctgaattctagtgtttggtttaactttggaactatatggtggctgttctggacagttttggactaggatctttatagaaaa

SEQ ID NO: 102597 - DNA, 634 bp, Zea Mays
tcagcatattgaacaatcgggaaatcttgaccacagttctcagtgagtggcagctgaagaagaccctgctgtctcgccttattgattatactttgaagcaaatctgccgctagaacgaataaaagaggtgaaagggggtctccttgtcgtaccccacgcttgcaatgaaaagatttgcccggcacaccattaaggagaaccgaggacgtgccagaatggaggatatccctaatccagcccagccatttgggcccaaatcctctgaaggacagcacctgaatgatcagatcgtgctcaactgtgtcaaaggccttctcaaagtccagcttgagcacaatgatttcttttttggaaacatggcacaaatggatgtattcataagcccaagctaggcaatcctggatggatctacctttgatgaagccatattgatttttgtgaacaagggaggtcatcactgtctgaagacggttggccagcaacttggtgatgattttcatactattatttagaagcgagattggcctaaaatctcccaccaattgagcattctccttcttcggaatcaaaacaataaaagaaccattaatacttcgaagacagacatccccttgataaaattgctcacataagt

SEQ ID NO: 102598 - DNA, 359 bp, Zea Mays
tggctagttatttaggccataaaggctactactactattatgaaggatgttatagcaagcatccgaaaaattagttaggtctgagaagacgactagaatgagcatgcatcatgattgtcgcattataattgtctcttgtgcatcaacatgcttatctcaccttcattccaataataagaaattctgaataatgtgttgtattgctatgttatgtaatataagaaatgccttatctcttgcctaattagtaagtcttgttaggttgtgttatgtgtttctcttgccttgctatctaggtggtattgtaaatattcaaacctttttgcaagaaaatgttgtccatcctgctcatgagaaga

SEQ ID NO: 102599 - DNA, 343 bp, Zea Mays
gtgagtcaccggagtgcaactgccgtggcgctcggtcaggtaagacccctagctgtaaacgggctgtccacaacgacatattgcgacgtggtaatgtccccaagcacgtggcatcctcgcggcgagtggcggacaccgacgatgacatcccggccgggcgtgaagcaagtgggtatggtggccaactcacaatcttatccgcagtcacgatcttttcacttgcccggtaatatccgcgtcgatccctgcatgaatctttacgacgagcttgaatcaccgcgctcgatcaccggcggcgaggtacactgcaccaaggatcttcttcagtgcactgtaccatggc

SEQ ID NO: 102600 - DNA, 344 bp, Zea Mays
gtttcctgggacaaggttcaacgcccattaaactatggggggttaggaattttaaacctggaaaagttgggttgggcactgaagatatggtggctttgggcagaaaaaatggatcggcctcgaccttgggatggcttccaagtggaggtacctcgaaatgccaaagctctcttcaacatggcaacaatccccataattggcaatgggaaaagaattttattctggaaagacaggtggctggatggaaagaacatcgctgaattagcacccaatctgttctcaaccattggtaagccaacagtaaaaaaaagacagtcgcagattctttgagcaacagaagatgg

SEQ ID NO: 102601 - DNA, 653 bp, Zea Mays
attggaaagggccactgtcgcgccccggtgaagtcccaagctctatggtctcgcacgcacgggtggggacatcaaggagatgcaagtcacaatcccgaccatgaacacgaatgacccttgtggcctgattcatgcactggtaaagacacgaaagctcaggtcccagcaagcataatgaacattatgtcttacaagaacaaaaagcggtggatcaactttttcattattccgggaagtcgcgttggagcacattacaacgtggggtcagcgagcgctacgaacaatgtcgtctatagacaacctacgtacgacgtgacttactgcctcatcataatactccaacatctcccccagaccctcgtctaggagggccgagggagggccaacgacctcccgtaggctgcagttggaatgaagctccccaaagagcagcgtcgtggcagcaccctaacaaacgtcgaaacctacaacgtcccagatgcggtatgggatgtcatccaagcgctccgctagagaggaaccaagagccccgacaaagtccaaggcctcacccaagcgatagcgcagctcctccagctcgacttccaaagctgtaggaaaaatgataaaggtaagggaaacatcgatgactccaaggagaaagggatgagcac

SEQ ID NO: 102602 - DNA, 651 bp, Zea Mays
caattagtgctcagactaccatgcattcttcatacattgcaccactgagagcatgcaatggcagcttgtattcttcctccacttgctcctcctattcaatcttgcttaacatctcatcagtgagggtcatgcctaattctttacgcaattgcatctgaatcttctttgggcatttagtctggtgaccttgctcaaatttctatccacaagtaaagcaaagcccattttgtcgcctatactccttcactaatctctctttaaacagttccactagtgtcatctgcaatcgaatgtcaggtttaaacatgggactattaaacttgggctatgaacccatcctcaagctcttttgtctttgcttctccagcaccacttgctaaatctgggctaactacgctgctcgatcagcagtggccaacagatgggactgaactgctccctgcaactcctattttagccccttgatgaaatgagccacacaatagtctcatccaatcccaggttgtgcactgaagtggcatagtgggcaccttcaaattccttgagataatcttccaccgactccttctgatagagattcatcaagtcacacatcgcctgtgaatattcctttgcaccaaactttgcttgcactaccctccccaaactcac

SEQ ID NO: 102603 - DNA, 526 bp, Zea Mays
aagacatcattattgccatatctttcaagaaggcctaggacacgccctagaacaaattcacctcatccatgaaaacgtgcacgatacaaatccgtgtggagcttgctgcatcaaagaaacttgatttgtctgccatgaacttcttctgctggatcatggggctcgccagtcgccaccaagctcaatgctactaatgcacctctacatgatgaggaagtcctcacttatctgctggccggctcccaacggactatgacccattcatcacctccatgatgactaaggatgagcccctctccatcgataacatgttcgtccacttggttgcgtttaaggctcgctaactccaacatatggccgaaatgcacatgcaacacagtgcctctgccaactacgtggatcgtggtagcccctctcgtggtagtggccatggtggtcatggtcgcgacagcggcggtgctccctcccatggcgatcgtcgtggcaacgaccctcgtcctcgatggttgattcgcggcaaactcgg

SEQ ID NO: 102604 - DNA, 445 bp, Zea Mays
gtagtggcaggctccctatgctcatcggctactgtagcaggcactgtagctacttggcgcccatgcccatgcgagtgggtcataatgtgattctccctcccctggtggcaggcttgcaacagttggtagggagttgtcatttcggtgaatagtacctcctgcatattgatgttgtactgcaatattctcattaggcatgttagtatcgacatggagaaaatcagggacatcaggatcacatctatcagcaccttttttagtcgtaaaggatggcaacaaaagaacttcagatcgtaatctagccccaacattagaatggagtgtatagaagggaaaacagtctcatcaaatatgacatctctagagatgtaaacacgtccagtggagatatcgagacatttaaaacgcttgtgaagaggactatagccaagaaaagcacactgct

SEQ ID NO: 102605 - DNA, 497 bp, Zea Mays
actctacatagttaccttgaaaaaagttggggcataattcattcttttgacgaatttagcattcgacacatatccagggttgagaattgtagagctaacaatttagcgtaggacacatcaggttatcggataaagcgagggagatttcacagcaccgaaaatttgataaccggtgccgcgctaggttcccaggtctcggactatctgggtgagggagccagactgtctgacattgtaaggaaggttctcctaattgattcggttgataacgaagccactgcaattgattggaggacacccataattaattacctacgaaatcccagtgttaggactgataggaacgttcgacgtatagctttcaagtatgttttaatgagtgatgacctctaccaccgatcagtcaacgatgtcctgcttaaatgcttgggcctagatgatgctatattggccatggccgaagtacatgaagggatttgtggtacccatcaatcggc

SEQ ID NO: 102606 - DNA, 393 bp, Zea Mays
cccccagccctcactatagacacatcatgaaaatatttccccttcatcgattcaatttgtccttgcttgatagtggatttcccaaaaaaacaacgtggctaggtctccacggccgatctttggcattctcatcttcactctcaatatcaaagctttcactatcgctggagttctcagacaacccagccagcatctcattggtaattttttctgcattggtcttctccatagcttcgtagaaaccagccaatgcagggtcagtgatcttcttctcctcaaccattcaaacgatggttgcgcagatgttgaagctcaaaagttaatcgagctcgagaaagcaaagaaagctaaaatggcaaacatagtgcaatcagctagataacaggaaaaata

SEQ ID NO: 102607 - DNA, 1195 bp, Zea Mays
agcaatggtctctagctgctatcacttcttgttgaaatagtttgaacaaattatgcgtgtagcaaatgcttccttgtttctccattggccatggtgtactaattagtggtgtgctatgaatactaatatgatccgcttttaactcttcatgacgttggcactccaaagttgtatcaaatctaagccaaaactcaacaaaactcaatttccgatggatgaaacgattgaagaatgaatttgagctttcagatcttgaagtagttcttaggactcctgctagaggtatatccataaaatatgctaggatccatgactcacgaatttgatacctatgtgccaaccattcattcctctccagactataaacaatcatgatagcattccatcgattctcaaattcttccggggtttctgaaccccatacacaaccattcaaatcattccaaaaatccttgttattgtttgttggatggccaactttctcagacatcttctccataatgtgccacatgcaaaatctatgagttgtatttggaaaaacagttctaattgctgatttcatactagcatcttcatcggtaatgataagtttaggagcttttccatccattgccaacagaaaagtttggaacaaccattcataagactcaatcttctcatttactatgaaagcacctccaaaaaagacactttgcatatgatgattcacgcctgtaaaaggtgcaaatatcatattgtattgattcgtactatatgttgcatcaaaagataccaaatcaccaaaatgagagtagttttttctgcttgtagcatcagcccaaaatatgtaaaccaacttgccatgctcatccacaacaaaatcatagaaaaatgcagcatttgcctctttcttccgctccatctgtgcaacaaataattgtgcatctgcatcttttattttctctctaagcccacgatagtagttctgaagatcacgcttcatgcatccaatattatcaaaaccatcacttacttgtaagagtctatatgcttgggacgtacctatacttgctttatgacatgtgaataatgtagtcttcactctttggttgattgagcgatttgaacgaagaaaaggaattttattaggtgatacaagattatgattatgttgctcaaccattgaggcgatatagtacctcttatccggtcccaa

SEQ ID NO: 102608 - DNA, 357 bp, Zea Mays
atgacagaagcaagcatatagacacaaggttccatttcatcagagattgtgttgacaagggtgaagtggatattgatcatgtgagtaccagggaccagcttgcggacattctaacaaaggcgcttgggcgtgttagatttctggagcttcgtcagcaactaggagttgtcgaggtgcagcgggattagggagtgaaatgttgaacttaatcccgtgcgtattagttgcatgaacatgtttacttctattattaggtagctgctgcattatgtaaacaaacggtgcatgcgccatgacttgtgctgcgttcacaaggtggtgactaggtcctccgccatgaccggatggaaaacggcc

SEQ ID NO: 102609 - DNA, 309 bp, Zea Mays
gattattggaacattaatcgagagagagagagagtgatcagactataaacaaagatagtttgatgatagaatgttggtttgatgatagaatgttttctaggatttgtgtgcaggccgggtggttgcgaggaagatccatctgttcttcatctacatgcacgccattatatcccatgcatgtccgccgtggatgaatacgagagatccagagagaggcggtcctattaattgtataaaatcatatcctagctatacctgctgtacgttcgacattccttgattgggtcccacagtgacagctccctctcg

SEQ ID NO: 102610 - DNA, 1068 bp, Zea Mays
aaagaatggtctacacaaaaagcacccaccgttggataaaccctgaggcaccgaggccaaagtcaagtgggttcgtgcccgagactgactcgttataagtggtcggcctcattaactacgtctgacatcaggccgcagtagagagccggtctacctcactcatgacctgcgcaacctctcggcttacagcgcactcataacctgcgcatccctttggtcaccagcgcattcttgacctacgagcccctcagcccgcggatcactcatgacctatcaagcttagacctgagagcacgaatcgtccatagggcccataacgcaacgagacacgccgagacctaggctctagaggccaggggtcggcgtggcacaaaggtagtaatgatggcaccagggcccccgcaccgctcacactagccgtcataatgagtgggagcagaggttaccatacgacaatgtgcatgtgggcaaacggccttgccacggtaaggcactcggttttaccacggaataatggctccttctcaaaggagccaccaacagccgaaccccgccctgacctataaaaggacgaggttggccacaaggacgggggctggagacacacacggacccaaacgaaccagagagatacagacgtacgaagaagactcacgacagaagacgctcgacagaaggcaaccacacatgcccggagaaacctaaggacttggaggtcggagtcaaggcttagcgtaggactccaggtccgtagtctttaggaccactcccacataagagacctagaagccttcccaccctctctcgcctgcttgtaacccgcttgtaacccctactacgagcatcgagcaacagaggtgtcggtagtgcgagccaccgaagactggatgtagtggcgttatgcccaaaccactataaacattgcgccaaccgaacacaccatccggagccctaaacgcgcacatagaaatttacttctcggagcggaggttcgaaacatcaacagttggcacgctaggtagggggcttgcgcattctcgacgaacattcaatgctccaaatggccag

SEQ ID NO: 102611 - DNA, 377 bp, Zea Mays
gttcataacaggatacacaggatttggccggtggtgcaggctgaacttgctttgaggacagtgctagcctgcatatgggattatgcaggcaaccaaacatggacgaattgcactatgggggcctgtataaggggttgttcaggcaaccaatttgacccttagttgtgcttttgccttcaccaccatgcatactaagagcatctgtagtgatgagtggaatcattgccgacatgtaggactgaagagagcaaaaataacgtttactgttgaactggtcttaactgcatgtatgggttcacaatagcaataaacaaattggacaaaataatccgtgcctgattgcctcctcatggctacagataacaagcctgcaaaaa

SEQ ID NO: 102612 - DNA, 705 bp, Zea Mays
atctaatcaggtcttacctactgttgtactgctctcacttaccttttctcattatcttccagtgtgtcagtggccagttcaggatggtgcggacgaagaatgtcacaccgtcagggggaggagatgaccaggaccctcctcgccccttcagacaggacaagggaaagactgtctaccttgagcagcaagggggcaagaagaagagacgtctggatagagccactcgtgcagcgattgctgtagtagcagtcgatcaagcagagcaaggaggtcagttgaggattttctctgatcagatttcctttctagtctgtcgcctctcgtcttggactcgctcctccactgctcggtccactccttctgaccgagtctccactccagctcccacttcaccagctcctgcctctctcgagccttccaccacacccactgctaccaccatctccaccactccagcttccactgctcccgcttccactccacctattcttccacctcgcttccgagagcgtgacgagactgaggtgcaaccactcgctgttgatcctcgactgctcgatattcagcagtccacagctgccagggtatgtcggttaagacacgtactcgtggactcatggtttccagctcagagggacccaacagttgcgccactcttcagcaccaggagccaggagtccttcaggggacaactgtatgctcaga

SEQ ID NO: 102613 - DNA, 513 bp, Zea Mays
gtgtgctcggatattttgttagaaaacactttttagtactgaatgtcgttattgttttcccattgttagaatacaacagtatctacaattgcagaagtaaatgtagtgtgatggttttgaaatttcttcgtatttcgcggggcatagaggtcgctctaagatgagtaattgcaaacgtgcttgtgttggattaagtaggcgcgagcgcaccgtgccgatttaagtcattaccgacttaaaccgactgctccgttagtagggtatagtggtcaccccgagttaagtaagcgtgagcatgtcacaccgccttaagccgttgccgacttaagccgattgctccgttagtagggtatagtggtcaccccgagttaagtaagcgtgagcatgtcacaccgccttaagccgttgccgacttaaaccgattgctccgttagtagggtatagtggtcaccccgagttaagtaagcgtgagcatgtcacaccgccttaagccgttgccgacttaatttgatt

SEQ ID NO: 102614 - DNA, 621 bp, Zea Mays
gagaacatcactggtggcaagtgcaaggttagctggccgacagtggcaagctgctagatcttgggggactcgtcgtccttgacatccaccgctttgcgagggctctacggcttagctgcctatggcggattgggatgacccaaatgccccttggacggggttacagactccttgtaacgacactgataaattactctttgcaacacccatgagaatcgcaattggcgatggagccaagacctccttctggcattgcacttgggtcaatgatcaacgacccaaggacattgtgcctgacatcttcgtcgcctcctctgaccgtaggctctctgttcgggaggccttgaccgatagcgcatgggtgagtcatattgatctccacgcgatccacgcggttgatcacctaaaatagtttgtggacctctggtcctttgcccattcggtctccttggtgcaaaacacatatgatcgcatcgattggatctacaacgcctacagtgaaatattctgcagcatctgcttaccagattcaattcatgggtcacacttgtttcaatctcaaagcccttatttggaagccatgtgggtcatataaatgcaaactcttcgcttggcttatca

SEQ ID NO: 102615 - DNA, 649 bp, Zea Mays
gtttgtaacaccctgattttcgtcgctaagtaaaatcttgttttatttcgcaatcatcttaatacattaattttacacgcatgatgttagtaaacacgtgactaggcaaactatttacaagtatttcacctcctttctcactagctataaattaatccatctcaagtactaacgtcaacactctactccaatgcaacttttgcacaaggatcccaccttcgtaacattacacttgctagcaaactatctcctcttcccaggagcaacacacgccttgacacagtgattccagaagataagctagctatctgttccttgcctcggaagcctcttaagccagtcgtacctcacaacaactcacagtcaactggtagtagtacctactcaccattactgacaccctgacgacgaggagacacatccatggcaagaagctttcgtgtgggaactggaagctgtcttctacctcccctgactagaaccaatgcacgcacacaccatgatgctggactaggagttgagaccacattgtcaagccaaggagacctgaaacgacacaacaagcagagaaagcagtagcccgacaagcccctgcgcgcgcagtcgaatcgaagaccagccactcacctcaatcaccaccgaagtcgtg

SEQ ID NO: 102616 - DNA, 503 bp, Zea Mays
gcacaggattacaggaatcctccggtctgaggcacctgggccaccagtggagcagaaacttgagagcctgggtgctaattacactccaaaccttgttaacatggtgctgaagaggtgcttcaaggtcaggcaactgggattctggttcttccactgggcaaagcgactcccggatttccaccacacgacggagacatacaacacgatgctgtacattgtgggcgaagcgaggagctttggtatcatggaggagctcgtgggtgcgatggatagggagatgtgctccaaggacatcaagacatggacgattttattatccagttatggtaagacgagacagattggcaagatgctgtcaacctttgaggcgatgaggaaatcggaatccatctggatagacagtaaagtctataggacagttcttcacgctttgtgcaatgctgataagcctgagcttgcccttgagttctacaaggatatgcccagcaacatggaggtcagga

SEQ ID NO: 102617 - DNA, 470 bp, Zea Mays
gtagagcatagtaaggatgcactcaactgaaggttggaaaggaacaaaggaaattctagggttggaggcatcaagatactatcagacggtaaagaactgacagaagcagtatcaggagcagggttgaacaccaaaggaagattgtggtccatgctaagcgtgacgcccagcgggatctcggctctagcagcacgtatcggttcctcgatgtcaagatcaccgacctctaaggtggccaggccagtggggatagcaggaagactaggactcgtcaccacagcttccttagatcgaaccagcggtgacccaacatgaacatccatggagacttctgaggaagaaccagcctcaggacccttgggggctggatcatcttcaacaacaccctcagaggatggaccatctttagtcacactcttaggggctggaccatcttcagctacaccctcaagggccagagtattctcacg

SEQ ID NO: 102618 - DNA, 453 bp, Zea Mays
cttgtataagttcaggcccaaagaactgtctttctccagtctgatcccaatataaaggagtcctgcatttcctgccatataaagcctgaaatggtgacatcttcaaactggcctggtagctattattataagagaactccacatatggtaagctcttatcccaactgccaccatgtttaagagcacaagctcttaacatatcctccagcacttggttagtcctctcggtctgcccatcagtttgaggatggtaggccgaactaaaattcaactgcgtatccaagctctcatgcaacttcttccaaaaccgagaagtaaactgtgatcctcggtctaacacgatcttcttaggcactccatatagacaaactatccgagtcatatacaattttgctagcttggcgcccgtgtaattagttctcagaggtatgaagtgagccacttttgtcaatc

SEQ ID NO: 102619 - DNA, 962 bp, Zea Mays
tttttactggattttataagtctctagactgagcacatgaaaacagggaagtgcaggggtctagccataaaactatctcagactcagaacgtccctgctgcggacagcgggttgattactgtgaagtacaggggctcttatgcaaagtgtcgcggccgaaggggtacgggcagtcgctggccgaagaggtaagaagtgatattagccgtccgatcaaggatggacgcgccagattagcccaacccagagatgaaccagtacgccctaatagccacacgatccccgatcagcggccgagaggagcccaagccgaaggaggtacgccaacctaaatcccaccactcattagcctatcgacggttctggcatctcctcttcttctggccacgcatcgcggcggcgcccgacagcccgcacggtcgtgcccaccggcggtcagcatggccaacgccccggggctctatcgctatagccaataggttctacgcgatgcggatgacaccactaataacagagagaacgtcacaccgggattgatagcatggagaagtctaggccacgacaagtcgtgaatcgcggcggagatgatcttcggcgagaaattagtggtgacccggcgcatgaatcccagattaatacggtcctaaacgtatcagggaagggagtgaagacaacagagggttcttaccgtagctctatcggcgtgaagctccctgtctccggaaaggtgtgagttacgacgacgaatcaagctccgttgagaaattccttccgccacgggtgctaaactcgcacgcgagagccacggcccagtgcgtagcgatctgatgacgtgcccccgatctcgcacagggacccgaagagctctgtccgtggattcctagtgcggcggcttcttcctctcgattcccgacgatggttaaggatggccatgtaccgaacacaggtgggggcccgcgtcc

SEQ ID NO: 102620 - DNA, 376 bp, Zea Mays
gtaattggtattgatactgtttttttttactgaatcctaggacgatcaaggtgtcatgttcttcaatgacctttcagatttacaaccagatgctatttactagcctaatcttggtttctagcaagttgcctattgccgttgcatggtgttactagtccaagcaaagcttttagccatctgaattctcttttttctggaaacaataaaaatatggatgcacataacttttgtgaacagtctgctcgtaatcccaacatttacccccttggtactggctaccacatttagttttctgtcctgcacgacttatcttgaaattctgcttgcagttggttgtgttgccttaaattgacatacaccaggacactaggacagg

SEQ ID NO: 102621 - DNA, 287 bp, Zea Mays
ttttggtattcatggggccacatgttggagtttagctcccttgtacattctcctccttagtatataaaagggagggcacttgcgtagcaagggggacacacactagatcgacccttgagcaatccaatgactcgaggatggggacagactcacttgaatccccacggaggcatctccaaccagtcccaggatttctcaagctctcggcaatacaactcacaatggagtaggtattatgctctgatagctcgaaccactctaaacccttgtgtgttcttgtgttcgtc

SEQ ID NO: 102622 - DNA, 481 bp, Zea Mays
tgatctttgaaaacatagcagaagtcgaggctactaggctagaggatattgatgtactcgaagaagaacggctgaacacggtaattcaatcagcacggtaccaacaaaccctgaggcgctatcacgataagaccatgcgacatcgatccttcgcagtaggagatctcgtcctccgccgaattctagcgggggaaggacggcacaagttgtcacctctatgggaaggaccattcataatagcagaagtcactcgaccgggatcatatcgcctcacttagatggacggcacggaaattgggaactcatggaacatagaacacctcaggaagttttacccctagctgtatttcaaatgctattgggacgataatgtactctgtaaactaggaaatataccatcaataaaaaggattcaagagcgctcaaattattcattgtcgacctgcattcttacttaactcggggtgaccactatacccta

SEQ ID NO: 102623 - DNA, 488 bp, Zea Mays
tcttttaaataacccgtaaagaatcatgcgcactattcctatgtgtcactgacattcgcagttaggcccctccctttctatttcttcgcaaggtgagatccccgacctcggacgacggagcagtggctccggtgaccctgtaccggctggaaaatgcaatgaccggcgctcaagtttggccgacacctaattccaccctcaataacactaatccctcaagcaattgcaaagttctagctcaaaaactctctgtccacggtgatggcgcacaccgaggacaatgtgaggtgttcccggtgatccaacacgggctagttcaattggctgggccgataagcatctatagcacacaggggtgttgaaacgagagcgaggagggcgtgaacggacctgcagaaggctggccacgacgagctcactcacggcggcgcggagaactgaattgggggaaactctaaattagagctctctggtggacaatacgagac

SEQ ID NO: 102624 - DNA, 654 bp, Zea Mays
tttgacttttttgggtatcacttggactagaggttgaaacaatgattccataggttaacagctgtagtgctatatccgagtttcttgtggtacaagtgtacaaagaatgtatattttgtcttgcttcgaggtgatgatactcatgtagagtttacccactgtaaatgaaataaatccttctcattttctctatatttttatatgagcttattagttctcgttattgacagatacatttttggcttaaatatattaagagtttcaaaatctccaattatctggccctttcctgataggatatatgctgcattcctgcttactaacttttgttagctgcattcaagttctaaatattaacatgtgcagtattctagctgtatatgtatagctttctttgtataacactgtcaatagaggtccattcatggatatgctctttgcttggcactccatgttccttatgctgttcaatatattagttgttgggaaattagttttgcttcctacttaggttgtctccagcagatcgtgcatatggtcgtgcaaaatactgttttacactttagattgcactgcttacatagtgacgtttgaaataggagataagatgggagataggatgagtaagctgttggagacaaccttacagtgaga

SEQ ID NO: 102625 - DNA, 504 bp, Zea Mays
gctctcaccgaagagtaataaaatggatcactggttgatggcgcctgtgattagttcgtggcttcaaggatttggcctttgaatttagatgaaaagcagggggggaggatcagcctctatcatgcaaataaaagctggtcgcagatttctccttttgcctcgggagcaccaaaaggctatgagccatgcataattaaagatgttttcttggggcaaaattgtcacacgatggatgatagtagctgctagctagcactgctatgaactatcaacagcagcatgatgatgacgatgatgacaacgattaggggagggagctatatatacatactagcagtaagtaactagtaccttaaccgcggatgattgcactgcagagtgcaggcacacatgtatacgtacagcgacgactggactgaatgatctctctttcagatggctctctcgatctctgaccgaatccaggattccagggtacttaaagcttagccaacatgtgtaaat

SEQ ID NO: 102626 - DNA, 492 bp, Zea Mays
cacggactggattttcattaccacttagccagcagcatggccaagctccacttccaaaccagcagttaccttctagtcatcaacatcccagggcccttagtagccagccaaatattcctggagttggtgggcctttatatccttccaagcatctgcctggtggatcattctctgctgagactaataacatgggttttatgaactcacctgctcaaatgcatcaaggtggagcaggtacaaactaccagcaaaagtcagttagtggtcatgcagttccaaatcatgttggtccatcaccaattcgacctccaatgggttctaatatgggtaatagtgatggacactttgaaagagatggccctcacacttatggaaggtttgatggagcaaaggctctccagcagcaaccaaagcttgctgctctctcaacttcacaaaatcccatggtaataatcttggtacagtagtgttgaatcttaatgaagcgaatag

SEQ ID NO: 102627 - DNA, 581 bp, Zea Mays
cgtcacagtaactcatcataagcatgttcgttggtcgccggtgacctcgccacggtgaaagccaccaatcctttgcgccactgctctcccctctctctggccgccagcgcgccattccaaattcatgagcccaccgccctcgggtcatataaattgagtgtgccatcagctccgctaggtagtcaagcatccaacgcacccactcgtgtctcggattgtccaccagagagctctaatttgagatttcccccaaatcggtcaagaacaccgcgtgtgtgagcttgccgcggtcagcccttcacaggtccgatcacaccctcctagctcttgttttagcactcttgtatgcccttgatacttcttgacccggccaattgaactacaccgtgctagatcaccgggaacgcctcggtttgttcgttgattgcgccgtcaccgtggacagagtgattaggagctagaatcttgcaattgattgaggggaaagggtcattacgggtagaattgggtgtcagccacaccagaaccctagtcattgtgttttccggccggtcttggctcgccggagccgctgctccgcc

SEQ ID NO: 102628 - DNA, 1291 bp, Zea Mays
tctttagacatctctcgattggatagcaccaatgtccctgcacgggccccccattcgtgcttcataggggagatgaagaatcaaatgttgcattggattgaagaagtcgaacggaaatatcttctcaagcttacacagtaacacgggtgtcaatctttccaagtctgcaaccacggtctgagataactcttttgcacaaagctggcggaagaaatagctcaactctaaaagcgctaggcagacatgctcagggacatagcctcgaaccatcgcaggaagaatctgttcaatccatatgtggaagtcatgactcttcatccctaagactcgcagagtagataagttcacccccctactcaggttagctgcatacccatcagggaacatcaacatcttgatccactgaagtacttccttcctctgggccctgcttaggacgaaatcggccttaggccttctccatgtctttccaccactaggcggcttcatctcttggtttggtctatcacataacgctgttagatccactcttgcctttacgttatcctttgacttatcaggaatgtccataattgttgcccaaagtgcctcggcaacattcttttcagtgtgcatcacgtcaatgttgtgtggaaggagcatgtcatcataataggggaaccgagtcaagcccgacttatgtgtccacatatgctgctcaccatatccaacaaaaccaccttctgtattggccacgagcccatctatctgttgacgaatttcggcaccaaccatcgttgcagttgggcggtctgtcactactacacctttcgtaaagttcttgatgtctaggtggaatggatggtcaggagggagaaattgtcgatgtttatcgaaggatgaatatttgccaccctttttcaaccaaatgaacctaagagcttccttgcaaactggccatgggaacttactgtgaacacaccacgcgcagaatagcccatatgccagtaagtcatgcatggagtactggtaccaaacatgcattttgaagtttgtcttcgtagctcggtcatacgtccataccccttcctcccaagcacgtaccaattcatcgatcaaaggctccatgtacacgcccattttattccccgggtgtccgggaattatcaacgacacgaatatattctgcctttgaaagcacacacccggggcagcgctcattccatagggattgaacccatctgtggccagcgcaacacgtacattacgagcctctttggctttctcacggtgaatggcatcaaagtgtttc

SEQ ID NO: 102629 - DNA, 878 bp, Zea Mays
cccgccgtgggcagcgaaagcacagggccgggtttggtcgtggacttggcggtgatcctttgcttctgccttcggggaatttgttgcccacggctctggacggtcctcgtcctgtgaggtttattgggcgttccaggatgatcgaccgtgctgagttggaacttcgccatgccctgatcgtcagtgttgttgggtaggaaggaactggttgcgccacggaggttagagaggcgctcgcttcatggtttggccttgacgctgatgcgctccgcctacgtcgtgctgcgccaacctcctttcttgtcctcttcccttcagaggagctggctgtgcgggtgattagtgaaggatcgtcgctccttgtccctccactgaggttgtatgttaagagatggactaggcagccttttgcttcgggaggcagtgtcttgtcttccctcattgacgtcgagctccgtggtatccctgctcacctttggggactggagacagcggaggttttgcttggtccatactgcctgatttagggcctgcacccggattctatcggcggggaggacttgtcagtcatcaggttgagagcatggtgccgctctcccgtggggttgccggaggtgttggacctgcatgctgtggagccggcggtcctcgatgaagatagggtttggattccacgttcgttggtgttccctgtgatagtgaagattattggatcggagggtgtccttgaggagcagctaccgccacctccaccggatccctctgatgatgagccggagcagggtcgtcgggctcggcgggtgcggaggctgggtgatcaggcctcattgcctcggacttcggtacactcgcggctgggccctcgttttcattcctcg

SEQ ID NO: 102630 - DNA, 438 bp, Zea Mays
attttagatctctatattttaggtccactgttggagtcggccttagctgagctaattgggagaatagtttgatagaaccttaattgtgggtcgacaccacatgtccatgcctcccattctcccaagcccatgtgtcgtgccgtcaaaagggtccgaaccccgaggcctcgtgcatgcatttcttcttattaagtcgttgcggcttcgaggccaatcaatgtatccacgtcgttccaaatatcaccgccgttcatttaaaaaatcaaagttgtccatgtgtcctgtgtcactctagcctccactctcgttctaaagcacagtgcccgttctaaagcacagtgatgcttctgtgtgtgaccgcacatccaagagccaagggtgcaataaaaaaataaaaaatctcggccacatctgtaacaccgccttcgattaaaaaag

SEQ ID NO: 102631 - DNA, 781 bp, Zea Mays
cgccggagtcgcgattcacacccggccaagcactgatagcgctcctcggtaagaaatatcattgttggagataaacttcggccactgttctcaccggccgtcgtgtcccgctatggtcaatcacgctggcatcaccgtcgttcgccgttatccggctaggctacgtgccttaacactttactatgtcgcgctgagtcaccataaaccgccccatggtcctggctcgtcgccggtgggtctgccacggtgaaggccacgaatcaccgcgctagtgactcatttcttctccgaccgccaccgcgtccaacccaaattcactagccaccgctcaagcatgctataaattgagtgcacccgcggctccgttaggtaattatgcatccattgcaccagtacttgcctcggattatccaccaaagcctcccaatttctctcttcccccaatttggttctccgcgccgccgtgtgttggctcactatggtcagcgaattccaggtctgttcatgctccctgtcctcttgtttcagcacccatacctgcccctgatactccttgatcaactcgattgagttaagctaccttagatcgtcgggaacgcgttcgattgcccgtggtgcccgttgttaccgtggacagagcgtgttagagctccgttaatgaaattagttgaggggaaatcatcgcgtagggttaaattcggtgtccagcaaaggggagggctagtcgttgcgtaatttagtcagtataagctcgccggagctcatttccccgccgttcgcc

SEQ ID NO: 102632 - DNA, 423 bp, Zea Mays
gagatatatactgtggttctctatggagttactcggccggatgcttggccctcacgtgtcacgtgggattctttttcgtaggggcaccaacaaggattagttagaaccttgagcgattctagatacttcggtaaaaatactgacgcatcaatgggagtatacatctctacctttgtctttaagcttccacatttattgtttatttaggttgcaatctttactatttctagattataatataggctagttggtaggattggaacctaggttgctaaactccttttgtggtagatatagcaacacttagacaaaactgtagtgcacattcatatttagttatttgcataggttttgtttaagaaattaattattgtcctagtttagagtgcgaaaaatagaagacctatttcacccctcttacac

SEQ ID NO: 102633 - DNA, 553 bp, Zea Mays
ggtcgctaaagcttatactcctagatgtctagcgcatgagagtccccgagacatatagtgctagaccccaagacgcgagggcctctcgggcttatactactagttaccccgggacacgaggggcctcaggggcttatactaagtgtggggtgcattacatatttacatatacttccaagtgtctcaaggggcaagtggcccctagggcttcatctgtaaggtgctccaagacatagggagcatagtgggcttaggctggtaggaagcccatggcgcaaaaaggctccgaggtttaatttcgtacgtcatgtcatgtgatctagtaggtttagctaggaggacccttgtatgagcaataatgagggccgaagatcttcatttcctaaggtcgaggatgcccctcgtcataggatgcaaatagtggtgattctttcataattggcctaaaatcagtcttcttggtgggtagaggagggtatgctcattcttggacgctgataggccttatgtcggatcatccaccaaataatcttgaaaatcctttggtggtctt

SEQ ID NO: 102634 - DNA, 307 bp, Zea Mays
gaggacaaggcgggcagcggcgatacagaacacgggcgacagatgaaatgagattttgactctcgggcgcgtacctaacatcagtaactcctgtcgacttggtcaactggccgacggggattaatttattcccgtcagcttgagtgcaaaccgacgagaattaaagtagccaacggggatttgcagtattcctgttctgagtattgtaaccttgatgtcctgttaagggcatgtgcaatgcatattagtgcaccgtgtcttgaggtgtgtgtcggtgtttcgaacctagctctgacaagtaaatttg

SEQ ID NO: 102635 - DNA, 623 bp, Zea Mays
cgcaccatcgtgtcactatacataatctctccatttgccaccctcactttacatgaagcacaagggtgcactggcagtcccattcgatcaaccaacttcttgttaatgaagctcgtggagctccccgagtccaccaggaccaacatcacctgattctacagcaatgcgcgcacaaccatacattctgcatttgtggtaccactgagagcattcagagacaacagaaatttctactcttcctctttctcttccaactcaatctgtgtcaacgtttgctctgatagcgtcatacccaactcctcagtagtaaaagcactcaactgcatctgcactcttttaggacagcgagcttgatggcccgattcgaatttgtcaccacaagtataacacagaccattttgcctcctatactctttcaccaatctctctttagacaaatcgggcaacgaagcagagcctctactgtcagctttggacacactactaccaaatcgactctaattaatagtcttgaaagatttgtggctctgtttatccaagataccctgctgaatcttggctaacaacgttgcacattcgacagaagcaggcacatgagatttaacgggtccttgtagttctgg

SEQ ID NO: 102636 - DNA, 313 bp, Zea Mays
gtggaacacagtttgtgaagcgtcttaccctgctcttaaaaggttcttaccagcactacaggtggcaaacggtgaccaatgtgataggccaaagagcatgggtgtgattgcaaaggagtacctgttctactcgagagaaaggtggagttatgggaaggctcactaaatatctatttgtgctacacaactcagtaacaaatagcaatgttgaataagtgtccaaagtactcgtcttaggtgctggcctagagaatatattagaacagttggaggaagacacaaaggaggtaacaaggatctaggtacagcaagg

SEQ ID NO: 102637 - DNA, 367 bp, Zea Mays
gatcgctcccgttgagtcaaatcgccatcgctgagttgcgtatttttcgcatgccctgtaggcactgtctgtctgtcgtgatcatcgagccacaattgcgcctgttgcgcacgttgcgtggatttatcgtgtaccccaattaccgagccataatcgtgcctgttgcgcttattacgaatgcttgctatactgtcgtagccctgatggccgcacacgcgttgacgccagatacgctagagcttgtactcgcgtggattgtggtgggttgttcaaggtcctgaagtcacattatgtgcaaccttcgtaaacaattttgttttcgctctatattttctttgattgtgttgtgtggcatcgtatatttata

SEQ ID NO: 102638 - DNA, 329 bp, Zea Mays
aattacccaaaatttcattgcacatagcttcaatcatctctagccactcttggcaaggctctttgaattgtttttcaaatttgaagcgatagagcaatcggacaagttcatccttcttctttgttcctttcagcttcggcatactccaaccactcaatgtaggagataccctgttcgccaagtattcttgcactagatccctggtactgatatgttcagtcaccactctgaattctgctatggctagctggcatcgtaaccctagcttcatgttgcacaagggtctggtcatcccgaagcttaagctcagagggctcatgaccagcatc

SEQ ID NO: 102639 - DNA, 344 bp, Zea Mays
acctcttcttcttcttttcctcaacaggtgcagtctggcggctaacccggtgtgggcgctttgggcgagcaccttcatgcttccgagtctccaccgctttgccaagttcttgtccagtcgtgatagccattggctcggcatgggtcgagtcagatgattccccagccagcatactaagcacaacatctatctctgcattgtctttgctagctggcatctcaaaatgagtctgcctctcatcatctggaggactccgaagaggggcaatcagagcctcaatatcctcgggagagggtcgcactctaagacctaggctaccatcactagcaggagggttggacaca

SEQ ID NO: 102640 - DNA, 429 bp, Zea Mays
tagaaatattttctttagatgtcctattgctagatttgcatggtgcagttttatagaggttttcagatgggactgatcccatttttaaatctgacttcatgagaagttaggctaaaactaacctgaatttaccccaacgtacatatgccttcttattttttctttgcaggcttggcgttgtcaatttggaaaacgtgcaataagatgacatttgagaggaaatttcctaatcacccctctgaattgttgtgttatgctataacttttctgcagaagtggatggacctaccaatactgagagtgagtgcggcgtcccgaaagaaaaacataatatgcagcatcatgagctttggtgcctgagtagtgagtactggcatatatttgacttttgtcacaatcaggcaaccaactaggcaaggttatataaat

SEQ ID NO: 102641 - DNA, 456 bp, Zea Mays
tgatgcatacaatctgaatcaaattgccatggtctacctagcagaatattacaagcatccataggcacaacgtcacagtcaacaacatcatgatatgaaccaatagcaaaattaattcgtaccagcttggttaccttgaccttaccactattattaagccattgaatgtgatatggatgcggatgcggtttggtcgtaagtgcaagcttccccaccatgtcgctgctagccaagttgttgcagctacctccatcaatgatcaaatgacatgaacgctccttaatgtcacactttgtttgaaacaacgtatgtcgctgattctgctctgtcttctccatttgtgcactaagcacacgctgtacaatgaggatctcataatgctctacatcatctgcatcaatctattcttcggttggttccatagtgcatgcatcatcagctgcaagcaaagcaagt

SEQ ID NO: 102642 - DNA, 481 bp, Zea Mays
caggcatcggcacgggtccgatctcgacggttcgggggagcttggtgggcttattatcactatgctggacagatgatgatgatgatgaggaggaggaggaggatggggtgcagagtgttcgctttcaggggtagtactagtatcaggcacgagcagcgagactctacagaccgggcacgtcgagttctgcgccagccacaggctgatacagcccgtgtggaaggtgtggctgcagggaggcagcacgcggagctcgtctccctcttcgtattccgccagacagatgacgcacctgccagtttaccaacagagaggtggttcagttaagttccagggccagcgaaacagttcaccatcccatggtctgttgtccatgtgaattttcagtgtagctaaaggtaaggagccaaaggtacaaataagacaagtcaaattcgtgcgagctatggggatgaaacatcaaacatctactcgccatgac

SEQ ID NO: 102643 - DNA, 645 bp, Zea Mays
gtaactcatcattatttataatgatgaccactttagcatggtcaaagattattttgtggtgtcgttgaagtccgtagatagcgtagtataggtcaactcagcgagtaaatgcgtgaccgttgtccaaaaatataacctaacataacttgtgtaggttcttcagtggtgcaagattttagagacactgtcctctgtgtcgttttcatcgcgccgtcgttagggataggtatgagaccgtgtagcactaaagcgcactaacaatgggttgtatcacatgcgattactcaactacagagcgactgtcaaccatcttatagtcatgatgacactgaaagacatacaactcatgtccaacattaaaggcaccatcgatagcccctatgaactctcttgcactctttatgctcatttacacatcacaaagcttaccagatagcacacttaatatgcatcctaatgctatcacattatctttgtcatacttcgactatttttcactggtcagaggacctccacaaggcttcacaacctgacttgtccatagcagtgagccacaaatcaagttttatggaccacatttaaaatttgatccaccaaacaagttttattgcatcaacaaagttgttatatccaccttaaggcgtc

SEQ ID NO: 102644 - DNA, 286 bp, Zea Mays
cttccccgaggtcgtacgcggcggcaaagcatgcatccatggcggcgagctactggcgtgtagcaatctgaggcccaggtgccaaggttcaagattcgaatggtcctacgcctagaggagataaatgcaaacctaggaaagaacttttaccgtgatacgaagcgcgcagtccccgccaccgagcaacactgtggtggctcacattgccggcgagaaattccttgtggctccgttgtctccgcaagcgcaacaagtccatgcatacgattccctcgatcccttaaag

SEQ ID NO: 102645 - DNA, 435 bp, Zea Mays
atgcacaagagcaaacatgcagcacacaatgcaagaacgaagatcacaacacaccgctctcactgaaagtcagaaatggctcagaacgatgccaagatctcactagaatgtcacaaacgagttgttgcggagtatgggagtgaagtattgctcttgggtgcttatatgatggagtgtgccatgggtccctttttataacttaaggccagtccctagctgttgctccttccttctaaatgtttttgaattcctgatgttctcgggggcaccggactagttcggtgcgccactagaccgagaatagggagtggtctctgggatcctgactggatccttccaaacccgggggcaccagactaggtccatgcaccaccggaccgccacatgtcacctccccgtgaagtacctgttgggcacttggagttagccaatacc

SEQ ID NO: 102646 - DNA, 294 bp, Zea Mays
agtccaccatttctgaagctgatcttcctaaaatggtgaagatgggttattttagtgaggccaagaaggaattaattcgttttggtggagaggaaactatcccaaagccaggaaaggacgaggtagtagtcttcaaaagttttcttaaagctggtctaaggttccccctgaacaggatgattgctattgtactgaagaagtttgggatttaccttcatcagctgacccccaatgctattgttagaataagtgtttacatttgggcccttcgtagccagggagtggaaccgttcg

SEQ ID NO: 102647 - DNA, 412 bp, Zea Mays
gacttgtgagcctctcctctatctcgctcgccctcttgtaaccctagcattgatcatcaatggtggcggtagcgcaagccgccgaaaacatggatgtagggacattatgttcaaacccgtacaaatcttgcgcccaccgcgcacaccgtccggagcccagaacgcgcacacaaatttacttatcggagcgaggttcgaaacaccaacactaatgaaaactatataaattagagcttaagtcgtgtcaatttgagcaaatccaataccataaggcacgttttcaaaaaaaaataaaaataaaattaccagactgttttttgtgtgtagaaatatgcatttaaaagctctgaaatatgactaacttttagaaaaaaatcataaaaaatgttgagagaggatgagatggactcac

SEQ ID NO: 102648 - DNA, 446 bp, Zea Mays
aaagactataaatatcgacactgatttcgtttcgtctctatgatcgttgttgtgtgattactgaggatcctaaaccaaagtccatggtagactgtcagaagcgctcagattgggtcagatggaaaggagcaatagagacgtaattagtaatagatcgtgcaaacaaacattagtaacaacgtccactaaccactcggagattatatatcgctatttgatgtcacatgtgaatgtgcttggctacgatgaatgactaaccacgtctagaagttatgtggttttgacaccacaaatatctccatcgttgtctatgaaggaacgagcttatatgactcctcatatctctgttgctattgggaggggtcagagtccggatcagagatatgtgacgactacgttgttcaacaataatttagacttggaggaagtagtaaatatttgtcgcc

SEQ ID NO: 102649 - DNA, 810 bp, Zea Mays
gaaaaaagggctgtggctcacaagtactaaaaatatcacaggtaacaagcaatactatcattatattgaacaaacataaaaaaaacatacccgtagggttgtcttccaacgactacattccttgtgtttccagttcacatgattaatcatgatgtatttaattgagaaaacaattaaaggtgatattatatcatcagcatctgctcctttccgaagaacctgagtggtaaagtcaagcactgggaaatatagcaatggatcaggtcatcacttatgataaagaacaaaaacatatgtaggttgtagagttaagtgaagacttgtcagtccacaatgttctcaaacaagagaacttacttttgcttaagtctattaattttatttaagccttgagtgtacaacatcctctctaagagctccgctatgtttcaaaacatatatatcgagccatccaggggtcagaaactgaattgtcaccaaatggatagtttggtgttagatttccatatcggatgctattatgccaaaagcgttaattttattttaacttattccacacttcccaaaatagttaactcatatgcttaaataaagaataaattgactactgagtgagaaaaagtgcacaaatctaggacactggatctagccaagttgtttttttaactacgcaggagaactgcgtgtcatttcaagcaagaaaaaagttacaaatacaaggaggcggttaacacccccagaaacactagaacactttacacaacaactgaacattaccacacccagcctaaggagcctccctatgaagga

SEQ ID NO: 102650 - DNA, 595 bp, Zea Mays
tgacgacacatttagtattaaagctcaacaatcacaaacagcggaacaaatcatgcaaaaagatcatacatattccaagtaacaaactgtgtgaaccaaagatgtagtatacatagcccgtccctcacaaatccaggtatctggaacccatcccaacacagacacacgcaccagagtaaaaattcaccaaccacacacggattctgcaccgaatgacagacggtaacacagttcgtgcaaagaacaaacatcctaatgcagacagcacgagggggtctagcagagcaaacgtggacttacggagtcacagacaatgtctacggggcgacgggcagcaggagcagaccacacgctgccatgacgacggtgggtgcccaaaccaaagtggcgaacaactacaaagacgggctagagaagctatcggttccaggacctaataaggcgaacttgaattgaggagagagggaagaaaatattaaaggggaggaaagtactcaccgtcgtgcagcacagagcgcggtgctgttttcagccatgcctgtcactggtgaggcatgggagcgagggagatgactactggtatggcaacgacggc

SEQ ID NO: 102651 - DNA, 866 bp, Zea Mays
gagtgatgtcaatattgaggacacacaggcagctcgtccaacacccaccttggccagcaaccattggtgttggtcctagatcctaagaatgtaattctcgatcaagaccttgtggtcgtactcgtcaagttgacctaggctacgatgttcactgtcagtcagggaatgaagtagacgacaatgagctcctggtgctcgccacttgaagaggactgtgtcatagcccttgatggcgacaatggagtcatcaccaaacggaacaatcccgtggacatcggtgtcgagctaggagaaggccatgcgctcccccgtcatgtggttcatcatgccggtgtcgaggatttagcatgtgctcccaccacccccttttccccaagctagacgaacagacagttctcatcaaggtggatctccggggttagggttagcattgccttcacaggaggcagcctggtgccactagcgaacgctagagccacaagcaccacaagcttcggctcctcaacgaacgcccactatgtgctgcctccaccctcaatctaaacgagagtccatctctagctccttgcgacacgagatccaccaatgataatggatttagggaaaacagttgcatcaacacccccttgctcacttctatttgggtcacgatggaggcaaggcctagcttcaacatcccttcagtgggctcctcccaaacataggctgcatgtgcctactcatccctcatcggcaataaactgctttccctttctattatcgtcggtgttctgtggcctcgagccaccaccgtctttgttgcacccactaggccaccaccttgtcaatgactcatgcttgatgttgtccgactgccacccaagctt

SEQ ID NO: 102652 - DNA, 459 bp, Zea Mays
cgattatatttctaacgctaacccctgtgacaccccagtgtcacctagggttcttccctaagctaattcaacctattaacacatgtaaattcagtaaaaggggtgaacatcaaaagaaacttcagaacaaaggtttataatgaatcttcttaaactcttcttaatcttgttatgaactttgagagagaaagaccctcaaaccctaataaaccctaagtaagccaagttaagcataaagggtaattgggagaagtcatggggaaaaatgcaaaattttagatatgatcaaattacaaagttttagttcatcaaataactaacaaatcatagtaagagagtttggccatttggtctttttaaaattcccaaatcagcccttgaaccatgaacccttggagaaattcagatttttgaatttctgaaattcagacctcttttcaatgatcaactgcgttctct

SEQ ID NO: 102653 - DNA, 405 bp, Zea Mays
cgacgatggggtggtccacaatggtaaaagatgtggaagggtggtcaccactgccagctccagctcggtgttctggccatcccggtgcaatagagagctaaacaaggtttgagagattacccaaagatgtgtgaatggtggagaaatatggagaaatacagttcaagcagctgagtcatcactagatggttctccaagttgtcagctgcatcttcagtaaaaaaaggctacaccagatggaaaatatccccccttcaaccccatctgttcaggcctacggctgcacaccagaatcacctagaaaactagtggagttaaataatttaccaatatgtactcttcagcttttctataaagaacccagattcaaactgtctagaacagccacattttatgtagtactga

SEQ ID NO: 102654 - DNA, 804 bp, Zea Mays
gaatagttggcaatagattagctgttcgtctcgcaatctactgtatatttatttcacagttccgagaagttcttaatggccacacatcgaagttttcccgcctctttgatgcacaatcggtgattaagcaacttactgtgacaacatagaaagtggctgaagttgtttagaatgctgaatgaagaaggtagatcggttacaagaaattctaattaactttagtgccgaaaactaccagggaaacaaatcctagcgaggaaatgtgaagcaaaatctgccaaagatggaggatgagggaaatactactgggagtaatctagtaccgaccgatatcatgcatgaattatatgaattaatatactactaggagtaatctagtatctagtatataaagcaccatgcatgttaacatacatactccacacgagtggtcctagatcagacacgtacgcaatcaatagttcaatatttgctcctattgcatgttgaaatattaaaagcctgaagtaagccttaaatagctgaatagctaaagtaaaggtgtgtttagatccatctaggaaacagtttgctagctaattttagcaccttggactctaaacaggctatctaataagttggcttattgttagcgggaggattgacaaattgtttgctcactagtcatttgacctttctaattggtgctagatcatgacaagagaaaaaggcatctatgagccaagattccaaacatgcccagaataattgttgcaaactaattatttgtcggttaattattgttaacatatcacgtcgtgtact

SEQ ID NO: 102655 - DNA, 311 bp, Zea Mays
atatttttgggtgcaaggaacatgttctattctgtgaaatacctaggggaccatatttggttgattcctgtcaaactctgggcacatttgtctccattcctttcatgtatgccatgggagatcttgactttacaagtatgccagtcatgctgacactcctgcttgtcattgtacacttaatatctgtttgactatctgtagttggcatcagtgcttacaatcataagctttgagtgaacatgcgtgctgggaaggaatgctgatatgcttagctgtgcatgagtattgctgttgcaagctttagatatgca

SEQ ID NO: 102656 - DNA, 789 bp, Zea Mays
taacaatctactcaaacaactatcaaatacaacaattgaacttacatgtgaatgtagtacttgaggtgtatccatctcccgggagctaatattggacatcggaggtcgaatccgatgttctccttcctccccattgcttacctcgttgattcgaggccccattagaacatgaggtggtgtaaacattaagttaccatcaacgactgcctcggtgtcttgacgaatcacaactccatctcctgccattgccggcgattatccagagttggccatctccaccgccaacgattgatgcagtctgaagccttatgttttttcatatgaagacaatgatggatgctacactaaacgtgtaaccgcatccccctttccagggtatttccacttttttcaaactgttaccgataatggagcaagtcacctagaatccaaatatccctcaatcactatttacgccatattaactcaaagttttataccaaatggtatatactatatacacaacatttatagcgtatatgtgttacgccatatcttttaacatcttattccatattttatctatcccttccacctttatgctccatggaagattcataaattccgcggccacaattaaccgaatccacgtctgcatgaggaatctaatccctataattccgcccactaccatatgataacacccttgccgttctgaccaacgttttacccataacacacttcacgatgacgtccaacctgcacgttccctgtcacggtccgatcgaacacccacgcgttcggttccag

SEQ ID NO: 102657 - DNA, 672 bp, Zea Mays
ccaaatagatttattatgagagtatattccataattcatctaatggtatttgctacaacttataaatattatttttgggggttatttggtgttttttgcccctgttgtataatgcaattgtgattatacccctacttttctaactgtgattttactctcgcgatcatgtttttgaagctttcgtttgcccctagtttgtactggcacttggtactgccgcattaaacgaaaaaattagaaatcgaaattagggccacacaaaaagaccaaagtaccttatatcctttgacccatgccttctctcctgtacccgttcacctagtattgatgcaaaatcctcaccctaacaagaagcggtgatgcgtcatgcgtagggatgcaagcaaaaaggttgacaccgcagaacaaggttggtttcaacgggaggtgttaccgaacgcgttagtggtgtgcgggacgaccaatatcgattgctgcgttggacggttcggtcgttatcgacttgaaccggtcggtaacggttgtctttagtgacgtcgagccttttgatttgtccatgcgcgtgccacgtcaggtagatgttttttaatcgtttgaagttcgaaaatttcaggaaaaaatctaaaaattcaaaaaaaatccctagaatttggcctacaaattagattttat

SEQ ID NO: 102658 - DNA, 447 bp, Zea Mays
caatgagtataagtgggaggtggatccgagcacgaggctacagacgccggactccgcctcatatatcaccagcagctccgcgatgttgtacccttccagaaccacaatatgcacctgcaaatttagcaagcctgaatcagtcgatcagaaatgacgtcggtgtggcggcatccacccgacacgagagaaactaatccagctaaatttccaacatagatgccaccatttggaagggtattcccgttaaatagaaagacacattaaggctatcttcactcaatttatattaaaatgtttatatagtagtgcttccaagatttctgacaactatgtacatagtaaaagattccttaaaaaaatcttgaagcctcatggttagcacaacagtgggtattttttaaaaaaacactgaagagcattccaatagtaattagaaactgaaaaaca

SEQ ID NO: 102659 - DNA, 382 bp, Zea Mays
gttggcagtttctgagctagtggcacgcatgtaggacaattaatattgagtttttcatttcgtagctgtaggattgattagccaccagcttgtttttgtttgtttggatcgtttgaataataccatatataatggcatctttgatttctccatctaatatccttcttgccatgctatcttagtgctacgcacgaaaagctagctacgatgcatgcactactgcactttgattcccatggtctatttgacaggcaggcaacaacgaagggccacgacttcgtctctagctaggctcccttaactcgggcggcaggtgggtcaatgctctcaatggccactatactgttgtcagagcttatgaggagacgaatgaaggcacaac

SEQ ID NO: 102660 - DNA, 280 bp, Zea Mays
cccttctcagttcattgattctatctccgtcgacgacccaagcatcggtcctatgttgcagggctgtttgaagtcgactcacacgggcttcaagatctctgatggggtcattacttccactgctgctgctttcatgtcggggagccaattgatgccgaggcaccccaattggtcccgtagacttgcgtgccgttagcctggtgcgtggcggcatctttctaaggggtaaaatgttattagtatagtgcttagcatgatgcatgtataattacagaatcaa

SEQ ID NO: 102661 - DNA, 280 bp, Zea Mays
ggcatggtagcggtcggagaaggaatgagtcactggtgttgtgattcgtggccttcaccgtggcggcctcaccggcgacgaactagtggcttacagtgactcactatgacgttgaggcacgtagccaggccggataacggcgaacaccggtgatgccaacgcgactaaccatggcacgacacgacggcggtgagaacagtggctggagtttatctccagcgtgatatttcttatcgaggagcacttatccgagttcagtcgggcgtgaatcgcaacgccg

SEQ ID NO: 102662 - DNA, 424 bp, Zea Mays
cctaatcctaagatgaggagggggcctaagcgcttgcctgtttggtgaattttggatgaacacaagaacactcggggaattatagtggttcaggacgctggagcgtaataccctacatccactgtctagaagttgtattgaccgtgtcccttgtaatgctgtgtcccctcccttatatagtttaagggaggtacatacaaggatgctgagctccgacatgcgggaccaggagcataatggaaggaatacattatgtgaataattaatgctgacagcacacatgagtagaggcgtataggcggagccgttcagattcccttcgccttagtaacgcatgagtaattagcgggagtcatgatgactgcagtccatgcagcattgataggcagtgacccttttcttggaaacgcacgagtaatggtga

SEQ ID NO: 102663 - DNA, 327 bp, Zea Mays
caaagagctcgcctagcagcattgctgtccaaagcaacgtagatagatagtggcgtcagggactcatgagctgatagagtcctaaaacctctatttcctacatccatcattttgatatgcacgcgagtgatgtagtagcaagctcgaggaggcttagacactcgccttgtgtcatatagaggttagacataggttcctagcgcatgcagtacatcctgcagcaggtttgggaagtgtcccgtctcgaacattgaggtgtaatgctcagtgacaggccatataccaacgaagttgtcctcttgctcatcattggcttcttcattgttg

SEQ ID NO: 102664 - DNA, 364 bp, Zea Mays
tccttgtcgaggttgaccatcttccttcctttggtcttggtgtgatcatccgagttagggacatgtagttaagataattgtgggtaggatagatttcatgaggtaggttggttagaatctttgttttcttattaggttgaaacagaggggttatgcaaccatctgatgggtatggtagttgcatatggtcaggtagttgtatatggtcaagttgatctaagacactaatttaggattaagtgaattaggtgagaagggtttttttggtgtagaattcaaattagctaaccagtctatcttactagtattaatgatctgggttaatcaattctaacatttagataggtgcaagagaatgaattag

SEQ ID NO: 102665 - DNA, 312 bp, Zea Mays
ctgaagtctgtggagaagatgctgaatattgcacagtgctctgaccgagagaaggttctctatgcttctggtcgacttactggtcctgctgctgattgatgggattcctacaccgctgcccacgatgttgctgatactatcacatgggcagaatttgctactcagttcagaaactatcatattccggttggactgatgaagatcaagaaggaatttctgtcgctgaagtaggggagcatgtcagtcagtgagtaccacgacagattcattcagctctcaagatatgcaccagatgaagtggctgaggatgag

SEQ ID NO: 102666 - DNA, 858 bp, Zea Mays
ggggtcgcgtctactcgtcggtggtgacctattccggtggtgccgagtacacggacaccatcacagatgctactctaacacactcacaggcttaattcgaccagagcgtcattaattcatagttgtccgcaacaacggcggaacaagatcaccggcgtgctcgttccggcttacccgagccggtcacattaaattcaaagactcggaacaaatcagtgactgcctaggactacagtgatcacgcaaacttggatcgagacaaccaggaacgaccagtcaacatgagccatgtccacagcagcgttcccagatgacgacacgatgttccctaagctactgtgcagtagcgtttaattggccgagactaggagcttcaccagcacgagagggtgtacaaacatggattagagggacgtgaacggacctgagaatggctggccacgacacgatgtctcacggcggcgttcctagccgatttgggggaaatctggtaaacttgcactctggtggacgagaagggtcggctgagggtggactgggttcataacagagaggcagagcaagggaaacactcaatttatagagagcaaccatgagcgtaacaaatttgggtgtagatggactcgcggcggcgaagagatgagtcaccggagcatgactaccgtggcgctcagtggggtaaggacttagggcggtaaatgggctatccactgtgacctcttgcgacgtggtaacaccctcaagtacatggcatcatcgcgatgagcagtggatgccgatgatggcactttggtcgatcatgaagcaagtgggtacggcggctagcgcacaaactcatatgaggtcacgatattttca

SEQ ID NO: 102667 - DNA, 1565 bp, Zea Mays
cttcatcaagcttttggagcggcaaatggaagtgggagtgcaactaagcatgtcctagacagcacgtgggattaaattgtttcactactgcagcaaactaatgggagaaatcaatccatggccaatactagatgggatgcagagggcttggatcaagggtctcaacgcagttcaaaacttgggacaatcaaagagctccctaagccaactcatttgcatgacaaggtgggatcctctgcactacaagtggtaaaagaaaaggtgtcgttttgtttcaggtgtaaaacaaaaggtcaccagctgagtgaatgcaatattgagttgttttgtgaagttttgatgtcaagacccacttaacatcgaaatgttcgatggttcgtgcttgcagaacttttgcagttccttgtgggtatgcggttgctggcttggagttttattatatacctcagcccatcctagcaaaatcaaagcatgatggttgtaatgggacagtgactattgtggagggctctctgacagaggagcagattactagtgagctgaaaaggttggtggcttcggattgggaatggagtgtgaagtgcttgggaaacaatgtgttctcgacaagttttccttcagttggtgaacttcatcgaatgattgaatggggaacagttcacactaaatttggagctaaaatgcaagtcaaggaagagggatctagagaagaaataaaatatgtgatgccaaaggtattggtgcaattcacaagattacctagggaattaagagaatacccattaatttgggcggttggctccatgctaggcatttcaaaagaggtggatacagtatttactcggaagtttgacagggcaagactgcaggtggcagtgcttgacccaaatctaattccacaatatgttgatgttgtagttggtgattatatttatgagctgaaattcaaggttgaagtggaggtcgatggcgatcagcctatgctgatggatatggatgactttggggcatacgacgacggtgattttcaggatcaaagcaaggatgataacttgggtgaaaaagggagcaggggatcagattcgttggatccatcaaacggaacaacaggtgcggttgacaaggcttcaaccgcaaagcaaaacagcaacaagactggggctaattctgtgagagatgggggcccggctgccataccttatcttgcacagatggatttgggacagccacaggagaccgggtcagtggttggtattgccatcattgaagccttgggtggaattccagaagtgacaggaagtgtgcatgatcttcgtcgcagtaagcgtcgcaccgattcggtgagcgaagactcgcttgttcgggcggaaaagcttacggcgggatacaacctggacaaccagtcttctaaaggtaacggcgatacatttgttgatttctcagatagttttatttatgagtcctttaaaaccattggtattcttgcgggtagcaatcctagttcggatactttgtctattagtcagttaaaacaattagagattaatagagataaggaacaacga

SEQ ID NO: 102668 - DNA, 361 bp, Zea Mays
agcgagagtcatgatgatactggaaagcgaaatccattgggaccttgccccagagtacaggtgttcgagattccgtgaaaaaaaagtgtgcagatgatggacatacgattcactataagtccctaacgtcttctactcctaataaccttatcttggttggtttgtcaaggagaaacaaattgctgctccaatttgtagcctcagaatgcaattttgcctccagaacggcactatgctttatgctctttccataacctagctagcagagaccctcatccattttaagccaaatttcattatccatgagaggtagccatcaagttttatgctgtattctcatgactccttgtgctctaagcac

SEQ ID NO: 102669 - DNA, 388 bp, Zea Mays
agcgtgttcctgtgttccacctgagaggagcgtgtagtgaaattattagggataaccgtcaccgtttgtttcctgtttttttgtgtttcgatggcaggcgatgaagaagaagcaaggatccctacagacttcgatgaatgtgttagccgccaagatcttgaggcaaacaacaagctcctgaaggagcaaatggaggagacggtccacaagtcagtgcatgatgccttcattgacatgaaccttggcaagacttacgagaggctggatcgacgattgtcccagatcgtcgacagacttgctgtgttggagacgcaacaacaagcaccgccaccaccacctcctcgtccacgtcttcccgatgatgcggtgtttgatgaaggtaattatg

SEQ ID NO: 102670 - DNA, 293 bp, Zea Mays
gccggcttttcagtcctctgcgtaggaggaacagtttctcttgtttcagcaactgaagaggccccttcgccaaactcaggtaccacgaccggttcaatgtaacgtggccggtgggtaagaaccctcacctttttgcccttcggcacaggctcaactggggtggccgaagcagcagttttcctctttttcccctatccccgcagtgggtagcggtaattggggtagacgaagccgatggcgtcaaaaactctgttcagcctcttctttccccgacctccgaaggctgcagacag

SEQ ID NO: 102671 - DNA, 570 bp, Zea Mays
gtttctagcacatctagtacatttgccatccttctcctcttgggagttgcggcagaacttttttgtgccttcgccgctgttacttctgatgaagggcttaaaatttctaacacttttgtttctccaatgtttggctcctcagccttatccttatcagtctttgtcccagctagctcagctgagggtagcttcggcattgtagttggctcttcagtccttggcgtaggaggggcagtttctcttgattcagcagctgaagaggcctccccgccaaactcaggcactacggccggttcaatataatgtggctggtgggtaagcaccttcatctttttgcccgcagccttcggcacaggctcgtctggagtggccagagtggcagtttttctcttcttttcgtgtcctcacagcggatagcggtagtcggggtaaacaaagccaatggcatcaaaaactctgtttaatctcttttttccccggcctctgaaggctatggatagtgcattatcttctgccttggaatatgatccaagcagttcatcacttgtaacttcgatgcattttagctag

SEQ ID NO: 102672 - DNA, 1005 bp, Zea Mays
gtggtcgaagacaaataagtataagaaagataatttatcaagaagaacaataaaaagcaagtagttgactcacctgaagattggagaagaataatggtaaacccaagtcagggggagctatgtcatggcttgacggaggaagatcagcaggaacaatttgaagaacgttgccaggggtgagttcagccccaccggcggatactagacttctcgcatctagctcgctgacctccaaggcgacttgtttgttcgaaaccgtagaagcatgcatcgctatcgccccatcggattgaggtggagacgacccaacatgggacatccatggacctgtgggaaggaaagctcatctgaacacccttgggggctgggttgcagcttgtgccacccaccagagccgggtcactaccggcaacaccctcgggggctgggttacagcttgcgctacccaccagagccggatcactaccggcgacaccctcgggggctgggtaactgccagcaccaccctcgggggctgggttttctatagcagccacctctaaggctgaaggcttccctgtcacctccatgtgagtcgagcaactcggaccaacgtcttggcattgaagactgccttccaaagtcgacgatgcacgagacactgctcgggatacctccaatcccacgtctggaatttctgaacaaacaaccatcacgtcatcagcagttggctccgatagcatatcctcagggacgacctcctcaagggcctgatcaaaatccgatattgacagttcctgaaggctaacaagagctgacaaagctggagaaggaatatcactcccccctcactacctctataatgccgactgttcttacgaatcagcgggacttcttcttcttgatcttcatcaaatatacagacaacagccggtgcacggtcacacccatcgggatcaactttaggaaggacacacccattgggatcaacttcaggaaggacacacccattgggattaacctcag

SEQ ID NO: 102673 - DNA, 317 bp, Zea Mays
ctatctagcgcacacgcggtcgaacatcggctatgccatcggctatctgagccggttcatggaggatccgcaggaggaccacctcgccgcgatcaagcgccttctccgctatattgcagggacgatcgagcatgggcttgtgtatccgaagagaggaggcggacgactggagctgacagggtacagcgacagcgagatggcaggagatgtcgacgggcggcgcagcacgacgagcatcatcttcttcctcagattgtgcgcaatttcatggtaatcccagaagcagaaggtggtggcactctccacctacgaggcat

SEQ ID NO: 102674 - DNA, 425 bp, Zea Mays
tccgttgcactgaaacacagaagctgttatttgctgcccaacaattgagaggccctgccagtacctagtgggcaaattttgtagcagttcaaccagctagacatcaggtcacttgggatgaattcaagctagtattccgtgaacactatgtttcagagggagtgcttcacatgaaacaagaggagtttattcgactaaagcaagggggagatactgtaatgcagtatctcaacaagtttaaccatttatcccaatatgctattgaccaagtgaacactgacctgaagaaaaataattgcttcatgaggggactcaacgaccgactccaacggaaaatggccacctgcttggatcttacttacagtagagctgtcagcacgacgctggcagtagaagccaagaacacaggccagggaaaatcaaag

SEQ ID NO: 102675 - DNA, 432 bp, Zea Mays
ctcgccccaatgcaagccacctagtgccaacattccagaaaatatggcccagggcctggatggaggagtggttttacattaaaaataatttaaagacaagggaagacgtcaaagaaatcattcaacgcctcatctgttctcgcttcggcctccgaaggccgaaggtggaaattgacggcaatgttgaagcatgtcagaaggcctttagcactgtgtgtgctttcattggcacgagggatttgattcaagagcatgtagcctttagggtatggctacttgtggaaagctgggatatgccgaaggagaccaccgccgattccagtgagggtggtttggtccgtttgaagtataccttcagatttggagagaagtttgatgagccagacgatgactggctgaagtgtattgaagctaccagtgatgagctactcg

SEQ ID NO: 102676 - DNA, 562 bp, Zea Mays
acatgtaatgatgctagaaattttgtaatggtatttagatggatatacttgacatttgtataatataatattttgatagatgtttaatttttgtgggtacgggtgacccgatgggtgacccatacccacgtgggtatgggtatgggggtaaatccatacccaccagtttatatggatgacccgaggggggtatttgtttgtcgtgggtatgggtatggggtagtaatacctggtgggtatttaaccattgccatctctatcctgaacaaagtatagaatggcaacggactcgctctcagagcgtgacgaccattgcagggagggtctatcccaaaaatgcattgtcaccaagtaaacccccaagcaatccacatggattactcaggggctcgggggctacttctagcagatgtgcttgcacgtgcccaagcgttccgcactcaccatgggaaaatggacccatgccaagcgcgtggcgtcgatcatagaaagggtccatccgtaaaacaacattatcaccaagtaaacccataaacaatccatatggattactcgagggctt

SEQ ID NO: 102677 - DNA, 467 bp, Zea Mays
tgatagctgttattataggagaactctgccaaagaaagacacttgtcccaatcctttccatagtgtagcacacatgccctcaacatgtcttccaaaatctgatttaccctttcgatctagccatctgtctgtgggtgatatgcggagctccttattgcatgggtcccaagtgattcttgcagctgctcccaaaagcgtgccacaaacagtgctcccctgtcagaaacaatggacttcggaatgccatgcaaacacacgatttgatcaacatagatttctgcatatttctctgtcttgtgggtggtgtgtaccggcaagaaatgagctgtcttggtcaacctatccacaatgacccaaatagaatcatggtgccaggaggttttgggcaatcccacgatgaaatccatgcaaatgtcctcccatttccaagatggtatgggaaggggttgcaaagggcctgctgcctt

SEQ ID NO: 102678 - DNA, 321 bp, Zea Mays
caagaaggcatgcatttgtaatgtgctcacccaattcagcattagctatttttaatgtgatctttgagaaccttatctaggggtacgacgaggccacttgtgaggtggccgacgccgcgtcagccgaggatttgttttggtgggctccctagggctcttctctggtattcgacttttgggtttcccggcacagacagccgccctcgtcgctgtgccaggcgtcaggacggaaggtggggagacaatcgagcttcccgccttgcttagtcgttagtttctgtttctttcttttatttggatgctaggttttgcacccagccc

SEQ ID NO: 102679 - DNA, 610 bp, Zea Mays
gcgacggcgtccggccggccgccggttactgatcatcaactacgtaggtgcaatccaacgcataaaagagactcgcagtcctgttcatgtagattagcgcagttaagcattgtggatttcagagacggtaaacgcaggtaaaaacaatcatcatccgctccatctgtgaatgacgaaggtgaatcactcgacgtagcaggctataggctagcagccgtgctaatattttgtggcaccccttgatccattccaaagcgaactctgttgggagttttctatcgttttgccactgcctacaactgtgcggcgctttgcccaaaagcttgcgatgcgttccttggggacctgggactctgggaggcagagagagcagacaggcttttggccctaggctgtgcggttcacctttggcttggtcgaattgactctgaaaagatgcgacaatgacacaaggtgtgctgcacccttctggtcagtgcactgtcctcttgcctgtgctgctgtgcagtgcaggagcagcatgcttttgcaagtttgcatgcgtaggagtaagtgacaaacaaccaacaggacgccagcgtcaagaggtgtcgattggtcattggagaag

SEQ ID NO: 102680 - DNA, 1122 bp, Zea Mays
ctgtcatcctaaggatcaaggaattcccaaagcctagagacaagcacacacaagctgcgagagcaatctccaaccataaggttgggaatgagtatgtcccccatctgcagtaatgaagaggtcagtcatttccaacaaaataagcaagcaacataaaacatcaaacattacactcgatgatgacaaggtcagtatgtgtacccaaaaaaatttagtataggagaaacatgctaggtaaaggtagtttaatatcattgagtaggcatatagcaaggatgttgcatgccaagattcattggagtatgtagacatagcatcttccctttgtaaacttgccacgtgtagtggtcgcgtgccagtaggttggtagacgaacattacagtacagggaaaatattttggtggggaagcagtcgcacaacgtaataggtaagagaaataaacatgttgtcagtatagcctttttttattttacatgtaggttatgtacaagtttgagtcgatcaactaaaaaagcgccacttgaccacacctcatccgacaatattggtaggaaaacgtgtctaacagcaaggaatggaactaataagaaactcaaaccccttgtcaaaaaacagacactcaaacctgttaaacaaaacggtatggtttctagccgaaaatgtctcaaaaatatataacacaaactgcagtttttcaagcacagatgctccaaaaaaacctccgaacgctttgaaggcaggagagctagattatgttgtgttaagggaaccaagaacatgattgtgtaattagggcatatcaattagatatttaatctatcaaacctatcgagaagatgctaaaacagaagtaagatatgtgacatttggtacgtattacatggttttcttttacgttcaagcaagtttgcacaacaggaaacaaacattgttcatgtataggtctgtatttatttactctttttctgcaagcccagtaaaccttctgttttaagatgttttaagagcggaagtatggatggttccattgatttcattgggtgtggcactgggatgccttgtccagaaattgtattgctcgtgagtcatttactaagaaaaatgatatgcagtttttggc

SEQ ID NO: 102681 - DNA, 389 bp, Zea Mays
cggcccacgaccacccctttgtccaggcgctcgcgtcggggtctgatagtgtgcacggaactgacgcggcaggcaacaggcagcagggatggttgccgatgggggtggattgggtgctctagttcctgaggccgttcgttgttctctgtgttatggaagggagacactgtatttgcgagggatttgatcggtgcactggccgcaacagccgtggcaacatggaaggatggtgtcgtgatcccccttctgaagatgctccaagacaacatgttgcatttcggccgcggggacgatcaggtatctgtgtggtctaatgttcaaggattatatattctcttactcctaatgatgctgacatgttgtagttggcaattatgtgagctgttgtg

SEQ ID NO: 102682 - DNA, 582 bp, Zea Mays
tatgctttctaaagtaggcttgaactacaatatttctataaaaatttccaaaaattctgtaaaaattacagtggcttctcactggtgtataatttttattctcaaaagttgaggcttaaaatgctaagggttctctctgcacaaaaatattaagtttttaggcagacggggtgctttgaactacaactctcttctaacagtggattattccctaaggcttatttttgctggcatttaggtgcaataatatgactttattccaagttttagccaatgatatttattggtcattttattgtgattttctaatgttttatggtctggtggtgctttctagtgctactatatttgaaaaatgtcaaacaacagatttcctaatttttctatcttctttgcacaagagcaatcattctagaatttggctatttttctcaaagggaaaggggtggtagcatttcttgaaatatatggtctttctcatggaataagaagtgaggtgtattacatcatgtttttaccttaaattcatatttttctctagtggcttacatcataaataattgggtaaaaattggtttgctc

SEQ ID NO: 102683 - DNA, 493 bp, Zea Mays
ctgatatggaaagggcgagagggagactgtgcgcgagagggaggctgtgcactgaaaccagcctaaccggtagatgttccatgtactactatttgaaatatctttgctagagtgtgctagtagtatagtctagaaagtactgccattccgaggtgccgacctaccccagaacagttgacttcgctaacggacggccaccgccgtcgacggactagctaagctagatggctgcgagctaggagtaccacgctataaattgaccatacggggcaggggcatacagctttctgcaccacttcccagttcccacgagtaatagttcgcatgcacccacaagcacacgcctctagctagctagaattcagtagagcacgccgtgcagtttgcacgaacgaacaccacactcgtcctaaacggctggctgcggagtgcgacatggtcaggccatgggttcttgtcgtccttcctctcatgctcgccaccttgcttattg

SEQ ID NO: 102684 - DNA, 553 bp, Zea Mays
gttcgatgtgccatcggtcatacactggacatgtttgttgccttatgcctgactctgttgcattttgaaacctctatgtgtgtcatattcagtgtggtattcggtgtaccattggacatgtctggtgcgttgtagcaccccacgcccccgttgtagacctctctacaagatgtatatagtgccacctgtccggtgtacacaagggttctatgcactcaattctttagcccaaccagcacacatgtccggtgtgccaccggacacgtctagtgcactgtgtagcatgtttttctttgtgtcttcgtgtttattatcttgggcttcacttgtcttgtgcctcatacacttttgcatgattttgatgtcttctaatgtcttgctttgaggtgtcaatatccttgattacctcattgcctttgtttaagtccacgctacatcctttgaactatatacataaacactagcagaaccattagtccaaatggttatgttgatcatgaaacaccaaactttttttattaaataggtcgaggtctattttcgttatagttat

SEQ ID NO: 102685 - DNA, 869 bp, Zea Mays
cacagagcgaaaatgtccgatagattagcaaaggatgagatgactacctggaatgctcacacgagaggtgacgatccaggcaggacgggagacggcacacgggcaatcaaggtcattgaaatgacagaagaggtgagcacatattagtcacatagtcataagtatatgaaatgtgaataaatacatacacagagagagatatggcacagaaaacacgagacgagacgatcgaaaggtcaaacggcgtgaaaaacgacgtttgaacgataaatagtgccataggaggtttggaattcgaattgaggcacaaaacgacatggaattgagccgatacttcacgaataggtttatataggtgaatatgagtgaagtgtgtgcttggtttgaatttaggcgaagaaaaagagattagggcactcggctcggaaacgatcgctcgaaacggggaatttggtgaaatttaagcctggaatctcggattggcgtgaaatttggcaagagtgttactggaagtgttgtgaaggtgcctgaaaaatttgggttcaattggagcatttttggctggtttgggcatttcaccgagcacatgacgtgcggagatctagggtttcggtgaaacggttatttgaggtgggaaaaccctcccgaaggagctagaaacctgcagggatgctcaatacacacagagacacacatactacaacatggatgcacaaaatttcacaggatttggagtttgggcaaaatgggtggaaatgggagcctctgctcaccagaacagagagggaggagaactgagggagagatggatgggctgctcaccgagagggatgaagagaagcacaaggtcgccgtgggatcgccgccgg

SEQ ID NO: 102686 - DNA, 340 bp, Zea Mays
cgggtgtagccggaataacaggtacgaaaaatcgaagtcttttctaaagaactccgtacagaagcctacgggagcggcctgatcaacgaaagcacgcagcttcatcacacaaaattatggttacatacatacagcgagggcatcacacattacattggctcaaccttcgggatgatacacatctccctatagttgaacaacattatcctcaattcctcacccgcaaacagacttcgcagctccccctcacccacactcgccccagctggcgaggacaacaattcccgtttgccagtcccgtccacacgaagatgaccaccctccatctcaccacgatgac

SEQ ID NO: 102687 - DNA, 419 bp, Zea Mays
ggcgagtatctagtttggatcgggacgttggtccttcagttcctgctgctgaagaagtgcctgtgcctgaatttactgacgttgaccccaatgggtgtgctccacctgctgctgaccccaatgggtgtgttgtctgtgttgctgatgaaaacgacggggaggaagaagatgaggtccctttgactcggaagaacagtcgacagtatatcgctagtggggaaagtagtggagttccttctcctgctctgtctgccctcattggtctacaagagttgtccctggcaaactttgatcagactcttgaagacatggttccagaagacctgctatcagagccagcggatgatggtgtgatggaggtttgtgccgatgtgctcgacgccgggttgggatcatcccgggcagcgtcccgcgcttcg

SEQ ID NO: 102688 - DNA, 272 bp, Zea Mays
cagtattactcattacttcctcctgtaacaaagctaaagagcatgcagtgtcaaggtcagctggacgctgtatgattaccaccgccttaagatcatctttgagtccatccacaaaccgagcaataaccatagtggttgttagatgattatcatgagccaacagctggtgcaacaacacatcaaattgttcaatataatccgacactcatccagtttggtatatgtgatagaattgcctaatgagtaaattgtgctgatcgcgaccaaatcgg

SEQ ID NO: 102689 - DNA, 292 bp, Zea Mays
ctgcggccatgtccagaagtattttatcaatatcagagagtgtgctttctagatttgcatcttcagcagttgcagcttcagcaggtgcagcttcggtagctgtagcgctctcgacagctggtgcctttgacgccgaagctggcggtggtgtttcttcaatagcttctgtcacagtaataatccttcgtttttttggcccagcagacttcttcgctgccgagggctccttcttcttctgtaaaagcttcgtcagatgtggccccagtggacttagcttgataggcaaggattc

SEQ ID NO: 102690 - DNA, 391 bp, Zea Mays
ccactctagcatgtgtccacataaagcatctcatcggaggcattcgcggtgcccgacacatcctcaacaataagcatcgggaacgataagaggtcgagcaaccacacgaaagaagatgcgcgagcagcctcagctcggctagggtgggaccacacgccttcgggcacgagatccgaaaggcacaatttcccctgaaggtacacacgccggccaacatcaccaagtatgatggctccacaaatctcgtcatatggctagaagactaccagctcgcgtgccacatggcgggaatcaaggacgacgacttggtcatccagttccttcatgtccatcttgcagaaggggcaagggcttggctcgagcacctgcatgccgataccatacataattt

SEQ ID NO: 102691 - DNA, 328 bp, Zea Mays
aaatattttgcacaagagaaagttctacaactagtgatccttttccaagttattgttagcatatatcaaatggatcacaaattgcataaatgtatcatgaattctccttttaacttagtgcacatcaagaggggtatcgattgatcgtatatgcgacactaagaatcatgattgttaattgaagtcattcaatgatcaaacaaataacagatgtgatcaaaaggacaacatacgcattagattatcaattaagcttagagtaggagaatccagcaaatatgctactttagaggaaaaataagaattgacaaatagtagcatacttcat

SEQ ID NO: 102692 - DNA, 287 bp, Zea Mays
gtccagccggattgggcgtattgccgatcacatccacgagcttgaggtggacgccttttgatgtggcgtaaaccatgctttcgccattaccaggtcccactatgaggaggggatcaacttggacaccttcagtatcggacattccgagggatggactgatgtggaacttgctgacatgctgaaagcgctagagccattgtattatcgccttggcagatatccttgacggtgacgctcttcctaaaaggggttaggaagttttagaactttcatgaacttggggtgtg

SEQ ID NO: 102693 - DNA, 421 bp, Zea Mays
tctacggctactcgtctaggtcgatgacagactatcattgttgttaggcaccatcatccggataaggatagaagtatccaggatatgaatgagcgtgaagtactacacaaaaccgaacaggtgcttggtggctctcgtcttgcgaaacacaatggagatcctcttgcatggatgacaaagataacattaaaaaaactacaagattgattaagctaaagtaaatgcttaacatccaaaaacaggtattgtagcgtggtgcactttaacacgcaaacgctcccactgctcacctccgcctgcagttcataacaccgcatgcaaattcatcccctatcaaagaacatgctgaagtaaaaaagtctcgtatgattcatcatcattgactgatcagtttcataactacagtgaaattgtaggctca

SEQ ID NO: 102694 - DNA, 423 bp, Zea Mays
atcgccggtggcccagggtatagggtccttccgatgccatcgatccctagtaaacttcagcatgcgccaagatgtttctcggagcttgggcgtagtcataacctccccgggcccagcacacgtcccagtcaactcctcaacaaaaagcctagagcccttcagccccatcttttcccctttcataccttgcacatctattttcctttttcgagtagctgcgaccacaacctttccctttgaggtgccctcttcaaacggggtcttcacctgttttctcggtcgtccccggaatcagcagagttcccctccaggtaaggaccatatggcaagctattcaattaaaaaacccggttcaacctgacgttggaaccgcggatatcccagctcctcaacatctcagtcttcggcacatattttccaaca

SEQ ID NO: 102695 - DNA, 712 bp, Zea Mays
gcaacaaatgacattttagggtgggcttatgacttatcctcttcctaatagggtttgtagttgtgaattggttaataacactgcacactacacatgtttgtcatgcatgatggtgatctacgtttttccattagctttgaaaatgggtgatgaccgaagaagggatatgtatgatggtttcaatagtgacaccttgggacactctgatgcattggttaaggttgttgacgaattcgtggcgcgcgcatttgctggtgagccacgtgtgacgaaatgcccgtgtactaggtgttgaaacctgatccgactggacaactttgacctctccatttatattcgcaaatatggctttaagacatactatttggtgtggcacaagcatggagaggtggatgctcctacgaagtcgaacacagacgaagacgtagactgaatggaggacatgctagatgacattcgacatgagtatctatcgctggagaccgaccgaccccgccggaggaagtgcaacaaatttacaaattcttgaagccgcggatgcaaaagtgcacgagggcaccaaagtggcgtacttcaggttgtaacacgacttatggtgatgaagtcagcgcagtcacgaccctcaccacgacgacgaacttctcttctctcagacacgacggagaacacgatctggttttcccctactaggcggccagagggtacgaatttc

SEQ ID NO: 102696 - DNA, 363 bp, Zea Mays
aatctttatcccacgctctattgtttctagctgattaggactgtctccgcttagctccacgagccttcgtcgtcggcacaatcgccaactccgtgtgtggtgtgcctcaacggcccagtcaaatccacacgtctccatccaggcttagcttcgcacttcgtcgtgtgccctcgtttcacccatcacctagctccacctgtccagcgcgactctatccggcctagctctgcgattcaccccttgacccctattccgctaatcgtgcagcactggttcctattgtattgcaacccctgtcaccattcgctcatccctattcttagaacgacgaggagctcaaagcaaatcaacacagcagcatcc

SEQ ID NO: 102697 - DNA, 664 bp, Zea Mays
aaagatggtcctgcagtcgactgaacaaattctgggcagtccaaaatatctgaagaaatatcctgacccactacctttcccaagtaatcctaggcagtttgcagataagaccaacttgggattagaaagggcatagtttggagtatgttttttgcctatcccagggaggtgactcagttgctggtatgccttgctgtcaacacaacatgagcctccatccttttacctccctgtcctgcatgtaggggggtgattctggttgctcctgtgcttagggctggtgtgggttgttgtgaatgtgtccacgtgcacatgttcatgcactagttggtcctcaactccatcttccctgtgaacatgtggaggcaaatagagtttacccttttgcctccttgccataaccctcaagtctaataaagggtactacagtcatctctgtattcctcaaccaacgtctgattgaacatcagttgctatcactcttgtgaacaaagatgggcaactgaaactatccctccaccctagaatagcccctgccccggctgaaccttgctagtggtgaccacgccgattgtttgtccatctcaccgtggccaacctcttcggtgatacaactcgcccattttgcttgtgttttgttatcaccaagtaattgtggtgctca

SEQ ID NO: 102698 - DNA, 447 bp, Zea Mays
gcggaaacgaagcaagggaagcgtaagcgttaggagacgaggcgccgagggaggcaagccgatcacaccaaacgcttcgtgctgctgccccgtctcttctcatcgtgatctcagggcagtggatcgatctcacgtcggaggcgaccttcttaggcgcgccaccgccatccgagccgagccgcagcgatccagatccaggtacccccttttggaccgcccctgcccctctatccctcgccccatcggcgtccgcgtgtcctcgtcccctgagacgccaccggcgtggagatggagtgacgatccgatcagatccgattgctcgttttctccgagaatctctcccccttttgtcggttgtgagctctgaaagtcgaatatgccctgtttccctccaatccatccagttggcagcttgtttgccgcgtggtggagttcgtactgatgtag

SEQ ID NO: 102699 - DNA, 561 bp, Zea Mays
caaaggcgataatagacaagagtatagaagaaaagataaaggcatagaagaaaccactggtataagtacaacaaagaatggagttacgtcaaggcttacacacaataaagaagaggatatagccaagggtgaggtaagtaaaacaccgctctcaaattgagataggagattggagattttagagaatagacataatgtaatcgcaaggtaggatatagagataagaaaggcaaagaaaataacaaacaaaagcacaacaaaggataaagttaaaaactcgtaggtgacaaagaaggggatacgaccaagggaaaaataggtagaaatttacaactcttagatcgagatggaagagaggacattttgaagggctggtataagataaacatcagtgtaagatatggtgatgtcgaaggtaaagatgataataatgaaaagcataacaaaggatagcgttaaggcaagactcgtgaagtggtgaagtggagaaaacaatcaagggtaagataggtaaggtcccaatagaagggttgaagtaaaaaattcataaccggtggaagt

SEQ ID NO: 102700 - DNA, 868 bp, Zea Mays
agttccttgggtcacggcaaaaggggatatcggtgacgtgctcaccagattgaggagcaaagattctcaaggcgacttcagaccaaacacccagacatgactaggcggttaggagtgtagggtatggacagtgaaaccctgctcggttttagataagaaacacaaacagggagagatggtttattgcactggtggtcacagttatagtaaaacaaggagcactcgactggacttgcatttatcggggcaccgacatgtttccgccgagttttgcatgagctagcacgcggcctcaacccctatgtccacgcaagaccagtctacagtgaggcaaagggtaaagctttactggtgtttggacagggaagcacacctacagctgagtcacaagtttctaccggcttccttggactccacctggcttcagatgcagtgcgtccatttttcctgggcaacatagttccttttctttcagcgaccccatctccaaaccatcggctcttcttatccactacagcctagaacacgtaggtagggaaaatggaagaaaagaaaaactcttcagatatatacagacccaatctaacctgtccactacatataaattaagttcagcacacccctatctaaccaagcgacttgggataaccttttctccaaatttaaaatagagactgggatatccttcttcataagaaatgtcttcctacaatggatcttcaagttttatataatgattatcccccaaaagtccaaggatgaagaattaaatggttccaaggtcaagaggattacacaatagttctgaaaattcagcacaatagcatcacattttaggttctgaaactacacctggcaacaacctgaa

SEQ ID NO: 102701 - DNA, 613 bp, Zea Mays
cctcgctctccttagtagaggggttgggctactcgggccctgatggcttctccttcgctggtgaaggggaagataaggcttcttaaaatggatcacctacctagataaggtgtaaaattgtcatcacagcttgccatccggagcttggatgatctcgtcgcgggacacgccagtcccctacctggcgtgccaactatcagtgtttcgtgcctcgctccgacaagtaaatttattgtgtgtgttctgagctccgaaggctatgcgtggagggcgtaagatttatactggttcatgcagaacgtacctacatatagtcatcggtggcttgcactaccgacaccattgctgatcaaacttgtagtcggggttacaagcaatcaagagagcgaggagagggtcccagatctcatatcagggtgtaagtggagcttagaagatgtaaggtggagtcctagctaagtcttggcttggcggagctccgaccacctgattctcgccggcgctcctccacctgttcgtccttgtgggttcgtccccatttgaaggcctccagtcattcctcagcacgtccttctgttccttgattcgtccatccccctgccatgaggcggcc

SEQ ID NO: 102702 - DNA, 315 bp, Zea Mays
gcatgagatggctagtggcggtgatcctggtggcattgtggtgctttattattaattagttgggtaaatggtgtccattcctgaatattgcagtatcgaagaataagaaacaaaaaaccactctctaaagtaccaccacgttcgaatccatcatgtattttgcaaggatcaaacacatttctcacacgccaacactcttacaccattttcatatcggtcagatgtacaaaccagcaatgaaaggaagctaagagtccctcaaatcaagacatggcatcaagtcatcctgctactacacgcgagaaaatagacaac

SEQ ID NO: 102703 - DNA, 578 bp, Zea Mays
aggtcctggtgccttcaactgggggcagttattcttgaagtgactggggtctccatagtgccaacaggcatttgctggtggttggttgcttgcgaccgagggggcctaaaaggagctctgactctgctggctgaaacgtgacggagtgggtccagctggtctattaaagcttggtcccttgggtggaaacccgaaggatcgagctctctggtgccggtcttgctgctgagcttggagaacttggaatttcctcttgaggtgacctttttcttcttcctttgccctttccacttgtatggctttattggagaggtgcgagaagctgaggaaatcttggctggcaaggatggtcttgagttctggtcttaaccctttcagaaaacgggccatcctcttggcttctgtgctgacattgtcaggcgtgtagcgagccaattctgtgaatttgtgcacgtactcactgacagatcttccaccttgagttagttcccgaaattcatcttccttgagctgaacgatcccttggggtacatggtgctctcggaaagcagtttcaaattctgcccaggtagcatctc

SEQ ID NO: 102704 - DNA, 549 bp, Zea Mays
cataacatccccatagaaccaatgattccacctttaagagttaattcagttgggggaaaagttcagttcgataggatttgtccgaatctaaggattgaaataagggggatagacttccccgctagcctagtagtaatgggaactcaagggttagatgtcatcctagggatgaattggctacacggaaatcaagcaactgtcagttgtgacaagagaacagttaagttggtgtctccatccggaaaggaagtagtaaccaagctatacttacctaaactagaagaaggagcctgtcaccatttatcagtagatgacaaggagtccaatccaattgaggcagttaggattgtgttagatttccccgatgtattccctgaagagttaccaggcatgccacctgaaagaaaagttgaatttgccatagagcttatcccaggcaccgcccctatttccaagagagcctatcaactgtccagaccagagttggtggaactcaagaaacaaattgatgagttgttggagaaaggttacatcaaaccaagtacctcg

SEQ ID NO: 102705 - DNA, 640 bp, Zea Mays
ggggtgtgtcctgcattggttgagcaaaacaaaatgagagtttcagcatggtgatttttactgaggacaacaaaacttgatttaatgggacgtgtgttgcttgtgatgtcaccgaggtcggtccactatgttgtcctccttccctcagcccctattgtggccgacccctagttttgctgccctagggtcgggtcacaacatgtatcaggtgtgagtgaggacaccatgtacttgctaagggtagaatcgacgtagttcctcgatattccacatgttggcgagcatcgtgcctcgtttgtcttccagcttgtaggtgcccagttagagaacttctccaattacgaatgaccctttccatggcgatgacaacttgtgtcgatccttgttgctctgcaccagcctaagcacaagggggcccacttccaaggtcctccctcatatgcagcagtcatggtatcgccatagcgtctactgatatttagtagtgctacgcagcaggcttcatcgagctgatctagggcgttagctctagtccacgttttgcttcactcttggggagtcgtattcacggtcggtggggaggatgacctcggccccataaaccatgaaatacgatgtgtatctagttgctcgactaggg

SEQ ID NO: 102706 - DNA, 299 bp, Zea Mays
gtaccctaatccagaaaacattctctgcgtgctgacaaagctaagtattcatgagattgtacaaaaacataaatcacaccacaaataccaacatgatcacatgaccgttgtccaatgatgctcaaattgcggcactagcagcaacataccatatgagcaatgatgttcaaaaacataaatcaccacacaaatatcaccataacaatgacgttaagaaacataaatcacatcacaaataccaccataatcagtcacatgaccattgtccaacgatactcaaattgcggccctagcagcaa

SEQ ID NO: 102707 - DNA, 432 bp, Zea Mays
cgcctcagggcgacgtcggattaaaataaaaatctaggcaaagacattcaggtgcgaaaacacccccatgtgcaactaacacaacaacgccatattaaataaaatcttagcgaacacaccctaggtgcacaccgtattaaataaaatcttggtgaagacacctccgcatgcaaaatagatgcccacgggcgaccccgatcaaaacaaaacattgctaaagacaaccagaggtacgaagtctctcagcagcatagtaaaacaaatagcggcaaaatacacctgtggcgcgggggcacccacaaaaaaggtctactctaaggctagcacccgttccccatcgacaaaggggggagagggcaacatttcacttttatttttgtcgatcggagagaaccgccaacactgccagactacattattagtacaaaccgc

SEQ ID NO: 102708 - DNA, 561 bp, Zea Mays
acttgctgttggtgtggatcaagaacatttggatatatatacatgtcttaacaatggacaacgtgcaggatttgatgaaatcatagatcatgtacttaataaaaaaaaccagttgttttttctggatggtccaggaggaatgggtaagaccttcctatataaggcactacttgctagagtacgttcagagggattaatagcaattgctactgcaacttcgggtatagcagcgtccatattgcccggaggacgcacaacacactcaagattcaaaatccctattaaactcgttgacaatagcacatgcaacttcacaaagcaaagtggcactgcggagttacttcgcacagcgtccctaattatctaggatgaatttgcgatgacaaagcgtcaagcagttgagtgccttgataggtccctacaagatattatgacatgttctttgccatttggtggaaaggttatagtatttggcggagattttcgccaggtgattcctgtagtgacatgtggtacaagagcacaaataatggatgccacattgcagagatcttatttgtg

SEQ ID NO: 102709 - DNA, 499 bp, Zea Mays
gtgcattatttggtcacttgatcttttcagtttgcagaaaaaaggttgttgatccaagaacaaggataaataaagccggccgaccatgcacgcatataaaatttctctgccgccgccgccgccgccgatggttacctggaacatggaatccagtgcaggggaagcagatcgacaagtgtaatcggattctgccaattgtctatacagtttcttaggtagaaccgaatggtccggtcctcaagcgaatttttaatcctgttgatttatgcttttttgcgggggggaaagtctggaattcgtcagagctgagttaacgaatccttctcaggccatatctgcgcgtgatagattgtgcgcgcgcgaatcgccatggcagcccaccagtccaccaccattctctgataggatcttctgagctcctgatacactgttaacgaatccttatcattgccaatgaacagacttttaatagcgcacttctacgggcctttattccaag

SEQ ID NO: 102710 - DNA, 429 bp, Zea Mays
atgatgtgcttttatgagatgaatgttttaccattacatagtttaattgggtcatcataaagagtaactgataaagtaaatgtcctaactattaaactgatacattagcgataacttccatacctttacctgtaattgttgacggtttgatgatcatcaatgtacaaaagagggcacctaggtttagtgaatgaagctcctcttgagcttatataagatacatcctcctcttctctcttagcgaagtcacaactcattggtactcctaattaggagacctctctcttctccctctctatcttaatgtttgcaaaattcttacatctccattttcacaactctacacacacaaacctagcaagagcaggcctccaaagacctctcatgttgaagattttgcttaggataggcaagacaataaggtttcag

SEQ ID NO: 102711 - DNA, 778 bp, Zea Mays
tactgattattttactaaatggactgaagctgtgcctttaaaaaatatgacgcataaggaattaattagttttgtattagagcatattgtatacagatttggcattccacaaacattaacaacagatcaaggagctgcttttatgtctcaccaatttaaagattttgccaaatctttgcggatcaagttattgaattcgtcgccgtattatgcgcaagctaatgggcaggccgaatctagcaacaaggtgttgatcaggttgataaagaagaagattacagaacagccgaagaggtggcatgaagtgttgtcagaggcgttatgggctcatcgggtatctcgacatggagcaactaaagtaacaccatttgaattggtttatggacaagaggcggtgcttcctattgaggtgaatttacaggcttgcagagtagcttgtcagaattcgttatcggctgaggtatatggtgagctaatgctagacaaaattgatgggaataatgaaagtcgattaacagctttaagggaaatagagaaggaaaagcttagagtagcgaaagcttataataaaaaggtgaaggagaaatcgtttcagattggagaattggtatggaaaacgattttacccgtgggagtcaaaaataataaattcggcaaatggtcgccgaattgggaaggaccattcaaagttgtaggtattgtgcacggaaatgcatatttcgttgaggatttgcaaggaaagaaattacccaaagcactcaacggtaagtatttgaaa

SEQ ID NO: 102712 - DNA, 491 bp, Zea Mays
tgtcgactacaaagtacagcattctgactttcctacctaaaggattatttgagcaggtattaatacattattttttattgtcacacatgttatcaatcaagcggtttatttagattcagtatcttttatagcattttctattcatttttaatggaaaagctttatttgtgtctgtcaaatttcatatgttcaatcgattatttgctttgctccccttttttgttccccaaatactattttgttttgacaagaaatgtggacttatccttaagtgaatgaaatacctatgttcatttttcttttgtgcaaactgatctcctagaattgttcttttttctgattgctttatctcttaattggcttaataatggattgatgatatgtctgcagggtcttcaaatgtgacagtgtatttaaaatgtgattctgttgtctttgcatattgtgcactgtcaaattgtactatcttggtttatgttagtgcacattgt

SEQ ID NO: 102713 - DNA, 459 bp, Zea Mays
acgagacaccacctacttggagttttctgaaacctgtccaccgctttttgttaaagctgaagaacctttagaagcggatgaatgggtatgtgttatggagcaaaaattcggactgatccgatgtactgaaacacagaagcccctattcgccgcccaacagttgagaggtcctgccagcacttggtgggcaaaattttcagctattcagcctgccggacatctggtcacatgggcggaattcaaacaggcgttcagggaacattatgttccagaaggggttttacagatgaaactggaggaatttatacgtttaaagcaagggggagactcagcaatgcaatatctcaacaagtttaatcatctctcccaatatgctatcgaccaagtggacacgaatttgaaaaagaaaaattgcttcatgagagggttgaatgatcgactccagcgcaagatggccac

SEQ ID NO: 102714 - DNA, 453 bp, Zea Mays
gccaaatctgataaagcagcagaagaagagtgcataacttagaataaactgagtgatgaaagcgaataaggaaactctaggctcactaaccaatatttgacgccttcaggtcatctatttgtttttggagcaacagagggttccactgcattagagacgaagcttgatcggggacaggagcaccacaggatctcagttggggagatacaccaccaagaaaatcctatgatcatggaaagataagcaaaaaagacagtttgccagtaagaacagtaaaaagcaaaggttgacttacttgaagataggagaggaacaggggaagacctaaagcaggaagagttggtgcattgctcgacgaggggaggtcagcgggaataatatcaaaggcatgactcggaggaatttcgaccccatcagcagtcggcaggctcctggcgtctggttcactggctt

SEQ ID NO: 102715 - DNA, 639 bp, Zea Mays
ctttttcctccttgactcaaagcaggaaaacagtaatcaggataaacaaacacaattacatcaaaactctattcagtcttcttttccctcgagcgccgaaggcaacagtcatggcctcgtcctctgccttcgagtaggctcccagcagctcatcactggtcgcctctatagcatatagccaatcatcatttggctcgtcaaattggcttatatactggaaggtgtacctaagataaaccaaaccaccttgggctggagctagcaacagtttccttcgacatttccaattcattcacaagaggccatactttgaaagcaatgtattcttgtaccaaatccctggtaccgatgtaagtacatacggtgttgaaagccattaggcactcttgcacctcattcccaattgcaattgattgtcttctaattccgaagcgcgaccatatgggatgttgaatgatgcccctcacatcttccctctgattctgatcattctttacgtagaaccattgcttcatccaagagctcggccacttctttcgaaatgttggcatgggataatttgcctcagagtggggcacgaagctattacatccgaagttgttatggtattgttccttaacggtcgcctttgtctggtag

SEQ ID NO: 102716 - DNA, 432 bp, Zea Mays
gctactcaaaagcaatacagttagttgtttcttttcatacatgagaactttggtacatttttgttttatacttctttcatccccttggataaaaagatagcattctttgcacagaatatcgcttgcttgttgagaaaggtaataatggagattgaacgccgcatttctactcaagcagaacacataagaaatgtaaggaatgctattttatacttatttttcaaattattcttgttgtaactcttacttgtatggcagcaaaatagccttatcagagcacgtgaagagaaatataaatcaaggataagagtactagaggcacttgcaagtgggacaggtggacaaatgcaaataaattcaagtgcggcaaatggaaaaataaatgtaagttctagttttcatttgaaacctattatgatgagttttgttaga

SEQ ID NO: 102717 - DNA, 713 bp, Zea Mays
agcagcataggtggatagcggtgtcagagactcatgagctgatagagtcctaaaccctctatcacctgcatccatcaccctgacatgaatgtgagtgatgtagtaacaagcccgagggggcttgtacactcgcctggtttcatacaggggtcggacgtaggttcccaacgcatgcagaacatcctgtagcaggttagggaagtgccccgtctcaaacattgatgtataatgttcggtgacaggccatatccccacgaagtggtccagttgttcaccgttggcttcctcgttgatggtctccttcttcttcttctttgaagttttcatcatcatcaccagagtcgtctgggtcgtcgccttcgagagcaggggcttggactgctggtgctggtggtgctgaagatgacgatccagctgtgaaggctagtgattctgtcaacgggctgggcgtaggcagaaactccttcgagctgtcctccagaataactccattctccacacaaatgcgagggagatccatagggatttccttgactaccactgggtagacgagaacttaccgtggtggagggatgtagttggtgttggtccgggtggtttgggttgtacgaaccatgcatctacaagagaaaatgtcaacttagttgaattttaaagaggtaagattaataaaataattttgtaagaacaaaattagcatgttttgaacagac

SEQ ID NO: 102718 - DNA, 1891 bp, Zea Mays
gtcggggatgggccagagcatcatggtcgttgtagccatgttttgctcggggttgaggaaatattgggcgtcgttggtcccctcggcgagctaatcatagactttccgcacccgaggtcttttggcttaaaggcattgtcgcttgatgtttccataaactctgtcgagttatcgaacgagggcatcaagctcctccggctgctgacagaggctcggttcattggcgaggatccgcgcttggtgttggcgttggtactcctcttagttgggggttccccgtcctttcaaccattctcattttgtggtggtgttgccatgaagtaggcccttcctaccgccttagtggtgtcagagttgggctcctcagttgagtcgtggttcgagttatcctcgagaaggttggggacaaaagttggctagtggctgatgatagccatgaacgttgagggtgaggcttcctccaccttttgcttgatggcgatggtgagccggttatggtgctacttgagggtggcggcacgcctcttgaggtgctgcttctcttccttgctcctggcgatggtggagcgcacaggtcctcatgcgctcgccatggtgggcacatcgaaattgatgagacgaagcttaccaatggaggtggcaagaaagtcaagggagccgaagctaatgcgactccctggcacgaaggtctcgccaacagagagtgtggatagctgagccatcagagtgaacaaagttgattggcatgctaatggactcctacctagcgcgccaactgtcgtggttgcggaaaccatggacatagtagaatttgtgttcgatgggggaggctagcatgtactcactccgaatgatgaatcgagggattctaacatggggtttatattggtttaggcttgcgccctagtccaatgtagtgctggacgtaacattcactgaggaatgtgttacaacaggtgcttgtgtgggaatgagggagtggagaactctggctaaatgctcctcagccttttggctgtttgaccctccccttttatagttcaaggggggttcttacataaggacttgtctgaaggagggtgcgacctattatctatggtggtgttgctagcgtagttctcctgatgtcgtcctctggttagtgcgcggtcgtacgctcaatatggatgattgcttcatctgcctagtttgcgggtcattgtagcaactctagtgctgagtttcccagtagtgacgcctggcgggacccatgggttagagtcagagggcacggagggtcgtacgtggtgacgccatgtcccgttgtcaaggactctctgtcatcccaccacgtcgtgtggcgtcatccaagacgatacatgtgtggcgacatgtcctaccatggccggtgtggggcaacagtacttaccttgtctccatgttagtcgggaaatgcatgctccttacacatgcatgtcaggatggcatggtgttggggcccacaaacatactagctcccattcgcaagccttgtgcttctctgccttgcagagttgcttgacggaacctagttggtccgtccgcttcacagagttgtttgggggacctggtcggtccatccgcctcacagagttgctcggtgggacctggtcagtttagatgggccatcaagagtcatgggattactttaggtaccctgttcctgggtacatgtcacttttctttattgtgccacccctatcttgtcacttatatcttgatttaggaatcaatgtgttctagcatgattttaaatccaatgtggcatgtgcattaatgcatgtgacacttagatgttgaaaatatggcatattactagcccaacattctacataatacaacatctcaacacaacttgccattctatagaatt

SEQ ID NO: 102719 - DNA, 846 bp, Zea Mays
atggactaaagaaggatgttgcttcacatgttgcactatgtgatgtttgccagagggtgaaagcagaacatcaaagacctgctggtttactgcacccacttaagataccttagtggaaatgggaagagattggcatggacttcattgcgggattaccccgcacatctgttgggtatgactcaatatgggtgattgtggagcggctaactaaagtagcccactttattctagtgaagaccgaggatcacaatttgtatgcttacatggtgtgcctaagaagattgtgtcagaccggggatcatagtttacttctctgtattggaagaagttgcacgagtgcttggatacaagattgaattttagttcagcctaccatcctcaaactgatgggcagaccgagagaaccaaccaagtattggaagatatgttaagagcttatgctcttaaacatggtggtaattgggataagaatttaccgtatgcggagttctcttacaataatagctaccaggccagtttgaagatgtcgctgtttgaggctttgtatggcagaaagtgcaggactccactgtattgggatcaaactggtgaaaggtagttctttgggcgtgaaattatacaagaggcagaagaacaagtccatcaaataagggagaatttgagaactgcgtaatcaaggcagaaaagctatgctgatacatggagaagactactagagttcaaggagggtgatcatgtatatttgaaggtgtcaccactccagggtatgcgaagatttaaagtcaaaggaaagttgtcccctcgcttcattggacccttcttaatcctaaagcgagtgggagaggt

SEQ ID NO: 102720 - DNA, 395 bp, Zea Mays
aatttatcacgtccaaaagtgtcggggtgcatggtggtgcggcttgaacgctagtacgctacctgttcgttgtcttgcccgtgagccactgacaaagcctcgcttatttttctttcaaaaaaagggtggcactgcgaaaagcaaggttctgtggggtgtgccatggagtatatcagtgtattatcccctggttacacagaaagacatcctttgcctttgcacaacattgtgcaagcctgatttggaaggaataaaacataccagctactatcgaccaccattgcgtcaatcaccttatttttcttttgtttcatctactttttcttaaagaattattcaactacgaacgtttactgaatatgggacttaggttaaaatgaagcacctattttcgg

SEQ ID NO: 102721 - DNA, 544 bp, Zea Mays
ctcaacatggactcaccattagccaccttaactcttactagtgaaaccacttcagttgataaggccaactgatctaccatcctctgactgacaaaacttgaggagctgcccgagtctaccaacataaccagcacttgattctggatcagtgcccgaactctcatacaattctcacggtcagttccactaatagcatttatagacaacttatatacttcctccacttccttatcttcctgatccagctgctacaacgcctcatctgacaaaaccaaccccatatcctctatagtcagattatgtaattgtgctccacctcttttaaggcatttagcttgatgccctggctcgtacttctctccacaaccaaaacataaaccatttagcctctgaaaatctctcagttgcctctccttagccaaatcagcagggccagttattgctctaggatctcctttcgctgtgttaaccatcactttgccccctaaataattcctctgaaatttggccttgttcatctccacaacttcttgatgtatctgcg

SEQ ID NO: 102722 - DNA, 366 bp, Zea Mays
aacaaagaatctaaactctctgccgccgaagcttctacagagggattgtaatttatagtgcgccacgcggcaggggaaaagctatcagaggaacagattgccgaagctgtgcaatatgctaaagatttgaagtatcccccaggatcccttgtgttcaatggcactgacgaagaatattttttgtactgcctcccggacaacaaggaaatatctgtttgccaggagatggcagaaaatataggattccccaagctagagcttggcctgtgtgccatgtcgaaggatggccttgcagacaatcttgcctataacagtctgaaggtgaagatgttttagcttatacgtagagtattttttgtgtctttt

SEQ ID NO: 102723 - DNA, 535 bp, Zea Mays
cttttcttgcaggggcaggagtcagcgcccttgttgtctccatgacagcgtctagtacgctagccattcttcttctcttgggagttgttgcgaagcctttgcaaccttcggcaattctacttctgccggagggctcacgatttctggcagcaatattgttttttctagctctggctttttggccacctcttctttggcttcggctggctcgtatatagacaccttcggcactacagccgatttttcggtgctcagaccggtaggagcagcttgttctatctcggtagtagaatatgttccttcaccaaacttcggcaatgtggccgtttcaatgtatcttggccggtgggtcaagaccttaattttcttgccctttggcacaacagagatggccgaggcggcagctttccttttcttcccctgctttcgcgaggggtaaatgtagtctgggtacacgaagccgataacatcaaaaactctgttcaatcttttcttgcctcaccctccgaaggttgaggtcaaagcaacatctttg

SEQ ID NO: 102724 - DNA, 476 bp, Zea Mays
agagcttgtatgaacttgtgagtttgagtgagtgtgtgagaactggagcctaagttgggtctgtcttgtaacgttgcgtgctctcccttttatagctcaagggggcacgtacaaggatgctgagccccgacatgtgggcccaggggcaaaacggaagggagtaactaatgcctgtcacgccagggtgatctccgagcgccataatgttcgtagtgcatatagtattgatatcctgcgctgcttcctcggtaatgcacgagtgatggtcagcatagtgtacgccgcagcacgggcatactgcctaccaacggaatggataggtatgccgcctgcaggatggcctggtcgcctcccgtcagtggactggacagggcacattaaatgctaaggcggcacatcgcctgccagtggaatggacagggctcattaaatgctgaggcaacacatcgcctgccagtggaatggacaaggctcat

SEQ ID NO: 102725 - DNA, 569 bp, Zea Mays
atcacaaatgtaaactagcttagttcaaaaatgaataatggcttcaaatctcaaagaacttgcctccttgttgttgtggatcaggttgggacgacatggctgttgtctgcttggggctgtggatgaaacgatcacctgatgacctgagttgtcgtcttgctggagcagactggaggttgtggacttagtgccgtaaacactgcagattgaagcttcaaattcagatgtagtgacagaatctgaataaacatatgcagtgacagaattttcacaggctgttgtacatagtaatcaggctgttctcgttaagagtttcattgtgttatttgcaataataatcagattctggagagtacactcacaacagcctgtgaaaactggcagcacgacatgtttatgcatatgttctactcacaatgaagcttcaatttgcataaattccgtcaccggcgtcgacgttggagctgtcggagatgtacacgatgccggtgaccttgtccgtgtacccgctggagtcggcgtccaggtcgcagtcgctgctcaggaaacctgcatgccacacgatcgac

SEQ ID NO: 102726 - DNA, 466 bp, Zea Mays
gattggcttgctttcgaaaaaccaagaatggtgtgatcaaacagattggtggggcaagcacgtctagcaagaaggtaagttcatctgtcacttgtgaagaactagctcacatgattgataccgctgtagctagcaaatatgggactgatgtcacagaaataacacacatgatttctgagggagtgcgcaattcttttgacacatttagatctgagtttaagcaagatatgaataataataatatgcctagacagatccgatatatagttcaacaggttcaaggagaattgcagggtaagcgtgtagaaaatctttcatatgcgcctagttataacggagcagttgcgcgtaatgatgtaaaccaaactgttaatgagaggagtggggattcagtaatgaactttaacctacagcagccatattatcagagtatggcatacgggccatctattccacctatagggaa

SEQ ID NO: 102727 - DNA, 440 bp, Zea Mays
gaggtttggaaaaaggtgaacatgtttgatctttgaaagagggctggttttgaacttgagaaaaacctgatttttcttttatgttcttctctctggtgacctttttggggtttttctgaaatctttttggggtcactctctttctattttttgtagggtattaagcgtactacaacttttataattagcccaagtcatgacaatgtggtttacatagcctttttgctaaactcccctctagggctccatttgcctaagggagttgaattagggtttgagtcattctctcctctttaggtgcatggtaaggtccaagcatgacttctcagatgggttacacctacttaggatcttgacccccaagtttggtgtcttgtgctcaatttaaccacatgtgatgataggttcaccagtgtagtctttgagtgaaaaccctaagt

SEQ ID NO: 102728 - DNA, 633 bp, Zea Mays
aaagttttgagaaaattgaacccaaagatgggctgtcagactgtcttaggtctgaaatcagattgacagtgtgattgagccatctttggactagaattcaaccatgatctagtgagagtttggttgtggttgctatagcaaggttgtagctggatcattagacaacaactttgctactggccgatccacaagttgccatgaaaaatcaggagaacgatgccaaacttggtctgtcaggctaactgaagaacaatccgatggtacagtaaccggatagaatcccaagttcagccccctcgccgccgacgagccgcgcgtagattcgtgctatcgccgtcgtgattcacgctcagatcagttggatagcaccgggggtcagtaaatatcacgtcgtggaaacactccggccattattttactccgaaaaccgtacccgagcagaccacggctgattcggatgagttcgccggagacaaccgctccacggccttgcgccacatgccttggcacattcaccgcatcgccgtgactcgcattagtcgtccgttcattgccggggagcttgccacggtgaaagccactaagattgcgcgctagtaaccttcttcccctccggccgccagcacatctttg

SEQ ID NO: 102729 - DNA, 808 bp, Zea Mays
tcggccccatgcgagccatgcgcttggccttcttcttcatcatacgacgcttcttacgcgccgccaaggtctctgtctcctcctccttcttgtgtttcctctccgccttaagggctcagtcctcgaggagaggaggaaggtagggcttgatgaagtagagccccttcaagacaaacacatgtcacgccgcaacaaacaaaccacccaagcgcaaagagactgaccagatcgctctcgacttgttgaggggaaggcccccctttaccaatgaagtctgacgtcaccccgcggtaatgtcattgatgcgagcctcgacctcgctctgcgagaggacctcattagagtgcctgtcaggatcgctctcgccggcgtacttccacatcagattctggcgggccatgagcgactgtagccaccgttgcatgaaggtgcatatcaacctctcgcctgagagtccctgtcccttcagcacaacgattttcccagttatatagtccaccttcttcttatacctagactcgacgtcgcgggtccactcggcgtgggattccatcttatggtcagtaaacggtggtgcgctccaatctatgttcttgacataaaaccactccccctcgtaatgggggatggaggtctggagcgggatcctgaggtaggctggccggcgactgtcgactgccgtacatctggacctaatatggatttatgacgtcacaataaggaatggcacaagaacttatgtaatttagtcttaggtgtcaacaggttacatatcaaaggcacaaagaagtacaatgcaaaaacatta

SEQ ID NO: 102730 - DNA, 722 bp, Zea Mays
caaacaaggctctccgtgcaaaagccgcctaagggtgcagccggaacagcacaataactacgtaaagatcgaagtctttcacaaaagactcacatcaatgaaggcgcgcagccttatcatacaaagtacggttacatacacacagcgagggcatcatatattacattggctcaaccttcgggatgatacccatctacctgtagttgaacagcattatcctcaattcctcaccctcaaaaaatttcgcagctccccttcacctacactcgccccaatcggcgaggacaacagttcccgtttaccagccccgtccacgcgaagacgaccactctccatctcactatgatgacgcctaccactttgcggcaattcactcactctccgtttcgccaccacccttcgccgcctatacacagtactcgcacccgggagcccctcggaacccaccacgcgcggcgaaggctccgctgcagccacatctaatgcaacaaaataatctaagccttcatccgaggactcatccgtccaaggaaacgaactcctagactcaccgtcggactcaaaacattcagacatagagccaggcacattatcatcggcgggcactacaattggagtctccaccgcaaaattggtattgtcagtagtgattgcttgcgcaggcccaaacgtcggaacctgtgcagcaaccgaggttcagtatcacacaggcaaaaatttca

SEQ ID NO: 102731 - DNA, 549 bp, Zea Mays
cgagaagagatagggaggagagtgcgtgagcaggggagggagaggagctcggcgcgggcgttttatagacgcaggaggagagtctgagggcaccgccattaatggtgaccaaagtgggaagagaaggtgaggagatggctgcgcagtgggagggataggaagcgagcgtgactctccactatagcaggcgaagaggcgaggcgccgggacgcggcatgccaactccacaccgaacgacgaacaaatttgatgctggacagagcagagagcaagatgctagatattgaagatggttatgacgggaaggtcccacgtggagatgacaatggcggccagattcctgatttctcacggaaaattccttcgttagagaatgagtatgagatgatttgtttcccgacgatgtaaacggggaactcccgacgagtaaacgggaacgggacgaggaacattttctatccccgtggtgacccgttagaattgcatgtgacaatgttttcgtgtagtagttaataatatgttttcgtgtagtagttaataataaaaata

SEQ ID NO: 102732 - DNA, 647 bp, Zea Mays
agcagaagagttggacttagagatgtcaatggggatccgatccccggttccctgcgaggaaatttctctattaggggatggatatgggattaatttagtccccgcggagatctaaatggggaaatttaatccccgtcgggttcgcggggacggaggtcccgtccccgttccccgtgtacccgccccacgaaactattttatctaaattagttaatttacttgttaaaattatagtaagaactcagtgcatgcaatattataaaatagaaaactaaactctaaagtatatgtctctggtaattttcaatcttttttgttaaatttgtattaatttgatgcaatcaattaaaatttatctttaaatattgtacttctagcgttaacagtttccccgcggggttccccatagggataaattccccgacggggacagggatgggagaaaaagctcccccgtgagcgttcgcggggacggggacggggaatttttgtccccgcagggacgaagatggaaagccattcccgaacggggaaatccccgttgcaatccctagttggactattccccacaattcctgcctcttgaacttcaagttcacaggcggcactagtgttggaaatatggactgcactttttagtcagcacc

SEQ ID NO: 102733 - DNA, 499 bp, Zea Mays
gtgccctgaaaccgaggaggctgaatcagctgcgcaaagatgtggcacaagtagtgagcatatggcaactgtcgacgagcacgaatcccatccaaaacggtgtcctcgatctcacaaataaggaaatccatgatgtcaaactcagagtgagagactagggcaccaaggagccagagctggatatgtgtggtagcctccctgtatcccatcctcggcagaagagtccgtctgatatgctcaaataaatacttggctgctgtagtaaaatctgccggtgaacgtcgcgacccatctgagaagggcgggcggaacagagccgcgacatgagctgtacccggagccacaccaccgtgagggcgacgaggagggtcagaggtgccgtagcagaggctgtgaagtcgagtcgtcgactcgggaaatccaaagagctggcgaatctgagtggcagtaatggtgacatcctctcgctcaaaacgaaaccgcatccagtgatgatccg

SEQ ID NO: 102734 - DNA, 407 bp, Zea Mays
aggcatgacatgggtccctaatgggagttctcaagatcaaggtaaggatgatgctttaggaagaggtggagtgaaggcaaaaaaggaataaagcaagtacatgacatttgcgtgaaaggtttgcccaaactcatcaaagttattggtctttgcatagtccatatttttgagttgtgacgtatacatcgtcccaaggtatgtccggttatccttcatgccatcattttgctccatatgcatctttatattatggaggagtgcaaccaaattattatgcatagggatagttgcaatatggtgctgcttataagaagctgaagtattttagttgatggtagttacgattcttgctataatttgcttcggtcatatttattcatgggatgaacatgcttataatatttgct

SEQ ID NO: 102735 - DNA, 497 bp, Zea Mays
tcatgtacatccgcaagatgatcaggtagtctagctgatatgcaacttctcttactcgctttaagatcaagaaaggtccaataaagtgaggggacaacttccctttgactttaaatctcctcataccccgaatcggtgacaccttcaaatagacatgatcaccctccttaaactctagcattcttctccgggtatccgcataacgttcctgccatgactgcgcagttcttacattctcccttatcattcgcacttgtttttctgcctcttgtataagttcaggcccaaagaactgcctttcaccagtttgatcccaatacagtggagtcctgcattttcttccatatagagcctcaaacggtgacatcttcaaactggcgtggtagctattattgtaagagaactccgcatatggtaagctcttatcccaactaccaccatgtttaagggcacaacctctcaacatatcctccaacacttggttggttctctcggtc

SEQ ID NO: 102736 - DNA, 536 bp, Zea Mays
aagtacttcattctcaaattcaaagttaacttctacacctttatactgttgtatgctaggctgtcagcaagatcatccttcgacaaaatcaagaggccatcttccagcttcgggaatcccatgctcttacctatctcccggcaaacggatatttctttgttgtccgggagacagtataagaagtcgtcatcgttagtgtcgttaaacactaaagctcccttcggatatttcaactttcgcgcatagtgtctggcttccagaatttcttcttcggacaatttcttccctgaagcgtgtcgaatgatgtagtcaacattttcgatcggagctttggaagcaggagtctcgatcttttcaggtgcaatttgccctgccgttttttcctcaggcgcgtcaggcttcgctacgatggacgctaaaggcccagcttcagcttcagcctgagctttcgtagcttcggcttctgcttgcccagtttcggcttcggcttgcgctttggcagcttcagcaattttctttgtaggagcagggctcaa

SEQ ID NO: 102737 - DNA, 296 bp, Zea Mays
gggaggcccatcaggcgacccatgataagtttaagtgttcgtaaggacccgggggatatctatcccccacatcgactttctctcacgttacatgcatagaacacgactaaaatcttttgcgcccacgcctacatctccccttgatgtctacagttcccacccgactgaggcccattgggcacctttcaggcaccccatcgggggccttttagatggctcacgggacataaccgggtcatggtgacccaggggtatctatccccccacactcatagccttacaaagtgatcgcaatc

SEQ ID NO: 102738 - DNA, 595 bp, Zea Mays
cgtgtgccctggtttgcggataacggctggtggtgaaagatctcaacgcagggaaggattggagccttatcaccggactattcactgtgccacttgccgcgcgattgactaaggtgtcctcgccggagtttgtcgtctttcgtagccacgccacgtacttagaagagctaccacgtcgtagtagataaccgtaggttgtctgtccgtcacctgagatattaccctggtgaacgccacggtagtttgcgccggtgactcacccctctcttcaactgtcggtctccccctttcaaaattcagggccaccaccctcaaacactataaattcatggtgctgctagctccgcaaggttgtcacaaagccagagcatccacccctaccctcgattagccaccatagctggagaattttgttcttccccccaaatctgttgtccgcgccaccgtgagacatcgcgttgtggccagtcgtctctaggtccgcccttgctctccttggccatgttttagcacccacacatgcttgtgatactcatcggctcaacccattgtgcttgaccccactcaatcgactagaacaccttgatttgtatgc

SEQ ID NO: 102739 - DNA, 416 bp, Zea Mays
tgatcttcttatacattcatctggtgtggatgtttcaccattgaattaaaatgaattgttgaagttggtaagggttgtgctcagtgcatattaccccttcataaaagagtgtcgttttaagacattaatgttgatgtatggctgcatccaaattcgatgtagtgaaatcatagtgttgattgcatctatgacttgctttgagcttcattacatgttgtttcatgcttgatgtcaggttgtgtagtttccttagacaattagtatgaggtagaagttcctgtgttaattaagaccaataatggacccatgttttgaacggtggtgctatatggggtaccttggatgctttgcttggagtggttgaattcgaggatgaattctttttaagggggtagagtgtaatatccaaaaaacaa

SEQ ID NO: 102740 - DNA, 724 bp, Zea Mays
cgacccatggcctctgtagcctagggctcgacgtggcttgtcttgttgtgccctgcaaacagtttatgcactcacaccatgagccagggggaggcatgggccataaatgcgctgcagtcttagggttcataggttatgagtgcgctgcagcccgaggggctcataggccatgagtgggaggcggaccgatgcctttgtcgtggctcagcattaggcgtagttaatggggtcgatcacttatgacgggtcgatctcgggccaggcgagggatccactcgagtggtttccctttggtttgcttggccctccttgtctggcttcgccacgcttgaccccgggctcagtgccacggggttcgtctgtgggtgcttctagggtagacgtttcctttctcctcatgctgaatgatggcccccggttgccagaggattcctcccagcgccctcgctgactgacaggccctacggggcggtgatcttatcctcgacaagcttaaagaaggggatcgctctctcagccagcctcgatatgaaacgactaagggcgaccaatgatcccgtcagcttctgtatgtccttgatgtgggcgggaggccccattgcctcgattgccctgatcttgttcgtgttcgcctcgatgccctagtgtgaaacttagaatcctagaagcttcccagcagagatgtcaaacacacacttctaagggttcaacttcatgagcgtgg

SEQ ID NO: 102741 - DNA, 471 bp, Zea Mays
acatatattctgatttgactaggggctttggaggaagactgcacccaaggcatgttagaacaatacacaatcctagccaaagtgaggacaggaacaaccataaccaagggcaccagtacagttctcagtcaacaggggcacaacagagctccttcagaccaccaaccccaagaggcagagggggacgaagcttcgaaggaagattcaactctcaaccaagaagactattttgcttattctgtggagatgataagggacacacaacaagaacatgccaatttacaatacagaagaagaaggaaatagctgaggccgaagcacgacaaaatcaaccgaagcaagtcctgcatattgcttcgtgttattccccatacattccaaagtatgtgggcaaccaacaaccactttcacaacctacaatttcagtggcttcggcaagtcactctccagctgcatgggccttaccacaac

SEQ ID NO: 102742 - DNA, 385 bp, Zea Mays
ataaaacttctcgagggtggaccagatctcgtgagtcgtagccaaatgttcaactcgctcaaactcacctagcgagaggcacgagaacaaagcattgaactttattgcttgaatcatgaatctccacttgaattggagtgattcattcacttgcagcattgaacataacatgaaggcaaatctcccaaactcaaaacacaatactttggagaaacgtagacatgtgaatcttccaatatgtgttgttggtcccatcaaagaacgtggcttgccaacaccatgttccatgttgccttcgtggattttgaactgattaggaaagggaaatccttaactggctctgataccaattgaaggactaatgaggtgaccagagtggggtgaa

SEQ ID NO: 102743 - DNA, 447 bp, Zea Mays
gtttgttgaatttagtgacttttaaatgacatgctaattttgtcccgagcagggcccagaggaaggaagtactacaatggatcaagatgttaatgttcccagataggtatgtagctaacctgagtagggggtaaacttatctactctgcgagtcttagggatgaagagtcatgacttccacatatgaattgaacgaattctttcggcgatggtttgaggctatgtccctgagcatgtctaactagcgcttgcagagttgagctatttcttccactaactttgtgcaagagagttatctcggaccgtgattacagacttggaaagaatggcacccatgttactatgtagtttgaagaagacctttccacatggtttctttaatccgatacaacatttgattcttcatctcctgtatgaggcacgaatgggggcccattcagggacgtt

SEQ ID NO: 102744 - DNA, 441 bp, Zea Mays
cttgggtctacatcagaaacatctgctcaatggtcatcaggggtggcggtggcaactgctgctgagctacctcctcttggggtgcctgctgctcctgctgatcacgtcttccacctctgcgcgtattctcagacatctgtagaaagcacacacacatcagatctgactctgcagtctttcagcataagaaaagataaatggaaaacttcatagcactgaacaattgatcatcttcactggctcttaacacagcttctcagataaagagaaaagtggaaataaagggattgcccaactaaataactaactttattaataactacaccaagttgcaggggatacccacaccttgatgacaatcattacaagttcatcatgacaagcatcaaaacatatgataagcaaactaactctaactaagactgactaagactaagacac

SEQ ID NO: 102745 - DNA, 615 bp, Zea Mays
gttggacaaggtgtagtgtcatcgaatgtaacctcacaagtgtccatgatgtggttagtctctaggttaagaacactattggtgtttcgtacctcgctctgacaagtaaatttattgcacgtgttctggctccagagggtgtgcgcggagcgtgcaaggtttatagtggttcgagcagaacatccctacttttagttgatagagggaggagaggctcccaagtctctttatctgggtggaagtggagcttataagctgtatggtggaatcctagctaagtcttggctcaatggggctctaatcttttggtcctcgacgacgctcctcctcctcttgttcgtccttatgggttcgtgtccgtctcaatgcgtctggttgccccaagatctctctccccttttccactttgccttgaggctatcctctctcttttatagctgggagaggggtcggccagcggtggtttccctaggaaggagccgttaggcaatggtaaaaccagcgttttaccccaggtgcagccacgagtactcgtggggcctggggctacctagttgtctcgtatttactatggcagatgacgtggggtggcaatggtcccagacgtcatcattt

SEQ ID NO: 102746 - DNA, 580 bp, Zea Mays
caaaaacggtccacaagacagcgagcaaggctagaggggctccttagcttctgcgccttttacctatatataacttggttggtcccagctgacccacacgacatttaccattggtatcgaccagctgccattaaattttgtgcctctaaagctcattcagcctttccgcttttgtgtgcttcgagaatccaagatctagttggccttcatatgacgagtattaggacaattgctaaggtagcaacatcgacatcgtcataagcattgcagaaagatgaagaagctatagacaccaaagtcatgcaagggtctgcaagtattcccatttcagaagttatgaaaggaatgacaactaagttgaagaaggggaaggctgaggaagcaactaaagaaggggttgactcagaggagaatgtctctgatggcgaggatgatgttgttgtggaagaagaaggtgatctatagctcttcaagcccagttatattgatatgggacggtctcttatacaatcaattgaacttaaagttcataggagacttggatacattgaagacgaagacttgattcattttgctggtg

SEQ ID NO: 102747 - DNA, 306 bp, Zea Mays
cttaattctgagcaacgctttaagagcacagaagaatgctgaggatgaaagctgccaaatagcccttggtaaccttcggtcagaggttatcaaactgaggaatgaagccacagagaaggataaaattctgctttccttgttagacagagtaaaggttagcgaagccaatcttgctgcacagtccaaagctcatagggttgaaattgaagatttaaagaaaaagcttgcagaaaagaacgaggattttgaagtagctaaagcaaaacaagaaataagtgaatggactagcgcaagactacaaaagaa

SEQ ID NO: 102748 - DNA, 359 bp, Zea Mays
tttgtcttccaccttgggtccagccttgatgcctcgggaatacccaggcagttaagtccagccgccggcgccaggatatcttcatcagccgaccttgggtccagaactgttgcctcgggaatacacaagagatttcctccagccgcatccttcccattgtccaaggaatttaaatgccccagcttcaggaaatcagccgcatgttccccgtcgtccaagatacttaaatgctccggcgccaggatatcttcatcagccgaccttgggtccagcactgttgcttcgggaatacacaagagatctcctccagccgcatccttcccattgtccaaggaatttaaatgccccagcttcaggaa

SEQ ID NO: 102749 - DNA, 440 bp, Zea Mays
atatgtcttgacatgcttccggagccacgatccggctatctccttggggccagtcatcgcaggtccggtggccaacactgaagatgctgctcgtgagggcgtgtaggacgttgtggacgcggtggccgagcgctttcagcgggatcctactggcgatgagtagctaggcctgcgtggagaaaacgagggttccgctggggaacgggttgtaatataccattgatttcgcaagatactcttcagatactacttattgggcaatattacaacttatctgcacaccacttttcctttgctgcgtgcaccgttaccaacttcttccttggtacttggcccccctgggatatggcctcgacgcgtcggggctggatactaggattcgtaattggcaactgatgtcgtgaccctcaaggggagctcccaattggaacttaacctgc

SEQ ID NO: 102750 - DNA, 722 bp, Zea Mays
caagtttgctatagatggattggcaagtctttgcacaaaaattcgagatctaggaattttaattcgttctgtcagacactcttaatcagttatctcgccgcaggcgaccacacactcggattcgcgcccaacactacgattcgtgctcaaagaagtactgattgttgctcagggtagtaaataccatcgtgtggatgaacttgagccactatccactccggccgccgtgtccacctagctcacggctgctttggaatcatcctcgccggtgatagccacctcgcaaccttgcaccacgtgtcttggtgtcttaccacgtcgcagtagctcgcgttatgcatatctgatgatcgtcggtgagctcgccacggtaaaagccaccaattgcttgcgccagagcacccccttctatcccaccgctgcacgtctttctcagaattagtcaccatcgctcatggatcctataaattgagcgtaccatccgctccgcaaggtattcaagcactcagcacacccactcgtgtcccaaatcgttcaccagagagccccaatttgggatttcccccaaatcggtccaaaacgccgcacaaagtgaccttaccgtggctagattgtttcaggtctgttcatgctatttgctctcccgttttatcacccttatgttctcctgatgctccttgacccattcaatgaagctatacaggcaccatatcatcgggaac

SEQ ID NO: 102751 - DNA, 355 bp, Zea Mays
gttaccagctctcaactggttcctcattatttcattggggtgtttcgtgactaggctgtgataagctctcttatccatttttctccaggcgtccccgggtacttggaattagagtaactagatttcctatccttttctttgaggcctcggaataggatgaggaataccattcatggtacttaagtcctctctagtgcactaaacaatagtgctacttgatcacgctctacaaatcacaaaacaaaatgacagttcaatactttatttcaatgtcttcttgacattccaatttacttattggtattgcacgggaatattctatgtgaattcccggcttcttgattttctagttttc

SEQ ID NO: 102752 - DNA, 652 bp, Zea Mays
cctcactttcccaggtggcttcctcttctccatctctgctccactgaaccttacagagtcttacttctgagttgcgggtccttctgactgctgagtcgagaatcttcactggcttttcccggtactggagatccttttgaatttgaattgcatctgcctcgatgtggttttctagtacttttagggcatttgcggagctgagacacatggaacacgttgtgaatatctgacatggattctggtagctcaagacggtatgctgcgggtcccactcggccaatgatggggtagggaccgacgaaacgtggtgctagctttcctttcatttggaaccttttgacaccacacatcggggagaccttgagataaacgaaatctccttcctcaaatctgagttctcttcgtctgttgtctacgtaactcttctgtcgactctgagcttcaagtaacctcctacggatcaaggcaactttctctttggcttctttaacaaagtcaggtccttctagtgtcctttcccctacattggaccacattaggggagtctggcattttcttccataaagtgcttcgaacggtgacattttgatgttggcctaatgtctgttgttgtatgagaattcgacgtacggcaaactggactcccaatccc

SEQ ID NO: 102753 - DNA, 836 bp, Zea Mays
aacaagttcacaaggatcacaaatttataatataaaaagtatgcaaagatcacaagttcacaatataacaagttcacagtataacaagttcatgaagatcacaagttcatagactcaaagttcacaattcacaatatccactcgatttagctgacatggcatgcttactcatgaaatatttttctcacataaagagttctttcactgcctcaccggaaaaccttaaaatctagtgtgtggtaaagacagactgtcggttctctgtcattatatattactaatacataacatgtgcatagaaaagagtggattcattcgagagaccaattgttaatctcaattgccttccaacaccatctatcacaaaaaatcttaaggcgtccaaaaaatacaaaataagcaatccttatctagagacgtacaggcgatgcgaaaaaatcacatgctggaaaattccgaaaaaaaattccgagacacaattctggaaaattccgagacaaatatcgggtaatttccgacaaaaaccagtaaccgaaggaaacggtcggtaaaacaccacgccgattccgatagaaaattttgattccgataccgattccgttttcgaaaaataccgttaccaattaatttggtcgaaaaatttcgaaattggtttccagaataccgaaaaattccgaaaccgttttcatccctacacgtgggcacgagagcagttttcccacctctcacacgttgcatgcgaggactagagaccgtgcgggagctacgcatgcaaggggccccacaaggcggtttcgctagtgcagatcacgcacaagcatgcagtgcgttttttt

SEQ ID NO: 102754 - DNA, 1618 bp, Zea Mays
ataatttatctgtgttccaaatatatcttcttcaataggatgtataggaagtctggtatgctcatctatttttccatcgagaggtgattcattatcaactgttgaatgcttgtccaattggctatcatcaacgtgtacttcatttgtgtcttctgaagaatccatcaaggtgaaacagtcctacaaaaattgcaaataaaatatagctaaatatactgatccaatggcacgatcgagatagaaggaaatatattccaatgagcatgtggtggagaacgcacaaaaattaaggtatggcatattttatatagaactatgtgtacaaatccatatacgtgtatgtatacacacacattttagttgacaacaaacaatttaatataaagcaattacttaagtattgtacagcaaacaaatgtaaaataaggacaaagcttctcaaataaacgtatttaatcacaagatttacttgtattgaatgcgtggaacccatcaaataaatggttttaatgttttctgctcttgaacacaataatgttttgtacatgattgaattggtaatttgtatcctgtgcaggctttcttcaatgcacctgatggcgatgagccattagctttagatatgagtagcatgggtaaaggtcaaatctggataaatggacaaggtattggaaggtactggcttggctacaaagcttctggaacctgtgggatctgtgattaccgtggagagtatgatgaaaagaagtgccaaaccaactgtggtgactcttctcagagatggtaggcgctttgtatatcaatgcagaaatatctatggaaagctcacatttgaaagcctttatattcatgccatgctcgctcaggtacaatgttcctcgttcatggcttaatctgatgtacgtggagaagcgctgatatagatcggctactacaagcacagaccacgccagaacgaacatccgctgctacagaagacgatgtggaggcgagcagcaagcacggcatgtagacgcaatgcaagcacaacgtacgtcgctacagatcacgtggaagcgagagcgcggactgcagatctatatacaatgttggatatacgatttgcaactgataaaacccattgaatcctgctagtgcgctgacagcagaccgatgccctaaactgatacacaggcattagtgcactaactaatacaggttgataaacttctgagcatcagtgcactataaactgataacacgggcattgggaggcttgccagcatgaataatagggaactcaacgactaaacattgtaaatctcgacacatgaatttgaaaaaaatatcggaaacaagcaataacacattcatcagataatggtagacctaatatgttgaactaaatggcatgcacaaaaacaaggtcaaaccagtagacggagtggaacaaagactcaccgtgctgatgtgcgatatggccgtcgtatgttcttctccactgctcaccctcgctctggacgacgcgccgctctgtagatagggtctcctgctcaccctcgctccggccgatgctatgcctgataattagtaatggttaaatagaaaaatcatatctcagcggaggtcaaggaaaaac

SEQ ID NO: 102755 - DNA, 485 bp, Zea Mays
cttagagctagaggcaatcccgaagaatatggcgcaaggcagttatctgtgcgtacccgtcgcagaaagaattgctgataatcggaaggcatactttgcgcataatgtggaggataactcgggcgactagactccgcaagagtcggcacatccgcacatgatagaagtagatagactcagatatgattagataagtagttacaatctgtaaagggacgtatcatcggctagttatataaggctgaaggggtagacctacaaaaactctctcgacattccactcatcacaaccacgcccaccattagattgataggagatcccatccatcaccacccgcaaatcatctgtaatctatgcaccaccagcaaactcaatacacagcaccaaacaggacgtagggtgttacgcaatcaggcaacccaaacctatataatccccttgtgtactgatgtgctcctgcacgtaccatcgagtcgcgatcaac

SEQ ID NO: 102756 - DNA, 501 bp, Zea Mays
cctggaaatagtggcgtagcttcctggacgcaacgagcacagcatagaggagtttgtgtgtctcaaggtacctggtctttgcctcgtggaggacctcgctgtcgtagtggaccggcttctgaacggtccggacccctgtacccggtcccgagccctcaggttcctggtcttcttgtgccatcctctcgacgaccagcaccatgctcaccgcttctgcagccgccgcgatgtataaatacagcggctccccaagctctcgggctaccagtattggtagggacactaggtgctgcttcaactcttggaaggcttgttctgcctctttggtccaagagaatggaccggacttccgcaacagcttgaagaagagtagcgccctctcagccagcctcaaaatgaagcggctaagggcggctaatgaccctgcaagcttctggacgtccttgatacggaccggaggccgcattgcctcaatcatcttgattttctctgggtttgcct

SEQ ID NO: 102757 - DNA, 570 bp, Zea Mays
cgcgaggccttcttgccttctagtggacccgggggatatatgtcccccacaacaatggtttctcgacaatatgtaagtccatcaaaagcccacgaagctagttagcctccactatagatgtgtctagtgctacaagtcctgcttccatagtagatcatgtcaacatggtctatttgtgtgatctgcatgaaacaacaacacctccaagagtgaaaacatacccgcttgtggtatacatctcatgcacattggttatccaattggcatcactatattgttctagtactataggatagacataataatgaattccgtaatctatagtacccacaaagttgttcattagattccctagcacaagccaatgatctcctctcgaattactagtaaaccgactcaatttgctaacagcaaaagagatgttagacctcatagcatcagcgagatacatgagtgacctgatgatttgtgaatatcttaattagtctctattagttctcttgttcttacgaaggatcaaactagtatcatagggtgttagagacgatttgttatatttatagccaaaac

SEQ ID NO: 102758 - DNA, 1516 bp, Zea Mays
ccatgaagccctcgacggcggtccaagctaggagccgagctccgacgagctagaccgatcggatgacgccacagctggagttttcaagcgacaggatccaaattaggctcaatccgcacctttcccctcaatcaattttgctagggacggtctgtcacgttctggccacggtgtcagtgcgggtgttcaagtgaattatgtgttccggatcaccgaaggttgggctggatgaattgaagccagggagaggttcctgggttcaccagggatcctggacacgctttggtttgggtaatacgagactcgaagagcagggcggcggtgagggttggttacggcggtatttttctgagcaagcacgcgttctggtgaaaggcttcggccgcaattcgattggttgatactggggcaataagagatcacatactaactaaaacaaagagtaatttgatcattactgaccggaggggcgctggccacgatgaggttggatttcaggtgtgcttgaacagaattggggcgaatgcaaaattagagctcgtagggaattgactaggagcaatacttggtgtgggggtgcacaatgatattgcgaagctagccacgagctcaatttataggcagcttcgtcggtggcacatgaattgaagatggcgcggtggcggccggagaggaaaaaggctactggtgcaagtgaactcgtggcaaccgtcgtggcgacaattccggtgatcggcgagaagctaaaacgaagcgcggcgatgcggtggaggtactcagatacgtggcgcaaggccgtgcgacggtggttccccggcgagcttatctgctcagccgcaaaacaagagggagatggtgacggtgagtcaccggagtgacctccagcccaccgacgacaaatatctttcctctcgcgatgttatccacccacccgagcgcgaatcccaacgccggcgacacgtattgcggcggaggagtgatcgacggcggtgaagtgctctgaacccaagcaggttactgtaccatcgacaaaaccattcagttggcctgacagccaattttggagcccaattctctctcaatttctaatgacaacccatgtcaagctctgcagaaaaattgtagagcaatgtaccatataccatgttgcaatatggtgttgccactaaaagccattagatcatactcgaaattgggcttgaagttgctgttagctcactgttagcctgatttcagtcctttagcagtctgacagtccaacttgggtggagattttctccacatttcttataagaacatggcttgaatccttaaacaaagttgttctcctatgtttggtcttcaaacttgttatggtcactttggacaaaatccctatattttaaaagatacagggctccaaagctgaaccaactaaactgaatttcagacttaggctctatagtacttaagaggtgatttttgcaaataagcccaaaacttagggtttagcttgcaaattcacatacttatgaac

SEQ ID NO: 102759 - DNA, 1058 bp, Zea Mays
aatggttgggaaatgtcgaacgaggctggtgccggttctagcgaaggtggtttggtttacctgagatatacctaccgttttagaaatcagtttgatgagccgaatgatgactggcttgaggctgtcgaagctaccagtgacgatctactggcggcttacacgaaggcagaggatgaagctatgaccactgccttcggtgcttgcgtgaagaggatgttgaatagagtttttgatgtgattggattttttatcctgattactgctttcctgcccgaaaacaagggttgaaaaggaaaatggtagcctcatccttttccaccgcgcctaagctaaagaaggttaaagttttaactcacagaccgaggccacattctataagaaggtcagctgcaattcccgatacaaaaggatacagattgctgaacagaccgaagctacccccttggcttcagagacgattcctaatatgacagtcgaagctagtgctagtccagtagaagagtctgagataaagagctcaaaggcagaagagcatttaagattgctgagtcccccaaccacaactgagttgccgaagctaacaactactgcaaccacaacaatgactcctaagaaaaggaggatggccagcgttttggattctgttttgaagtcaataaatattccgactcctgcttctattgaacctccgaaaggcaatgttgaagactcaagagtgctcactgcaagcgcttctcccactcacactgaggctgaaactttgagggctaagccagtagaactagcgaaggaaagtcttcatgaaaagccaacattgcctactcccgaagcaccttcccaagttgattcaaaacatattgttcgtcatgcttcggggaaacaactatccgaagaacaagttgctgaagtgctacattatgcaagggatctgaaatacccgcggggatccttggtttatggagggagcgacgaagatgacttcctttactgtctaccaaacattaatgagattaatgtttgccgtgaaatgatggacaacatgggatacctgaagcttg

SEQ ID NO: 102760 - DNA, 350 bp, Zea Mays
cttcctatcatagatcaaggagaggggtgaccgtgttacataaatctagggttgggtgagatggacgatggtcgggtcttgtcatgttgctccttatcctccatgattcttaccaaccgaaggactcctgtgaatgacttctccttctttcgttagaacactatggcgatgccagggtcgctgttaggtgttgtcttgtcttcatataggttgtcccactatgttcagttgacctactaagagggagttgttgagtttgtaccacgaaatgccctatgatgagtgaggtctatacattgacataccaacccctatgtcgtttttgaaccgcacgcctctgttagaacctg

SEQ ID NO: 102761 - DNA, 309 bp, Zea Mays
gcttgggccatattcaaaggcagaagataacgcgttatctgcggccttcggaggccagaagaagaagaggctgaatagtgtttttgatgctattgggtttatgtaccctgattaccgctacccgtcgtgggggcagaagagaaagagtgcaacttctgggaaggatgctgctccagctgttccaagcgagcccgcgccgaagaggaaaaaggtgaaggtccttactcaccggccgcgatatattgaaccggccgaagtgcccgaattttggggcgagacctcttcggctactaaagccgaagaatctgc

SEQ ID NO: 102762 - DNA, 981 bp, Zea Mays
tgatgatgttgtgtttgtagattgtcagagtccatcaattgactccaatgtgttttatgaaatttttccatttcgaagagtcgttagacatagaaggttatcttgcccattttgtggtattagatgaggcatctttagcccctccaggtgtttgtgaggggtcagcctctttggttgtgtgcaagggggcgaagtatttgggcgtaaaagggggacactagaggtcaggaaagcggccacccaaagaaattttaagtttgggaggtaccaaagcgacgaagactcctcgaggtgctcggaagagagctagtcttgttgccatgactgatatgttcgttgggcttcctcatagcccttgtattcacaaagatgagctttttccttggatggactaccgatgagttcaacatattgccgtggggatatttagagctcaacctccttataaaaactgagccagtcagtcgatgtgatatagttttttgcgattgattgcaggcgaagcctacttatatgtatgtgttgtaataaagcattctttgtttggttgtgtttattgaggtcgtcgatcggcaaccctttggcggaatgctgccctcgctcgcccccctcttgtcgattggtgactgaagcaggactatagattaaggaccgttcaatgcctgttgaggttacacccatctatgtcgattaaggaccgttcgatgcatgttgaggttgagactttgcaagtagctatatgctctggtaagccagaacctacgtataccattacatgaaaaggcaaccacgcataggacatgggtgatggtgagagcagcgtgtacccatcatgcgaccgtccaagatggcgtaggaattgtgggatgttgtggtctcgggttgcgcggacctgttcatgtttaggaggatccgtgagaaaggttgatatatgtagggttttgacatgcatatatcaccataagaaatatatatgatgta

SEQ ID NO: 102763 - DNA, 353 bp, Zea Mays
tacatattgtgcctgtcctacagctccacatactatatcttctgatcaatacagatttgaccttgcaatcgcagtttcactaccttttggtaagtatcacgaaccagcctccgattgtaccatcctttgcttgtatttcgtcagacacttgtaagagcttggtaagatacattagagcgtgttcctgtgttccacctgagaggagcgtgtagtgaaattattagggataaccttcaccatttgtttcctgtttttgtgtttcgatggcaagcgacgacgaggaagcaaggatccctacagacttcgatgaatgtgttagccgccaagatcttgaggcaaacaacaagctcctg

SEQ ID NO: 102764 - DNA, 566 bp, Zea Mays
gatgatgaccaactctccggtgatgaccaactctccgatgatgaccaactctcagatgatgaccaactctccgatgatgaccaactctcgtatgatgaccaactctcgaatgactaactttgacgaccaactcgccgccaatcagctatggctaaccaattctccatcgagcaaaccgatagcacagagatttaagcctagggctactaacccacgtcagctacgatgggacgtgtcaccaacaagtcacgtacggatatgcgcaaagcacaccgaatgcccatcagggtctctataatgacccgtacatcggaaggacgggacaacgcgccataccgagcttgcgcgtgtgctcactggcgataggagaagccatgcctcgtacgacctcactttgagactgatccatggaacccattacgaagacataagtgatggactctctacaagagtcagagcagtgggaaaggacgacgccatgtcgggagtacgactacgcacggccctacgaaggacccaccacgccaacctagggagcagatctccctccctccctctctctctct

SEQ ID NO: 102765 - DNA, 591 bp, Zea Mays
gcgcgatccagcacgccctcgcgcgcggaacaacatgcacgacatacgagaaatacttaaacagatgtcgcgcatacactaagcgagtattaattcaaaatgtttgagttggcattaatcaatttaacacatatttgtaaagcacaagttagaactatacattagttttaattggaaagtcatttttttaaccactatcgaatgaacaaattattaattacttaagatccgcgacataccaaaataatgttactaatacgaaattgaagttattacgaagttagcgcgactggaacgagtcgtgacgggtttacgacacaatttatattgaatagataacatctctcgaatttaaattatgtggcgcgattgtattggtcaaagcgaagccacacaaagggccacatggatctcagcaacaactagtcaaaatgagtgggatcaaatgtggctagcatctccccaaatcccaactgcacggttggcttcttctcatctccttcttcccaatcgcacaaacacaacagagcttcttcttccacggacggagcagagaacagagggagaggagaccggctagcagggatctcg

SEQ ID NO: 102766 - DNA, 574 bp, Zea Mays
ctgagttgttgctctgtacgtgtgtagttgtgtgttgcttctatcatggccttggttcgtgtgtcaactgcagcacagaagttggtcggcagcagaacaaacagaacagcgcaaggagtgtctgaagaggcaagcatgaggatctgccattcagtcagtagttgcttcatgatcggtggggttggacggatggatttaaccccaggcctaggctactaactgaatggttcattggctttctccctggtcaagtggagaggaggaaggcaggggacgaagcgtcgaggacttattccttccttcctttcttccttcccttgcttctttcagatgggttattgcatctctgcctccttccagtttttatgccatttgtttgttagtaggataatctgattgatgaaatctggttggtcagagcaatgttgtttgaggattctgtggtgccaattaaactactgaaagaaacatttttatcagatttcagctcttagcttagacatacatgtatcccattttaaatccactgtctgaagaagagaagaacaagctatgcacctaaaaaatactttta

SEQ ID NO: 102767 - DNA, 2745 bp, Zea Mays
ccgttttgagcgagcatcgccatcaaacctcagaagagttcgcagaggttcaggtggttttttgtaaggttccaacctaatccgcccacccttacaacaaaggttgtagacaatcctccactgagttacagcagaagcactcttgacacgctcctggaaccaaaagaaggcgccgcaaaaagggcattcgtgcgtcggcccaccataataagaaaggaatggattgttgtctgaaggaacacaaaacaacaatggatcagcaaaacacaacaaaggtaagacacgtgcatgtggagactgtagcgcctagcaggggacctttcaagcgagcaatgtaggagtcctttagaggaacagcaggagcgggtagagtcgagcatggagcctgtgttgtacaagctcgtgtccgccttctcacttcaattcgacggtgtctattggaggtggaagcctctctagggaaatgcaacaacgatctagcatctatgttttaccaggtcacaacgaagaggagaacataagaatgagcgtgtgatgcatcataatcccaatagatgtacatgatacgtacgaggtcttagtggaaacgtcggccaaatagggatgcattgttggttaagcaaggatgtctgagtggtcatgttcgatggagataatacaagtatgtctgtggcaaccattggttaagaaacaaggtcatcatcttgcaaacagattgagcaacgagcaggggacccagaaacagcgcaagtcagtaaatagaaacaaaaacgtggccaaaggaacaaaccagaggtggtaggtctcctcttcctctcatttccagaggagcgaccagtactctgacatggcccatggtccattggtcagcagtttatagaatcgcaaatggagtgtctaggtatgggacaagagcacaggtatcacattggaatcagttctgaataccaccagaggtaacagcaagtagggaggtaaagccaagatggccaaaaaggagaagcatacatgataaatcagagtatggatgtatgaagcaagtgcaaacgtaacaagtaaaccataacaattaaccaaagtacatgaaataaaatggagcacacagaacctgcgacatacctgatacgcagcgtattcagtggagcgagcacgtgggcagaaggggaagcacgttgcaaattcctgaagcaacaattgtaaataataagaacaagtaaatacataaacaataagaacacatacatgtaaaaaagaaaacacagatagaaccaacaaaaggagggcaaaaaagagacaaagcacaattatacaacagcaaaagcctacattcagcttatgccaacatcaaaagcaaagattcccaaagtgtaggtaagcaaaggaagttaaactaaggcagcaccagtatgtggtaagggtctatgagaggaagcaaaggacacaaaatcaatctcagaatatataaacgaagaagaaccaaacatagacacaactaggaaaagaagagcagtaaagaggtgaagggcatatgcaggaacgcattttgacaaaagggtcccaccaacatcatcggggctgtagcaaggcaggtgttccatagcacaaagaaccacaactataaataagagagataactaagttccgagcacacaactcgaacgtctgtaagcataaataaagagctctagggagctaagaagtcccaaccacaattaagcatgaaatttatttttctcacccaactaaactgtatgcgaggaccagactgcagggaatctctgaatatgttttgtgctaatgcttactgtgtaaccataattcaaaccattgattcaaactgttttggtttgaccttcgagaagacccaccatccgaagccaatgctgtttgtagcctaagaaataataaattggccaccaaatttatatgcgaacccttttactctttgcagaaaccccttacacgcaatagctagatgtttgcggtcaacgcacatgtagatgcatatcctaataagctaaactttcagaactttgaatagagtaacctgcaggggtcaacaacacacgaaaactgactcccaaaaagccacacgtgggaactgaggtaactctgcctcggagctaagactacacaaatacaaaagaaacacaacaccatggcaccgacacaacagaagcacatgatcagagagcgagcacagtagcaagagggaaaacctgccaacagtataccatgatcccaccacagagtatggatgtatgaagcaagtgcaaatgtaacaagtaaaccataacaattaaccaaagtataggaaataaaatggagcacgcagaacctgcgacatacctgatatgcaacgtattcggtggagcgagcacgtgggcagaaagggaagcacgttgcaaattcctgaagcaacaattgtaaataataagaacaagtaaatacataaacaataagaacacatacacgtaaaaaagaaaacacggatagaaccaacaaaaggagggcaaaaaagagacaaagcacaattatacagcagcaaaagcctacattcagctgacgccgacatcaaaagcaaatattcccaaatcgtaggtaagcaagggaagttaaactaaggcagcaccagtatgtggtaaggttctatgagaggaagcaaaggacacaaaatcaatctcagaatatataaacgaaaaagaaccaaacatagacacaaccaggaaaagaagagcaataaag

SEQ ID NO: 102768 - DNA, 556 bp, Zea Mays
aggctatcatcacaagcacaactaaaagtaccagtgttattatagactgttacttgttcattacaaaaataaatagttcagccccttgggctaccaacaactaaccaacaacacttctccccctttttggcagcgaacaccaataaagcaggagaaggaacagtcacaaatcaccaagatggagagggatcgaagaaccgagatgccagattaacaacaaagttttgctccccggggttagcaggaggaggagtgctacctgatggatcctggggggataagaagatgaggggcccagatcaccctggtggggaggcgggacaaactgatctctatcattaaagaattcttcttcaacatcttcatcctcagcagacatgaatggaacaccataagcctgttggtgccattcattaatatcaggagggggtgcatgaagaggcacatcaggcgagcgcggagcaaaaggaattcccatagagattgactgacgacgaagattgtcatccgtctcctgctgccgccttgccagctcatgcacatcagcagatatgtc

SEQ ID NO: 102769 - DNA, 420 bp, Zea Mays
cgccatcacaatggattgtccaatgtgtttcagggtctgggtgccgagatggtgaaggccccgtccaatccactataaagtcagcgaggacttgcgatttgattgaattcctagactcgaagactatatgatatccagagagtttcgctgcccacttgcctattctagttgtagcctcctggttgttgaataggtcgttgatgcttcggtgtgtagccactcttattttgtgtgctttgaagtagtgtcacagctttcatgacgccatgtgcacaaagtaagctattttgtacatttttgtcatattgcacttggagctgctgaggacctctaagacgaagtgtacagactactgctgtagttttccattcttggccttctcttgtaccaaagctacactgattgtttgatgggaagcta

SEQ ID NO: 102770 - DNA, 643 bp, Zea Mays
gtacagttatgcccccggtcacctgctacagctccagaatattcccccttacgaggtcattatagcgatgttcagtacaacccgatcaaatgtaatacaaactctaccccaaggagggcttacaaatgggcccgaatgatagcagaacgtggccttcgcccacgtatggtacccttcgccctatgatgacaggtcttcgaccttgctaggactatcgttgttcggaaccatccaagccggcagggtcgactttgttaagctacaaggggaccccttttaagtggtggagcccttcgcttcgatgccttcggcagttctggacgaagtcctcgattccgataccgatcgaggtacccttcgcttcatgtatctacaataaagcatgttcagttggtgttaaagaagattgattgagggtttagacgacctttgctccaacactacccccccccccccccccgaggggccagttcaacttggtgagctagtctcgaagtctttttccaggaaatggccaaaacgctgcccgtcaggttgaagaggtcctcggggggggagttttaaaagtgaccattgaaagatgatgttttactgtggggctgttggtttctcttggtgctttttcaggcctataaaaaccatt

SEQ ID NO: 102771 - DNA, 529 bp, Zea Mays
tgacaaccttgcttaggagggctttcccatcatattgtgggaggtactgtaggaggcaggattccatacacctccacattacactgtgcagttgtttgaggaacatggagtgcctcgctgtaaggtgtggctagccttggagccccaccctttgtagccagggtggcgttcattggactctgagacccttggtttccgagcccatgacacgatagaggccacaaccttgcacgtgttgacgaccttctatggatttcacccgttggatatggtgactcaccccatcggcctattccccgctgagaaggaggatgacccaatgtggagggaccaggttgaccatgccaacgtgtgacgacaatctaccctggagccaccgctcgactgacggttctgtgcatgagtgcactatacggcgccctacaacgcgaggccatgtcacacttgatgggcctggcttaggatgcaaaagtcaccatcatggatcgagaagatcttgtggtggatctatctactgagttggtggaga

SEQ ID NO: 102772 - DNA, 512 bp, Zea Mays
agagaggcaaggcatcagtttccacgttgcgatcccagagaacgggcaagacggtggagggggagggaaactagagctagggttctatgagaaggagaggggaaccagagatagggttccgtgaaagagtgaggcggagccatggaggcagcgttgttgggatggagggacttgaaccgtggtttgattacaaagaaatatatgggtgtttttaagaatgttaggcacaacgacgatagaagccagtttccccacgttaaaatctaacagcaacaacattaattaatcgtgttcttgacgtcccttattaacgaaagcttctagtaccttgcatggcggtcatggcagcaggacgacgacgggttagcgtcagtcatgatgactactcgagttgattgctactgctagctagatagatagagtagtatatcaccgattcttgctctcttcctcccctgcggcgccgtggcaaatccaccacgacagggacggccactccatttgcacattcc

SEQ ID NO: 102773 - DNA, 724 bp, Zea Mays
tatattgtttttattattttcttggttcactggactgtgcgccaaatattggaaagcgcagggatctctgcgcaagaattcccaagacacagaactacatccatacggacggcgggttgattagctaattcttggagggctctttagcaaaatggtcgctgcaaaggggtatggatagacttcggccgttgaatccaccgtgtgtggtctggattagatccgcataaccctgagccagtacgcaattgtgcccgttggatttgcaactgacgacccaagattcgccatgccaagcacctacccatggccatcgtatggataatatatggctcagatttaattctcgtgaatggttacgctctcatctaatcgcatccgtccgagctagatcggacgacactcacgccttctcctacctccccactaccagacctggccccgcctaggcttacaccgacgagctcgccggagcaggccccatatcgcatcggcaacacccccgatcactactaaatgaaagagaacgcgagggagatgaggaattaggtggatggatactcaccaacaacgacgcaacaccgaagcctggccccggccgtacgcggtactacggtggcggcaagattccggggagaaattccctgtacccacggcagcaatctgcacggtgagggcaccgccacccacaacatccaccagtgaacgccatgagcagcaaatcggg

SEQ ID NO: 102774 - DNA, 383 bp, Zea Mays
tgaatgttgtgttatggcgtttggcctcacaggggcaccagctacatttcaaaaggcgatgaatgcaacgttgtcttcactgctccgtcgctatgtattggtattttttgacgacatcttaatttacagctctagttttgcggaccatcttcagcatgttcgggcagttttggaattgttggttcgtgataagtggtaggttaagctgtcgaaatgctcatttgcgcagcagcagttgtcatatttaggccacatcatttccgctgcaggcgttgcaactgatccatcgaagattcaagcggtggcatcgtgggctaccccacgttcactcaaggaattgcgcagttttttgggcttggcgggttattatcggcggtttgcag

SEQ ID NO: 102775 - DNA, 542 bp, Zea Mays
aggatttgtagtcttcgcctgcaaacacgacaatactcagataaggaagaaaacacatacctccgatcagccttgagctaggtgtcatgtagtgagccctagttgggcatgatggtcaattggttgaagaggggaactagcagatcgtggttaggctttgctactaaggatgggagtgttgcttgttttggtaaggttggtgagtacattggcctgaaacccttagagaaacctttagccacccacaaacttgttaagctcactccacctaaatccgccacccctgctgtgagagatggattgcttgtggagcctgtgagagccccacctcagaaacaagtgtggtgtccaaaacctaaccatctcaggaacacacttgacaccctgccagatatctctagtgatccccttcctagagcccctcaggcatccaaaaagacccattcccacaaacagattccacctaagagagaggtgaggtttcattatgagtattgtgagagggatgtacatttgcctccttttagctttaggaggaagac

SEQ ID NO: 102776 - DNA, 678 bp, Zea Mays
cgcagctctcctgtgtgttcgataaaaaaaatcacactcaactgaaatcaaacaaggctttaaagcccgcacggacacccctgatcctgaacacacaaactggctaacacaccaaacatagccgaaaacgtaaacaagaactacgcttcttctattcaacatttcccacatgaacttcagtagccatggcaccatcagtactggcaccatctagctagccacctaaaagtagggggttggggtgtgaggtagggaaggacgaggacaagagtgacaaagagagtggggatgaaggagcatgcatcgtttgaaaaaaaacaccagactcttgcattacagccattgacaatgcttcgtaacccaactcagttatcattttcttttttgaaagaatactccagggaaaaccccagaattgtaatatagtgtggcaccacaaattcgaacccggatcagcacactcctagcccatggactttaccacagcattgtaagcaccttcgctacctcaattatcataacttcctccgatgcctcacctcctattttgcctggaagcatgtccatctagtccaggagcagggtcaaaccacagcgttgtgtctagtcaatgcctaggtactgctaggctcctattttttaagcactacaacgtaccatccagaaaaaagctggaat

SEQ ID NO: 102777 - DNA, 302 bp, Zea Mays
cgccgtccccgaggtggcattccatggtggggcggcgatgggaagatttgggaggcatgaagtcgcggcgacggcgcggtactgcgaggagagcgagtcgagcaggtagaggagcggccacagagtactgggtttctgaatatggtctgctttctgaatatactgacattgatctctaaaaggcttaatattcattagttttgttctctgctagcatcaaacatgaacagagagactgtagaggcgccacactagcacatataggtcgaggtggagcaggagaggagcataacatacctttg

SEQ ID NO: 102778 - DNA, 2211 bp, Zea Mays
tcgagcttcgttcggtcgctcccactgcttgtccgtcgtcgcagcgccctatatcgctccaaatcgtcggctagccggccaacgccaccgagaagctgacccgagtgtccgctcgtccggtgaactagtaagccaactcattttaccgattaatcacactagttgaccaataaatcaggataggtcgcgactaaccgtactgtagacgcactgcccttcgcctaggtgcaccaccggttatcaccggttaatcactttagtgatgtggctacctgatggagaatgctgattaattggcctgatatgttgataagccagtagtcaagtaggagctagggttagaggattttccccttttcaacatgaaatctttttaaatcgccactactaattgcaatatagacttatgatacttgtaatagtagttcatgttattgctatttttggggatgtcggatcagatcaatccggattgggaacacaaggacaacatatatcctagatttacgtgtaagtattgcaagaaagagtcgaagaagcggtgctacacattttaaacaacaccatgcatcacgtgggggaaaagtgcagggttgtagcaacgttctgccggacatttctgattacttttggtggtacattgacaagggccaagataaaaggaaagcaagaatagtggtggaggtatggaggttggcattggtgggttcatctcgtggttttgatggtgacgacaacgacgagttgtaggccgcaatgcgtgtttcgttgtcgtcctctcaaaagcactacacggtattacccgtagtgcgttgtcggtaccaaacatcgacataacctccttttcccatgcgtgcttaccaactaatcatgtgggagtatgttgggagacgcctaggaacgagtccagaccccgccccctatatatatgaagtggtacggctgtggtggatacataccccctcggatcctcatggacactaaaacatatcatgggctgcctgataggtttcctgctgagtcgccatgtgggatgaactagtaggatgtagccaactcaggtgagcccgatccaagctaatgaagaccgacgtccgagttaagcgtcgttgaagcccggatgtgtcggatgatgtagttgcaaacacctgaaaggcttggcattcgacgataactcgggcggctaggcgatgaagactccggatatgtagggacacaatctgcgacaaagaaggagataagcaagtagatagtaatcgcaacttgtaacgggataactctctctggtcgcgtatatgaggccgagggggaccccctaccattccatctcatcacccaccactccagctcatcctcacccacaaccctgagcttgtaatcctcgtacttcggagatcaatatcaaacccaacaggaagtagggtattacgcaattctaagcggcccaaacatgtataaatccgtgagtgatcccagcgtgcctctgcacgaaccatcgagtcgcgatcaacgacgccatcctacccaaaagcatcacgtaggtaacctcgtggtgcgtggttgggtcacaaacgccgacaacgatcgattgagagaatcacatatccaatcaaacaaatctacctacattactttatattatcatgccttaggagtatacgtagtgtagccctagttgtagtttcccaatctcaatcttcacctagcttcgactctgcatcgtctcgaggtgtcttgtgtggcttaccgatcccaaaataaccctagatctttcctccctaaagggatccatcctgaggggcaagatctaggttctagaggagctcatccctatcttcatataaaattatttgcgcacgcggatggtccggtggccaactgcggacgatctggtgacttgtcgtcgacggttcgccgcctcacagaagggttccccaatgtcctcgcccccgcgagcgggatctatgaatagttggtgtttggcccaaaaaaggtgttaagattttttggaattaaaagcatcgatagaaattgatttagcatttacctcattacactctaaattacaaaaggtgaatgtcatataattaggtttatctttatctgttgccctatttggcataacttattttacaatttgttcgtaggtttaaacaaatgttgtatcaaacagtaggcttttgcatcagcttgtcagttcaacttcttctt

SEQ ID NO: 102779 - DNA, 990 bp, Zea Mays
cagtaagactaaggcaatgttggattggcttgtacctagttcagtgactgagttaaggggttttttgggattaaccgggtactacaaaaagtttgtcaggcattatgggacaattgccaagcctctgactcggttgttgcagggaaaacatttatggaattggactgaagcttctcaataggcttttgacaaattgaaagtggcaatgacacaaaccccaatcttggctctaccaaattttgagattccatttgaggtagagactgatgcttgtgaggaaggaatatgggctattttgatgcaacaacacagaacgatagcatttcttagtaaagctttggggtgaagaacaaacaactttctatatatgagaaagagcttttggctcttattatggcagtagacagatggaggccttacttgctgaggtcatagtatgttataaggacagatcatcaatctttgactttcttgggtgaacaacagttatagttagactggcaaaagaaagctatgtctaagttgatgggttaacaatttaaaattatatataagaagggcaaggaaaatctagtggcagatgcactctcgagagttggaagggttttggctttaactactgtcactgaagtgcaaccagcctagatcatggaggttactaattcttatgtaagagaccttgaggctcaacagatggtgcaaagactggctttgcacattccagacgaggctgtgttttatcttcatcagggcataatcagaagacatcaacagatatgggtgggtaacaactctactttgagaaccaagattgttcagcttttcatgagtcggctcacgggggacattcaggcatcaatgcaacttatcaaaggatgaagaagatgttttggtggcagggactaaagctagatgtggaatcctttgttaagcagtgtcaggtctgtcagtaggccaagggtgaaaggaagttccttgcaggtttattac

SEQ ID NO: 102780 - DNA, 325 bp, Zea Mays
tgaactgcaggataaagcaacacatatgtgaatatccaacgcggccatattcagatacatggataggacacacagccatattcagacacgtggatagataaagagcgtgttgcatttgaattataatgcagccatcataggatatacaaacatatttgtcccattttcaaacaaaaacatggttaagctattaattgtagaactggcaaaattaagataaagctagctgcatttcggaaaagatttactgccaacttcattagttgaatttttgatagtactgaataagaatgcaatgccaccctcaatagatactggacagctg

SEQ ID NO: 102781 - DNA, 616 bp, Zea Mays
cctcctatacatcgcggcctcacacaacgcagtcagcgcagcgctggttcaagaaaaggaaagggacgacacggctcagtaatgcccagtgtactttgtctccgaagtcctcacgagttctagatgcaacatgactgaacttgtgaaaatctcatacgtagtcatcatggcttcgcgcaagctaagacattacttcgaggcatacaagatatgagtcacttccgacaggggacttggggagctgctcagaaatccggaagcatccgcaggaatagcaaagtgggcagtggaactctcagggtacaacatcattttcgagcctagaacatcaatcaaatcacaagtcctggcagatttcatcgtagaatggacaggacctgtggggccgcaacaggaacacgcagaaatggtctggattatccactgcgagggcgcatggtgtcacacaggagcaggcgtcgtgacgatcatcacattacctgtcggagtcaaatacagatacgccgcgcgcctcatcttcgcgctagagtccgacagatgcacaaacaacatatatagccgagtacaaagcggtcatcctcagacttcgcaaactgcgagcccttggcgtgaccac

SEQ ID NO: 102782 - DNA, 421 bp, Zea Mays
cgaaccacttgcgcttccgagttggccttgaaatatgctgaggttagattcattgccgccatcattgtaatgagggggtggattatgcacgctcggcagtttgtcaccatagtaagttgttgtgaagtttgacacatcctctagaatgtatgcctctacaatggaagcctcgatttagcatttattctacatttatttcaaatagtctttagacatctctcgattggatagcaccaatgtccctgcacgggcctccccattcatgcctcatataggaggtgaagaagcaaatgctgcaactgattgaagaagccaggtggaaatatcttctcaagcttacacaataacaagggtgtcagtctttccaagtctgcaatcacggttcaaggtaactcttttgcacaaatctggcggaagaaat

SEQ ID NO: 102783 - DNA, 431 bp, Zea Mays
gctaagtctcgcctcaatccccatggtttaaatactccattacctattccacatgtaccttgagaagatatatctatggactttgttttagggctacctcggtctcagagggggagggattttatttttgttgttgtagatcgcttttctaaaatggcacattttatcccctgtcataagagcaatgatgcttcacatggtgctgatttgtttttcagggagattgttcgtttacatggagttctaaatactattgtttcataccgggatacaaaatttctcagctacttttggaagacattgtgggctaagcttggcacaaagttgttattttcaaccacttgtcatccacaaacggatgggcaaactgaagttgtcaaccgtaccttgtcaaccatgttgcgtgctgtgttgaaaaagaatttgaagct

SEQ ID NO: 102784 - DNA, 331 bp, Zea Mays
gtaacaccctacttcctggtgtagatctttatgtggtgggttacaagtggagtctcctagatggataaaagctaatgagataggtagatggttgatcaatggaaatgaaagggtacccactggccttatatatccgaccgtagggcactccttgcatacatgagtggatgcatatcccctagataatagtgaactgactgaacagaacttcctacaaccctaccgacttatccctaatctgttctgatattcaaggatgccatgcgcgggaaagtcaggtggttgttgcggatagcgtataagctgatgggctgcctcgtcctgagtcgga

SEQ ID NO: 102785 - DNA, 324 bp, Zea Mays
cgattaccttccctgtcctagctccttgcccacaccggcaaatcccgattgcgtgcctaccccccttccccggcctcctactccagccgcacgtgcgcttccccacatgtccccccacactcctctagctgtctcgttcttcggccatgcgcgccccgccttctccctcgcgtgccccacctcccccgacgtggtggttttccccacgccacgcgcaatctccatcatgtgccgccctatcccctacgtgcagggctcctttgctcgcgcacgtgtctcccttgccctaacccatctaccctctcgcacgcgtccaagatggct

SEQ ID NO: 102786 - DNA, 353 bp, Zea Mays
tggattggaaacataagtggttgaagttcaactatcaggagtcaacagtgctcctccatgctgttcagtagtctgtcccacatggtactctattggaaatcagacattcagattcatcaccactagattcggcccagctgcattcactatcagaattgcctgtgcctgaacccatccgacgtctgttgtgttcattccaatctctatttgaggagcccacctcccttactcctagcagattttgtgatcacacaataccgctgattgaaggggctagaccgatctctatacggccatatcggttttcaccagcaatgaaggacgagattgaagcccaaattcaacaaatgctt

SEQ ID NO: 102787 - DNA, 274 bp, Zea Mays
cgaggagtctgtgcgccgtcgcaggaccgaccggctgcatgaggattttcgtcgttatgcagccgagactggtcatcctctccctcctgggtcccctccacctcctgcccctaccttccccgcataccttaatgagtggcaccaacaggagtttggtgtgccattcattaccccggaggatgaggccgaggactatgatgaccctttctacacctcggatcctcctcatcctcctcctccctactcgggtcagggacccactcccggtgacccc

SEQ ID NO: 102788 - DNA, 361 bp, Zea Mays
tactcttcccacttttccaaacctctgtcgaaaaaacctaagcgcagttttattggtttggttaaaattgttgagggcttgatctcggctgaggatcttgagaaggatttcggtttccatttcccctggggccgtacttggaaagccaccaagtgtcactctggtttcctgatgcaatttccttctcaagagaggctggatgaaatgatcaacttccctgaattgaaaatgaaattatctggtgcaaaaatctctgtttcgtcttggagttcacaggctaagccaaaatccaaactccactctgtttggattgttgctgaaaatgtgcctgaagaacttcagaattactaggctatctgtg

SEQ ID NO: 102789 - DNA, 697 bp, Zea Mays
aactgcttgagacagactaatcatggcccggttttgtttaacttttaccctagtgcattccttgtagactttatctagatattctgcatccttggtataggacaaagcttcatccggataacttcttttgatagaataaactgtgaattaggctggttcaagaatcacatttttttagtttcgtttcttcatgtatacactactgacctctattactaatgtgtttacatggtttaaaactgttttggtaatcgaattttattaccatataatcgtcatgtaatcaaactaacaaattataaagaaacctgaaaaaattatagatgctaagatgcatttcattgttgtcactctctttaatatctgttatcataggataaaatagaacttaaaatttaatataatagtagaatagataattaaatgaaacctgcttggacgcattcctgcatttcactttcttttgatgttcatgtttgttcttagctttggaacattttcttttcgatccacaacacaagcagcatgactttggccagcggttacacgtctttctaggaggttttattgcagttggggcatcataaccatacaaagcatgtcttctgaaaacacaaccagtcccaacatatattggtccttggatcccatcaagacctttcatgttaatctgcaaagagaagtagataatgcagaa

SEQ ID NO: 102790 - DNA, 389 bp, Zea Mays
ttttatttcgcacatccttggtgatctcgttgtttccttataacttccttcgataatgaatttttacctaaaccctcctattggaaccttacctaccttacccttgattgttttctccacttcgtcacttcgcgagtcttgccttaactttatcatttgcaatgctctccgttatcatcatctttacccttgacacctctatatcttacattgatgtctatcttatacctatcatttaaaatctcttgtcctccatctcaatctgagcgttgtactttacttattttcccttggttgtatcctcttctttgcctcttgcgagtttttaactccatcctttgttgtgcttccgtttgttgttgcatttacctttctcatctctcgatttg

SEQ ID NO: 102791 - DNA, 724 bp, Zea Mays
gagggaggcacaggagatgggggcgattcttgctctggcaacgatggaagttcttgctccagcagcaagggcagcttcagctcctactcggctagcaggagacaaggccaagaatgaggaaccaggttcccggatcgatggggtcatggaatgggaacatggtacgtgcccatgatacttaaaaaagattttaacactacaggaacgagattgttcccacgttcacaggaacgtggacaagttccacgttaccggtttctaagccccgaacttatgtgtgatgtgatctaggtctctaagtttgccttgggtgcaagcattggtcccaacaggctctgacccacatgcgcctgagatgacaagctgactgggttttgatatggacccgacaccaagtgtcaccgtcactcttctctttctcaaagcctcttccttcccaaatctggtaaaggtgcccaccacagcggtccacccatgtggccaaggccaagagtggaggtgctaatttggtgcccaagggatgatttagtggccgaggcctatcgaggcaacggtggacaaggcagcaaggaagcggcagaagaagacacaagagagagggcccgctatgcacgggggcctgccatcgccagtacgctgctcagcaagatcgggagctcaagagagatcaaagcccatttggaccaattctagcacccgtgacaagttcaagaacccatatgac

SEQ ID NO: 102792 - DNA, 427 bp, Zea Mays
actggtacaacatcagacagtaagggaatgtgatggtcaaatggcctcggtggaggtaaagagactggagtagcaaacacatctttgtactcgtccaacagagactacaattcaatttcctctcttgattttttcagattcagtgactgtctccactagagcaaaagcccagatatcattccccttcatcatcttctccaaatgcacagtagaaatccctatcacttctccccgttgtccattggttcccagcaattggacaatctctccattatcttcaaagcttatgacctttccttcccagtcacattgcatggggctatgtctcttcaaccagtcataatattgcgtcataagctcctaactccaacacccgcatgtcattcctataggtgtggccattagcccaccactccatggccttaac

SEQ ID NO: 102793 - DNA, 843 bp, Zea Mays
cgtcttaagtcactgctgacttaagccgattgctctgttagtagggtatagtggtcaccctaagttaagtaagtgtgagcatgttgcaccgtcttaagtcactgccgacttaagccgattgctccgttagtacggtatagtggtcacccttagttaagtaagcgtgagcatgttgcaccgtcttaagtcactgccgacttaaggcgattgctccgttagtagggtatagtgatcaccctgagtcgagtaagtatgcagattgataataaatagttcgagtgcctttgataatgaagtctttttattgatgatgtattttccgattacagaatacaatgctgcccctaatagcctttgaaatctggctaggggtaaaactttctgagatgctctacattccatgaattccctatttccgtgccatccatttgagtaagtcgatatgatcctggccaagtgacttcttctaccatgaatggcccttcccatagtggcgataatttgtgtcgtccttcccccgttagaattcagcgaaggaccaagtctcccactgcgaaggatcgatgtcgtatggccttatcatgatagcgcctcagggtttgctggtacgtagctgactgaattactgtatttaatcgttcttcctctagtatatcaatatcctccagtctagtagcttctgcctcagctatgttttcaaagatcagccttggtgcccaaacctgagatcagcaggtagtactgcctccgaaccatagaccatgaagaagggagtatttccatgcaaagctcggctaggttgagttcttaagctccaaaccacatatgacaactctctgatcc

SEQ ID NO: 102794 - DNA, 521 bp, Zea Mays
caggaaggtaaggtgattgcttatggctctaggtagttgaagaaacatgagaggaattatcctacccatgatcttgagttggccgctattgtgtttgccccaaaatcgtggaggcattatctttatggtgagtcttgtgacatttatatgatcacaagatcctcaagtacttttttactcagaaagagctgaatttgaggcagcgtcgatggcttgagttgctaaaggattatgatctattgattcagtatcatctaggaaaggcgaatgtggtagctgatgctcttagcaggactggtgttccgaaagtggcactgcctttgattgtagatccagatcatatgggtgtttctctgtgctatgcaggcattgctagagaggagactcagatgctcattcaatcttcccttcttgataagtgcgtgtggcgcaacaccaggatcgtttaattcaggaggctcgtaatagagtcaatgatggtaaacctcaagaattctctattgatgagaataatttggttc

SEQ ID NO: 102795 - DNA, 527 bp, Zea Mays
gtcaaaaacgtttttagtgcttccaaggcttcctgagcttctgtggtccattggaatttatcacctttttgagcagtttatagaatggcatccctttctcaccaagcattgatatgaatctacttagtgctgccatgcatccagtgagcctttgtactttgttctgtgattgcagtggctccatcctcataatggattcaatcttctctagatttgcctctattcctcgatggctgacgatatacccaagtagctttccagccggtagcccgaacatgcacttctctgggttcagtttccatcggtagcgcctcaagctattgaagacctattttaaatcctcaatgaagttgtctgagtcttctgttttgatgactacatcatcaacataggcctctactcacttgccccagtggtcggctaagcatgtttggatagccctctggtaagttgctccagcgtttttgaggccaaacgacatggacgtatagcagaaggctccaaacgtcgtgatgaatgcaatcttc

SEQ ID NO: 102796 - DNA, 500 bp, Zea Mays
cacatatctagttgtttttataagaaagtactcatgtcagagatgtcagaaaaagacagaatcagacagtctgccgaccacgaacgaacgatctgcggtcgaacaacatttaccacccaagcactgaccacaaggatttaacacgggcgaattgtccacctaccaaggcagggttgttcgcgacctagaagttagtaccgttcgagctcaaccctcacacagtctttagtacaaaccaccaaaaacacacagctgcccaatccattttggcacctgcagtgcccaaaccctcggacagcttttttttcttttactttttgggttgaactttcactccgtaagtaagaaggaatgattcctgagttgtaaaaaaatgtagcttttattagaaatattgtttatttttgccgtctaaaaccatcgtagatctttacaagagagactatatgcacgaatcaacaaaaacgatgctgtttcatacggtagatagagtacaaaac

SEQ ID NO: 102797 - DNA, 346 bp, Zea Mays
gttagttttaatagaggatgggaggagagatgacgggtctatggctgtgttgttactgtggctgctggctatgtgtcgtcgacttggggaagaggaggaagaaacagtcggcgtgtgagttctgagggagggagctcgccgcaacagtggagaaattgtttatcccaaagaaagccgaaagcggtggcgaggtgaagacatgaaatagcaatgctaagctaatcccatggcacatgtcgtcagctttgacgagtggtggtggtgccaatgccactgctttcacctccttgatccttgcattcctattatttcccgttgacacaagggaaacctctctgctcatgag

SEQ ID NO: 102798 - DNA, 296 bp, Zea Mays
attttgaaggtactgcagcacgatggttacaggtggtcaggttgaagcaagggttgggtgattggaggaatttgtttaggctggtattagacaaatttggagccgagaaatacccaagagcgatgaggaaattattgaatataagacaaaaggggggagtagaagaatatgtgaaggagtttgaagaagcaagatatgctactgttgttcataatcctatgatggatgaaacattttatgtcagtcagtttgtcaaaggactgaagaatgaaattcagtatccaattatgtcccag

SEQ ID NO: 102799 - DNA, 385 bp, Zea Mays
gctgttttttcctcgtcttcctttgccaagctgatctgatgatacccggagtagcaatctaagaaggacaacacagaacaccccgcagtcgagtctaccacctggtctatcctaggaagtctgaagggatccttcggacagtgtttgttgagatacgtatagtcgacgcacatgcgccaatccactttattctttttgagtacaagaataggatttgccaaccactcgggatgtagtacttctctaatgaatcctgccgcgaccaagcgagctagctctgcacggatggcttctctcttatcggacatgaaatgacgtaacttttgtcggatcggcctcgcctggggatagaccttcagtttgtgctcgaccagctctctgggga

SEQ ID NO: 102800 - DNA, 351 bp, Zea Mays
agaacatcaacattcattgcatcaagatgtcaatcctctcattcctctgttcaaactgcatggaactgggttatgcgttgcagatttattcagagtttcatgttctacacatcgtagcagcaggagtatggcagtagggaggaagggcactcttctaatctagtcaactccattatttttcttcaaagcaaatcatgctagcttgcatagatttgttcaaaactaaaaacaaacaagatgggtcagacatccagccagcctcgtggtatcaacggtcaacggatgcatcattgagtgttagcactactactacccaaagccaaattgcggccatggatgggagtatgggac

SEQ ID NO: 102801 - DNA, 487 bp, Zea Mays
agtgaatacatatacaagaaagacaggtaaggcggcgtccaaggtggtggccgagcaaccctatggtgtacaattcctttgggcccaaaaacatgtgttgatgatttctggtagattctggacgtcatcttgttacataatagcgatattttgatatggagccaattgggttgaaaatcttatctccttagctttccaacagtatctagaacgttcaaaatggagtgcgtttgtggcatggacgtcctttttctagggatttaatctaggccatgagtttcatatctaacggtcggcgtgtgtccatactccatcgatcgacataatagcaaaagagcccttgattttctagggattcaacccgccgtccacaccaatagaagaagtatcacggatacgtcctgtttttattaaattgaaccccgagcttttgcaaattcatgcccgtagtacatagttctaggaaatcataaaataaatataaaag

SEQ ID NO: 102802 - DNA, 739 bp, Zea Mays
acagacaatggcgacccacatggaggtaggatggatggcgctgatgaatggcaccagcaagggcgagcccacatgaggcgaggtgaaaggaatggagggaaagaaacctcaccactacgggagtggaggaggagaagcacgggcggagggtgtaaggagggagcagagatgagggaagaggaagagtagagaggaaggagtggagatgagacgtgactgtggtgggagcagaggcggaccccgcatcatggcctctgccatcactcaagacggcgagacggccgtgtccatgcctcactgcctcacacagtggcctggcacgaatcgatgcagccaacagggtgcttgtacgcatgaagtgcggtggtgaggactaaggagaaatcagatgtggtttagaatagattcacgtccgctaccgcagccgtccacgcgtcgatctgttgatgggcaaaacctccatgaagtgcggacaggcctccaaacctgagcggcttttaagactttagattataatactaattgggcacatttcttctagaataaaatcttagatgaactcaattcctcgaataggtcatttgcatcaaatcagattgtccatatcttttaagtgaggccttaagattatgacaacaagatttcaagctttttatctaatgattgcaatgcactagaggtaaataagaaactaaatatttgtttgataacattaatactatttaaatattcttataag

SEQ ID NO: 102803 - DNA, 722 bp, Zea Mays
ctcagagcgagtcattcacgcggacacagtggaaggcaacagtaggcggaggttgtggtaggagatggcgaaagctgctagtggagacagtgaaggcaaaggaggtggcgctgcgatgttgagggcgagtcaggcgacagagaagaggaggcgacggatggtggaggcatgggtggcgggaaggttggggacagagctcatgagtcgccatggccatgaaggagaaaaagcttcccaaacctagatcccactgcttcacaaagtgacaaacagagaggagcaactaaacaaaattacctttggaatttcgtggggaggtcaccggatcacggcaaccaactgctatgagggagggtgaggaagagaggttaggtgaagaagataggtattaaatagcttctgatgcacctattaaatagcaatgattttgctgccgatgcagctaagttttgtgtctgatcagagcttctaatgcagagcttccgatgcagctaagttttgtgtctaccaaaatgtttgaatcaattccatttcattatgtttgtcatatgggcatctcatatctgtatggatatgatgagtattacaccaatttgaattgtgtgatgcgtactctactaattgtaaaagttcaatagaaaacagatgaacatggcaggttatttgttgtcttttttttctaatcatggatattttcttccattctgttcagccaaccttgg

SEQ ID NO: 102804 - DNA, 355 bp, Zea Mays
aaaatcttgatggggtactcagcataagttaaatcctcttgaacactaaggtcctccattggtaattgttcctcaggtaccctgagacatttcttcgctgagacacatgaaagacatcatgaacatccgcgagatgatccggtaactccaattggtatgcaacttctcccactcgctttaagattaagaagggtccaataaagcgaggggacaactttcctttgactttgaatcttcttattccacgaagtgctgacaccatgaggtacacatgatcaccttcctcaaactccagtggtcttcttctattatcagcgtagctcttttgcctggtctgagctaccctcaagttctc

SEQ ID NO: 102805 - DNA, 350 bp, Zea Mays
aagaaatagagagcccggatggttctaaagaaagtgggttagctcaaatttttaattcctctttgtgttttataatgcatgcatgctggaagtaacgttgcctctcaaaagaaaatagagtgccttttagggcatccataaaaatatataagtactggcccacggggcctaagtaattagccacctaatttcccctctatgcctaaggcctttcgtcctaggtctagcggtctagtcctgacgatctgtagcagtttctaggcaagttttagattttgaaaattggtattcatggtttatcatctttctctgtggtggaatttgctccgataccagctgtggcggaacca

SEQ ID NO: 102806 - DNA, 811 bp, Zea Mays
ccgtgatctcaatcccaaaattcttgtccagttcgatcgagacatataaattgtggatgccctctactctgcttcttagatacacgcccaacccatccccagctagctcctatcatgcaccaccacaccctaatttcgcatttcccccaattcacttctccacgccgctgtgaaccatcgcgccgtggaccaccaattctaggtccgttcttgttctctttgttcatgtttcaacacctctattcactggtgatgctcctcagttcaacccattaagctagaccatgctcaattatctggaacacctcgatttgtccatgaagttcgccgtcgtcgtgggtgggagaacctagggctggattggtgcaattaaagcagggcttagattcgtatagggttggggacgctagttcgacacttaattgggtcagtcgacgccgttcatggccggtcttagcaaagagatggccaacggcgagcgcgccgttgccaaggttcggtttggagaagaaacagaaatcggagggtctctgtgcaaatgtcagagagacagtgaatagtggctagagcttcttcaccggttatttgaaagaccgagggccttttcacaaagttgacaatgcggtcgcaggcgctcccgcgttctacgtgaacctgggcttgctgggctggtttcggcccacatgggcatttatgtatgtatattgttatgtttagaaaatgaagaagaaatagttgaagaggaagttgcaccatcgactgtcggggacagtttctactttgacatttgtggaacagatcctgagtcccc

SEQ ID NO: 102807 - DNA, 343 bp, Zea Mays
attctctctcctcgttgatagtgaaaaaagctagcgcccaactacagtggcatgcatcaatcaagaaaacaagccagcagcgacaaggagcatctcaatatctcgatcattggcttccactcataccatagcctcccatgctactactcctttgttggtcgttagacatgttgaagttggatcattgcacctgattttaccctcgacaatggtttgcactttacatagtcacatctcagtgtaactaaacatggttatattcagattgtcacaccgagcttagctagtgttggactaattataagcagtaagtataaaaatatcgagctctgattatgtaatg

SEQ ID NO: 102808 - DNA, 1216 bp, Zea Mays
actttcttataacgaccatgaacagattataacattaaattaggcaaacaatgcagtttctgaaatctgtacagaatttgggcagatttagttactgaatttgtgaaaagcataactcctaaacaatcagacttatggctgtcaaattttaacaccagcaagataataaagttatctaccccttttctatagcacatatctacagaaaatacaatttagttcatcaaacatacaacacagggaaatcactgcgtgcagtccaaaacagcaactaataatttcagctcctatttactttaagaattggcgcgttctagagacttgaaccattctaacactttgacatttgttagagttaaaataaccaagtgagaaccaacaagtcaacttaccaatttttatccgagttcttttgtacgctagaatcaccacacacaattaacaaacacctccaccacaataatcggacccggtacatatacgtgtatcggtgcgcccttcacacaccaatttgcattttaacttagacctcacatgaaacactactactttttatccgcgatcataaccatacacatttagaccacaacgagcaattcaccgtgattacgagcttaaccaagtcatctaacaattcggctaactagagtaacgacatagccgctaaataacatacacgtcggcttgcctattatcatcgcaatccgagacacaacatacactacaacatttttataaacacacagattcacgagtatattcgcacatcgaccaatttatacgaatcgtaaaccactaatctccacatcgcaatcaccacgcatttacttcccaaatcatgaacgtatatatgtttatcatacgaaccgagtatttcaataattatcctaaaacaactaactccattacacacttgtatctcaaatctacttgacttacttgaagtgtctactcgaaatcgtgagcacaatcatactccatatgtgaagcataatttaacaaacgcataatacacattgtctcgactcgacttaataatatagagaaagcgacgactactttggcatgtcaccacctctctatatgagccaaaataatttctactatcgactaagagttctaagtattaaacccattattactttccacgcgcaaataaaccttaacttaacacaagtgacaccgctggatttttactaaactcgtcatgcgcata

SEQ ID NO: 102809 - DNA, 355 bp, Zea Mays
ttgatcctaaatacaagagaagattgattgaattccacatgaaaattttttatggtgaaagatagaagagtttctcagtgtgcttaataaactatattagttttatgctaatttagccccttctcttgaaaagaacaatagtgatgaggtaggaattagtaacacaattgatggtctcatgggaactcagattgatgaactagaatgctacctctatcacacaaatgttgctaatctaaacaactaaaatgagctgaaaaagtatatggcagatcctttgttgaagcatagtggatcattcgacattttatcttggtggagaggcaagacaaaagagtaccccattctaacacaa

SEQ ID NO: 102810 - DNA, 1177 bp, Zea Mays
ctgaaactggcctgggtcggcccatctacaggcggaagtccgcgcgctcgcgtcggcggtgctgactttgagaaaaggccctcgccattttgaataacctgaagcggggttgcagcactattccccgaggcactgatagtttacaaaaacatcctcctagttctatttcttcaccgcccgaagtccatgacagcgaacagcgcagggccgagctctggtgagcctgtaccggccggattacttgatgacaggtgctctactttagtcgaaaccaaattcaaggcctaacgatcgtttcctctcaactaatttcacgaacggcctctaacctgctctgtgcacggtgaccgtatgatcaacgaccaaaccaacgtgttcccggcgatctaaggtaacttagctcaattgaataggtcgaggagtatcaggggtgcacgagaacactaaaacgagagggtaaagggtatgagcggacctgagatgagctgaccacgacgaggcctctttcatggtggtggaaagcaggtttgggggaaatgagaaattaacgagctctagtggatgattcgaggcatggtttgcttcactggttgcacaattacctagcggagcaggtggggtcgacaatttataggctcccacagtggtggccggtgaatttgagagagacgtgcggcggccggagaaagaagaaggttactggcgctcggggttagtggctttcaccgtggcagcccttcggcaatcaccgggcatgcatgatgtcattaactgtgacgtggtcaagtgctttagtacgtggcgcacggcggtaagcggccaacgacggcgaggtctatccgaccgatcgacgagcaagtgggtacggcgagcttagctgtgaccgagcccgagtcgatcaggtgccaagatctttactcgcccacggttatccgcaagtcacagcgcacgaatcacaatggccagcgtgaatcgtagcgtgacggtcaccggtggcgaagtctctgagctggcgatccaatccggtcattgtaccatcgcgaagttcatttagtcggcctgacagaccaagtttggggcgaattttctcccaattttccatggcaactaaaccaatgctctgcagcaaagttgtagcctaatgatccagctacaaacttactatagcaaccatagc

SEQ ID NO: 102811 - DNA, 525 bp, Zea Mays
ctggcactcgacaaagcggccgattccggtagtacttgctcccaaacaaattaagttcctcgtatatatccttggacctgattccttttgtatagtcatttcttggagaatgctaatgtacttcttcctgagctattaaaatgtcccagacaatagatatagtcgagagagatttggatgtcatcaatttgtgatgttttcttcagtcgttgaacataatatgacctagagctagtcgttgatgttttctttttagtaacgaatagttgtcgatgattatttgacgacagttcagttacaaatatactctagttccaaaaaaatagttcacggagctcataacatggtgacccaataagcgcgaaagttcttcccttccttctgcttccaggtccaggcataagccggcatagacagtgtgtacacactgtccaccgagccatgacgaccttgcattgaggaaatcattgcagccatcgccaaagatttcagacagcctgcgctttgaggcacacacagctcacg

SEQ ID NO: 102812 - DNA, 552 bp, Zea Mays
tcattgtgtgcaacatgtcccttcccttatggtacctaggtgtggagtctagagaaagtggtcaatgatgaagatgaaggtcatgagagttcatccctatgaactatgagtagtgaagacaagcgcttagacttgactgagggatttgaggagtggtggctgacacctagggacaccaacaataatgagacatggtagagtagattgtttcactagcacagtcaaggattggtgggacacgtgttccagaatatatgggacgtgtatggattattctacatttgatcgtttggtagttgagcctcaaagccacccagcagtggtttcgtgcattgggcctaaaaaaccatagtgcggttctagcaagaatcggaggtaacacatggagtcatcatagaggttgcgtagaggcatagcaaatcagtgaaaagggaatgtggttgttgtcggtgtttatgacctcactgcgcaccatggggttccccacgtgatgtttttgggcaggacaacgtcgttgatggtgaatcgattgtacgtgcaggtacacattgg

SEQ ID NO: 102813 - DNA, 467 bp, Zea Mays
ggacctctcttggttgttgctagttttcaatgttgtggacttgtagttggtcgtgctcttgatgggttgggtcttactacatgggcatgatccatgtcctgctggtctgcagagtctcttttggcttctgttgtgactagaatttcctttggtggagctcctctgaatgagcatatttttcaaagagttgatacaattcctaaaggttggtcagagggtcccttgtgcagtgactgtataggacacctgcatgaaggccactgattgcataatggatggatatacagtcatcgaccgagggtagctgtgatttcaaaaggaggaactttttgtagtagtcgtgaagactttacttctcttgctgcctacaaattgagagttctgcctgtgcgtctatttctggtctataaccttgaaaatttagcaggaatttgtcatggagtgtcttcaaggagtcaattgataat

SEQ ID NO: 102814 - DNA, 513 bp, Zea Mays
atgatatgcagctgtcttgcgtattcgagaaaaaaacatcattggcataagggcaacaactcagagttaacagaaatagagtataaattattgtcataaaggcaatagttaaataaaatcaactgaagttcacatcattggcataagggtacatattattgtcataagggcaagaattaactaaaatcaactaaagttcacatcattggcataggctactgctcagattcaaagttttaacaacacaagacacaaccatgggcaatgagctcagaatatgtacaagaatcacatgcatcatagacattgcagtcattgactcaaaggtactaaaaaagagaaagggaggctctttgttaccggacaagtacaataggacaagagcaccagctgcaacccaactatgcaacagagacctacacaagcaatcaactcatcattattcctggggaagaagcacagaagagggaatgacatgttagggtttacctgcgagggggagaggaaaaggaa

SEQ ID NO: 102815 - DNA, 651 bp, Zea Mays
atatgcgctaccctctgcggatggcagagagtagggagacgtggtgacaggtacgatctcagttgattcgtttgtggcccatgctctttttgactctggccctagctattcgtttgtttcagagaattttgtgtcgcgggctggtctttcggtgcagaggttgggtcacccaattttggttagttctgctagtggctccattagtagctgttcagtttgttaggggtgttccgtcattcttgctgatgaggtcttttaggccaatcttgttgtgatttccttgggggcattcgatgttatcttgggtatggattggttatctcagtatcgcgcagttatattatgtttttggaagacagtgttattgcaggcgccgtcgggtagggaggtgatattcttgggaagttctccaaagttcacgttatcctcgttgtcgcaattgcttctggatcttcggtcaaggaagtcgggaattctttactccatggtggtggagggtgaggctgccttgcgggtgcaggacatccgtgtggtgtgtgactttgtcgacgtgtttccagcagagcttccaggcattcctcccgagcgtgatgctacttttgaaatcaagttgattcctggtacgcagcctattcataaggccctgtattg

SEQ ID NO: 102816 - DNA, 406 bp, Zea Mays
tttagcatctggtccaccaaggaatcaaccttaatctacctaggaggcaataaatgaacacaacatccacaaaacttggacaagaatgcttagggatctacttgttaaaacatgtagaacacatatctagtaaaacacacatgagatggaaatgtgttgcatgttgtcctcttcttgatcacatgagcatctccgacaaggtgcatcaaaatagtgtaccaaaaatcaaaatactacatttaaagtgtttagaacactaaaaacaaattaaacttcaacagttaagccccatattatatattttaaaaaataattacattgttaggaaagaaaaggttgaagatgatgtagaaaacaagaataggacactaatcttgggtgtagtgtgtttggatcacttacagat

SEQ ID NO: 102817 - DNA, 635 bp, Zea Mays
cgaatttgaacttataaggtagtcgcacaagttctttcttctcctttgtcccctttagcttcggcatgttccattcactcaacgtagggaacaccttataggccagatattcttggactagatctcttgtgctgatctgctcggctaccacccggaattctgccacagcttgttggcatggtgaccccggctccatacggcacaacagcctagtcagcccaaagcttaagcttagagggctcagtactagcgtcttgagcttctccctcttcttctcatcggccttcacataaaaccactcattttttcaaccagttggccacttggtgcgatagctaaccaccggagtcttcatatctttgtggtaagcgaagttgtagcaaccaaaattctcatgaagaccatcttctctagccttcatctgataatgaagctcgtgcactcggcaaaaggcttcggcattcaggtctattccttggcttcgcagagcccagatgaagacgttgagtctaacgatatcgttaggagtcagctgatgaagatagattttgtaattttccaaaacttcaccaatcatttcgttcaaaggaaacctcaaccccggtctgaagaaactcctgaaaactaccacctca

SEQ ID NO: 102818 - DNA, 312 bp, Zea Mays
aatccgtggcccagatctaatgatgcagatgggaatgcaataatgtaatcctacgtgtccacagctggatcaacgaccagcacaagacccctctcccatgaccacaaccatggcggcgcgagcgcgactacagcggtggtgcccacgttggagttaggcgatttggtccctcagtgatccaaattgcaccccacttggcgcaacgcgatgctcagcccaccatgaacacaggagtggtagatctaccgacgccaccacaaaggcgaggagtattcccggcataatgcggcattacaacgtcatgacggctcc

SEQ ID NO: 102819 - DNA, 441 bp, Zea Mays
ggaaccaagtttgttcaattgtgtgttcacagaatgctcctgttctttctgaaatgtcatcacagacaacaccagttccaatttgtttgcccctactaatcactgtgaagtgtcaaattgcataagacaatttttttcagatgaagagcatctccatagatggaatgccacatgttgggtagaccaactaaacacaattaatttttttcagttttagaacatgatgaagtcatgttctggtgtcaatttctaattttctatgtttgacgctttgagctggcttccaagttggaatactataattcaggtggaatgacaggtacatgcgacttagttgtattgacaggtacatgcgacttagttgtatttgacaccattgacagaaaaggagggttgtgatggcgcctgtgtctaggataaatctgtttatttctgttagat

SEQ ID NO: 102820 - DNA, 408 bp, Zea Mays
gaataagctaccgataatgtgttgtcgtcggtagccaccgatatcagtctctagttttggaaagccgacactcttcgataaagtgtcgattatcttcgctccggcgcggtcatggatacatcccaagacctcctcatcaaccttgcagaagaccaaagctcccagttggtatccacataacatggcatattcttttagctccaacttttcttcttcggaaagctcctgaccgcctaggtgccgaaggtcgaaattttctttgcccgaaggaccataaacaatttctctttctttaactggtgttgtggccacgtcctcctctgcagtagcatctttaactacctctgatataattctgtcaatatccgacattgtagctttggcttcaccggcgtccttggcttcgat

SEQ ID NO: 102821 - DNA, 430 bp, Zea Mays
ttcatgtgtatgggtcgaaggcggtgctgcctgccgatctgatctttggggcgcctaggctgacctttgaaagcatagctgaggcagaagcaaccagtctagaggacattgatgtgctggaggaggaacgactaaacatggtaattcagtcgtccagataccagcagactttgaggcgctaccacgacaaagttgtgcgacaccgatcctttgcagtcggagacttggtcctccgccgagtactaatgggggagggacggcacaagctatcaccacaatgggaagggtcgttcgtcgtggcagaggtcacacggtcgggatcctatcggcttactcagatggatggcactgaggtggggaactcatggaatatcgagcacctcagaaagttctacccttagtgatacctcaaaagtctcgagggcaagtt

SEQ ID NO: 102822 - DNA, 590 bp, Zea Mays
aaacgaccaagcaaacacacccgactcggtctctcgcagccacgggcatctggctcaggtggggggggggggggggggggtgtgccaccgctatagctactctagtactatcaacagtagcaggggtgcatgattgctcaccatctgcatgcaggcagctctccgcagatccatgcatccacgagcgagagctagcccatgccgtgacaacagttggatctactgctactacagtctacactactagtagtaagatctgagtctctagctaatgaccgatcatcatctacgcctatgctatctactactacttcttcagtcctactaccagcagcagatgagcagtagtgtcgacgatccatccgagcgcttcggttgcctacttgccttgcatgcatgcatgcatgatcagctaccaattcaaccagccctcgtagatacagtcctgtgtcgttccatccttcttgccggccatctttctatgctgtggcgcccaggcacgcgtgcatgatgtgagcctagcttcgtcgcctctatctctagggagtacgtacgtactacatcgctagtaggacggagtactagcagcg

SEQ ID NO: 102823 - DNA, 1164 bp, Zea Mays
ctgcataatatcagcatgatgctatgtctgttgatcactgtgctgtggttggctggccactcgtggtggcggacaatgacccttaaaagtatatattctgtttgtacaaaccttgacttttctatcatctagctattgaagaagcaatcgacagcttgaagactgatgctagcatgaaggcaaacaatgtcaacttggtgagattctcatcctacacaatctactaacttgcttatcttagcttataaggaacacctttatttccttctttgccctgtggttggttggttggttgtgctatatgtatctatcttcttcttgatgcctttcatcttcgacccttgtagcctgctaagaaagacgcaagttcttctgatgcagtatcttgcatttcctccggcgatgcagctagtactgtgaaggatagagaaatgaaccaagaaacttcttttggcgaccaagggatgcattactatggatattattatcctggtgggtggattacgttttgatttctttaaaaaagaagtcattcattatctgactttattgtttagtgcaggtgcatacggaggatgggatgagaatggctactttgttggatataatggcctagaggtgcacccagcagtaagttataataatagtgtactttacaaagtgtcatatatgcctttcctattgtagtccctagtggtcctaactaaaaactgaaggatggtgcactttgtgcgtctctatggtggtaccaacaagctttgcacctgttagctgtcatcttttcttgaattgtttgggaaagtgtccaactattttagtgtcaccctttattgtgctacactgctactgttatccttgttccaaaaatctctctgctggatttgttaaacgatttaattgtcatcaccctatatggtgtcatgacctcatgactattccattgtactgcttgagttaaacaaatctgaatgactgaaactgaacgagtacctgtttttagtgaggatcagtcgttttagacttttagttgcatgtctgcttacaaggaattatagtcaagtttttatatacgctttccaatcctaatattgaatgatgtcttaattatggatgttgtttgaagtactcaatttcaaaactggtgattgaattgttgcctttttt

SEQ ID NO: 102824 - DNA, 629 bp, Zea Mays
ctggcttatcatggcccaaatgaagatccccattctaatgatagcttcgggggtaatctgatgaaggtaaatttcaaaagtcttcaaaacttcaactaaaaatttgtccagggggaatcgaaaccctgctttcataaaactcctatagacaacaatttcgtctgcttcgggcgcaggggcattgctatctcctccagccctcacgatagaaatatcgcggaagtatcttcctttcattgcatcaatttgactctgtttgatggttgatttcctgaagatggtatgactcggccgccagggccgatcttcggcaccttcatttccactttctaagtcaaaactttcactatcaccggaatcttcagataacccagctagcatctcattggtaatcttatttatatttgtcttcttcatagcttcataaaacccagccaatatagggtcagcaatcttcttctcttcagccatttagacaacggttgcacgattgccgaagcttaaaactcaaccaaaactcggcagagcaaaaaaattcagaatgccaaaaatagcgcaagcaactgaaatggcacaacaaatgctcttgatgcaggttcctatttaaatgcctagtgccccacgatttg

SEQ ID NO: 102825 - DNA, 483 bp, Zea Mays
gccaactacctagcacacctaggtggggtagacagatgtttctaagcagtgattcatatattgttgagaaaccatatattactaatattggcagatgattggcttaaacttccaatttttataactatgtttagaaccatcctaattaatgttgaaaagcttactcagacttgtttggtgtgattgattgagatgttacattgtacttattacaatggcatccctgtcgccatggatctgtccacgccgacaagccctatcgaggatccacactccctccaatctccctgcttagatctttcaccggtattgccttgcatcgcagcgccttccatcttggatgacgccaccgtcggtgtgaactcaagtgcttttgagacactgcattagttgtggttggaactcaagtttttctgagacaatatgtttgttgtggttggaactcaagtacaaaacagtgttttgggtgaccatatgggtgaa

SEQ ID NO: 102826 - DNA, 1288 bp, Zea Mays
ggaaaccacagtagtagaaagttttgtttgagtagttatatacatgcttgtattattttgaacattaattttccgtgtctcagaactgtccgtagtgatggctagatgcccgtgtcgcattaatttcaggactaggcagcatctaggatagcaactaagggaaaaagagcatcaagctaatagagacaaagaagaaagtacaatccataagcatatactagaaagtggaggagccgtccggtgatgatttccagtacactactactcgattaaagcatgaatagatggaatcttttgatcagctaaggcctgtcacacttaagccctctcaccaatatcctaatacgaacggcaaggtcacattccatattctttgtgcattattattgttaattaaataatccacatgcatcacatccccctagctagctagtcatgctgccgtcctttcaccgctcacgattgacacatgctcaacctagcaaaacccggaacccactatttaatttggagaggagaactaaacctccagctgcctcaattattgttgataaaagtgtagatgatatatatacataactggtttctagacggacaagttgaccttagaaatgtttcttatgcatgcatggcatctttgtatagtggaaaaagaaactgctctgcatgcatggcgtcggtgtgaaggttgctagctagcaggctattcaagatgacagctacaaattaaataaaatcacttactccgtccatcaagctgcatatgttcagcagcctgacagatagtatatagtatcaagaatttgtgcgcacttcgtggatgacagttgacaaaaaaagacacatggtatcatattagtgaagctactacgatatatataccggactttggaattgtaagtactctaattaccatattagtgaagctactaagaccattatatttttcactagtttttttttttgtcttggtaaggtcaatttatggatctgacttgttcttgcaatcattctggacaccagggatttattgtataggcattaatcatttgccttgcattttgtgtatattattactttatattaacaagttctcgtgttaacagaaccagtccctcaggataaattactaatgcaatgaattgatgcagatgaaagaacaggtacatttcaatagttcattatactcatatttcttaaaatttttgtggcaggcctaggacccataaacaataaatattaactcacttatagggatgtaattggcagacccaattcaaatgtcaat

SEQ ID NO: 102827 - DNA, 481 bp, Zea Mays
ccacaatcatcaaatccggcatacatatatatcgatgcgctcttcacatagtaatttgcattttaacttgggcatcacatgaacactactaatttttacctgcgaccgtaaccatacacatttagactacaacaagcaaatcatcgtgattacgagcttaaccaacccatctaacacttcggctaactagagcaacgacatagcccgctaaataacatacacgtcggcttgcctattattatcactatctaaggcacaacatacaccacaacatttttataaacatacatattcacatgtatattcacatatcgaccaaatcatacgaaccgtaaaccactaatctctaactcgaaaccatcatgcgcttacttcccaattcatgaacacataacacgtattgacccgactcaagatatagaggaagcgataactactttggcatgtcaccacctcactatataagccaaaacaatttcta

SEQ ID NO: 102828 - DNA, 585 bp, Zea Mays
ttgccaattcttatcaaagcaacaacatttaccagcacagcaactacagaccatacccgtaacatggccatttgcgtgctggggactggacatgattggacctttcaagaaagctcagggaggctacactcatgtgttggtcgccattgacaaattcaccaaatggatagaatacaaacccattgcttctctaacttcagccaaggcagtggaattcatacaagatataatattcaggtttgggataccgaatagcatcataaccgacctgggatccaatttcactagctttgaattctttgatttctgcaacaacggagcatccaaatcaaatacgcgttggtagcacatccaagagccaatggtcaggtggaaagggctaatggaatgatactggaagcactcaggaagaaagatttcgacaagaatgaaaagttcacagggaagtggatcggagaattaccttatgtggtttggagcctaagaactcaacccagtcgagctctgcatggaaacacccccttcttcatggtctatggtttggaggcagtgctacctaccgacctcaggtttggggcaccaagg

SEQ ID NO: 102829 - DNA, 1235 bp, Zea Mays
gggggacagcaccagctcgtgggggtgcgagtttggagatgcgccgtgggaggaaaaccgagtacctcgacatcccactcaaggacagcatcaaaggatggcgcctggaatggtttatcctagagaatcacgagaattctctcccccctcggtcagggagatagccagatgttcgcactccaagttggactgaaccccccacagacttggaggtagctgaggccagggctctgcttgccgaggttggattgttgaaggagaagggtctgactgccgaggctgtggtcaccgattttgttcttaagaacattcagccactgaaagacagagtgtacccaacttatttgtatcgtggcctcactgattcgacccaggttaccaacagaaggattcctgttgtggatctggtaagctggcttgaaatgattcttagaggtaaggtgtcgaatatcggtgctcctgttgcatattcagcctagaatctgcctccttccaaggctttcatcaattttgtgtcaaatcctcctgctggtgacagtggtttgggccttagagtgcgaccttctcccgaagaggttgaggctttggttgtttcgcttggtgaaatccccgatgacgagaggcaggttcattttgagatgcctttgaatccgagtgaagcagaaataagtgccatgctggacatgttggctgaggattcctctgatttggtccctgctgaaacactagttgtagcacccatcccagagtctagaaaaactttggacatttagagatctgatagtattcgcccgaagcgtccttgctgaaccaatcatccaacttctcctgctgaggggaagaaaaagaaaaagagacgtcttcggcgagtgtcatgcttgaatcaggatgccggcccttctgctcctgctgccggggaagtgccagtgccaatttttactgaagctgaacccaatgggtgtgacccgactgatgctgaccccaatgggtgtggccttgatgatgctgaccccaatgggtgtaatctggtcagagctgatcccaatgggtgtactatctgtattattgatgaggatgaggaagaggaggaggaaatccccttaattcggaagaacagtcggcgctatatagccagtggggagagtagtggtgttccttctccagctttgtctgctctcgttggtctgcaagaattgtctttggcaaattttgatcaaactctcgaagatatggtc

SEQ ID NO: 102830 - DNA, 508 bp, Zea Mays
catttacgatgttttagctcacgttttacgccggaatctgccctagccagaacccgcgcatgattgggtgcacgcgattttcacgccgtaattttgggcttcatttgctgttacaaaactgctatatgatttacgctaaatttcgtaatcatttatactgttttagctcacgttttatgctggaatccgcccgagcagaacccgcgaactgtggctgtaaattaaaatttatttccttctactaatgctcctcaaaccgtaactatccctttatttacgcgattatgcagcacgtctttccttatatcaaaccggtcaatatttatataatgcatggtttatgctatcatgttacacatcgttatgcagtcgtaaacggtgtgcacatggtaatattcgtttccgtgagtcgaggtacaaaatattccttctatgcatgatttatacacattactacatatatttatgcgtgcatatatctcctgacgcgtatcacccgggattcgtg

SEQ ID NO: 102831 - DNA, 651 bp, Zea Mays
cacaatacgaaataccacccagcggcggatttgctgcggaggcgcacctgtgtgttcgtcttgaggagtgaaagtaatagcgatcgtaacagttggtattcggagccgtgctggagcaccaccacgactaccggacgaggctgcaattgaaggccgaagctatggcaccggcgaagagtgatgatctggtgacgtagttgttggcgaaaattgaggaagggaacaaagagacacatccgagaatggaggtgacgcagacggcgattggcaacatggaatccacggtgaagagcgtgatgggggaacaagtggagttccagaggtggcgacccgaagtggagaccagggtgacagagatcgccgaggcgctccaagccatccagccaaggtgaatgaagtggcgcagagatctgtatctgcttcatcgaaggcagaaattaaggcgacgaatggtgcgtcgggtttcgcacatctggaaccaccttctacggagacgatgcacgggcataatcgccaccactcgtcagacccttaccggagagcgggtgctgtcgggaacgatatgttccggtcacccactccggtcggagttacgatcccacccctcaaattgtgatccattccaattcgaaaccatggggtgaaattctt

SEQ ID NO: 102832 - DNA, 919 bp, Zea Mays
gagaaggcagactgtctctctctggacacaaccagcaaactattcaacctccaatccggccgcttcggtcgaaatcatgagtcttcccttggcttggaatgaatcctgtatgtggggggaataagagaattcctagggatcctcgtagtagtgagattgcattgttcgaagacgcatgttcctctatttcttctaatctaaagaggtcattctttagtgtggcgtgggttctcccaatgttgccaaagtctttctacgataggatgtatgaacttgtagtttgtctattattaattgtcttgtgcctaagtactgggaatggtatctactatgaatggtttttgtgctcagacttctcatgaaccgactcctatttttcactcaaaataaccaccattaaggaaacagacacatcaactgattgctactatttttaggctgctattttaaagctgccatttgcattcaattttggtcaacattatgaactgacagcaaaaaactgctattgccaggttcctattttgaagcaattttagccaccattgtaaactgcctgctgcttggttttgctacttgcaaatagcattcttatgaactggctgtttccacccgttcacttaatatgtgcattatttctagcttttaatgttgataggatatgataggtgacacattgatgttgtgcggtgacagattagagacgtgaaagaaatagaatgagcagggtacttaggtacttgcctacctgttccattgcgcgtagaatgagaaatagttcctatagtgttagcgtccacataaccaccattctgaaggaaacagacacatcaactgattgctgctatttttaggctgccatttgcattcaattttagtcaacattatgaactggcagcaaaacaaagctgctattgtc

SEQ ID NO: 102833 - DNA, 564 bp, Zea Mays
gttggtatggcttttctagatacataataaaagttatatatctaggcctagcatatatttatatacataataaaagctatgtacctagaaatgctggaacaacttgtaatttttataagagagagtacttttttatggcagtcattttgagtccagaatgcacatgttttgaaccatcaatggtgtactatcatctcttgtgacagtactatgtaatttctcttgaggccttcctccatgtaaggcccttcatttgctgtcaacttgtcatgttgcagcttagctagttgcatcaattaatggtgcagatattggtctctatccagcactaatgaaatggtacaccagataaccagcaaccgattgaattatatcagtcttcttgtctggatatgcccaagtatgaagggcaattgctggtatgtgttcttttcaaccaaccgagtaatgatgatacggaggcttcctatttcttagtgcgcctttatctttactgtctgtgtaccaaatttgttgagggttgtccatgccgatgttcaaccatgcagatcattataaaaaaaa

SEQ ID NO: 102834 - DNA, 417 bp, Zea Mays
tgttatccgttgatcgtgcggtcaccgtgagcagagaagttgggagctcgaaccgtgcaattgatcgaggggaaacgtttgttagatgttgaattaggtatcagccaagttagagcaccggccattgcatgtcttggccggtacaggttcgccggagctcggtctgttgccgtgctacgtcgtggacctaacgttgtgaagaaatagaaatccaagggggttttgtagctgtcagtgaaacgcaggaatagtgtcgcgaccccttttcaagttattcaaattgccaaggtcttctgcgcaaaattgacaatgcgagcgcgggcgcgcgcgtgttctcctttctgcaggccgacttgggctgaaatgagcccaatactgttgatcctttctctttttctttttctgccaggattaggg

SEQ ID NO: 102835 - DNA, 448 bp, Zea Mays
gtcatcagtagtgttgattaatttcaaagtaaactgaccgaccggcagtgattgcttatatattccgttgcatgcagtgtcgagcagagtgtttttcagtaattaatagagagcttaacgagagtggagctagtgtcattctctttggcgcctcgagcgagttggtcaccagcgcccgtatacatccacgcacgtccagcaacacgagatatatagtagctagctactcctggccggttgccgccgcccgccggagagtaaacgtccgtacgtacgtgtccagaacgacacacaaatgcgcgcgtgctctttcttgctcctcgtctcgcctttccgcttttccagacatgacatgcatgcatgcatgctgccgtgtgccgttgcgtcgtcgtcgtcctccctccctccctccggcctacgacgactactacgtactacccctaccccc

SEQ ID NO: 102836 - DNA, 545 bp, Zea Mays
atcagctgacaaagccgagggagacacggcgacgccactcttgggccagaatggcgagggctcaagacgatgagatacgttggctgatcggcggcaggtacttggagaagactgctggccgagtgggattgtctgtctggctgcgaggcctaggttatctgtctggctgctcgagtgctggttgggcccatttgggctggacggctggttgggctgctagtagatggctggaccgctggatggccggatgggccagttgaagccggtaattatcgacggtaaattaccgaccaaatgtggtaattttcgaaaacggtcggtaaaacctgaaactgtttttgctatcgtttttgaatttttttgccgttttttatttcgaattgtcgggtaccatttccattttcgtttatccctaaattccgataaaatatcaaaaacgattctcgataatcggcaattatcgctttcacttttgtaacacccctggtgttactgtaactaaaacttgagcatggcatcataagcattggcattgcatatgtttg

SEQ ID NO: 102837 - DNA, 569 bp, Zea Mays
aacaagcataagcataacttctcaataaaagtgtaccttgtttcagcatccaccaaccttcggcttagatatgtcaccacatgctccttcccctcagtttcttgtgtcagaacagccccaatgaccttatcttcagctacaatgtataatcggaatggtactcctgctcgtggtgcttttaatacaggagccgaagataagtattttttgatgagatcaaatgcttctttctgttctgccccaagcgaattcggcatcattcttaagccgaagaataggggtgaacggatcaatcttcccggctaggttagaaataaaccttcgtaaataattcaccttgccgagaaacttctgtacctcgaccttacaggtcggaggtcccacattccgaatagacttgattcggtcagggtctatctctataccatgttcatggatgaaaatcctaaaaacttaccagccgacactccaaaagcacatttacgtgggttcattttcaaaccataccgatgcatttattaaaggctttgcgcaaatcagctatatgagaactaaactcagccgatttg

SEQ ID NO: 102838 - DNA, 334 bp, Zea Mays
ctccactaaaataggagggctaaccgactccctctttatctcttcttatcttctaaacaaacagcctagctaggacttatcctttgtggcgcctggcatactgccggcccacaaaggtgtctacaacatttcctccctcgctgacgaagagctcgtcctcgagcgtcatggctggatatctaagcttgaagtcttccagctgctcccaagaagtatccatctctgctcggcctatccacttgatcagaacttcccacaccccctgattcagccttgcatggaggactttttctgatgtagggatgactctgccgttgaggagctcgggcagcgg

SEQ ID NO: 102839 - DNA, 409 bp, Zea Mays
ttaagcatgagagatcgttgagaataatggtctctatgtcttaattgtcatctatcttgaattcgacatcactttcatccttatctatctggaacctttctaaagtttggaacgtatttgttctgaaaattagcgagtcttgtgattaattaaaattcatcgattgtgcaaatacgaatttgggaatttagttcagacatccgatttcatcccaaacaaatttattagaattcgacgactaaagtttttggtgcaaaatgatccagaccccgcgtgcgttatccgagagatcgtgcacaaggtttataattgcattgtttgtccagcagagtaatcaaacgttcggagcgagaataaaaagggaatcaagggaaaggctcatcaattatcaaggactcctttttgcata

SEQ ID NO: 102840 - DNA, 676 bp, Zea Mays
ttgccgacttaagtcgattgctctgttagtagggcatagtggtcaccccgagttaagtaagtgtgagcatgttgcaccgccttaagtcgttgccgacttaagtcgattgctccgttagtagggcatagtggtcaccccgagttaaataagcatgagcatgttgcaccgccttaagtcgttgccgacttaagtcgattgctccgttagtagggcatagtggtcaccccgagttaagtaagaatacgagtcaatcgtaaatgaactgagtatctttgaaacctctttttttattgatgatatatttccactttacagagtacatcgccgtcccagcagttttgaaatacagctagggataaaactttctgaggtgttctatgttccaggagttcccaacttctgtgccatccatccgagtgagacgatacgatccgggccgagtgacttctgctactatgaagggtccttcccataagggtgataacttgtgtcgtccctcccccgttagaattcggcggaggacgagatctcctactgagaagaatcgttatcgcacagccttgtcgtgatagcgccttagagtctgctggtaccgtgctgattggattactgcgttaagccgttcttcttcaagtacatcaatgtcctccagcctggtggcctcagcttctgctat

SEQ ID NO: 102841 - DNA, 1088 bp, Zea Mays
acaacacatcagttcttaacgcttaccatggaattgactaggaacagcatgtcagtgactaggaacagcatgtcagttaacaaagcatgtaatataacaaattagtgtttttaggataatgttgtcaggaacagcacgtcagttaactacattctccaaaaatggtttgtttggctgaattactattatacggatgcatcttgtcaccgaatccaacaaaagtatttgtattactccctcagacccaaaataaaattactgctaccgctgctcaagattactgctttggtggttctgtttcatgggaggttgcaatattaaaatagaactgaaggggtcggtcacgcgtgcattactagattataactggggagcagattgtaaacagagcagattgtaaacagagcagattgtactgtactgtaaacggagcagaaaagtaatgtattgtactgtaaacggagcagcagattgtaaacggagcaacagattgtaaaagaaatatcaccctatatcttccttttagatgtgttggcacagttaccttgatagcggttccgtctaatgcacccaaacaattctacaaatatgtcataaaagaaatatcacttcaatgcgtctatttatagttgaagaaaaaccttaaagttttatgtatttaccttaaagtttttccaagtattatctgtgctattctctggaattgggtcaggagtcttaagaagcaaatgttgcaactttagaacagctagaaggcataagttgaactgcctactaaccgtctcgccgcttcgaaagaaaaaccttccaattgttcggttcttcaaatgatgagccaacgtatacaaaaaatgagccactatctcctctagggtcatattgcgtgtggcctttagcccaccaacatctctaagcatctcacacaaaataaagaaagttcttctatccatacgtagctcactaatacattttctatcactctcacgaatgagtccatttaaattctccatcctacgctctctatttcttaaccttctttctattctcagacattttcttctatatgctaatcccatgagcaaccaaac

SEQ ID NO: 102842 - DNA, 529 bp, Zea Mays
ggcggtgcgacatgctcacgcttacttaactcggggtgaccactatgccctactaatggagcaatcggcttaagtcggcaacgacttaaggcggtgcgacatgctcacgcttacttaactcggtgtgaccactatgccctactaacggagcaatcggctaaagtcggtggcgacttaagccggtgcaacatgctcatgcttacttaactcggggtgaccactatgccctactaacggagcaatcggctaaactcagtggcgacttaagccggtgcaacatgctcacacttacttaactcggggtgatcactatgccctactaacggagcaatcggctaaagtcggtggcgacttaagccggtgcaacatgctcacgactacgcaattcagggtgaccactacgccctactgacaaaagcaagcgacttaagtcagcagcgacttaaggcgatccgacaagattacaattactcatattaggatgacttctatatcccgcaaacaaatttcataaccatcgcgcatcatt

SEQ ID NO: 102843 - DNA, 350 bp, Zea Mays
acgcaacagcggccaaacgctgaaacttttgaccgcgtgcgcagtttacttcctttagctcatttagctgcatgacttgtttactagcagcatcagtttgccgacagcattttggttgtgaaagcaggaggatggaggccgcacagttctcacttctcagttgggtaggcagcatcccattcccatccaagttttaggcgcttctttgacaggacttgagttggcagaagcaatctctcgtcagagcagggctgttacaaaaagctggtgtggctgttacaaaaagctggtgcatgcattcttaacgttatcacctacacgtacgagcagagcagatatgttatacgcac

SEQ ID NO: 102844 - DNA, 437 bp, Zea Mays
cagggagtatgaacggtcctgggattcgctgaccacggtgaggtcaaaccgagcggtgttcttgagtgatttgggggaaatgagaaattggagagctctggtgaacaattggaggcacgacttggtggcttggtgcgtgattaccctacagacccgacggtgtgctcaatttatagtgtgcttgagcggtggtctccaattttggattggcgcgctagcggtcggagaagaaaggagttactggcgcacgagattagtggctgtaaccgtggcaacctcaccggcaatctctagataggtcagtacgagtcatggcggcatggttaaagtgctgaggcacgtggcacaatacagtgaggtgtctaactccggtgaggattgatccaaggcgatcggggtagagtggacacggcgaccagagtaaacagtggccgaag

SEQ ID NO: 102845 - DNA, 494 bp, Zea Mays
agcacgtactctccgtcagcgagattgcaatgtaatgaatgcaatgagtaagatatatgcatggcatgatatgcaattataattaagatttgatgggggaaaatgatcaatttaataaggtagggcttaatctctctactgaagattttgaggtacacttagcaaattagggtcaagcttggttaagctaattggtaagtttattttggtgttctactgatttccctttaatgtcttagtaagaatttattaagatttctggctgaagttattggagtgagatttattttccctctctttctttctaattcttttatgcttttaaggtaggtttgaactacaagataacttaataaatttccaaaaattctgcaaaaattacagtggcttctttctagtgtatagttctctgtctcaaaatttggggcctaaatagtgagaggttctctctgtataaaattatcaaatattagggcagaagagatgttttgaac

SEQ ID NO: 102846 - DNA, 418 bp, Zea Mays
gcccctaagggtgccgctaaagatgatccaacccccgaatggcttgcgaccggctccccatcggctgcctccatggatgtccatgttgggtcaccgatggtttggtctgatgaagctatggtgatgggttctgatcttctcgttagtccggttagcccgtccaccttagaggtcagtggtcatggcactgaagacccgatgggtgctcctagagttgagatcccaatgggtgtcgcacttagcttggattacccttttcctttggtgcctagttctgttctcgatgttgctgctgttagcgtctttccttctgatagtaccttgatacctccggccttgggatttccctcgttcctttccaaccttcaggtatgtacatccctgctctaccctgcctttgttagtggatgttttcttt

SEQ ID NO: 102847 - DNA, 277 bp, Zea Mays
atcaggtcgaattgaatgtcaccacatataaatgtcatgtgaccatccaatacgtttgacaccgtatgtaaccttatatttcttcgaaataagaagaatagttttccaaaatctttttagtggtatatctttgcaccattctggagtaggtgtgaaattaaacacagacacaaatttgtttgcatgattaatacgaaaagtacatagcctgtagagtatctcctgccataagaacctgcaaaccatgagacattagaattatatgtttgcacaattt

SEQ ID NO: 102848 - DNA, 403 bp, Zea Mays
gaaaagctcattccaatgcatcaaactctaaggatgcgtttgtgtttggtggcgggacagcaggataagaagtcccctggcgtcctctctcttgtttaaggaatcatctcttaatccctgactctaaaacaaacaaccttatttaaggaatcgtcctatcctatctcgttatgtcattacaaccaaacgcaccctaagagaacatgcacaatacatgtaacagagttaattttctagtgttggagctggattacaaatcaaacgcatcaaaatattataaatttctcgagtagagctgctgcatgatatagttggttgagcaaaattagaattagtagagtagatcagtcccaaacacccacttaacatcgcgcggtctcattgcggagtttctaaagcaaaa

SEQ ID NO: 102849 - DNA, 1019 bp, Zea Mays
aatcaaatgaggactaacaagtagacttactaatttttatccatgtcattccgtgcacttgaattaccacacacgtttaacaaatacattcaccacaatactcagacccggtatatatgtatatcgatgcgctcttcacacactagtttgcattttaacttagacatcacatgagcactactaattttacccgcggccataatcatacgcatttagaccataacaagcaaatcaccgtgattacgagcttaaccaaagccatcaaacaagtcggctaacaagaggaacggcatagcccgccatacaacatacacatcggcttgcctattattatcgccatctgatacacaacatacactacaacgtttttataaacatacatgttcgtacgtatatttgcacatcgaccaaatcatacgaaacgtaaaccactaatctccaactcgaaaccatcatgcgcttacttcccaaatcatgaacacatacatgtttatcatacgaatagagcctttcaataattatcccaaaacaactgactccattacacaacttgtatcatgaacctacttgattacttgaagcgtctacttgaaatcgtgagcacaatcatacactatatgcaaagcataatttaacgaacgcataatacgcatcgtctcgactcgacttataaacatagaggaagcgataactactttggcatgccaccacctttctatttaagccaagacaatttctacctacaacgatcaaacattcatatcgagcacactttattttaccctgtctcgcaaacaaccatattgtggcgtgcactcgagacacttcagtcatcgtagcgtaaccactaatatatgaactccgacactcaggtcttaacaatacatcctccacgcaactagcattttctaaactattcgtcacatcaataaatataccatctatataatcacgaatcacatcccattgcataggatttgcactttaatctcggcttaactgcacgcctcatactcgtc

SEQ ID NO: 102850 - DNA, 708 bp, Zea Mays
tgcaaatacaataagcttgagttttattttaaactaatgtatatatagagtttatactaaacaactggttttcagaactccagggtgtccatttacctcggctttgcatgatctagtcttacaggtgtcattcactcctcactggagaggattttgcatgatcacatggcatctgattggcatgcaccgcttttttattgtattaaattgctttgctatgcgctgtagctacgtagaattactgaaaagggatcgaacactacctttgcatgcataaaaggcttagtaagacgcaacagatcttaactgaatctagtttctgttcatatcacagttttttgcctagataatgcagtaatatctgttttgtaccgtagcagttcacagcaacaaaaggttttatccccttggatgactattgatgtaggtgatctgagacctttggtttatgatagaacatggtcttctacttgatctggtatgataatatggactctcagttaaagctataccaactttgagagttcatacaaagttagcttagatgacaagggatccgaagacaaatgcaattcgctaaaaccctaatcatggacttacaaaccataagctattccactttctggcattgatgttgtcttttgttttacctttaatgtttagacacatgcttatgatgctttcagcaacattgcgctcttggtgcat

SEQ ID NO: 102851 - DNA, 584 bp, Zea Mays
gctctccaattacaaacaacccctccgagggtggggacatcttgtggcggtccttgttggtttggactcgccgaagcacaaggtcccctccttctaaagtcctcctctgcacttgcggttgttataccttcacaacatctgttagtaccttgccgaccataggagcatcacgttgcgggcctcatcaagttgatccaacgtgtctttgaggctcgaatcgtatcctttgtttgcatataacgaccttaccctcaaggcgccatactcgatgtcggtggggaggattgcctcggctccataagccatgaagtatggtgtgtacctagtcaaaaggtttgggttgtcctcatgctccagaaaactacagtcaattcctggggccacagtcagccaagttgcttgaggcaggcaaaagttcgaggattgaggccttgtaggattgctgttagctcgcttgaactatctgtttgcacgggggtgagccatggtgacccaatctacacgaatgtggtattcattgcaaaattctaggaatttgttcccggtgaactaagtaccgttatccgtgataattgagcttggca

SEQ ID NO: 102852 - DNA, 637 bp, Zea Mays
gtcgtagctgcctactgccctcccctgcccccaatttcattcaatccaaggaccagaccgcaagtctcagataggctggctcatggttgtacacgctctagcagtagcaggcacagacagtaccaggagaaagaattagtagcagcatctttcgcctatcatctttgctttctttttcctaaagagcacagaaagggcgttccgctaagaggaaaagttgcttgtgtagtcggtggcagtagatcgtcacttcacagaaatcttcagccggcgtccgtcgattctacggtcgctgctgcgccatgcgtcgtcgcccaccactcgcactaggaaaccaacacatcgatgcacacgaatacctgtaggcatcatgtgcctgagtgccctcaggctctcaacaacgacggcgtctgctgaacatcatcgctcgatcaaaatcttagaccaccattctgcttcgttcgaaaacacctctgcttctgaagcaaatctcaagaccggaggagcggagggcatatatgaatcacctcccgcccttgcccttacctttcccaccagcccctttgctgaacccgttcccatcgggccgcctgttcttctggaatttcccgtctttcgccgatttgttcttcaaccg

SEQ ID NO: 102853 - DNA, 391 bp, Zea Mays
ctggagatccttttgaatctgaattgcctctgccttgatgtggttttctggtacttgcaggcatttgcagagctgggacacatgaaacacattgtgaatgtctcacatggattctggtagctcaaggcggtatgcggcgggtcccacttggctaatgacggggcaggggccaacgaaacgcggtgatagctttccttcatttggaaccttttgacaccatgcatcggggagaccttgagataaacaaaatctccttcctcaaatctgagttctcttcgtctgttgtctgcataacttttctgtcgactctgagcttcaagtaacctcttgcggatcagggcaactttctcttcggcttctttaacaaagtcgggtccttctagtgtccttt

SEQ ID NO: 102854 - DNA, 343 bp, Zea Mays
tgggaattgggaactagcaagcatggagcgcctccaccgtcagaatctcaactgcaaaaggacaatttagatgagaacagctcagaggaatatagaaataagaaaatttagatggagggattgatggaatggaagcaaagatgttacctctttatttggaagcatcactgtcattgtcgctgtaatcatcgtcgtctgccggccgtccgaagctgaagaataggtataacaccaagagggtcgaaaaaacatggacgcattaggggaagaaatgaaggagtagtagcgacttcatgtgggaggatagtaggagaccaactgcatgcgttacctttgatgacgc

SEQ ID NO: 102855 - DNA, 376 bp, Zea Mays
tcttccgccatgctgctggaattgattacccgccatctcacgtaagaagtgggtattatcggcagtagcattgaccaaggcattgatagcctcagccagtgttggtggtactggtggcggattaggagtatcttcccgaccacgggaagtccctacgccgtcatgcgcacgagtccgtgatggcatctgaggcaaagaaacatttgggaaaaatataacatgccgatacacaccatcactttagattaccaaaatgtaatcatacagactcaagtctacaacatgacttcattacttattttacataggtatagtttctaaactatactagtctaatctttgtcatccttgttttcttcatttcctgcagttggag

SEQ ID NO: 102856 - DNA, 359 bp, Zea Mays
gcgtattatagttgattggatacaaaggatatggattacagagttgttgccaaggccaaccgaaatgagcagatctcctcttggatttgtgaggccagcatgtgaaagacttgttccttatactgaaaaaccctacgacatcgctctttccaaatattccatatagtgtagatcatcacttgcagttgatgtgcgtcccgcgccgaccggaccaatgcctgccaccaatgcgatattccttgtgggacttgtgacggcagattaagatggaaacaatttgcaattagttgccagcaacggagggcataactgcaagatgccatcaagtgtatatgagattcaggatcattctggcaaag

SEQ ID NO: 102857 - DNA, 723 bp, Zea Mays
tcctaaggcgtggcgcccccacggtgaatggcgaacacgtcggtgatggccgctcggccacgtcgctagtgcgaacagatgaataaccgagcgcacagtacttacaagctcatccgcggcaaagatcttttacccggggatcgttatccgtgtttatccaagtgtgaatcgtggtgttggcacaaatccgcgcgcaagattgccggcggcgaggtgcactgcacctatgattatatccagtgcactgtaccatcagtttctcattcagccatcctaacaaaccactttgcagagcctagatctcaaattttcatgtgaatacttactaatccgtctttaacaaagttgtagctcaaccaaccagctacaaatcgactatagtaactatcctcaatccagcactacatcctattccaatttgacccaaaagtcttgccaatgtcactagtgaccttaattcagttatcagtgtgactgacagcacaactttgagctcatttttctccaaactttgtatgtgatcatagcttagttacttaagcaaagttgcactcctattatagctctacaagtttgatgtgtcgaccctaggcaaatgcctttaatttttaaaaatacaaagctccaaagtcagccctattcaactgattttagacttaggcatatggagtgcatgaggggctttttttgcacttaagtccaaatctcatcttttgacatgga

SEQ ID NO: 102858 - DNA, 594 bp, Zea Mays
gaaaaaatacatgataagaaatctaccaagtagtaggtttgaattagtagtccattagaagacaatgttgtatcgattgagctgttagaaacaaacataaagaatggtgattgcctcaatgaactgaatagaaaagataatgaaagaagagttgatccacggggttgcatgtgtcgggcgccaacggcctgtgcagtgtccgcccctcccacgcgtcgtcaagatggctccccgtcaagaaggttcaggcttttctgatctcggtctggtggagaagatgcacacatagagatatacaagttcagtaacatccacctatttattgtgcacggtcaaaatagtgggacctcacttaaaacacgagaattgacacccacagatgcttatgttttcaacgctaggtacatcaatggcctgaatgtcagccagtccttaggtgagcaggctacattagagaattagcaagtcatcaaatatatcaacttacctgtcccaacaattactatccatttcgaaatcaatacgactctgtttaccttggtcggaaggttacatcaagaatctaataatctctcaagtacacattcacatctc

SEQ ID NO: 102859 - DNA, 467 bp, Zea Mays
gtcttctctctctgttctccaggctgtgctctcccccaatttccacccttttgtgccaatttccatttcctgtcaaatcccagtgaattcatatggtggaatgtgttccaatgtgcccattgagtatccctgcaggttcttagctccttcgggagggttttcccacctcaaatagccgtttcaccgaaaccttaattcctcgcaccccacgtgctcggtgaaatgcccaaaccagccaaaaatgctccaattgaacccaaatttttcaggcaccttcacaacacttccagtaacacttttgccaaatttcacgccaatccgagattccaggcttaaatttcaccaaattctccgttttgagcgatcgtttccgagccgagtgcccaaatctctttttcttcgcctaaattcaaaccaagcacacacttcactcatatacacctatacaaacctattcgtgaagtatc

SEQ ID NO: 102860 - DNA, 503 bp, Zea Mays
taaaaaacacaaaaaataataaattgctgaatagctgataatgactatatctgagtgcctatacaatagggttgttggtctcaatatagaactccgtcacctcctctaccgtaccggttacagcaccaacatcaaccacacgctgagatttaaacggcgagggaagatcacatcgtggtggtgatttggttcggccaattgattttttagtggatactagatcttatctatatcactatataatccgttagttaaactttgcagaatgtatccaaccaaaacgctcccacgtctataacctccactaaattcactaaataaattacatctagacttaacacatcattaaaataaacggttcagatcgctggataactctctctcgtttactcatataaattcaatgtacaatattatttagatcatccatcaatcctctccctctcctacgatatcgttgccctcgtgttctcaccgtctccccctcactcacgccactgtcg

SEQ ID NO: 102861 - DNA, 407 bp, Zea Mays
tgtctatagggacgttgtgcgcttggtcgggcgcatttattatgttggtctggttgcgcctgtagctggtctgtgcgcagatagtttcttggtgtagacttgtgcatggacgtaatgcgcttgcgttttggcgcgcttgttgaattaatccggctgcacccttaggcgacttttgcacggatagtcttttgaggatgacttcgattttgcgcacgtgttgtgctagtccagctgcacccttagacgacttttgcacggatagtctttcggagaagacttcgattttgcgcacttgttgtgctagtccggatgcacccttaggcgacttttgcacggatagtctttcggagaagacttcgattttgcgcacttgttgtgctagtccggctgcacccttaggcgacttt

SEQ ID NO: 102862 - DNA, 300 bp, Zea Mays
gtcgggtctatcagctaaagtagtggaagcaggctcgactagggtagctagtggagtcggctcaggatcaccccaatcggcgttgtcatgatcctcctccacaaacatggcctgtaccatctgatctggacctgcaggttcaaatacaagggatggacaaggcgaagtctcatcaaaagtaagctcacaggcctccatgatgcggttagtcttcaaattaagaatacgataatcatgagaatgtaaagcataacccagaaaaatcccatcagaagactgtgactcaaacttgtccaaatt

SEQ ID NO: 102863 - DNA, 381 bp, Zea Mays
ttgaaagttccatgttgaatcattcccaggttcaacttctccatttcttggcataatgtaatgtcagaagtcttcattgtaagacaatgacaggaagccttacgacttagtgcatctgccactacattggcctgcgtgatagtgaatctccaattcataatcctgaatcagctcaagccatctcctctgcctcatatttagctctcactgggtaaagttgtacttcaaacttttatgatctgtatagatatgatagatattccccaacagataatgacgccatatatttcagggcatgaaccatagcagctaattccaggtcatgagttggataatgctcctcatgccagcgcaactgtcttgaggcgtatgctacaactc

SEQ ID NO: 102864 - DNA, 743 bp, Zea Mays
attggccacgagaaacgtacccatcatgaccggctctccttccggtgtcgtggccacttgtgtataataaattcgcccagttttcttcatatttttgcccgctgcattgtttgtcatatttcccttgccttgtctagaactcactgggttctgctgattattggagttattccgcttcagatatgggcagtctttgatgaagtgtccagacttcccataattgaagcaaccagtggatgaactcgggagtgcagggaaacgagtaccaggggcactcggctaatttgttgaggtgggggcagtggcagggcggataaagacaggttgtttaaaggggtaggagggtggacgtggtgaagaacggttttgattaaaagatcggatcaccaacctttgtctcttctcaggcccttggttggacctgtcacctccataaccctttgacttgcttgggcctgcacacttggcttcaactgccagcgctgtgctgacagccctgctgtaggagaggtcgaggaaggtggacattttccgttgtagccggtcattaaggcccctcataaaacaatttctgttcttcagatcagtgttgacctgatcaatggcatattgggacaaatggttgaacttgttgagatattgtgtaacagtatctccaccttgtttaagcttcatgaattcttcttgcttcatatggagcaccccttctggaatgtagtgctcccaaaatgccaacttaaatt

SEQ ID NO: 102865 - DNA, 278 bp, Zea Mays
gcatggtgaaggtgaacgagtccaagcaaccctggaccctaaactcacaaaatgggcaaagcagcccgaaccccacagaccccaacagtcccaaactctctaacccacttacccacgccaccgccgctgaggcaccgaccgcgccatcccccatgggatgggatgccccttgtggccttgtcgcagtacgatccaacaaacaggatgaaaaaacaaggagcgcgttaggtttcgcggatctcactgacaaatacctcgaatcgacacgggatgcagcc

SEQ ID NO: 102866 - DNA, 449 bp, Zea Mays
gcaccactatctccttcagggcatccgactgccctgaaaacatggcaggggctggcatactaccactcatcaccacccctgtcattgccaacatgaggctacatcatgtcctgagtgatggtggaactgcgctcaacgtcatcagtcacgctgcgttcaagcagctgcagatcataggatcccgactggaaccctctcgcccgttctccagagtgggccctcaaccggtgtatgcccttgggagcatcgcactcccggttacattcgggactgaggaaaacttccgcactgagaacgtccagttcgacgttgcgaaggttaacctccctttcaatgccatcattggcaggccgatcctgtaccagttcatggccattgcccattacgggtacttggtcctcaagatgtcgtcccctgctggggtcctcaccgtgcggggcgaccgcccc

SEQ ID NO: 102867 - DNA, 563 bp, Zea Mays
ttgatttgtaaagcgattaagagcctctaagttgtggagtgccttgcgagactcggtctcgcttgagaaaagaaaagatgaactcaagtttgatctttgtgatcacttgagcgaggaaagggttgagagaaacccggtcctcaatggactcctcaacaaagatgtaggtttctttgtgaaatcgaactcttgtaacaaattgtcgtgtgtttcttccttttgtcttgcaatttgttcttaatctttcctccctattcttatgcttatttgcactaaaattctattccattgtgttgctaagtccaattccgcatttatacttactagcaaccttgtgcaagtattgtgctcaactactcatactaacccggactagcacatcttgttctaaagcttaatatcataatctcggatcgagtttggattattttgaattaaatttccagtgtctcttattcacccctagctaggcgactattaatacacctttgtgccccgactaacaaacgacattaatgtctatgaggtcatgacattaagagcctaacacacaaagagtttta

SEQ ID NO: 102868 - DNA, 458 bp, Zea Mays
gggtagggcagggccacagcacggcaaggcacgttgtttgagtaaacggtgcaagggtggcactggcttggtggcagatttggttccgctcccaagtacgcagcttgaccatactcctctgtcctctgtacaaatcaggaggccacttctatttgccgtatagtcaatggtgatccagtgcttgcacctaccctctgtactggctccatagatacagtgtacgtagaagaacactccagtacagacaggtctccagcttactgtaggtgcttaagcaaaaagcagagccctctgcatctacctcgccgctccgttggcttcgaaacaaagctagttaggtttggaacagccgtctcgtctgctccatggaaatgcttggccttttgccaacacgaaagctttaaaggaagaacccttggcgaaacaagattacgacggccccatcggatggatcattg

SEQ ID NO: 102869 - DNA, 597 bp, Zea Mays
gtgagagcacgtcggatcacacgagggtttatatagggccgctagaatgcataacaccctagttcatgtcgaggctgtgtattagagtttcactggtgtacatggattacaggtgagttgtgggtagcggagaatgagttctcttgtcgatctagtggtgcgtggttgctattagaaagctaatgagctatgaggtggtactgggatgtgacgagacgagatgctttcgtaggggtaccccaccggccttgtatagatgacgagatggttatccctttataagttgcgatcactatctaactctatctagatcctattttaacgtagcatgcattcttgcctatccggggttcgatcgcttcttcagtcgagtatttagccctttaggtgtgccacctctttgcacgagacataagcgctcctattgcacataacttggctgtcaagtctctgtttccctgggtggagcttgtctggtctggttgtgactcgagggcctgtcttgctaggcaagccatcgggaggcccatcaggcggcccatcaggcggcccatgaagcgtttatgtgttcataaggacccaactgatatctatctc

SEQ ID NO: 102870 - DNA, 299 bp, Zea Mays
aagatttggaactcttgtttcctcttgtcttttgctttacaatcccctttattttgatgcctctgtgcgtaccgtttgcttaatggcaagtgttcacttaaaataatcgctatattgtaggcctaatgatcaactagttgtcctcttattttgttgctaagtatgaaaggttgaaaatgtgaggaatcttccatgcgcagagcccactaatgaaggggggttgcaggattgtgatgcaagaacccatcatccttctttgtcatccgtaatcttgaaaagtaattttccgatcacaagat

SEQ ID NO: 102871 - DNA, 799 bp, Zea Mays
cttggatattcagagacctgtcagtgttcgcccaaaacgcccttgccgagccaatcaacctgattctcctgctgatgagcagaaaaagaaaaagagacgtcttcggcgagtatctagtttggatcgggacgttggtcctcccgttcctgctgcggaggaagtacctgtgcctgaatttactgacgctgaccccaataggtgtgatctatctgtcgctgatcccaatgggtgtgctccatctgctgctgatcccaatgggggtgttgtctgtgttgctgatgaaaacggcggggaggaagaagatgaggtccctttgactcggaagaacagtcggcaatatgtcgccagtggggaaagtagtggagttccttctcctgctctgtctgccctcattggtctacaagaattgtccctggcgaactttgatcagactcttgaagatatggttccagaggatctgttatcagagccagcggatgatggtgcgacgaatgtttgtgctgatgtgctcgacgctgggttggggtcatctcgggcagcgtcccgtgcctcatcgaccttggagcgcggtcttgagggtcaggaaactgacttggatcgtcttgttcccatggaaataactgagggaccttcgccttagaggcggctactgcagagaacttggtcctcaaggatggtgttgacacttacccagcccccgagggtgttgccggggatgattcggctcgggtgggaagcgcaagccacggcccagcccccgagggtgttgccggagatgatctggctcaagtgggtagtg

SEQ ID NO: 102872 - DNA, 556 bp, Zea Mays
atgagaagaagagggaaaaacttatgactatggttatgagtcctctgaggttgagcttcgggatgacaaggtcattgtgcaatatgcaactcggctccccatgctagctggccgaagtcgaattcagagtggtggctgctgaaattagcactagggacttagtgcgggaatacctggcgaataaaacctttccaacctctagcggttggggatgccgaaggagggaggaaagaaatatgaacttgttcgactcccctcccgcttcaagtttgaaaagcaattcaaaaaaccatgtactgaatgggtagaaatgatagaaactatgtgtaatgaaattcttggaaattacacaaagaaagaagatcggttaatcattgctgccttcagtacccagctgaaccgaaggttaaatcgggtaatggatgccctgaacttcgagtacccggattacgacaaacttgacgaaggggtcgggggagcaaaaagaaaaagagttgttagcattttgagcaggcaagctgctcgatctgtgaagaaagacgaagaggctttgaag

SEQ ID NO: 102873 - DNA, 322 bp, Zea Mays
aatcagagcctcaatgtcctcgggagagggtcgcactctaagacccagaccaccatcactagcaggagggttggacacaaattcagaaaatgacctatcaggtagcagattccaagcagaataggcaacaagagcaccaacatttgacactctgcccctcagaatcatgtccagtcggctcaccagatcttcagtgggaattctcttgttggtgacccgggtagagtcattgataccactgtacagataagctgggtatgccctgtctttcaaaggctgaatattcttgaagacaaaattagcaaccacagcttcagcagtc

SEQ ID NO: 102874 - DNA, 600 bp, Zea Mays
cacacatcgaccaaattatacgaaccgtaaacctctaatctctaactcgaaaccatcatgcgcttatttcccaattcatgaacacataacgcgtattgacccgactcaagatatagaggaagcgattactattttggcatgtcaccacctctctaattaagccaaaacaatttctacttatatcgaccgaacatttgtgtcgagcacaccttatattaccttgtctcgtatacaaccatgttgtagcgtgcactcgagacactaccgattaacttaacgcaattaccactacaatgcacttcgatatacacgttcgacatcactgtgcttcgacagaccccacacttccaatctacttgtcacatccaaacacaccacgtgcccactgcgttctcatgaccaattttagcacaattatttacgacaacatttatcgactagacaatgaaacactaaccgaccattcgcacatctcatcttaaaaacactaatcacatgtcacataatttatatcttcgatccactctatcctacactacgatgaatacataaaatatttttaacatagacgaacatcttagccgactgcgaaaattacca

SEQ ID NO: 102875 - DNA, 535 bp, Zea Mays
tttgtatgcagcggaggcagaggtgttggggtaacaccggcagccgaacacacgcaggtgggaataggacgacgggcacctgtagagagcatagttggagtggaaaacttgagagtcttcgaggggtggtgattaaaaagatgggtggcagtgtggagggcttccacccaatagggaggggggagatgtgactgaaagagaagggagcgaatgatgttgatggtgcgcaggacacgctcaaccttgccattttgctgcgaggtgtaggggcacgacatgcggagggcaacaccatgcgtgagaaagaaggtgcgagcggtggaattgtcaaactcacgaccgttgtcgcattgtacacttttgatggtggtgccgaattgggtggcaacaaaagcgaaaaattgtgcaatagtggagaatgtatcggatttaagacggagaggaaaagtccacaagaggtgagagcagtcatcaagaatagcaaggtaatatttgaaccttgaaatactggacaccagggaggtccataaatcac

SEQ ID NO: 102876 - DNA, 693 bp, Zea Mays
atccaggccctgcaaattaggctgtcaggcgcactgaatagagaccccattgtacagtgactgaacaagatcctaaattcatcccccttcgccgccggtgatctgccattgcaattcgcgctcgcctgaaagattcgtgccacgagaagtatggataacatcaggtgtggtgagaatatccagcgcggggtgaatctggtcgctagccggaccagtcgccgtgtcttgccgtggttagtcacgctggcatcacgggagttcgccgttatccggccaggctacgtgcctcaacgttttaccacgtcgcagtgagtcaacgtaagacactctctgctactggttcgtcgtcggtgaggtcgccacggttgatgccaccgagctctcgtgacagtgctctcttcactcttcgaccgccaccgcgccaacccaaattcatgagccaccgccccaagtcctataaatagagcacaccgtcaggttcgtagggtagtcacgcatctagccaccaagccatgccttcaattgttcaccagagctcaccaattccagatttcccccaaacctgctttccgccaccgtgaaagaggtctcgccgtggccagctcatcttaggtccgctcataccctttgccctctcgttttagtgttcttgtgtgcccctgatactcgtcgaccaactcgattgagctaagc

SEQ ID NO: 102877 - DNA, 501 bp, Zea Mays
ccctcgagattcagacggggctcgagaaaagataagggtattccttcctcagagaatcctcactttcccaggtggcttcctcttcaccatccctgctccattgaaccttacagagtcttacttctgagttgcgggtccttctgactgctgagtcgagaatcttcactggcttttcccggtactggagatccttttgaatctgaattgcatctgcctcgatgtggttttctggtacttttaggcatttgcgaagctgagacacatggaacacattgtgaatatctaacatggattctggtagctgaagatggtatgctgcgggtcccacccgactaatgacggggtagggaccgacgaaacgtggtgctagctttcctttcatttggaacctttttacaccatgcatcggggagaccttgagataaacgaaatctccttcctcaaatcggagttctcttcgtctgttgtctgcgtagctcttctgtcgactctgagcttcaa

SEQ ID NO: 102878 - DNA, 639 bp, Zea Mays
tattacaaatcctacccccttaacaagaatctcgtcctcgagatttaggaaggactagggaaaagatggggaaaatctatgtgaagctcttcttctctctcccaagtagcttcatcttctccatggtgactccattgtactttgcacattttaatcactttgctcattgtgacatgagtcagtgtgtcaagaatcttgataggatactcagcataagtcagatcatcttgaacactaagatcctccaatggtagctgctcttcaggtaccctgagacatttcttcagctgagatacatggaagacatcatgtacatccacgagatgatcgggtagttccagttggtaggcaacctctcccacttgctttaagatcaagaaaggtctaataaagcgaggggacaacttccctttgactttaaatctcctcataccttggatcggtgacaccttcaaatacacgtgatcaccctccttaaactctagcagtctcctccgggtatccgcatagcttttctgccttgactgcgtagttctcaaattctcccttatcattcgcacttgttcttttgcctctcgtataatttcaggcccaaagaactgcctttcaccagttcgatcccaatacagtggagtcctg

SEQ ID NO: 102879 - DNA, 1289 bp, Zea Mays
ttcgcctcgagaatagggttccaatcaataatggcatattgtgcttaagcgcgaaaaatgtgactgttattgggggggctgtccaatcattgtatgaagaatggcagatgaaccagaaatactctggcttatcccgtccatcattgaggttgtctccaagtgatgatggagttgggcctccaccatttgagaagttagacattgaagcacgcccctgcagggaaaccaaagttcaagcatatcctggtaatggttaataccctcgttttcactcctgcactcatgctgttcactaaatagatgtggaagttatgagttgcttgccttaagtaaaatacagaaacacaacaacacagcctttttatctccactcccaagcaagttggagtaggctagagatgcaacccaacatgaggcacccgcaaaaacgaaaaacctgtgtaaaaaacatcattaagtaaaatatagcaccagaagtcaatgaaaatttgcatttggttcaggcagtgaaatctgcatgaatggtacttcaggattattcctcatgaaaaggtgctataatgtatagtgctatacttgtcgctagaaatatattgattttgttgaaatttaataggaagtcactgtcaagtcgtgtaaatcttaacaagcaccattaatcggataacagacagactggttccttgtcattgttacgagctattattgcatatatgcttgcaaaacttttagatgtcctcatgacatgtgatctgtcttccttgcataaagctaggaagttggcagttactcatgaccatggaccagttaattctggtggcaagccaatgaatgagggttcaaacgatgagaacagagacaatattgagagtaaggttgaatctaagcaaattactcaagacagcaggccaaaagagggtcagactccaaaaccttatcttccatagtatcactttaatctttatgatttgtcaggggcagttggggactaatacttatttccttgcaatgtgcagtcagcgaagctgttccagtccagaaccaagctgccgcgcagaagctactgcagaaaatgtcgcaggccgtgcctgaggacaggcgcggtcgcggtcatagattcaagggcaaaggcaaggaagaagatgctcaggtttttaccctcgatgaatgggagaagaggaaagccatcagttcgaagcccgctgcggaaagctacgtgcatgacactagccgagacgaggagctggcgaggcaactgcaggaacaactagacctagaagacttgcatg

SEQ ID NO: 102880 - DNA, 368 bp, Zea Mays
gtcgtcttacgctggaatctctcatttagttccctcataaaacaattcttctttttcaggtctgtatccacttggtcaatggcgtactgggagagatgattgaatttattgagatactgcatcaccgagtctcccccttgctttagtcagatgaactcttctagcttcatttgtagcaccccctctggaacataatgttccctaaatgccaatttgaattcttcccaagtgatttgatgtcccgcaggttggatggtcgaaaagtttgcccaccaagtactggcagggcctcttaacactgagcggcaaatataggcttctgaacctcggtgcatcggattaatctgaatttctgttccattactcgc

SEQ ID NO: 102881 - DNA, 802 bp, Zea Mays
gtttgtgagtctgttttcctagactgaagagtcttcagatgaagatttggattattttgctgcgttagatatggccgcagcggagtcttcgctgcggctggagatgggcgaaacgttggatcccccagctagggcgaagagcgaacaccgtcaataaaaggtggtggcgaagcatagtgttggtgagagttcgcgaagtggtaggcgccgtcggatggggttggagcgaactcgtcttcgtgtagatcggtataatcaacgcgacttgttgtcttcgtcgtttgggacgagtattggtgaggggacctacggaatttgtttgagggggaggaattgtggatgatgttgtttaactatcgggaggcgggcattatctcgaaggttgagccgatgtagaatgtgtgatgccctcacttgtcgtgcagtagtagagggcgcaattgtatttatttgtgtggtgggtctggtgacccttcgctgtgtatatgtaatctgcgacttgtattgtaatatgggttgttgcccttcgcttggcaatgttatgttgtaagtgtccggcggtacgcttgggcgatttttgcacggggttgtcttgtgggaaagacattgtgtcatacagtactatgcttgtccggttgcacccttaggcgacttttgcatggagtgtcttttagtaaaagactttgtatcacgcacttgtgcttgtttggctgcacccttaggcgacttttgcacggagtgtcttttagttaaagacttcatatcgtgcacttgttgtgcttgtccggctgcacccttaggc

SEQ ID NO: 102882 - DNA, 645 bp, Zea Mays
tggttttctctcatggtattagagcccacctcctaaagacctaaaccctagctgctaggactatccagaaaccctaatcctagccgccaaaaaaatcaatatgccatggtgagttcttcaactttctctgctagttcgcaacttctgttgagacaagcaattgcagagaaactcaacaagaacaattattctctatggagggcgcaagtcctgcctatcctccagggcgcccaactgcaatgttatcttgacggcttgtgtgccgctctgaccgagaagattgaagtttcaatcggtgacaagaagatgtagatcaatcctgagttgacatggtggttagcaattgagcaacaagtatttggtttccttctcaccttcatgactaaagaagtcatgagtcagatcgtgacttgtgaaacacctcataaggtgtggactatccttgagcagaccaatgcgccaagttctcaagcaagaatagtcaatacaaggattgcacttgcaacaactcaggaaaggtaacatgtcaatttctgagtatatcgtaaagatgaagtcacttgtagatgagatgaagccaattgatgaagaagaacaagtcccatacatcttggcgagactagatattgagttcaacccggtgat

SEQ ID NO: 102883 - DNA, 645 bp, Zea Mays
aggaggcgcctttccggcgttgcccttgtttttttcccctctccaactcgaggggttttcgatccggggggcggttcccggcgagatttttgacccggcccggtgcttggttccattgatctccgtctgctactccttcctcctacttggttgccttgccttcccggtccctgatcggagcctgtcgccggcgggcgggcgggctgagtttactgcccgttactggggggacaaagagcagaaggaacagagagtaaaaaatcttgggccttgatcggatccgaggacggggcaatgcggtaataaggagcggccatcactgccggagtttgatccatccaaggagaagaaagaggaggggaggccgcgctttcctttctttctggtgagcgttccggcctccgcgccgcccgtctctgttcattctttttagccttaaagctactacagtactaggcaacaaaagcggtcgcggaagttgccatctttttttttccccttcccctttcatcattgctgatggcgtcgactgcctgcctgctcacactcacgcagaagcggaggcaactcccgaggcgcccgccatgctgcgcaacagatcgagaagggcggttggtggtggtgccaaccaagcccaaggacgag

SEQ ID NO: 102884 - DNA, 441 bp, Zea Mays
gttcgacgggaacacactatggttttcacaccaacatagtgaaattttcttataataacctctcggtatactcgcaacttcgtgttgctagcgattacatgtccttttatctcatagtttgcttcatgccattcagcgacaaagagagcaatgtgctaacatctggttgagcaatgtatgactgagatttctggtctaaaattatttggtaaggtctttttgcttactaatagaatcccaatttgtgatgtcttatatgccaaaaaggctttcatgcattatatatcttcgggttacttcgggtaaaactttatgcatgaggtaagagagcaaagaattaacttatctgtgtttcatttatattttaatttaatttcccagattttcaagtaccatacaacttaatatagttgttatggccacttggcaatataaataaat

SEQ ID NO: 102885 - DNA, 490 bp, Zea Mays
atccaactttacccgtcgaacggtgtttttaacatgtttggcaactgtctactagggccaggtagcgagtatggaattctcattgggggggggagcgattgccttactacggtcgctctagccatggcaagaattcttctccactgcgggtaatttaccaatgtactttattgattcatttgtgggtccctctcaaactctcgaagaacaaatattttttatggaggtgtatacatatttgaaacagactacaaggaatcttttttagccgacatggatggcagcatagtctacagatcaatcattcataggcttagtgttgtttcatagttgaaccccgtcatattttctagcaatgtactattgttatagtatgtagaagaagagaccatagaggaaggtggaggaatatgagggaactgagggagatgagtttagagttaggactggtccatgtgtgaaaagataagacatttggcccatgcgcggt

SEQ ID NO: 102886 - DNA, 447 bp, Zea Mays
ccaaacacattgatattagacatcatttcttgagagaccatgaagccaaaggagatatcgaattgtttcatgtgagcattgaaaatcaactagccgatatcttcaaaaaaccccttgatgagactaggttttgttttcttaggagtgaactaaatatcttggattctcgaaacgtgtcataaaactaaaatttgaatcatgattgtttgatataaaattgctttatgcacaaaatgacatgtgaaatcctatttttattgccaaagttactcatgtcacaaatattgattgtagttaaagccttaccgggcaatatctcaaaacaggttgagtaaatcggttgagtaggccactcaaccagttttcttctggtgaaaaccagttgaaccggtataaaaaccggttgaaccggtttttgtggcctctgcatccgcgctgtcagtcagc

SEQ ID NO: 102887 - DNA, 584 bp, Zea Mays
atatcttcacccagtcagaattaaatatgaggcaaaggcgatggcttgagcttattaaggactatgaactagaaattcattatcacccaggcaaagccaatgttgtggcagatgcactgagccgtaaggtttcctgccactgtcttatggtgaagacctctgacaacactttatgtcaagagatggaaaagctaaacctggggatggtcccacaaggaaccctgaatcagctaaagcttgagtctatcatcttgcaaagaataattgatgctcaaaaggataatgtgggtatgaagcacatacgggaaaagataagggctggaacagccaaatgtttcaaagaagacgatcaaggtgtggtatggttcagtaaccgcatagtagtgccgaagaacgaagaactccgccagcaaattttagatgaagcgcatcttagtcgctattctattcatccgggaagcactaagatgtatcatgatctaaaacagcactactggtggacgaagatgaaaattgaaattgcacgctatgtggctaagtgtgacacttgcagacgtgtcaaagccatacacatgaaaactgct

SEQ ID NO: 102888 - DNA, 434 bp, Zea Mays
cgttcgcgtactgagatgttgtgggaacatgaagaacccgagcatgaccaagggcaactttctctcgaacaaagtggagatcaatctcaacatgctttgttcgctgatgttgcactgggttgctagagatatatacgacactgacgttatcacaataaaccatggtggcttagcaaggagggtggtgaagctcaatcaatagctgttgcagccaggtagcttcagcaacaccacttgccacggctcggtattcggcctcggcgctggagcgtgagattgtgtgctgacacttggaggaccaggacaccaggttatcaccttggaacactgcaaagctagaggtgggatgacgagtatccggacatccagcccagtcagcatccgtgtacacgacaaggtctataggtgacgagcggcacatggtcaagccaagt

SEQ ID NO: 102889 - DNA, 610 bp, Zea Mays
tagacttgacaaagtacttccgtgccacaggaaggaagcaatacatattttctgggttacggttacgggagactaccaaggaaaaattaatcataggcggctcttcacaccaatcctcttcctccatttctcttcccgtaccctggcctggcggggtcgcgcttagccagctttgcaggtctcctccgtttaaaacatggcacctagctgttttggtgagaaaccctagattgattggagttggatgttctggagtggcgaggaaccctagattgattggagttagatggatgcttgctcgttttgttagttcctttaccgtccctcaaatccaaacattccttgctgggactggtacggtgctccagttcatctaaagcagtttgccttttggggaatactggtttgtgtttgtttttccaaaactgtctagggttccgcacgccctgtgtttgagacccctttggatttattgttataatgagttttgcttgcccggtgttcaattagtgtaccattgaatttttaacagagcactgatcaagcgttttgttccaaggtttttttaatcagttctaatgcccatatattatctcattcatgtgttgat

SEQ ID NO: 102890 - DNA, 428 bp, Zea Mays
gtcgtggaatatcaactgaggcaggagaaaaagaagagagagagggagccaggggttgaagacgatgtgcgcgtccgttgatttgatttgaacggctgggattaaaccatagatacccccttttagcactttagatcttgaccgtgggtcgcccatccgaggggtgggatgggcactggcgtggttggatttcgggcgttggctttggatccaacgatttcggttgattaccggttcacttaaagcgccatctgatcgagatcctcggagtgagatccagcggccagaaaccgtgcctaccccttcgcgtggccaacttgcataagcgcccctgtacttctggggaatcaacccgcagtcctcccctcggggttctctgtgtctgtggggtttttgcgagcaggcccctgtactttttagaaaatgag

SEQ ID NO: 102891 - DNA, 1683 bp, Zea Mays
gtgcgatgcgacctccaagccaagaaaaggcttagggcgcgtcagcgccttcatagcaaataattgatgaaggcgacactcgatcagcgatatggtaacggagtaatcaccagtcagtttgatatcatcaacatacaacaacagaatagcacgtcctcgaggataaactgatacgaacatggccgaatcatgatcactccgagcaaaccctgcctggataaccactgtgctgaacttcaaaaaccgacgctatcggggcttgttgagaccatagatcgctttgcgtaaaggacagacaagagaagaagtcagaagggcaggttctctttcatccgtcttttctaggtgcgcatctctatctactaaaagtaggggtggttgccatagatagattgggtcattcgtaacctgagcaataaccgatgctactacagcaataacggaaataaccgatgctacagcagaaactacagctatacgtggcggccccacacgcagctttgtttaacaagcatcacccttcctttcttttcaaatgcttcctcagtcaatcagcagcttattcgattcctattcttattaaacatctgatatagatggtgggaacaatgaagcagattcttcatctgtaggttgcaatccgtatgatttcttctcgatctcctgcttgtgtttcacctcgcacctaagcatcacgttcctagggacagagacatctgcgctctaaggcaatcatagtatagtatagtatagtatagtactgccagcatggttacatcgttctgcgggcaagctaagcttcaacttaaaagtcacctgatttgggccaaaggagtaggaacagctgctggggaagcaccattaccatctatgggaggttgaatagctgcataagtagtagtaggagcatgggcactgggaaaagatgaaatcgatccagctctggtaacaaagcagtaggcaaggcggaacctcctctactaaaatacgaatacgaatacgaataccctacttccgaggagaaaggacatccctcaatcacgggacaatcctccactccagggcaaaggtacttccaaagcagacaaggttcatctgcgcatgaaaggaatgaaacaaattcaatagattcaatagggtcatccccaccgagatcggtacctatctagatccccagcttcgacaaggcgtcctccttcgcattttgcgaccattcccacgaggactacgattcggattctccaatttcatccccaattacacctcttaagaggaagggacggccctctatccggtgtgggttcctacgaattattgtatggtttcggatcctggtccctctgcccttgctttttgttattccataggggtatggattgaagtaatcactaatccaggaaagatggatctttagctagctctacggcaaagccaatacgccatgtatcaaaacaatagggataggggtaattgtataccacctacgaataggaatatcctgggtttagtaataaatcgaatttcatcaattctaagcacggtaacggcagtgctcctatccaacggccggggatctattcgatttatcaatttgctaatgccgaaaagcttaggttgttatttcatcgtcttgcgctaaaaaggcaccctcctattatgctaaggccagggacggataacggg

SEQ ID NO: 102892 - DNA, 400 bp, Zea Mays
tgtggacttcgcgcaggatctggagaccttcggtctctatgacacatttgagcatgggttgactgatccctttcttgtatagctggccctcaataagtgtgaagtcccgacttcggtgtttgaggcgcttggcctcgttgacatcacctggatggaaatatccttgcaagaacagggttattggggcccgccagtcttcggccatgatgaggttgacaatgcgatggccctcggcgttggtggttatttgcagaccctctgggctgcggacgactggtgtgccaataacgtggtagaacacgtcggagggtagggcttctcctctggctgctgctttggccaacgcgtcggcttcttcgtttctagcgcggtccacatgctacagggtgaaacccttgaa

SEQ ID NO: 102893 - DNA, 755 bp, Zea Mays
gattgcccaagcgcgaaattctcgagcctgtaccacctcaaccactgcaaatgagggaacatgtgagtcagactctaacacgacatggagcctaaagataacatgtgagcaaatatgttagaaacatacgtcatccatcacagaatggacactaacaccagctcaaccactcctacactaggaagtctaaagatggcacatgctagcccacactaggatatgacgaaacataatgataggctctaggatagcttgtgcatgtctacaataccaagatggaagaggtagatgtcagccatgacatcgcttgaccaacaggaatcctggtgtacaataaactacatgacgacacccgaccctcatccacttcgcccgacctcaaattcttatatcagggccccactcccaccttagcctataaaaggatgcgggaagcccatgctcaaggcatgtctgttttggtattcaaacactagaacacttatacacactcgcacactagagacttgcaagctcatctcctctcttgtccttttgtaaccccctactacaaacccatgcaaagtagcacaactggacatagagacattctacctgaactagtataaatcgtcgtgtcatatttgcacaccatctattcccaaatgtgtaaaacacgattattactagatggtggcatgaaacaacgacaattggcacgccatgtaggagattttttgcccatcatgccatttttccatcactgaggatcgaat

SEQ ID NO: 102894 - DNA, 332 bp, Zea Mays
cacgcatgcatgcaaggccatcggttggctccctatccctactcttttcaaactcgtgccactgctcggtgggtaccaccctatttcatgctccacctcatgatactccccaacaacattaagctcatacactgctgcacctctgcccttaccattcggccctctctaacatccttgctccctttcactttctcatatggctacctaaaaaactaagggaggacgaccacatggaggatggggggatgacaagggtgtaagcgtggtgcttgagcttgtagtaggagagaaaaatgtcacctgtcgttgtttggcggtgggttatcctagaa

SEQ ID NO: 102895 - DNA, 271 bp, Zea Mays
aaaactaagcagtgacattaatttatattttgtaaatgtcctggctattacttgcgtagcgtaaacgttataacttctagaccgtagcttcgacgatcgcgtttctttcctcgtgtgaccatagaagcgagctttattttgtattgcacgttcttatattgttttcctttgtatggtgtgatgttcttatacttgtatatgtttgtttgtttgttcctgcttgtattcgctatgcgtcgcgaatagtttgcgaccctttttccgagcttcg

SEQ ID NO: 102896 - DNA, 454 bp, Zea Mays
aaggcgcagattgaaaccgaggcaaaggtaaccgaagccgaagctacaatgggccaggccgatgccgaagctgggccttcagagcctgtcaaggagaaatcctcagaaactggagaaaaggcaacgagagaagaagctataaaacagattttgcttgaaaaagctgtcgcacctactcccgtagcatcttccgaagtccttgattatattattcgacatgcttcgggaaaaagattatccgaagaagaaatttttgaagctaaacactatgcccgagaattgaagtacccgaaaggggccttagtgtttaatggcacagatgaagatgacttcttatattgcctcccagagaacaaagaattatctgtctgccgggagatggccagaagtatggggttcccgaagcttgaagctggcctctgcgccatgatgagggacgatcttgcggatagcc

SEQ ID NO: 102897 - DNA, 317 bp, Zea Mays
tcttacttcagttttcttgtttatttacttgcctagtaactagtcatgattagttagtcaccaatttatgaattggagtagagagcgcttgggatttggagtgatgacagagcaataggtctgtggttgttcgttgttgaattggaaggttgaaggttcaggatgtgccaaaagctgttaatcatgaagcagcaatgtaatagtctgcgccgtccatggaatgacattgctactattccaacgtggagatgttctgaagttgaactgggcaattccatagttggaggttggtcatttcagatgtctggtttaacaaa

SEQ ID NO: 102898 - DNA, 509 bp, Zea Mays
gcgtaaaagagtgccaaataataggttatatataggagacagggaatcaacaagtggttgattccataaccgtaggttatgcatgcatcacatttaaacaatactaagtaatcttcccctcttatagagacatggcacgcacaaaggttacccagcggatggcgaccagacctcaaggcgtacctcgagactagttggctcctcgacatgaggggagtagtagtggcagtaatgatcccctagggaatttggaggccagagttgaacgtctaatgatggaactgtgccatggaagcagggagcgtgcgcgtgatagtcgtctcattgctgagttgtcaggagaggttgactatttgtagtgggagattgtggagcgggatagggctattgactgggctataaattcacgatctatagcctaggattgtgaggcgaatgcccgagcccgggtggaagagctaagcgtagccctggaaaatctacaagcgtataacaacactctacacgag

SEQ ID NO: 102899 - DNA, 493 bp, Zea Mays
tatctgttctttgagcgtcataattctttgcagaagaactaactcaagcttcaaattttccaaaattctgtgctgcactatccccagattcaacttctccatttcttgacatatagtggtgtcaggtgctcttactgtaagacaatggcaaaaagtcttacgacttaaagcatctgccaccacattggcttttccttggtgataatggatttccaaatcataatctttaattagctcaagccatcttctctgcctcatgttcagttctaattgggtaaagatatatttcaaacttttgtgatccgtatacaaatgtcaggtatttcctagcagataatgacgccaaatcttgagggcaagaacgaccgtagctagctccagatcatgagttgggtagtgctcttcatgccggcgcagctagcttgaagcatatgctatgactcacccttcttgcattaagacacatccgagtccactgcctgacgcgtcacaa

SEQ ID NO: 102900 - DNA, 494 bp, Zea Mays
ctcctcctcctcctcctcctccatgtggagggagacgcatcatctcaacttgtttatgtatatatgtagtggtcaaattcagacgaacatcacttcacaatggtcttttgctcagtcaaagagaagcaaaaggtcgtgtgtgatgactgatgaggtggtgacgcagatcccatgcatcctcctctcagggcaacacgcatgttcacacagctcagccatatgctctagctactctccgcccaaagatatggaggagagcacgtagcatccacgttccctgcacgttcccacagtaaccaagttagctagggtgcttcgtcttcttccactctcacccacccatgttagctagctctatcgtacgcaatatactgcaatataccacggcatatcatatgtatatatagcacgcggttacctacactatagctatatatctctgcaagtccaagatcatcttctactccaactgcaacagaccatagacctaccag

SEQ ID NO: 102901 - DNA, 396 bp, Zea Mays
tgatggtccacagttgtctgtgttggttccggagaattcacgcccaatattgatgccattaaggaaagaggcttgagataagaaaaatacatatattgagcttcccaatttcgataacatacttggtcaggtgtttatattctctgaagactagtttattcattagttatttgtttcatcgacaaacatatttgtgtatttgatttgatttcaccatctcatagtagatatcagtgagaaacttcagcatgaagacacacttcctagattaaaattgagttttatggttagttgtagtaaccttttaaaccataattcctggacttatcttgatcaatacttgtgacttttcgaagacactggattggttattggaatatgtagcaacagtgaata

SEQ ID NO: 102902 - DNA, 533 bp, Zea Mays
ttttatgttgatgcctatcatgcacagtatatgcacagaaacttgcattaacatgcaaaattagcatcaaaagttggtagggatgcaaacttgaactactactttctgagtttgttgcttagggtcaagataagttgaggaacattcactataactgaaagcaatcactttagtagtttagttttttatacctgacatgcatataacttctgatttctgcttcattttttgtgtgtacgcaaatcatatggcaggtgatcatgatagtagacagtggccttttttctctaatgaggcaggagaactgtgtatcatttcattaagaaggaaaaaatacaaggagaggctagagggccagctctgtagatgtatagttgcaggcgagccacataaattagaaaaaactgacctccaccacacacatcctgacctaattgtcaaggataatgtgacctgacgagtaactcgtagagggctgaaacaccacaagctattctcattcaccgccaactgtaacataccctcatcgttgc

SEQ ID NO: 102903 - DNA, 484 bp, Zea Mays
ggacgatggaactgggtggagacccaggcgaagaagtgagtgagggtggtaaaagtgttagacttcaaccgaagaggaaaagtccatagaaaatgggaaaaatcatccaaaattactaaataatatttgtatccagagagactgagtacaggggagatccagagaccacaatggtggcctgcttagccctagaggaagatgtaggaaaagggagacgagtatggcggccaagctgacaagcatgacagaggccctcaaaatgacccctaatacaaggatctaaagtgctggaaagctttgtcatgacgtcatgtcctgggtggccgagacggcgatgccaagtggtggaggtggtggtggagaccaggacgggaggcggagacgcgccggtggaagaaagccggagcgtatcgaggggcccgacgttgtcacatcgggtgagtggggtcctagaggccagatccttcacagaaaaccagaaggg

SEQ ID NO: 102904 - DNA, 555 bp, Zea Mays
gtcaccaaatcagcccttagtgggttaccatgagcaactctaggttagtacatggattttgttcgataaagccaatgtgtcagggttttgaactcacgacaagtaaatttgtatgttagtgggggatttcacgagctaccattctaatggctttgctttggtgagcttttgagaagatttagactggtttatagaagtaccctacgtctactactatgttaaagtctttgtcgatgattgggaatgtgttacaaggtgaatcttgagctctcgtgcttgtatgtctactagaaacttagttggatgagaggatgtcaatttgtcttgttgaatgctagttggtctgtaggctaagtctgcttgggtttctatgggaggctaggttccctttatatagtctagagaacaagtagccattgttacattgagaaatctatggggtgtgctatttcctgcctttgggttgtcgttgaggggaggattagggttgaaagagacccgactctttgtgggcagctcaatgaggaagtagggcaccttggtggcgtgatcgga

SEQ ID NO: 102905 - DNA, 556 bp, Zea Mays
tgtggccgttgtggacgtgactcaccgtggatgaggctcatcacaacggaatccccggtaagaacatcatgcccagaatcgccttcatacccgtatcatgtggaccgatttaattgagatttagtgtgcgtaattcggaggttagcctatcggcgtgagacctcaccgtggcggcggtagtgccgtgacctggtctgcccgtggagaagatgtgcctccgccgtccgattttcttcgaatggccaggattagaagatagacaccccttcgcccatttgaagcttagtcgttggatcacgggtgtggggtttagatcgagctaggacgtggctgtcccttaaccgttgatatcggatctgatggtcagggcgggttgcaacgtgttactgcgccgtgttctaatctcgtccgatcgggtgtgatcggacggctctggcctaccgatacccctttgcggttgttgctttgcgaatgagcccccgcgaaagatataaattaaaccgcagtcccacgcctgaagttttgtgtcttaaggtcttttgcatagtaacccctg

SEQ ID NO: 102906 - DNA, 416 bp, Zea Mays
tgttggcacgcatcttgttcacgccgagtaaacatagtgtctatggtctctctagtaaactgaacaaagttctcatactctccttggtacgtctcaaagagtctggttttcacattatcattgccctcatggaatttttgagggtggatcatatctcgtgagccatagacaaatatccaactcattcaaactcactcagagtgaggcacgagaataaagcattgcgagctttgttgtctgaatcacggatcaccacttgaattggagtgttttgttcacttacaacaatgaatgcaacattgaggaaaatctcccaaacttgatatccaatacttttaagaaacatagacatacgaatcttctagtatgggtagttggtcccatcaaagaatagtagcttgccaacaccacattcc

SEQ ID NO: 102907 - DNA, 477 bp, Zea Mays
taatattttggatgaaaattggaaattaacatgtaatgtagccatgatgagactgcataaaatacctgcttttccgcatttgggtttgtgttcgtctccaaatcgtcagggcagccctcaaatgcacgacgcatttgttgttgcttttcgtgtatttcttcaaactgggtacctgtcaactccgtattcggttgtgaatatggcatagtcaggtcctgggtattttgggtacccttatggatgtgtgcctctgtaattaaaaagttgtagtatttaaacagcaagaactgataaatgcatagagttaagtacatgaattgaataaatgacaatgagggaaggtaacctgacgacatatgctgagatatatctggaggtttatctgtttgaggcgcttctgcaacattgtctgggtcgccagactccgcgcgaaggacatcatcaattaactcagcaaatgtgtccgctagttcatac

SEQ ID NO: 102908 - DNA, 520 bp, Zea Mays
cgggaactcgcggtaacggctacttcagacgcgtaacatctacttcaacggtcgggtgacacgtggtggtctggtggtggaccagttcggtctagtgccagcccaagatggaagggcccaatcaagatctcggaggacgtgttcccggtccagtgtgcttgtgtagtgcagaattccagtagcttactaaacagctatttgggggcttagggctataaatagactcccatttagaccccctctcttcaccaagtcactcaagagctagcacttcacttctatgcattagagaaacacacatatgtgatccgagcgtatatttttgtgagatagagttgtgctgctgcttgcgtttgtgctcttattctttgggtgttgttcttgtgctcttgcgcacgttctactcctctctctctcttgttgttcttgaagtagttgctccgatcaaattgtgtatggctgcaagagactctggattgtggagatccttatgaggagaaaattataatgaataatcgtg

SEQ ID NO: 102909 - DNA, 788 bp, Zea Mays
ctcatcttttacggagttacgtgcttcacatcgggatctgcaagaagctagagtacgtctggaaagagtaccgcgagaatggaattgagaaatgctctatggcagtctacctgggagaaagccaaaactacccaaattaccctcctttccaagtcaccttcattggacaccgcttcccagacacttgccaaaatgttgcccaaaaagccctccgccagctatgccaaaactacagcagggaagtcttcgagacacctcttcgttactttccacccagcaacaaaaatacccctacctggaggaaaagacttcaggccctgtcaggaagagatcctagtgaggatgaccccaccatagtatacatggccggatacctccacactcttgacaaccactatgatgaccttttcgcccactgcacccgcttgaactcccgggtggagagcctagagcaacaaatcaagaaattaaaagaagaaaaggcgtccctccaagaaagtctcgaaatagcagaaggtgaagaggccaacactcgtgaagcctaccgaaccctaaagatggattatgataagaagttaaagaagctcgcccccactaagaagatccggaagcggaccaagagccaaggatgccagactgaacgaaaagaggaagccccaccaacactgcctccctccaggatagaaaacttgtcagacgttgaggatatgtccctagctagccttgacgaccttctcagggaatttggggataccttagaaagggagtgtgacggaacctcccaagtc

SEQ ID NO: 102910 - DNA, 343 bp, Zea Mays
atcggctcaaccttcaggatgatgcccgcctccctataattgaacaacattattttcaatttcacaccctcaaaaaggttccacagatcccctcaccaatgctcatcccaatcggcgaagacaatagttctcgtttaccaatacggtctactcgaagacggtcccgctccatccccatccgacggtgcctaccactccgcgaaacctcgcccacgctatgcttcgacaccacccttcgtcgtcggcacttggtcctcgcactaggaagatcagccacctcgccaacctccacccgcgacgaggactccgccgcggccacatctaacgcagcaaaataatccaa

SEQ ID NO: 102911 - DNA, 627 bp, Zea Mays
cattgtacttcccaacagaaaaaggaacattcaccacttggataacatgcaatgctacataatcattatgccactgcatcttatatggactaggatgacaccttgattttaattccgatctgtccatcaattcttgactagaaatgttgttgcagctaccattatcaacaatgatgtggcatagctcatctttgatcataccttaggtatggaaaagattgtggcattgtccattttcttccctttcagcagtcacacttagcactcaaaaagagataaaacagttatgatctccttcttctggctggatctcattctcttcctgttgaatttcttaatcaaacttcgatccatcatcttctggatcacttctgattcccattcacctttttcattcaacaacaatgttcttctacttggacattgagcagcaatgtgcccacgaccatggcacttatgacacacaatttctctggtactagtagcaggccgctacttatttgcagggaatgaccctacagaagccgccatctttgatgtaccattggatagagaagacctaccttcatttccttgggatcgtcctccaccaaaataagcactgaattgctgtttgcaccatgggac

SEQ ID NO: 102912 - DNA, 311 bp, Zea Mays
ctgccggtatgtgtggctgagggaccacatattctcctagcagcatcactgatcgaagcaacataggtagatagcagtgttagagactcatcagctgatagagtcctgaaccctctatcacctgcatccatcaccctgacatgaatacgagtgatgtagtagcaagcctgaggaggctcgtacactcgccttgtctcatataggggtcggacgtaggttcccaatgcatgcagaacatcctgcagtaggttagggaagtgccctctctcgaacattgaggtatgatgttcagtgataggccataaccccac

SEQ ID NO: 102913 - DNA, 492 bp, Zea Mays
cgcgtagcgagccagttctatgaatttgtgcacgtactcactgacagatcttccaccttgagttagctcccgaaattcatcttccttgacctgaacgatcccttggggcacatgatgttctcggaaagcggcttcaaattctgcccaggcagtgctggtggggcttccttcttccgttcagtctggcatccttgactcttggtctacttccggatcttcttagtgggggcgagcttctttaacttcttatcgtaatccatcttcagggtttggaaggcttcacgagtgttggcctcttcaccttctgctatttcgagactttcttggagggacgtcttctactttttaagttccttgacctgttgctctaagctttccacccgggagtttaggtgggtgaagtgggagaaaagatcgtcgtagtggttatcaagtgtgtggacatatctggccatgtagactatggtagggtcatcttcagtaggatctctt

SEQ ID NO: 102914 - DNA, 407 bp, Zea Mays
aaacataaacttaaatcatatttatacccctgggaaaccagaaaccctaattggaaccctggaaaaaccctaaaactaaaccctaggggcctatgtgcaaaattagtccactttgggactaaagtgcaaaaaccaagtcaaataagtttcttaaatcaattgggtcacaaatatgtgaatttgcaagccaaaccctaagttttggatcaaattgcaaaaatcacctcttaagcactatagagcctaagtctgaaatcagtgggttttcttcaactttgaacccttgtatctttcatgttctagggattttgccctagggcaccacatcaaagttgtagacctatcaaaggtgaacatttttgcttaagaatgtgagctcagttgttaaaaagaatttagagataaat

SEQ ID NO: 102915 - DNA, 298 bp, Zea Mays
cgatcgtaatgggtgaataccgatctagtcaagatctagtgccaacacttagccaaaaggccatgatggggtttctagggtatagcccatgttctgttaaggatgagtgcaacatcctactatttattggatttattattttgaagttaccgccttagagatcatgactatatttaaacaactgggataaaacatataataggcgtctacacactagtgactctttgtaaaagctttgaagagaaacccgccgattcacaatttgtagtgtttaaatggagtgtcatgcccctatgca

SEQ ID NO: 102916 - DNA, 489 bp, Zea Mays
tggaaatacaaaggtcgtcttctcttatctgcataacgcttgtgacgatgttgtgctatcttcaaacgctgttggataagtttcactttctcttccgccttctttactaaatctggcccaaagaaaaaccactcaccgggtcctgaccagtttagtggagttctgcaccgctaaccataaagagcctcaaaaggtgccatcttgatactctcttggtaactattgttataggagaattcagccaatggcaagcactcatcccatttttcggaataggctaatacacctgcccttaacatatcttccaagatttgattcacccttttggtttgcccactggtttggggatgataggctgaactatgaattagcttagtatcaagagatttgtggaagtcttcccaaaatctagagacgaattgaggtcctcgaaaagacactatggtcttaggcacaccatgcagactcataatccaagcaatatatagt

SEQ ID NO: 102917 - DNA, 427 bp, Zea Mays
gattgatgtctgtccaaataactgcatgcttttctagaaggggcacgagaaataaaataggtgctttaaatgtggcaaaacaaggtacgtctaggtcgtaaacgatgacggtgaaacgatgacaaggatgttgctcacaggcaatttctttacatgcccatttcacctagactgaattgactgtttcactctaacagaatggccatgcacatgcggtggcacaaggaagttgagagggaggacaaagaagtgatggcacacccttaagatggagacgcatagatggctctatacaactttgatttagagtttgcaaaggatgcgagaaatgttcgtattgggctagcgactaatggcttcacaccttttggtcaatccaccgcatcctattcatgttggcccatgtttgcaattccataaaatcttc

SEQ ID NO: 102918 - DNA, 382 bp, Zea Mays
aagaggtctctcgtgaagaggtccacgccactggaccacccgtctctcgtgcccgaggggcaccccacagaggcgaacgaacattggacgacatcctcgatgcccagagcccgtaccacaaatatatgtgccacaccctttgaaactgcagagacttcaagcactccgtcgggaatggccgacccttcgaacctctaccacctcccccaccacgaggagggcccagagaacctcgacaacctcaacaacaggaagggggaggaggtggagcattcctgtgcgtcgacatagaggtcaacgtcatctttagaggacatggatcgcaagagaacaaaaggcaacagaagctcaacgatcgacagatactggtggcaaccactag

SEQ ID NO: 102919 - DNA, 788 bp, Zea Mays
cgtttggacccattcctctctccttgactctatggatggtgggtcccactaggcagcagcatcaccacgccattttgtttttgctcgcaccagacgctgccgcttcaacggactcagcccagttcatctctctgccgcctcgcctccactgctatgtagtaaatgccatgtcgtcgtcgtgaccgctcgattctcctccccgctgcccaacttcttcccagccgcacctctcgcacaaacgccgccgtaggccgctcgttgcttgcccacacctgcgactgctcgtgctctcggatataatagcgtcgcaccacccagctgaaacgcgccaccgtttccccttcctccactcgtggcgactgtttcttcttcccactcgcggcaaccattaatggccatgaccggcagtttctcgtctcccagacctcttccctgctcgcccgctcatgcccttcccctattgacagtaccgccatcgcactgactatttcccttcctcccattaactctagcagtttcaatcttacaccatgcagccatcaatggcgtgtaacgtagagattatagagcattcaagcgtgcactaactcgtcctcttctcactggcgtccattacaatctccctcgccctataaaaactgcatcaccagatcgtgctcgtgcccatccgcccgcctggcagctcttcctctacgcctctctggctctagccgcgcagtcgctgtactcgtgtgggaagccccctgctctccccgtcactagagttagcatcccacggccttgccgat

SEQ ID NO: 102920 - DNA, 275 bp, Zea Mays
attagatattggaatttaattataaattgtatacaaaacttgtggggaattttatgtagatgcctatggagtttttgtttgttaccactgctatcataattttaaagttatgaaattgttaagcagcgcctctgcagtttggtgggtgtggggagagttgttacccacggcggggtttgagattgtgcgtaggtgcgacgtcgtttatgagtgttattatgtgaaattggtgcactaagttgtgtgtcaaaagcaggtggtggacttccggatcg

SEQ ID NO: 102921 - DNA, 272 bp, Zea Mays
aagaatgatgccgaattcgcttgggggcagaacagcaagaagcatttgatctcatcaaaaaatacttatctttggctcccgtattaaaagcaccacgagcaggagtaccattccgattatacattgcagctgaagataaggtcattagggatgttctgacacaagaaactgaggggaaggagcatgtggtgacatatctaagccgaaggttgatggatgctgaaacaaggtacacttttattgagaagttatgcttatgcttgttttatgca

SEQ ID NO: 102922 - DNA, 342 bp, Zea Mays
tctctatatcccatgcgaggtaaaagtgtccacctcatcagagcatgtagaaactttgcaggtgtggtgaagtccgctagagaacgcctcaatccatttgtgaacggtggtcggatgagaaccgagacatgagcaatacctggagcaactccaccgtgagggcgacgagatgggtctgcagaaccatagcaaagatcgtgtagcctcgtcgatgactcaagaaaaccaaacaactctctgatctgattagcatgtaaagtgacattctctcgcttaaagcaaaatctcatccactggtggtcgatgtcaatccagactatagcgtagaagactttgaccgac

SEQ ID NO: 102923 - DNA, 884 bp, Zea Mays
cttgatttgataccacttttcggacctagatggctaaggagggatgaatagcctataaaaattatcctacacacccacaaataacagtaaagcaatgttggatactataaaagatgtcataggaacgtatacttgctctagctaaagtttactccatgaaagctccctaaacaattctagtagcttggcctctagtatatataccatgtgtttggttgcccgcgtctgtcggtgcaaggcccatcgatgcaaaaataaaatgactccatgtgttcggttgactgagctcgtctctggctaggccacactcatgcaaatgatacagccaaaaggttcgttcctcgcgaaccaggatgcgctcggccttgactgcatcaattcgcgtagtcgcgctagggttcctctcatgtctcatctcgccctccatctctcatgtctcctctggctctctaggtgctctcctgtctcctctcgccctcaagctctccctcatttttctcctctcgtcctcgagctctcacaccctccactcccctcgctgttaaggatctagttccttccaggtttcgacaaaaggtatgaagtttgatattctctcttgcactcttcccctggccacaagatctttgtataatttggttgcctgtcttgtgaatgttttcttagatttgcgaatgttgagtaatattggtagttgtggttgtgtatatcatggtattgtgccacgtttctcgaatctggtgtagcttgaggttgatgttctcagatctagactgttggaactagatcctctctctatttttctaggttttttaagtttagttgtccccaagtgttgaactaaccacttgtttctagtccttccatgggaactaatcacgttc

SEQ ID NO: 102924 - DNA, 368 bp, Zea Mays
cccaggtcgataatgatgttgttaggtattccaaacctgaacattatttcctgaatgaactccactgcttttgccgaggttaaagaggcgatggggttgtattctatccactttgtgaatttgtcaatggcaactagtatgtgggtataccccccttgagctttctggaagggctcaatcatgtccagcccccagcatgcaaatggctaggtcacgggaatagtctgcaactgctgtgcggatagatgctgctgctgtgataagaattggcacgcctcgcacttctggaccaactcagctgcatccttcttcgctgttggctagtaaaacctagacctaaaagcctttcctaccagagtccatgacgc

SEQ ID NO: 102925 - DNA, 598 bp, Zea Mays
cagggatcttcatatctctgagactgataaatattgggagtctaccaatctgcacaagttctacagatacataaattctctctgcagaatgactctcattccaaaaggaggtaatcaaatgaatatcctgggagagagcaaagtcttgctctcatttatgaagccaaatagttctgaaagcatcaatgtatttgatatgatttggcaagaaatcatccatgttgcctgcttccctctcaagggatgtcttcacgcccccttcatcatgaagatgattgaagtggtgactcagtttcgctttgagaaaggaacaagacatctctcctacacccccttctggattgatccaaacaatccagcagggcgtctgaggaaagccccctccagctctcgtggacatgctgctgccggtccctcgcgtccctctcctggtcgcggatctcccacaccacgtggtcgtggtcgtggtcgaggttgtggtcgtgggatgggagctcgactggcccatggtattgcagccttcttttccatgtgcaggaacatatcttccaatgtgcatgagctggcgaggcgtcagcgggagactgacgacaacctt

SEQ ID NO: 102926 - DNA, 412 bp, Zea Mays
cgccttttgggcactaagattaaatgcattcaatctgattggggtggtgaatatcagaaaatacacaataccttttttcgctctcttggcattgctcatcgtgtgtcatgtcctcacacccatcaacaaaatggatccgcagaacgcaaataccgtcacatagttgaaactggtctagctcttcttgctcacgctcacgtgcccctcaaattttgggatgaagcttttctcgccgcagcctacctcatcaatcgaatgcctacttagggtcattgacaacaaaactcctatcgaacgtctttttggtaccactccaaattattctatgttgcgtattttcggttgtgcatgctggccaaacttgcatccatataataagcataaactttcttttcgctctaaggaatgcgta

SEQ ID NO: 102927 - DNA, 403 bp, Zea Mays
gaagcgatcaccacaagaagaaaattgtggtccgctggggaagtatgaaccaaaacctctgtcacatggtccttggccatatgatacacgaccagcaagcattccgttgggcacgaccaccacatagtctcactgcctgagacctagcggcaagaggcaaaacacctctaggcctcccaggacgtctctgaacaggctgagcatgaacaccatgagaggggcggtgcatgtccttcctgctcgactaagaaacccgccactcatctctcttcctcctaaagcaaaaagaagctagatgcccatccctctcacaatggtacctcacctctctcttgggtggattttgtttgtggaagaggattttcttttcggatggctgaggggctctaggaaggggatcgct

SEQ ID NO: 102928 - DNA, 310 bp, Zea Mays
ttttgttgtggctggatggccaggatcagttcatgacatgagagttttcaaagatgcaattggaaaatatggagataggtttccacatcctccggaaattccatcttgtggactcggggtatccaaactgtattggctatcttgctccatacaaaggtacaaaataccatcttcccgaatttcgtcgaggtccaatgtcaagaggtagaaaagaaaattttaattatgcacattcttcacttagaaatgtaattgaaaggtcatttggtgtcttgaaaatgaaatggaggactctattagatctccctag

SEQ ID NO: 102929 - DNA, 332 bp, Zea Mays
aagaatgaagaggagtcggatgacaaaactgcagcagaacgcatcgcaaggcaatcagctcactacaccctcattggggaggcactgtacagaaggggcgcaacaggagtcctcatgaagtgcattctttcagctactgggaagcaactgttagatgaggtccatgccggacagtgcaggatacacacaacatccaggactctggttgggaaggtctttaggtctggtttctactggccgatagcaaaaagtgatgcagccgagttagttcagaggtgtgaagcttgccaattcttgtcaaagcagcagcatttaccagcacagcaactgca

SEQ ID NO: 102930 - DNA, 396 bp, Zea Mays
agggctagtcgggtgctggcacagatgagtgattacgctatttttggggagatgcttgttgcttgtctgatttctaatgtgcttgtatgttgtctttgtagtcgatgaatgatgaagaggtcaaagacttcgccgacctagaaagttcagtagcgacacaagacgttggcgcataggcgcgtgtcgtagagtaatcatcgctcgcgagggtcggtggtaccgaccatgaagcgacagggacttcgctgtcgtctacctttgagcaggtgtaatgataggagtaggattattgtaacatcacttttgctatgtgttaatacttaaagtcggctgctgcgcaggttccggcgactgggcctgcgcaagcaaattttggcctattgggcaagaggaaag

SEQ ID NO: 102931 - DNA, 1090 bp, Zea Mays
gtctgtccagtgatctcactcagcaaccgtcctagccagactccttgacaggccgcagctgctccagcaagtggagagagctaaaatccactgtttctgcgactgccaagagatggggcaagaacctagcaagaacaccatgccagaggtgctcttcctaccatcgacatcacccccatgtcactgtcatcgaaccaatcagcttcaactcctctatcatctttctccgagaatatgagggcccagggtcataattgcctgcaatatacctgagcaaatgcttcactgctacttcatggtctttgcgaggatcctccatgaatctactcacataccctacgacaaacgtgatgtctggtcgtgtgtgagtcaagtacctgaggcctccaactaggcttccatatcgtgttgcatttaccttctcagcattgctggccttgcttaacttaatcttctcttgtattggcaccttggtgggattattcaatttcccatcctagccctctccagcaacttgcgtgcgtatgcgccttggctgagttcaatggcatgtttgccttgcctcatctctatcccaagatagtacaggagaaggcccagatcgctcatcttgaactttgctgccatctcgctcttgaatttgttgatttgctgctgctcgaagccgatgatgatcaggtcatcaacatacaccccgaccacgagcacatccatccttcgtgcgttgggtgtataatgcatgctcggatggacacttctcgaagccgagtgtggtgagcgtggcgtctagcttcaagttccatgctcgtggcgcttggcgtagcccgtacaacgcctttcggagtcgcaacaccttgtgctctcctcccggcgacgatgaacccgggcggctgctgcacatggaccacctcggcgagcttcctgttgaggaaggcggatttcacatccaagtgatggacgctctagtcctttgtggttgctagtgcgagcagcagtcacactgagttcattcgtgccaccggcacaaatacctcttcgaagtcgattccctcatgccgcatgaaccctttcgccaccaacctcgccttgt

SEQ ID NO: 102932 - DNA, 798 bp, Zea Mays
gttgacactaatattttaatgactgcgaatgcaacgccttttaatggaaatgtgtctgagggttctgaacctaggtcatggtcctcggacggggatgattttgggagccctttttcgtggattgaggagtattcttaggaggatttagactactttgctgtgttggatttggccgcattggagtctctgccgcaacctgatgcacgagaagtgtctgccaccccggccaaggcgatggccgaagacccgctcaggcgaaaagtggtgttgaaacagagcattggcatgacatcacgaagtgggagacgtcgctggatgggtatggagcggtcccgtcttcgactagatctgggtagtcaacgcgatctactgtcctcgacgtccggaacgtgtattggggagggggacttgcagaatctgtttaagggcgaagagttaaggatgatgttgtttaatttccgggaggttggtcttattccgaaggcggagcctatgtagcaattttgctggcctcgctcttgtgttgcgatagtgagtgaaaacgctaccctccccctcttcgcaatagagaatgagggcaacaaaatgtgatttgtattattgtgcgatgtgtccgccgggccttatgctttatttatgtaacctacgatggcatattgcgtgctgtacttattgcaagattgcttcaatttgttatcgtgtttgcgtgacacttaggtgactttgcttcctatgggtgatgtcgcacacttgttgtgcttgcccgactgcacccctaggcgacttttgctcggtcgt

SEQ ID NO: 102933 - DNA, 425 bp, Zea Mays
gtcgacagtgacactctcatccatcaagtttttgaaacagaaacgggagatgacgacaagcacctcatcggtatctatgtccaggtcctcggcacagaccgcctctaactttgccaaataagtcaattgttccttgactgttgggctcaccttgcccaggtacattctactgtgcatgtacatgttttttcttcttgtcttatatgcctcttgtcttatatgcctgtactttgtacacatattttctttcaccataaagcacatgaaagccacaaaagaaccccacaaatatgcataaatcattgtcttaatgactctctacaagcaatcttagttgggtgagaggctaccgacctataatggtaggaagaacctgtacacagctggcccattgtcgttttcttcacatgaatttcatatcagtt

SEQ ID NO: 102934 - DNA, 407 bp, Zea Mays
gacctctgctggtacttcttcacaaacaggagcagaagggccagcatcctggtccaagcatgacattcgctgaagccgtctctttttcttcttctcctcctcaacaggcacagttgggaggctgacttggcgaggatgctttgagagaataccctcaggattttgggtgtccactattttgtcaagctcttgtataatcgtaacagccattgcttcagcagggggcgagtcagaagattctccagccaacatattgagtacaacatctatttctgcatcatctagacttgtcggcatctcaaaatgaacttgcctctcatcattgggaagatcacaaagaggagcaaccagaacctcaatgtcttcaggagagggtcgcactctaagacccagaccactatcaccag

SEQ ID NO: 102935 - DNA, 567 bp, Zea Mays
tatttatttatttattttgtcgcacgcgatagcgagtctttctttcagacaaccagtccctgtctcgtgggaggtgagaaagaaaaatctgacctgctgatgcattcctctctagctagatgattatatatggctagatgattatatatatttctttcagattggttaatacgatggatagacgatacattaccaacttgtggaggtgagggcgcggaaggagacttttagggaggaacaggaacagccacgaccacgatgagtccttggcagtgcatgccgtcgactgcaacactactacacgtccatcaggtaacagatgcaacaaggcgtctgccgcccatcaggttcagtcacctaaatgctccaaatccaagaccacgtccaggtgtgtgatccatcaactattttttcaaacaaagatgcagagaattagcctgtcctgtccaactgttggtaaaaatgtttgttactatccacatctctgtcctgtccgcaacgaaccaaataatcatcgtgggaagaacccccaaacctattgtggcccttgtaatttcttctgtagct

SEQ ID NO: 102936 - DNA, 567 bp, Zea Mays
tcttcttctcacgatggttagcaggcggcggcgcttctatccccgcggtggatgacccgccggagttggccaagccgccaccccagagccatgcccccctaatccgattagtcctacacggtctacagagggagacaaatcaattgagaagatccctaccaggtttcgtgaagcagatacgggtgaccacgtcgatgtacgaggccgcgatgatgtgtctgtcctccgagcaattcatggcgccccatggttcctccttcccacgtgacgctagaaaccctccaggagatcaggagaaacacccagagccaaaggcgagccctcgaagacggcgcaggcgcatatccatgacattgacttcatcatcgacggcggatccccttttctccctctctgctgtttctccctatctggtgcttctttgtcgaaggtgttgcaagtcaagtcgatgggtcgaggcggcctatgattctccatatatatgcatgctccggctgaagaaacggcatggccgaggaccgcgcgaagcctcgaatgctagccgctccgattttgccgcgccgcggg

SEQ ID NO: 102937 - DNA, 970 bp, Zea Mays
aataaggaatttgcctagggtcaacacatcaaacttgtagagctactgtaggagtacaactttgcttaagtgattaagcattgttgtcatacaaaaagtggagataattagccctaaagtctggctgtcagaccactcttagactgaatactgactaccagtgagttctgaggaactttgggctcgattcatgctgaaaggaataagtaaacgggcaagatccctatagcagaattgtagctggtatatagggctacaagtttgttacaaatggattggcaagttcttgcacaaaaatccaagatctaggcattgcaattctatctgtgaggcactctgaatcaggatttcgatggtacagtgttcagatcagatcgccaggttcagttcatctcgccgccggtgatcccacgccgtgatcctcgtcgccgttgcgattcgtgctctgtgggggtgcagataactcttaagggcaagaaatatcgcatcgtggatgaactcaggccactgttccgctccggccgtcgtgcccgcctgagttacggccgattcggatgaactcaccggagatagccatctatcgaccatgcgccacgtgccttggtgtcttaccacgtcacaatagctcatattacacacgttcggtgatcgccggtgagcccgccacgatgaaagccaccaatccgtacaggttcgccggagctcggcctggcgccgttcgccgtcgaggaccgcaggttgtgaaggattagaaagtggagggcctcggtgtaaatgtcagtgacccattgaaatagtgtgcgggactattagccagtttttcaaacgaccgaggacccttgcgcaaagttggcaccgcgggcgcgtgcggacgcgcgttttctctgttctcgggccgacttggatcagattcagcccaatactattgaccctttctctttttctttttctaccaggattagggaatttc

SEQ ID NO: 102938 - DNA, 384 bp, Zea Mays
gcgatgtgtttcaaagagttaaggccgaacaccaaagactagctggactattacacccaccaaatatatccaagtgggagtgggaagagattggtatggacttcattactggattgcctcgcacctcgaaaggatatgattctatatgggttattgtggatagcctaaccaaagtggctcatttcattccggtcaagactacttataagagatctcaattggctgagttatatatggcttggattgtgtctctacacggtgtaccgaagaagatcgttttggatagaggatcacagtttacctctaaattttgggaaagttttcatgagaatatggatacgaagttgaattttagtacggcctatcatcctcggactgatggac

SEQ ID NO: 102939 - DNA, 436 bp, Zea Mays
accagggggatccgggtcaatcctcttcttatcctccgccccaggatccctcaggaagctaccctcccccagctcagtctggggaagaacactttgcaactcacctggcgcatcagttctttgatcctcctcctcctcagtggtaatatgtggttggtggttctctctttttggttctagttgccaaaaagggggagaaggattctcatcttagcagtacttttaatttatgtaatgaacaattgtctgtaataattattcgcctgacttgtgatgcatgtggtgatggcttagagccacaaactgtttaatgacgtgatgaccttattgtaatagccagtagtaacacttcatatcttatgctatacaatgatggacttgtttgtttgctattcttgttatcatcaaatcttaatatacttttgttgcatccctc

SEQ ID NO: 102940 - DNA, 437 bp, Zea Mays
ttcaaaaaccttgccacaacgattatgtgcagttaccactcccttagcacctgctcccctccttctctccctttcctatctcttaccactgtccactggaatcctatagttcacacttcacaggatgtatgtagattgcatagttcacacttaccaagaccgattaggcgtcctaatcgttaccctaatcacgattaggcgcctggttggtcctatagcacgaccagctggtcgcccgacttgtaatcacttctatcaatgctaacacattcgagaaatgtatcaatgcttaaaggcaaacaaaaggttggatgggcatcgcggatacatacctatgatagcaccacaatgcatatttgcatacggttcctcaccagtcaagagcttccataaaactatcccaaaagagaacacatccacctgcatgtgtaaaacca

SEQ ID NO: 102941 - DNA, 537 bp, Zea Mays
ggtcaattggctgccttttgctttaggaggaagagagatgagcggcggggttctaagttgagcagagggaacatgaaccacccctctcatggtgttcatgatcctcctattcagagacatcatgcgatgcctagaggtgctttgcctgttgctgctaggcctaaggcagtgagaccacagggtggtcatacccgacagggtgctgatcatgtgccatatggccaaggaccccatgctatagtggctttgattctcacttccctagcggaacacggtttccttctcgtggtgatcgctatcccccatgggaccagggatgtttggtgttttccctaacagttttcaggggcaaatgctacaacacgagtatccttcacactttactaaccccagtgttgtgccatttgctcacctcgtgtcttattattgatgctggatagaagcctggagaacatgtggctcatggattcccactgttcatgccacatgaccgaaagttctaaatggttctccagcctcgaccccatgattggtaag

SEQ ID NO: 102942 - DNA, 592 bp, Zea Mays
atcggattgaggatggtatgcactactgaggcacaactatgttcctgctaacttgaacaattcctgccataatttactattaaacacggggtctctgtctgaaatcattgtagctggtaaaccatggagtcgatatactgcatacaagtacagtttagccacagaaagagctgtaaatggatgagccaacgacagaaaatgtgcatactttgaaaacttgtcgactaccactaaaatgcagctatacttgtgcgatggaggtaacctagtgataaagtccaaattgactacatgacacacgtgagctggaattggcagtggtaaaataaggcccgggtacttgacttgatccggttttgcttgctggcatataagacaggattgcacaaactccttaacatgttcttcactctaggccaaacaaatgtaaaaaaatgtttaatctttatatatgtgagtatagttactaggcaacacttggagcatgtaaaatgagtgacgtcctttaactcctcaccattgccatatcaagatgttttttgttttactctattacaacttcataattttcattttttatcatctttatgaa

SEQ ID NO: 102943 - DNA, 294 bp, Zea Mays
ttatcttcttggcttagatgagcgtagagtcgcatgaagcttctttcatcctcctcatcctcatttgtgcttccgctatcattttcattagccacacaacatatatgggaatcgaaatgggaagacaaaccttttggagaggtggattcatcgtttggtttccaacgttcattttcttcttccttcaaagagttagtttcacaaggactagaggaagtagaagcatcatatgaactaacatgtttggactcatcaaatttacttctaattctagtccaaatatcatgcgcatca

SEQ ID NO: 102944 - DNA, 490 bp, Zea Mays
cttgtagttcagtagctatatttggctttcctttgatctctatcgatatcttcattctgcttaatacatttattgcgtatactgtatggatgtgactgcttcagaaaatctattgaaaattcctggccgtccaccccccaatgggtgtcaccaagggacgtcttggtacgcagggcgtttagcacactgtctaggagtagtaacttgacgtgaccgtggggagtaatcatatcgctcaagcagttgaccttaacccaaatggtgtcgtgttacgcgaagcggcgtctactgcctgacttgccttcaggcgatttgaattgcttattgaatacttgcgactgttcgatgagtgtggtaggagatgaacagttgcctccggcccatataaatagcctggttgccccgttattatcttcacacctcctctgatcatctgttgcttctttctcgaccccctcttctcttccatctagccatggacaaggacaag

SEQ ID NO: 102945 - DNA, 321 bp, Zea Mays
gggctatgtccattttggaaaaggttggctgtgatcatgccaaggctgtagttcaaccagattttgccttctcggccaacgatgttagaaacccttcggtcaaagctactacactaggcgggaagttttattccgaagtatggctgaagggtggtcgagaaatagctaatgaggccattagaaaaaatgagaaagagtctcatgacgccttagaagaggctaatagagttgaagaagctgctgaacgggccagacttataggtatatcctttatagcttagcttcataaatttttctagcttcggtgctaacagatatttg

SEQ ID NO: 102946 - DNA, 692 bp, Zea Mays
ggaaatagatgtgtagctaggtggctatttatataggccataaaggctactattactactattaggatgttgtagaagcattcgaaaaattagtttggtctgagaagacgactagaatgagcatgcatcatgattgtcgcataattgtctcttgtgcactaacatgcttctctcacctttattccgataataaaaacttgggaataatgcgatgtattgctatgttagaaatgccttaccccgtgtcagattggtaagtcttgttagttcgtgctatgtgtttgtcttgtcttgctagctaggtgtattgtaattgttcaaccctctttgccaataaaaaattgttgcctgttttgcccataaaaaggcccctccaaacaaccttgagtttagcaagtgaaacccttgtaaaaaacatgcttgtgttggtgttttctaacccttgtgtgtttcccccttgaagttgcacctgcacggcttgtagacacccatagcttgacccctaaatcgactaaaacttccttgtgcacttgttgtgtcaaaaaaatcgtttggtgtctagttgcgcaaactctatcaagatcatgtttctttccataaatccttgctcctaaaacttcatagcatttctgttaatcatcctagccgatcatgtttgcctttctctccttttgcctaaatctggtaatcct

SEQ ID NO: 102947 - DNA, 515 bp, Zea Mays
gataacctaacctcagatctatctttgagaacatgctggctcccctcagctagtcgaacagatcttctattatgtgcagagggtacttgttcttgattgtgacttcattcagagctcggtaatcaatgcacatcttcctggtgccatctttcttttccacgaacaggacaggagcggcccaaggtgaggtacttggtctgatgtaacctttctctgacatctcatctatctgcttcttgagctcaaccaattctggtccagataccctgtaggctcttttggaaatgggggcagtgccaggaataagttctatggcaaactcaactttctactcaggtggcatacctggtaaatctttagggaacacatccggtatttctgacacaaccttgatagcctcgagtggatcggcctctttgctatcaatagccatctagtgacaaccttctttctttggctcgggtgagactagctcggtcaccacttcttctcctagtgaggacaccaacttcacc

SEQ ID NO: 102948 - DNA, 551 bp, Zea Mays
cttcatttctcaactcaatcacctctgaacgaaggttgttgagtgctatggtacaactttcatcttcagcattcttctgggccctcagggcattactaagaatcaagccctgtaaagaagaagcaagaattgagtatgacaataaaatacttcgtttctaacttcaaaatcaacttttataccttaatgctattatacgcgaggctatcagcaaattcatcatttgacaagaccaaaagaccttcttctagtttcggaaatcccatactcctagctatctcctggcacacggatatttctttgttatccgggagacagtacaagaaatcatcttcattggtaccatagaacactaaggcccattttgaatatttcagtctttgggcatagtgtttggcctctaggatttcttcctgggataatttcttccccgaagcatgtcgaatattgtagtcaacatcttcgttcagagcttcgggagcaggagcttcggtcttttctagaacaatctgccctgctattttgtcttcaagcgcgacaggcttcatctc

SEQ ID NO: 102949 - DNA, 439 bp, Zea Mays
tcaaaccgtagttcctattgtacatccatcatcacctcctcaaacttcacatgctgctccttatcctcttttcaacccactatctccaccacaagcatcgccattcagggctccaccaccttctcctcatctcttggagacccactgtctacaccaccagcaagggatccaccttctccacagacatcaagggatccactgccatcaaagaaacctaaattttctataccaaaattggtgtccacgttcgagaaaaagaagagtaaaactactactgctggcacggttcgaaccaaaaggcctttgttgcattcgaggacatgtggataatgatgaaccttcaaagactcgacatgcaacttgtgatggtgtttgcattgaaagtgttgctcatacttccacatatatgtgttattattagtttgttatataaattttc

SEQ ID NO: 102950 - DNA, 291 bp, Zea Mays
catcgcctcaatcgccctgattttctccaggtttgctacaatgccccggtgtgaaaccaggaaccccagaaacttccctatggagaccccaaagacacacttgtccgggttcagctttgtgcgggttgcccgcagcttgtcgaagagcagggttaagtcttccactagggtcgaccttgccttagtcttgaccacgatgtcgtcgacgtacacctccactttgtccctgatgaggtccctgaaagtcttactcatcgcccgcacaaatgttggcaaggcatttttcagacc

SEQ ID NO: 102951 - DNA, 451 bp, Zea Mays
attttttatagtcaatagtgggtgattaggagagcataggtatcgagctacatattatgtaggatatacgctggacaggttgaggtaagaaagattatggcaatgagaagactttatccaaaatgtttaagtcctgattcatctcgagattcgttttggctgttatatccttccttgtcgatgttgatcttttcttctccggtcttggtctcattggtttgaggttagtgtatatcatcagggttggggagtgtggttaagatagatctggatgagatagactacataatgtaggtcaagttgttgggtatggccgagttgatctaagtcaccaatttaggctcgagtgaactaggagtatggccttatcttttgtacccgcattaagtaacttactcttgattagatcatcatagtttagataaaatctagattaggttgtgtgggggga

SEQ ID NO: 102952 - DNA, 351 bp, Zea Mays
ctgtgtggtcgcgccatgcttttgtttgagcttggtatttgtttagagcctgtagggagaagacgtggtctccatcaatgaggtccttcgaagtgggctcatccacgtcggggacggctgacgggactgtccgtggtgacccgtgttttatttcttgcggggtcatggcctctgatccatatagaaggcggaaaggggtgaacccagtcgccctgcactcagtcgtgttcagtgcccagaccgcttcaggtaacaggtcggcccacttgccctttttgtcgtcgaggagcatcttcttgacggctgtgaaaattttgccatttacgcgttccacaactccattggattgcg

SEQ ID NO: 102953 - DNA, 464 bp, Zea Mays
atttctaggatttattttaatagtgctcggaccgaggaaacaaaatcccgagagttcaggggctaaatcgtgaaaaacggggtctaagtgtaattatctttatacatgtgaggatggcgggttaatttagacaaaggtagagagcctatttgcaaccttcgcacggtcgaaggggtatgggtgaatggtggtcgtgcgatctgaatcgatggccaggattaaaacttcaaccggtacacgatagtggccgattgatttgcaactgacgatccaagattcgccacgtcagtcaccaaatctggtccgcccagatttcatcgcacggtccggattttattcataaagctgtacgcggtcgtctaatctcgcccacccatttggatcgaacgaccctcacacaccaacacgagtgggcacgacatcagctaatcctcaccgttcaccataaatcgacggcaatcggg

SEQ ID NO: 102954 - DNA, 323 bp, Zea Mays
cctgaaacaaaattcagagatggttcagagtttttaatgaagaaaacatgaagatggatgcaaaaacaactaaaagaatagcaaacaagcacttcatttggaaaagaatcttttatgcaaagcttatagtcaacaaaataagggatctgtcctagcagattaatcttctaatgagtaaaaggggtaatcataagttcataactatttaatcaaagaggcattgatacaaagaaattgcacaatacactgaatttgttgcaaaaatagacggatcgcgaagacattttcttgtaatttcagtgatgccataaaaaaggttacca

SEQ ID NO: 102955 - DNA, 362 bp, Zea Mays
tgatcccttcgggatcacctctaataaatttttgctcgaatgagtaagcacccacctttgcaaaacaatctttcagcttcttggcacaatccaaggatttttcgtaatatctttccttcgaatcccgaagctcatctacattcttttgcaatcttgcgctagtccactcgcttatttcctgctttgccttagccacttcaaaatcttcattcttctcagtaagctttttctttaaattttcaattttagctctatgagcttcggactgcgcggcaagattggcttcattagccttgactctgtccactaaggaaagcaaaattttatccttctctgcagcttcattcctcagtttgataacc

SEQ ID NO: 102956 - DNA, 870 bp, Zea Mays
cgcccgtgacagatagcaatttgggtcttagagtgcgaccttctgctgaagaggtccgttccttagttgcttcgctcggggagatacctgatgatgaacggtagatttattttgaagtgcccctaaaccctagtgacgcagacataaatgacatgctcgatctgctagctgaggattcgtctgatactgctcctgatggtacattggcggtggtgccgcttccagaggttgatgcgaccttggatgtctcgaaacctgtcaatactcgcccgaggcgtcccagccgaaccagtcagcccgagccttctgctgatgagcagaagaagaaaagaagacgcctccggcgagtgtctagctttgatgaggatgccagcaccttagctcctgctgccgaagaaatgactgcaactggccttgttgacattgaacccaatgggtgtgccccgcctgctgctgaccccaatgaggatgttgtttgtgctgttgctgtggaagatgaggaggaagagaatgaaactccattaactcggaaaaacagtcggcagttcgctgctagtggtggtagtagtggggttcattctcctgccttgtctgctcttattggtctgcaagaactgtccatggccaattttgatcaagctctagaggatatggtccctgagaacttgctgttggaacctgcagacgttgatgcaacagaaacttgtgcggccgtgccagatgctgggttgaggtcgtcccgtgcctcgtcgaccttagagcacgatctcgagggccgggatgacgacttggatcgtcctgatcctatggaagtagctgaaggcccgtcgaccttagaggtggtcacggcagagagcttggatcccttaa

SEQ ID NO: 102957 - DNA, 321 bp, Zea Mays
gttcggatgatctaaaataagttgctaactgttaaaaaggtattgcctccatccttttatatttgacgccaaatagtacaaaattaaactaaaaacgtcaaataaaaatggagggagtattagcttgtttcccctcttgccgttgcagatgataaaagtttagtcgttgatccaaatgcgaggcctaacgtggtctctcagtgacaagttttgtgatccctgtttggatccatctgacactgtcggctaattttagcaccttgtactccaagggatgaataataaattggttaattattagccggaaggctgacaaattgt

SEQ ID NO: 102958 - DNA, 424 bp, Zea Mays
gcacaagctttgttcagtgtactcaggatccagatgaatacctctagtcattcgtccgaagatttcttcgtcttcgaacctaggcactagcagtctaggatgacattgtcatcaaggccatggtcaaggggcttagacaagggccaggaacccaatactttgcaagaaaacctccacactctattgagaagttgctgtagaatatggacgaatacataacagatgacaatgatttctgtgagaggagggaggagttacataggtacatcaaagaagccagaggcttcaggggaaggttccaccccaggcatgttcaaagcattcacaacccaatgcagggtgaggaaaagatggcccagtctcaaggtcagtcgggccagcaacaagcaagctcccagcagtaaagaagctctcaacaccaacc

SEQ ID NO: 102959 - DNA, 283 bp, Zea Mays
aaaaccaacgacagcctggagaagatgatcaaagaacatgagaagctaaagtgctctcatgatgatttggtccagcggtatgattcaattttatttgagcaaagaaataatgatgatgctttatctcgtgttgctcaacttaaaatggaaaatgccatgcttgagagacaagtagaattgttaagtcatgataaacttgctctaactgaaaaatatgatttattgtcttgttatcatgataatctcttggatagacatatcatgcttgaagttgctcatgagg

SEQ ID NO: 102960 - DNA, 348 bp, Zea Mays
gtcatgctagcaggtgtgatcaggaattacctccgcagggggtggctcctctcacggccaggaggctaccacttttcaagatgatcgtcaacgctccgtcggaggggactcggctgagcgccctacccccagcgacgaggaggttgcttgctggctcacggaagccatggaaattcacaaaggtgcggatggggctatcgtcacatatgtcttcctaatcctaggtttccctctaatgcgtcccgagccaggttttgtggagtttataagttttcctgattccactctatgttccctcttttttctcatcggtttcacaccatacgactccctccttccttgatctag

SEQ ID NO: 102961 - DNA, 310 bp, Zea Mays
gatatctcttgcaaagatgtgtttaatagagtccaaaatcacaaggatgatcatgctctttggtccgacatttgcgctttacatgaagggatcaagagtgagtgtggggaatgttatcacattgtgatgagaaaattaaattcatttcaaatgcttcgcaatgaaaatgcgaataacatgtactcacagtttaatatccttgtagaagaagccaatgacgtggggttcacacaactcacacaaccagctgttgtgagggaaattcttagtgtgttgcctatcaagaagtatgggcacatatcaccgtact

SEQ ID NO: 102962 - DNA, 363 bp, Zea Mays
gaggcctcattgcctcaattgccttgatcttctccgggtttgcttcaatgccccggtgcgaaaccaggaatcccagcaacttcccagcagagacaccaaagacgcacttgttcgggttcagcttcgtatgcgttgcccgcagcttgtcaaagaccagggtcaagtcttccattagagtcgaccctctcttagtcttgaccacgatgacatcgacgtatatctctatcctgtccctaatcaggtccctgaaggtcttactcatcgcccgtacaaatgttggcaaggcgttcttcagaccgtagggcattacaacataacaataaagcccatccactgttacaaaagcggtatgcttcctatctt

SEQ ID NO: 102963 - DNA, 363 bp, Zea Mays
acccggctatgggtgattatttgaccatgggcgcggtctatcgtttatctcatccactgcttttgtgggattgacccgtgaactggcactgtatcagactaagtgtgtgagtgggtgtggtttcaaaactatttgctttcgcttcttaaattcgaaatggtattgcaataactctgcttgatacactgatgtattcgaattatctgcgaatctatgtatcatgtgaacggtgacggttaaactattacgatcctggttgtgttactgaaaagtttgaaatccttcgtggtttcacggactaccgggtttatatgggctcaagtatgcaaaatcaattgtctaagtggatgattttcatacttg

SEQ ID NO: 102964 - DNA, 300 bp, Zea Mays
gtcggttcttctgcaaagaataattaatgcacaaagaagtgatgagggtatgaaacacattcatgagaaaataaaggctggtaaagcaaactgtttcagaaaggatgatcaaggcattgtatggtttaacaaccgcatagttgtgcctaagaatgatgaagtccgctagtaaattttggatgaagctcatcttagccactaatccattcatcccagaagcactaagatgtatcatgatctaaagcaacattattggtggatgaaaatgaagatcgaaattgcacgctatgtggcgaagtg

SEQ ID NO: 102965 - DNA, 963 bp, Zea Mays
atttgttggaggtgtgcgggtatatgccgtaatatggttatactcgcgacgaggaaagatgtatgtattgtgtaacacgactcttaggtcgctattatataaccgtgtgaaggatgctcccgagggtcatgtgactaaaaggggttgtagtggcaaagctagaagtaagtttaatatttttaaatgattaattgatagcacctatcgacatcgtcatgatttttgttgtatggcggatcgatgccttgtcgttgtagttttggggaattttcggaaatgtgctggtgctttactgatggggttgaatgtacttgtgatgtattagaataactgcgtgtcgtacgagcatccgaaaatggtgaaagttggtgtatgttggtaattagaaaatagtcacgacgttagccaatagccaagcttatgccgaaatgtaaaatatgggaactttgagttgaaattatgcttatataggcatgtggattaataataataattggaagaacagtcgttcaaattggtcagtccaattaagaatgattttgcgtgtgaggtgaggtggtgacatgccaaagtagtcaccgcttccctatgtttataagtcgagtcaatacccattaggcgttcattaaatttcatgtcgcacatagtgtttggttgtattcgtgacaaggaggtataggttttactcaattagaagtttggttgatgtggctaggaaatttgtttcggcttgggtaatgaagtggtgacgtgaccaagtagtcccctggttatgagtcaggtctagatgtgttatgccttcgccgtgatacccatcgcatatgctaatttgatatatatgaaaaatgaaatagacgcatcatatgatttagtggtgctggtattgtgatctaagtacattatatatgtgtgataaatgttgggcttgaggattgtctttcgggcgaggaaggtgtaatagac

SEQ ID NO: 102966 - DNA, 374 bp, Zea Mays
caaattcaatcttaataaaccaatccatccacaaaaccgaccccattcacccttcatttgccttgctaacaaccctaattaggttgctggtttagatttgtgggtcagtttggtcatcaccatccactatcattccacaaactcaatctcgataaaccgactcaatcacacaaactgactatacccacaaaaccgatccccacccttccagcgcctcgccagaaaccttgattcagagtccaaacttaaaatggccataactttcacctcagaactcgattcaggcccattttttcaaatcacacataattaaatcttgcatttgattctttccggcttcatcggactcgccatttctaaaatctccaaattcg

SEQ ID NO: 102967 - DNA, 470 bp, Zea Mays
ccagggtcgatggcgtggtggcagccgaaatcgatggcgattggggagcgactctcaggggcactcctcatgaatcgccttcaccaccatttggtcttctactatcgccgagatctggttggatggaacggatctggctgatgcgccggtggttggatgagggcgacattcacggcgaatggaaggggagcgaggcacggggggcgacgatggccgaagattttgggcatggatttgcagagtttccaagctgggtgggggcatggatggaggcgcggcgtgtggatggaaggggagatgcgagcaccaatggaagggcagttgggggcgcaacgcatggatggggtgtcaatggaaagggaagatgcggtcgtcctgtaatggcgtctgtcgaggctcgggatcgcaggagcaaagttcgcaggagcgggggcaggcgggggcgccagggctgtggacgtcctccttac

SEQ ID NO: 102968 - DNA, 839 bp, Zea Mays
aggaagacttcctggcactgaagcagggacccatgtctgttagtgagtacaaggacaagtttctatagttgtctcattatgcacctaaagacgtcaactctgacgctaaaaggtcgtacatgttcatgagaggcttggtcaaccctctgcattaccagttgatgaaccacaccttccacatcttctagcacctatttgatggagcaatcatgaccaaaaggaagcgaaaggaaatggaagatcggaagcacaagatgagtggacctcagactagaagcagcagtcatccccattgctcaagcaatctgtcccaacactacaagcatggtcactcatagtgatattagcaacagagtcagcgccaaccccaacaatagttttagaggtagtatccacaacagcagcaacagtactgtcaaaacaacatgtagggaggtaaccaatatcagaggcatgacaaccaagcaccttgtcttcctgccaatatcagaggcatgacaaccaagcaccttgtcttcctgccctagtacctaaccagagcaactaggcagccccaggacaaggaggaggtagaggatgctttcactgtggagagcaagaccattgggcaacgcattgtctgaagaaagcaacacaatagcaatcagctcctaatgccccaacaagaaaaggcgcaccccaacaagttgtaggtgctcatggctaggcatacaaccgtgtgaaggtgaatcacttggaggtcgaagcaatccaggatgcacaagacgtggtagtaggtacgttctcaatcaaatctcatccagcaaaagtgttatttgatactagtgcaacacattcat

SEQ ID NO: 102969 - DNA, 642 bp, Zea Mays
gctcagggacatagcctcgaaccatcacaggaagaatccgttcaatctatatgtggaagttatgagtcttcatccctaagactcacagagtagataagttcaccccctactcaggttagctgcatacccatcagggaacatcaacatcttgatccactgaagtacttccttcatttgggccctgcttaggacgaaatcggacttagtccttctccatgtctttccaccactaggcagcttcatctcttggtttggtctatcacataatgctgccagatccactcttgcctttacattatcctttgacttatcaggaatgtccataattgttgcccaaagtgcctcggcaacattcttttcagtgtgcatcacgtcaatgttgtgtggaaggagtaggtcgtcatgatagaggagccgagtcaagcccgacttatctgtccacatatgctgctcaccatatcccacaaaccatcttctagattggccacgagcccatctatctcttgacaaatttcgacactagtcatcgttgcaggtgggcggtctgtcactacgacacctttcgtaagtttcttgatgtctaggcggaatggttggtcaggagggagaaattgtcaatgtttatcggacaatgaatattta

SEQ ID NO: 102970 - DNA, 647 bp, Zea Mays
gttgaagtgttaaagatatatcagatctttcttcatcagattacccccgaagctataattaggatggggatgtttgtctgggttgtaagaagccaggggctggagctgagcgtgaagtgcttttgcaatatgcacgagctattatacgagacgaaagctactggtaaggaacagtaccacaacaacttcggttgttacggattcattgctcgctctaatgcaagctacccggtgccaacataccggaaaaaatggctcggggcctggatggaggagtggttttacgttaaaaatgatctgattaaaatgaaggatatcaaggaaatcatccagcgccccatctggtctcgcttcggccttcgaaggccgaaggtggctattgaaggtgacgtcgaagcgtgccagaaggcctttagcaatgtttgtgccttcattggcacaagagatatagtccaagagcacatagcctatagggtgtggccacttgtggatagctgggaaatgccgaaggagactactgttgaatccagtgaaggtggcctagttcgattgaaatataccttcagattcagagagaagtttgatgaaccaaatgattactggttgaaatgcattgaagctaccagcgacgagctgcttgggacata

SEQ ID NO: 102971 - DNA, 355 bp, Zea Mays
cttttactgaggcaaggctcctatgatggacggactccctattacggctcactgcgacgtggtaatgctcctaggcacgtggcgcaggtacgaagatggtgaactccggcgaggacaccgcagttagtcgtacagcaagtgggtacagtgaatagttcagtggtcgggtccaagcacatctagcgccaagatcttttatccaatgtcgttatccgcgcgttatagggcacgaatcgtagcaccagcgaggatcgcggtgtggggtcatcggcagcgagatacactgcatctactgatctttgtcaggcactttaccatcagaacccccatcagagtgcctgatagagcaatttgc

SEQ ID NO: 102972 - DNA, 475 bp, Zea Mays
ccgtgtttgtgaaattaagtttacagtcggtggtgatttagtagaaagcttcagttaaattacgtgtgtgctggttacagatcaggacacaaaaagcaatcacaacaacactggagaagcatcgtctactctggtaaatctatcctagtgccagaaaaggtccggtacatgtgaaacaagaattaaaattataccatggagagtaccaaaacagaggttacacttaaagtggataaggttatatatacatatacctaccttggctagagtctccgtccattcgaacaagcttcgatagaagacacaactcgcaactctccatagtgtcttacagttttgccttccttccctcctcctttgtaccgtgctatgtgcacactatccaccagccatctttatggctctattaaccatcttcatggctctattaagtattaaccatctccatgtccaagactccaaaccatgatctcca

SEQ ID NO: 102973 - DNA, 563 bp, Zea Mays
atcgcagttaaaaattagtagtgctcatgtggtgtctaagctaaaatgagaactagtgggtgaaaagcgcttcgatatacatatatgccggatatgatgattgtggtgaatgcgttgattaattgtgtatggtagttctagcgcatgaaataacttgtataaagattagtaagtctacttgttagtcctcatttaattaatttaactctaatgaatggtaaagtgttagaataattcaagtctctaaaacgtggcaattcttgaattatataggagctgaaaattattagttgctgttttggactgcacgcagtgatttccccgtgctgtatgtttgatgaactaaattatgttttctgtagatatgtgatatagaaaagttgtagataactttattgtcttactggtgttaaaatttgacagccataagtctgatcgtttgggagttatacttgtcgcaaattcagtaactgaatatgcccactttctgtacagattccagaaattgaattgtttacttaagttaatgttacaatctgttcatggtcattataagaacgttg

SEQ ID NO: 102974 - DNA, 1255 bp, Zea Mays
atggagttagggctcgaatttaagcatgaaccagtaagaatttggttagggatgctatagcaaagatgaagagggattattgctctacaacttttctaaagagagattaacaaggcatcatatgaaaaatcgagattcgggcactataaaatggtttgggaggaaaactgattgtgttgcgccatggtacagtgcaccggggggatcaggttcagaacctcgccgtcgacgaccgatctacgccgtgatttgcgccggggtcaggctgagctatcgacaggcatctcctcgcgacgatattcttgaagcaggataagatcttcgcggtaggggggtgattattccggccgccacgcggtcactgatctttccggccatgcttggtcaccggtgccgctctcctctattcgtccacgccatcaccgatttgactgctttacggtcgcggtttaacgtggcaagctctaagagaagtaccacgcttggtgtcgtcgttgatcgccagcagggtccggtgatggttatcaccgtgatcgtcgcgatgctcatggagcctataaatccaccctgctctcacttcgtttgtctcaaatcaaccaagcctagctcttcattcctcagttgctaatccaacaagccactagccatcatgttctgtcccccatcctctgtgatcaacggaattccccagaaccagtttcttctgccgccgtgaagaactcttccgtggccagcactcctcgggttagtgcatacccaattgattcgagttatttcttgtttttagccccctgttgctctcggagccagccaattggagtttacctgagtctcatcaccggaacacccctctgctctgtagaacgccgccgcgacgccctctctatcgacccgcttttctactcttgcccaacccaaattctagcgtgtatataaactctggtgaacccatgaagcttacccaagcttcaatttagtcaaccatgctttctgttatccagaacgcattgatccattcgaccatccgcactgtcgccatgaactggttgattcaaagccccgttagtaaaattgattgaggggaaatgcgcgggaggagttcaatctggtgtctaccgctcgggagcactagtctttgcgccatccggccagtctaacctcgctggtgttcaaagctccgccgtgcgatgtcatggtcctggcgcggtgaagaattagaagtgcaggggcttttctgcgaatgtcagtgagacgt

SEQ ID NO: 102975 - DNA, 619 bp, Zea Mays
gtgtttttcccgtcggtgtctgtcattattcgatctaattttttgggccagtgggaatctgctgtcgaggtgctgatttgtggaatctttgcaatgcctctagacctttttccccatttttttggttaggaatgtgaagtctattcagaaatgttttttcatgttatagtggacatagggtgtgtttgcctaatggtaaatggtagcatttgtttgtgacggtggattactggttagtaatgtgcacagcattgttttttttaactctaaaatataactggttttgaattcggggacgctccgtagtgtatgggtaatactaatatcacaacttgcagtaccaatgctatgtcagatttgtgctgtttaatttgtggtaatacaaatgctggagtttagaatgtggtggttgaacagccattgtttcagcagttgtttaggtactttactggtttcgctttcaaggcttgaagagattgaattgagggcctgatgtgccattcaaaataaacatttataatcactgggtcacaagtgggcccagagcacaggtcttttctggggcaggtcacatatttcattatgatgttgaggaactgtagtattctgtagtgtcaag

SEQ ID NO: 102976 - DNA, 695 bp, Zea Mays
aagaaatattctaggtatgacgtcaatggataccgttttcgcacaacaaactacgacaaaagtcggcccaatcgaaaaacaacgtgttgtggagtctttacgcccggccttgacgatgtcgattattttggacgaatcgaagaaatatatgagctcattttttatggttccaaacctcttactccagtgatattcaaatgtcattggtttgaccctcaagtgacgagacggagacattctaatcttgggatagttgaaattcgacaagattccaccttaccaggagacgatgtctatatcgtggcccaacatgccacacaagtgtattatctctcatattcatgccaaacgaaagaacatcttaagggttgggatgttgtgtataaggtatcgtcccacgggaggttacctgttcctaacgatgaagattacaacttagacccagacacatatgatggagagttcttccaagaagatggctagaagggtgatttgagatagacttaaccgaagctatcggaatggatgtagatattgaaatggttgttgatgaggaggatgatgaggtgcaaaatgataatgacttagtaatccttgaaggcaataacattaatgatgaggttgcgtcttctgatggtgttgagattgaaatggttgatagtgatgatgagagttatgatccggctaaccccgac

SEQ ID NO: 102977 - DNA, 528 bp, Zea Mays
gtgaattccagggacctattctaaatcccccacactatcactaggatggcgggttaaatacgaaaaagagcaggggatcttaagtaaattaccactacgtaggggtacgcttgaatggtggccgctggatcaatcacaagggtcaagattagatccccgccagtacgatgtataggaggttagatcatgatcctattctcaggattaaaaggaggccagatcgattcctggccaacagatccgaggtcaacgctaatggtcaaatgcggtgacgagtgcaagccatgctttaatctctaccgcacatcacaccaccaacgacccccatctcctcccttcatcccgatgggttgacggtggcgccgtgatggccgacgagcgtagaggagatggcgccgccagtgtaacaccccagctgtacgttaactgcgaatatggacttaagcgcgagatatcggtaaataaaatggtcactgaattctagtcatctttgtatatcacgattttcatatcgtatctgtcttcgtc

SEQ ID NO: 102978 - DNA, 603 bp, Zea Mays
atacaactcgtactcctgctaggctagctagctacacaaccgcacaatccatgcatccacccggccggccggtacccagcccagatgtacttgcgatggcagctttgttgtcaccggcacgcactggcaatagtagaacgagtcagcgagggatagattgaagaattaatggcccacacctccactggacaactgctatatactaggataacagagtgctgttcatcaatggatccaaagaaacgttctaactcgtaacagtattcacatttccgtctctagaccaactccagcaacgccctatactcggctacacgttcgtattctgcacgcccgaagccactattccaccctccaacagactctgtaaaccacagtgcaaaatgggtgtgcattttttcattccgtatttctacggtgtctctctcctctctgcacaagttaaaaccggagcatttaaaaagcgggacccaactgtcattgagatgatggggatgcggatatggagtctgttggacgaccgtgcaatatattgagcatgttgtcacgtaaaataaggatgcggagagagattctgctggagttaattggtcaggtacgtac

SEQ ID NO: 102979 - DNA, 1069 bp, Zea Mays
gttttgcatgtagagctatgcatgtttttcattatcatcgtgtttgtgcatcactcgtttcttgtttatttcatagatgctattttctgggacaattgctgaaaacattgcttatagagaccctgtgggagatattgacatgaatagggttgagtacgctgctaagattgccaatgctgaggagttcattaagatgttgccagaagggtacaattcaaatgtgggacagagaggttctagtttgagcggtggacagaagcaaaggtaaaatgctcactttccagtttccagactaccttgtatcacaaggtaaacatgttgaccatacactatccagtagcatcttttttgtaccggaacaggtccatttaatttgtacggtgtgtttttatccgcaggttatctattgccagggcaatctatcaaaattcctccatattgataatggatgaagcaacttctgctttggatatcagatctgagctgctactgaaagaagcgcttagtaatctaattgcaaaacactcagtaactgtaagttcttgtatgtgtggtcaggccattcctgcatcggcgtgctttccgatatcaattattgctaagtaacttcttcccttgctgtgactgaatacaggttatcatcattgctcatcgacaggaaatggtcctaatggctgacaggattatttcactagagcgcggtgaattgcgagagatgtcgaaacaggcatttttgtctcaagatggtcacttcagcttaccaaggatcaggagtccaaattagggtgtccaaactagggtgagacttggcatgggtaatggtagtttctctcgtgaagatttgttcatatatttggccatggaagaaaacgattgatagaatcacatttcttgcctgagccctgctcagaactttggcttcttggaaccttgtttcatcccaacagcaacaaatctgtcaacattatcgaaggtcgtctgccggagagaatagcaggctcctcagcggcattggctcctacctgctgcaagattctcctcaagacctcaacaggaaggtcaaagcaag

SEQ ID NO: 102980 - DNA, 1132 bp, Zea Mays
ttgcaatgtgctaatcattgaaagtgattttttatgataatgatcacttaccttaaatccttttggagaaggtgatatttttcttgataccaccagtgatgaatgcaggaagagattatgcctaatgataaaaagtagtgagagatgcatatttgatatcccctcatcccaaaatacatcagtacaacaatattaagataggttagcactaaaggtaatttatctaggtgccttagctattgtagtgatagtatattgtttctagcactaagaaataagaaaggtttaatcttccccatttcgtgtatgcatatgagctactcggtatgagagacagtgatcgtcagattagacacatgcaaaagggttggaatgaatattgatagccaaattagtcatccataacctacaatgacaagattgtgggacaaattttaaatcttattgtgacatatttttggaaaagatggattatttcacatcaagatcctaattgaaaattacatatacttacggcacaacgaggacgctaaatagtgcaattgcatctgacacagcataaacccctcgcaatctcgggataaatagaccttgaattacctcacccataggaggattgacagtactcagttcaacaaagaaggaaatggcgataaggagcataaaaataactcctatgagctctattttcctaaccttcaagaaaaacaaagaatggttcacatgtcagttatatgctaaccaaagttgaagcactatatatcttattgtctaggcatcaatttttctgtgctacataattcttttgagatttgtaccctcattatttggcctccataacagaaagtattacttctcctttctacaagtgaaatggaatgaattgtatatagacacacacacacatattttctcctaaaagtatcttatgtagtttttttagataaatgaaattgcatatgacatttatcaaacttaggtggtgacaaactatattaataacatgtatattttatgatgacatgagaatcttaccccatagatctgtaaagctagaagcaggaacgtgcttgctccacatatcagaacaccaaccaaaaaagggatgttgagcaatatgttgtatgccaaa

SEQ ID NO: 102981 - DNA, 427 bp, Zea Mays
agatgtgttacatcattttgagatttataattaaagtatagagcttacctaaaattcagaagacatccaataattgtacggagattgtgatactcacctagaggggggtggataggcgatgcatgaaaatttaatacttaaacaaaaacttgatcccaattaagttttagaacgagagagaatataatccaagtgacggaaaagagttctctttcactttttactcttataaatgtcaaataagattagagagcaacacaagtgagttagaatgaaatcgtggtaagagaacttagaaggggagacataggagaacaaatcacaattgaaagtacagaacacacgaggcaaggaatttgtttttactgaggttcagttctgaagaacctactccccgttgtggtgttcgacaggacctggtctctct

SEQ ID NO: 102982 - DNA, 551 bp, Zea Mays
agagcacctgctcgaggctggaccagaggaggtctcgctggggaaagcgtcggcctgctcaacctagggcagaggcatggagcgcctaaggaaaccagcaaggagggagctcatggggagatatcctgtgccatgggaggagagggaaacgctggggagctcgaccaacgaggttgttggccgaccatggagacatcctactgccgagcgccatggagggagctggagatggcgtggggaacagtgggagagatgcagccgtgtgggagaagaggaagaaggttgtggcggctagggaaaataaaggggtgggaatgaaaaatagccaagtgcaagtggagagggatccgtatttatagaggggcactagggttagggttttctagtgggccaaatgggctgggctggcccaagacacttaatcgggctgcgctaagtattttccggaataaaaatgctcctgcagaattcgcctctacggagaatagagcgaaatagagtttgaaagatcgggcgattaactcgaccaagagattgatttgacttcgctc

SEQ ID NO: 102983 - DNA, 444 bp, Zea Mays
agaaacaggcggtggtttaaacatagacgacatggtacgtttgcagctccagattacatggccaatttcatccgggttttctctgtcattgatcggctttcaggttggtttcattgaactccaaattctgtggtcagttttgtccaagttatcttcatcacatgatcactctgctttttggcagtttcaagaaccccttcttggcctaaacagtattgcttaaacctgacttcatgtacagtagctgttgctccgggtgaaatatgcggccaatttcatccctctgatccctgtcaccacaatctttccatttaattccaaagctttttcaacagtgcaacgaacccatcatcgtcggtactatgttgataaaaacgcaccacaaaactgaagaaaatgtagatctgttattcttgagctgggattacttggccagcttcatcc

SEQ ID NO: 102984 - DNA, 701 bp, Zea Mays
gtcgcggacggtctggcttctgagaccgaatggtccggtctgtcgcaaaacggtttggcttttaaggccgagcggtgaccccaacataaaaccagtgttgcggacgatccaactcttgagaccgaacggtccgccgtcacacagagatcatctaattcccctgtgggagacataatagaggaattcagagatctcgacaaattaggacaggggtttacatcggtcgatcctttggaatagatcgatataggggatggtaaaacttcaaggccgactcttgtgaacaagaccctggagatcgatcctagagatgaaatgatcggtctattgaaagaatattctgattgctttgcttggaactacactgagacgccaggattaagccgtgagatagtagagcatcggctgcccatcaagtccggtttcagaccgttgaagcagaaagctaaaacatttcgtccagacctgctcccacgaataaaggacaaaattcatcggctgctagaagctaattttattagaccttgcagatacgtagagtgggttccaatattgtgccggtggagaagaaagaatcaggtaagctcagagtatgcattgattttcgtaatttaaatagagcaactcctaaagatgaatatcccatgcccatagccgacacattgatcaataatgcgtcaggaaatagaattattagcttt

SEQ ID NO: 102985 - DNA, 323 bp, Zea Mays
caggaggagggaagctgccgaagcatacaagaacatagaacgaacaaattgcccaaagtggcagacccaaaaactcctgtgcctcatttgcacttgtcttgtttatcctttcttgatgacctctgatggcacgaggctggcatgttggaagatgcagcaatttctttctttccaaatgttcatcccattgaaggattttctagtggctatagtttgcaatttttcactgttcttgatactatctgatcatatggtcataattcataaatgtcgaagttagaccaaccctttctgatcatattactgtgttactaaggatacta

SEQ ID NO: 102986 - DNA, 426 bp, Zea Mays
ttccaatcgtagccttaatagcaaaattgaaggtttcccaattttccacctccagggagtcttccttgacccctagtaaaataccaccagaatgacctctcgctgaaatccaattccattggaaacaacaattagatgagatccagttaagctctctaaccgaaaattcttgcttaatggtttcttggatcccaattatgtccactctttcttgagtgagaaattccctaagttgattgattctccctaactgccccattcccctaatattccaactgagaaatttcatttatcctttttagactgtttcccaggcctccctttctttttatttttctcaggctcagcccccctgggccttcctgggtaattacaggagcctccaatctctctttatttgttatagcctcaatggctaattcttgc

SEQ ID NO: 102987 - DNA, 403 bp, Zea Mays
gtctttaattgatcttcttttttggtataattgcccaaaacttcattgcacatagtctcaatcatctccagccactcttgacaaggcttcttgaactgcttctcaaacttaaaccgataaggcaatcacacaagctcaagtgttttcttcgtcccctttagcttcggcatgctaaattcacttaacgtcggagacgtcctgttggccaagtattcttgaaccagatctctagtgctgatctgttcagccaccaccctaaactctgatacagacagttggcatgctgaccctggcttgatgttgcacaaaggtctggtcattccgaagctcaaggccagcgggctcatcaccgtcgtcatcagtttctctcttttcttctcatcgaccttaatataaaaccatt

SEQ ID NO: 102988 - DNA, 665 bp, Zea Mays
tgcatccaagttgtaattgccctgtagtacttgcagtgagtttggcagaaaaactagaagatcactatagagctagagcaaacaaacagcaagcacacaaaagagttacacggacttaaccgtaactgtttcaaggtcgtggttttctgaattctggtacaatgcatgcatacataagctatgactatgctaattttccaaaacaaaacaaataacccaatttagcaaataaaggaaactgaaccttgaagatgcaccggatcttgatcactaataaagctttgtgattgacccactaggtaaggatttatctattgcagttgcaggcctgatataggcggaggttgccgcacaagcggtgttaaattatctgagcagcagttaggaagcagaacagaaccctatgagtacagtaatatctgtgagcgagggagcagaagagggggtttaccaactacgttaactttgggactgaagggctctgttgatatctcctccttgtagctcttaaacccttcgattacgacctgaaccagacagatggccaataagccaacaagcttacatggggagaaaaatatcaccaaattgtacccagggcagaacatcttgccttctttatatacattttctaggccgagacaggtcacgctaccatgaaaccc

SEQ ID NO: 102989 - DNA, 772 bp, Zea Mays
gttggtgagggcaatcccaggctaaacagcatggtcaacctggtcgtcgtgctcaacaccgagctggaccacgcccttgacgagttgggcaaggttcgggcggaggttgcggaattccgtggtgagtgcgcatcacgccactatctggatggtggttctcccgcccatgtcgggattcagcacccttaccgttcaccgccccgtggtcgcttcgagtatggtaccccagagtgcaggacctagatagatttggatccatagattgacggagtcagagtctataataatgattaattcagtatcttagtcttagtcagtcttagttagagttggtttgcttatcatttgtttgatgcttgtcgtgatgaacatgtagtgaagttgtctctttgtaatgattgtcattaggtgtgggtatcccctgcaacttggtgtagttattaataaattcacttatttagttgggtaatccatttatttccactttcctctttatccgagaagctgtcagtgaagatgatcagttgttcagtgctatgaagatttctgtatatcttttcttatgctgaaagactgctgagtcagatctgatgtgtgtgtgctttctacagatgtctgagaacaggcgcagaggtgcaaggcatgctcagccggaaaagtaggcacccaaggaggaggcagctcagcagcagcagttaccaccgccacccacgatgaccattgagcagatgttcctgatgcagacgcaagcagttcaagcgattggtcagac

SEQ ID NO: 102990 - DNA, 530 bp, Zea Mays
gaattttgtagcagttcaaccggctggacatcagatcacatgggaagaatacaagctagcattccgtgaacactatgttccagagggagtgcttcacatgaaacaagaggagttcattcgactaaagcaagggagagatactgtaatatagtatctcaacaagttcaatcatctgtcctagtatgctatcgatcaagtaaatactgatctgaagaaaaagaattgcttcatgaggggacttaatgacaggctttagaggaaaatggcaacctgtctggaccttacttacagcagagctgtcagcacgacattggtcgtagaagccaagaacacagaccatggaaaatcaaagggatttggaggtgataggtctaatcagggacctgagaagcgaactaggttggtgatccggccttttaatcagaatcgttcttcgcctcgtccaccctcctatcccttcaagcagcctgttttcattcgtcctaccattgcccctgcttcagtcgagtgccactggtactcatttcccc

SEQ ID NO: 102991 - DNA, 525 bp, Zea Mays
atgaaattaggcgacgaatggaaaactgcttttaaaactaagttcggcttgtatgagtggttagtgatgccttttggattaactaatgcccctagtacttttatgcgtttgatgaacgaggttttacgcccatttattggaaaatttgtggtggtttattttgatgatatcttgatctacagcacttgtttatctgaacatcttgaccatctacgtgttgtttttgatgctttgcgcgccgcgcgcttatttgctaaccttgacaaatgcaccttttgcaccgcacgcgtatcgtttcttggctatgttgtcactacacagggtattgaggttgatgaggccaaggtgcatgctattcagagttggccaacaccatcgacggtgacacaagtacgaagttttcttggacttgcaggattttatcgtcatttcgtgaaggatttcagcaccatcgctgccccattacatgagttgaccaagaagggtgtttcatttaattgggggcagtcacaagaggattctttt

SEQ ID NO: 102992 - DNA, 796 bp, Zea Mays
tctctcgcaagcctagtccaccacgctcaaccacaccagtcccaacaactcatggtctttcaattgctaaaactgctgctgatagtcttgcaaaaactaatgagatgttaagtcaagaggttgaaagactccgtgcacaggtattgactttgattcttgcagctttgtgttattacatggacaaactcttaaatttgtggacttgtttaggttgacaatctaaggcgccgttgcgagcttcaagaacttgagttgcacatgaagtcaatacaatgccaaaattgcatggggacaattcagatgtaattcgcaagacaaggtgaagaaaaagacataaaaattaaagagtatgactgtatgagagattagtaaaacaactatacatcaccatgcgaatagaattttcagtatgagggattagtaaaacaactgcacatcaccatactaatagaattttcagtatgtactctcggtctcttctattatcataggaaaaatcatcttgcatttttaaatagcactccaatgaactcacaacacaaattagaaaccatgaacgtacaatttcatctaccacatcaactcgaagtacaataacagaaccacatatgtcgctatggtttctatatattttgtttaaatgggataattgtttaaacatgttctaaatatttacaataatactaaccacaaaaaatacataggtaaggtatactaaagcaactgtgttacaccgcacacagtctataattctgattaccatgggctgataagaacaacagagagattcacgttg

SEQ ID NO: 102993 - DNA, 466 bp, Zea Mays
ctccatttgaagtgctttatggtcatttgccaacacaagtgggactggtcgctgctgaacagtgtgaagttccggaccttcaacagtttctggacgatagacaaaatgtgcttcgacaggttcgcatgcatctgcaatgagctcaagcacgaatgaaaaggcaggctgcagaactgaacgttccttttcagttggtgaccaagtgtttctaaaattgcagccatattgtcagtcgtcggtaaccgagaggcagaaccagaaactttcttttcggttctttggtccttatactatcagcaaatagatcaatctagtggcttatgaactggcgttaccagctgacaattctattcatcctgtctttcacgtttctcaactcaaggcagtcatcggatctcgtattccggtgagtcctgtgttacctgatttgtctcataatcttcaggtgccggttgctgtgcttgat

SEQ ID NO: 102994 - DNA, 366 bp, Zea Mays
tgttgaagcctttgttgctcgctttcgagtgttacaatgcagagagcttggctctcgtgcttgtgtaagaagtgttacattctgagctaggatatctctatggtttgaccctcatccctttatatagtcaaaggaacatgtggcctactcttacatgacaattttggtgggtacactatttctatctttaattgtgtggttctttattttatgtcaatgtgtgtgcattcactttatcatccttgatcaaaccatgagggtggttgtgtcttgcgggcgtttgttgccttaccatcgggtacactttcgtgcgagcagtttgtcttggagtcctcctccctaccttgttcaaaacgtccatgttca

SEQ ID NO: 102995 - DNA, 407 bp, Zea Mays
aggggcctgcttcttccggatgattttgaaaatacaggtttgtagcctgaattctcgcatagtatatggcatccttcactaacttctttgcattgttatggaacacatgttcagcgtgccccatgtaatcctctccgttaggcaaccgatatcgaagctacaacataaaagaatacaaatacaatggtataagtcatagaattacaatattaagaaacagaacaaaaacaataaataattcatacacaaaagtcatgacgcacaagtccctgtctgtcggtgtggtttagttcctttttaaacttgtactcatcccaggtactgacgagcacctcatcaacgatatctccgtctgaaaccttcactatactagggtagtgaaggcggcaaagagaacccaacgtaag

SEQ ID NO: 102996 - DNA, 367 bp, Zea Mays
tcggtagtcttcgcaaattttttatttaagatccaaggcccaagcgcctttgtaattctccaaactatgttattcgggtcagcactcttttcctcccgggggtgaggtttttaacgaggcggcgccatgtaatataccaacgaaaagcccccacaaaaaactccatgcatcattaccaaaagtgtcgaaaaagaccgctacgacgaccttcgacattcgacatatacgaggtcaccgcgacaggtagcacagactaccctcgcgtgcgacaaacccatgaaaaagtcgcctaagggtgcagctggacaagcacaataagtgcgcaacacgaagtttttactaaaagacatccgcgcaaaagtcgcct

SEQ ID NO: 102997 - DNA, 446 bp, Zea Mays
ggtaacttgtcatgcaaaaattgaagaaaaacacctatgaagatgctctgtcagaacaactgaagaagaccatgatggtacagtagcaaaaagttcttctaattcagtgtatctcaccgccggtgaccttacgccgcgattgacgccggtcgtcgcgattcgtgcgccctggtttgcggataacggctggtggtgaaagatctcaacgcaggtaaggattggagccttatcaccggactattcactgtgccacttgccgcgcgattgactcaggtgtcctcgccggagttcgccatctttcgtagctgcaccacgtacttagaagagttaccacgttgcagtagatagccgtaggtagtctgtccatcacctgagacgttgccccggtgaatgccacggtagttcgcgccagtgactcacctctctctttgaccgtcggtctcccc

SEQ ID NO: 102998 - DNA, 644 bp, Zea Mays
caactttcggacctcaggacagatgaacaaggagtcctttggttcaagaaccgtctgtgtgtaccaaaaggagaggcatgggaagtcctgctcaatgaagctcacaactcagcctactccatccacccaggaaccaccaagatgtacctagacctcaaaactagatactggtggagagggatgaagaaagagatagcactgtatgtggcccggtgtgacacttgccaatgaacaaaagccgagcaccagaaacctgcaggcctattgcaacccctcccagtgcccggatggaagtgggaggaaatatgcatggattttgtaactggactgccccggacgcaaaaagggaatgactctatctgggtaataatagaccgtcttaccaaggtagcccacttcatcccagtgaaaaccacctttggaggagccacccttgcccggatatatcttaaagagatagtcagactccatggtatccctcggaagatagtgtcaggcaaggggacacagttcacttcaaaattttggaagggccttcagcaagctatgggcaccaagttagatttcagcaccgcctatcacccctagtcagatggtcagacggaaagggtcaacaaggttctcgaggatttattaagagcctg

SEQ ID NO: 102999 - DNA, 668 bp, Zea Mays
gggtttcaacacgcacaagttctgcttggccaccagtttcaacacggactagatctgcatcagcattgctgtcttcatggccaccggtttgaacaagcactagatctgcatcagcattgctgtctgcttggccaccggtttgaacaagcactagttcatcgccaccagtttctacatctttatttgaagtactaggttgtgatgtagaagtccgcaactctttcgggatctaatttttcgtagtattcttccttggtttcctcttcctacaaagtaaaacattggtcaattaaacagtaaaacattggtcaattaaacattggtcaattaataaatggagtcttaacctcttctttgttccattcaaagggcatttataactggtcttccgatgacctagttgaccacagcttggacaagtgtactgtctttttatcttagttgttccttgagcattctgtgtgacctttctttttgtcccactgccaccctctagacaactcttcattctgtttttcctttgtcgtccaaccgttcttttagccattggtgcacatacctcctttgaaaaatccaccttcggccaaaaagaacggtcaccaataggttgaatcctacccatgtaagcttttctaaacttgtctacagaataatactcatcaacaaag

SEQ ID NO: 103000 - DNA, 684 bp, Zea Mays
cccgatttgggggagatgagcaatttgtggtctctggtgaacaattggaggcaagtgctggtgctttggatgggtaattaccctacagagctcatggagtgctcaatttatagatcctctgagcggtggccagtgaatttgaaggagacacgcggcgaccggagagaaggagggacactggtgcagtgattcgtggcaattgcgggacaagaagccacgacgatcactgggtaacgatcacaaatcacggtgacgtagttaatggcctaaggcatggcacaatcgtggtgaagggcgcaaactccggtgacggccacaaggccacgtcgccggtgcaagtggtcgaggaacagcgagtccacagtagcccgaactcatccgcgacgtgatctttttacgtccgagcgcaatctacttccctgcggcacgaatcacggcgaccggcgtgaatccgagcgcacggttcaccggcggcgaagttatctgatcctgggatattttcagtactgtaccatcaggaatcctatttagagcttctgtctgattaatttgcatgactcatatctcggatttttgcgtgagaatgtgttaatctttctataacaagtttgtagctcaacaatcaatcttcaattcaactatagcaactatccttaatcgagtactagatactactcaaacttg

SEQ ID NO: 103001 - DNA, 1202 bp, Zea Mays
ccatatcctctttcggcacgcttgccttccattaaacaattcaaccatttgcaatttttatctccctatatctcttcaatggaaatccaacttcatatgcatatcggctatataattggtacgcctcgtccacattactaaatgccataccgaccttgggtactaatcgttgatctatactatcatcctattcaattaatggagtcgtcatgcagtgcacatatataaaaaataatcctacagcatggtgaatttataggaattcataaattacacggactgtatatataatacatgtgtattcagttaaatcataactagcacggactgtataacaaatacatgggtgttcctttgaacttacatggctttggagaatgtgtggtgtgtcctgctcatgttcaccaattgtcctcatcggtatccgctgagttgttctcaccaaacttggttgaactgtgttggtgtcttcaagaattcctggcgccggtaacgcaaccgggggagttaccgtatgccggccatcggttgtacagggtgtcgtcgccgtcgtagcttctccacacttctccgatcccctggccgtctccattgtgtatgccctaactctcccagagctctgaacaaaaacgtctgcggctgtgtgtagctcgtattttttccagctaatctcctatactcgcctaaaccgctctgacctatattcatggcatgatctaatatcctccgcgattttctccgcagtctgcatgtcgcgagatttacgtgaacgacacgttatgattacctgcctattgtgttacatttccataaacatggctcaccccaacgtgcgaccgccccacgttcccggatgacgcacgcgtcacccccactacccgatctgaccacacacgtcgcgttagatgattatttatttgttattagtaatttaaacaagcataaaagtctaaccacctcccactcacgtcgaactatgccaatttacgcagtcaataacggcaaaatacgcaagcataaacgcgcgacccacgtctctgtacccgagcccctccccacgttaccatttacgcatctgtttgattcaaattctgtatgcataaactccctacctttgactcggtgcatgcgcgcggtactcccaccccctgccacgtcgtcccgcgcccgcacacctagcctggccggggctctctctagta

SEQ ID NO: 103002 - DNA, 684 bp, Zea Mays
atcatgctagggagtgttttaaatctttgtggtgcgagatctgttgcaaagaaacccacaacaccgctcggtgtgttcttcccaaacagaataaacccagtatgcctattgttggtatggcggcagatgggctagggttttactcttctcatttcgccaagccattatccaacaaacctaaacacagttttattggcttggttaaaatcattgagggtttgatcacggccgaggatctggagaaggatttcggttttcactttccttggggccgcacttggaaagctactaagtgtcattctggcttcctcatgcaattcccctctcaagagaggttggatgaaatgattaatttccctaaattgaaaatgaaattgtctggggccaaaatttctgtctcttcttggagttctcaggctaagcctaagtcaaaactgcattctgtgtggattgtggctgagaatgtgccagaagagctgcaaaattaccaggccatttgtgaattgggatccactattggggcagtggaagaagtggatattaactctttaaactctaaagaaattgtgagattcaaagttcatgtgaagagtgttgctatgatccccctatcattgaagttggtgtcaaaccttttctgtatgacattttctttaaaattgacaacattattgatgaaggttg

SEQ ID NO: 103003 - DNA, 335 bp, Zea Mays
ctgagaatgtggggcaaaaatcgtaaagactaggatctcttttaaaattcagcgtggctatctaagcatgcatgctccttggctgtaggattttatatcacatgctaagattagatcacaaagttgtatgttaaataactaatcctatccattcatctattgatcattggttagggacccatcctccacccgacggcgaacgggtggccatcgagcacatgatgtggcaacacagctccaacgagtagtttttcgacgccctaggtgctaaaacgagcactatcaaatgctacgcatgactacaaacatgacaaatcaatggggagggttctcac

SEQ ID NO: 103004 - DNA, 825 bp, Zea Mays
tacagatcctaaacatgctccattaaatcataaatcattttggagctggtcatgcaacaggtttgcatgaagtgttgcctctcgctaagctcgtcgatgcttcgggggtcacgattggtgctgcaacggagggctcgactgttttatagtcatccatgtcgtatgatcctccatgctcatccttaatcatcatattgtgcataatgatacatgcacatatgttcacactgagtacttgctaggagaaagaacaacctggggttgcaaaactatgaaatcgagctttgagcaccccaaatgtcctctccatattattttgtggcccctcctagcacgcaacaaactttgtagtccgtgggagcagaacagtcttcatgaacacctgctaccgagggtatattgccattaacatggtagtatccttagttgtactcgtgaccattcactatgaaattcatatttggtgcttcacccttaagtggttgatcatattcacaccattgttcgatcccaccactcctaaaaacatgccatgcacaagtcatatgaggcaactgcctcgagcatgatagttgggatccgatgtcctctcttgtgaactgtcccctctatccaatgggacaattcatctacctctaatgcatgtaatctatactccctatcataccagaaaatcccatcccccaagctaatagatgcctagggtacggtcaacaacagtgggacgacatatgtactttagtccaaaacattcagtaacacctctacagaaaacttcaagacactccaaggtgtagcttttccccatttttgcactcatcgatg

SEQ ID NO: 103005 - DNA, 376 bp, Zea Mays
acctaacgagggtttcccctcaaacaatttcatcaacgggacattgaatcgatcggtccatggaaacggcacggacactcgaatgggtatcacgttcccggtgattaagagggactcagtgtaattgggttggttgaggagcatcagggaagcacactaatgctgaaacaaggcagcagagaccatgaacaaagctggaagtggctggccacggtgaggtgcgttttacggtggcggaaaccgtgattggggaaagtgagcaattctcggtccctagtggataatccggggcaaggattggtgcaatagatgtgtgattaccctatggagccacaagtgcactcaatttatagtgatcgtgagcggtggccagtga

SEQ ID NO: 103006 - DNA, 417 bp, Zea Mays
gcctggttgacagttcatgcatgcacactttatttttttagtcaccccggttatacacttaatcaattcggttaagatcagactcctctcatgttttgaggatgcaaatttctggtgctcattgcaggctacaacatgggttttctttcccctggttgatagttcatgcatgcacactttatttttttagtcacccgggtacacacttaatcaatttggttaagatttgtgtttccatactcatctgtccattaggataataaaatatgttagtatagtgatactttttcctaggttgcaatgtgtttactaatgatttcattttcggtaccgagatgcaatgtctatacattagtacactcttggttagactcttaaactttgaccggcaaaatcagaagtaaacccacttaagcc

SEQ ID NO: 103007 - DNA, 437 bp, Zea Mays
gccgagaggagaccctgggacatccggacatggttaggttacactgcggctaggctggaacatggttccgggctacgaaataccactctatatgcatgtaacggggacaagtacacgggacaaaccgtgttcctggtcaagcttttgtcggtacgttttataaattcgtccattttgcggctaagagttcacggcgtcagggtatatagctggctagctgcagaataagttcacggcctggttgaaaagactataccgtcgacaaccataatgccactccatgcatttgtgggcgaaattgttttccgttttgcagcacggatatttcggaattgctacgaaaagaacagtcaacgaacaagcaccttttttttgcagaaatctcaagccaatcgtgcttagaaaacagttcagtcatgttatatctgagctttgag

SEQ ID NO: 103008 - DNA, 449 bp, Zea Mays
aaagtgccaaatgtatattaaagttatatgcaacataatcaaacactcaaaccttgcatacttgacctttttaccgttttgctccttttggcctatttgagctcggggttgaactccaaatcctcaagttaccataacttgaacttaatggtcatctatgagctccaacaccctgcaatggtcacaaagaacatttctaaacacaaaaatgacccaactaaaagttaaagtgtacttagctcttttgggtcccttccaggttatgactttgatacttctccactttcttgcgaccatgtcctactaattgagcaaggatcttgagccttatgacttaaaccataaaccctaggaattacatcaacagttccaagtcatgtccttatgtcatgatcctcgatgcaccatagcctgtctcaactcaattaaccttaactttgcaagagcct

SEQ ID NO: 103009 - DNA, 849 bp, Zea Mays
cgacgacaacaacagtggcattggcggggagaagggcggcgacggcgatggtggtactagtgatgaggcaccaccagcttatgtaatagtcatgggtgtagtgtaggggtagtagtagggggtggggatcctttgctagaatcagttcataatgaagttgccatcttcttcctttgagtactgagttctttcttttccctttatcccactctgtgcttgaggttcgataggtggtatcaagctctctattttgcttagtttcctgtatccttcgcgttacccttgacgactgacttctggcgttcgacttatacgacgaaatgaatcctctatcagactcaacctgtcctacttaatttgtctgacttatcacctttctttttgattttgagagaccgtttccattgtactgatgcagtgataggtcgggggtacttatatatatatatatatgcttattgtctgatggttcttggcagaaaaccctagcgttgctttcaccgtaacttcctcctttgaaattttcctgcctcagggactttgtgcccgatttcacactcgcgacaggtctcatggcgtcgtgcccaagaagaagaagcaaggggcgcatgcggctgtgatccccctattgatcccaatagtcaactccccttttgcgataactacgcttccattgtttctgaatctgatctgctccaacttgtccaaacgggtgtccttcatacaaaggattgagttcatggcgtgtttggcaagggattattgtgcccacagaagacacccacgagtccattgttttgttcctttcttgatttgggcctaggcttatccgtctctctcttcttctgt

SEQ ID NO: 103010 - DNA, 503 bp, Zea Mays
tcgaggaaccaagagaaaggaagaaggtcaagaagattgaggtacctaaagctaagggtgaagaagatggtcttggaagaagtcaaggttggtcaagctaagaagagtcctagtgcattgaataccatgttatatggacatgacttacaaccattgaggtaatgcttatggtttaatggtttaagtcataaagctcaagatccagctcgtgtagagacatggtcgcaagaagtgcagaagtatcaaagtcagaacctggaagaacccaaaagagctaagtatactttgactagtaatttgggtcattcctatgtttggagatgttcttgtgaccattgcagggtattggagctcaaatatggcaaatattatcaagttatgtcgacgtgaggattatgagtccaaccccgagctcaaacagaccaaaaagagcaaaatggtgaaaacaattaagtatacaaggtttgagtatttgaatctgttgcatacaccttttactatgc

SEQ ID NO: 103011 - DNA, 413 bp, Zea Mays
gttggagcttcgctcggaagcctcacgatgccctagattgccatgctcagcctcctaatcgtcgataagtcggacattactgaatttacccctgctcactcctaactttgcgataggttcaatagagagttgggcattggcgcactgtcatgtattccaccagagatcaattagccctggttgttgcttcacccttggacagtcccgattaggtaacaagatacttcttcgaatgatttaaatcctagccatctaattggatgtggattgctaggattagatcccgagcacttaccgattcattggaggggtgggatctaatcagcgccagtaatcccagatccaacgactcagatgagcccataccccttcgaacgtgaaggttttgcgtatgagtccctgtggaaattgtg

SEQ ID NO: 103012 - DNA, 792 bp, Zea Mays
ggcgggttgggtttggggagaggagcagaaaattaaagagtgaatccccttttgcattgctgcatctgaaagcgggaggggagcggcctttcgttgtcttctatggaggaacttgggggcatccatcaccagcaggggctgcaacctaagtatgaagaagcgtgagggtctgagggagggggcacaggagagggacgagaaacaacccccatggcggatgtcctcatcacacgttgcaactccaatccgcaactgaggcccccacggtcctcagcacatgctccaacttcaacctataaccgacagggaccgcaattgaggacgaaaaattgagagggaggcaggaggggtgcatgggggagagaggagaaacatccgaacatcccccatggccgtcccgtgcggaccgccccacagattgcgataaggcaacgacagtttccccatggcgggccctgtgccctgcaaatttctcaagacaaaggctgcgacggttactcatcgccccgctataatcacatcaacgcacacgaactagcagcaaaggagcaaacctaacaggctaacagcaaggaatttgagattcgagaaaaatacggtgaaagaggatggtcgtacctatggggaaacaggaagatgaagtttgtggatcgcgcacgtgaagagggggcacggagggccgtctttccccaccatcgttgtgaacgcgtcgtctctcccgacgtcaggaacacgcgtgtaaagaggaagaggaggctgctgcagcagctaccacttctgatttcgcgcccg

SEQ ID NO: 103013 - DNA, 585 bp, Zea Mays
aagcagttcatcacttgtaacttcgatgcattttagccagtcatcgtttggttcattgaatttatccccatatctgaatgtgtgcttcagccggactagttcaccttcactagattcggtgatggtctccttcggcatttcccagctctctacaagcggccatactctgaatgctatgtgctcttgaattaaatctcttgtaccaataatgaagcagacaataccaaatgccttctggcatgcttcggcagcttcgtcaatttcaaccttcggctttcagaggccgaagcaggaccatatggggcgcataataacctccttgatgtcctctcttgctatcaagtcattcttcacataaaaccattcttccatccaatttcccgcccatctcttcgaaatgttggcactaggtggcttgcgttgggtcgggcgataaaaccataacaaccaaatttgttgtgatattgttctttctccgtggccttcgtctcatacagaagttcgtgcatgctgcagaagcattttgcgcttggctctatcccttggcttcttactgcccagatgaagactcccatcctcaatata

SEQ ID NO: 103014 - DNA, 400 bp, Zea Mays
cgcgcgtgattggtggcaaaccccgtggcatccactccggtgatcaacggagagctaaagcaggatgcggtgatgcggtggaaatgccaagacacgcagcacaaggccggaaggcggcggtcaccggcgtgcatatcagaatccaccacggcgagctctgtacggtggccggaatattttactggccgtagcttatccacggcgaggtatgccaagcattatccacttacccagagcacaaatcgagacggtgatggcacgaatcgcggcggagggatcgtcggcggtgagatctctgaagcttatcttcttcagtactgtacaatggcaaaccccattcagttggactgacagcctgatttgcagagcagaaacctccagattttgtgcagtaacatga

SEQ ID NO: 103015 - DNA, 364 bp, Zea Mays
gccgaagctacaatgtcgggtaatgacaaaattatatcagaggtagttaaagatgctactgcagaggaggacgtggccacagcgccagttaaagaaagagaaattgattcggtccttcaggcgaagaaaattttgaccttcggcacctgggcagtcaggagcttttcgaagaagtaaagttggagctaaaagaatatgccatgttgtgtggataccaaccgggagctttggtcttcggcggggttgatgaggaggtcttgggatgtatccatgatcgcgccagagcgaagatagttgacactttatcaaagagtgtcggctttctgaagctagagactgatataccgacgacaacatattgtcg

SEQ ID NO: 103016 - DNA, 843 bp, Zea Mays
acgaaacttccatgcaaaggatgatgaatgcactatgcatgtcaacaacatgagttcaccccaaataacatgtgttagacatatacttccaccccttcccaataataatcaacatgtgtaacttgatcaaaccacaccctcaacatatgtaattaatagaacatgaataacttcaagcaacggtacccaacaaggaatatgaggatgaacacaattgacataaatataatcaagtatcggacacattaatcgaccgatgggataaaccatcactattttacttgccttcaccgggaaatttggacaaagccctaagtgctatccggaagtccacacctgtttttgacacacaacttagtgcacaaatccacataacaaacgctcataaacgatgccgcacctacgcacaattccgaacccgccgcgagcgacttatcacccccatcacccaccaactgcagcgatgctgcttgacaatttcatatctttaaaattatgatagtagtggtaacaaacaaaaactccagaagcatctacctaaaattccccacaagttttgtattcaaatgacaattaaatgctaacttctaattagcccaaaacagtccacaagataaaccctgcaatctgtttttggacagcaacctagccgggttcaaacagcgatatctcctaaaatataactccgaatcgagcacataagtactcgttggaaaggtatgacaaagctctacatgattctctcactgattaacactaattacccacgaaaaatccccagaaactactagaactgctgctgttcgcccacccacaaaaattctggacagcacctctaccgat

SEQ ID NO: 103017 - DNA, 666 bp, Zea Mays
ggtgaatagtactgggccagaagcagcccatacggcccagccactcagagaaacggggcgcgcccgcgcccgcgttggcagtcttgcagaagggcccccgaggttttcactatatgggaatgggtccttccactgtttaacacagtcactgacactttgcagaagagtccctgaggttctattcctttaccgcgccaagtccctgacgacggtgagcacggccgagctccggcgacctcgcgcactggccaaatcgcaccaagaccggcgccctgctacggcctaaaccaaattcacgccccaatcagcgtttcccctaacttaattgtgcaaatggtgatatactctcttctgtccacgagaaccgcggagactacggacacttgatcgtgttcccgacgattggtggactcctagtgcgaattggtgacacggtaagcatcccagagcgacaagagtgctcgaacgaaggagagtgagggatgaactgacctggaaagggctggccgcggtgatgtgtggttcacggcggcggagagtcgatttgggggaaaacccgaattgcggggctacggtgaacgagtggagatgagagtgggtgctatagcttgacgattacatggcgcaaccgacctggccctcaatttatagaagggtaaagcggtg

SEQ ID NO: 103018 - DNA, 759 bp, Zea Mays
gagaattctgctaaggaaaggcacttatcccaattcttcccatagtgcaacacacatgcccttaacatgtcttccaaaatctaatttaccctttctgtctaaccatctgtctgaggatggtatgctgagctccttatcacctgagttcccagtgactcttgcagctgctcccagaaatgtgctacgaacggtgctcccttgtctgacacaatagttcttggtattccatgcaaacaaactatctggtcaacatagatctcagcatacttctctgccctgtgggtggtatgtactagcaagaaatgagctgtcttggtcaacctatccacaatgacccaaatagaatcgtggtgtcgggatgtgttgggtaaacccacaataatatccatgcaaatatcctcccatttcaagctggtacgggaagaggttgtaaggtacaggctaccttcaaatgactagctttgactctctggcaagtgtcgcattcagatacatacttagcaatttccctcttcattctagtccaccagtacaaggatctgagatcatgatacatcttgttactgccggggtgcatggaaaatttggaaagatgagcttcatccaatatttttcttctgagttcggaatttttaggaacaaccaatcggccttcaaaccatagaattcccttgctgtcctgacggaagcatttgtacttatccaccgtttgcttgagcatatccttgatgacttgaacacccttgtcaccaatctgtg

SEQ ID NO: 103019 - DNA, 487 bp, Zea Mays
tagtcatcaaaggtggatgctacctttcaaattcacaaaaagtgacctgcaaacaacactaaaaaaatgggcgccaaagaagcggtctctctgaaaaaaatcaatcatgtgttgtgcaaattcaagtaaagcagtttgaaggcggagggtagctatccaccatcctcggcaaaagtgatggcaaaacaatcgcctcggccatattcccaaaccttacccccaaaatgttagccatatcccacattccccattgaaaagacgtgaatggcatgggacacatgactgaagggaggtctgatgatggtccgcctagcttcaagaggtcataaggaagtgctaacctttgatacgcagacaatacgaggaagctgaagtacaagtgaaaatcgtgttgaagattcgagaagtgatgctaaacataccctttagtggcaccgttgctggctatcatataacttggtgacctaaaggaaagccaacatttttt

SEQ ID NO: 103020 - DNA, 544 bp, Zea Mays
tgaagtcttagttcttagtttagtggagggtctgttttttagtctggtggtcatgggtgtcatgtgtggagcttccctgtttaactggtaatcccagttcaacgttgtggggtgtgctctatgtagctacctctgttattgctttcttaaaagctgagtaaaatctcctttcaaaaaaaagttccaagccgaacaaaagggcctcatattcggcttgattgttagtgcaataagttttcaatcggctagggaagtcgaagaagacattacttggtgaaacaaacacgatgccaattccttgtccttcattgcaaaccgatccatcaaaatataaagtctagggagtaacagtgagttatgatatatctagtttatgagcatcatcgatccgatgttctacaataaaatctgctacaacctggcctttcatagatttcaatggttcaggccaagtcatattctataaatgcataagcccatttaccaattctaccactcataatcgggttttgcaacatgtatttgatcacatcggtttgaccga

SEQ ID NO: 103021 - DNA, 596 bp, Zea Mays
atttattgaccttaatctagtgtgtccgattaatctttagggcgttgtttgaataagtgtatattgtttatacacacatgtattggtcttagttatgtatgtaaaactagtatgctataaaaactaacctaacctacacatatagattgcgatatgtttgggggagaggggggagagagagagaaaccaaaggtttcttccgctttccctcctcgccatggggcgtcctagatcgaggaggttcgcgaaagacacctaccccgaccatatatactcatcgaggtttcaccagagaatccacatggtgtcatatgcctgagggcaggggcggaggaccaaatgtggcgataccttagcccgacccattagcagcactagatcgaagacccttggtctttcttcgcgtctgacatctgcctagcttctttgttgcgtcgtcgttcgcagacatacacagttgctcgcttctccgtcacccgtttagcttcttggctgcgtcgatgttcgcacacgcaggtgcaattgctcgcttctttctttatcgtcggctatcgctcgctcgcttcgcctccgcacctctaaggacagtcgctcgc

SEQ ID NO: 103022 - DNA, 613 bp, Zea Mays
taggctacggaggccaggagtcggcgtgtcagagaggtagtaatgatggcgttagggccctgcgcggcccatgccagccgtcataatgagtgtgagcagaggtgaccagatgacaaggtgcatgcagacaaatggccttgccacggtaaggcactcggttttaccacggaataacaactccttctcaaaggagccaacgaaagccaacctcaccttggcctataaaaggaggaggtcggccacagggatggggttggagacacacatagacccaaatgaactggagagacgcagacatgcgaagaagacccatgacagaagatgctcgatagaaggcaaacacacacgtctggagaaaccttaagatctggaggccagagccaaggcttagcgtaggactctagttccgtagtctttaggatactcccgcataagagacctgggagccttccctccctctctcgcccacttgtaacccacttgtaacccctactacaacatcgagcaactaaggtaccggtagcacaagccgccgaagactggatgtagggatgttctgctcgaacgagtttaaaccttgtgcccaccgagcacaccgtccagagcctagaac

SEQ ID NO: 103023 - DNA, 363 bp, Zea Mays
tcccaatgtcatcggctataggatgaagaaaaatcactacatcatccgcataaagggatatgcggtttagggtttaatgtttagggtggtatcattgtgtaacgatatcaggataccatcgatacatgagaaattcatagagtagaaagagagcaagagatgcaggctagaagatcactggatgagggtattctatggctactaacacataatttgttttatagagatttggacctcgagagcatagcactctatgttttcttattggtagatgaattgatcgaagtagaggccaaaattacacacttagatattatttgagctagatgaccgtccaacttccctctacttcggttttggtga

SEQ ID NO: 103024 - DNA, 745 bp, Zea Mays
gaaaaggacgatggttttaaataattcccgtggttaaattgggtgtaattcctgacgcttaaaaacaaacaaaaatataaaaaattatgtgggttttgcaggggaaccaaacagctctttactctgcaactggatgttacaaaaaaacaggcattccgttttcagaacgtttccatcatagaactctctactgatgaaacacacgatgatgcaggattgaccgtgaacaaaccaggcttcagacgggacatgaggcaaagcggagcgacaatccatgatcaccgctgcttcaaattttgtatcgcggtagaaactagaattgaacacgctttatttcagctatcgaatggacgggacgggacagcatcaaatcgcaaaaccaccaggccactggccacctaccaccaccgcagctaagttgggttgtatcgccggcgcacgagcagtcgccggggtaagaaaggacggaaacgcagacacgccgctggctcgagaccaaattcaacacctaacacgaagggactacctatccagttcttgattaaggaagaggacgaagagattgaagaaccatgcatgcgcacgcaggcacagatagaaattagtggcaaaaaagaagaaaaaaaaacaaaaaccagcggcacaaagacagcttgcagggggagagacgacaggaaggaaaggacaagtggaggaagctcacctcctccaggacgatcgagttccgagcggtggcgggaggcgg

SEQ ID NO: 103025 - DNA, 377 bp, Zea Mays
gaatgcgtgggaccgtgaatcgtagctcgtgatttcttttggacggcgtatcgggtggccggagttatggcgccgccgccctgttccgtccatctcggctggaggtgggtgatggcgtgccagccgttagatccatggtggatgcgtgcgattagatccgggtgggtgatgatcttcataccgttggttttccaatgggcgtatgggatcgaatccagggcgtatcgcttcaggatgtgatctggaccatgaatcccggatcctgtggcccggattgattacgggttcacatatgataacgatctaatccgagccctcaaatgtcgatccaacggttgaattctacccgtaccccttcgtcttggacgatttactta

SEQ ID NO: 103026 - DNA, 370 bp, Zea Mays
cagaaagcttcagggggagttctgtaagcttcgggacctctgcgtaattacttttgcacttcaataggactgcatgttgttttaacacaagtctagggtcactttagcaaaaagccacggccgaaggggtacgcgagcgttctgaccaccagatctaaaatcgacgcacaagattaaatgttttctcccaccgaaccggtacgcccccagagccgcccgatctagatccgatggtcgcgggcgaaacattacctagatctaatctagtgcgttcatcggaggatcaacgacggataacgggtctagtcgaaccattaccccgacctaatctcggccaccagtcctacatccgacggctggcgcattttct

SEQ ID NO: 103027 - DNA, 344 bp, Zea Mays
ctgatattggtctgacagtgagttctgatgaactttggactcgattcaagctcaagggagtaagtaaatgagcaaggtctctatagccgaattgtagctggtttatagagctacaactttgatacagatggattaagtagttactacataaaaatctgagatctgggctctgcaaatcggtctgtcagatgctccgatgaaagtctgatagtacagtaaattgaataagatctcaggttcagcccccctcaacgccggtgatctcgcgcccggattcgtgccggcgtcgcgatgcacgcccagttaaacgcagataacgatcctcgaatgaaaactatggcgat

SEQ ID NO: 103028 - DNA, 747 bp, Zea Mays
attaagccctgcaagaaagaataaaggattagcgtgagaataaaagacttcatttccaagtccataagcttcaaagttcacttatgtacctttagactgttgtatgcgagggtgtccgcgaggtcagccttcgtcatggcgcagaggccagcttcgaaaatcccatacttttggccatctcctggtagatagataactctttgttgttcgggaggcagtataggaaatcatcttcgtccgtgccgttgaacactaaagcccccttcgggtacttcagctcccgggcatagtgtttggcttcaaaaacttcttcttcggataatctttttcccgaagcatgtcgaataatatagtcaagatcttcggacggtgcttcgagagcaggggatttggcttctttggccacatttttctctagagctaccctaatatctggagattcttcttcggccttctgctcagttgtggcaagcttcatctcaacatgcaccgagggcctagctttggtttccgtatgagctgtaacagcttcggaagccttcttcacaggagcaggagtcagtgctcttgttgtctccacaacggcgtccaacacgctagccattcttctcctcttgggagtggtggcaggagcttttgcaacctttggtagctctacttctactggctggctcagaatttctggtagatctgttgccttttctaattctggttttttggttgtctcatcttcagcttcgactgaat

SEQ ID NO: 103029 - DNA, 467 bp, Zea Mays
gcagtctcaaaccccgccgcgggtaataatttccccccacaccaaccaaactgcagcggcgctgcttaacaattccataactttaaaattaagacagcagtggtgacaaccaaaaactccagagacaactacgtacatttccccacaagtttggtatacaatttaggattaaattctaacatctaattacccctaaacggtccacaagacaacccctgcaatctgtttttttccttatttgggcagcgacatattcggattcaaacagtgataacttttaaaatatatgtccgaatcgagcgcataagtacttgttggaaagataacataaagccctacataattctcatactgattaacactaattactcccgaaaaatccccagaaacggctaatactgctgctgttcatccccctgaaaatctgttttttggacagccacatacccggattcaaacggtgataa

SEQ ID NO: 103030 - DNA, 457 bp, Zea Mays
cgcgcctcgaagaaacttgtcacacaggagttggaagtcgctcgtcacaacattaaggccttagaggatgaccgtgttgttatgaaagcaatgtgtgacaaagcgatggataaagctgttcgtgtcaggtgaatcctgatgaaaagacccggtgttgtggtgcctgaggatatcgttgctgacattctcgttgttcctgctggtgtaagcaaaccttcttcctctggtaatcccgctggcgaggtctcctacaagaatgctcctgcatggtgatttgcgtgatgaagacaaactttgatttgttcggataagaaacacttttcattgagttagtacttttatcaagatagtgtatcatagagttcatgtgtgcgtgatcgcgttatatttaaattgactgttctgtcaatagggtgttgaggttaccctcagacatatgagtgtaagcatgctctat

SEQ ID NO: 103031 - DNA, 309 bp, Zea Mays
caaaatctattgaaaattcctggatgtcccctccccaatgggtgtaaccaagggacggcttggtacactgagcatttagcaaactgcccttgagtagtaacttgacgtgacctcagggtgtaatcatatcgtccaagcagttgaccttagtccaaagggtgtcgtgttacatgaaagaacttccctcctctatatattgaggaaaattccagcttgttccgagcatcctttcgcttttccgtcgttcttcttttgtagtcaattgatagtttgtcttcatgcctagcgctgctagcgtttttagagata

SEQ ID NO: 103032 - DNA, 355 bp, Zea Mays
ctaatttggatacttggattatcttgtcaaggtcaaagtttctttttatgtatttcaacattcatttgtgtttgggccagatgaatttaattggttatacaaagacttgcagcagaaataaatattgctttaaatgctatttgctatcaaactaccagatcgcttcaccatttatttaataatttgtctggtataaccaatgggttgcaccttcgtattttgaggatcgatgggagcagcatgggaagggtggttttatgagcatgatgagagcttagggtttggtggtcccatgaaagaattgaataagtatcgacaagtatcagaattattttttatttaaaaatgctaaaaa

SEQ ID NO: 103033 - DNA, 512 bp, Zea Mays
gcgtttttgctcactatcgcaacacaagagcgagggcagcatacacgctacattggctcagccttcgggataaggcccgcctcacaaaaattaaataacatcatcttcaactcctcaccctcaaaaagattccatagatccccctccccaatacacgtcccggacgacgaggacatcaaatctcgttggccaccccaatttacccaaagacgggttcgttctatccccatccgacgacgtctaccacttcacgacatctcaccaacactatgcttcgacaccactcttcgccgatggtgctcatcggtccttgccccagccgggggatcagatgttttgcgcacttccagccgcggcacggactccgtcgcggccacatccaacgcaacaaaataatccaaatcctcatcccaagactctttagtccacgaaaacggttcccaaactcacccccatcagatgaccaagacccagtttccgaaccagacaaattttcattaacaagagttgca

SEQ ID NO: 103034 - DNA, 719 bp, Zea Mays
gtttaggttttcagattacgttcatgtttgtgttaatacatagttattgttagatttcgttcatgttattgtcgaatggagatagagataaagatagagcttgtgtatgttagtattgtgatggcttatagtttatggattagttatggtttagttattgtttcaagttatatgatatttttgccacatctgtaggagacatgtcggatgaagataaagatagagatagagtctggatgcacggagagaaggttggcgcaactttcaaatgcaagtattgtagagaaacaaagagcggagggggcgatacctgattgaaggagcatttcgtgcatagagggaagaatgccaagaaatgtccctttattcctccagacataaagacatatttccaacttgacatagataagacaaaggaaaagaagagttctaggttcaggcagcagctgaggcagataaggcagcacgaacccattttggggacgatgagtatgaggatgaacttcaagcggctttgcatcagtcacgtgtggagcacgaatttagtcagagggctagtgcaaggtatgacaggggtggtggatcctctagctagagggtatctcgagggccacttgataggatgatgggaaggagtagggaacaagtacctaagcttgttatagactagaatcttgctcaagcctctggaccaagacaacagatgatagatattggtc

SEQ ID NO: 103035 - DNA, 1251 bp, Zea Mays
gttttctcgggggctgggtcatcctcagcaataccctcgggggctagaccaccttcagtagcacccttaggggctgggttatcttcagtcataccctattgggttggacaaccctcgtgtggaacctcagggaccgaagtgtcctcatgaatcagaccgccctcaaaggttgaagatgcttgtgaaactgcccgggttatttctttcccagcaagaagactatccgaaggagcaccattcgggacctctacacggatgtcagcacctccagcttcagaaagttccaataagacaccctctaaatgatttcctctagtgcatggtcaatggtagacaatgtcatcccctagaggctaaccagcctcgatagagcctgaattgggacatcgttgttggctttgctacgacgattcctgcgaaccaaaggaggaacatcttcctcatcctcctcctccacttcctcctcctacgaaacacgcctaccagatctgatgccaccacaactctcaatgtcatcttcgagatcgacactcgccgggtcaccaccaaggtctggagcagcggagttagcctctagctctaagccggatgagtgctgaagctttcttttcctcctcttcgtctcggtggacacaaccggagaaccttctcggcgtgttcgcttgcaacaagcactaccagggctgcagactctctcctccccaccaaacacacgctcggttgcggcactcgccgactcaccgcgaacagactcgactgactcgccagccagaatactaagaacaacattcgctttggcttcatcagagatagtttgtatccggaggtgagtcagtttttcctcttcagggagaccccggtacgcagcaatgaaggattcaatctccttcgaagaatgtcatgctttatggcctagacccccgtcttaaacaggtaggttggatataaaatctgaaagggacctctgcagtgacaaaacgacacaatatgggcactacgtatgacaagtacaaaaactcatatacaacaacgcttaccacagggggaagattccaggtagagtacgaaagtggagcaccaacattcgaagctttgcccctcaacatcgagtcaacccgactcagcacgtcctcctcagatatccgcttatcagtaagtcgagaggggtcattaacaccggtgtacagataagccgggtagactctatctttcaaaggttgaatgttcttgaaaatgaaattgacaatgata

SEQ ID NO: 103036 - DNA, 455 bp, Zea Mays
gcgttgcagagctccggcgagctcgcgtaccggccgaaccgctccaggactggcgccctactttggtagagatcaaatccaagatctaacgagggtttcccctcaatcaatttcacgattggcgatctacctagctctgcccacgaagacagcgggcatcgtggacattcactcgcgttcccggtgatcagtgggttcctagttcaattgggcgggtcgatgatcatcacgggtacacgagagcactcaaacgagggagcagacggtatgaactgacctgaattgcgctggccacggcgaggtgttcttgcggtgtgtttgagcagatttgggggaactgtaaaattcgagctcgctggtgatcaactgagggtaatacttggtggctgggtgtgtgatgatcttgcggagcttatggagggctcaatttatactaagcgagagcggtggccggg

SEQ ID NO: 103037 - DNA, 393 bp, Zea Mays
ggcgtcgattactattttctggagtcactgacaattgcaaagaagtcctcaaacttctatctattctcggtttgaagtccccgacggcgctcacgcacagccgagctccggcgagcacctgcaccggccgaatggggcaacggctagggttctcgagcggtggacatcaaatctgacctatcccaagcatttcccctaacctaattccatctatggcccaatggcttgctctggccacgttggccgtgaacatcacggcgagacaaccgtgttcccgacgaccagagagctcctagcgcaattacgtgggtcggagagcatcgtagacctatgagtgtacttaaacggggaagaagatggtatgagcggacctgaatagtgctggccacgacg

SEQ ID NO: 103038 - DNA, 352 bp, Zea Mays
tgcggcacagtggcctagtcagtccgaagcttaaactcagtgggctcaggattatcgtcttcaacttctccctcttcttctcatcggccttgatatagaaccattcacttttccagccggttggccacatggtgagatagctgagcaccggggccttcatatccttgcgatacgcaaagttatatcagccaaaattttcatgtagcccgtcttctctggccttcgtttggtaatgtagctcatgcattcggcagaaagcttcagcattcggttccatttcttggcttcgaagagcccagatgaagacgttgagcctaacgatagcgctaggggtcagctgatgaagataaat

SEQ ID NO: 103039 - DNA, 450 bp, Zea Mays
ctcacgcttacttaactcggggtgaccactataccctactaacggagcaatcgacttaagtcggcaatgacttaaggcggtgcgacatgctcacacttacttaacttggggtgaccactatacccaactaacggagcaatcggcttaagtcggcaatgacttaaagcggtgcgacatgctcacgcttgcttagctcggggtgaccacaatatcctactaatggagcggtcagtttaagttggtaatgacttaaatttacacggcacgctcgcgcctacttaatccaacacaagcacatttgcgattactcatcttagggcgacctctatgccccgcgaggaaattccatacaacatttacttctgcgattgtagatactgttgtattctaacaacgggaaaacaatagcggcattcagtactaaaaagtgttttctaacaaaatatccag

SEQ ID NO: 103040 - DNA, 290 bp, Zea Mays
atcattttgttgagaaagcgcattgactcagatcaaacttaggaacaaatttccaagattgatgaactacttgttagaaagaaacagacttgtaaccctaaatccatcggcataaataaggcaggttaggaacccctacgaatcatctgatcttagaaactagatcttatctcgtagctaatcttctagctagcagcgcatcattgtaacctcgagctcaagcaatacaacctcaccatcacacatgacaagggttttatgccttccgatggcctgaacctatataattt

SEQ ID NO: 103041 - DNA, 432 bp, Zea Mays
gagcgactgaatatggtgattcaatcaacacggtaccagcaaactctgaggcgctatcatgataaggccatacagcgttgatccttcacagtgggagatctcgtcctccgccgaattctaacgggggagggacgacataaattgtcacctctatgggaaggaccattcttagtagcagaagccactcggccaggatcatatcgtctcactcagatggatggcacggaaattgggaactcatggaacatagaacacctcaggaagttttacccctagctacattccagaagctctcggattgatgatgtattctgtaaatcgagaaaaatatcaacaataaaaaggtttcaaaggcactcagattgttcgctgtcaattggcacgcttacctaactcggggtgaccactatgccctactaacggagcaatcgg

SEQ ID NO: 103042 - DNA, 291 bp, Zea Mays
gctattgccatctcgtgcaaaaaccctgtatgcgttgctacactcccccgttggatcaacttgcaccagtgagcaagttccaacacacaggttatccaaaaatggcgaaaggtggtgtatgttggtgattgggaaatagtcacgtcattagccaactcgtgttaagcaggagtcgattgcgttaagtgattgttatatacatgttgtgtctcggacttcgataataatagactagccgacgtgtatgatgtatagcggcctatattgttgctctagttagccgaattgtta

SEQ ID NO: 103043 - DNA, 570 bp, Zea Mays
ttctgatgccgtttcgggagcggtgcgcgttctctggatagggcagttcagtagtactactgtagttgggagtgctataaaagctcgtcgccgtcaggctgctgtttccttgtttattggtccaccggactgctcctgctttctcggcattggttggattctttgggtgtttgtttgttcgtatgatttgggatgggtcatggctggcaagcggcagcgtgaagagctgcttgctaggacatgtttggttcctttaccacgtgtatatgtttgctttgaggtcaaattagaatgagccgtggtcgcctcgatttcttggatcacaatgccaaaaaaaaatgcttcggtgttcatatcgctcctacgcgactctcatccaaacactatataaaatatgaccgcccccttctatccatttttgttcgtccaaccaaatacacccttagttacttgacttaactttagtcactaaaataccatatttggtttcagtgaccaaatctgactaaagagcatagcattaaatactgtacaaattaactgcattacccttagttaatgtcgttttcc

SEQ ID NO: 103044 - DNA, 474 bp, Zea Mays
attttccatgagttgttaggaaacactgtggaagtttacattgatgatattgtagtcaaatcggctgagtttagttctcatatagttgatttgcgcaaagcctttgataaaatgcgtcggtacggtttgaaaatgaacccacgtaaatgtgcttttggggtatcggctggtaagtttttaggatttatcatccatgaacatggcatagagatagaccctgaccgaattaagtctattcggaatgtgggacctcagacctgtaaggtcgaagtgtagaagtttctcagcaaggtgaattatttacggaggtttatttcaaacctagccaggaagattgatgccttcacccctatccttcggcttaagaatgatgccgaattcgcttggggggcagagcagcaggaagcatttgatctcattaaaaaatacttgtcttcggctcccgtattaaaagcaccacgagcaggagtacca

SEQ ID NO: 103045 - DNA, 386 bp, Zea Mays
atcagatgtaggattttgtttttgtgatactgaaactcggttgctgcgcaggtttcgacgtgtgggcctgcgcaagcaacccctgctgacggtactaattttgtggtggccgcaaccgcagtgcctgctaatgatagtttatctggttctgaatctgggtctttttcgtctgatggtgggtttgggagtccgttttcctggaccaaagagtcttcggatgaagacttgaattattttgctgcgttagatgtggccgctgtggagtcctcgccgcggttggaggttggtgaggtgtctgatctctcaagtgcgaggatcgagtgccgacggcgaaaagtggtgtcgaagcatagtgttggcgagatgtcgcgaagtggtaggcgtcg

SEQ ID NO: 103046 - DNA, 526 bp, Zea Mays
agcacactgctacactagctccattcttccccgacatccttttcattcaggggagattggagtcatggcccatctctgatgatgaacccaccgtgctgggggaagaacctcaccaacgcgatgctcaacgatggagaaataggcgttgtaacgtgcagcgacatcacgaagctggagaacgggacccggcacaacccgtctctagggatgaagcctcagagatgggggagaccctcgacgaaagagacatcgacgaaagattctaggctctagcgggagaatccgctccttgcccgaaacttgtaccacgattttgctcgagccttgaatatgccaagctaagttggaggagtcctggcgcagatagccgatggcctcccgcgaaccccaggtgcgaagggctatcggtaggtgcttactcaggcggccaatcatcttctacctctcgcccacccaccaaacgacctgcgtcatgccatcaacaaccgacgagacgcacagagcaacatcagcgcttcacgcgatc

SEQ ID NO: 103047 - DNA, 375 bp, Zea Mays
ggccatgttgacgatagtgggatcatcttctatgggatctcctcctgccagagcctggagtcttttcttccaggttggggtgtttttgttgctgggtgggaaatatcggaggggagtctcaaagatctctcggctatagttttggcacagttgtttgagggcttttcgagcgatgctctggcatgtgtctgggaagcggtgcccgatgaaggtaatttggaaaggagggtggtttgggtagttccggcttttctcccaagtagaccgccatagagcacttttccattccattttcacggtactctttccagacatattcgggcttcttgcggatccccaagcgcagtgcgtagcttcgaagaaggtgaggaaagc

SEQ ID NO: 103048 - DNA, 832 bp, Zea Mays
aaagaaaggggaggttttaaaaggataagtttaaggtgagaatttaggtagaagacaaaaatatcgcaagtgccagaggcgataacagacaagggtgtgagagagaagatgaaggcattgaagagacagtggtatgattacaacaaataatggagttgcacccaagcttacacgcggtaaagaagaggatacaaccaagggtgaggtaagtaaaacaccgctctcaaattggaatatgaagttggagattttagataacatacataacgtaatcaccaaggtaagatcgagggatgagaaaggtaaaggtaatagcaaacaaaagtaggcaaaggatggagttaaggcaaaactcgcaaaatggagaaatggagaagacaatcgtgggtaaggtaggtaaggttccaacagaatgggtgaagtaaaagaaattattaccgagggaagttatatggaaacgatgagatcattaaggatgtgaggaatagaacgatcgctcatggatcatgaagaaacaaaggtggtcaagagcatgtaaactgaaatgtcttaaacagacattggggtacaaaggttagcatttatataaaaagtaagagtatgcaagattccgaaggtgcgagcataccaagaccaagggagtacgaattactaaaagatagcgacttaacaatagaagaggaaaggctctcaaaagacaggaaggtcaggaacatataaactgaaatgtctaagtaggtagtagaaatttagaggcaagtatttgaaacaagggcattaaaggggtacatcgtcgtcgcgggccctgccaccctccgcgggtggcccggcc

SEQ ID NO: 103049 - DNA, 344 bp, Zea Mays
ggcatcatggactgcaaactcaatgaatttctggcattgacccaagggaatcacaccatgctatagtaccctccggcattcaatgatctgtgatagtatgcagtctaccatgtggataaagatgagaagaagagcgacagattcaggagaggtctcagtaccaagttccgagaatgtctcaacacaatctaggccaatagttacaacgagctagtcaacctggccatctcgtaggaagattgcatcatgtcccatagagcagagaagaagaggaaggcacccatggcaggaccatccgcacaacctcaacgcttccggatcttgtccaatattcaaatcagggg

SEQ ID NO: 103050 - DNA, 416 bp, Zea Mays
taggttgggacctagtcttacgataagtatcaaaccaagaagggctccatgactctcccccatctgggaggggcccttcaaggtaacgggaatgcaccgacccgagggcaaccatctagctacgactgaaggaatgcctcaccctggtgcccgaacatctctataagtcctatccatagagcaagtctgaggggtcgattttgtttcccttttgtaactaggtaacacatacgtgtacgccagcccggtggggtccgaccccataaacccggcctgttggtctgcacccatgcatgatgagttataaagaaaaactaccccctcagttatgcccctatgatagttccatcttgctgctccatggtcttgccttgcagtttttcagataataccttttatctaacccacccgcacag

SEQ ID NO: 103051 - DNA, 320 bp, Zea Mays
cacgtgagtcgtgcaagagatatataatagcagatcttcagctggctgacttggcgtggctcggcgcgacggcttcagtactggcggcgttgtcaggaatttcttcagtgcatctagagcttcctgagcttctgaggtccactggaatttgtccacctttttgagcaacttgtagaacggcaagcctttctctcctaaccttgatatgaatctgcttaaagttgccatgcatccagtaagtctttgtactttcttctgcgaccgtggcgcttccatcctcatgatagcctcgatcttttctgggttagcttcaattcccc

SEQ ID NO: 103052 - DNA, 420 bp, Zea Mays
tgcaggagctaggaacatgcaagagtaagctcagctaggaatcagatatgtctactggccttctttttatacttactgtgactcatattgtcatatatagtagttaattagttatatacataatatatatataatttatggctatattgccaaaacgcctagaaaagcgcctagaagcgcctaagaccgagtactcccgactaggcgctaggcaatgggtcaccgcctagattccgcctagcgcctagctgaaccttggcggaagctattatgtctatgtgtttatttgcataggtaggtgatacgtgggaagcaggcatctcaaggttgcaatagacagtgtttgtgtttagaatattgtgccagtgcctcaattttattagatgaacattgggacgtcagctatttgactggaccaat

SEQ ID NO: 103053 - DNA, 625 bp, Zea Mays
ccaatcttgaacagaactttcaccttataaccaatcttgatatctcctgattcattcaaccattggacatgatatggatgagggtgtcgttgcaacttcaaaccaagcttttcaaccatctcacgacttgcaagattatggcagctccctccatcaatgatcacctttactactttgtcttgcactttggctcgcgtttgaaaaagattatgtcgctgtccaatttcagcttctttcatttgaacactcaagatttgtgtaaccacaagagtagtaccatgctcaaattcacatccagtgtgttcctcatttttatgagtgtcttctacctttcctgcttcagcttcctcttcactagctgatgtatattctccatcatcattcacaaggatcacacgattattgggacactcctttatgacatgaccacgacctccacacttgaagcactgaataccactactcttggctgttgaacccactgatgttgaagtggatgttgctggtttataactcgtgtttggagcagcaccattctttccactagaattgccttgaatattggatcgcaagcctctagttgaaccttttgtcgctgaggatgcaacagtaaaccttgagatcg

SEQ ID NO: 103054 - DNA, 858 bp, Zea Mays
gccatgcaccaaagagcactcatcccctttggtttgtaaaaccattgaacatctagagaagctccttcaaatgtagaaaagtcgaaccctaaacgacagtttggtggagcccaagttttccacaccctagtataatgaccaaaaaagtcgaacatgagaaaagctcctctggcagattttgtcgaatagtttccttgccgctatgctgaaaatgtttctgtcctctatgttagggcgtagctcaaagtttgggagtaaatcccataactgaagataatgcactagaactccaaccgagagagctcccttaatgtttgagatccatcttctatttgcctcctgaacaatccttttgtttgcaatccgtttcaggatgatttcaaataatctaggagcaatcttaataatcctttgtccaaggagccacttatctgtcgaaaacaaggtaagagacccataccctacctctgaaactagaactgtagaaaagaatgttgaagccttgcttggaacttggatggggaggtttgcccaaggatgccctaaatcagtcttgtgcagccgaagccatctcatgcgaagtgctcaatagagctccggtaggctagaaatacctagccctcctaactgaagaggctgacacaccctgccccatactacaatgcaatgccttccccagacttctttacaaccataccaaagaaatccctttcatatcttatcaatagcttgtagggcctatggagggatgtgaatagtcattgccaagtagataatcatgcctgtaaggatgtgctacacttgaattcttctgcctgcccttgtcattaagtcaactttctagcttgggaggtggtt

SEQ ID NO: 103055 - DNA, 542 bp, Zea Mays
tgcaattcatcatgtttcttatatcttgatgattctgattttgattttaagtctaccctgcgagaataagtaagaatcataaccttaatttcattttgttcctgcatgcagacccatcacccatgatgttgtattgtctaatccattgtgcaattcatcatatttcttatatctctattctactactttaatgctatgtttagcatgtgtaatatttcccaatcatggttcagctagaatctgttgcagtcgaatatgagggcaacagttattgtatattagaatatgaccttccatctatgcataaagcatggctgccagctggttgagttgataagtctgattatatctgataattggtaatttatcaggcgataaatttaaatttatggatgaaatttgactgaaaatggggaaaacatgagtttgaccatttttttcaaatcaagtatgatatattggtatgtttatagtttataggacctcatcgatatcaccaacactttgcaacgtactgctgagattctggtagaactaacacc

SEQ ID NO: 103056 - DNA, 715 bp, Zea Mays
ataaagtgtgctcgacataaatgtttggtcgttgtaggtagaaattgtctcgacttaagtagagaggtgatgacatgccgtaagtagtcatcacttcctctataattataagtcgagtctatacgcgttagacgttccttaaattgtgcttcgcaaataagtgtacgattgtgtttatgacttgaatagatgtcttcgagtgaactaataagttcctaaagcaattatgtgtaaggtgtttatagtgacgctttatcccgaaaggtgttaagtctgcgcacaaataagagataagtgtattttgtgtagtgtggattgattttgagttcatggtagcaagaaacgaattagtgcgcatataggcgaggaatgagtgtgatgaaatggtgtcatgccttcgtagtcatcatgtcgtctgttggtgacctaactgaaggtcgtagagaagggtcgattacatgtgtgttattattgtcaccttgtggttctgtatgaatttgcaatgtgaagtagtaggctctctatgtgatgctagatgtctaggtagacgttcgtgaattgtggtgctcggaccgtcgagatgaaggttaagtcggtcgacgccgattaagtagttaaaatgattaatagaataatcatggggttaaaactagaaactagtgttctcgcacccggttgggatgttgtagcccaatttcgcatggttatgatcgcg

SEQ ID NO: 103057 - DNA, 519 bp, Zea Mays
accgatgcctagacatttggggcgacactcaactagttgttgggcaagtaatgaaagattcgaagtgttgggaccccaatatggcagcatacttcaaggaagtacaccgcctcgaggacaagtttgatggtttcaagctaaaccatatcctctaatgggataacaaagcggctaacgctctactgaagatagcctccggacggggagccatcctaataggagtctttgctaatgacctctttgagccaaccgtgtggtgtggtgaaactcgatgcgaaaacgaccaactgggaacactagtccaccgacccgaaaagctttgtgacctccatcagggattgatcctcgaccgcttgctgaagcattcactatcataggggtgaggccacctcattgggtcctactgcctcgcaaatgatccatactcagaaacgtaccaatcgggctctccctagtaagatcccgtactcatcctttcctttgtagggatcgaaaaacctcacgacgtgtgaaatagtc

SEQ ID NO: 103058 - DNA, 550 bp, Zea Mays
aggggaggaggtgggacccgcttcttggggtggctacaggacaagctagagtcgctcccgtctattatgatgggccatatgtcctatgtgtctcttgtgacttgtgagggggctacgaatgccttgcccggtgagggatgtaggcacttcgaggcctttgatcagggcaacgaggacttcgatgctggtgtgttccagattgaagacgacgtgctaaagcactctatgggggcgcttaacgataggatgtggggtcctcacggccgcggcttcgtccgagagagagccgatcgagcgctggtgtaggttttttgtttttgatgatggtggtgtgtgtgtgtgtgtgtgtgtttgttgtctgaaacgttgttatgttgtctttgcaggcaatgtgggatgaagaggtggaagacctcgttggccttgagagctcggtggcttggaaggacgttgtgatggagacgggagcggaagagcaatcctcactcaaggaaggcggcgctgagggtcctgcggcggcgggtacttctgcgcaggttgaaagaatata

SEQ ID NO: 103059 - DNA, 583 bp, Zea Mays
gttgtttttggaaggtcaactgttaagcaagggcagatcgaagcgatgaaaggcagatatttttgttatatttctattgtgagggtcggaggggagaatatcgttcctcttcccgaagctaatgaggtggtagtcttcagaagcttcatgaaggctgggcttcgtttcccgcttcataaaatgctagtcgatgttttgaaaacgtttgagatatatcttcattagattacccccaaagctcttattagagtaggggtttttatatgggccatgaggaggcaagggctagagccagatgtcaggtgcttctgtaatattcacaagttatcatatcggacgaaagcgactgggaaagagcaataccacaataacttcagttgttacagcttcgtgcctcgctctgaggctagttaccttgtgcccacatttcggaaaaggtggccaggctcttggatgcaggagtggttttatatgaagaatgatctgagtaagagagaggatgtgaaagggattattcaacgcactatatggtctcgctttggcattaggaggccactcattgcacatgggaatgacgtgctag

SEQ ID NO: 103060 - DNA, 544 bp, Zea Mays
ttttggacccaagtgcaaataccaaggtagtacaacatcacaaactatgtgtttctcacatttgaggatttgcaagccacgtgatgaagtttggacttatttgcaaaaaggacaccccatacatccctatgcctaagtatgaaaaccagtgcatagagccaactttggaaccctgtatctttccgttcatgaggaatttgcctagggtcaacatatcaaacttgtagagctactataggagtacagctttgcttaagtgattaagccttggtgtcatgttaaatctggagataattaggtctaaaatcaagctgacagtcagccaatgaactgaataaggggtaacagtgatgttgtgcaagctttgagattggattcgaccatgatccagtaattgtttgactatggttgctatagcaagattgtagctggatcatagggctatagctttgatacatatggattaagtagttactacatgaaattcaaagatcctggcacctgaaatccctctgttagacaccctgatggtgatcgccatggt

SEQ ID NO: 103061 - DNA, 276 bp, Zea Mays
acaagattggaaccagatctgacatgtttgtcccttcgtttcttcttcaacacacaatcgcatgtctacttgtcgagatgttggtgggctgaactctacaatattaagcaattgcaatgaggtattgtgccataagcctaattccaaggttacacgatcattcacatatggatgctggcttttcatatggaaaccaccataaattctagcctttacaatgcaatctgtcactagatctttcctttctatgtgagtcgctgctagatctgttcttga

SEQ ID NO: 103062 - DNA, 540 bp, Zea Mays
caaaatgtttaccttgaaattagaatagaataaactgccgacaatatgctgccgactgtagcggctgatgtccgcttcaagcttcgggaagccgatactcttcgataaagtaccgacaaccttcgcaccagtttggtctcgtatacagcctaacccttcatcatcaataccaccaaagagaagcgcccccggccgatatccacaagatatagcatactctttcaattcctctttttcagcttcagtcagctcctggccaactaagtttcggaagtcaaaagtttcatcttccgaggtatcttcggttattcctcctttctcgggtttggcagtcgtggtctcttcggtggctgcagcagtttcttcagcgaccatgtttagcagcattttatctatatcagcggctatgctctctaaattaataccttcggagttagcatcttcggctctggcctcttctgcggcagtctccgaaggtacagcttcagtagctgtcatgatttcaattgtcggcatcttcagagttggagctcttagtgg

SEQ ID NO: 103063 - DNA, 419 bp, Zea Mays
ctttgatttttggagggattttccctttccaaatatgattgaagcaagaaccatagcagttactatcaatgttatcatagagagttttcacattaaattctttcttattgccccatttccatttaacatcatcacccaactcctggaattcaaacatctgaaatttttcaagaatttcagcccattttttcctgtcatcatcactgatccatcttctgaaatcaagttgggcatttttctcaatgacatcaatcacaagaatctttttgtcattacaaatatcaaacaagtatggtttagatatagcaagaggagtttcaagaagccaagaatcttcccaaaatctagacttatcaccagactgcgtaataatgtgtcttccctgcatgtaatactctctaactttaagcatatcactc

SEQ ID NO: 103064 - DNA, 587 bp, Zea Mays
acgaactcatgacctatcggactaggcctgagtgcacagacctctagcagggcacaacatgacaggccacaccgagccccaggctacaaaggccaagggtcggtatagactaaatgatggtgcctgggaccatcgcagcccaacgccgtccgccacggtaaatacaagacagcctggcaacctcgaaccccacgagtacgcgtggctttaccatgggtagaatgttagtttcacccttgcctgatggatccttcccaaggaagccaccgctgcctgacccctctcccggactataaaatggaagggttggcctccaggcaagaggatgcttccaaaggtagccagacgacacctagatggagccgaacccacaaggacgaaccccggacgaacaagaggataaggagcgcccacgaggaccaagaggccggagccccaccgccaagccaaaacttagctaggactccactctgtagcttctaagctccacttcgacccccgaataagagacctgggagcctctcctccctctctcgcccacttgtaacccctactacgtgttttgaccatcaatggtgccggtagcg

SEQ ID NO: 103065 - DNA, 542 bp, Zea Mays
acgatatcgaggccccatcgctgcagtggccaagtgtgggcggtgagctttgtgaattgtgaggggggcaaccgttctaggtgagaatttttggcacgcttcgcacaagaggaccactctgttagctgcgcacacaatagctaaccagttgaaaccttagcacatgactttggtagcgagggccctaggtcccaaatgtgaaccgcatgttcctctatggaccttgcgaaggagttctatgccttcgattattgtgatacatttgagcattggttggcttattcccttcttgtatcattgtccatctatcaatgcgaagtcacggcttctgtgcttcaatcttttggcttctctctagtaagaggggcgataatgaccttggaggtataaggtgatgagtgcaggccagtcttcggtcattattagatgtacgattctgtggccgtcggggtcttatgtcatctgcaggccttcaggatttctttcagctggtgtgtcgattgtgtggaagaacatgtcagatgccattgggtcgcctttcg

SEQ ID NO: 103066 - DNA, 346 bp, Zea Mays
cctagggctacgtccatcttagagaaggatggctatgatcacgctaaggttgtagctcagccagacttcgccttcttagctaatgattttaaaaaaccttcagccgaagctactaccctaggtgggaaattttattctgaagtatggctgaaaggtggacgagaaattgctgatgaagctattaaaagaaatgagaaagaatctcatgatgctttagaagaagcaaaaggagccgaagaagctaccgagcgggctagacttataggtagcactttttaactcattttcataagtttttcagcttcgacactaacagatactgtgtctcaatgcaactgagctttct

SEQ ID NO: 103067 - DNA, 522 bp, Zea Mays
tgaacataagcctctgttgtcggacgaccagcatctaattggatttttttaagatctatctcgtaagctttgcgaagccaagcgatccttccttcttttgtcttcagtgatgcaaatacatctctatactttttctcaatcaacagatgagtggcaaacaaatgtaggtcgctgccttctggtgatccatcatcgataacttgttgcaactgcacaataacctcaactcaaactgggtccgtgtcagcagaggtaatggacttgttagtggtcattgaacgtgactcaaaagcctccacaaggcgtttcatgtactcttccctcgaatctttttttcttctttggtttaggagaatcatgccgcatcttacgcttcccagttgcatttgtgcatgggtcaggtgtgctgttttcacccccacctaaagtggcttccaaatgatcatcagatgatgaattagcatcctctacgccaggaacaagggttctttcatttgtgcagacaatgggtccaaacataac

SEQ ID NO: 103068 - DNA, 1163 bp, Zea Mays
gcttatgtaagtccaacacgacagtcgtgccatgattgggcctcatgcatgacacgtcgtgccgggccaagctcggcccgttaaagcactcgaccagacgtgaggatagcaaaaatatattccctccctgtgatgtatggctacctgcctgctccacttgcccccttcgcccctcggttacatcgcctcattctcattgtctcacgcaaactctatgaaagctcctccgtttctcttgctcgtcgctctcctcttgctctagggatcttccttctattcaatggtgagccgatgacaagtagccactatcggcgtgacagtggcctactcgctctgtcgtcgctaacctgttttgtaactataagtccggctctggcttaaccttaaaccgatgaccctcgataatgacttttttgtggtgctcctgctactttggcgctcttgatccggttggtctcgtgaagtccgatttggctattcccctagatctaccttttttgctcgtcatgttgttcttagtttgatgatttgttcttagatctcttgctttcgtcgcatctgtgtatatctcttattctactactgtcggcgacaagtgtttctcattttaaccttaactctaagcctaacctactatgttcccctctctctcgactatcctcgctaagatccatgttctgctccactcctcccttaacctcaagcaacatcccctctagtggcccctcgtcggtgactctagtgttttggtcggtaaggtgaagttattcccctagatctactatttctgtgtcgtcataatgttttattttgctttcttttttcatttatgtgtttcgaaggttgttgaggagccaaagacgtcgtgaggagtcagctaagaattcctagatggaccttgattcagccgctaaggaggcggagcatgagactgtggatcacaatgggcaacctgatggcatggcgttgtttagcagtaatgtcaatgttgctatcgacatgtttaagcgtgtccataattatatgtattatgttttttcttgtattagttttttgtattttttatttgtattattaatgaggcttacgagcgctacaacccagttagccaacgggcttgaagctctacacgaccccgtttaaaggcactccttatcgtgttt

SEQ ID NO: 103069 - DNA, 562 bp, Zea Mays
ttctcggttgcgccatgtcgtgaccgtttcaccatgtatctataaccgtggcaatcgaggagttactatcccggagccattgcaccgacgggcgccacagtgagttaccagtgaaaaatcacaacgtcgccccaaccatgttcatccaaaattggatcacactgtggttgaatcctttaaattgagtgccacgctagctccgcctatccattatgaacctagtccaacacttgcttctcccttccatcgactatagcctgagaattctggatttccctataatcgaccagagcaccaccgtgatacacctcgccgtggccaaagtgatccaggttggttcatacctctctagtctgtgttctagtgtccttagggtctcttgttgctcgccgacctgaccgattgaactctaccatagtaaactatccagaacaccggcttgtcgtcgtggaacgcctcgtggactacctcaacatgggtagccaactcggtctttcctccggttgtctttggcgccattcctgagtctagacattcttgtgatgctcaccctatccccaat

SEQ ID NO: 103070 - DNA, 343 bp, Zea Mays
tggatccagtcaatatctgccggcaagatgaacggtacggtgcaatgcaacggataaattttgaaccagaccgttgcagcaccttggataaaattgctcacgatcgctagaccactacataatccagctattaataagttaataatatccaacttgaatgaaaaggtgcaaggtaaattcagtgatgtcattcattggacatctgtactattctagagctgcacacgaactgtgtatctgtatggcatcctacacgaaaccgaggctaccgagtccagataatgtacctgaacgtacacctcgtcgtccattgctgcgcttacaattaggcctccactcatgg

SEQ ID NO: 103071 - DNA, 540 bp, Zea Mays
gtgaaaggacatagcaatgctcaaaacaagatgatgatacattattgaatttgggacaattcttcttgacatgttccttcttgtggcacttgtgacacaccttgtcacattctttcacaaacatggtctttcgcttcataaaatcattctttcctttcttaggaacatacccaagaccctcacgattaagtgagcaccgttggcttcccaatataaaatccaatttaacctttccaccataggccttctctaagtcatgagttagagcatttactttcccttccaaggcttcattctcaacaatgatttgtgattcatcaaaaccaatattatcattcacaagagaaattttgcatttatcacaaataaaactagtaggttgtggttcacttgtagaactatcaagtaagtcacaagtgattccaacatcctcggtgaccaccacaacttcatgcacaagagatgagttttgagcctccacaagcttctcacaactctcttttagattgttgtgggaggtcttgagctcctcaaaggaca

SEQ ID NO: 103072 - DNA, 366 bp, Zea Mays
cgagcactgacaggcttctgaacatccaaagtcgtatcagcctctgggaggggcgccactaccaacgtcccagcaggagcagcatcggatgaatcctcagctagcaaatcaagcatagcgcttatttctgcatcattagggttcaggggcacctcaaaatgaacctgtcgttcgtcatcaggaatctccccaagcgaggcaactaaagcactaacttcttcagcagagggtcgcactctaaggcccaaattgccatcagtaatgggtggattcgacacgaaaagggtgaaggctttggaaggaggcaagttccaggacgaatacgccaatggagcaccaacatttgacaccttgcccctgaggatc

SEQ ID NO: 103073 - DNA, 357 bp, Zea Mays
aatggtattcttatgcaacatttatggcgagatcttcagagacgctttggcaaagaaggggggtttctttctttatgaagcgtgaaaagaagggaggtgtttttcgcctacgactcaaaaatggtatgtacgaagatttcacgcctcacaaagaaatatattacatcattaaatatacaaatagttgataagtgtttcttacaaaagcaaaattgtataaagagaatctaaagttttaacaaataagctctagtcatcctcttttaaaactttatcgtcagcttcgttcagtagtctgttgacagcttcgtcaacggcttcatagcaatcctaattacatcgagcgcccctttagag

SEQ ID NO: 103074 - DNA, 507 bp, Zea Mays
ctgttctttcgagtcaaagggacctcatctccttcctcacagtcgtcttcatcagcaacacagacaacacacccattggggtcagcagcagaaggagcacacccattggggtcagcagcagaaggagcacacccattggggtcagcagcaggtagagcacccccatcgagttcagcgtcagtaaattcaggaatgggcgcttcttcagcagcaggaaccaaaggaccaacatcccgatccaaactagatactcgtcggagacgtctctttttcttcttcggctcgtcagcagaaggatcaagttgattggctcgggaaggacgcctcgggcgagtactgacaggtttctgaatatccaaggttatatcagtttctgggggaggtgccaccaccaacgtcccagcaggagcagcatcagaagagtcctcagccagcaaatcaagcatagcacttatttctgcgtcactaggatccagaggcacctcaaaatggacctgccgttcatca

SEQ ID NO: 103075 - DNA, 901 bp, Zea Mays
acttcgggtaaaactttatgcatgaggagagaggagagaattaacttatccatgttctgttgtatttcaatttaatttcccagattattcaagcactatagagctatggccacttggcaatataaataaatatatgatgccacacaacacaagcaaataaaatatagagctaaacaaaattatttacgaaggttgcacataatgtgacattaggggcttgaacaacccaccataatccacgcgagtacaagctctagcgtatctggcgtcagcgtgtgtgcgaccatcagggctacgacagtatagcaagccttcgtaatatgcgcaataggcacaattatggctcggtaattggggtacacgataaaaccacgcaacatgcgcaacaagcgcaatcgtggctcgcggcagacagacagtgcctacagggcatgcaaaaaatacgcgactcagcgatggcggtctgactcaacgggagcgatccgattaatggagagcgcgacatagcaatcacatgacgcaaccaagttcgaacggcacaaatattgcgtcgtgttgccagggcgcagtcaatattcagctaatgccataactcagtcgattaccaacgcagcctgatcggcgtgtctgagtacccattatacaatttaatcgctcgatatgagtccgaaggctcaacacatagaaaatatttagagcgatttgagtatacacaatataaccttcacatgcattttaataaatttccgctaagtatttactacgggaaataaaagcagaaaatactagaattaatttatgaatataacacattagatgcaaagcattttcccacatcgaagcatacattttctattaattatttgcatcaagaaattaaggaatgtagaaattgcaacat

SEQ ID NO: 103076 - DNA, 523 bp, Zea Mays
gaggtccggacccaacgacgcatcctgggatgtattacctttcctcgccacgcggtgccctcagaccgacccatgtggtggggtcgggtgccgctctccgtgttacttggaggtgtcgtacgggtgcagcgtcttcatactatagaagagggtacccctgattcagggtaccgacagcgttctttaggggaataattcgggtatccctgattattaccctcgacaatctgaaataggagatgtgataggtaagacaactagagatagccttaaagtggttttgttgaagtcggtctcagagcatgtacaattctaagatcttggatcgattttccaagtataaacaacaattaagataatgtataatgcacctcagagtctctagaccataaatgaagttaaaagacaatatgtataaatagactcgcgaagagcctgcctcctagcttttccacttaccccacttgagacctcttaaaagaccccctaattaaaatacctcaacttcaaaactagttgttta

SEQ ID NO: 103077 - DNA, 308 bp, Zea Mays
aagaattcgacctcgaattccatcgcttctaacgaaacgacacaagaaagatcagtgaagacaaaaactcaccaataacaaaaagttcaaggtacttttgccgcatcagctcctcaagctcctaggtagcctcgcgctccgtctgatttgcccacaagaccttaacatacttaattgttctccttctcgtgacacgctccgaggactccaaaatatgcaccgggcgacactccagagtcatatcttgctgcacagcgatcggttccaactcgatttgatggtccggatcctgcagatacttcctcaac

SEQ ID NO: 103078 - DNA, 626 bp, Zea Mays
gcaatatgtccagggcttcaacgacctctgccaatacgcgggttaccatgcagactcttatgagaagaagagggaccgcttccggaggggacttagtaccaaactccgtgagcgccttaacactgttcgagccaacaactacaatgaactggtcaacctggccatctcccaggaagactgcatcttagcccatcgagaagataagaagaggaaggcaccgatggcaggatcctcggcccaaccctagaggttccagattgtctccaacactcataaaacgggatcccaacaacaggcatgaagatgggtaatcaggctgctttagcaatagcaagcacccaaccgtctccctgccctctctccaagaaacaatccacctccgcgacagcaacatcagcagtagtttcggtagggaagcgggaatcaatgcttcacgtgtggtaacgccggccactacgccaaggattgcccacggaatcaaccaagacaggtgccagctgctaaccaagaaaagggaaagaaacaaaaggtgcaactcaagcaagggaggctaaatttcaccactctggaggagttacccgagggagcacccatcatgactggtaccttctcagttttaaatcaac

SEQ ID NO: 103079 - DNA, 406 bp, Zea Mays
gaagacacgacgataccctcgactatctctaaacttttgaaatggagggagaaaaatcgaaggctaaggggactaccaacgacacgagaataatcgcttcacgatcgcagcgaagtctaccaagcacgacaggacgcaaagggggataacttctgccaaaggtctgaagatttggagggcaacagagatgacccacaatgcctacactggtagacctcgctccaaaaaacgtacatgtaacaaagattaccaatagcattagcaggtccacctgtaagtggctgcggaggtatcaatttctgtgaatcgagaaatctataattggtcatgtaattaccatcttgtactatgcatggcgggattatagttggtaaccgggggcattacggtacttagtttactaacc

SEQ ID NO: 103080 - DNA, 464 bp, Zea Mays
cgtggcttttactaactgaataaaattcagcatttcccccgactgacaactcgacttggagcagaatttgctgtcaatttgaagtaaaaacaggagaatccatattaacaaaaactgctctccaaccagccctcaacaacttgctatagcaacacagggtataaaacacactgatagaaagttataatgccccaagttgtcctaaaccaaaggaattttcttgtttcagttagctgaaatccaaaacgtgacagtgaatgttttgggacagtttactgcaagctctgtgcaggaccatgccaatctcataataagaaatctactcactaaccaaagatcttcaacattgctataggagtcatggctcatacccacatagattagtcacaacaaggatctaaaactgagtaagcacactgaacttggactttcagttggctgaaacctgaattcggacattaaat

SEQ ID NO: 103081 - DNA, 455 bp, Zea Mays
tgcacatttttatgaccataccggccagccaacatagcttctaccggcttataagtcttccttctttagagaaagcaatcatggtcaaatgctcctgctagtgtcaaattgaggcaaatttttgcgcgagcagacgtgggtccggtgtgtgcaaaactaatggtggctgtcacgtgggcgtccgtagtctgcaatgtgggcccaacgtccggagtgtgtgatggcttgcacaataggaatggctgaatgggaatgggggattttgtcatatgggaccggagtgccccaagtcaggagttgctcgacgtcccgcgtcacagaatgtgatggtttgccggacaacagcggtggaggagccattatggcttagtgtggcatcagccataccttacttttaataactctcatatcttctactataacatcaaaataagatgtggtgtgatggatatgat

SEQ ID NO: 103082 - DNA, 656 bp, Zea Mays
aactgcttgggtcgtattccaaagtggaagataatgccttatccacatccttcgggggccggggaaaaaagagaataaacagagtttttgatgccatcggttttgtttaccccaactactgctacccactgcgaggacggggaaagaagaggaaggctgctgcttcagccaaaattgctgcttcggccaaaattgatgccatcagttttgtttaccccgactactgctacccgcccccgatgagcctgcgctgaagagcaaaaaactgaaagtccttacccaccggccacggtatattgaaccggctgtggtgcctgaatttggcggagagacttcttcaactgctaaaccaaaggagcccatttctcctacacagaaggctgaagatccggctgtaatgctgaaggtaccctcagccgagctagctgagtcgaagactgataaggctaaagagccaaaaatcgaaggaacaaaaatgttagaagttttaagcccttcggcagaagtaacagtaccgaaggcataaaaaggtcttgcggcaactcccaaaagaagaaggatggcaaatgtactagatgtgctagaatcagtaaaggcttcaagctctactccttcagggaaaattgtcgaggcttcaaaaatgcaaaccgaagctg

SEQ ID NO: 103083 - DNA, 400 bp, Zea Mays
gtcggatgtagtcccttaaggtctcattaggcttttatcgacaattcttgaggtcccacaatatgtcagggtgaacgtacgtgccacggaaattttcgacaaagatttcctcgagtcggcctagttctggatgcaacttgtcctcaagttctctagccacgcacacatagaatctgccaaatacaggggaggttgtggattataaagtcatcatggtgtgctcctcccacatggcatgctagtcggtagtatcccagccaacgattggggttcgattctcctgagtatgttgcaatattggtgggtgccatgtaccgctgtggcactggtgttcaaaggatgtgatggctaaaggcccgaggtcctgtggtggcgggctcaggatttagtccccatcgag

SEQ ID NO: 103084 - DNA, 303 bp, Zea Mays
gagggcactagacatgttcagtgacacactggataggtactacagctgaaccgaagactaggatgaagagtgtgtcctattgacatgaagcacgcaaagagaactgaagagtggccttaggaattaaagggcaccagccatatttggtacaacaatggactctgcactagatacaacactcaaagatgtcgcaaatgcaaccaggtcgggtataatacaccagacatgttcggtgtaacaccggtggcacaccggatacccagaggctcatcggtcagtaacaaatagtcataacggctagtt

SEQ ID NO: 103085 - DNA, 295 bp, Zea Mays
ggatttgaccatgacactcgtgttgccaccataggatgatatggttgcttcatagctcatgagaattgctttgggtcaaagtggccatcgtacatgggtagctggggtggcttgtatgaaggtggccatggcacagcctgcagctctatagctaggggagaaacatcatcaaaagcaatattgtcatggttaaaatcatcatagcacatatcttcatggctggggccttcctaatgaaggtctctttgttgtagtcgatacccttgttcggtttcttgtgcgatgtgtcgcattt

SEQ ID NO: 103086 - DNA, 331 bp, Zea Mays
tttttcaatgggaagccaacttcatatgcatactgactataaaattgatatgcttcatccacaccactgaatgtcataccaactttaggtaccaacctcgaatcaattgtcactttctgtgcaaattaataaaatatatatgtatgtacaaataacaataacatgtacgatgcatggtgtccgacctaattttccatcgtatgcacaatataacatgtcataccatctagctccatactattaccctcgattcaatttttctatcgtatgcaatctaatatacattaatgaaaatccaaaacagttataaagaacttacatatctctgcag

SEQ ID NO: 103087 - DNA, 493 bp, Zea Mays
tttgttttcattgccttttccatgtgtagtgtatcgtcatttgtttagcctagtttagaccttagttagagttgctctgcctagtttagttggtcatgcttatgtatcatcattcaaaattttatatcctgcagtaccaaagtaggaaaatacgtaagtttcaactctatcatttctttttattagaatccaaattcagttgctatcttaattttttctacatattttatatggtttaaaaacacccacaacaaattatttcttgtagtaattttgccttctttaattatcataggcatgactgcggtattttcacacttcaatacatggaatattgggatatatctgttgatatgatgctcaagttccgcactgaggacatccctcaaattcgaatcaccttggccaacgatctctattttagtgagaagaacactgaagacaagtctctagttcgcaacatgtttcttcaggttttttgtgattcaatttg

SEQ ID NO: 103088 - DNA, 504 bp, Zea Mays
tgccctgctcctgagattccagtgcccgcttatgctcctgtgtttgactctcaggccgaggatgcagctcttcgtcagtatgacactccgggtacaacagctgatgatgatgatgatgatgatgattttgggattcctcctctgcctccgcctcctatgcctccacgctcacatgatcatgaggctgggagctctagtgctgcccctgctactcctcaggctatggaccctgctcttgcttcgattctccagactctctctcagcagcaggttcacctggcagccgagcaggcccgtttatccgacaggatgctctcaatgtttcagaacatgcaggacaggcaggatgctcttcagcagcagcttattcaggatagggcagagaatagggcattcatggctctcatgcttcagcattctggtatctcagcacctccggttcagtctgctccgcctccttcgcttcacgctccagtggtgccttcgatcttgtctggaccccct

SEQ ID NO: 103089 - DNA, 545 bp, Zea Mays
gttttttctgaaggggaaggtgaggctgatctgaattggcgcttcaaagatggagcatccatgaaatcatcatcggacaatgtggatggagctgaaggaggatttctttttacacgacaagctagtgcctttctacgaacacgatgaactggtgctggttgtggatcagtctgctgctggttatgtggattatcagcttgatgtgctgagctgctagatcgagttcgtcttgaaatgtcaacggaaaaaacctcctgacttgactcaatggttagtctttttgcattagttggagggcgatcaacagatctcatggttaaacactgaatatatctgttgaaaaaaatattgtttttaaatacaacgatttatgcataaatatatgccaagaaaaatcgaattttgactataactatctacaatgcatactacataatactaaatggagttacataacttaaactacctttttcatttatatgacaacatttaatgaaccatggttatatacaaacataaagagtaatttaatatttcatataatt

SEQ ID NO: 103090 - DNA, 376 bp, Zea Mays
tgctggcggtgtgcttgatgaggaagaggaggaggaagaagaagaaattccactgatccgtaagaatagtcgtcgccatagggtcagcgacattcccatacaagccttgtcagcgcttgtcagcctccaggggttgtcaatatctgattttgaccaagcgctagaagagatcatccctgaagaccttctatcaaagcctcctaaagctgacaatcccactatctgttcagagatcccagatgacggtcttctgccgcatgattctgccaggcaagagataacccgggtagtttctcatgcctggtcgaccttagagggcggtcttcctagcgaagacactgatccaagtcacctggctcctatggacgtggctgag

SEQ ID NO: 103091 - DNA, 657 bp, Zea Mays
gtctcccacagatcaggaagtggccgaggcaggcgtgctgcttactgaagtcggattactgaaagagagaggtctgactgccgaagccgtggtcactgattttgtaatcaagaacattcagccactgaaagacagggcctacccagcatatctgtatcgagggctggccgactcaactcgggttaccaataggagaattccttctgttgatttggtaagccgacttgaaatgatcctcaggggtaaagtttcaaatgttggtgctccagtggcatactcggcttggaacctaccccctcccaaagctttcaccctttttgtgtcaaatccgcctgtaactgacagcaatttgggccttagagtgcgaccctctgctgaagaagtcaatactttggtcacttcgctcgggacaatccctgatgatgaacggcaggtttattttgaagtgcctctgaaccctagtgatgccgacataaatgatatgcttgatctgttagctgaggattcatccgatgctgctcctgatggtacgttggcagtggtgccccttccagaggttgatacaactttggatgtcccaaaacctatcagcactcgccctaggcgccctagccgaaccagtcagcccgagccttctgctgatgagcaaaagaaaaa

SEQ ID NO: 103092 - DNA, 295 bp, Zea Mays
ctccatagtatcctcagccctgtatccaaaagactctgaatccaacgaacgccatcctggctgcaggggatgaggctctagggtcatcctcaccctacagcggggcactcggtgcttctcgaacagctgcaccgcgtactggggaggcgtcgtgtaaccagctccctaaaggacctcccacaagatacgggggaaaccctctcgtgcaagcccgtcagtgtgggactgtgcattcccttcatccgaggatccgtgagaagtcatctgtgtacggttaagcgtaagtaaaaaaaga

SEQ ID NO: 103093 - DNA, 724 bp, Zea Mays
ggtggtgcattcacttgatatggaggatctgagcaagaagtccatgaccaatctcaaatggttttctcagtttcttctcccataaataaaagggatagaagatggtgacgttaaaatcagctttccacttcaggattttccaagctgacaagcttcatggccagcgtgatgctatccagggcgtcatataccttctcagatcttggatgcgatttatcttcaaccaggaacttgtgcatcctaccatctaactcaataaagctgtacccagcagatttcttgtgatctttttcctttagcagcttccacacccgggcaacaccgtcccatttgccacatgacgcgtatatattcgaaagaatcactaggttagctgtattgtgtggctccaggtgcattagtttttccactgctatttccgctagttcaaagttgccatggaagctgcaggctccaagcagggctccccaaattacggcgtcaggctccattggcatgctcgcgatcagactgtcagcttcttttaacaggccagcacgccccagcaggtcaaccatgcaaccatagtgctcgattcttggcttaagaccgaactcccctctcatcgagttgaagagcagcttgccttcatccaccaagcctccatgagtacaggccaaaatgactccaacaaatgtaatgccatctggttttgcccctgtcatctaaacagagtaaaatcagc

SEQ ID NO: 103094 - DNA, 276 bp, Zea Mays
ggcgcttgcaggaactggcacaattcatcaacaacatgtagctgaactgtttctgcacaacgatgtcccttggaaaatggcaacccacacttgtagcatagacccttggccttgcgatatgcaaacaaggaggcaaccttatcattagcagaagaccctttggttgcacccccaggcgatggcacgttctgtctggttgaagtatctgaatgtggaggcaacgacaatggcagcgggctcttgctcgctgactttgaagaaaatggtgcatcaaat

SEQ ID NO: 103095 - DNA, 539 bp, Zea Mays
ggcattgttgtcagctatagtaccatctactaggagcctaggctgtttacgacgctgcaggtcgtacacagtcgatggaacagtgtgtcgtcgtttggcagtgtcgtctttgagcggctagtagcctgtccacatgctatcttatttcaaactggatttgttttgagaggggatcagtgtagggaagtggcctaccctcctgcaggtgcatagttaggtggcttgcacagttgtcagttgcactgcactgtttcggcatggaataggttttttctttagcttcttcgcatcgctgaaatcattccttctacatttaatttcgtgtgcccctaatagtactagtgtgtaggagtagtataccgtacgtacatgacaacttctagctaggcggctgtctgtatatgtacgctagctcgggccaatcgcctaccgacgactgtacgcagtacagtagtagaaaactagaaatagtggccctgggatggcaaaagcatgaaggtaagcggcagggtagctactactggcctactggcgacgtg

SEQ ID NO: 103096 - DNA, 982 bp, Zea Mays
gtttgaattcggaccttctattggcgcttctgggggcttcataacaatttggaaaggttctctttttgatgtggagattattgatcaaaattattttggtcacatgatccgtttccatacaaagcttaccaatcaaacttggtggctcaccaacatttatgccccttgtactcctcaaaggagagaagaatttctctcttggttttccagcattgagattgataataacaaattatggatcttccttggtgactttaatatgatcagatctcctgataaccgcaacaagccgggtggggatcacctcagaatgatgagttttaatttggcaatcagtcagctggggcttcaggaaattcccctcaaaggacaagcctacacttggtcaaatatgcaacgtcacccgcttctcgaaaaacttgattggtgctttgtatcacaggcttggtcggtcacctttccagctaactctgcactctcgcttcctagaggaacctcggatcatatcctttggatggtcaatgtccaaattaatgttcccaaaccacccatctttagatttgaaaattattggcttcagcttgatgatttccactctatctttcaagactcttggaatcagcctatctttcaaccagaccctgctaaaaggctcatggcaaagtttaaaagagcacacaagcacatccatgtctggtgtaagtctctccccaacttaacaaaattgattgataaggtcaagttggtggtgcagctgttagacttcattgaggagagcagagacttaaccattctggaatggaacttcaaagaaatccttcttctccatttacaagatcttttagctaagcaacagatttattggaaacaaagaggtcaaatcaaatgggccacccttggagatgccggcactaaattctttcacgccaatgccactgtcaagcacagacataaccttatttcttctcttaaagatgataat

SEQ ID NO: 103097 - DNA, 497 bp, Zea Mays
gaaggggactgcaaagtactatgaccaacatgtgagatctccatacctgagtcgttggctgcatgcacctgctcacctccgtgatacttatcatgaatggtcatcttgttcaactctccagtgatgtggtcggtggcacctgaatccatgtaccagttggtgtccaccccgtagttggttgatgcagcagatgcagatttttgtggacgattgtcgttgtagcgctcatcgaatcgattgtagcacttctaggcagggtgccccttgatgccacagatctggcacttgacaccatcctggtactcggggaaaggagttcgagtacctgtgcgaccgcccttggggccacggttgaagcctccacgaccaccattagggcggccaccacttccttgatttggcttgaagttgttgcgattccccttcgcagcaacgttggcggatgactggcttccaccgcttctcatctccaccctctgctcatgactcaccagttg

SEQ ID NO: 103098 - DNA, 475 bp, Zea Mays
tccgcattgaatagaaaaggccatctcgcattaaaattgtcgttattcttctctgatgagttcctgagaatattaaagtctcccccaatgaggattgggggtggtaacatggctcaccatattaaccagttcgggctaaaaaattctccttaagggttatcctgtgccggaccatatacgcacacaagagaccatttgaacccatcatctttgttacgaagaagaaatttgacataaaagtctccctcatctatcgaacctatatcatacacattgagatcaatacccataagtatacctcctgaccgcccccttggttccttgcaatgccagatgaactctctaccagcacaaaggtttttaaggaacgtatccgaaaaaacattcttgccggtttccgaaagcgcaatgaaactaaggttgaattccttagttagatcagccacaaagcgatgttttttcgggtctttaaacc

SEQ ID NO: 103099 - DNA, 308 bp, Zea Mays
atataatgcattaatccattaaattaaacaagacaagaggctacagagggggagaagaaaggaggaacaaaaagtaagattgttgtaagggaagaggaaaacaggaatagatgaaggtaagagggggagaagaaaagaggaacaactagctacttaatataatagacagattatgctaattgcataatccattaaataaaacaagacaagtatgacaaacatgttaaattcaattaagtcaataaataaacatggcaaaacatggaccaagcaattgaaagatggcttaactgaaaattgaaagcaca

SEQ ID NO: 103100 - DNA, 496 bp, Zea Mays
ttaaaacaaaattattgcaactgaaatggattgaaaaggagtaaaaatggaatttctatgaattaaataagttctagatatatttttatacacaaaaaccatttcctaaattattttcctgaatttcctaagcttctggactgggcgcatgaataaacaaaaggtcagggctaacttgaaagattccccagactcagtgcaaactcgagctggacgacgggttcaattctgtgaaagctgagggctcataagtaagaatgccatgcgaaggggtacggttgatcactggctgttagatcccaatctagcgacccagattttaactaccgaaatggatccctatgcgtacaatctgaatccaacgatctagatcaagacacgaaccggtatgtttttgcgtccgcccgatccaagttctacggtcatgattaaatgaagacgcgcttcatctccatcctccgaacagatcgaacggttcagaacacatctggccatg

SEQ ID NO: 103101 - DNA, 515 bp, Zea Mays
agtgtcagcagcgtcatgggcagcaacataagagtcccaccagtcagcagcaggaccagtcagatgaccagaagcatagagagccttctcccggtcgaagcattgggcaatgtttaacatcttctctactgacttcaaccggtcatcggcgtgcagaggatctggagagctggtgaaggtagacggcttgtggctcataaaaccctcccggtgcttgtcccagggtgcaagtggtggtggcggtggtggtaatggggcttgctgctatcgccccatcctctcctgatgcatctcctcccaaatatcttgcctttcctggcgcatctcttggcgttcctgctgcatctacgcatgcatatctgccatagtattaggcatttgtttcatcatctgcatctaggctgcaaccactggatcagttccggctggtggagaatttggaggattcatatcttcttcttgttgttgtctaagtaccctccggttgtgtggattggcaggtagatcaattcatc

SEQ ID NO: 103102 - DNA, 303 bp, Zea Mays
attatacaattatattcgattagagaacaccatttctctccaccgctttttcggtaataattgttgcaatcaatcatcacatatgcacagctgaaggtcagaggacaagcaagcctgcactgcaaagtgcaatccttcctttgaaggtaaaccaaacaccgcaatgacaacattggctcttcaactactgttgctaaacatttaaaccacaactaaagcacaatttgaaggcgtctgcgatagcatctcataaatatgtagatcaaattactatgcactccatttctccaacagaaaataaac

SEQ ID NO: 103103 - DNA, 467 bp, Zea Mays
tttcggggacctgatcagggacagagtagaggtatacgtcgatgacatcgtggtcaagactaagagagggtcgaccctagtggaagacttaaccctggtcttcgacaagctatgggcaacacgcacgaagctgaacccggacaagtgcgtctttggtgtctccgcaggaaagttgctggggttcctggtttcgcactggggcattgaggcaaaccaagagaatatcaaagcgattgagacgatgaggcctctggcccgcatcaaggatgtctagaagcttacggggtcaatagccgcccttagtcgcttcatttcaaggctggctgagagggcgctacccttcttcaagctattgcggaactccggcccattctcttggaccaaagaggcggaacaagcctttcaagagttgaagtagcacctggtgtccctaccaatactggtagctccagaacctgaggagccgt

SEQ ID NO: 103104 - DNA, 429 bp, Zea Mays
attacggttacatacacacatcgagggcatcatatattacattggctcaaccttcgggatgatacccatctccctatagttgaacatcattatcctcaattcctcaccctcaaaaagatttcgcagctccccttcacctacactcgccccaatcggcgaggacaacaattctcgtttaccagtcccgtccacgcgaagacgaccactctccatctcactacgatgatgcctaccactttgcgacaattcactcactctccgttttgccaccgcccttcgtcgcctatacccagtactcgcacccgggagcccctcggaaccctccacgcgcagcgaaggctctgctgcagccacatctaacgctgcaaaataatccaagtcctcatctgaagactcctccatccacgcaatcaaactcccagaatcatc

SEQ ID NO: 103105 - DNA, 708 bp, Zea Mays
acactcgcaatgacgctgctttaaacagatcggataactttgtttctctgtgctttagccttaaaacggggcttacctacacctaaccaacccttcgcctttcacagtttagaatttagtaatactaatacacacgagtgccggtagtgggtcattcattctacaagttagctgctcgtaggttgctacgactacgattttcttttatacttaactataaagtataaaacacaaagatatgtgtattctgttggctaggtgtgtatgaacgtgagtttgaagctaccaatcatggttccaatcctcatttgtatataattttagttttttttaccatttaaacgtgtgtgcgcgtgtggtggtggtgatgggggagttgacgcacgacaatggaaatagtggaaattggtgctttatagtagtagagactgtttttgttccagttcgtagggtcatgtgtctagcaggtgacctatgctgttttgttaggaggattcatacatatctaagtcgatttagggctcgtttggcatagctctgtctcctgattctttagcttggtgctttatagtagtagagactgtttttgttccagttcgtagggtcatgtgtctagcaggtgacctatgctgttttgttaggaggattcatacatatctaagtcgatttagggctcgtttggcatagctctgtctcctgattctttag

SEQ ID NO: 103106 - DNA, 576 bp, Zea Mays
cgcgcccgaggctaggcagtttgtgctgtgttctcagtttttgtctctgcgctctggcggtttcctccccatcgccggcgtcctcccctctccagcggccaccgtgctccagcgtcctccggggatcttcctcagctgtgctcctcactcttctctggtgagcacctccctccactgtcttccctctctctctccatttctctggacagtgaacactcttccacccctttgtgcccaaatcaaattcctgtcgattcttgtgaattcttgtggttggaaatgttcctctgtgtgccttgaacacctgtgcaggtttctagctcccgttgggagggtttcaatccttaaatagccgtttcaccgtaaccctaaatcctcgcacatcacatgctcggtgaaatgcccaaaccagccaaatatgctccgattgaacccaaatttttctgccaccttcacaacacctccagtaacatattcgccaaatttcacacccatccgatttaccaggcttcattttcaccaaattctctgtttcatgcgatcgtttccgagccgagtgcccaaattccattttct

SEQ ID NO: 103107 - DNA, 1038 bp, Zea Mays
ccacctggcaggacattgccagatccgcgccctcgcttggatctagaccgaggaggagtgtcttcattaatttctagggcgtcgtcgtctgagtcggactcaaccatagatggatttctatgacgcaccatccttaagattaaacagagaagaacacatggtgagagagatatttgatgtccaaggagtttaacgaacatgtttgaggaaagatacgtatgatattgagcatgcacttcaaccgttcatatgagcggtttagctacaatgaacaataccaacctacttaactcaaacaatgctcgagacaatgataacagtttaattgtgccatacacctaaactacacaatattcttgaaaggatactcaagataatcaagaacggtattggatcgagtcaaaaatagggaaaatgagacaatacctcgatctgtgaaatcgaccatgaaaatcccaatgaagagtggagagatgatggaggagcccgagggggtcaaatctccaacaatctccacaatgatttgatagtttgggagggatttggagtgtaggatgtgagagagggagagagaaaggtgagggcgtcggcggctgcaacaaatgagagagtgaagatagaaagtggggaggagaggagagaaaaggggcggcggcggctggtcaaactgaccaaaactggttcaaccggttcagaagccggttcaaccggttttgctgcagcgcgcacagtaaacacgcagaaaacgaggtttgactgcgcagaaaacctggcgcactgacaacgcagactacgagactgacggcgcagactgcggagttgacagactgcacagaatcagaggtgacgaaaaccggttcaaccggtttttaaaccggttcaaccggttctcaccagagagaatccggttgagtggcttactcagccggtttactcaaccagctttcagagacaacccgataaggcctagaatacaagcaatatttatgacatgaataatttaggcaataaaaacaagatttcacatgtcatattgtg

SEQ ID NO: 103108 - DNA, 461 bp, Zea Mays
attgtatacaaaaagtatcttttccaatttccaacggtagctgatgtttgacaataaaagctttgttgatgaaggtatgagatgcgtctgaatcgaatagagtcaccgcaggatggttggcgacaggaaatacactcatcataactagagcacgctcaggaatagcatggcatgattaagattaacttgtccccacctaggtacaactctgctcctcttctagtatcttgtcggttacaccgaggtaacttggtcagcgattgtggcttagccactgatttagggaaatgatagtcttgagtagaatgtcctgactttccacaattctcacatgagttagtgttgtctaagatagctttagaatgaatgtctaggacggctcatgtgagaacccccatccttgtcccatttgcatcacatgattccaaatggtaacaggaaccgaccttaacataaactgc

SEQ ID NO: 103109 - DNA, 475 bp, Zea Mays
tgatattcgtgctattgtacttattcaaagacctgccgacctggatactgcgtgttccttggctcttttgcaggaagaggtgtccgagccgctgaaacgatgggagttttcgaagtcggattatggtgctcggccaagttaccggggtgttcctgcggtttctgatagggtggtgccgtcacatattcctgagatcaagtcggcaccagccttgcatcagtcggctgaggataaattcaaggctcttcgggcgtatcggcgggcaaaaggattatgtgaccggtgcgctgagaagtggtccaagggtcatacctgttccacaacagtccatctgcacgccatgcaagaggttctggagctcttttcagtcaaggacatacctgatggtgatctagctgctgaaatcgttgaagagtccacttgtttggctctgtcatctgaagctctgaaagggggtatggtgaaacgtgcttta

SEQ ID NO: 103110 - DNA, 323 bp, Zea Mays
tttcaccgtggcagtgactccggtgatcgccggacatgcaaccagtgagtcaccgcgaggaagtcccgcgctgagacacgtggtgcgcaacggcggtagcttatcggcgacgaggctatccaaccgacgatgagctggggggtgaagtacggcggccttagccgtagctcaatccggtaccggatttttaccaggtcaagcttatatgttgtacacggtgcacgaatcacaacaagagatcgaccaccggcgacagctcaccggcgacgagcgggggttaagtcgggatctccttcagttcagggtctactgtaccatggaat

SEQ ID NO: 103111 - DNA, 322 bp, Zea Mays
tcattgagtcggggtcagtgtatatcatcggagttagggaatatagatttggatgagatagactacatgatgtgggtcaaaagtttgtttgatgttagtggggataggcagattatgtaatccatcacgactctattggttgggttagacctcatgtgcgtggctgagttggtttaaggcaatagtttagttttaagtgcatgaggggtatggccttatcttttgtaccaacattaagtaacttactctagattagatcataatagattagataaaatctagattaggttggatatgactagattagactagtttaggttag

SEQ ID NO: 103112 - DNA, 483 bp, Zea Mays
ggctttagagacttacctctgtttgacaaggatgcttgcaaaacaaggatggagactaatgataaggcctaattctctttgtgtgagaatcattaaagggaaatattttcccaatggtgattttttgaaagtaaataaaaggaagcagagctcggaattttggaaggctatgttgtttggtcgtgaagctttatggcagggcttgattaaaagagtgggtcctggatcttcaatcaatatttgggaggacaactagattccaagtcttcggcagttgaagcccactgtccatcttgaaggagtccaagtgcaatatgtggacgaacttttttagccaagtactagacactggaatgttgatctggtgaggaagtctttcgttgctatggatcatgaggaaattctaaagctgagacctagcactcggttggatactgatgtgctgggttgcgcgcatgagaaaaatggtgagttcttagttcg

SEQ ID NO: 103113 - DNA, 661 bp, Zea Mays
caagaaaggatagattttaatttggtcacctagtgccactagctgttggaataccctatatatacattacatattgacctactgacatactcggagagcaaatgaaaattgtttttatacataacacttttaactatatgtgctctaatatgtttagcaaaatatgtggcacatatgcactggctcatatatgttgcgtagtttttcagccgagcacaaaaaaaaaagtatggtgtgcacaggtcgtcccatctgtagcactagataacgcaagcacgtaggtctctctaaagatcatcgaacataaaactcaatcaaggatacactccctcccggccctctgatgggtgaataatagggagatttcaagtaattaattttagattagatttggacctgtagcaatggcatgcatgtttgcgggtccatccaaaattcaagtgtctcacctatacgctacatgtcagctatacacgatcgaggggagagaaacatgggagacgtttttgtgagcaaaaggagagaaaacaagatgggcatggctgtgctctgtgctgtgacggtggtcctcttctcttctctcgtctgacatgtccaacgatggtggagggcccaccagcattccctgtccttggctgacgtcatacttttttggactcta

SEQ ID NO: 103114 - DNA, 351 bp, Zea Mays
ttccatctccttaaatgataaacaatgggcatccataagtgtatccaaccatgataccttttaccatttgtccatagcatgaagttcctccaccatcatcatcaagccacttgatcaatagcccagatcaacacatggcttgataattctataatgatatgatcccctccatgttatcacatggccttcttggtttatcaatctcaagatagcttgctctttaccgttgctttatgtccattggtgctaagtccttgctcttgcttcaccgccacgtggtccctcacacatgagactttgacttgcccttcacactagccactcggtccatcgaagccaagccatatctct

SEQ ID NO: 103115 - DNA, 637 bp, Zea Mays
accattagctcgatgatggtcttgggcctacttgaaagggaaatgagctatatgcacttctaacttggttttagtgattaatgaccaacataacctcgagtactaactagttttctaagtgtgtacttgcaggtccataagtgctagattgtggaatctagctcaacttacagctcaaatagaggcaaatagggcaaatcttggataaggtgaattatgactagttcataggtttggataaattctaattgcccttagcaacttttttgagtgccttagaggctttggaatgacatatttcaaaaaaggtgcatttagagccgagtttgaacctagaacaagattctgggttcaaggcaagaaaaaatgagaatctgtgacttagatcggttggaaatactcaaaataagtttgtctaagtcacatgaaggttttcgaagttagcagacttatttggaagaagatatgcaaaaagttgtcaagttccaattgttctggggtccaccgaaccagtctaatggcgcacgaaacccttcttccggtggcttcgatggcctcgtgcactagaccagtccaatggtgagccgaaccactttaccaaataacactatagaagcgcaattctagtgtagcgcac

SEQ ID NO: 103116 - DNA, 1188 bp, Zea Mays
catgatttcaaatagacgcttcgtatggtcaagttcataaagcaagttatgtggagtgtggtaaattagtgaaacagagcttagatttagcattttaaatgtctaatcaataatgctattagtgttacttgtgacgaatgatgtttgtttgataaagtcgatgctttgctctagtaataataatgccagctatccatgcacggttattcagagcttgggccaccgtcctcctcttgataagcccctttgggacagccttaactaaattaggagccaattctgagattttcttcccctgtacccatctatgattccataattttatattctctccattaccctctaaggagtctacagcaatatgaaagagggataatgcctttagggggacttggagcggtagtccagcccatggtctagcatgatcagttttctctgcccacagccaaagaatgcacagagcacaacacatagtctccaaattatgaatttccacccctccatatcgcaatgggcgttggacatggactcgctcccaagaaatcagacagctccctccattggcactctcttgagtcttgacctttccaaaggaaacccctgccgtttatcaatggctttgactactcatttaggaagctcgatgacaatagcattagcatgatagatggtactatggtagaagcagttagaaccaccttgaccatagtgaggcaccctgctctgttcatcagggaggccttccaacctggaagttgatcagccaccttgttcaccaaaggaaggtcagccttagaagctttgtggatggtgagagggggggtcaagatacttgcaggggaagtccttcacagagcaagccagattgccagaatatcagaggtctgctgcaaatgttccttttgcttgaccaccagaatatcaaagctttgtagatggtgagatggaaaactttgtagatgatcaccaagagggggaggggaacatgggctgcctggtgggctgggccagcccacttcttactctgttccttttctttttctcttcatcatctgctgctctaagctgctgttttaaattttccttaaattcttaaggtgtcacctcacctcacactttagtcgcttaagtgtaaggtatagtcagtcaccacatcaccataccgccttgataaccatgataaaagat

SEQ ID NO: 103117 - DNA, 461 bp, Zea Mays
ttgtgtggaaggagcaggtcgtcaaaataggggagccgagtcaagccagacttacgtgtccacatatgcttttcaccatatcccacaaaaccaccttctgtattggccacgagcccatctatctgttgacgaatttcagcaccagtcatcgttgcaggtgggcggtctgtcactacgacacctttcgtaaagttcttgatgtctaggcggaatggatggtcaggagggagaaattgtcgatgtttatcgaaggacgaatatttgccaccctttttcaaccaaatgaacctgagagcttccttgcaaactgggcatggaaacttaccgtgaacacaccaggcacagaatagcccatacgccggtaagtcatgcatggagtactggtaccaaacatgcattctgaagtttctctttgtagctcgatcatacgtccataccccttcctcctaggcacgtaccaa

SEQ ID NO: 103118 - DNA, 760 bp, Zea Mays
cgcatgttacggatgctgaagttttgcctggtccgagtgctgggcgtaggcggcgaagggcggtggcgaagcgtagagtgagtgaagtggatggcggtcggcttcgtgtgggcagggctggcaagcgggaattgttgtcctcgttggttggggtgagtgtaggtgagggcgagttgtgaagtctttttgagggtgaggagcttaggataatgctatttaactatagggagatggggatcattccgaaggttgaaccaatgtaaggtgtgatgccctcgctgtacatatgtaactatagtttgtatggtgaggctgtgcgccttcgcgcatccggctatgtccataggggcatcgcgcacttggtctagcacgtttattatgtcggtccggctgcgcctgtagtcggtctttgcgcggacagtttcttggtgtagacttttgcacggatagtcttttgaggaagacttcggttttgcgcatttgttgtgctagttcggctgcacccttaggcgacttttgcgcggtttgtcttttgagggagacttcgattttgcgcacttgttgtcttgttgtgctagtccggctgcacccttaggcgacttttgcacggatagtcttttgaggaagacttcgatttggcgcacttgttgtgctagtccggctgcacccttaggcgacttttgcgcggattgtcgcacgcgagggtagctagcgctgcccctagcggtgactttgtattggtcgaatgtcgaaggccgtc

SEQ ID NO: 103119 - DNA, 558 bp, Zea Mays
gccttattcaaaatggtgaagtcaatgcacatgcgtaacttgccatttttcttttttatcatgacaatgtttgcgagccagtcagggtagtcgattagttcaataaattttgcatccaggagttgttggactttggccttggctgcctatgtcttctcatgtgacattttgcggagtcgttgtttcttagggcggacgaaggggttgatatgcaacttgtgttcaatgatactccggctaactccgaccaggtccgatgacgaccaggcgaagacatttgattctgcgtagacagtcgagcaagttggtctcctcttgtggggctaggccttcacctattaacaccgcatggttggggagggttgtgtcgaggggtaattttttggactctttgtcactctgaatcaggatttgttgcttatttgccttcagcgagggatctgggttactggctagtgcgttagcgcctagacaatgtacattttgatgccctaggatgaagtctcttcctatgttatgggccatctgctgatcactgaagattgtgatgaccccgcc

SEQ ID NO: 103120 - DNA, 485 bp, Zea Mays
atacatcaactgggaaggatgtgaagctattggagatccagagatgtcacaggctttgagggcctgtgagagaaagaaaatgaagaacattatgacattccaatatgattggaatgatgaggttattgctcagttctactctactctttggatcaagctggccgatgaggaaagtccctataactttccttatctaaatttctatatcgaaggcagctggtacaaggtgagctaccggaggtttgttcacattcttggattctctgatgaagacatttctggggacaagattaaaattcatgactttcgtcaacccaccagagatgaagcccaggatctccatatatctgagactggtaaattttgggagtccaccaatctgcataagttttacagatatattaactccctcagcagaatgactctcattccaaaaggaggtaaccaaatgaatatcttgggcgagagcaaggtcttgctctcgt

SEQ ID NO: 103121 - DNA, 573 bp, Zea Mays
cacatccaaaacacgcacgcttagacaaggcacacccgggacactaacaaccgccgacctaaaaccccctcactcaaccgagatcaaatagagtttgcatattcttggcacctaccatggacatggaccaaaggtgcagttcgccagttcctccctgaaccactccactaggatagtcagggacagggaagggcgtgctccataaaaaacacatctgtttctatgtttccatagactccaagcttcaaggatgacaacactattaaatccctttcttatccctttgtggattttagaggaagcttctctccaccagtcatcaaaacagacatcactgcacttgggtagtacatcagtaaggccaattggggagaggatagtgtgccagaattgtcctgcaaaaacacaattagagagaatatgttgcactgtttcatcatcttgatcacagaggacacaactctcagggaagtcaacccctctcttttttagcatgtcagctgtccaacactaattattaatagcaagccatatctatatgtagtttaacttgataatggccgccaactactg

SEQ ID NO: 103122 - DNA, 435 bp, Zea Mays
caactttcgagtttgctacaaaggaggaacgagcctcagccctcacgatcgagctcaaacaaaaatcactaaaaagtattgggaggagcgaaccaggagtgtcgacccaagtgaacttgaccaaagttagtggctggaaggatctcagcagcgcagatgtcctgttgtctccatcaagggcatacaccatctttctcttcttagagacgactttccttacacacgacatggggtggagaggcaaggagcactatgaaaggaacgaagggtgatatcaaatgtcacgatgaaataaaggcggagatggaggtcggcaaggtccatcgctcgagatgtgcataatatcaaactgtcatgtcctgaccggtgcctcgccccatcactgaaagggaaatgtgctcctgagccatttttaagtgttctggtgattaacta

SEQ ID NO: 103123 - DNA, 274 bp, Zea Mays
cagaaagatatcatgagaaaagcaacgtgaagaattggcaaatggtctgtagaactcaatgagcttgtcattgatttcatgcatcggtcatcaattcaatcataggcattggtagacttcaccgctgactggacgccaggggatcaggagggcaatattaaaatctgactcccagctagttacaggacatgttaacaaaagcaacaaagcaagtgacttgaagctagaaaagtacctagacatagtctggagattggaagcttcttttgaaggt

SEQ ID NO: 103124 - DNA, 576 bp, Zea Mays
ttttacctgcatgtatatgcgtgaaagttgcgtatttgtttggtgaggctccggcgagccgtgctgcacatcacacggtctgtttcttgacaaatccccgggaggtcaggaggtggttgtctcgtgatgctgctacgactttaacatcaaatgataatgttatgtttgattgtacagtcaccgcctttctatcaaatccgtgtctcaagactcaacagggacgtgaccaaataggtcgactaaaaacattagtgtacctccagaaaatgaccaactaaacgactaaacaaggcaccagtagtgagtgttgtcttggccccttccatgaaaggtacccttccctctcccatttctctttcatagcgagcgatgaaaaggacagcagcaagccagtgtcttcaacgccaaggtaaggtatcctagtaggataatccaactgtgttaaattgtccgtggcaaacagtgtaaaatataggatttagactttagataatattgtttgtatagtgaaatttgaaatatagaataagataaagtaactgcctgagaaagtcgtataccttaacagcaatggct

SEQ ID NO: 103125 - DNA, 282 bp, Zea Mays
aaatggttgacgtctagtaagaaattagcttcgatcaacgtcagtttagcaagtgtcactatatggacgagaaacgaaattaatgagatgttaccattctaataattatgctgctaataagtactactaaataaccaacctcaatagattagtataataagcagtgtgattaggctatcactttcttgtgtgcccttggatgtatgcttgcattagagtattgcgaacaattgcaaaacctgattaagtgactattccgttttaactaagtttatctatata

SEQ ID NO: 103126 - DNA, 858 bp, Zea Mays
cgaagatgatgccttgtccgtagccttcgagggccgggaaaaaaaagattgaatagggtactcgatgcaatcggcttcgtataccctgattataactacccgctgcgaatgcaagggaaaaagagaaaagttgttgcttcggccaccactgatgtgccgaagggcaaaaaagtgaaggttctgacccaccggccgcggtatattgaactggccgtagtgcctaaatttggcgaaggggcctcttcaactgccaaagcaagacaagctactccgattgtgcagagcattgaagagctgactgtagtgttgaaggtacctacagtcgggccagccgaagctaagaatgataaggttgaacaaccaaaggtggaaaaaataatgaaaatgctagaaattctgagcccaccagctgaggcaaaattgccaaaggtgcaaaaggctcctgccgcaactcccaagaggaggagaatggccagcatgctggacgctgtcttggagactacgaaggccttgagccctagacctactaagagaaatgctgaagctgccaaagtccaagacgaggccgaagctggaccttcagcgcccgttgggacaaaggctgtcgtgcctgaagataaagttgatcaacaaactacagatatcgacatggcagcaagacaagacatggcagaaaaagcaaaaccttatgtccccgaagccctagttgaagatattgattacatttttcgacatgctttggggaaaaaattatccgaagaagaaatcgtggaagcaagacattatgctcaaaaacttaaatatccgaaaggagccttagtgtttaacggcagtaatgaagatgatttcatgtactgt

SEQ ID NO: 103127 - DNA, 590 bp, Zea Mays
cttatacctaggtttaggtacacaccaaaataaacaaatttttgtatagttaacatggacaaatctaatgaaaactaggttttgatctattttttctgtcgatgcttcactgctcagtccactcttcacctgagccatttgattctcttccctagcgcaagcccggtcgtggctcactcgcttcttcggtcatcgaatgaccagtaagtcggtgacctaacccgcccgctgcagcgcaccttgccttctcatcactcatcaactcgtcgactcgtcgggatcctgcagacaacgttgatattttgcctcctagctagttcgcaccagcagatgggcaagttgttggtgggaccgtggcgtcacctgtccctcgctaactcattagagtctcaccgcgccgttgcaacacgacaatgggtgtcacttgtcgtcaccgtcatctatcgctgccttacttcttgcactcgctcctcctagccgtcgtcatctcaccaacgccatctcacgacaatttcgatgactcgccagaacgacgcgccgatgcggctgctccgccctagtgcctcgtcctcagtcagtccacctatttt

SEQ ID NO: 103128 - DNA, 492 bp, Zea Mays
agcttcaggtatccatcatccagccccttggggtccttagtatatatgcttcgtattcgggaccatgttgttgacaataccagtttcggatccctcccttctgccccttttttgtagatcttgcactaggaacttgagatgaccaacaggaacttggtcatagggaggtggtcctaggatgaaggagacggagggtgaccatgtgctccttactgggttgcttgaagcatttgaggctgaagccaaatgtatcattggctcttgtgactgggtgtgactggggttaaacatactaagggacatacggtgaatagtacgaagatgtactgaacacctccttcgactaagatggttgagtagctgatgaagcaagttctttttgcttgttaattatatggtggcgggttctcgttgtgtggcctttgtcctcaccacaaaacaggcaaaatggctttcttggaggcgcattaaacctgccaccaaagcttcggc

SEQ ID NO: 103129 - DNA, 284 bp, Zea Mays
ttgtcctccttcagctaacaaggtggtactattcgggagagctgcactgcgtggcttcgttcatgttacacttgggtgttttcttacgacccatatgagaggtaacgacctggttgttaggcaagacgtgggggacaaaacagatctaccctatgtcatgttgggattgggtgttttctcacggcctatctgggatgtaatagcctggttgttaggcgagacgtggcggagaaaaacaaatatactctaagctgcttcgcatgtgacgcatggcacacgacgca

SEQ ID NO: 103130 - DNA, 273 bp, Zea Mays
caccgtatttagtcgctcttcttcgagtacgtcaacgtcttccagcctagtagcttcagcttctgctatgttatcaaagattaaccttggtgccccgaacttgagatcggcaggtagcactgcctccgaaccataaaccataaagaagggggtatttccatgtagagctcggctgggttgagttctcaggctccaaactacatatggcaactctctgatccattttcctgcgaacttttcattcttatcaaagactttctttctgagtgcttc

SEQ ID NO: 103131 - DNA, 488 bp, Zea Mays
atggtagggcctcaaggatccaaagaatgaaccctcatattatagaattgaatgaccacccaactctagaaggaaaaaacgaggttcatggggtcattatgctttgaccacccaaactctggaaggaaacaaatgtggttcatggggtacttatgctagttgctaggaacctcaaccacaccaacctctagtactcatctaactctacaatcatctattgttggaaatttccaacatccacctcccttgacttgctgccaacaatcattgtcatggtgagaaaagaacattcagcagttggtgaacatctaaagcaaggcctctagaatccaaaggttaaacactctaatttgtagactcaataccctctaaagttcaggtgctccttatgctagttgcttataacaccttaccacactaatattttgggactcatctattactaactttcactatcgcctgtatttgtcatcaactattgtctttga

SEQ ID NO: 103132 - DNA, 544 bp, Zea Mays
ctagcttgaacttggtttctccgagcttgttgtgaaaaactctccttgaccgctttaagcagtatagcatcatcaacttcactcgttcaggtcatgtacaagcggtcgtagatgccgatgaagagggtgatcttttggttgtttgtcgactatcgatccttcaactccttggggatatggtggctaggagcttatgtgatggagttgtacgtgttggctatttgcgtgcagaatgtcgatccccttttatcattggcatcaatgaggaccatttagtacattagcaccaacaaatatggacttaaaaaaactattttggatctagaaaagtgtggactttgaaaaaatatttgttcttatcagccttccatccactatcttggtctgatccttcaccgttggaattataaagcatgggagtaagcaaactggtttgaagcagaatcgctaccactagttgggggcactgtcgtggctgcatgagcatgaaatggggggtgaggaccatatgaaggaggatcaccatattcgggaggagcacaaa

SEQ ID NO: 103133 - DNA, 488 bp, Zea Mays
ggatgttgccatgttgtgaatattactttaaaaatcgagaagaatccaataattgtgtaaactagagcaggttgcggtacagttgatcatgtcgttaactacagatgttataatatagagaaattttttgccttgtcatgcaataaaacaagagaaaaagtcagtgtctttgtagtccggttacaacttccaacacctcagaaggcatttagtgactgcggatcttgtttttacgatcaagggccttacttcctaattttattagaggtgacttggaattttatgaattgtcgagttcttttgttgaattagagtgtagagcataagaaaagttgtgaactgtttgataaattaactagcaccaggttgttttttgttagtgttgctatggttctggctgtgtctgatgcatcacagagttatatagtaatgcaagaacatattaaccgatcctacgtatcgtatatgacctattgccattaccatga

SEQ ID NO: 103134 - DNA, 460 bp, Zea Mays
gcgagtattaattcaaaatgtttgagttggcattaatcaaattaacacgtatttgtaaagcacaagttagaactatacattagttttaattggagagtcatatttaaccactattgaatgaacaaataattaattacttaagatccgcgacataccaaaataatgttactaatacgaaattgaagttattacgaagttaacgcgactggaacgagtcgtgatgggtttacgacgcaatttatattgaatagatatcatctctagaatttaaattacgtcgctcggttctattggtcaaagcgaagccatacgaagggccacatggatctcagccacaactagccaaaatgagtgggatcaaatgtggctagcatctcctccaccgctcatgaacacacgcacggacaaaaaaccaccgtgcagccgccatgggagagcaagggctcggcactgtcgcgcg

SEQ ID NO: 103135 - DNA, 829 bp, Zea Mays
atcagttgtcattcaataaatctactcatgtcacttatgctcctcttcagcttgtgcacactgatgtttggggtccagctgttacctctgtaggaggatttcgatactatgtcagttttgttgatgatttcagccgtttcacatggttatatctattgaaacaaaagtccgatgttcagcatgctttttctttatttcaaacccatgtagaacgtcttcttgatacaaaaatccaaactgtccagtcagattgggggggagaatatcgccccctttctcgctatctcagaagtcaaggtattcatcatcgtattacctgtcctcacacgtcccagcaaaacggcattgccgagcgcaaacataggcacctcgtcgaaaccggcattgctcttcttgcccactcctcccttcccatgcgtttttgggatgaagcctttctcactgcctgttacttaatcaatcgcatgcccactcgaacactacatcactcctctcctttggaatcacttttccataccaaacccgattatatcttccttcgtgcttttggttgtgcctgctacccaaatcttcggccctacaactcccacaaactttcttttcgctcagtacaatgtgtatttttgggttatagctctatgcacaagggttacaaatgtcttgaccgcacgtcaggacgaatttatatatctcgtgatgttgtgttcaacgaatccctgtttccttttgcttctactgaaccacccttgtctgcatctacttctgcccctacttcagatgagccactagcatataatgatcatatgcggcgatatagacttgaactgtt

SEQ ID NO: 103136 - DNA, 448 bp, Zea Mays
gcttgatagccgccttatcatctggctcttcctcattcttgatatatctgataataggcatcctccattcgttcgggtccaactctatgacaagtacattgttctctgctgccttgcactctgcttctaactcctgtgaaatgattggacatcgtacctcttacacaaaaaaatgtttagagcaacttgagttgtgctggaaccaagcttcgatagtgtatcggctgccacattgcgatccctttccacatggtggaactccagtccctcaaatttgccttctatctactggacgactgcacagtatttggccatagattcggtggaacagtcccagtccttgttgatctggcttatcaccacaagagagtccccaaacaccataagtcgcttgacgccgagtgaaatagtgatgtgtaccccgtgtatcaatgcttcatactcagct

SEQ ID NO: 103137 - DNA, 429 bp, Zea Mays
gcaaggatggtgttggttatatgtccatgtttgaggccataaaactcaaggatggaatgagtgaaaccaaagaaagggaaatggatcccgtcaacaagatgagcatagaaaagtatgtactcaccattgtcttcccgtagagtttgaattaggtgtaccatgggtagtcatcgcctgagcgtgatgatgacacccaatcaaggattgcgcagaccttgctaaggccctcctcattaagcacttgaggcttggggagatgtttaaggatcattgtgtttgccatgaaaagcataggggaggtaaagtatagcaggctgaggaatggaaggagaaaagtagtaacatactaaggaaataaggaggcaatggttcacataaaaggtaaaacctctcctaccctttatttagaagccttaccgccaactttct

SEQ ID NO: 103138 - DNA, 660 bp, Zea Mays
cacatatatataattagtcagccttcccatagctccaattttctctcgagcagaacaggtactcctttgcaatcacacccacgctctttggacagtcacaccggtcaccgtttgccacctgcagtgctggtaagaacattgtaagagcggggtaagacgcttcataatttgtattctaccacctcctccaccaccctgagagatagttgtagggttcacattgtttgttgcctttttgtctctgttttgtgttaacaatgacatgaccaaagaatcaaatagacaaggataaggggcctaagcttaacgacgatgagtgtgtctctcagatggaattgaaggagatgatgcgcacgatgactgaagcttttaaaaaatatcagaactctgcctcgacatcctatgagcagcttgatcgaagagttgatgaacttgctacacgcatggacgtactggaggctcgtcccccaccaacaactccagccccatctcactctcctgtggacgacgacgacgatgacgacgatgtttatgcaccactgccacaacgcttcgcacgtaatcgacaaggtatgggaggtaatggtagacgtcgtcatcataatcctcaaccagaccatgatccatttgctaaaattaagttctctattccaccattca

SEQ ID NO: 103139 - DNA, 277 bp, Zea Mays
tgttttttcagttattgaataattacagtttctgtttaatttattcattcttgttttgattatatattgatattctaaactgtgtggtcatctttaagggaggcagtgttactgttttattgtaaccttaccaagaatgaggagctattattgtttcattcttatcttcatcttcacaattcacattgcgtgtgtttgcctgtttctgtttggttgtgcgtcccgtggtagcctggctcactacatgcgttgactgggcctctaaatgtatccagtt

SEQ ID NO: 103140 - DNA, 393 bp, Zea Mays
ctagtacatgttcttctagatggcactagaaaacaagggcatgctttggacataaactttctaaatccaggtttctcaccaaagcaaaatggcaactcatcttgtattaccatctcggcaaaagcaacccttagtgtgccttgatcaaacctccacgtgctaacaccttcatgttgagttgcttgtagaataccttgagatggatctttgttaaacttatttggattgcgtttgcaagcaaccagatgcatcttcaatgaagatgtgccatggcgtccagcctccaccttcatgttttgatggcaatatttgcacttagcatgcataacaatgtctttatcatcctttatcttaataaaatgtcgccatacatctgaccttggtgctacttcc

SEQ ID NO: 103141 - DNA, 443 bp, Zea Mays
taaaggagtgagccccaaaccacccctgccttgtaccaagaataaggaaataaagacatgtcgtgtttccttttccattacttaccctaggacttttaatctcgggacgagattcttttatggggggaagtatgtaacacccctagtgttactgttactaaaacttgagcataacatcataagcattggcattccatatgtttgttacagctagagtgcattcactaggcaaaaatttgaaacaagttgtattgatatgaccttttgcaaataaaaccctggaatagggaactgaaccctagatagggtgtaatagagcaaacaaggcttaaacaagagaaaacttcaaaatgcaattgaaaaagtcataaaatatctccatagatgaactcaagtgacatccaaacccctgaaatgtcaaaaaccctaaaaaggaccctgga

SEQ ID NO: 103142 - DNA, 398 bp, Zea Mays
gggacctctaaccagccaatacctgtgctacagggaacacgtgcgtacaaccatgtttgttcagccattacttcaacaaaaaacaatatggtgttagtgatgcttatgtcgacacaggtggtagatctataatgtcattcccttcagcgcttgccgcatccaataggcgacgccggcgcagtagagtacatcacatggtacctgacgagccattgtcaaccatgcttcctttggaaaggtcatatgtagatgctctaaaaggtgtgtattatgcccaacattcctggtaacattctccctgctttgctttggtgctaccctttctcttcttcctgtgtagatgcctaccctgagaggtcatactacggtggacctgaacacatatgcccatactgcca

SEQ ID NO: 103143 - DNA, 752 bp, Zea Mays
aaatgctaaaccttatgctttttgttctaaattttagagtttagaattaaatacagaaactgaccaaaccttgtttaattaaggaaaattagttatgcttctgtgctgagcttgagaaaatttatagatgttcaaacctcatttaaacactgtttaaaatagtaagaaccccattattgaaaattttagtggggatatctattaaaagccattcttgcccaaaacttaggaaaatcagaaagaccttataaattagtgaccagtagatgaaattatttttcctagtctacttcactagcaaagaacctagaaaaaatagaaagacctctagtcgagaacagatttaaagtggaatgttttatttagcattattccaactagaaaacaattattagagtaataaaaccagacccaaagttattaataaaaattcagtgaacttgtgatcaccaaaaccctactgcaaaaataataaacaccccatctcatcattttaagtatggtagataaatagaacatgataatgagtcatatttttgaataaatcattagtaacccaaataatgcaataatgggcaaataaaacttttctagatcactaatgagataggccaccggagaaaaatgcaaacccatttaaaggatgcacaataatgcatattataaatacttcatgaaaaaggccatttaatccaaagaattcctaccaccccttcctttaagcaaaaggatgccaaacttcagaatgattg

SEQ ID NO: 103144 - DNA, 921 bp, Zea Mays
gtttgatccatcttatttttttgggggtgggatgtggggttagcggggatagaatggttctatcttttgtgtttggtgaggggataataatgtccatgttccacctctagtctcccctaatcccaatcaaacgaggaattgttgaccccattgtccttgttgcgcaccctcaactctatccccattatcccctaatcccaattaaaggaagaaagctaggtccctcaaccttattgttcgatctatcgaaccaaatgttacctcactaccttgctcgtcgtccctccaaccactaccatcatcggtccggcggctctctaatgcctcctcttccaaacatgtggccacaaatccctctccttgacatgaaaacttcaaaccctaacccaaaacaagagtttgtcatacgtccttaaaggttgaggagatcgcttaagaagaggtaaccatcaaatttggcttcttactttctccttcattccaattctatcttacttatttgccggaggaccttaaataaggcggagaacatcggagaagaagaggtaactatcagatctcgcttcttacttcctccttccttccttccttccttccttccaactatatcatacttatttcctttttggttttggttatgtgagacatcaaatttatttccatttttggggatctcgatttaagctaggtctattcgattctagaatgaggtatgggttagcggggatgggatggttctatcttttgtgtttggttgaggggataataatgtccatgttctgtgtttggtttgaggaatgtggatgaagagaatatatcactgtttgtgatccattaaacatctgttaggtgacatctgtgtgtcatcctcaattaccctgttcttctcactttctccacacaatcagcggttcgtagccc

SEQ ID NO: 103145 - DNA, 827 bp, Zea Mays
ataagatcaatgtgggttagggaggtggaggagacaatagtgttattatgatttaaggttagggttaagatttttgataagccctccatggccatgcttagaaagggaagggtcaaacaacaatgatcgacacgagggtggagcaggttgaagggcgatgagcaaggcgctggtgtcgctacagagctggtggaggaagataaccagatggatggtgccactcttgggggcgacaaggttgcaatcttttattcatcgactagatttaggggtgggtagggatagagcagcgagggttggcatccaatgttgtatgagccaacgactggggacaacactagtggttggaggtggggtcagttggtacggttcgtcgaagaagaatagtagacaatggttagagacaaggaataatgtgtgtgagagagagagactcatgcgtcagatgttgtagtagcacgtgcactaattaagacagatgctttgctgatgccatgttgactaggtgttggagaatagttgttgtcgactattggggcatcttctccattaatcgctataggattcaagtggccctatagaaccttctgagtagcacctccattctatattgttcataaccacaactttttgatgcatgtgtaaactttctatagagccactcctacctccaactatattgttctttaatcactgtctggttgtgtggtctctggtgaccatcagaagataatgtgatcccctctttctttgtgctttgtttaaattgtgcactaaactctgttctttccctctcagtgcctcaccgtaactttctagggagtgca

SEQ ID NO: 103146 - DNA, 755 bp, Zea Mays
ccgtggtcggctttgccatcctacttatgtatcattagcttatcgttagcacgacgttacctttatttccgctgccagtgaaacttggaaccaagggtttatgttcaaacctatgtcttgtaataataatactcgtccttaatatggcatgttattacctttgtggatggttgtattctctattctcatcttcgaatgagacgtggttatcgatcctgtatatgtggttaaatcagatgtgatccgacggactgtcagtttaatcccattttagtgtgtcgtcaccctcggggtggaagtcaatgcacttaagttggattatgcagtgcggttccgccacagttgtgcaagctgaacctggaagttgttccttccggtgaattaagttatatctcggtggaacccacattgcaagagcaaatagtgagggcacagattgaggataagggtgttcaaatgattaaggtaatggtcaagcaaaaggcagagaaatacaaatgctttcgtcaggacagcaagggaatcctatggtttggagaccgattggttgttcccaaggaccctgagctcagaaagaagatactagatgaagctcacctttccaaattctccatgcacccgggtagcaacaagatgtaccatgatcttagatctttatattggtggactagaatgaaaagggaaattgccaagtacatatccgagtgtgacacttgccagaggataaaggctagtcacttgaaggcagcaggccc

SEQ ID NO: 103147 - DNA, 355 bp, Zea Mays
cgaaggggtacgtgatgatctaatcctggccatccgttagccgatcgatggctagaatgcttcttctttctctagacccaagggacaccctgacgcattctagtccggtggccttcctaccgtcgagctgtatcccggcgtcctagagctcccacggataccgaacggcgccacaccacaccgggatggagtaatccccggcgagatggcaggcaaagccccagcgtgtggatcaaggcgtgagcagaaactgcgcttagcgaagccgatggcaaactacaggaatatatgctcgtacctgcgattgaggcataggtcggccacctggcgtgatggtgcttcttcatcaccgccg

SEQ ID NO: 103148 - DNA, 782 bp, Zea Mays
ctgccaaaagtgttctcctgggctcaccgcaagagttggatcgacttttgtgtcagattcgcaagcctgacgttggcaatttctcgtcgtcgatcgcgcttcgccatgaacccgcgggccgccatggactgctcgcctgtgcgtacgattcatggtatggatccctcacccatacctgtcttcattgccgtaacgagtacagccggttgaattagagttttgtgcgcttatgtcgtagattaatcttgccggtgatggacttcgtcgtgtcggtgttgtggccgccatggtagggctgtccaagggagaagaggactccagcaccgtctgatgctctttggatggctaggattagataccgcataccctttcgccccaataactcaaaactgtagaccttcgatcaggcgattctgatcgatgcatcacaaccttgattcgaaccgtcggatcgcgatcccacggcctgaaacgtgtaccagttcatttgatgccaaaactaatctgggcaatcggggaaagatccaacggcccgaatctcgtgataccctttcgaccgaccatttatgcatatgagaccctcatgttttaataaataaacccgtcgtcctagagttgtagtaaagaattcaattcagacccctggcatttgcagtttaaaccctgtgctctctggaatttatggccacagtccaaacagtttaataattagtgaaaaagaacactgaaatcgaattttctatataaaaataattgttgaatcttatttacttcatagaaaa

SEQ ID NO: 103149 - DNA, 341 bp, Zea Mays
tatctcttttggccctcccaactacaacagactgttgtggttgttgcacaacaagagaagaatgctcagtggacaaagaatcatcaattatgggtgaaatatcatgaacctacagatttggaatagcagcatcctgaaacatattgtcatccccatctaagttctccacctacaaacttactttatgtggaactgactggtgaacattaaataaatgattagcataatacatttcagattatttaaaaacaacagttctactcaacattgccttcttggtttcagggttctataatttatatccttttacccctgaaccataacccaaaaagacacacttt

SEQ ID NO: 103150 - DNA, 580 bp, Zea Mays
agggtgggggcggctgcaacaattggggagaaggagagtgggtcggctagggttggggaggagaggggggctcccatcatcgaatcgagatcaatggcccaaactcgctctcccatctaagctcccgagggtgtggaaaaatgcgaaaagatctactgtttccctgatgaatgcctcctgaaactccaaaccccaatgccacagaacatgaaagaaaagagaaaaagaaatttaacttcttttcagaaaattggggtatcacactctaccccccttaaaaagaattcgtcctcaaatttgaccactccaagcaaagcatccaaggtacctcatatggcaccaccattcaaaacatgggtccattattggtcttaattaacacaagatcttctaactcggactaattgtctaaggaaactacacaacctgatatcaagcatgaaacaacatgcaatgaagctcaaagcaagtcatagatgcaatcaacactacggtttcacaccatcgaatttggatgcagctatacatcaacattaatgtattaaaacaacactcttttatgaaggggtaatatgcacta

SEQ ID NO: 103151 - DNA, 416 bp, Zea Mays
gaagttgaggagacatgtggaactagtggaggagatggtatacaggtatgtaatgttttaatatgtattttgtaacatattattcatcataatatattgatgaggtatgaaacactaaaatttcaggacgatgatgaagacaatagagacatcgaaagatatggtgaattggatgaaaggaataacaaggttttgatcatattgttgtgaatgtttatttgtaaatgatgtatactgagctttcaaccaatttttcaggaaattcaagacgtatctaatatacttgaacggggtgtggacaatgttcaaatacctataccgatacgtccattagaagatgtaatatctttaacaactatattgatttgcggttatacatataaatgatttataggtttgtgttattggcttatgat

SEQ ID NO: 103152 - DNA, 542 bp, Zea Mays
atcggctctggccttcgtctaatagtgcatctcatgcactcggcagaacccttcaccattcgcacttttaccctggcttcggagagcccatatgtaaacattgagcttgacaatggcattcggcgtcagctgatgaatatatatttcaaaacttttcaaaacttctcctatcatatcatacagggaaaccgcagccctaccctgaagaagctcctaaacgcaacaacttcatcttctttcggttccggaatcacttcttcaccagcaaagcgaataagcttatcttgatcttccccaaaatagcccaactttttcgtcacaacaaagtccctttctgttatggttgattttccgaattcaatgtgactaggttttgatgggcttagaatgttgttgtcctcttcattctcatcatcaattccaccttctgccacagtctgctcagcttcggtagtagcatcttcagcagtagcatcttccgacacaaccagacctgaacgtctcattacttctgatatcggtgccgtttcagtcacttcggc

SEQ ID NO: 103153 - DNA, 450 bp, Zea Mays
catagcaagacctatgaccgaactcctcaagaaggacaataagtttgtgtggaccccaaagtgtgaggaaagtttctagatcataaaggaaaagctcacgaccgtgcccgttttgacactaccagatatacaccaggatttcgtcatcttctgtgatgcttcaaggcaaggcttagagtgtgtcctgatgcaaaatgagaaagttattgcttatgcatctcgcttactcaagtcgcatgagcagaattaccccacccacgatttgaaattggcagccatagtgcatgccctaaaaatatggaggcactatctaattgggaacaaatgccacatcttcactgatcacaagagtctgaagtatatcttcactcagccagacctcaacctccgtcaaagaagatggcttgaactaatcaaagattatgaccttgagatccattaccaccccgg

SEQ ID NO: 103154 - DNA, 427 bp, Zea Mays
taccaagaaaactatcgaagctgccaaaaatcaagttgaagccaaagctgggccttcagcgcctactaagacgaaggctgtcgtgcctaaagataaggtgggtcagcaaagttcagataccggcaagacggcagagcaagtcgtgacagaaaaagcaaaatctcctgtccccaaagccttagctgaagatactgattacattgttcgacatgcttcggggaagaaattatctgaagaagaaaacttggagaccaaacactacgcccaaagactgaaatatccgaagggagccttagtgttcaatggtagtaacgaagatgatttcctgtactgtctcctagataacaaagaaatatccgtttgccgggagatagctaagagtatgggatttcctaagcttgaagaaggcctttcggtcttatcgaag

SEQ ID NO: 103155 - DNA, 445 bp, Zea Mays
gcgctgaggaatcaactatagtgccgaaggtgtctatagttgagccagtccaagccgaaggtggggcggccaagaagccaaagttagaaaaaacaatagtgctgccagaaattctgagcccggtggaagcagaattgcggaaggttgcgaaagctcccgccacaactcccaagaggagaagaatggccagcgtgttagacgccgtcatggagataagagtactgactcctgctcctgtaaaaagggttgttgaagctactaggctcatactaaaaccgaagctaggccttcggtgcctgctgagacgaagcccgttgtaactgaggaaagggctgaacaagaatcttcagatattggcataggtatggagaaggaagtagccgaagaagctaaatctcctgctcccgaagcactgtcccaaaatcttgattttattatttgacat

SEQ ID NO: 103156 - DNA, 467 bp, Zea Mays
gcagtagatatcatatttttaaaagctttcaagcaaatgcaagaacccgaagacaagctttaggattcaacttttcccctctatggcttcagggagcaacaagtgatggcgctaggaaagttgtctatgtccattaccttcgactatgtcaacaatacaagaacagaggaggtcatgttcgaaatagttgatatagaattcccatacaatgcaatcattgggagagggattctcaacatattcgaagcagttttgcattcagcttacctttgcatgaagatacctagaaaccaaggggtcatatcagtttatggtagccaagaagtagcaagaagggcagaagggaccctacaagaacctaagattgtctataacatagacgaagctgaagcatagtctcaggaatctgagaagcaactaaaagagaaagcatcttcggtggatcagccgaagctagtgctcctctg

SEQ ID NO: 103157 - DNA, 384 bp, Zea Mays
atgtgtatatcgattgcgcccttcacacactaatttgcattttaacttatacatcacatgaacacccctaattttacccgcgaccataaccatgcgcatttaggccataacaagcaaatcatcgtgattacgagcttaactaaagccgtccaacaattcggctaactagagtaacgacatagcccgctaaataacatacacgtcggctagtccattattatcgcaatccgagacacaacatacactacagcaattttataaacaccatattcacaagtattttcgcacatcgaccaatctatacgaatcgtaaaccactagtctataattcgcaaacactatgcatttacttcccgaatttacgaacacatacatatttatcat

SEQ ID NO: 103158 - DNA, 704 bp, Zea Mays
gatcgcagcaggttctcaagcttgggaatccgacaatgtgtgtacataagccacaattctaaattggctgttggagggagaggttgatgtaacaaaatgtcagttagacagtaggagattattttccagacttctaatatatttaaattctgttaatatattctgcttgttgaacttaacaaaatcccttgaagttttattaatatcttggaaaatgcacctgtttaagtaatctttttcatgaatgctagcacctttgttcttctatatccccaattttggaaagcctcaacacaacttttcaacattttccagaaatcggagttattgaacattggagaattctagcttttttctcggtgtctttgtcaatctgcactatgatctggaaccacatatgatgttgatgtttcaagcgcaggcaccatgttcatccagcaaatattgctacatgtgaacataggctattgctgcataactgattatacatttgaaaaatgtttaccttgcatttcttaaggtggctttggctgggtacagggttctggctagtgttaatttatgtgataccagtaaatgttgctacttatcaacaagagtgcttttttcaacacaactagcacaaattaactggggtactctttacagataaaattgggtattctttgtagaacaacgaagcaaaaaagatgactcgtttcctc

SEQ ID NO: 103159 - DNA, 343 bp, Zea Mays
atgctagagacttcgggactatctaaggaatggtgggatgaggctatcttgacagcgtgtcatgtcctgaataaagttcccacaaagaacaaagaaatcaagaggaaattacatatctcctatttgcgcacctggtttgtttggctaaagtgaatgtgccaattaataagaagcgcaaattaggaccgaaaactattgattgtattttccttggacatgctttccacatcattggatataggttcttaattataaactctggagtaccggacatgttggttggtactattatggagtccagagatgctatgttttttgaggacgaatttcccatgaaagctac

SEQ ID NO: 103160 - DNA, 440 bp, Zea Mays
caagaacttggttacagtggttaccatgggcagaattttgttacaacacttcgtaccactccgccctcaaatgttccccctttcgggtagtttatggcagagagccaccaacattgttagcttaccatcctggtgtcgcaaaggtggcagcggtagatcagcagctccaggaacgagatgaatttctgactgaaatcaaggaaaggctggtacaagcacaacttgtgatgaagacatatcaagatcagtcacgacgagagttcgaattccaagaaggcgattgggtatggctccgtttacaacagcgaacaacagtgggtgtcaccgcggctgctccgtcgaaattgggtcctcgcttctttgggccataccaggtaacaagtcgcattgggaaagtctcttataagttgcagctgccagcacgggcccggatccacgac

SEQ ID NO: 103161 - DNA, 368 bp, Zea Mays
cttgggtaaatccttgccttgtaatgtttgtagtaaataggcgttaccagacattacctgttttactttgtaaggaccctcccagcttggtgaccatttcccaaacttctggtctttattccttagaggcaggatggtcttccacaccaggtctcatatctgaaatgattttgctttgaccttcttgttgtaggccctggctaccatgatcttgtccttttctattgctcccaaagctatcacctcttgtcggtcacctcatcaatattatccatcattgaattacaataatcagtgacagttagatcattttctccggcgaacctgacagcattcaaacttatttccacaggcaacactgcttcctg

SEQ ID NO: 103162 - DNA, 1184 bp, Zea Mays
tctgaccctgggggtcgggtgaccaaagggatttctaggggtgtagaggggatgccatgtttttccacaaaactagtggctataaatgaatgggatgctcctgaatcaaaaagtacagtagcaggagtaaattcaacaaggaactcaccgagcactactcccggagcttgctgggcctcttgagcgtcgacgtgattaactcgtgctctgccctggtattgggtcctgctctgctgactgttggaggggagtgccttggaggcaggtgctgaggtattcttggggccattcaccgagttggagtaggtaggtctgggtgccttcaactgggggcagttattcttgaagtgactggggtctccgcagtgccaacaggcatttgctggtggttggttgcttgcaaccgagggggcctgaaaggagctctgactctgctgactgtaacgtgacggagtgggtccagctggtctattgaagcttggtcccttgggtggaagcccgaaggatcgagctctctggtgacggtcttgctgctgagctcagagaacttggaatttcctcttgagatgccctttttcttcctcttttgccctttccacttgtatggctttgttggagaggtgcgagaagctgaggaaatcttggctggagaggatggtcttgagttctggtcgtagccctttcagaaaatgggccatcttcttggtttcagtgctgacatcgtcaggggcgtagcgagccaactctgtgaatttgtgcatctactcactgacagatcttccaccttgagttagttcccggaattcatcttccttgagttgaacgatcccctggggtacatggtgctcatagaaagtcgtttcaaattctgcccaggtagcgtccctgacggccgcactgaaggtatcccaccatgctagggccatcctagagaattgatgagtagccaattgaacacgatgattttcggggcatcctatggcttccaatttcctcttgatcgtgcgcagctagtcgtcggcatcgaggggattgctagatccagcgaacatgggaggcttgagtctcagaaattctcccatcctgtcctgtggtcttccaccacctgggcgttggttttccaggcttctagtgaggacttcaatgagtcgggtttgattggctagaacttgggccaaatctag

SEQ ID NO: 103163 - DNA, 607 bp, Zea Mays
gttaaactaaggactgaatcaagccttaaccacacaaataaagttcaatataatgaggcccatgagcttgggtctgggcatgagctcatcttatgaagagtttgaactgagcacatcgagatcttttgacagaactgtatatgaactaaacaggcactacacttctatgagtatgacatagagtaaatcaacaattcatatttttcaagcctatttccagaactgaaagcctgaaactaccacatcattggtcttagccttgacagataacaatactaggtgtgccttcagatttttcaaacgtgacagtaatcagaaaagattgtgaacattattttgtatctcactatgattacaggaactaacagttttcaattcttcacccatgaacttgacaatggcccagcatgtctccaatttctactgacaaaccatgttcctctaaagcgcagggtgactgagcgagcagctttttctgtccatggctcagcctcagcttcttcgctgcacctccctccatacgcactcaacctccgcccactaccccttctgtgtccctcagctctcctttgatgagatcccctccatggtggcggcaggagctgag

SEQ ID NO: 103164 - DNA, 655 bp, Zea Mays
ggaaggtgcttcgggagcaagggattcagtttctttggccatatttctctcaaaagctatatcagtatttggaggtacttcttccgcccccagcttggctgtggcaagcttcgtctcaacaagcactgtgggttcggcctcggttccagccttaattgttgcagatttaattttatctgcctagtatcagcttcagcctgcgcctcggcactttcggcaaccttctttatggaagaggggcgtttggagtctgttgtttccaaaatgtctaatgcatttaccatccttttccttctaggggttattgcagaactttttctgccttcagcactgttgcttctgctgaaggacttagaactgtgggcatctttgttacttcttcagttttttatctttcagccttatcttcatcaaccttcgattcaataagcttagtcgaaggcgccttcggcattacagccggctcttcaatcttctgtgtgggaggagcaggttctttcgcttcagaaactgaagaagtttccccgccaaactcaggcactatggccggttcaatgtagcgcggtcagtgggtaaggaccttcaactttttcctctttggcgcaggctcgcttggagcagccaaagaagcaaccttccagaagttgcacccttt

SEQ ID NO: 103165 - DNA, 696 bp, Zea Mays
ggaatgtcgaagaggaaggacgaagggaaaatttttgaacttgttcggttgccataccggttcaaattttagaatactttcagcggccccggtgccaaatggatggaaatgatagagacaatgtgcaatgagatccttggtaactatacaaagaaggaggatcaattgatgacaaccgcctttggtacttggaagaaacgaaggctgaaccaggtaatggacgccctttgcttcgaatacctggactatgagagacttgacgaagaaactgggggtgaagaaaaagaggattgtaagcattttgaaaaggcaagcaatcagatctattgaaaaagacaagcaaagagctgcttccaagaaacagaaaatgtcagcagaaccaaagctttcagctcccaaaaagtgaaaaacttcaaccctggcccctattgagatgaaggtgcaagattcactagggaagattgctggaacttcttcatcctcttctatcggcatgacaaaaattctgaaggtaatgactgaatccttcccgtttgctatgctaagtcctctggggtcagatctgactagcttattgtagtcaaaggagaacggggttgaaaaggtgctgaagacgagaagaagactgcttcggcgaccagaggggtgagggtggtcagaagaaacaatatatgatggttgtgatgagggccatcc

SEQ ID NO: 103166 - DNA, 889 bp, Zea Mays
tggagaaaaagatccccgacttccttgaccggcgatctggaagcaattgcgccagcaaggataacgtgaactttggggaacttcccaagaataccacctccttacccgacgacgcctgcaataacactgtcttccaaaaacaggatataactgcgcgatactgagataaccaatccatacccaagataacatcgaatgccccaaggaaatcaccaccagattggtcgaaaagacctcatcagcaagaataacggaacacccctgacaaactgaacagctactaatggagccattagcagaactaaccaaaattgggtgacccaacctctgcaccgaaagaccagcctgtgacacaaaatcctccgagacaaacgaatagctagcaccagagtcaaaaagagcatgggccgcaaacgaatcaactgaaatcgtacctgtcacacgtctccttgctctctgccatccgcagcgggtagcacataagctccaaaaatacccgcagaagaggaagctcccagagtgaaattaacagaagaaccccactgagccgccaggtgaggcagacgcggagctccaaactgagacgacataggagtagacggtgcaggagtaggcgcggccaaatactgaggaaaaccctgcatcggcacgaactgagaagtcctaggcacataaagctactgcggaggaagaggaactgaaaactgctgcttagcacttgacatcatgttgatagtgccctaagaagaggaggaagtcaccggctcccatctgagcttcccattaggattcctcctacacaccacatccttgtggtcctgactgcagatagaacacctgccactccagtggcactctgcacggcgatgcgcatcaccacagcggaaac

SEQ ID NO: 103167 - DNA, 492 bp, Zea Mays
gtccgttcgaaaacgatgcatctcacatttacttgtgatgtgtgtaatccaaattgttcagcggtattttggatagcctgagaatagcgtctattgcgtgttattttgtctgcagcccatgttcgttccgttcttagtctcaaatgtgtaactattttttcggaaatgatacaagcgccaaaagactaacatgactagagaggcgacaaaaaatatacacctcacaactgagcagtataaggattgttgggagccttctcccgattgtcctcaaaacaccaaaataatatttgttttctggtctatttctaagtgttacaggtactcttacaaaaagcgttttcgtatgaatcaattatgtacgaaggtacaagctccaggataacatcataaaggggcgaaggacgaagctggacgaagccgaagcatgtctaccctctcaaagatgatagaagaaaaagacattgttaccctctccatgctaaatagttt

SEQ ID NO: 103168 - DNA, 343 bp, Zea Mays
aaaagaaaaagagagcccggatggtttttaaaggaagtgggttagctcaagtttttaattcccttttgtgtttataatgcatgcatgctgaaagtaacgtctcctctccaaataatagggtgctcttagggcatccttaaaagtctaagtattggcccacggggcctacttaattagccacctatttctccctctatgcctaaggccttccgtcctaggtctagcggtctagtcctgacgatccgtagtagtttctaggcaagttttaaattttgaaaatggtatccatggtttattgtccttctctgtggtggaatttgctccgataccagttgcggcagaa

SEQ ID NO: 103169 - DNA, 966 bp, Zea Mays
aacgaaatttgaatcaactcaaaagaaattgtgaaccctaggtgaaggaaggcggtgacggacaatcgaactaccccatgctcaacaagacgaactacaccatctggttattgctcatgaagatcaaactgcaagtgtgctgcatctgggcaccattgatcttggaggtgaagatgttctggagcacgaggactggatagcaccggatgccatttgcagtgtcgtcccaaaggagatggtccccacactcgcggtcaagccttcgatgaaggatgcgtgggaagtcatccacaacatgcacatcggggatgagtggatctagaagacaagcacacaacgagtgcgatgagggtacaaacttcttgcattccaggagggtgagagcatctaagatttcacactccaactcataggcatcgtcaaccagctcgccacgctcggagatccttaacccgaccacaaggtcatggagaagtatctccaaattgcatgatcaaggtacaagcagttagtcatttaaattgaggcattgctagatgtttcgacgctttcaattgaagagatcacaagttggctcgtggcctcggaggatgatctagacccccatccttccattcacgccgacggcaagttgtacctcacggaggagcagtggcttgagcgctacaagcagaagaagcaagagggatcgtgcggtgccgatgacaccgggtatcgcggtcgacttcatggcggctggggcaaggcttgcggcggcggcaaaccgagtgcacgagacacctcgggaccttcgtcaggccatggcgaaaacttgtgcagaaagtgtgacaaggttggtgaaggaccagtgaggtgaccagaggggggtgaatgggagcgactaaaaatttctcttccaagaacaacaccgtgactgcaatcccaaatttcacacatccccaaaagacgaaagaaattgcataacac

SEQ ID NO: 103170 - DNA, 1139 bp, Zea Mays
gcaggttgaggacagacgttggttgatggccgatgacgaccacaaatgttgaaggtaaagctccctctgtcttctgcttgatggtgttggtaagtctgttaaggcacctcttcatggcggtggcacgcctcttgatgagtcacttctccacctagctgctagaggtgacagagcgtgcgggtcctaagcctgtaacgacaagcatgtcagggtcgacgatgcgcagcttgccggtggtggtggtgaggaagttgagggagccgaacaagatgtggcttcctagtgcgaaggtctcgccaccggtgagcgctgaagtctgagccatcggagtggattgtgtcacttggcacactaaaggtcccctaccgggtgcgccaactgtcatggtttcgtaaactcggggacgatagaatttgtattcggtggggatgctagcgtggactcactatgaatggtgaatcacctcggactcaagcagagggttatactagttcagactttcgccctagtccagtgtagtgctgatcgtagattcatagtactgtttgaggattgtgttaccgctgctgcatgcgtgggaaggaggggccctgcccttttatagctcaagggtaggaccttacagaggagacttgtttcctactggtaagagcgtgatctgttgcccctagttgacgtatcttctttaacgtatttcatagggtcatgtgtcgccatactctcggtctggcataccatcacgcttgtccggacgtctttcatagggtcatgcatcaccgtactctcgatatggtgtactgtcacgctcgtctggcttacgggtccctgtagcgagtctgatgttgatgtcctcatagtggcgcatggcggctcccatagtgtagtctcatggtgcaatcgtgcgcggcgcgacctcgcctttcgtcatggactctgcgtcatcctccaacgtgcatatgtgtacactaagtatggtgtatcatcctatcctttatggtataaaactcactgtagggactctggtgcttaggtcccccattactggagatgactggccccacaagacagctgggatacgtcagagactgtatgcggtggcatgtcataatgttgatagggacttctcgacgccccttcgg

SEQ ID NO: 103171 - DNA, 909 bp, Zea Mays
tggttgaagcatcacattgaggtgtatgccaggatgctcaggcttaggtataacaagacataggaacataaactcatatttaatgcaagtagcaggggaaggttgtatgggatagcaaagacatgccgacatgagtaggacacaccgatcacattgaaaggcgtgaagttgttagttgtcaagctgatatgaacatttcttgcatcgctggcgaactttggatcacagttctcaagatacttccatgcatcaccatctaatgggtgcaccattaacccatcttttttgtttgtacaatctttatgtcacctcatgtgcatagcggtcttcctcaagagaaacaaatgtttcactcaaggagtgagaggcatgtaccgaagttttttacgtgcaacctttgtcaccaccttctccccatcttcatttacaagctccacataccttgacttgccacattttaagcacttctcttccttgccatgttccttccaaaagagcatgtagttgtcttggcaaacatcaatcttcttgatatggcccagccgcatagagtttattttaggaaacactgagttgattggttgtgattatttggtagcaaatagtccctttttgtaatggtagcattagttaccttattgagcattatacggctctatagtttctatgtttaggaaagagattgtggggaaataaaagggagaaaggcagaagagaaaagggacattcttgttccacaaattccagtctcaggcatcgccgacgataaacggccggtggttccgtcaaccgctaccataggtcgccggcgagctatcccggtgccgccctagcctactcgatctgggctgcggcctggaactcgttcctatcaacgggaacacccatatcaactggtatcggattcag

SEQ ID NO: 103172 - DNA, 412 bp, Zea Mays
aatccatgtctatttcttcccacttccatttgggtactgggaggggttgaagcagacctgcaggcttctgatgctctgccttagttcgctggcacaaaccatcgagcccaacttgagatgtgtatccactatgcctccttcgtgatctcgacacatgtcattatctaattgaccacctaatcaccaagtccttgtgcccccatttgacatggtcaactaccatctcaacttggtcaatactatcttttctaatccacatgtacacttggttattaatgtccatagatgtcagccacacacgatccatcctccatcatttggtacatcagtctaagactcctatccatcattcatcacccctagtccatcaacacgaagttagttgaccctgtccattattgttggtcatatc

SEQ ID NO: 103173 - DNA, 807 bp, Zea Mays
tcgttgtaccgtcgtgcgacgtggttgagctcttggccgaagaacttgtcttcgaggcaccgaacttcttcgcagtaggcttccattcttgtgtcacggcagatcgaattcttcatgacctattcgatgatgatctaggagtctcctcgcacatcgaggcgcctgactcctagttcagtggtgatgcgcaagccgttgatcaaggcctcatactcagccacgttgttggatgcaacgaagtggagccgtatgatgtactgcaagtgcaccccaaggggtgagatgaagagcagtcccgcacctacccctgttttcatcaacgacctgtcgaagtacatagtccacaacttggctaggattggagttgttggcaactgggtatcggtccactcagccagaaagtcagcctagatctaggacttgatggcctttctggggatgaacgagagagcttctcccatgagttcgactgcccatttggctaccctgtctgaggcttccctgttctggatgatttcccctagagggtaggacgataccactgttactgggtgagactcaaaatagtgacgtagttttcgccgagccaggactattgcgtataacctagacttgtgggtaacatatctttgtcttggacaatacctcgctgatgaagtatacaggcctctaaacctgcaagatatgtccttcctcctttctctcaactacgatctcggcgctgaccacctgggtggccacgactacatagagtaagaggggctccccttcggagggaggcaccagaatgggtgtgttggaaaggag

SEQ ID NO: 103174 - DNA, 438 bp, Zea Mays
aatatagtcaagatcttcggacggtgcttcgagagcaggggatttggcttcttcggccacattcttctctagagctatgctagcatctggaaactcttctccggcatcctgctcagttgcggcaggttctgcttccgtgggcgctgagggtcgagcttcggtttcagctcgagccgctacatcttcggcagctatcttcacagcggtaggagttggtgctcttgttgtctccatgatatcgtctagtacgctagccattcttctcctcttgggagttgtggcgggagcttttgcaaccttcggcaattctgcttctaccggtgggctccgaatttctggcaacactattgttttttcaaactctggctttttggtcgccccatcttcggcttcgactagctcaactataggcaccttcgacactatagttgattcctc

SEQ ID NO: 103175 - DNA, 412 bp, Zea Mays
ctccatgaaagctaacgaagcttgatggcttgccatgcttttcgtcgtgacgaagctcgtcgtggtcatgagatcactagaggtggccgccaatgttggatacttgatttcaatcccctgaaggcattgaaaattaaggcagcacaagttagtaatggagaccttcgtcctaagtttaacacttatatagtgttaaggcgaaaaatgaaggccttcagatataaatgtaaatggaagtgatacgtaataaaataacacagtacaatggtctatgagaacttatctcttttgccttaacattttcaatacgtctcccattacaatagatatacaagcatacatttggctccttgacagaagaaggtatgaaggttcttcaaaagctaagcggcaccaaagctataaccctcga

SEQ ID NO: 103176 - DNA, 403 bp, Zea Mays
cgaagttactgaaaactctatattatcaagctaaaacatgttttaggtaccctacaaaaggaaagcaaagctaaacttggtcaaaagtaacatgtaaagcgaatattaggttatgaagtttcaggttcataggactgtcacaaagacatgaatcgaagaagacagcttcggtcagctttgattctacggacatcggtgcacatatacagaaaatgaggagaagaatcagaaagtttgctcaacatggaaggagggaagaaaaagacggcgctaccctcatgagacttgtggtccatgcatgcgcataaaccttatcggctcgtttgtaattttatacaaagttgtaccgtgccactataaataggagcatgtcatgcataaggacggggttcagacgtaagag

SEQ ID NO: 103177 - DNA, 387 bp, Zea Mays
cgagcaaaagcctcctaagggtgcagccgggcatgcgccagaagcgcacgacatcacccgcaggaagcgaagtcctcatcccacctaagtgccgcgcaaacacgattacaaatcgaaacaatctcgcaataaatgcagcacacagtatgcatgccatcgtagtttacatacataaaacgaaaggcccatcgaccacatcgcacaaataatacaagtcatattttgtcgccctccctctccattgtgaagcgagggagagcagcgttttcactcactattgcaacacgagagcaaggccagcaaaaatgttacatcagctccgccttcgaaataagacccgcctctcggaaattaaacaacatcatcctcaactcttcgccctcaaat

SEQ ID NO: 103178 - DNA, 937 bp, Zea Mays
tattttttaaaacgaaaacatttgtgtcaaatggaacctcaattttgcaaccgaaatggtagctccaagctctgcttcttgtggatcccaaaatcatgaacagttgctagaataacgaagacgctgttcatactgcaaggtcggaaaaccggaccaaattacaaacacctggagtatgctagaagcagcacttgccctgtggcaggcataataatttattacattaatatatgactgctgcatatcggtttctatggatctgtctgtccagcagaagagcggctgtcgaaggcctttctgtgccaaattttcaaatgatctagaggatggggccttggtggtgtaagcctagctgagagcaccacaccatcagcctctcctaccaggctaccactgatatctgcttcgaagcttcaggtaagaagaaagctgctgcaacacagggcactacaaagcgggtgatgtttcagaaactgctgggcataacctgtagtggaagtgtggaactccatgccaatctaacaggtggttgatcttcccaggattgaatcaatgcaacggcaacttaatctttttatctggtttcggagtagcatgagtcaaaacacgcaaatgacagtatgatcaacactttatcctcagcaacctgcttcacaactctctgtgcttgctgaggcgcgctttgcgcactgcttcttggatattcttttcatgctccttgagcatctgctccacgtttccttttgctgtaatcattgaacctgagtgctgatatattctgctcttgcccttgttctgatcagatagaagtataccaaaaaagttgttaatggtagaccaaaaaaagcataaaaaatactatgatgttaatgtcaaaacagctaacttgttccaatagaaaaaataactcagcatgtgcaatgtccacacaaactct

SEQ ID NO: 103179 - DNA, 623 bp, Zea Mays
aaacaattcatggccatgataaagttttaaaaactgatgatcaaatagtttggcttgaggcgcgggggcggctgaggttagcgtgggtatagacatgagttctcggtagttttcttgcgaaaaccggcgagaaaaagtaggtctcgcggcgagaaacagcgaaaaccgtctctgttttaaaaaaacaattttgaaatcccaaaccgttcgggaacgtcggatttcgacagttttggtctggtttctcgttttccgcggtggcggggcgaggaatttgtttcgaacgggattggtaaacctgggtcccatgcgtcctagatctgggagaactgctgggacatgcttgtcgcggagctgcaatgcagccgcagtaccgatcgtgatggcagtcgaattattagcttccttactcactcactcacgcaccaaccaaacatatagcaatggcacatgacatgatgagtcctagactcctgctccggacaaagcatccagctatggtggcctgttacagtacggcgcgcagcagttattgcagttgcaagcatgattgctcagatatctttgtctttgtttccttgtgccctccacctacctacctatcgcaaccgtataggtagtgc

SEQ ID NO: 103180 - DNA, 307 bp, Zea Mays
gaagaattgtttttatttttaaatacgataccattcctatgtaaccaaagagaccaacatgttgtagtcgcactaagaaagatgatatttctaatatttctatcaaagccactaagccaggaaacaaacaaattagatacactatatggtttagatatcctaaggccatgtggattaaagcccaaataagacgcgcaaatcgacaatcaaaaaataagtgttgaattgtctctatctcatgacagaagcaacatgttttgttttcctgccagttgcgtcttgctaaattatccttggttagtatcac

SEQ ID NO: 103181 - DNA, 543 bp, Zea Mays
caagctgccgcgatggccccctcctcggtgtcactcggccccagattcaacatgctcgaggcaagggaacgacgacgattatggcgcggggatgatgaaaaaaaagggttttgggagaagaaaggaatgcggaaattcccgcaccggacgagagattatacgcgtgcgaacagatagggtgcgttgatagggctccgttggaggagtctttttatttttttccttaaattaagattaggaataaaaagattaggaactattggagatgctctaaggtctaggtctacagctggctatggagatcttatggtcaaccatcgagggaggtaaaggacaccattggattagagggaacgtggtgaggggcacagatgcattagatggagcacgttgaagagcgcaattagatcagagggagggccaagaggaggatgaccaaagcgagtaggtgaagcaacataagttaagagagcaggaagtagatgactttcttctagcttgtaaggctaaccgcaacggagcctcctaaagcttctcctaaag

SEQ ID NO: 103182 - DNA, 590 bp, Zea Mays
agctaccggagtggaaaccactgaagctgaaaccggcgaagccgaagctaccggggccgaagccgggaccaccgaagagtcgaacctagaaaccacacttgaggttattgacaatatactcctaaaaatggctgaagaagaagctgttgtggctgcggtgaacacggcaactgaaaaggggaaagagcatattgatgaaatttcggaagaaggagattttaacttttaagatttgcttggacaagagttaacagacgccgaaaaagaagagttgaaaaatatgccatatcttgcggatataaatcaggggctatgctatttggtggggtcaacgaagggaaactaagatgccttcggaaccgcaccgaggccaaaattgttagaaccctctccaaaagcattggcttgccgaagctagaagcggacatgtgccgttatcaacgacaccatatcgtcggaagcttgctttatgctaacttcaaggtaacgaatatttttgttattttattactactattattatcttttaggtcatgttctaacgaagatcgtttcgacagagcatattattaagcaaggttctaaaaatg

SEQ ID NO: 103183 - DNA, 671 bp, Zea Mays
taggtgtacttatctgcacataatcttcttgtccagttttgttggcaaccttgcattctttttctaaagatcgcctacagttcttcccttctgctattttacctgcataagcacaaaaaaatcagcaacgagtacaatctatgttaaggtaaaaaacataagtaaaaactcataccattataaatctcatgcagatcatcatagaaagggaatgatctaccatcccatctctgtaaattctttggtagatcagcccataccccacccacagtggtagccattttcagatcattatccaaccaaagccactatttgacacaatgatcttcacaacattgtagtccttttttagcctttgctctctatccttcaactgcgacactacaaagtttgctgatgtaaacctttcattaatacgctgtgtcatactgttccatgcctctttggtccatccattctgcgcacgatatcttggtgagttgtactctttgaggatgctcacaaaaaaccatgttcttccttcattccaatcagctctaatctcaattttccctagaacaaacaaaattcaaatgacatgaaccaaacagggatcaccagtgaagtgctaaactatgcaaatatgtaaccctagctagaaataagagaggaatatagggcacataccagcc

SEQ ID NO: 103184 - DNA, 678 bp, Zea Mays
cgatttgttctaatgacaactgctttcccgaagcgtgtcaaacaatgtattccaagtcaccatggggaggtgcttcgggagcaggagatgtagattttttaggaatgttcttttccaccagccctattggcgcagctttcgaaggtccggcttcggcgataacattagccatgcttgcagcaatcgcttctcttgcatcttcagatttttcaccagatgcttcggcagaagcaagaactagcgctttcatggattctaaacaacatctaaaatgctagccattcttctcttctttggagttgctgttgtagtactcaatggcttcgacaaccctgttacagctggagagctcagcacctttcgctattctactgccttttctgattccggctcttttaccaggcctgtactagcttcgatcgacatcacatgagttgtttctaaggttgaggggcagcctctgcactttcaataagctttggcacctcagccataccaataggcttcggcctacatgtcaagaccttggccctcttcggcttcgacgcactagaagaggttgaagcagtaactttcctttttcccccttgccttcgaacaggaaaacagtaataagggtaaacaaacccaataacattgaaaactctgttcactctccttttccctcgagcgtcgaag

SEQ ID NO: 103185 - DNA, 449 bp, Zea Mays
ccattgtgaagataaaaaacaacccatcatcataggagaaaaatgattctgaaggaaacaactcaatactatggcaaatgataactctgaaacataaatttttatgttccaaataagacaatgctttagaatgacataaatccaaatttgtctcctaaacgcgcacatattgtgccttggcagttgaacaaaagatataatgaacgaatatatacccaataaacaggattagaggaggataactggaatgatacctcctggtaattgttgaggtagatcttgaggggctcaacgtattcctcaaagccgagcgtacccaaggaccaaatgatgtcgtcgtcgttgatggtctttcgcctctccttgacgcacttatcactcgccctgcagagatgaatggacagcgagtcggcatgcgaggccaaggggtgggagcatcagagtttgag

SEQ ID NO: 103186 - DNA, 361 bp, Zea Mays
gttgctatcatgaccaaggcgtacccaaatgttgagaggagcgagctgattttgatccaggagatcgctacttacatgcttcttgtgtgtggagctgtctacataatcgcagtaagcttaccgagttttgcgcgctcatgtttcgttgtgtcagcataactgccttttctattatttttcagatagtttaaatgcgacaactgttggatgtgaaatatcgtaggtttcaaccatcttctgtttgggaaacttagtctatacccagtcttatttgattcaaatcatatatagcatgatggaccagttgaatgcttcaagtatggagtggaatctctcttacaagtattaaaatggttacggc

SEQ ID NO: 103187 - DNA, 386 bp, Zea Mays
tgcacctgttgcgcatatgactactgttcgaaccttgattgcagttgcagcctcatcttcttggactatctcccagatggatgtgaagaatgcttttctcaatggtgatctacatgaagaagtttatatgcatcctcttctaggggttaatactcccttagggcatgtttgtcgtctccgtcgcgcattgtatggcctgaaacaagctcctcgtgcttggtttgagcgattcatctctgtcattacagctgttggtttttcttataatgaacatgattctgcattgtttgttcatgtctctccaaaaggtcgtactttacttctattatatgtggatgatatgctgattacaggtgacaaatcagaacatatttctcatgtcaagc

SEQ ID NO: 103188 - DNA, 525 bp, Zea Mays
cagaattgatccatgaaccctatagtaaacttaaagactattgtttggggaacaaattttattaatggaggttaccctgttcttaacaagaatcaagagaaagagggggtgaaaggaggtcggttcagcagaacaatgaagatcagtgaaccagaaatatctacagaaggaaaagatctctggttactgtggtttcggatgtgtgtaggtgaagaggagataggaacgaccgcggcaagataactacgggctgattcacggtcccgcgaacctagtcggagcctggccggagattttttgccgttgtttgtcgtggcgcggtattttgtcgctgtgtcactcgggccaccaccttacctcactttgcctcttccttatgtggtagccatgcgctaacaatgcatttcgtggccgctgatcgttagccggaccactgtgcctataaatagcgccatggaccacggcgaggcactcacaacttcaccagtgagattggtacaagccaaaattcgcactgccttctcc

SEQ ID NO: 103189 - DNA, 427 bp, Zea Mays
agacctgggcgtcttctaccagacgcagttgtctcggccaccgtctatcagtgccccagccactcatctacacattgaagatctggatctcaactcccttggtaatgacttcccaaatttatcctcctaccaagaagtactccagtccgatggtgctacaccctacctagggttgcctcccttaggtcgtggaattagaacagggcgcacactctgtcaatttccccgatctagtgcgggagccatgagatccagaggtggctcacaagtttttcgtggtcgaggtggatctagaggatgtcgtggaggtcgaggaagggccacagttactcgtggtggactctctggtgtcaacccaaccactgaccatgcccttgttcaatatctagaacatgaagaagaaaatgaattggacgctcgatctcca

SEQ ID NO: 103190 - DNA, 653 bp, Zea Mays
cctgaaaccccaagctgccaccggccacttcctcctccccccatgcgtagcttctctcagtcgttgttccttttcgtctgctagctctgtggtctagaagcatcgccattccctacctcttctctggtctaggtgcccaccatggacatcagcgctgccaggactcgacgaccattgacgtcttcttgctcgtccatcggacctcattgggactgtcgtcagatgtctaggcctccacctccgtgctccagtcctatcgttcgctcacctctcttctagcatgagtagaccacgcctctcttcactctacctgcattcacccttgtgtcatctcctatcttgtcatccgtgtttcgccctaccatggagctacctcgccgaagtcctttctcatctcctccacgcgcacggcagctgctcggagcccttccccttgcaccctcccctccagtagcagcagactagacaccatcaccttggatgcggctccttctcacccaagccaagctcgcacaggtcatgtgcagccctctactcctctttggcaactctcgcactcctcgtgtttggtgaaatgcctaagaggcgtgtgttgttgtggactgcaccgatggcctcgccttcgtgtgcgcactccttgttgtgctcgtcgc

SEQ ID NO: 103191 - DNA, 373 bp, Zea Mays
ctctatctctgacgcattggaatccaatgctgcttcagcggcgggtatctgatttggagacgacaaatgctggttagtgcctctgtttcctccttggctttctgattaatatgctttttactgaatatctttcttcaaccatttcttgctagatatggtccggtggtactctgagctcgaggagaagtactctcaaggtcagatggacctggctcgagtttctgcttctttagacgacgccaacttgttgaattcctctctcagtgctcagcttgactctgaaagggtggctaacgaagtaagtttactttgactttctctgatgtgttcttactgcccgctgggtgtttgagagctgactcttgtctgcagg

SEQ ID NO: 103192 - DNA, 443 bp, Zea Mays
agaggtagtgctgcccgctgacctaatcttcggggcgccgaggttaactttcgaaagcatagccgaagcagaggcaaccaggctagaagatatcgacgtgctcgaggaagaacgattgaacacaataattcagtcggctaggtaccagcagaccttgaggtgctaccatgataaagctgtgcagcacaccgatcctttgcagtgggagacttggtccttcgccgaattctaacaggggaagggcgacacaagttatcaccactatgggatggaccgttcattgtatcagaggtcacacgaccaggatcataccggcttactcagatggacggcacagaagtggggaactcatggaacatagaacacctcagaaaattctatccttagcaaaggcctcaaaattcttgaaggaacattgtactctgtaatctgaggacttcatc

SEQ ID NO: 103193 - DNA, 782 bp, Zea Mays
ctcttttgatggtactccttttgaaacgcgcctttgatttctactagtgctgaaaatctgccctatttatagaactgtcattcccactagatacttgtacctcctttcttgtgctttggtccatctattctattacattttctaggccagcaactaggacgagtacttggaacacttattcagcattgctatctgttactgacttgtgtgccacatatatatatttagtcagccttcccatagctccaattttctctcgagcagaacaggtactcctttgcaatcacacccatgctcgttggacagtcacaccggtcaccgtttgccacctgcagtactggtaagaacgttgtaagagcggggtaagacacttcataatttgtattccaccacctccaccaccacccctgagagatagttgtagggttcacattatttgttgcctttttgtctctgttttgtgctaacaatgacaggaccaaagaatcaaatggacaaggacaaggggcctaaacttaacgacgatgagtgtgtctctcaaatggaattgaaggagatgatgcacgcgatgactgaagcttttaaaaaatactaggactctgcctcaatatcccatgagcagcttgatcgatgagttgctaaacttgttacacgcatgaacgtactggaggctcgtcccccaccaccaactccagccccagctcactctcctatggacgacgacgacgatgacgacgatgtttatgcatcgctgcgacaacgcctcacacgtaatcgacaag

SEQ ID NO: 103194 - DNA, 333 bp, Zea Mays
gcttggaagtgaagattggagtgactccaaggtcactagactgtttatgagagcatacaaagaaaaggacaagagtctagcaaggatgataagggaccgtgatgactatgaggaaatgacacctcaccaactatttgcaaaaattcaacaacatgagtctgaagaagccccaatcaagacaggagacacccatgtcttgatctcaaatgaacaagattcccccaagaagaacaaagaccataaggcaaagaaagtggtcgaaacatcaagtgatgaagatagttcaagtgatgaagacacagctatgttcatcaaaaccttcaagaagtttgt

SEQ ID NO: 103195 - DNA, 859 bp, Zea Mays
ccgatgtgttgactgggacagatacagggatagataacatgacttcttctttcttgtccatgacttaactgaatagtcctttgatcgacattgataatagccttattctgggctaaccaattcatgcctagaatcaaatctacgtcttgcccctttataactatcatattggtggtgaaatcatatccgtctaaattcacgggtacatggaagactacttccttagtaaaaatttgacccataggtgattgaataacaaaacccttctttgattcaacactaggtatgcaatgcttctcaacaaaagccttgctcatgaaagtatgtgatgcaccagaatcaaaaagaatgacggcgggatgattggcaacgaaaacttacccatcatcacaggctctccttctggggtggtagccacttgagtatagtagactcgtctagttttactttcacctttgcctgcctgagtgtttgtcacatttcccttgccttgcgatgtgcttccagaagccttttgaaagttggatttattttgcttcggatagggacaatccttgatgaaatgtccagacttcccacagttgaagcagctgttagatgaactaggtagggctaggaaatgagtactatgagcacttggctgaatatttttagcacgagcagtagtgggacagatgaaaactagtttgttgaaaggataggcgggtggacaaggaaaagagcgatttgggttaaagggacgaataaccaaccttgaccgcttctcggatccttgagaggatccttcacccccttcacacccaaatctttttgtctttctctacccgaattcttggcctcgaccaaaagtgttgtgctt

SEQ ID NO: 103196 - DNA, 772 bp, Zea Mays
aagcaagtttgcatatacatgccattcttgttagcctttaattgtttggtcaggtgcgaatttgtgcttgttaatcttgataattgacattatccaggtggtttgacggtgataaggagattgatgccctttttagtcaaatgagagtatgtgcttgtgatcggcaacgcctatataacttggcgatcaaaagtttaataattacattacaaagagccttttattacaatagtttaaatagctgactttaatataaagtgaacagcttgtggacggtcggatgtaaatgattgtgggtggagtggtgaagaatcggcccctagacaccacttggctctagcgtgaatggagggtgagcgacaacttcttacgaatcggccctatagacaccatttggacggcaacaggtgaggccggccgggagaccacgtacggtgtcggcgccatctgaaccggccgaccaatggatacccgagcggcgcatgtgcagctccgtcccaataaccggcgcatgtactggttggttggtacaagtagtatatcctttgtcgtgaacaagcgtgtagtatgcatactgggttgcttgcatcgaataaattaagaacactagggccggaaaaggaggggactttttaaaagtttggttgtgccggttcagaggagtctgtctggcagctatgcctgtttgcactttggcagcacattcctttgcagcattcagaaatgggccaacgggctcaacttccaccaaaaaccatgtggtcggccagtg

SEQ ID NO: 103197 - DNA, 354 bp, Zea Mays
tgtctctaatgtaccctctcgagctatgaggtgcatgagcaaaaggagccctcaattggtgacaataggtgctctcactccacactacctaaaagaatggatctcagggcattcaggtaaaaggcaaatgtatggagaatggaactatgcaatttctttgaatatcttaaagttctgttgattgtgatcatagctatgttattgcctttcaattggtagtatcttggcttaggtgctttatgctttaaaatgttgtttcctttggtgtacctaagaaaatacttcttaatcatggtgtgcttagacattgtgctttatatgcatgatcttgtcatttttcaattggtatatgtg

SEQ ID NO: 103198 - DNA, 491 bp, Zea Mays
ctggccgcggtgaggttgggcttcgggtggcggagaacagatttggggcgaacgtgaaattggagagctgtggggagtaatcggagctacgcgtgggttctctggatgcacaattacctagcggcactggccgaggctccaatttataggcagcttcgacggtggctgggaattttaacggcgatgtgtggcggtcgaagataaggaagaggtctggcgttgtggttacgtgtccccagtcgtggcgagctcatcgacgatgatgggacggcagtagggaatcacgacggtgccgtggaaaggctcggacatgcggcgggcacagagatggcatgacgacggcgagcggccttatctacggcggtgagcaaaagggggaaagtattacggctgaccggggtggcttccagctcgacggcgacgacgatctttttttccacgcagcgttatccggttgccagcgaacgttaatcttaacgcagcggcgcgaa

SEQ ID NO: 103199 - DNA, 634 bp, Zea Mays
ggtcgatccacacacccttagactttgatctagaagaacacatgtcaatggaggaaaccacaagactctaccaatgtcgcccggagtcagtgcacctgatcaccatgtacgcatgatagtctaaacagcaagagcaccagaactcaaacaacgatgaggacttgcatacacatgcatgatgatagttgtgggggcaagaacactatcgccttgagaggcgacaacagcatgaggacaagtggcatctacacgacaaacactgatattgtaagcactaggattgtcccttcttgtagttttgttgtagcgaggatgcatcggttacagattttttatgactgactcgagtgggctaggccttatcatcctcaacactgagcatcagcctttcagtggctcgagcctacactggaacgccaccaagagtcgatctaagaggctccaccacccagggagtcagtctaaaaagatacatgtcaacaagggtcgatggaggaggagcaaaggcaacgacaaaaaaggatcgatcttttggggccaaatagcgactacatacaactcttcgctaccgtaccccaaatagctaaagaattgatggtccataagaaattgcaaggtcaccctcttcaatggt

SEQ ID NO: 103200 - DNA, 346 bp, Zea Mays
ataaccaaaaactcatataatccatatcttgtagtgaaggttgttttaggtacatcttcagtctgaatcttcaattggtgataacctgatcttagatctaattttgaaaatactttagctcctctcatctgatcaaacaaatattcaatccgaggtattgggtatttgttcttaattgttacttcattcaagcttctatagtcgacacacattctcctcgaaccatctttcttgttcacaaatagaactggggctccccatggagaagaactgggtgaacaaaacctttttctagtaattcttctatttgtttctctagttcaattaaatctttgacatccattcg

SEQ ID NO: 103201 - DNA, 541 bp, Zea Mays
gcacaattgaaattactttggtttgcaactgactattgtttccaagccagactcgtcccttgtgtctgagtcaatgagaaagggtatgtggcctctcccgacgccactgcaagctgagccaggagctgcttagcatgttcatcctgttgataaccctgcatgacctcttgaacccaagtgggtgtgcactgtgaaatattacacacttgcgcagaagcagggtatcttgataatgcatcagcggccaaattgtctgaccctttattgtaaatgatgtgatactgcagacccaccaatttggtgtacagtttctgctgccataccgtatgtagatgctgcttatttagttgtgtcaaactctgatgatccgtataaatgtggaattctgtcagttgcaaatacgatctccattgagtcactgcaatgaggatggctaagtactccttcacgtacgtggagaggccttgatttttgggtcccagtgccttgctcaagaattccaagggatgcccgttctgcatgagcacagccctgattcccg

SEQ ID NO: 103202 - DNA, 271 bp, Zea Mays
gttttcttctcagaaggtctatgctcacttgattggcacccatcagtcgctccctctcttctcttggttatggaaatctaaatgtcaacctaagaacaaagtattcttctggttattgctcaaaaatagattgaatacctgctcccttctcagacgacgttcaatgcctttagactccttcacatgcgacaactgtatactccagattgaagaaacgcctattcatctcttcttcagatgcaactttgctaggcgatgttggctacttttg

SEQ ID NO: 103203 - DNA, 291 bp, Zea Mays
gggttaccaaatgctgggggaggaaaggcattaggcattgatgaagttgttgctgcaaacaatttaagggatgaacttggtttatccaaagaagaatttggtgttgcagctctacaagatcgtttaaggaaagggtttgacgatgatctaagcatcagattcttctttctaatactgttcaataggttgttgttccctactgcaagctggggaataactaaccatgaggttcttttaactgaggaaattgatcgtttccacgagatggactggtgccagctaatattcaat

SEQ ID NO: 103204 - DNA, 320 bp, Zea Mays
aaacagagtattcccaacgctgaggaagtggggtatgccgaagcttgaagaagagaagaaagagggtgaactcgtttggctgccttatcactttaagttcaaaaaacacttcaaggaaccttaccaagaatggttggacacgatcgaagttatgtgtaatgagattttagggaactataacaaaaaagaagatcagttgctaactacagccttcggcgctcgtccgaagcaaagattgaatcaggtaatggatgcactaaattttgaatatcttgattatgagcgtttgaacaaagttgccgaagggcaaaaaagaaaaa

SEQ ID NO: 103205 - DNA, 515 bp, Zea Mays
aggccttagacacaatggatgaactattggagatgcttggacatttagagccagatataggatgtgaagatgctggtagtgcaactactggagagggcaaccatgtgggtgttctttttatataaaattgttgaacattttattcagaacttaattattgctaattgtaaaaattaaacgttgcagggcaaagaggatgctgttggaaacactgaaggtgaacatgtatcgcaatgtgataacgaggagcatgtggcagtacattcacgacaacaggtaatattatggcaaaaaacaatgtaatttatgtataatgcaaacaaatgggatgatttatacattatttgtaatattgactataatgcactaatgagtaggatggaggcttaaatattgatgcacatcatcaatctgaactgcaaatgacgcttgttggaaatgatgattgtgaaggaacacaatatggggatgttagaaaggtatgaaatctaaatttattaaattgcagatattct

SEQ ID NO: 103206 - DNA, 728 bp, Zea Mays
gaatctgctaggccctgtcaaaggaggtgttatcgactcaaccacataccatgttcaggatgtctgtaaatattggggaatttttaccaccttctaaacaaggatcaccttctaaatggtaataagcaataagtttatggtaacaaaaattgaacaactcagtcataatggattgttgaagatgtcatctaatattgtgttttatagaagaaaaaaaagacggtacaaatatattagcaggctgattcttggttcagtccgctaatatatctgagttgccatcacacacattttatttttataaaaagatgtaacacactgatttaccatcctgattcctgagttctatcatcttcatataacaacagtctgttacaccacagtattctcaaaattgtaaatacataaaatggcataaacttggaactatctagacatctcaacccaaacaaccaatttagggacttggctctgcacatacaaaatgaggactggtcgacgcaagtatataccctagacaaggaaatgtgtttctagcccgctaacgtccaaagcatccatggtgctggagcaaatgacccatttggtggcacacatttattatacccatcatggcgctcgacatcaatccgattcatgggcctcacgcgtgcaatgcaaaagcaagagcatgaatatgatgacgacgatgatgattagtaattacgtggaggcggagtggattcatg

SEQ ID NO: 103207 - DNA, 629 bp, Zea Mays
ttcagcaacaaaccatctatcgttcgccagtataattcatctcccatcaaggtatactttaatacttgcctcgggacgcttctatcattggtgctactggggtttcgcagacattcaatcaatggtttcctccaatcagaatcatttactccactttgctgcccgatatctgacttttgtggcctgagtcatgcactcctatatcattgacgtttccaaacattggcttattttgaataaaaactgccccttctccgccttataccccgatgcttgctgtgctaaaatgttagctctgtcattcttgcctcggggcacatgcgcaatactaaacatatccatctgtttaattatatccagacaattgtctaaataactacgcaacaaaccatctaaacattgaaactgtccctttacatgctgcactaacagcaaagaatccccgaacgcatctacatcttttactcccatatccatcaaatgccttaaaccaaacaacaacgcttcgtactcaatctgattgttagtgcaagaatattcgatcctaactgacatttcatgtaataaaccatttggtgataccaaaacacagccgattccccgcccttctttgcatacagaaccatcaa

SEQ ID NO: 103208 - DNA, 495 bp, Zea Mays
tccatggattagtgcttcatattctgccgcattatttgatgctggaaataatagctggagtgttcctgcatctgctccctgtaacttcagcaagccatcatagtacattctccatacttcggtagtctccgggttgtctgggacctgacgctcagtccactctgacacgaagtcaaccagtgcttgagtctttattaccgtgcgaggtcggaactctatgtcgtgagctcctagctcacatgcccacttggctacccttccgatagcttctttgttgtggagaatgtcccctattggaaatcttatgactactatgactttgtggtcatcaaagtagtgacagagcttgcgagcggttagaagtaccgcgtatagcagtttctgaacttggggatacttcatctttgagggcctgataacttcgctgatgaagtaaactgaatgttgtaccgggtatgtatgtccttcttccacccgctcgactactaacacggt

SEQ ID NO: 103209 - DNA, 652 bp, Zea Mays
attgttatgatgactcctattagggtatagggttactgaagggattgcatcccatctgattataccaaaaaccgaatatggtttctgatcaaatccagccatactgtcgaagaacccaaccaatgatttactccattttgattaaccaaattgatgtaattatattcatcgctttcttagtggcagcattattatagaatcggaattgccttgcctatttcctagcacaattttttcttcttctcttttgggtcatgcttgttctccctttgccgtaatcttaaaatggtgcatctttttttttattacatccaatctgaatgagattctgagcaaaccaggtgctctcctcttttgatcggcaagcactgtactagctaagatctacatcaaaatgttatgctatactttcttttatgtcaatcatatgtttcttttggcatccatttggtcccttgttcaccatacaagatttcggattttattatttaagtgtcagttttatgcaatccctttcccagtggcagcatacattgattgctctcccaatggtgaggattgtatctaagttcggtggaaacttctacatccaaaattgaatgacttctcagcaaagctattttgcctgcccaaccattccttgtcttgaaga

SEQ ID NO: 103210 - DNA, 799 bp, Zea Mays
aagaagagttatgctgatgtgaggaggcgagatttggaatttgcagtgggtgaccaagtccttctcagggtatcacccactaaaggagttgttcggttcggtgtctccgaaaagcttagcctgagatatattggaccgttcactatcttggcccgggtgggcagcttggcttatcgcttgcaattgtcggattccatggtaggggtacacctagtttttcatgtctctatgctgaggaagttcttgcgggatccggaccatcagattgagatggaaccaattgcggtgcagcaggatctgactttggagtgtcgtccggtgcgtatcttggaatcctcggagcgtgttttgaggaagagatcaattaagtatgtcaaggtcttatggactaatcagtctgagcgcgaggctacgtgggaacttgaggagctgatgcggctgaaatatccggaacttttcgttgtgggtaagtgttgttgattcattaatttttccttttgtcattccgatagaagcgtcagaattcgaggtcgaattctttttaaggggggtagagtgtgatacccggtttgcaaagaggagaagtggaggttattcgttttgttctttttcctcttttgggtgatgcgctttggaaatttggaatttgtggaaaatattcacctataagacagtagaatttctttggttatttgcttgcgacggggtcaggagctgtcacgtgggcgagttgggccttgaaccttgatccggcccattagtctccccttaaccctagccgccctccccctaattcccc

SEQ ID NO: 103211 - DNA, 494 bp, Zea Mays
cagaggaagaaaacttcgacaagtgagaatcaggcactccaggttgcagaacaatatcctgaagaacatgatacaactcaaaaaattccagcaacactctaaaagttagggctccctggaagtcattaatccaatcagaatgaagagcatcactgaccagcctcttgttgatccttcttctagggaccatagcaactagagagggggcaatctcactttcactcctattgccaattagccatctgtccttccagaagagcatattggtaccatcccccactactgtaaccacagccgcctcaaaaagcttctgaatctctttactagaattaatagaaaaaaatggtccaaggtttattagactcagtcttttgcaaaccaagaccatctaaccccaagagcccagcataactaatttaaattttaaatcatgcagccctagaccacccagttcctttgatctagtaactttaggccatgccagcaaacagtgc

SEQ ID NO: 103212 - DNA, 308 bp, Zea Mays
tagatttcgtaattttccaaaacttctccaatcatttcgttcaaaggaaacctcaatcctgctctgaagaaactcctgaaaactaccacctcatcattttctacggtcggagtggtttcttccccgccaaagcgaatcagcttcttctcagcttctccgaagtagcctacctttatcatcataggcatatcagcctcagaaatagtagattttccaaagtccaagtggctcggtttggctggcataagaatcctgtaatcttcctcttcttcatcagcatcatcttcttcgatgtcagactattcagc

SEQ ID NO: 103213 - DNA, 614 bp, Zea Mays
gaaaaggtggacttttctccgatgtcagaaaagtccgagggagctatatttcttggaaaatacaagtttttttcagagcaaaaaacattttccttttataaaagggccagcatgacaagatgatggctgactatcagcaaaagacacgaagtacaaaaaagaacaaaagatgtaaaaccctgcatccactgtattcatggacaacaaaaacagttcatcgatcattgttcaggtagaacacattcgaaagaacgcaccccagagccagaatgcgaggaagcctattttcgtaataaaactgagagcgagaacacttttttttataagcgagcgacaacgttgaaccaagggcaagccatgcgcgtgtactccagcggtcgtcctcaccaacccaagtctcgagtcctgaatcctgatgcgcaccaaccacagcccaccgagcttcctgccccctccggccaacacgaaacttccgaaccactgtccactggctcccaagattagcgcatgtctgtgttctctgcaaacaaaaactcgtacattgccttggtcgtcttggaccagtcaccacagtccacaccaccagctcccctccctttccggaccacaaaaac

SEQ ID NO: 103214 - DNA, 347 bp, Zea Mays
atgtctggctatgaacgtgactagattcgtcgagagggaaaagatgggggacctaatttcttatgttggtttcgatattatgtagatataaatgacaatatacacccggaccttcgacaattgtccctaggagcagtaactgccagacgttatggtcggtataatgtcaatggtttccgtttccgttctacaaggttcaatgatgatcatcctctagcagccacgacaaatttcggagttgtaactagagctgtcgatgatgaagggatgatgactaattattatggagtcattaatgatatactcgagtacaagttttttagagacaaacaactcaaagtggtgtt

SEQ ID NO: 103215 - DNA, 322 bp, Zea Mays
ttgaatccatatatatatgtgtgcactaaaacttgaggagaacttagtgtaatttgcaattagtgatatgcttatctatcaaattgtatcaattggtggctttcaattgatattttccgtacatgatcactagttgtagaatccatacttgtgaaattttcatgttgcctcttgttgtgataagaaaatgccaggtgacatctagactccaggtatcaagcttcaccttcgatttagtatgacaatcttgatttaatagcttagacctatgtcacaactataccaacaagagcttgcaaatgaattctaaatccaaaacaag

SEQ ID NO: 103216 - DNA, 665 bp, Zea Mays
gggaaatgccgaaggaagctgccgctggctccagccaaagtggcttagtttatgtcaagtatacctttcggtacagaagtcaatttgatgaaccaaatgatgactagctagacgctatagaggcaacaagtgatgagctactcggagcctactcgaggacagaagacgaagccatgatagttgccttcggcgctcgagggaaaaagaggctcaatagggttttcgatgttattggatttgtttaccctgattactgctttcctgtccgaaggcaagggggaaaaggaaagttgctgcttcaacatcttctagtgcaccaaaggcgaagagagtcaaggtcttgacacgtagaccgaaacccattgggatggccgatgtgcctaagtttgttgagagtgtagaagctgccccttaagcacagaaacaactcctgcgatgctgatcgaagctggtgcagacccggtcaaagtgccggaatcagagaaggcggcagaacagccaaaggtgctgagcccagcagctgtagcagggctaccgaagccatcaagtacaacaacaacaactccaaggaaaagaagaatggctagcatcttagacgctgttttagaatccgtaaaggtgtcagtttctgcttctgccaaagcatctggtgaaacatctggaga

SEQ ID NO: 103217 - DNA, 1182 bp, Zea Mays
atcatatctttcttgcctaagtaaactgcctaaggctattggtttgcgatcaagaccctgtttgtgtagcctcgaggttgtatacatgtgcttaatatctttctttggtataacattaacttcaaagacccagcgcataatatttatggaactttatactcacattcttatatttgtttgcagccttcacaaacctgcaatctgaacacgtcacaaatgatgtcttgccttttgtggatgtacatcttggtcagtcacaaatgatgtcttgccttttgtggatgtacatcttggtcacctctgtttatcgcttttgtggatggattgttcagctggctttagtagatggaatgactctgcacttgtagttgcgtaatgtttgtgcttagctgtctggattgtgccggccaagagttggctctaggtaccttgtaaatagctctggtttggttgcctgtccctcactgtatcaactagccgtaaacttggaccatgtaatcttattctgcaccagtttccagctgaaacaagcctcaacgtcatgctatggtgcacgtttaactgcggtgctacaactttaatgtgaattattttcgagctacctatgttctatgttctgttgagtatctgttttctttttctctgaactaaacaattttgtttgagatttagtcatcctccatttactttcattatagcgtgtataactgtgtattcatattttcccagtgccggatagggcgcccgaaggggcgccgcctgatctagtgttatgcaatgcaagtggaaggtagcggtgaccacgggcagctaaaaggaacgttattggcgacaggatttgactatctgactgagtactacacaacatcgaaccaaacgccgaacgcgaaacattatcgggttgcactgtgaaaatacgaccggtttcggcgcaaattgaacgaaacaaaaagtcaaacactactaatctaagttcagttttggaatcatgcacttgttgtttgtggctactgagactatcttcagcagactctctattccactccttatttcaaacttcattatacaaatagtgtaatctactgtgcaaaatagtactttacacgaccgtttatacggcctaatggagatgacctcaaggcgaaatttcatacaattttttccagtgcacttacctaaccc

SEQ ID NO: 103218 - DNA, 353 bp, Zea Mays
gagcaatccccacgtacatggtgattgggtccgagttcgggttgatgatacacgctcatgggacgagggcgaactagaatgaaggagtccttatcgatatgttgacgaaatagtagtcgaccacacacgggcagcccaagcgaatggtgaagctccaacgacaaattccacgcacctcgaacactctcacatctctcggacgccatgtatagcttcctccgtcttcgatgaatcctcccggtcactcaccaagttccgaactatggcgtgggcggtccatcgatatagcggcttccatctctcttctctctgctcgaccatggcgagactctcggcatggatggtggctggac

SEQ ID NO: 103219 - DNA, 468 bp, Zea Mays
ggggtgcatgggccattaatgcgttgtagttcgaagggctcataggtcatgagtgttatgcggatcgaggtgctcgtaggtcatgagtgggaagcgaacaggcaccatgctatggcttggtgccaggcgtggttaaatgcggtcgactatttatggctagtcagtctgggactgggcgtgggatccactagagtggttccctttcaacacgcctgacctcccctgtcaggttccaccacactcgaccccaagctcggtgccatggggttcgaccgagggtgggtcctttcctcagtgcactctctaattagtgggtcccagggatcaggggtcatttccctgagaaacatgataagcatgagaatgtaatgcataacccaagaaaaccccatcaaaatactgagactcaaatttgtccaaatttccctattttagcacaaaatatctacagccaaacactctgaaatg

SEQ ID NO: 103220 - DNA, 513 bp, Zea Mays
acctttttcgcactaggcagctattgagagatagcattcatagctcagtagaggagcaggttgccatgtttttacatgtggtaggtcataaccaaaggtttagagttatacacatgacctttcgaagatctattgagaccatcagtagatacttcagggaagtattgtatgctgttggtgaactgagaaatgaaacgatcttaccaccttcaactgctacaccaaccaaaattagagatagccacagatggtacccctatttcaaggtcagccctccaaacacacaactactgatcccttccttttcatgttgggtttgtagtaacaaatgtttgccctaatgtgtaggactgtattggtgccattgatggcactcatgtgctagcaagagtttctagaaatcagagagctgccttccttggtaggaaacacaccacaacacagaacatcttagctgctgtagactttgatctaaggtttacatatgttcttgctggctgggagggatcagca

SEQ ID NO: 103221 - DNA, 481 bp, Zea Mays
ttatcagacgaaggggtatctctcgatcagatcgatgccttccgacgagtatccaacgaccagaaccccccttctccatcctcaggtcggagtagggcaacgacggcgagctctgcggtggagttcttcaccgacgaactacggaccatgtccctagcgctctaaaatcgaagcagatggatcctacgcagggcggaggtgagcgcaaaactagtgaaggatccttacatgctaggttggtgagggtggtgctaccagcaatgacgcctacggcggtggttctcctggccaaccgacgaggaatactccgcgccttgaagacccccaaccccgtctggttcggattaacgcttatagaacgaagggtgagagtcgtgcagagttctcaccgagatcgaaggagtggaagatcctgcccacggtgagacacggtccgaccgccgcccgtgagctccagtgaggaattggcggcgctcaggtg

SEQ ID NO: 103222 - DNA, 1590 bp, Zea Mays
gtctgtgtagttcaaaaaaaggcaataagcaagataccgatacaattatacaacaataaattcaggcagaatcaatgccacacaattttacaggtttttctatcaccaaaatgaacaacaatgcaagcaaggaatatcgtatttaagttctatgccaagatgtttctagctttttttatttcaatgaatctacagcgttataatccgctagcttttgcttcaaaataagcattcgatatttagcagcaggaaataattacaggatgtaacaatcttgaaccagctgcatgtgaacgaaagagtatactataattaaaccaaaaaaggatatcttttagcttgtttacgacactctctagatgacccgtctttctatcaattgctgtcttgttatcccttattatcttcacaaactttagttttgagcgtctagaatcatagaagcctcctgtcatagcaccttttttccctacctgatcacctgatacaataacaagttaactacagattcaattgagaaatttagaattaaagtaacaacgacagctcaacgtaaaaaaccaagactaccatcaagtgtgatgcaatctagaccattgctacgtgcaactttagtcgcagtttccagatctcggcatatgactgtcctgccaaaaacctaacaaaaacgtaaagtcagatataaaaaataataaagaattttcttctagtatagaagagcaattgatttgagaaactgccttaggtgattgggcaaggaaagctaactatttggaagagcaaaagccccatataagcatgcaatgtagccagaatgaaaaatgtattaaaataaacagacaatggaaaagatagaggcaagtaatccctttgatcacaagtagtataagttgtttaggacattgaagcaggtttgcaaggttgaactttgacaagcaaatcacaattactgtaaaattgtggtgatctaaaacaaaagagactatgctctacccatgatgaacctactaaaataaaaccttaaattgtctatcgatctagttctttgtatgctgatgatcgaagtcaaataagtttgactacaatcggaggcaccttatcaacccaatacaagtgcataagattattgcattgtattctaaaacctcgaattttacaatcgaccggcacaaattaggaatgcacctattacttgaaagcttcacctggaagaacacaaagtacgtatatgaatttctcaacagtttgaatgtctggcatatcataaactatggtttgccatggcgcttgtagtttaagcagaggcatgtgaagctgagggttggcttgcatgagagccacaactaagcagcagccagcaatgactggaataggacatgctagttacggctgacatggcaccaacggagatcaccagaatggaactgaaggcgtgtcagctgcgaaccagccatctagtttccaaccttcaagtaaacagaccagaccccagatgcagcaaaagaggccgagtatatattactagagagttcatactaatgcatatcctcacaaatgacgaacatgtaactctgcagaaagtgatattac

SEQ ID NO: 103223 - DNA, 309 bp, Zea Mays
ggactgtattggcccatttgttgtcgatgtatctagcgaggtttctacaatgacatcatgggatagaaaactaggaatagtagatttttctaatgtacgtgtgagctttttaagggtttcttctatcccatcgttacgttgttccaactgatctcgttgctataattctatagaatgcttaatagattggtcactggaattacttacatcgctgtcgtggagcagagacacgagggcgttgagcttgatttctcgttgcctaatgatcttctggtgttgatccaccgtgaagtgcgccatgaatttctc

SEQ ID NO: 103224 - DNA, 344 bp, Zea Mays
accgagccacggcgaccgccggtgggatatctccggccacacatggctgggttcgcgggatggtgccacgtccgaatttatctctccacgatcgactccctccaccggatcactcgagcacatccggttcaacagtgcctcagatcttatctgcgttcttcagatatttacagtgctttgatcttcagcgttttactgaaccgaccacctatcatccccactttctcatgcttcttgttaagaataggttaacctcccttaataaaatttgttccccaaacaacagtctttaagtttgttatagggttcatggatcaattctgtatagattctcagatttggtg

SEQ ID NO: 103225 - DNA, 449 bp, Zea Mays
gatttccgccatttgccttcactgcaagtacacactgtctgctaaatcttcttctggaactggacacttgatctgtcacctagaactttgcccccgctaagaaagataaagaaaaaaccggtagatctcaatccatgcttaagtttaatgttgatggatctgttgtgcactgggagtacgctccatctgttgcaaggactgagctttgtcgtatgattgctagactagacctacctctgtgttttggtgaatgtagtgcatttcaagaatatattactcgtgctcataatcctcggtttgttaagtcctctaggcaaactactgctagagacttaattaggctttttaatgattgtgctgaacaactgattaatgtactcaaatccgtttcatctgttgcacttacatctgacatttggtctggcaacgcaaaagaggattacatcagt

SEQ ID NO: 103226 - DNA, 417 bp, Zea Mays
ctcgggcatagtgtttagcttcaaaaatttcttcttcggataatctttttctcgaagcatgatgaataatataatcaaggtcttcggaaggcgcttcgggagcaggagtggcagctttttcaagcaaaatctgttctatagcttcttcttccgctgccttttctccaattttcgagggtttctccttggcaggctctgaaggcccagcttcggcgctagcctgactcattgtagcttcggcttcggtcagttttgtttcggtttcaatttgtactttcgaagccttggcaattttccctggagtagagcttgaagcttttatcgtctccagcacatctagtacactggccatcctttttctcttgggggtcgctgctagacctttttgtgccttcagcacctccactcttgccgaag

SEQ ID NO: 103227 - DNA, 1235 bp, Zea Mays
acagcaggacaggcaccagagaattcgatcttttgggtttccacccaagggaccaagcttcaacaagccagttagatccactccgtcacgtttcagtcagcagggtcaaagttccctctaggccccctccgttgcaagcaaccaacctccagccaatgcctgttggcattgcggagaccccagtcactacaagaataattgtcctcagttgaagacatttgtgcctacctactccaactcggtgaatggccccaagagtgccccagcacccgcctccaaggcaccctcctccaacagccagctaagcaagacccagtatcatggcagggcacgagtaaaccacgtcgacgctcaagaggctcagcaagccctaggagtagtgctcgatgagttcctagttgaatgtactcccgtctctgtactttttgatttaggaccatctcattcattcataaccactggttttgtggaaaagcatggcattcccactgcatatctagaaattcccttggtcacccgaaccctaggggcagaccttctatgccacctcaaatgctcccaagtcaggattcttttaagtggggtagtgttcttggtagacttagccatcttgccatcccacgaaattgatgtgatcttaggaatggattggttaaccaagcataatggcgtcataagttgcacagataagaccgttcttctcactggccaccaaggaaagtcaatttcatgtaaggcttagccacccgcccaagatccaatggtgtttaatctagcagcagaaagcatatctgtagtagaagaattcatggatgtaatcccaggagaattgccaggaatgccgctagaaagagaagtggagttctaaattgacctaattcccggcaccacaccaattgcaaaaagaccatatcgcatggctcccaccgaattggcagaactaaaactccatatcgcagaacttcaacagaaagggtacattcgtcccagttcatctccttggggagcaccagtcctgttcgtcaccaaaaaggatggaagtatgaggatgcgtattgattaccgatccttgaacgaagttacaatcaaaaacaagtacccactacctcggattgatgacctcttcgactagcttcaaggggtcaagtatttctccaagatagatctaaggtcaggatatcaccagctaagaatcaaggaagcagacgttcagaagatggcttttgtcactcgct

SEQ ID NO: 103228 - DNA, 733 bp, Zea Mays
gggaggggtgaagtccaagaggaaggggaggggaagggggcggctgcaaaatcccaaggggaaaggggggacggctagggttaggggagactaatgggccggatcaaggttcaaggcccaactcgcccatgtgacagctcccgaccccgtcgcaaacaactaaccaaagaaattgtactgtcttacaggtgaatattttccataaattccaaattcccaaagcgcatcacccgaacgaggaaaaagaataaaaagaataacctccacttctcctctttgcaaaccgggtatcacactctaccccccttaaaaagaatttgacctcgaattctgacgcttctatcggaacgacaaaagggaaaatttaatgaatcaacaacacttacccacaacaaaaagttccggatatttctgccgcatcagctcctcaagttcccacgtagcctcgcgctcagactgattagtccataagaccttgacatacttaattgatctcttcctcaaaaaacgctccgaggattccaagatacgcaccggacgacactccaaggtcagatcctgctgcaccgcaattggttccatctcaatctgatggttcggatcccgcaagaacttcctcagcatagagacatgaaaaactatgtgtacccctgccatggtaactggcaattgctagcgataagccaagctgcccacccgggccaagatagtgaacggtccaatatatctcggg

SEQ ID NO: 103229 - DNA, 471 bp, Zea Mays
gattggtggtgagggctggttcactgtgtgcacaattacttagcggagcaggctagggcaccaatttatagtgtccaagggcggtggctcccaattttggaatggcgcgctggcagccggagagaaggaaggtcactggcggctcagtcgtggcgtcctctggtgcaatggttctgaaatggcaagcctaggcgtgccatggttactactacgcagtaaagagctacggtgtggcataaatgaggtcaccgaagtaccacggcgacaccggcggtccagccacgtcgcacggctacaggcgcaagtgataagcttcaccccgcgaccaaatccactccaataccgatcttttcaccccctcggtactatcatgcccgagtcctgcacgaatcaccgcgatcagcgcaaatccttgcacggaggtcaccggcagcgagggggatgaatctgaagatttttttagtactgtac

SEQ ID NO: 103230 - DNA, 475 bp, Zea Mays
agaccatccaatacagtgtcctcgatctcacaaataaggaaatccacgacatcaaactcggagtgagagaccagggcaccaaggagccagagctggatatgtgtggtagcctccctgtatcccatcctcggcagaagagtccgtctgataagctcaaataagaacttggctgctgtagtgaaatctgccagtgaacgtcgcgacccatctgagaagggcgggcagaatagagccgcgacgtgagctgtacccggagccacaccgccgtgagggcgacgaggagggtcagaggtgccgtagcataagttgtgaagtcgagtcgacgactcgagaaatccaaagagctggcgaatctgactggcagtaatagtgacatcctctcgctcaaaacgaaacctcatccagtgatgatctgggtctatccatacagtcgcgtagaaaactcgaacccactcctcaacatacctgccgctag

SEQ ID NO: 103231 - DNA, 899 bp, Zea Mays
atgtggtgtctttgaggccttggggttgacctctgcctccctgctgatgatactgattcccagccatttcccgaaggaagcgagtattatcagcagtggtattgcttaaggcaacgatagcctctgccagcgtgggaggtataggcaacgggtccagagtttcctccccaccacaggaagttcgcgtcccatcttaagcacgagttctggatggcatctgaagaagaaaacatatttgattattacatgccatgagtacaccacctttgttacattattccaaactggtattaattatacatactcaatttgtacaactcagctttccttatctaaattacataaggaaacaacctactactatactactctagttatctgcgtccttggctgctctcgttccactgtagctttatttgcgaggttcatgaaaggaggggctccaaagagattcaactccccataagttcctccgccagctgctcctaatgttccagctcccattgctgcaacctctggtggcacgttcggatgcaactggtcatacaacacgtgcacttcctcgtgaagagtgttattgtatgcttgtagatttgccaaggctacgcttagctcctccatccgagctcgggcatttgcctcgcaatcccaggctatatatcatgaatttacagcccagtctatagccctgtatcactccacaatctcctgctgcaaatggtcaacctctgctgacaactcagcaatacgacggctatcacacgcacactccctgcttccatggcgcagtttcgtcgttagtctttcaactctgacctctagatcccctatgggatcattacttccgctaatgctcccctcatgtcgaggagccaactagtgctgaggcacgccttgag

SEQ ID NO: 103232 - DNA, 448 bp, Zea Mays
tcgtcgtgggcggaccaggacattgccaaaattactgtgagaacctgctccccaagttcgccaccttctcaatttcattttgcacctgagatacgtagtggtcgtgtaccattaagcgttgtgggtgtttcggccatggagggccgtcgtggaactcggcatggtcgccggggtttagccgaggagaagaagacgcgcggtagagggtaagatctagatgaatggttgtgatttgatcttaggttagcccatcgcgatattaaatctggtgcaccggttcggaatcagatggctggaatctgatcgcccccctgccgttgatgctcgatcgggcggttgcgaagggagatacattatgcgatgaccgtgatttaatctggtccgtctacgttgaccggacggccgagaaacacccgtacctcttcgcgggcgcactatttcttatgag

SEQ ID NO: 103233 - DNA, 475 bp, Zea Mays
gggtaactgccgaattatgctagattgcatcggtgttttggaggcaacaaccgagctatgcttggcgatgttggcattttagaggtaaccaccgagtcatgctgagccacgttggcgttttagaaatagcagtcgagtggtgcttggcgacgtcagcgttttagaggtaacaaccgagtcatgctgagtcacgtcagtgttttagaaataacggccgagtggtgattggcgacgtcggcgttttagaggtaacaaccgagtcatgctgagccacatcggcgttttagaaatgccgaccgagtggtgacctagtgctttttagaaacagtgtctgacccgaggaaaccccatttatatcatgtcaccacacgcctctgcgttttgagacctagcctcgcttttttgcctccaaacatcctctgcttccctttgatttcacttccgcttagtccaccgacgaaattgagatggcgcc

SEQ ID NO: 103234 - DNA, 349 bp, Zea Mays
gccaaagtcggtggtactggtggcgagttaggagtatcttccctaccgcgggaagtccccgcaccatcatgtgcgcgagtccgtgatggcatctgaggcaaagaaacatttggaaaaaaatataacatgccaacatacaccatcatattacattaccaaaatgtaataattatacagactccaatgtacaacttgacttcattacttattttacataagtataacatctaaactatactattctagtcttcttcatcctttgtaataattatgcaggagaccgttcgtcagcaaggttcatggaaggagggggattaaaaaggtctagctccccattaggtccttcatt

SEQ ID NO: 103235 - DNA, 509 bp, Zea Mays
gaacgagccaaatccgcgccaaattcgtcgcctcccttcggcaccgagaggggaacgctcttcaatctcatccatcgccgcctccctttccttcaacggtgccgaagatggactccgcgccaaatccgccattcaatcttcgtcgtctcccttccttacgccgcgaggtgaacgggatcccctacccatcctccatacacgtcgccataaaccatatatatcaaggccaccagactggagttcctctccttgcggcaaatcctccacgcgtttgtaagttctcggagtgaatcaaacgcaacaaggatcgcgagctgctggtgggtactgaacggcgcaacaaggcactggtcggcaacaagtgacgcccagactggagttccactccttccaagcaaggattgtggtcggcgcaacaattttctggtatgggaatttccctcacgccctgcattcttctgtaattactgttattagtcactcttagtcacacaccacatgaatacaca

SEQ ID NO: 103236 - DNA, 298 bp, Zea Mays
attagcgggaaacgctatcccccttatttccacacttacattcaagcaaatgctatcggctcgaattctaccaccggctgagtcaatttgaatgggggttgacatggtagttgttgtaagattatgtgcttctacccatgatgcagtaatgaatgaatgtgttgctccagtatcaaataacacttctgcaatatgggagtcaactggaaacatacctactatcatgtcgggggtctcctgaactacttcagcctccaggtggttcagtctcccatggttgtagcgtggctgagagcgg

SEQ ID NO: 103237 - DNA, 456 bp, Zea Mays
tcttttgcatcaccttggtgatgtattaatattcggtgtgtgtttctccaggcaacatatggggagcagatggttgagttccatgggtaggattatgattggtggtcgaaaccaattgacctaaaggcgacatgtgctatcacagaaagacaagcccatgtacggtgagagtttctaacttatggccatgtgcttgcgattgtactgaagctatggttcaatattgtaggttgggtataattattcattgattgactctagggagatgaggtgacaaggacgacaatctataccatcatccttataggtgtctcattctcacgactcagcctaggacatggagatttctaggatgcacgaagttataaggcaataggcggagtagcagaggcagcaacctgaggaccaaagggagaaggatgagtactatgcgaacctctaggctcagcagcaggc

SEQ ID NO: 103238 - DNA, 296 bp, Zea Mays
cagagatgatgcaaaatcttcatcgaaatgttgtgagcatcattaaaggaagtctgagtgcatagtaatataggaaagtacagggacaagaggacgctcgtgagatctagagtattctaaagatgtcacatgaaggtgatccaaaagcaaagatacatcaaattgagtccctagaaagtgaactagcaaggtatgaatgggtaaagggcaagtcattacaatcactctttgatcggttgatggttctagtcaacaagataagggtgcttggaagtgaagaatggaatgattcgaag

SEQ ID NO: 103239 - DNA, 490 bp, Zea Mays
agataatggaccttttgactctgcgacaaaactgcctccgttgaggattataaaactcagtttgagcagctactctaccacattcgcttgtatgttaaatcaataagtgagatttttctgatttttcagtatgtcatgccgctgaaagaggaattgaaggcggcagtggaacttcagttgccaaacaccatggccccagctgctacattggcctgtgcaagagagtgtgctggctagattgcagaggtctacgactaaagtatctgtatcgagcacagttcataggtcatacgagcttcaaccataacgtcctgatctggaaacccttgggaccttctaagtgtaagtttttcgcatggctcatcattcacaaccggctttggacggcacacggcagatagtttagctaagcgggactggccgcatgacctggtatgttctctttgtagacgtcaacacaccacgtactcattgtgtgtcgatactctag

SEQ ID NO: 103240 - DNA, 372 bp, Zea Mays
ttactgggcgcgaatcgaagcgccggcgcgaatccgagcgcgtgggtcaccggccgcgaggttcagtgcatctgagatttttctggctactgtaccatggtcatcttcttcagtcgttctgacggcgcgatttgaggagccttgttctctattttccatgtgacaacttactaatcggtttgtgtgggggatggatatcccccgggtccactagaaggcaagaaagcctcgtgaaaggctttgggcctattgtctcgaaaagccgtcccttcgtgggccaggggagaactactagcagaatgggtcgacgcagggaatgagcagactcggacccaggcggctcattggatttaagcgttatccatagctctg

SEQ ID NO: 103241 - DNA, 427 bp, Zea Mays
gaagaaataatgaagatgccagagattttgagccctccaatagaggcaacagtaccaaaggtacaaatgggttctgtcataactcctaagaggagaaggatggcaaatgtgctagatgttgtgttagaaacaacaaaaaccttgagtcctgctcctacaaggaaagttgccgaagcttccaaggcgcaacccgaagctgatactaagcaggctgaagtcgaagctgcaacaattcaggctgaaaccgaagctgggccttcagtgcccaccgagatggagcgtgctgaccctaaggaaaaatcaatagagtggattgcaactgaaaaaatcaaggctcctggtcccaaagcatcgaacaaaagtattgactatattattcgtcatgcttcgggaaaggtactatcccaagaagaaatgttagaagcac

SEQ ID NO: 103242 - DNA, 569 bp, Zea Mays
cgaggcagaggctaccaggttggaggatattgatgtactagaagaagagcgattgaatacattaattcagtcagccaggtaccagcaaaccctgaggcgctatcatgataaggctattcgacatcgatctttcatagtgggagacttggtccttcgtcgaattctaacatggaaaggacgacacaaattgtcaccattatggaaagggccatttgtagtagcagaagttacccgaccaggatcataccggcttactcaaatggatggcacggaaataggaaattcatggaatatagagcacctcaggaagttttacccctagctagatttcaaaagctatcggggcagcattgtattctgtaatcagaaaatacatcatcaataaaaagtcttcattctcaaaggcactcgaactacttactatgaatctgcatgcccacttaacttagggtgaccactataccctactaacggagcaatcggcttaagtcggcagagacttaagacggtgcaacatgctcacacttacttaacttagggtgaccactataccctactaacgaagcaat

SEQ ID NO: 103243 - DNA, 612 bp, Zea Mays
ttcagcttgaatttttgcagcttcaacttctgcttgcttcgtttcatcctcgggtagagctttggaagcttcggcaatttttcctgaaggagcaggattcaaggattttgctgaatctagcacaacatctaacacatttgccattcttctcctcttaggagttgcagcggaacccttttgtgctttcggcactattatctctgttgacgggctcaaaatctccaacatttttgttatttttcaactttcaacccttcagccttatccttatcagccttcgtctaaaccagcttaactaaaggtaacttcggcattacaaccggctcttcagggctctgcgcaattggagcagtcactcttgtttcagcagctgaagaggcctccccgctaaactcaggcaccacggtcggttcaatgtaacgaggctggtgcgtaagaaccttcatctttttgcccgcagccttcggcacaggttcgtctggggtggccaaagcagtagcttttctcttcttcccctgtccccgcagggggtggcggtaatcggggtagacaaagccgatggcgtcaaaaactctgttcattctcttttttccccgacttccgaaagctgta

SEQ ID NO: 103244 - DNA, 384 bp, Zea Mays
gatagagaccgggtgaccttcaagaatctgggggtcttcagctttgatgggttgaacagggttggatggagcgggctcttggatccgcagggctctacgttggttatgggtgaccaagtaggcctccatcaacttttggacgtgctcatccttggcttgcttcagggcttccacagcaatgacttcacgactttccaaggatgctacacgggcttgagctgtggtgagatccacatggagttgacggttgagcttctcagcatcttctactcgggcaatcatctgacggtggtgccgagccaagaaatcatactgtacatcaagggtgagcaggtatgcagtgaggtacatgactgtggggtcgtcctcaagcagttgcttccc

SEQ ID NO: 103245 - DNA, 397 bp, Zea Mays
gactaaggccaccgagacagctctgatttccgaagttatgagacaatcgggcttaattgtgaccgagggaaccattgacgaaggtacttctggtgccgaagctgagctggctgatattgaggaagaagaaaatgctgatgaagaagaagattataacattttgatcccatcaaaacccagccacctggattttgagaaatctactgtgtctgaagccgatgtgcctatgatgatgaaattgggctacttcggagaagctgaaaagaagcttattcgttttgccggggaagagaccattccaacaccgaaggatgacgaagtagtagttttcaaaagctttttcagagcaggattacggtttcccctgaatgagatggtaggagaagtttcgaataat

SEQ ID NO: 103246 - DNA, 618 bp, Zea Mays
gtgagttagtgatgatatttctcatcattctaagaccaggatgccctagttgacaatgccatagggagaataattcataatgtctaaacaccgtctttagggaagtggacactgcaggtgcactaatcttagtataatataaccctgattctagcgatgggaatttttctatgacttctttgtcatattccccatactttatgatgcataggtattccttaccattttcctctgtggtttctacatgaaaaccatttgcatgaatgtccctaaaactcaagagagttctggttgatttggggtacaatagtgcttctttgatttcgatttgagtacccatcgggagtgtaattgtggctttaccggagcctattacacatgaatcgtttccggcgattgtggtaatacttccaacgttcttcgtgattatgtgaaagtattttgtttcccttaaaatggtatttgtcgtgccactgtcgacaatacatatatcctccatagaccttttataataaaattattgcaattagtaattatcataagggaaatattgcatagtaaattcaaatagttcaacattcatgaaataaagataatgctctcatagagcttacatgc

SEQ ID NO: 103247 - DNA, 619 bp, Zea Mays
aaacaaggaggtttttgccctaggtcaccacatcaaatttgtagacctatcaaaggagaacaactttgcttaagagtgtaagcatggttgttatgaagaaatggaagaaaaactcacccaaagttgagctggtaggctgttgaagtctgaatttcagactgacagtgtaaccacagaaactttgggtacaaattcaaacatgatccagtaggaatttggctatagctgctgtggaaaaattatagctgaatctttggtctacaactttgctacagaactctaggtatgttgccacagaaaattaagagaaatttaaccctaaaggttgtcaggccaactgaatgaaggacgccatggtacagtatctgagaggatcaggacgccagctcaactcgccgccgacgatccccaccgtgattcgtgccgccgccgtcctgattcgtgcccggtgaggaacggataacgccggggatggataaatcatacgtggcgccatctcccgagtccagccggagttcttcaccggtggccaccatgaccagtaaattttgccgcggtggcactcatgtcgtgatctccctcactgtgtctcctaccgatgtggtcaacatgcgctcgc

SEQ ID NO: 103248 - DNA, 420 bp, Zea Mays
gttcaggggctaacacgcaaatgtactcagactcagggaacagtaatggtgcacggcaggttgatttatccaaaccccagggtctcttttgaaagacacgctggccgaaggggtacgaggccatctgagcgtccgatcttggcccatcggtccagattagaacccaggtgttacgtaaacccgtaatccaccctatctaaccacaatcacccgaccctgttccgaccgcccgtgttttatgaagtgaaaggagtatacttgatctaatctcgcccatccgtatctcatctagcggccagaattaactccgagcgaagggatatctcacatttaatccgcgtcgtccacacacagatccactgtcatggcacagtcttcctccccaacaccgaaccaaggtggtgtcggtcactcaccacg

SEQ ID NO: 103249 - DNA, 407 bp, Zea Mays
ggctagcaaatcctattcttgtactaaaaagaataaagtggattggcgcatgtgcgtcgactatacagatctcaacaaacactgtccgaaaagatcccttcggacttcctagaatagatcaggtggtagattcgactatcgggtgttctatgttgtccttcctggactactactctggataccatcagatcagcctggcaaaagaagatgaggaaaaaactgcattcattaccccgttttgagctttctgctatacctccatgtcgtttggccttaagaacactggagcgacttacgagagagctattcaaacatgcttagccgatcactggggcaagcgggtagaagcttatgttgatgatgtggtgattaaaacagaaaacttagaaaacttcattgaagatttg

SEQ ID NO: 103250 - DNA, 340 bp, Zea Mays
tgagttttagcaagggtgtttgatactaaaaaatatgaagtggaagcgctccctttgctcaaaactccatttccctttcaatttgagactaagcacaacatatacttgaagaatggttagtctcaaatatttaatgtgtagagaatttgtccccctaaacttgtgcatacaagtgatgaatacttgtagatcaatgcactttaggatttgtgaggtctaaggatgcaagttctacacattgaactttggtataagcaaaaatatgaattaagaggaggtaccaactgaaagagatatataagatcaaaagatatgtcaattaagatttattatagttcta

SEQ ID NO: 103251 - DNA, 438 bp, Zea Mays
ttgggagaaaagaaccgaaaaccggttgaaccagtttgtaaaccgattgaaccggtttccatcaggaagatctcggttcactgatctactcagccggagactcgaccggattcaaaaccggttgagccgggaaaaaatccggttgaaccggtttccaaaaaatatctgcatacgacttttctgacagctctgactgtcagactgggaagagaaacagtctagaaaccggttgaaccggtttcaggtccggttgaaccgatttttgaaactgaagagcaagttttgtcaaatctgaagtgaaccaaggtggaacttttgtggggagtaagagtggtttttcaaaaggcattcatgatctagaaaagtgttctctaagatgattttgaaggaatttgaattgagctcattgcataacttacttaacttattgcagatccc

SEQ ID NO: 103252 - DNA, 462 bp, Zea Mays
aggggcgaagggcatacccatagtggaagcttgacgacgaaggttgtcgtcagtctcccgctgacgccttgccagctcatgtacatcagcagaaatattccggcacatagagaaaaatgccgcaatcctgtgggccaagcgggcacccatcccttggccatgacctcgaccacgaccacgaccacatggcgtgagagatccgcggccaggggagggacgcgaggcaccggcagcagcagcaggaccagcagacggaccagcagaggtatgagcacgggagctggaaggggctttccttaagcgccctactggattgttgggatcaatccagaaaggggtataggattgatgtcttgtacctttatcatatcgaaattgtgtcacaacttcaatcatcttcatgataaaaggtgcatgaagacatcccttcagtggaaagcaggcagcatggatgatttcctg

SEQ ID NO: 103253 - DNA, 878 bp, Zea Mays
aagctgttaggttggccgcatgacgtaacccttagccttgatcaaaaagtttttgagtcaaaactattttcttaaaaaaaatcttgctcttatccctccatttcaaaaatgttttccccctttccttattttagaagtcagatggaggtccgttgccaaaccagcttttgctagaacgaagatggtttccccaagttgctgagagcatgcacagttcgcctcggaattaggagccagccagagtatgatggtcgtgaattcatcgagcatggcacagagaagtgtgtcgtgaccgtatacattggatccagtgtgcaccatgtggaatggagtgtcactgctgcggggtacagattcaaagacacctgccaagttgtcgctcgcaaggcattgagagccctatgtcaaatttatgaagaagtggtcgacacctcgctcagattctttctgccctttcaaagagaccgtccagtctggatggccaggatgcgtgcattggaagagcagcagctgcttgaggacaaccccatagtcgtgtacctcactgcataccttctcaccctggatgcctagtgtgatttcttagctcggcaccaccgtcagatgattgcttgagcagaagatgcagagaagcgcaaccgtaagctccatgtggatctcaccacagctcaagcccgtatagctgccttggaaagtcatgaagccattgatgttgaagccctgaagcaagccaaggatgagcatgtccagaagttgatggaggcctacttggtcacccataaccaacgtagagccctacggatccaagagcccgcttcatccaacccagttcaacccatgagagctgaacatccccagattctggaaggtcacccggt

SEQ ID NO: 103254 - DNA, 505 bp, Zea Mays
gcggcttatagattttgttgactggagccaaagatatggggtgatcaaatcgggtttgtctcactgcgtgaatccgagctaaaacccttgacttgacgtgtctagggcacaaatctcgatgccatcttcacacacgttgcagaggggttaatttagcacaactttgtcaatgggggcttcaggttttaagttagggattaaggtgaacacgctcgagttctaggtgagggctgaaattcagaaatctgaattttcagatttccatagagagcttccacttgcatggccttttgggggattttaaacaattattttggccaaacttttctagtagttattgtagcttaattagtgtatttcaacttttataattggcctaagccatgatttcaagtttttcatggtctttttaccaatttcccccttttcacttaaatgacctagttaaggttattctagggttttggacattttccccactttgagtgcatgatatgattaaggc

SEQ ID NO: 103255 - DNA, 1898 bp, Zea Mays
ctctcacagcgtacatacaggaattccggagaatatgctttgtcacatagacaacattttggttttattgacgaacctataccatccttgcttttaaggattacatcattcgccctgaactcgcttccatcatccttgtcgttcttatttttcttccatatgagaccgaaatatgtgatcgcttgaacttttttagccttcgttggtttttcggactttgactttttagcttttgtcttttggacactagtgatgttctgagttaccactttggcgggtggctgggctttcacatttagaactggctgggttgtagcttccacatttccaactcgttgtgccttaacctttgtgactggctcggcttccactttgggggcaggctcagcagaatgggaagaactaaccttagagacatttctgggagcggtcactggctgttggccattattcttctgtagatgctggatataacttgcatttgtattgtaactagtgagcataagatttcgcttctggagacataacttgcatatcaaactggaagtagtactgcctcctttgctaacaacagatcttgatgtacactctttatgacaattacctgaaagttagttttagatagcaacattgtgactaaagtattcaaaatattagagattgatcaaatatcttcttggatattgcaagggaaacgaatggaaaaagatgatctaaagagcaagacatatatccataccttgacaagagctgcatttaacaatatccctgcatgtgatcaaacaaaattcaaaaagtcagtatcttaaaaagaataaacgtataattattaatcagtatatgaggcgaggcagaaaaacctgtagagaacacccttcttgcatgacgcgcagggatagacttctcccttgtgaaagagatatgaaaaaacatctctgtcaggtgctttcactcgccttgggtataaattggtaaaacattccggaattcctggagtaggcaaggagctagcctcagcatgctgctcaaattctcgtaacatgtacaatggcacgtggttttcagaaaaccacatttttctaatttcatcctgatcactttctgcttccaagatattttttgtcagacggacaggaagatgcttttggttgggaaacttcagtgcgtatcttatcttattgtcgattatttttttatcacagagtacagcatttctgagtgcagaaaagtcagcgtcagaactttttccatctgaaggaatttgatctggagagataaactccttccatctgatgtgagcatcaagatatctaacctgagaaaaatggttattaggtttgtgctaaggtattttctttgcaacatcaggacaaaaatgcaaacctgcagagcaagttgagacgaagtctggcttagtccaacacatgctctccagaaaagttgccgagatcgtcttggaaaattagaaccttcatgataagataaacctgctaaccttttcttaccacctaagtaggtgacaaaatcacgggaacttgttcatgttctgaatactgattactgatagaggatcagataagactactaatagttaaaacacataataccttggcgagcagcttttcttatggttgaatgtagaagagcccccctctgcaaagtacgttttattatatttcctccggtccaccaagtccagctgttgtcatcatcagtaacagtaccgggttcagacaccaacaaacgtcttctgccacgccttccgccagccccacgtttttggtgttgtgcaggacgagatgcccctgttgatggacaaggagattccgcaggccaatcgtctatcggcttgaaccagcttgcagaaaatgctactccacggatgttgctttccaact

SEQ ID NO: 103256 - DNA, 274 bp, Zea Mays
gaagaaggtcgcaattgctatgcagatgagcattatctgccgaccctattccacgttagtagtgaccgcacagtgccattttatattttaaaagaatctggttgtcaaatatgtcttctaggtactgatgtcaaggctctcatatgtattgaacagatgatggaccctgctggcattgcaaactggtcagtcacctacgttgactggtctgaaggaaagtggcatcccagatcttttcgtgctaaggatgtcacttatgaacgcctgaagaata

SEQ ID NO: 103257 - DNA, 394 bp, Zea Mays
atggaaaattagtaaggacttaaattatgaccaactaagttccccagtaccattttatttaactagagaaaggctaagtcttatttttcttgttctttttataattctttttcttttacttacgcttaaccatacacagatgacttcccacggatcctcagatgacggaaatacactgtcccacactgacgggcttggacgagagggctttccccacattttgtgggaggtacttcagggggccggatacacgacaccccctcagtacgcggtgcagcagttcgagaagcaccgagtgccccgctgtagggtgaggatgaccttggagcctcatcccctgcagccaggctggcgctcactggactctgagtcttttggataccgagctgaggac

SEQ ID NO: 103258 - DNA, 421 bp, Zea Mays
cctgcggatatgatccatcggccttagtcaaagcatatgttctgattgcagattcacgtggtctgtgataactctccttcgattaattcaccctgatggtgatttgcctcacgaagaggttcatcttaatgatgaagttcctagcaatgcgcgcaatatcattgtgctgggaatacggaacaatgaatcttttgtttttgggaaacggcgaagatcattattaaatgtgggagacaaatgtgtcgacatctatcttgcctctctagattgcaaacggatccaaaacaaagtcctaggcatgagtgctttaagctctcttatcgggtcattgataaatgcaatcgaggctgaaccaataatcgcaaaatgaaagtcacgagcttgaagttcgaacatttatgggcactattgaaataatgtg

SEQ ID NO: 103259 - DNA, 373 bp, Zea Mays
ctcgacaaaacattgactaggaacttgtggcacgatagacaaaggttagtcataaaaatgtctcaaagaccatggttttgtctctagtgtctgatatggtctctagcttatgggtgtgcctagcccatgcagtgaagtaccgtagtgcttcatatccctcacccagccaatgtcaatctatgaccaaccaaattcataggtctcccccccacatcgctttgccttctcgaggcacccataaccgacaacaacatggaagagggcatatggactatgaggacaacgtgatagccgctagaatagtgttagatcatggtggtagatccaccattgtgccactaacacgtggcgatgaggaactgctagaacttga

SEQ ID NO: 103260 - DNA, 669 bp, Zea Mays
tgttccacttccagaacatagacatgttggatccacaaatttcaatttgctaagcagcaggagccatacaattttcacactggtaataatgaagcctttcatgttacaatgagattcatgcacacaattcagcatcttattgaatatacgggactaaagtacctgcatggctgcatttcacattgtaaaatctctggcactactcagtttactgtttcatgtagacaatagagagcagcggcccctgcagtgaatctagtgaagaggaagcggttaccttctcacagctggtgggatcatcatcgtatttcctttgtttttgtttcttctgaagttctgatccattcctctgccttgccaatataaatgattcaagatataatacacatgcatttcattcacactaggctaatttctcgctatctgttcctgttctttatcattatagttggctgtagatatatgatacatctgtatttcatttacacttggcatcatatattgtttcgtctgcatttctattgtgttcacgtggtctataaatcggtttcttaattttcttgctcatttgcagaacctcatcgatctggcaggttcagagagttcaagggctgaaactacaggagtacgccggaaggaaggatcttatatcaataaaagcttgctaac

SEQ ID NO: 103261 - DNA, 3028 bp, Zea Mays
gagagccagaagaccaatgaacggcctgttcctctctagtctctcttccgtttccggtggtatcatcgtctcagagtttatcttctccatatcgcttgcctgttctcgttgcctcgtaagctcttgagttacaccatcgtttgcgttcacctctgggatgttaaaaatctggtttcttttactggcatggcggccgttcgtgtatacatgctcctctatctagccacgggatgcagtgatgatacacatctatacgctgcgttaagaacaagaacatgcagttgcatggccacctattattggtttcacttgtgctgctggtgtttgttcgtctggtttggcctttgggttcatgttttctctggaagagagctctcttcagtccactctgaaatggctgtagggtttcattagctgccgactcatccattcacctgccaagaaccatggacaggtctggtcttggtagccgagtgggtggcgcgggagctaaaatcaagctctacgctgtttgtggttggactgaagggtgctcccttttgtttgctcaaacgcttgtgcatgaaatcaaaccacctacctcagtaccaataacctcgagttttgttctgtaatatttggtgcacacttattacagctatgttgttaatttgtgagtttctcaacaatattctggcgcttgttattacctttgttcttctctgtttctcctttgctgtgtacgttctaccatctgatcagattttctccccactagatgaaagcaatccgcagtgcctcatgaactattcttagcgttgttgaaatcttaatatatctaaaaggtcctgcctcgtgaactattcttagttagggtatcgtttggccggggtcagatcgctgtatgacatgttcatttgctgctagttagttcttcctatgcagaaacaaagtttgattcgcacgctgcacttctcttcctttttttatggtaggaatataggatatttctctagcgaattagaactaatgaactactatgcttatagcttgctaaggccccgtttggtttcctttgcattcttctaatccagctatttttcaagaaccgtattttttgatagtcagaatctgaactgtttgcctactttagatttttttgataattaaatgtatatttatttagaacatccttgcccagtgctatttttgtctttttagtacatcatatcttcagtattatttataaatattaaggacgtcagggatactagatattaagataatacagtctaatgctagaattagtattgtttggagttttaacagattttagttcataaattatcaatatccatcgacaactaaccccatttggttgcggaaggatgttgataatctatatactaaatctactagagttttaaaatgtaccgattttcgcatttgattgtatgaagatttcagaattccagtatttcagacgttcttgctattaacagatgatactatggatgtggtatattaaaaagacacaagtgtctctaaaatatagaccacgaacaagtgttagccaagtgtattttaaataaatgtctacaaaatgtaagtagctaaacgatctagattctgattataagaaattaatacggattcttaaaatatctggatccttcaaaccaaataggaacatttggatcattttttgtgttatcgtaggcgcagcgtggtacttgctggcacagtgtactttctcgtttgtccagaacagtactgagatcttcgtcttgtccgcttctcaaatgacgagtgcatcgactacaccacatctctcagtcatggatttgtccgtaaaaacaggctcgaaccttttttttttgcaggtacttattaagtagtggccaagcatatatggttggtgcatggatgcagtatgcactggataaaggagtttaagatcgatcagtagaatgatattcatgttcaaggataacagcaacattgcatggcgtgatattgttactactccctgtgtttggacaatggtgtcgctaaaaatagttttatcaatccctgtgtttaatttttaagaggcatggggtcggagccacagcaagcggacgggcgacggaggagctccactgcatccaccacggggctctgctcttcagtgttttcctcactgatgcgttgatatgacataaaggacaccgaacaggtttgctttgcgtgcacacgtcgctcagcagaaatagtgtgtagccgctgcttttcttgtaccacttcgcaaacaagtcatgtcttgttggaggaccgccggactccagggtacatgcacagtacctgctccaggaccaggagagcgagtacagcttgctgtgaatgctgcttcgtagaacattgtcctactccttgattgatcacgagctcgtagtctcatgcttatacatgcatggtaattgggtagtttgcatcctttgctgtgatctctaattgcggctaatagttagttaattctatttaaaattacgtcactaactaccagctagctaatagttatattagccactagatctaactagaattagctggctaattcactagtacacagaagctatacagcgatgatttttcaatggtgtttcttagaaccgtccgtgctatggccaatattactactatctagctaactgttagttgcgaggtgtttagatcgcacaacaataggcaggcgaataaagtgttgttttactaaagctacctacctctactcctggttgttagaattactaaggattagggattgaaaacattattttgaattaataaggatttaaacctagccaatcctatcccgtcgacatggattggcactaaaactaatagaccctcaattagcgggagcgcattttcgtcaattgattaggtacagtagttaggtatatatatatccatctaatgagatactaattgtttcaattggtttagatctatgttaactacttattagcaggtaactagtagctaaatagactcaaacaagctcaaa

SEQ ID NO: 103262 - DNA, 672 bp, Zea Mays
cttacacatgcatcatgctaagaattatactaataaagttttcccccttagaaagatgccgccacgcacaaggctaacggcgcgcaagtcaactggaccaatgggtgtgccccggcatcaactggctcctcgacatgagaacagtagcagcgggagcaatgacccaataggagatcttgaagcccgagtgagtcgacttcaagcggagctacaacccaggaccaatgcttgggtcgcggacggagatagaatgaactaagaagggacatccgtcacctgcgggatcagcttgttgatcgggacttggcgctcgactgggcagtatagtcccgtttgctggcatgtgctaaggaagcaagggctcaggcccgaatcaaggaacttagctcaactgtcaacgacctgcaggtctattgcaatacgttgcatgaggaagtccatgtactgtattcgcaattacaccctagtgcacctgcacaccctgctgaggcggaagccggaccctcccacgttgcgggacgcgcgctgggtggggagttagacctttttgagccccctccttccatgaggttggttgacgtctggactcccacacctgacgatgaggccgccaagagtaatgggaagcaggactaatggtgtaatagaagtagaggtagtgtagtgtattgt

SEQ ID NO: 103263 - DNA, 469 bp, Zea Mays
aaaaaatttcaaatgtgcgcaatgatcgggcttccatctgtcagggtcttgggccgcttggtgataccaggcatcggactctgaaaattgggccacatatgccatacaagcctgcgtcgggtttagtggctctgtttgccaggactggaactggtgtgggtcttgctagggctcctcacattcgttctgctcaacctgtgtctcgttgctttcgcgccgccacatacgcagacattctgcttggctccatggaggggggaggacaacgtgcaggaggtgcttctggccgtgatggagctcagggcggtcgtgggggccgttcaaacagccagggagacctggtaggtcgcgggggttatcgccggccgtacctcgggcaaggtgggcacaggggtcgatctgtacgtggccgtcatgggagctatggcctgggtgctggcgtcgctggtgggcaccgaggcaactttgg

SEQ ID NO: 103264 - DNA, 320 bp, Zea Mays
cgtaaccatacgcatttagaatacaacaagcaaattatcgtggctacgaccttaaccaatttatcgaacaatttggctaaatagagcaacaacacggtccgctcgacagcatacacatcggcttgtctattactatcgcaatccgagacacaacatatatataacaaacacttaacgaaatcgactcctatttaacatgagttggctaatcacagtagaagacttagcgaaccatttagacattgcaactcaaaacatgggtgggagcaagttaattaatgtttcttaaccttttctcaacttaaactggacaacacaca

SEQ ID NO: 103265 - DNA, 574 bp, Zea Mays
aaccctagggggttaagtgcaaaattagtccacttttggactaaagtgcaaaaactatgaagttaaagcatcttgggtcatttcgttcacaaatatgtgggtttgcaacttgaaccctaggttttgggcctatttgcataaacaccacttttgtaaccatatggctaagtctgattttcagaaattaggttcaactttgggaccttgtaactttcaaacaaaagggattttgctctgggtcaccacatcaatattgtagatctatcatcggggaataactttgcttaagagagtaaatatggttgttatgcaaagttaagagaaaaataggcgccaagttgggctgtcagtcggtttgctgactgaaatatggtcaccagtggtattggtcgaacttgggatcagatttgagctaaatccagtaggaattcgactaggattgctataacaaagataaagaggatctataggactacaactttgctgcagagcctcggataggttgccatggaaatttgagagataattgtgcccaaacattgactgtcaggtgcactcatggcagctcgcgatg

SEQ ID NO: 103266 - DNA, 372 bp, Zea Mays
catgtttgaaacaaaaaatagtgtttctatgatattaaaggcattgtattcgcacgagagggtattagagtacaactatttgatgaagacgctagtgggctagctaatgatcttttgtgataacaggtttcctataatccccactattcaaggaatacttaaacggtgtttaggtccactcaagtaaaacgccacacatcaatttgccacatcgattctcaaaataaaataaagatgataaaaagttggaatataaagaattcaatacaatagatcaactttcaaacccgcaaatgatgtttccctgatgtcaagggcattatattcggatgagagggtattagagtacaactagtggatgaagacgtcttt

SEQ ID NO: 103267 - DNA, 540 bp, Zea Mays
cgggcacagactgctctccggtcttcgttagaagctaggagcacgttaatgggctggctggctgaccagggacctgggcctgtgactacgagtactgtagccgggtacccgccattcgggtacccgtatcctacccggatttgtcgagtatttgtcgggtagtagtcgtcccgtatcctacccgtatccggttactgtttgtccgggtactatccgtatccgacccgtttaaaaaaatacccgtatccggtacccgaaaaaacgggtatttctagtatccgtatccggtacccgccgggtaatcccgtcccgttttcacccctaaccaggggcacattctagttctctatccaccaaatatccgagcacaatgatcacacacacatataattcacaaatacattcagtatcttctaaacacgtcactatggcgaaacatctctatttggcaatgtctttcgcaggggcaattgaggaagaagggcaactcgaggcatcaggcgcagccttgacgtcggcaacaatgtcatcaggaacaac

SEQ ID NO: 103268 - DNA, 1174 bp, Zea Mays
aaatggcacaacactagggtaagtaaactatgaagaataccagtgctacaacatttgcccctaaaaagtgttagggaaaacaccaaacatccccggtttcgaagggaagtgatcaccacaagaaggaaattgtggtccgctagggaagtatgaaccaaagcctctgtcacgtggtcgttggccatatggcacacgaccagcatcccgtcgggcacaaccaccacgtggtctcactgcctgaggcctagcggcaagagccaaaacacctctaggcctcgcaggacgtctctaaacaggctgagcatgaacaccatgagaggggcggttcatgtccttcctactcgactcagaaaatcgccgctcatctctcttcctcctaaagcaaaaagaagctatatgcccatccctctcacaattctcaatggtacctcacctctctcttggttcgattttgtttgtgggagggggctttcttttttgatggctgagggggctttcttttgtgggaggggatcgctagagaagtggggaaaggtgtcaagtgtgttcctgagatggttaggttttggaagccacacttgtttctgaggaggagctctcacaggttcatcaatcacaccatctctcacaggggtgataggcttagcagggctggttttgataagcttgggagtgggtgaaggtttctctaaaggtgtcaaaccactgcactcaccaaccttcccaaagcgagcgacacttccatccttagcagcaaagcctaaacccggtctaccagttcccctcttgaactgactgaccatcatgcccaactggggctcactgcacgacacccaactcaagatagatcgaaggtctatgttttcttcctcgattcttgtcttgtcgtgtctgcaggactcaatggcagactgcaaaccctcacaaagtgcacactgcgcaggtgcagggacactcactgagctatccttctcaagcaaagctatcctaacgtctctctctgctagcttagactgtaagctaggacaaacagtacacgcacccaacaggatagatcaagatctcaactcatcgcgctcatctagcaaggtggagtacttggtctgcaaagtggtgatgttggacatgtgtagagtgcactcatcacattcaatcttgtcagacaccacaactg

SEQ ID NO: 103269 - DNA, 606 bp, Zea Mays
tggatatcccccagatccactcaggggcgaaaactctgctcaagaccacatatcagtcgccccgtagtgacgccacatcgtgggctgggtaaagagaatgatagaaatgggccgacccaggaatgcaatgggcccacgcccagattactcgtggcttgggcgtgatcccgttgaagcttttcgcttttcccgtgcccgacatcctcaaatgccggagatagctcggagcggaggcaccatgttttcctcgggatagcgaagtttgttcgctattatctaggagataagctggaagagtgtgatcagcgtgtacgagggaagtaccctacggtcgtgtatataaggccagggaggatccccatcactttcatctcattagcacctcaccacttggtagacaccacttgtaaacacctcccacatacaaagtcatcccaggaagtagggtattacgctcctcaaccgacccgaacctactgaaactcgctcgactctctctttctcgtgcccccgacacgaaccatcgagttacaatccacgacactgtcctacccaaaagcaccacgagggtaccctcgggtgtgtggccggacactaaacaccgac

SEQ ID NO: 103270 - DNA, 665 bp, Zea Mays
ggatgccttaagtcaaaaagcccagtgcaactgtataaccatggactctaagatcgccactctgtgtgacgagttgcgcaagctgaacatggaagttgtttccctaggtaccttggactatatcttagtggagccaaccttacaagaatagatagtcatggcacagattggtgacaagggtgttcaagtcattaaggaaatgctcaatcgaaaagtggataattataaatgctttcgtcaggacagcaagggtgttctatggtttgaggacagactggttgttcccaaaaatccagaactcaggaagaaaatcttggacgaagctcatctttccaagttttccatgcaccccggaagtaacaagatgtatcatgaccttagatccttgtattggtggaccaggatgaagagggaaatatctaagtatgtatctgagtgcgacactttccaaagaatcaaagctagtcatttgaaggtagcaggtaccttacaacctctccccataccatcttggaaatgggaggacctcagcatggatttcattgtgggattgcccaacacctcccggcaccatgattctatttgggtcattgtggataggctaaccaagacagctcatttcttgccagtgcataccacccacagggcagaaaagtacgcagaaa

SEQ ID NO: 103271 - DNA, 405 bp, Zea Mays
caatgagccagtaacagatttcactgccagtggaggttctgctctccttcaggatctccgtttccagaatcctgcattgcgcattcgcgatgccaggattgatgggaaccgcttttggatgcttcatcatgtggatttttataattccgtgatcctccccaagaaacatcaacctattctgcttcaacgctatatcaactgggaaggttgtgaggccattggggacccagagatgacacaggcattgagggcctgtgaaaggaaaaagatgaagagtatcatgacattccaatatgattggaatgatgaagtcattgcccaattctactcaactttgtggatcaagccagctgacgaggagagtccatacaactatccttatctgaacttctacattgaaggcag

SEQ ID NO: 103272 - DNA, 323 bp, Zea Mays
tttgacctttgtatggtgctagataaccctttcgatttggataacctcagtcaacaagatagtactttccttgaggaggatgtggaaactcatccttgtacttgttcaacaaagtgtctctccatatgcgtgtgtcatgagctgacccaggccatcccgccaccacaaatgtgaacctcatactgaaatcacaaatagccataacattctgactacaatatccatgtcgattcatatgcactgcctgctctgatgatggaacagtgactccgatatgggtaccatcaatggcgcctatacaatttctgaaatgaggccaagat

SEQ ID NO: 103273 - DNA, 407 bp, Zea Mays
ctgatgcatacttgatctagatactccgttgttcgcagaaatcaaagaattcagagctagtgaagttgaatcccaggtcagttatgatgctattcggtatcccaaaccttaatattatgtcttgtatgaattccactaccttggctgaagttagagaagcaatgggtttgtactctatccatttggtgaatttatcgatggcgaccagtacatgagtatcgcctccctgagctttcttgaagggtccaatcatgtccaatccccagcacgcaaatggccatgttatatgtatggtctgcagctgttgtgctggtaaatgttgttgctttgacaagaattggcaagcttcacatctctggactaactcggctgcgtcactctttgctgttggccaatagaaaccagac

SEQ ID NO: 103274 - DNA, 779 bp, Zea Mays
gttcctagtcgttcgtccgcgaggtccatgagacccagaggcctcaccacctggcatgacattgccagatccgcgcccgtgcttggatctggaccgaggaggagtgtcttcacgaatttctagggcatcgtcatctgagtcagattcaacaacagatggatttctacgacgaaccatccttaagatcaaaccaaaaatacatatggtgagagagatgtttgatgttcaaggagtttaacgaacacgtttgaggaaagacaggtataatattgggcatgcacttcaaccgttcatatgagcggtttagctacaatgaacaatatcaacctacttaactcaaaaacaatgtttgagacaatgataacagtttaagtgtgccatacacctaaactacacaatctccttgaagagatacttaagataatcaagaactgtatggatcgagttaaaaaatagggaagatgaaataatacctcgatctgtgaaaccgaccacgaaaatcccaaagaagagtggagagatggtggaggagctcgaagggatcgaatctccaacaatctccacgaagttttgatagtttttggagggatttgtgtgtaggatgtgagagagggagagagagaaacgagggtgtcggtggcaggaagaaatgagagagtgaagatagaaagtagagaggagaggagagaaaaggggcagcggcggctggtcaaactgaccaaaaccggttcaaccggtccagaaacgaggtttgactgcgtagaaaaactgacacactg

SEQ ID NO: 103275 - DNA, 356 bp, Zea Mays
catcttgttactgtcggggtgcacggaaaatttggaaaggtgagcctcatccattattttctttctgagctcgaggttcttcggaacaaccaatcgatctccaaaccatagaatccctttactatcctgacggaaacattcgtatttatccaccttctgttcgatcatttccttaatgacttgaaaacccttgtcaccaatctgtgccatgactatctgctcatgtaaagtgggctccactgaaatataacttaaggcaccggaggaaacaacttctattttcagcttgcacaactcatcacacagggtggtgatttttgcatccatattcacacagttgcactgggccttccgac

SEQ ID NO: 103276 - DNA, 378 bp, Zea Mays
gccgatcgaagctagtacaggcccagttaaagagtaggaatcagaaaaggcagcagaacaaccaaagatactgagcccaccagctgtaacagggctgcctaagccatcgagcactacaacagtgactccaaggaaaagaagaatgactagcgttttagatgttgtattggaatctgtgaaagcgccagtttctgcttctgccagagcatctggtgagaaatctaaagatgcaagagaaaagattactgcaagcacgactactgctcttggcgaagccgaaccttcgaaagttgtgccaatagggctggtggaagagagtgttcctgaaaaatctaaatctcctgctcccgaagcacctccctatggtgacttggaata

SEQ ID NO: 103277 - DNA, 426 bp, Zea Mays
ctctagaaatgtacggttttgaagaactggtatggggtgatcactaggtgaaattttgaatttgttgggattgagagcagtgggcctaagcgattcgggtcagtggctatcgtacatgggtatttggggtgacctctacgaagttggctatggtaccagtagctagctttggagaggtgttatgttaaaattttcatgctaaaagagaggtatcatcaaaaataatattgttatcgtcaattttttcatgccacttgtcgtcgtggctggggctttaggttgtgtcgcatttcttccgctgcttcgtcgaatttattttgtagttcagataaccgaagcattttctcccttctcttcttggctttgagtggaggattttgtccagattggtattcggaggagcaagaatagcctttggcgtcgttg

SEQ ID NO: 103278 - DNA, 320 bp, Zea Mays
cgtggttgatcggtgcgtttattgagtgtttgtttctcttacagtccacaaaaccacataaaaattcaggttagaccttatcccagcacccttttgagcctcgcaatttctttcaataatctgcattgttaaatttgtgtgcttgcgtgtcatttgttgttggttgcattgtgttttttcaccatccttctttcttccaccattcaaaccctagcgtgccgccacgatctcctgtttgatcacgccacaaaccgagtcaacgccacttccttgtttttctccttcggttacgtaaaaaaaacagaaacaaaaaagaaaag

SEQ ID NO: 103279 - DNA, 1005 bp, Zea Mays
cttttttggactaggagcactggggaggcgaaaggactagagctatgaacaattaatccagcctgcaacagctctttgacttgtttctctatttcatccttgtggagtggggaataccgatagggtctggaattcacaggagcggcattgggtaataaagggatgtggtggtcatgtattctagacggtggtaggactttgggatcttcaaagacatcctgaaactcgagcagaacttgctgtacagctgctggaatagagggatcgtgtgtatttggcaacacctccaccactgccatagccccaatgtcatttccagctgctcatttcagtatttttttagaagtggcaccttccaataccgaaggaggaggaagcagaccttgtaaatgcacttgcttacccttataagaaaaatccagggttcgctgctcccagtgacaagtcatggggcttaggggagcaagccaatcgtacccaagaattgcatcaaaagagcccagatcaaggaccatcatgtcagtgtgaaaagtatgtccctggatccaccattccagctgagacactgagtggtcagtaattagagtctcaccatttgctaccttcacttgcattgacgacattggaatagcagacagaccacatgtgtggaggaatgtagaattaacaaaactgtgggagctgtcactgtccaccaaaatcagcataaccttgttttggactaatgctctgagcttaagggtccgaccgtgatctgtgcccgccaatgcattaagagacaagtgacagaactccgaagataatgcatcctccatatccaactgatagagaatgtcatcagtaagaggaacatcgaggtcgttcaccataatggcattgagttgtggtttgggtctctttgtgcatttagctaggtgggaaggatcaaagggttcagcacaataaaagcagagattatgagcgcggcagtagtctcttttctttctctccttacttaatgaggtg

SEQ ID NO: 103280 - DNA, 575 bp, Zea Mays
caaaagtcagataaaaacttttttactgaaccttgtcgatcagaattttagaaaccatcacttaaatttggatgagatccggacctctagagacctagttcaaggtattaggtcggttgttctatagttgtggaaggtgtaagcttacaataaggaactaggctatgtggctacctagctacagaccacccctaagaacgtggacctatcccctcgacccagtccctagcagtttgatccctgttcagcatcaaggggtcccaaactaagcgacaaactagttacataactcggatttcatgataacaatagaagtgagcacgtgaatggggtagagggaatgatatgtataaataggaaaatgaatcgatacataaggattgaacactagagaccgggtttatgagagcaggcctcaccaagctggaccaggtttatgaggacagacctcatcgggctggaccacagataaatgttatcctattacaaaggaggagttctttctcatgctacattacatgtagaacgtacaaggttgacctaaccgctcgagcgacgttgagcgttagactcca

SEQ ID NO: 103281 - DNA, 1167 bp, Zea Mays
gacactagagggtctcttccacttcaccacagcagcaacattcttgggatcaaccgcaatgccctgctgattaatcacatgacctaggaaagccacttcagacagccaaaaagcacacttcttcaatttgaaataaaactgattcttcctaagagcacccagaatgagacgaagatgccgctcatgttcttcctctgtttttgaataaatcagaatatcatccagaaacacgaccacaaagtcgtccaagaactcatgtaacatcctattcattgcttccataaaagcagcaggggcattagttaagccaaaatacatgactatgaactcaaaatgaccataccttgtgcaaaaagttgtcttctcaatatcctcctcacggatcctcaactgatgataacaagagttcaaatcaattttagagaacacctgggcacccctcaactgctcaaagagaacctcaatacgatgtagtggatatttattcttgattgtcacttgattcaaagcatgataatccacacataacctcttgcttttatccttcttctcaacaaacaacactggggaagcccatgttgacctgctaggcctaatgaaacccttagccaacagatcatccaattgccgcttcaattccacctgctcctttggagccatccgatacggggccttatgaataggctgcgtactcggaatcagtttgatttcaaaatccgcatcacgctccggtggaacgcctggaagctctgctggaaacacgtcggcatagtcacacaccacacggatgtcttgcacccgcaaggcaacctcactctccaccaccatggagaaaaagaccccgacttccttgactgacgatccgtaagcaattgggacaacaaggataacgtgaactttggagaacttcccaagaataccacctccctacccaatggcgcctgcaataacactgtcttccaaaaacaggatataactacacgatactgagttaaccaatccatacccaagataacatcaaatgccccaaggaaatcaccacaagattagctgaaaagacctcatcagcaagaatgatagaacaaccctgacatactgaacagctactaatggagccattagcagaactaaccacaattgggtgacccatcctctgcaccgaaagac

SEQ ID NO: 103282 - DNA, 467 bp, Zea Mays
aaacgaacaagagcgagatgggtaagacaacactctcggattgaaatggaataagtgaggctaaaaaaataggtaaacatcgtggtaaatatggagagaggtcaagggtcaaaggtgataataggccaggatataaaggaagaggtaaatgtgcataaaaaaccaggaatctaggtacaaccaaggatgaggttacaaactcgtgagccaaagaagaggatacgaccaagagaaataaggtatgagacggaagaggggcaattttaaagggcaggtatgagacaaacatcaatgtaggatatagaggtgtcaagggtgcatatgataataattaaaagcataacaaaaggatatagttaaggcaagacttgcaaaacgacaaagtggggaaaacaatcaagggtaagataggtaaggttccaacagaagggttgaagtaaagattcattaccaagtggagtgacaag

SEQ ID NO: 103283 - DNA, 604 bp, Zea Mays
caacttttatatatggcttttctacaaaaaacataatttagtctatcaaacatacagcatgacgagaacagcacgtgcagcccaaaaacaacaactaataaaattcagctcttaattacttcaagaattgacgcgttctagagacttgaaacattctaacactttgacatttgttagagttaaaataaccaagtgagaaccaacaagtcaacttaccaatttttatctgagttattttgtacgctagaatcaccacacacaattaacaaacacatccaccacaataatcggacctggtacatatatgtttatcgatgcgctcttcacacaataatttgctttttaaattagacatcacatgagcaccactaattttacccgcgaccataaccatacacatttagaccacaacaagcaattcatcgtgattacgagcttaaccgaaccatctaactagagcaacgacatagcccgctaaataacatacacgtcggtttgcctgtcactacatacattacaacctctttataaacacacatattcataagtattttcgcacactgaccaaatcatacgaatcgtaaaccactaatctccaaatcgc

SEQ ID NO: 103284 - DNA, 561 bp, Zea Mays
gacgacgccgcggctgtgagggtcccacatcctattataaagtgccccagcaaagcgcttcagcatgtcatcttcaatctggaacacgccacgatcgaagtcctcgttggctcggtcgaaggcctcgaaatgcctgcatcccttgcaagacaaggcattcgcagccccttcgcaagtcacgagagatgcataggacatgatacccatcacaatagacaggagcgactttagctcatcttgcagccaccctagaaagcgggtccccacctcctcccccaatttgtcgaagggggcggtttgcgtgccaaggtcacggtacgcatccacgaaaagcgtgtgcgcccggtcaaccctagcacgggtggaagattctgtcctctcgcggtggccacgcatattcttcagctccagctccaagtcagcaacacgcttgcgggcagcctaagcctccgtgcgggtgttctccgcatcctctttttcatcattaagtcggcggccgaggtcctccttttcctcctcctgcgctgtcactttctcgagaaggttctggctcttattttt

SEQ ID NO: 103285 - DNA, 856 bp, Zea Mays
cgcggtgttcgccaagctccgccagacagcgtcgtcggaatggaacatcagcggcgacccctgcaccggcatcgccacggacggcaccgtcatcgaagacaacggcaacttcaacccgggcatcaagtgcgagtgctccgaccagaacaacatcaccgtctgccacgtcaccaagctgtaagtgcttgtgctcctctctagacgcgcgccaggtgctcgatgaaatgctcgccttagccttggccgctcgcgttgggcctgtcgcatgccgtgaatgcgcatatctttccaccttttgcgaatgaacactggtctctgcaaaagccaaatacttgttggaggtttcgattcgtgcgtgttgttgggtttctatctgacgaacagcggtcatggctgaggctgacttgagatggcatgagctgatgcctgatgggtacttttgtgttgccaatgtaggaagatatacgcgctcaatgccgttggccccataccacaggaactgcagaatcttacgcgcttgatcaatctgtatgtgctcttagcctcttaactttcttgcatgaaattgtctgggaaccaaaacatctatctctatctcaagcgccctattgttaaaactgttcactcgtggttgattggaatgtatataacctgcctgatgcgtgtcgcataattttatgctcccattttctcgttgtccattatggatttcgcagattgtagatctcatactaccaccttagtatttctctagcatgacatttctgatagagattagtacagacttcctttgacgattgccgttaactgtcattgtgtctgatattcctcataagctttggcagtaacttaagat

SEQ ID NO: 103286 - DNA, 727 bp, Zea Mays
gttacatgccaattcactatccttaggacctagatcctttgtgagactattagctaactgattacgagacttgacatatttcaacttcaaagccccgttgtcaatcttctccttgatgaagaatctatcaatctccacatgtttcatacggtcaaactggactgaattatttgctatattgagtgcagcaacattatcacaatgaagtaacattgtctcatctttcaacacccgaagctctttcagaagacctttcaaccacatcatctcacatagagctaaagccattgctctatgttcggcctcagcagtagaccgagaaaccacaacttgtttcttgcttctccacgaaacaaggttacctcccacaaacacacaatatccagatgtggatctccgatcgtctctactacttgcccaatcagcgtcacaatagccctccagattcagatgttgatttgatctaaaccacaaccctttgctaggggttcccttcaggtacctcatgatttgattgaccaactccatatgtcttgttctaggatcatgcatatacctactcaccacactcactacataagcaatatccggtcttgtatgacaaagatatatcaaccgacccactatcctctgatatctttctcgattcaccgggtcacctgactcggcacaagtttggtgattcttatcaatgggtgagccacttggacgacacccaagcattcct

SEQ ID NO: 103287 - DNA, 440 bp, Zea Mays
ggccactgaagattggacatatggttgtagtttaaggtaaaccatgtccccaacttggaactctcggtctgtcctcttcttatttgcttggaatttcatcctgtgttgtgctcgttgaaggtggtcttgaactagcttaaccatgagttctcgctggtcaagccaagcctaaaggtctaaggaaggaaatgcatcggttagcgttaaccccagatgtcttggagctcgaccatatagtacttaaaatggggattgccccaatgatgaatgaaaactggtattataccaatattctgccagagacaaccaatgagaccattttgtaggacaagcgtgcacaaaactgcgtagaaaggtttccaagcattgattgacacgctcggtttggccgttcgtttgaggatgataggaggtgctcatgcgaagtgttgttccggtca

SEQ ID NO: 103288 - DNA, 1123 bp, Zea Mays
gccatcaacactagttgcaggagggatgcatgccggcccatgccaggggcaggcggcgtatcctttggattaaatttgcgtggcacgccagttagcaacgtgcaagagatactgttacccaaggcaagaccattgactcaatgtgccgcttgagcaccctttattatgacctttactgttcctcatgcgttaccgaggtatgaagggacatgtggaggagacaatacgacaccgtccatacacccctacgcatgacatcgtattagtctacaccgcaacctacaccaaggactacgcctacgttctgattagatgaggcaggaggataggatgctaggagccaacacgacgaccaagggaagatatgcgcccaaaagatatagcgctgccagctcttacccgacgcctcacgctttgtgtaaaagtaactcctcggcccatctgttggggcctagctcccttgtaatgtgccccccttggactattaaagggagggcactagcgatgaaaagggagaggtcgactcacgtccaaattcactatactcggtctctcaagcaatacaactcatagtggatgtagggtattacgctccgacggtctgaaccactctaaactcttatgttcttcagttcatctactcggtcaggcaaaactctaggccccttatcataggacaagggcaggtgcttccgccacccgggcggaggatttcccctttgatatttagtgtgccaggtagggggtcagggttccaagcttggtcccttaattggtatgacatcccactcatccacagatgacctgaaccgtggcgtatccgccgacatttgccgcatgacggagaagcaacgtctcaagaggttcacaatcaacctcagacggtgtctcaataggcacacaaccgccatcaagcggaaggcgatgggagcctcacccacaacaaagaagtctaccgctgccaccttcccaccaatctccataatgcctgaggtcacctctgtctacccccagcctgagttaacaaggcttgaggctcacactatcggccaatagccaagcaaaggcgtgaatggctccatcggtcagccactgtattccatggttagaggagttgtctccc

SEQ ID NO: 103289 - DNA, 580 bp, Zea Mays
gctcatactgtcatgctattttttggtatgctgaaagagtacgaaatcggcatggtgctacatctattacatataacaattgctgcaaaggtggcaagatcagcatacctccatataggcctagacccgaacctctattttctcttgcaagatttgacggtgatgcaacctcaaagagattcatcagaagcataaggcaatacaattgcttatttgctttcacatcaatgggtgcacaaatagataattcagtcaatgatggtcgtggtccaccactatttaaaatatgtggacaagtgcatcatcggattggatctctattacctccagatggatcatcaccaaagttcattcagttgtacatttacgacactgccaatgaagttcaaaacagaatgaaatgcctaggagatgagatcaataaccaagataatttggatactgatatagtcaatggattaattgagatgctagacaatcataatccattcgtaaaaaaattccgcatggcaagagaccgtctatctgataatgaaagtgaagatttcattattagactcattggtgctaaagaaggtga

SEQ ID NO: 103290 - DNA, 620 bp, Zea Mays
cttttcactcttgtcaaatactttattcttgagtgcttctagtatcattctattggctctttctacttggccattggctcttgggtgtgctactgatgcatacttaatctagatgctccgttgctcgtagaaatcgaagaattcagagttggtgaaattggatcctaggtcggtgatgatgctgtttggtattccaaacctgaatattatgtcttgtatgaaatccactgctttggctgaggtcaaagaagcaattggcttgtactctatccattttgtgaatttgtcaatggcaaccagtacatgagtatagcctccctgagctttcttgaaaggtccgatcatgtccagcccccagcatgcgaacgaccatgttacaggaatggtctgcagctgctgtgcgggtaaatgttgttgctttgataagaattggcaagcttcacacctctggactaactcggcagcattgttcttcgctgttggccaatagaaaccagatctaaaagccttcccgaccagagtcctggatgatgcatgtactctgcactgcccggcatggatttcatcaacagttgcttcccaatggctgagtgaatgcacttcatgaggattcctgccac

SEQ ID NO: 103291 - DNA, 428 bp, Zea Mays
aagaggcaccggtgcttttgtgcagattcgaaaaaaaatattcccaccgagtttcttcaatcctatgcagcatctctttatacatcttccatatgaggctaaggtcagtggtcctattcagtacaggtggatgtttcatatagaaagagcatcaaagaagcttagagcaatggtgggcaataaggcaagagttgaaggatgtattgcggcacaatttaaactgaacaaggtagcacacttcacaaggagggccacaaaggaccagaccctaacaaccctgaccagctctacagccagatggccacagatcggctggtgagttttggcccaaaattacaaacattcaaattatagaaatttctatatttgtaagtttgtgaatgatgtataggcggcatgtggggagtagatgtgtcagcaccataggc

SEQ ID NO: 103292 - DNA, 383 bp, Zea Mays
aatatctcctcaagcttacacagtaacacgggtgccaatctttcaaagtctgcaaccatggtccgagataactcttttgcacaaagctggcggaagaaatagctcaactctgaaagcgttagccagacatgctcagggacatagcctcgaaccatcgcaggaagaatctgttcaatccatatgtggaagtcatgactcttcatccctaagactcacagagtagataagttcaccccctactcaggttagctgcatacccatcaaggaacatcaacaacttgatccactgaagtacttccttcctctgggccctgcttaggacaaaatcggccttaggccttctccatgtctttccaccacttggcggctttatctcttggttt

SEQ ID NO: 103293 - DNA, 460 bp, Zea Mays
cgacgtggcacgggtgccgttccacgtagggaggcgctattcgctctacatcgcacccatcatcccatggtacgtagttaaggtactcgtaccaccaactctctgactctgacgatcaatcgattttcttaggccgaggaggtctcaattggtagctgcaggtggagtgctggcgatactgatgcgaacggaacttgtgagtcagattggtgcgtatggggtgagcgattggctgcttgcttgctcgtttctaaattgatggagcggggaactgaggtgtccgtgtttatggcgtcgacgacgggcatgaggatgcatatcatgtatttgtggagttgtggcagccttcgttgagtcttgaagaactacttatgcggtcgtgatccgaagaaggttctcaaagcatggacatctcttagctttgttggatgattctaatttacatatgtttccatttcaa

SEQ ID NO: 103294 - DNA, 570 bp, Zea Mays
ttggaactgacaaaacttttattgaaaaaggaaatcccttcggctaccgatggaagagtcgggggtcagaaaaagcgacgtatgatgaacatactgcagacgattgagcaaaccctgcttccagcctcggcggacaagactgtcaaatctacagatgtcgaagctgctgttgccactgaaggtgaaggtctaacaaccagcatgtccgaaattgacaaaattatatcagacatggttgtggagaaggatgtggccaaagaagtttcaaataaagggaaaaggctgaggaaatctcttcggaagaagctgacttcgacctatggcacctgggtgtccaatagctttccgaagaggatatggcagagttgaaggaatttgctatctcgtgcggctaccagtctggatcggtactctttggcggggttgatgaagaaatcctaggttgcatccacgatcgtgctagtgcaaaaattataggtaccctgtcgaagagtgtcggcttcccgaggcttgagaaggatatcagctgctacaggcggcaacacatcataggcagcttgttttattcca

SEQ ID NO: 103295 - DNA, 659 bp, Zea Mays
atgagagctacatgattgacccttcgatagtgttcttttttttgcccttttgtgtcgaactcatagctagatcctccggtgatcatacgaatgaccccttgaaagggttgatcggcgaagtcctcttgtttcggtgctggtggtggaggcgattgattttggtgatgtggtggtggtggaggcggtagagctaggatcacttggtgttgctggtatatgttgtggttttgctggtggggatggtaatgctcattgcggaattggtgctggtagtattgttggggatggtaggtgtgggcgacaactctttggttgtcagcaggttggtttctggccattctatcctttgtggctttggttttagggcagtccccggtgggatgtgccgagtctttgccatggaaaaggcaatagaaccttcactgttgtgggcctctgcccctgcctctggtgtttccaccgtggccctgcttcggagggtattcgtgacgacgagcggtgtccctagtctgctaccgattggcaatgttgtgcacctgggactggttatgattttgctggcttgggtccgattgcgaaggctgacccatgtcctgctggactgcggagtgtccttgggctttcactgtgactcgatttttctttggtggagctctttg

SEQ ID NO: 103296 - DNA, 412 bp, Zea Mays
caattgcaaaactcaaaatttgatttaatgcataaggcaaatgcacgctggctccgtgtggttacgaccagtagcataggccaaaagaaaaattaggtataactggaaaaaaggaaaaagactagaaataagaaccaaacccacaacctacgaattagaacacaacagcctatccattgcaccacatcttcattagtgattataatggaagatataaaagtttaggtatggaggatgccacactaagccataatggctcctccgccactggttatggccacacttcctcaaaatctcaagcacacatatgccgaagttcaaaacacctagggatccccgagctagaactttcacaaaactagagaatggaacactctaagagatcaactaagtgataaagtctaaggaataa

SEQ ID NO: 103297 - DNA, 685 bp, Zea Mays
ttggagctttctgctatacctccatgtcgtttggcctcaagaacgctggagcgacttactagagagctattcaaacatgcttagccaatcactggagcaagcgggtagaagcttatgtcgatgatgtggtgattaaaacaaaaaactcagaaaacttcatcgaggatctgcagctggtcttcaacagcctgaggtggtaccggtggaagctcaatccggaaaaatgtgtatttggagtgccagctgggaagttgctcggattcattgtcagccaccgaggaattgaagctaacccagaaaaaaatcgaggctatcatgaggatggaagcaccacgatcacaaaagaaagtgcaaaggcttactgggtgcatgacagctttaagcaggttcatatcaaggttaggagaaaaaggcctaccattctataaattgctcaagaaagtagacaagttccagtggacctcaaaagctcaggaagcccttgatgcactgaagaagttcttgaccacaccgccagtgctaaagccgccacgccgagccatgctaaaccagccggcagaagatctgttgttgtatatctcctgcacgactcacgtggtgagcgccgcgtcaatagtcgagcgggcagaggaaggacatgcatatccagtacaacatcccgtctatttcatcagtgaagttctgg

SEQ ID NO: 103298 - DNA, 390 bp, Zea Mays
ttggcatcttccttctgtttttcttggaaaaactgcagtgcttgtgtcatatcatttcctgttacttccttgtttaatttagttctgtagttacttacatctttttttgtacgacaatgttgtcatacctcctctcagataaaacaatatagcaatcatctttcgagtaggtatgttgttgtggttcaatgttcgtataactcctttttccatttcagtcatgtatttatgtctgctaaacatgttgttgttgtcagctggtctgagatcatgattgtgttccaagtctacctatcgatcacccacttctgttgatgttcttttataaccatgactactttgcagtctgttttaacctggacatttgtattcctttttggccctttctcg

SEQ ID NO: 103299 - DNA, 300 bp, Zea Mays
gagtctttgtgaaggctatgtagtgtatccctggccattcaccttggtagtgaaaatcaggtctgataggaatgggggtgcctgatcttccgtcaggtgaaggtaactatcgatttggtggagatgtcacacagacgatccggcttccaatcaacacgactagaaccccgcaatcgtagcaccacttctcctctggttatcaaccgtgcactgcgtgattgacctcgccacgagggctaattcctgcctgagaatcgaagacataagcaagaacaagagaaaacacaatctagaatattg

SEQ ID NO: 103300 - DNA, 339 bp, Zea Mays
ccggttacgtcactacagatgtagaagtagtttctagacactgttttgtaatggactgcttcaaagttttttgttttatggatccataatctcagttgtcccatatgccaaatccaattatgctaatcatttagctgaagccagcagtactcgttgtgttgcagttatagtgctattttctacaatgcatttctgtcatatgtgagatagcgttctgatggaaaacactcaaagtttcagcgtgtatttactgtgttccagttttccagacttttgagttttgtttatgctatactgcttgacagttttaatcacctaagacaccaacagtcaggtttt

SEQ ID NO: 103301 - DNA, 355 bp, Zea Mays
tggcggtctagtcaaattaaaggggtcggggagcatcgcagacgtatgataatgctcaaacaagggagcagaggacgggaactgaccgaagttgggctggcgacagtgagctcggttgcatggtggcggaaatcggatttggggggaattccaaattcaagttctctggtgggaggtttgggatgcaagcgggtgcaataactggtagagtacatggcgaagccgagggggggctcaatttatagactccgagagcggtggctctcaatttgcccacggcgagctggcggccggaggtgaagaagaagcctggtgcgcgtggtcacgtggccaacggcgtggcagtaactccgat

SEQ ID NO: 103302 - DNA, 1663 bp, Zea Mays
cgactggattcactccctttcgcctgctatacggatcggaggccatgaccccgcaggaaataaaacatgggtcaccacggacaagcgcttcaagcgtccccgacgtagacgaaccaacctccaaagacctcatcgacgaagaccgtgtctttgccctgtaggccctcaacaaataccaagctcaaacgaaggcctggcacaaccacgcagtcgtcccaagagaatttgacgaaggggacctcgtactcgtccgaacagcccggacagagtcacggggcaagctagagccaaaatgggagggtccattcatcgtcaagacgaaggcatcccccagcgtgtacaggctaacaactccatctggcgaggacctagagcattcctggaatatcgataatctccgcaaattttttgtttgaatcctcagggccaacacgcccttgtaattcaccaaacaatatcgttccagcccgcactcttttcctcctagggggtgaggtttttaatgaggcggagccatgtaatatacctgcaaaaatcccccgcaaaaaccaagacacaatatgtcgaaaaagactgcatcgacggtcttcggcattcgaccacaccgaagtcaccgcgaggggcagcgctgactaccctcgcgtgcgacactccgcgcaaaagtcacctaagggtgcagccagaacagcacaacaagtgcaccaaatcgaagtctttccaaaagatctccgtgcaaaagtcgcctaagggtgcagccggactagcacaataagtgcgcaaaatcaaagtcttttccaaaagactctccatgcaaaagtcgcctaagggtgtagccggaataataagtgcgcaaaattgaagtcttttccaaaaaaactctccgcgcaaaagtcgcctatgggtgcagccggaacagcacaacaagtgcgataatcgaagtctttataaaagacaccctgcgcaaaaagtcgtctaagggtgcagccggactagcacaataagtgcgcaaaatcaaagtcttttccaaaagactctccgtgcaaaagtcgcctaagggtgcagccggaataataagtgcgcaacatcgaagtcttttccaaaaaaactctccgtgcagaagtcgccgacgggtgtggccggaccaacgaaggcgcgcagccttaccatataaattacggttacatacacacagcgagggcatcatatattacattggctcaaccttcgggatgatacccatctccatatagttgaatagcattatcctcaattcctcaccctcaaaaagatttcgtagctccccttcacctacactcgccccaatcggcgaggacaacaattctcgtttaccagtcccgttcacgccaagacgaccactctccatctcaccacgatgacgcctaccacttcgcgacaattcactcactcttcgtttcgccaccgcccttcgccgcctatacccagtactcgcacccgggagcccctcaaaaccctccacgcgcggcgaaggctccgctacagccacatctaacgctgcaaaataatcaaagtcctcatctgaagactcctccatccacgcaatcgaactcccagaatcatcagactcaaaacacttagacacagagccaaacgaatcatcatcggtagccacggtcgaagccgc

SEQ ID NO: 103303 - DNA, 501 bp, Zea Mays
gaggcgtagcgagcgaccaaatccctaccgagcaaccttacgaggcagagcagacgaccaagtccctgtcgagcaaccatgcgaggcagagcgaatgaccaagtccctatcgagcaaccacgtgagacgaaacggacgaccaacttcataatgaacaaaccgcgcgaggggcaagcaaccgggtcccgtgccaatctgaccagcataagggaagggtcgacctaatgatacgggcccacgtcagcaaaacaagacgggtcatcaccaaaccacgtccgggcatcgggtatggcgtcgaaaggtcccgacggacatcaaacgatatgtcgtcacgtatagtcctaggcaaactcccactgacatatggggccagtcaaccccgatcgtaggggcctcatcatttgagtctctagagtgatccgaatactagaaaggatgcaacgaataccccatgccagtttatgcctactgttggggcaaaggcgaagacgtcacccttcg

SEQ ID NO: 103304 - DNA, 424 bp, Zea Mays
gctttgtccgaggtatataggaccgtctactatcttagccgagttggcagctgggcttagcatgcaattgtcggaatctatgatcagagtacaccatgtattccatgtctttatgtgaaggaagtatttgcggaatccagaccatcaaatcgagctagagccgattcctgtgtagcaagaccagactctagagtgtcgtctgctgcgtatcttagaatcctaggagcttgaggagctgatgcggtagaagtacccgaacttttctttatgtgtgagttttgttggttcattaatctttcctttgtcgttccgatagaagcatcggaattcgaggtcgaattctttttaaggggggtagagtgtgatacccaattttcaaaaagaagagaaattgaagtttactcttttttttctttgttttctc

SEQ ID NO: 103305 - DNA, 1448 bp, Zea Mays
aggacgcgcccgtgcgcgcgcgcccgcggtggtggtttgcacaaaggcccctgatgacctgaaaaatgcgctaagaaccctcggccactatttattgtctcactgacaaatgcaccgaggtcctcagaactttatttcttctccaaataggtccctgaccacggcgcgctcgccgttcatcaccaacgcggcccgtactggccatgaccggcggtgaccgcctagtctagctacaagggaggcatcacagacccaaggtgaccctagaacatgctctaattggactaattcgggccaggatgtgcctgaccacggtgaccgcggatactgaactttgatcgaggtgttccggttgattaggtgaagtaaagctccaagggctgggcaggtgacgatcacaagcacatgtgggtgctaaaacacgaaaaacaagggcgaggacggacctggaatcagctagccgcgagtaagcggttcacggcggcgcaatcgaccaaattgggggaagaaggaaattcgctggctacgttggctaattgagggtgagaacgggtgcttcggcttcgtgataacatggcgcaactgacccgaccttcaatttatagaaatgctaagcgatggtgtccaattttgaaagagaagaacgatgaccgagaggaggggtgagtcatcagcgtaaactatcgtggcgctccctcgggtgatgcctccggcgatgaactgaccttctatgaatatctactgcgacgcgatacatcttctaagcacgtggcacggttataaatcgtcggcgaactccgacgaggacactgccgtccactgcgcgacaggtgtcgcggtgaatagtccggcgataagcttctctcctttccccgagttgagatctttctctgcccatgattatccgtgagtcccagcgcacgaatcgcgatgatcggtgttaatcgcggtggagagtctccggcggtgaggtgcgttgcatctctgatattttgctattgtaccatgggaagctctgtttatgacgcctgatagagcaagtttggcgttgattttctccgaatttcatgtgacaaccccatcatcccactgcatcaaagttatagcccaattaaccatctgcaatcttgctatggggatcatgcccaaacttgcgctggattatgttcaaatctgggttcaaagatcgcctcatcacactgtcagaccaggttcagtctccagacagcctgacaacccatctttgggtgtatttttcttcacatttttcataacaacagtgttgcatcccttaaacagagttgttctcctttgatagatctatagaatttatgtggtggcctagggcaaaaccaatatggtttgaaagttacaaggccccaaagttgagctaatatcactaatttcagacttaagcaattggagtatgagtggggctcttttgcaaa

SEQ ID NO: 103306 - DNA, 940 bp, Zea Mays
cggagcagaacggaggggaggtccgaatcgcaggttcaggagatccttgaaacgtccccatgttggtgtgccgtcgtcatcctgcagttgggtaaaccacatctgggcgacgtcgtccaggtagtacgacgccagtgccacgcgctcctccgccatagttctgtgttggtggaaataggcgtcgcatttgtggaggaagagcatgggatcggtcgtaccgtcgaagcgaggaaaatcccactttctatgtttgtggtggaagtcttgatcacgtaggccttccgcacgtcgggcagcaacgttgccgccggaggatgaagacgtgtccttgatggccgccatgtctgacttcaaggtcgtcatctccgcggtgagggacttcagctgtgccatgatctcggcgagggagggttctgccatggtgttgctgttggtgtctgaggcagtggatggtgggctagcgatggcagcagctgcggtggaggagcggctggggcgggtgggggaggatcggcgtgacctctgataccaggttgtcaagggcagtggtacccaaggcagcaggaccccggctacgtagttcgtagtcgcgatccgtcgtcgccggcagggttatttcccccacgccgtcgccgactattgtcaaccgggttataccccctggttgccgacctagagaggaagggagaggagataggctaataatacttgattgatttatctcctttgcggttacagttttatatggccagaggcccaaccgaaaggagcaacaaactccataatctaaggaactccctaatctaaggaactgaataacagcaactccacaatctaagggactggataacagcaggctatcctatcctatcccttagctgtcctgcatggccgctgcttgctctagggcgcggcgcacgtcacgggcacgacgtcgcct

SEQ ID NO: 103307 - DNA, 494 bp, Zea Mays
tattgaaccggccacagtgcccgagtttgttggtgaatcctcttcggcccccgaagccaaggagccgactcccctgtcgaatattgaagagccggtcataatgccggagatagagaaaatagaagaaccgaaggctaaagaaacaaggacatatgaaatttaagtccttcagcaaaagttgaagtaccaaaaagccaaaagggtctagcattgacccccaaaaggaaaaggatggttaatgtactggatgtattggagacaataaagtcttcaagcactactccgaagaaaattgtcgaaactcccgaagtgcaaatcgaagcctttggtgctgaagcttcaaagcatcaagctgagactgaagctgggccttcagagcccgccaaggtggaatccttggaaaccaaagaaacataagcagcagaacaaattttaactggagaaactggcactatcgcccccgaagcattttccgaagcttccaattatatttt

SEQ ID NO: 103308 - DNA, 551 bp, Zea Mays
tgaaggcccagcttcggcactagcttggattactgtagcttcaatttcggccggctttgtttcagcttcggtttgcatttttgaagcctcgacaattttccctgaaggagtagagcttaaagcctttactgtttctagcacatctagcacatttgccatccttcttcttttgggagttggcgcaaaacttttttgtgccttcggcactgttacttctgccgaagggcttaaaatttctaacatttttgttccttcaacttttggctcttcggccttatctttatcggtctttgactcagctagctcggatgaaggtaccttcggcatcatagccggatcttcagccttctgcgtaggaggaatgggctcctttggttcagcagctgaagaagtttccccgccaaactcaggcaccacggccgactcaatatagcgtggccggtgggtaaggactttcaactttttgctcgtcggcgcggcctcatctggaatggccgaagcagcagttttggccaaagcagcagctttcctcttctttcccccgtcctcgc

SEQ ID NO: 103309 - DNA, 361 bp, Zea Mays
gccaattaaaagtgttagtactagtcgaactgtgtcgagaagcggcaataattaggcatgggttacttatgcttagataatagctatctttacacttatgattaatgtctgttagtatgactacatgaaatgtagtggctaagtttgttctccctcttatcatgaatatagcgagttgtcaagtatggtaagggttacgttattctcactacctcgaatgatcgttagcgctaagccatatgtcgcgtgtatgattatgggtttcaccttcttgtatggtgtattgttttcctctctgttttgaaatgtgaatgtatgattgtgttcacatagagagcgacctggtcgaggaacccgaaga

SEQ ID NO: 103310 - DNA, 746 bp, Zea Mays
gtttcaatgtatcttggccggtgggtcaagaccttgatcttcttgcccttcggcacaacagagatggccgaagcggtagttttccttttctttcgcgagggatagcaataatcagggtatacgaaaccaatgacgtcaaaaactctattcaatattttcttgcctcggccttcgaaggccaatgtcattgcatcatctttggttcttgtgtaggccccaagcaattcgtcactggttgcctcaatactgcttaatcattcatcgtttggctcatcaaactcgcctctatatctgaaagtatattttaaatagaccaagccgccttgactagacccagcagcagcctccttcggcatctcccattcattcacaagcgaccatactctgtaggcgatgtgttcttgcaccaagtctcttgtgccaataaaagtacatacagtgttgaagcttctctggcatgcctctatatcgttcccaagagcgatggctggcctcctgatgccgaagcgagaccagatgggatgttgaataattctttttatatcttccctctcaactaaattattcttaacatagaaccacttctccatctaggccccgggccacctttttcggaatgttggaaccgggtaacttacatcgggacggggcacgaagccataacaaccgaagttgttgtgatattgctccttgccagtagcctttgtctcgtacaacagctcgtgcatgttgcagaagcattttgc

SEQ ID NO: 103311 - DNA, 535 bp, Zea Mays
ctcttgttcatttgtgctgcaatccaattgattagatgttgcgtatgcgattgggtagaggggctgtccagaattttaggtggtggacgaacagcagtagttctagcagtttctgggcatttttcgtggggaattaatgggaatcagtttgggaatcatgtagaactttggcatacctttccaacgagtatttatgcgctcaattcggagttataaattaaatgatatcgccatttgaatccgggtatgtggctgtccaaaaaaacatattttcaggtggacgaacagcagcagtattagcagtttctggggatgtttcgtgagtaattagtgttaatcagtatgagaatcatgtagtgctttgtcttacctttccaacaagtacttatgcactcgattcggaattatattttaaaagttatcgctgtttgaatccgggtatgtcgctgcccaaaagagaaaaaacagagagcagggtttatcttgtggaccgtttaggggtaattagatgttagaatttaatcataaattgtat

SEQ ID NO: 103312 - DNA, 687 bp, Zea Mays
gccatcatgtgattagtcttcatagcaagcacaatagcgccaaatgttgggttcggactcgatgggcccaagcacttgcgccatatgttgggtttggactcgagggggccaagcaattaggagtaggtcagacaaacagtacacgacaaaacaaatgacatgggatcccaaatgtcttatccatcgtatcccatctagccctaagacaaggtatttataggataaccaggagaccggggatctaagtacgttcgtacccctagttacctgctacattcttggactatactatacaatagggtaattactgaacaatgttaccctatgcctaattacgcaagacactatacccatggaggaggctgacaggactaggtgtgtcccagcatgccacatctttcatgcattcggccccttagcttcaagttccaaacgccttcgtcttggggctttccactacgtcaaaaacatatctttagtgacatgtttttatgagtgacacgtgtaaaacatgtatcatattttatgtctataattgaattgattaagtgacgcgtaaaatgacatcactaatagaaccactttgctgatcctggaattcgaacccaaaaccttctagtaatgaaggacctcacctacccctacatcaccaactcatttatgtatatattacgttttcgttcatca

SEQ ID NO: 103313 - DNA, 531 bp, Zea Mays
ttcaaagttagcatgtcgatgatgatgacgccgaccaaacattccatcatttgcaaagggattctcatcagatccttcctcacgatcatggtcttcaaactcctcgtcttcaaatcttactcgacgtctatgtgcacgatgccttccacgtggattatcgaaatcagcgtgacaaccatcaccataacctctacggccatctctgaactgatcaaattcatggccgaaaccagaattctcatctccgaattcttcgcagttaaattcttctggatcacgatgatgtagccttcgaccacctgtcatgggcagacgttcattaaacatcctttccatggcctccacgagtgagtcggccatgtgatgcaattcagcccgagagatagggggctctccgtctccatggtttccagcgtgaacactcgaattggatcctaccatgttagatggaagcaaaaaagtagaatatgaaagtatttgtagaacactcgatctcacctcttacttacccaagctctttcctgatctcta

SEQ ID NO: 103314 - DNA, 344 bp, Zea Mays
gagctgaaatgtaacaaacatggcaaaacaaaaaaagacaaaccagcaggaacaagatatttgcatagaaaaaaagcgctgcgagaaaggcccaaaaaggaatacaaatgtccaagttaaaacagattgcagagtattcatggttataaaggaacatggacaaaaatgggtgatcgataagttagacttggaacacaatcatgagctcagaccagctgacagcaacaacatgtttagtgggcataagtacatgacagatatggaaaaaggaattataagaacattgaaccacaacaacatacctacacggaagatgatagctatattgtcttatctgagaggag

SEQ ID NO: 103315 - DNA, 451 bp, Zea Mays
aaaaatacttaggagaaatatgcttagtcatattactcttaatatagcatgtttccatttgttcaacacatgcaacattatcttcatagataatggtgggggtatttgcggtgttagaaccacatgacttctggatgtggttagtcatccgtcgtagccaagcacattctcgtgtggcttcatatagtgagattatctctgagtggttagtagacgtcgttactaatgtctgtttacacgatctccaggatacaacagtgccaccacatagaaatacaaagccagtctgagatataccattatggggaactgactgatatccaacatcagcgtagcccaccatagtctggtcttgattcttcggaaaaaaacaggccaagatcttgagtgcctttgaggtatctaaatatagtcttaacacctacccaatgttatctggttgggtctgcac

SEQ ID NO: 103316 - DNA, 787 bp, Zea Mays
gttttagaagaagggaaaaaaaacccaagcgattctgccatcataattgtgccgctgcagtcgcgccttaatagaatacgctaatggagacgaaaagcctggttgttgtaggttgagatgtcaggacgcggctatagagggagggagctgaggagaacttagtacagttcggtttcttggttcctacttaatgaacaatgatatgcatgctgcgtagctaataagggggggtgccccagctgcccttgaattcaggctgggggccgggcgggctccacgccggcgtctgcataccacaaccgacaggaacgggataatattattattattcgctccaccggactcattagcgtttattaggaaccaaacgtcccctcacaagacaacaacaaaagtagtcgagtagatggcgcttatatgttaattaacttcaagataactctacgttttaggggtttttactctcctcccttttttgacaaataaagtacacattttatttgtactggttagcaggaactgcccctttcacacgctcttgatttcaggacattttttttgaggcactacgtaccgatgtaatatatcaacacgagatacatagtaataactaatttttagttttaccattacacaaatataatcatcatattcgaagatgttatgccctcaccttcagagctaacaaaaccctcggtgttaatcccaatagccaattgtaatcgggtgcaccgtcgggaacataaaacccatcggccgccaatcataaaaccttgccaacgaattg

SEQ ID NO: 103317 - DNA, 542 bp, Zea Mays
gtccctttctggccttctagaggggccacaaagtactcgcccccacgtgtctgggatgtcatattatggtgctgaggcgttgtacgatgcagtgagaggtttggctgagacggatgtgtagtcgggtaataatcattatcactaggttttgcgtgttctgcgctggactgtccgaccaaatacgcggactgttcggtcgcatggccggaccatctgatgatgtattcagactgtctggcgctatgcgtggacggtccccgagttgttcgtttagggtttgagtgggacgtggtggctcaggcgcgggtcttagttattcggttccaaaaatggggccagtcgttgttggcttggacggtccacgctcacgtgaggacggtccggtcgtgcacatatcagcggttttacccccgatttgcgaaggaggatgtggttgtccaggatatgtgtctatcgaagtggggttgtgattggtcatgtcaatctatagccgatgaatcgcgtgtgtttcctagattcaacctcgtgcgaaggaaaattca

SEQ ID NO: 103318 - DNA, 431 bp, Zea Mays
tacaaaggcaccagttctcagctaccgcacgaagtggccgactggttggaagagtgagtggttctacatgaaggctgacgaaaaaagagggagaagctgatgaccatggttatgagtccgctaactttgagcttcggaatgaccaggcctttgtgtaatatgcaactggggtcaccctgtcagctggctgaagtagaatttagagtggtagctgagcagatcagtaatagggacttggtgcaagaatacttagcaaacaggacgtatccgacgtctagtggctggggaatgccgaaaaagaaagaagtagggaagaagcatgaacttgttcaacttgcttacagttttaagtttgaaaaacaattcaagaagccttgcaaagaatggctagacatgattgagaccatgtgcaatgagatacttgggaattt

SEQ ID NO: 103319 - DNA, 475 bp, Zea Mays
ggttgatcttgtccttttccagtcttgctctttggtgtctccatccgggtttgggacaagaggctaagatagatctgttatgtagttcaagttgttgggtatggccgagttgatctaggtcaccagtttaagcttaagtggatttggagtatggcttaatccgttgtaccagcattaagtaacttactctagattagatcataatagattagatagaatctagattaggttggtacaactagattaaactagttaaaatctcattattttggattaggtcctggtggttactttaggatcagataaatatagtgtttaggataaaacgaatctttcatgataagatgaatctattaggataagagagagccttttaagataagataaattggttagaatgagatcttttaggataagataaatctctgaagctagatgtattccgatggggataatctaggttgtctagttattt

SEQ ID NO: 103320 - DNA, 1081 bp, Zea Mays
ataaaattcagctcctattcacttaaaaattgccgcgttctagagacttgaattattttaacaccttaccatttgttacagttcaaacaatcaaattagaaccaacaagtagacttactaattttatacaattcatttttttgcactagaattgtcatacacaattagcaacgcatctaccacaataatcttacccggcatatatgtgtttatcgatgcgctcttcacatagtaatttgcagtttaacttgggcatcacatgaacactactaatttttacccgcgactgtaaccatgcgcatttagactacaacaagcaatttattgcgattacgtgcttaactaaagccgtccaacgattcggctaactagagtaacgacatagcccgctaaataacatacacgtcagctagtccattgttaccacaatccaagacacaacatatacttcaacgtttttataaacatatatattcacaagtatttttgcacaccgaccaagcatacgaatcgtaaaccaccaatatccaaatcgaaatcaccatgcatttacttaccaaaccatgaacacataacgtgtatcgaccagactctagatatagaggaagcgatgactactttggcatgtcaccacatctctaattaagccaaaacaatttctacttatatcgaccgaacattcgtgtcgagcacaccttatattaccttgtctcacatacaaccatgttgtggcgtgcactcgagacactaccgattaacttaacgcaattaccactacaatgcacttcgatatacacgttcgacatcacagtgcttcgacagaccccacacttccaatctatttgtcacatccaaacacaccacatgtccactgcattctcatgaccaattttagcacaattatttacgacaatatttatcgactagacaataaaacactaaccgatcattcgcacatctcatcttaaaaacactaatcacatgtcacataatttatattttcgacccactctaacctacaccacgatgaatacataaaatatatttaacatagactatctcattagccgactgtggaaat

SEQ ID NO: 103321 - DNA, 346 bp, Zea Mays
aaatccatgctgaggtcctcccatttccaagatggtatgggaagaggctgtaaggtgcctgctgccttcaaatggcttgctttgatcctttggcaagtgtcgcactcagatacatacttagcaatttctcttttcatcctggtccaccaatacaaggatctgaggtcatggtacatcttgttactgctagggtgcatggaaaacttggaaagatgagcttcatccaatattttcttcctgagttctgggttcatgggaacaaccaatcggtcttcaaaccatagaactcccttgttgtcctgacgaaaacatttgtacttatccaccttttgttcgagcatttcct

SEQ ID NO: 103322 - DNA, 758 bp, Zea Mays
gcaagattgcaaagcgacaaagtgaaaggaaacgaacaagagcgggatagggaaaacaacactctcggattgaaatggaataagtgaggctaagaaaaataggtaaacatcatggtaagtatggagagaggtcaagggtcaaaggtgataataggcaaggatataaaggaagaggtaaatgtgcataaaaacaggaatctaggtacaaccaaaaatagagttaagataagtcttgcaagtggtaaagtataggatatatccacgggtgagataagtaagagaccacgcttgaactaaggtgggagattggaggttttagataacgaacatagcgtaatcgccaagttaagattgagagatgagaagggtaaagccaataagaaacaaaagcacaacaaaggatgaggttacaaactcgcgagccaaagaagaggatacgaccaagagaaggaaggtatgagacggaagaggggcggtttttaagggcaggtatgagacaaccatcaatgtaggatatagaggtgtcaagggtgcatatgataataagtaaaagcatgacaaaggatataattaaggaaagactcgcgaaacaacaatgtggagaaaacatcatgtgtaagataggtaaggttccaacagaagggttgaagtaacagaaattattaccgagggaagttatgaggaaacggtgagatcatcaaggatgtgtgaaatagaatggtcgctcatggaccatcaagaagcaagggtgatcaaag

SEQ ID NO: 103323 - DNA, 1080 bp, Zea Mays
ccagtctgcaatttttagtcagtgacataattggtgcaagaatcacatggacgagtactagtagtctgctttaggttgttctgattacagcacgagatttatgcatgaagtaaacattccaaaacagaccatgactgacagcagcagggaatcatatacagttactaactacaaactgggttcaaaacaacaactgaataaacatatatgcaagctggtacaagatcatggtctggaccagaggtgagcatcacaagagacgatgggctggctgagtcgatgcacacaaagaaaaagtatctacctcacgtcctcacatagactagaggatggatagatggagtacatggtcactaactacaaactgagcccacaaagcctagccatgtagcatttcatttgctagaaattaaataggttcatagtcactaactgtttttagtgtgcatcacttgctgttttcacttttttgctgaatctgtagtttgatttcagatagtttgatagtcacttttttgctgaatctgtagtttgatttcaaataggttcatagtcactatctcaattaaataggttcatagtcactgaattacaacagggctattggggaaacacatatcctctttttgtaaatctagaattcagaaacaattattgtaatcttgttatggtatgccatccttaatgtaaacagaagtgaacctggctagcagtagaattgactgcttatacatttttctcaatacaatatgggtccacttcagatgagatgtacggcaaacatcaaagttacatgtttctatgtgcattttataaatgggacaggaatggatgttcagagtgaggagagaaatataccttcatgatttcttcatcattaccagaattggattaatgttgcttgcaggtatccattgaatgttagttcactatgagctgtttggatatatgaatatgttttgtattgaagtgagtactttgtaagagtcgttggatgttgcatatggtatcttctgtgttggctgctagtagtaattttttatgtttgagttacttaagatcagctgggcggtagatgaa

SEQ ID NO: 103324 - DNA, 422 bp, Zea Mays
ctaggtagcatccctgatggtgacgttaaaggtgtcccaccaggctaaggccatcccagaaagttggtgggcagctagttgaacacgctgattttctgggcaaccaatggcttccagtttccttttgatcgtgcgcatccaatcgtctacatcgagggggttgcttgatccggcgaacgtgggaggtttgagtctcaggaagtcccccattctgtcttgtggtcttccaccattcggccgctgattttccatatttcgagtgaggacctcgatgagtcgggtttgattggctagaacttgggctaggtctaagggtagtggtggaggtgcagggaggtgggtttcactttcttctctaatgacttccccttcagctcttcggggaaaacctgctccaatcccagaggcggtaggcgtggttt

SEQ ID NO: 103325 - DNA, 342 bp, Zea Mays
gtttttttctacgtagagctctatcttttaatttgaggcatcactttgagatgctcttagattgatcatcgttgtggaagcttaaaggccaaatagggggattaggctgtgacactagttgctaggggtctgcagttcttgatcctgagcacttgcttctggacttcgaaaacccttgcaacgatgcttcttcatctggtactttttgtactactaaaggttggcaaatgaatgcattgagcttattctttctagtgtacctatatttgggtttacagtgtttgttctgttgttcatgaagggtccagcaaaatttgcaggcgtgttgctttgtttggaaac

SEQ ID NO: 103326 - DNA, 543 bp, Zea Mays
ggtgatggggtgtcaaactgtgatacattagaagttgaactgttctgcacatgcaatgcggttggtcttacatgaggataaccagatacttctgttatgttgttagcatgaagctgtttgatttgcttaggaataatatccccaaaacttgcagagacactggatgatagaactcgattttcattggcaaagttcgacttcaccaaagtggacgtggatgtgtgttcctgctggagacgtagagcagtcgattcactaaaacactcatcggtatcttcggcaatacctataagacaaagacacgtttttaatgtatgtttatggcttcaaactttaaattgagagtgactccttgcaagcaaaaaggcaaggattaatgaatcatagtgtaacttctacagtaaggcaaaaggaaatactgcccaccaggtatgagccagtaacaacgaatggcggaatggcaagctaattgatgatgattgaaatccatcggatagagaatttactgcagtaatgctcaaatgctctgaatttacaggaaca

SEQ ID NO: 103327 - DNA, 311 bp, Zea Mays
gaagagttccccctcaaggaccacgagacactacctatctggagttctccgaaacccgcccaacactcttcatcaaggcagatgaacccttggaagctgatgaatgggtgcgaataatggaacagaaatttgggctaatccgatgcctcgaggtacagaagcccctatctgccgctcagcagttaagaggccccgccagcacctcgtgggcaaacttttccgccatccaacctgcgggacatcaaatcacttgggaagaattcaaactggcatttagggaatattatgttccggaaggcatgctacaaatg

SEQ ID NO: 103328 - DNA, 581 bp, Zea Mays
cttgtttactcctactacaatagcctctcgccgccgctggctctgctacccgcgttcttcgctgcatctggttcttctcggactccgccgctccccccgcagacgcaagaaactgctggccatggagcccccatccgcccaggcgatgtccgcgactgacgacttccaggacaaggccgtcgacgagtggtaaggggactcgactgctccctccaaaccccgatccttctcgtttccgctttctcctttacgagttatatatgaccgacggcggtccgccgtttgtttggttgcagttgctcttgctgctacgattgctgctccagcatcctggacttcctgtgctgctcgtcctgatcgatcgatgcctgccctttcgacggccccgtggaatttctcagggaaccggaggccttaccgtggcccactgatcttggattctagatgccgtgggattcgtgtgttctttaggtccttcggtgacgatgtttgtaatccggattcgaatcatcggtaacagtaaaggaaacttgatagactgctgaacagccgagttatcttcaaccctgcggtgtgtttcc

SEQ ID NO: 103329 - DNA, 900 bp, Zea Mays
tactccaactagggatcgtgaaatggagattaatgtggacaatgaaattgattactaaactacttcagagataaacaacaatggtaattactaatccaactttaattgatctgacacataaattatagaggcaaactgacttaacacaactttccatcaatagaaagtatcagtccttctccagtcccttccatagagagtgacaaaatggctgaaggagcagacgttgagatgcaataccagacaacccagaatgtaaccactaatggtaattacaatctcattccactattggttccctaaatattcttagtggcaaaaattatgtgaaccaatagaagatgatggaggtgtgctctttgcagaggatgacgatgaggctgtttttgacaatgatgacgaagaaggatacctattcgctgggcaaggtacttgcttaatgttttaaataggctttgaaaattcataaagttgtatgtcttacctattattctttgaaaaccaatttagatggtgaatctggagaggatatcgagattgttgaaacccaagatgcctttactgttactcctgacataccggacccttacgacaaggtgtacaataacatgcctgaagaaacacatttgttgaacacagttgccgactgcaactactgtaaagcgaagaagtttcagtatgaacctcctgggttgtgttgtcttagtgggcaggttgatctagccccattagagacaccatcccagcttcagaggctgtgggagtgtgcagatgttgatgcgaggcactttcgtgataacattcactttttcaacgaccatttctcattcacttctctgtattgttgccttgacagtacgactacaaacatggattgtggtgtctacacatttcgtgcac

SEQ ID NO: 103330 - DNA, 577 bp, Zea Mays
gttcaagaggggtctagggtttactcccctcttgtccaaagtgataagtgcaccaaaggcttgggtaatgctcttggtcattcacctttcttggttaacacatggtccccaagattcttatactcttctccttaagtttcttccacatgtgatgatgggcttggcttgtgtagtcttaagtggaaaccctaagtaacacctgaggtgttacagtggatgaactcgaagcactatggatgctctgtcgcccatccacttgcgccggcgatgtggccgagcggccatcgtcgtggtgtacgtcgttcgccatgatcatcccacaccgtgaccatttcaccacatcgctgctagccgtaatagctcacttgtgaccgtaatagctcctcaaccagtgatcgccacggtagatcgcagcggtgactcatcccctctctccggccgccagcaccccatggcaaaattaggagccaccgcccttggaaattataaattggtgttccagcctgctccgctaagtaattgtgcacccagtgaaccagccctcacctccaatcgtccctcacaactccccaatttg

SEQ ID NO: 103331 - DNA, 1149 bp, Zea Mays
gcgtatttgagcaaaaagtatcccaagggtgcagctaagggtgctaagtcacccgatagatgcagaatttttctgaacacaaaaccgccgaagggtgtggctagattaatacaagcgcgggaaaacaccaaggagcgcaaaattaccacccacatacagggtattatttcattcgaaggctcccatagcagtccctcggcgaagaggggcgagggcagcgtttacactcaatttgccaaagcacggctatgtcaacgcctaatattacataggctccgtctttgggtccaggccagcctcctggaaattaaacaacataagtctaagctctgcaccatcgaaaagtgccctaaggtctccctcttcaaaacaccattcggttgttggtgcaagagcaaaccagcgaggccccttctctgacagcattctctcccgcgggcgaggcccctccattcccatgtggtgatgccttccggagcctctggtgctttgagatggctcaccaaaggttcccactctttgctttggcactccaactcttctcttgcccctcgccatagtcggggaaaccctagatgaagactccaccattctagactctctcgcaaacaaatctaacgctacaaaaaaatataagtcctcttctgaggactcatcgtccatcctagcgaatggactcagtaattctttgcttcccgacgaccacgaatcaaagtcaggcccgctgtcactaagccctgtcgaacttcgacacatcaacggtgcaacgttttcaacatcaccaaatatttcctttcccttgcccaataggccaaaatctacttgtgcaggcccagtcgccagaacccgcgcagttgtcgactttatgtcgactttatgtattaaatagacagtgaaaatatggtcgtatcaatcctactctaatctttacacctacacagaggcagacgactgcgtggtccccaacgctccagagtcactatacccgaccttcacgagcgaagactgctccttagcacccacctctgtgtcagcatcttgttgggccattgagctctctaggccggcgaggtctttgacctcttcattcctcatcgcctgcgaaggcaacataccagtgcattagaaaaggcaaacataagtgccatc

SEQ ID NO: 103332 - DNA, 616 bp, Zea Mays
cttgaaacgcgtccaacagactattccctgtgttactgacattcacaaaaaccccttcaagttctatttctttacatcccgaggtccacgacggggagcggcggagaaccgagctccggcgagcctacaccggccggattactcaactaccggtgctcctgtgcggcagacaccaaattgaacccttaacaaacatttcccctcgcttaattgctggattggagctctacatcaccctgtccacggtgacagcggacacaagggacagcaagaagcgttcccggcgatctaaggggtcctaccttaatcggctgggtcgagaagcatcagggacacacaaggatactgaaacaaaagagcagggggcatgagcggacctggagcacgctgaccacggtgagatcactttgcgcggtgctcgggatcgatttgggggaattctgaaattggcgagctctggtgagcaattggaggcacgatttggtggcttgggtgcttgactaccttacggacccgacgacacgctcaatttataggctccgggggcggtggcgcgtgaattggagttggcgcggtggcggccgaagagaaggagatgtactgtcgcgagagcttg

SEQ ID NO: 103333 - DNA, 594 bp, Zea Mays
ctaggggctttgtcagacgtttcaacccaaggcatgtcaggaccatagataatccaaattagagtgaagacaaaaacaatcacactcagggacaacaaagtcactctcaatccacaggaacctagcaaagcaccttcagaccaccggccccaagaggtggaagaggaggtagtagtttcggaggaagattcaataatcaaccaaggaaactattcaaccttttctgtggatagtacaaggagcatacaacaagaacctgtcaagtcacgatatagaaacagaaggaaatcaccgaagctaaagcacaacagaatcagtcgaggcaggtcctccacaccgcctcatactattctacatacattcaagagtatgttcgcgaccaatagccaagtccacaaccatcagcttcagttgcttcagcaagtcactcttcaccttgatggatcctgccttagccgttcacacaagcacccctcatcatatgagcaacaacatccaggtccagccgcagttttctgcacaagaagaccacagcgagacacaagggaacaatccgaagccagaataataaacaacattgtatcagagttgaag

SEQ ID NO: 103334 - DNA, 594 bp, Zea Mays
ctttgttggccctctttcaggtagctgataaatacaccataagcaaagaggtgaagctccacatgtcctcttcaacaaaggataaaggaaagaccaaacaaaggctcaaacaagacaagggctagaagcatttctacgataaaaaagtcaacacagtggaacgtgacactcgacaatgctgagaaggcaaaccacctacctgagatgagtacattgttaggtataaatctataatggatggaacatgtacctatcatccacatggtaatcatactacacaagagtgttgacacataaggtattttgcacagagagtgctgaaagagccacaccccaaggcgcctaagccaagaagcagcaagactggcaagaaaggcaattcaagagaagtagacatggagaaattcccacaaccaactcaagacatcatgtgcatcatcgaggcttcagaatagtatgagtccaataaaaataatagatgtaagaccgagatgtcttcgcaatagagcctgtcacaccgggattcttgcggtggttagagatgattgtcactttcgatagaaccaagcatcatgatcatgtttcgtgtttagg

SEQ ID NO: 103335 - DNA, 438 bp, Zea Mays
atcatgttgtacctgctatagaattggaaagccaaaaggttcagacaacgcccccagcgacgatactttcagcgatcatgatggccaaagaaaaaactggttctacgaagcctgcgacagtaggtgataagggtaaaggacccacagaaatcaaggaggccaaaaaagccattgagataacacaccactaggataagggccttttgatcaagaatttgaaggccgacgatacagggttcaccatttagctagaaaggttatgggcgttaaatagctggtcgaagctattggcttcgctaaacaacttgggtacccttcgaggtccacaatcttcatgggagggccgaatgattacctatattactgcttgaatagcttggagactgaagtataccactatatggtgaacaacataggttttccgaagctggaggctat

SEQ ID NO: 103336 - DNA, 286 bp, Zea Mays
cggagcatcaccaccaccgtgaagccgtggcgcgggaacctccactacggcgttgtctcggcttgggaaggttgtcaagaagacttcatcgaacccatagaacctccgcgggtgtttgagcgcgctcggtgcgttctggaaccggagaaattactcactagagcatatttccatggtcggcatagttcggatcactaatagctagtagtcagagggcagtgctgaagcattagagatacttgctccgacgagttcgctggtgagcagttcgggcggtgccattgtg

SEQ ID NO: 103337 - DNA, 496 bp, Zea Mays
ttgagagttcgtggttttgttgaagtccgtagatgttatagtacatatttatttgccaagcagttgcatgattgttgtctaaaaaccctattcattctaacatatgtaggttttttagcggagcatggttttggagacattgctctctttgtcgtctttatcacgtcgatgttagggatagagaagcctgagatcatgcagcaataatgactttcttgtcttaaactaacctgtagtaaattggttgtttcttgtttctttcgaagagaacaacaccctctattatataggatattatataggaaaaccaggctaatgataaccatgtacaaaaggatattaaactaaaactaactcggttacaatctccacgatttgatggatccaattccaaacatttcatgcaagacaaaattggaaagtaactcagttacgatatccacgatatgatggattcagttttgaacttgttgcacaaagtgaagttggattcatg

SEQ ID NO: 103338 - DNA, 328 bp, Zea Mays
tataatcggactacctgttggcgctctctctggtattgacttgacaaatactttggaaaacagggctgcatccgggtatgaagctccaaaggctttggagaacttttcattggaaacagggtttcaagtttctggtgatatcattctcctagctttacttgttgtatactgcatttaacttatattctaaccatttgtttttttcaggggaatctagatctatttctttgtggagacttaactactatgagtgggcaatgcaaatttttgagcaacactccatgagcgagggggcgtaccaatttgctcttgctgcactagaactagt

SEQ ID NO: 103339 - DNA, 518 bp, Zea Mays
gcgggtgacatttcgacgggaggccgggagccgagagcagcagattatcgacgcttgtggtgcatcctgcagagcaataggattgtgacttgcgagtgggagagcttgctaggccttgggttgttgccatcttaagaggatttgggctgagcgagagccaacagccggagagggagttttcagttttttggcatttttgtgtttattcgggttggacgaattagaaaccgaacctgaacccaatacccgaataaatcctatctatggaccgaacccaaaacccgaaaccctaaaaaccaaaatctgaccaattcgatttattcagattcaggttcgataaacggattcaaaatgtccattcctaccctatgaccatgggggttaggtattataccattcttgtgagctatggctcctaaaagtgggagtttcaatgaggcgtgtagatgttttatgcctttaaagtgtccctggatcaagttccgagaggtttcaatcatactttgggcgaagacaag

SEQ ID NO: 103340 - DNA, 538 bp, Zea Mays
cggtcgtcctggatatgagtccatcgacataccaaaatatggttgggactgagaagcctcatttgtcgccgatgtttttgacgcagttattttagtgcccaatttatgtgacaaaaaatcaggtgtatgcgtattttccaatgcatgtgtcatattctctatatcctccattataattttaatctgattatcaaaagaaattttaacagattgaatatcggctaatggcgtggtgttacttacaatggggagctgatgcaggaaggctgacagtgaatcgtactttacttccctcttcttgacgaccttctggtggtgatctaccttgaagtgcgagaggtaccactttttcgccaccttgcttatctgagcctgttgtcgttgcaattcctcgtccagccttttcatgtggtcttctaatttctcatcctcattggccggcgagttagtcagccttgtgttaatgtctaggacgacattgttgtgatctttgggattagccattgcgaccgatctgataggtctaatttaatagatc

SEQ ID NO: 103341 - DNA, 726 bp, Zea Mays
ttgttactaatcatggtaagtctaacataacgccaaacaagcctaaatattctcagcagcaccgattgcaagttacacatcctgtcacattaaccacttatccaaaattaaggtgattattttcttcttagacatcataggttcgtttaatgaaaagactccaatagattatcagtcagataagtctaaccatagatattgttactaaaatggcgatcaaaagctactaatactgtgtttgactatcaaattgcaagttacacgttgcgcaaataataattcacaggtcgaacagagatcgctacagttgagtactttgacgtcgatgtccttgagattggtgtgaagccactcggctgaaaaatgcctaggttgaagctcttgtcaagttcataataggcatgcaccacctgccaaggttagctgaattctcagtacttggttatctgacatctgtcccttttggaagcagtctcctgggagtttagttattacttggctacctctggtcttgacaaagggcaattagagttaaattaatctgccactgtgaattggtctaacaatctgtggacaactaccttgatgtttggactgtaagactacataccatgtgggaagtggctcttaacttttggtcaatatagttattgtcttctgaaccatgggaagctaatgcacatacaattcagagtttctacatacctgcatttgaaaatagtctat

SEQ ID NO: 103342 - DNA, 411 bp, Zea Mays
gtcctaagcagtgcattcaagttggattaaaaatttgttttcagaacttaaaactttttctaagcctgaaattgataccatttgggttgacgtctcgcgatctctaatttttgctaggcaactcgagttggacaaaatataaaagttgttggtaattacttagggcataccatcccaagagttggcatcgatccgattctgtttgacatgttttgacactcagttttcaccgatctctatagcaatgacaaatctattttcgtgagtccttatctctttaaccattgcccgaatcaccttgagtcctgtatgagatatatagagtgaatatctgggaacaaaccttatgtagggattttggctattagagcacgccaccctcctccacatccgtttgaaaatgtcttcgaa

SEQ ID NO: 103343 - DNA, 2532 bp, Zea Mays
aattcacctcatgcttcctcaactgcctagagccataagcaatcactctgtcctcctgcatcaacacacagccaagaccaatacgagaagcatccatataaactgtgaaacacttaccactctcaggcaaagctatgataggggcgttcaccaacttgttcttcaatgacttataactgacctcgcaatcgttggaccagacgaaaagaacacccttctccaagagtctggtcaaaggcttagcaatgctggaaaattttggcacgaaacaccgataatatccggcaagccccaagaaactttggatttcagagacattagagggtctcttccactccaccacagcagcgacattcttgggatcaaccgcaatgccctcctgattaatcacatgacccaggaaagccacttcagacagccaaaaagcacacttcttcaatttgccataaaacagattcttcctaagagcacccagaacgagacggagatgtcggtcgtgctcttcctccgttttttattaaatcaaaatatcatccaggaacacgaccacaaagtcatccaagaacttatgtaacatcctattcattgcttccataaaagcagcaggggcattagttaagccaaaagacatgactatgaactcgtaatacccatacctggtgcaaaaagctgtcttctcaatatcctcctcacgaatcctcaactgatgataactagagttcaaatcaattttagagaacacctgggcacccctcaactgttcaaagagaacctcaatacgaggtagcggatatttattcttgattgtcacttgattcaaagcacgataatccacacattacctcttgcttttatccttcttctcaacaaacaatactggggaagcccatggcgacctgctaggcctaatgaaacccttagccagcagatcatccaattgccgcttcaattcaacctgctctttggagccatccgatacagggccttatgaataggctgcgtacccaaaatcagtttgatttcaaaagccgcatcgcgctccggtagaatgactggaagctctgctgcaaacacgtcggcatagtcacacaccacacagatgtcttgcacccacaaggcagcctcactctccaccaccatggagaaaaagattcacgacttccttgaccgatgatccagaagcaattgggacaacaatgataacgtgaactttggagaacttcccaagaataccacctccctacccgacggcgcctgcaataacactatcttccaaaaacaggatataactgtgtgatactaagttaatcaattcatacccaagataacatcaaatgcccccaaggaaatcaccacaagattagctgaaaagacctcatcagcaagaatgacggaacaaccttgacatactgaatagctactaatggagcctttagcagaactaaccacaattgggtgacccatcctctacaccgaaagaccagctcgcgacacaaatttctctgaaacaaacgaatagctagcaccagagtcaaaaagagcatgggcaacaaacgaatcaactgagatcatacatgtcaccacgtatccctgctctttgccatccgcatagggtagcacatatgctccaaaaatacccatagaagaggaagctcccagagtgaagttaacagaagaaccccacggagtcgccaaatgaggcagacgcggagctccaaactgagatggtataggagtggtcggtgtaggagtaggcgcggccaaaaactgaggaaaaccctgcataggcacgaaccgaggagtcccgagcacataaaactactacggagggggtggtactaaaaattgatgctcaacgcttgacatcatgctgacagtgccttgagaggaggaagaagtcactcgctcccatttgagcttcccattgggatttctcctacacaccacatccttgtgatcctgactacagatagagcacctgccactccactgacactcggcacggcgatgcgcttcaccacaacggaaacacaccagccccagcccgggcttaggaacagcacgatacctctaagtactccctcatgaagtacccgattcggagggtttgccatggtaggggtggtggcgctggtgttgtgactttcccctcttatgggctggacccccagtgttgcccctcctcgcgtcctggccacgaggctgatcaacacccgaagacttctgagactccatggtgtactgatgttgcatctccacacccaatgcctgctccaccgtagtacggaaatccaccaacggaaaggcgcctagagcatgcctgatagaaggtttcaggccctaatggaactagcacgccttctccaattcattgtaagccacatgaggaacaaagcggaccattttgttaaagcccacttcatactctgtgatagacttcttctcctgcttgtaagattgcaaatcaatcttcattttctctaggaaggtgactgggtagaacgtcctctcaaactgcttgatgaaaacatc

SEQ ID NO: 103344 - DNA, 378 bp, Zea Mays
cttccttgaggttataaataggacaatacacggcttcaaggaggcaggcgaacacttcacggttctcacctccaccacaatattatcacttgcatcaatcaaccccagggacttgggatccttccctctcccgaccagcttttattccctactgcaagcacttaggtgcaggaaatataagtctcatccccctccattggaagtagggtcttctcttgcccaaaccaggataaagacttgtgtctccttgcatcacccatctgggtctgggcacacaacattaattcactagtcggcagatccttgaatcaaaacaatgacactattcttcccctattcaaggcatttgatatgtttgtgctaggcttgtgtgttttt

SEQ ID NO: 103345 - DNA, 619 bp, Zea Mays
gtaactgtggcgtgttggcaagataggaccaatcggcagtacggcagcaattgacgtaatcgaactatcgaagtcgctcgttcctgacgcgagaagcatggcaatggaagaaagagcatgttgggacaaggctgaacaagacttcgagtcaggtttgaattggattgacgggattagaggagattaaatccccacaatccactttaaaccaaacaagcccttatcagatgacttttgactctatctctgagtgtagaacccagatgtgatcggagacctcgagcccttcggtgctcgcgcagtacggaccgtggtgttggggtgttctcgtgttccccctcgtgcaactcctacggcgcgaagattgttcgactcaagggcttgccgtcttgaggatgaagaccacccagggtagccgcataagcatcgaactctttgatccaaccacgctcgtcgaaatatgggaagacctcgacgtcgaagacgagcggaagacaaaggtgaccagacgaagaccctgcaacccaattacaagacgtatttcatgaacctagtaggtaactagggtctaggggcacaaatgtatttagatctgtgtcctcctagttgccctacaaat

SEQ ID NO: 103346 - DNA, 445 bp, Zea Mays
atcacttctactaaaggccacgaaccccgtcgagcattaccggaggccgctactaccaatccgcgctctgccaccgctcgggccccgtcctgaggtccttggaagctcacgcaagcgtgtacattccgctcctcgattagcctagtttggtgttggcagttgtgagcgcaattgctcgccgtggttgaaggagtcatcgggtgccgctagttgtgtggaggcaaggcaacatcgcctcaattcgaggtaaaatcacttctctattcttcgccctaccctcctctgcgtagggaacctttcgagatggagtttagggcattgatcacagaaatcgctcgcgacgggagctgcgccgctgtgattgttaggccgccgtcgagtttgtgcactagggatagaagacgacttctgggccgcaggatcataatcggctgatcgacggacg

SEQ ID NO: 103347 - DNA, 403 bp, Zea Mays
tgatgaagttgtgtgccctcgcttgtataggtgtgcgaaggcgttgtatactttgtctagtatgttttgttatgctgtgctggtgtgattatagttcggctgcgcccttaggcggcttctgcgcggtggcttcggtctttggcgcacttgttgtgctagtccggctgcacccttaggcgacttctgcgcagatagtcttcgcgatagacttcggttttttcgcacttgttgtgctagtccggctgcacccttgggcgacttctgcgcggatagtcttcgcgatatacttcggttttttcgcacttgttgtgctagtccggctgcacccttgggcgacttctgtgcggatagtcttcgcgatagacttcggttttttcgcacttgttgtgctagtccggctgca

SEQ ID NO: 103348 - DNA, 352 bp, Zea Mays
tcacgctcggttgaacatggataacgatccttggtgaaaaatcgggcgctggggatgagcttggaacactgttccgccctggccaccgtacacacttgcctcacgaccggtcctgatcacctcgccgaagttggccgcctgccgctcgcgttccacgtgcccaagtgctctacctgtttgttcatcaccggtggtcacgccatggtgcgggccacgaatcatttgcaccagtaaccttcttcctctccgaccgccagcgcgccatgctaaattcaagagccaccgctctcaggtcctataaattgagcatgctatcagctcctctaggtagtcgcgcacccaacacaccagc

SEQ ID NO: 103349 - DNA, 303 bp, Zea Mays
ccgtattcaaccgttcctcttctagtatatcaacatcctccagcctagtagcttcggcttcagctatgttttcgaagatcaatcttggtgccccaaacttgagatcagcaggtagcactgcctccaaaccatagaccatgaagaagggagtgtttccatgcaaagctcggctgggttgagttcttaggctccagaccacataaggcaactctctgattcactttcctgtgaacttttcattcttgtcgaagactttctttgagtgcttctagtatcattccgttggctctttctacctgcccg

SEQ ID NO: 103350 - DNA, 426 bp, Zea Mays
gtcggattatatttatgatagattaactttgattggagagattaatctacctaacataggttaaataaatattatttataaaaaagcgtgacatggtataaataatgttgttactacatggtacatatttatatgaagctaacataactggaacggacatgaatcggacgtcttacgcaaaagttaaagtgcatttattaataaaccgtgggttcaaacgctcattggccaaaaacgagccacaaagagggccacagagtttgtagccacagaggaccgacgtggggtgatgcgtgtgcaggggaaacattcagcggggtccacatgttgattttcttccagacgtgagggcgtgaggcaaaggaatctgcatgcaacatgcaggtggggccatgggtggttttcattttctatttgcatgtggcc

SEQ ID NO: 103351 - DNA, 532 bp, Zea Mays
ccgaggcgaagtacctggccaatttcaaggtggagaagcatcagaaagtagtccggcaaagggagactgaccgagcattgctcttacctattgcacccgcccccaatgtaagtaaaacaaacgatatttaatctattagagcttgcatatatgaacagcaagagcaaatgcatcaagtaatagggggtatgcaagaggatataaaagaatagcgtgcgcatttgaaaaatctgttgttcccaattttttaacgtatgatgttgaagctaggaacgatgcacaaaattctttggctgcaaacgggtattcacaaccccaaccattgtatggtatgctaatgaactcctatgccgggcaaccacagcctccgccaccaatctggggtaaacccacaaacctgcacacaaacggaccgtctgggactgagctcgtaccatctgggccagctgtggctggctatttttgtgacgagccgccgagatccacgtctggaccactgtactccacgcaagggctaactgacatgcttaga

SEQ ID NO: 103352 - DNA, 687 bp, Zea Mays
cgggagcttgatgctcgcgacctcgcttacgtgtcagtacgagttctaggaggatgttaggtgaacaatggaccagacagatcgaccccataaaaaaacgaagcaaattaggccacctaaaaaaacctggaatgttctggggggaaaaagaaacaggcaggccttcttaggcgacctaactggaacaaagggccacggcacggcaggtaatctggttcgccaacccacaaagtggctccaaagtctcggggacgggggcgtcaaggtggagaggcagctgaggcccacgcacggctgtgaaacctgcacacaccatgattcagcgtctccacactgttcgtagtagtacactgcagtgcagtgcagtgtcttcacctcttgtgtctgtcgtcgactcgttggctcgttgcagttgctgtggctggagcgagttaaaccgcttcatcagttcatcacttcctcgtccgtgaacacaacaccagttcgttatcagcttctgaggttgagagtttcggcctagcgttcacgtgcaaatatgtctctgcggccttgtcagcgtatcggcccacagcagtggaagagacgtggcccaacgaagtgcaagcccagttctctgcctacctgggcccgagatatggctaggttactctatggccttgtgaatggaatgaaacaaggaatactgac

SEQ ID NO: 103353 - DNA, 489 bp, Zea Mays
agtcgataacgacaaacagtttgacaaccaagacttccaggaattttgcaactctatcgacacgaaggcagtgttcgcctctgtctaccatccgcaatccaacgaagaagttgaacgcgccaacagcaagattttcagtgcaatcaagaaaaggctaatcgacgacaagaaaggcaaatgggcggaccagcttcccgaagtcatatgggcactgcacacaacagaatccagagcgactggatttacaactttctgcttgatgtacggatctgaagctatgacaccgcaagagctgaagcacggatctccacgaacaagccccacaaccactcctgatgttgacgaatcaaccttcaaagaccttatcgatggagaccgtgttcttgcccaagacggactgaacaagtaccaagcgcaaacaaaggcatggcgcgacaacaccgtcatccccaaagaattccaggaaggagaactagtcctcactagaac

SEQ ID NO: 103354 - DNA, 944 bp, Zea Mays
tagtagaggtctggacgacacatattgtttaggcacatttttataatctgccttagttgggatctttatctttgcggccatttccttagccttttctacagactcctcgtgctcggccaaatcaacagtacgtgacgtgaggtcccgtccaatccctttaaaaaatcgagttatgccagcagtagtagctttactcttctttttctcgaatgtagacaccaattttggtagaggaaatttagatttctttgattgtcgtgaatcccttgatggatgtggagaaggtggtggtgtcctaaatgttgatgcttgtggcggagacggtggattagaaagaggatgaggagcagcaagggaagattgtggagttgatgatggatgtaaaggtactaaagtttgaggaggcggagatggttggggatgagacgacgacggcgttggtgtatcaaccaattcgacatcccttcgaggctaaaggatgaaattttttatggcttgtccaagtttctcgattcctttgggcccatggatgtctagcatgtcgtccttagatccttggacgaccatcgtcacttctatcctgcaataatcatctggtatgtcgcttccatgaaacttgcgtcctgggatcgcaatgtctgttcctactttcttcgtgcgattattattaatatcatatcttataaccagtgtgcatgtcactggccttgttatgtcatcaactggataacagaccttatttcccattgacgcgatagagcttgggacggttgtacaatcagtggaagccggcggttgagctgttggaattatttgtagctatggagtggtcatctattgatcagacatcgcacttgccaactgctgcatcaattctggtgaaggatttgatagcatttgatacatcaggtctttgaactctttctttgcctcttgcttaaaat

SEQ ID NO: 103355 - DNA, 295 bp, Zea Mays
ggcaaaggcgtagaaatcaccacgatcactaaggatctcttcaaaagcttcggcttcttcaccgatccattcgatgattccttcaggatcgcctctaataaatttttactcggatgagtaagcacccacctttgcaaaactgtcttttagcttcttggcataatccaaggatttttggtaatatctttcctttgatttctgaagctcatctacattcttttgcaacctcgcgctagtccactcgcttatttcctgcttcgccttagccacttcgaaatcttcattcttctcggca

SEQ ID NO: 103356 - DNA, 952 bp, Zea Mays
cttatctccaactctctaagtttacttagctgagccagctttttcaggaagttcatatggtacatacacgtattgacatgtgtcagctcttccaaattttgcattttaccaatttcatatggtaatctggtgtcaagatcaatgaacagcctagccaattgccgaagttgaataatagccggaggtaactcactcaccccagtgtttcttatatccaatgtatccaagtactggagttttaccacttgctttgggagctctgtgatttctgtttctctaaggttcaagtatttcaggtggattagcctctctatattttccaggtggtggttttctaatcccttacaaccttctaggtcaagcacgcgaagagccttcatgtttgaaagagatggcagttgcttcccatgcccaaagatagtcactgatctgacatgagatagcgatgttgactcttctagcaccaaagctggtggttctccgtcaccacattggatagataatcttcgtatcttgttctgtggacttgatgtaagttctcgagagtctaacaaagtaacaaagttctcctctacagactttgttatgattaaatcaagaatcatgtcatgaactcgacaagtcaccacactcccactgtcatgatcgataaaccatggttggaccagtcttctattgataagctcattaaagtaactttcacctatatcatgtgcatttttcccatattcttcttgaacaaatccttcattaatccatctaactatcaaactctttctatttatgatgtaatcttctgggaagatacttatataaagaagacaagttttcagataatgtggtagatcaaataactgatagatagaatctttctcatgacctctatgtctggattattctcgagtgtagacccaatagaatttgccactctgttccactgatccaatgtcag

SEQ ID NO: 103357 - DNA, 357 bp, Zea Mays
atttcctgggtattgaggtattacaatctacaaagggctattatctctcacagtataaatacatccaataccttattgctcgctctagtctgactgataatcgtacggctgcaacacccatagatattcacttacaactttgtctgaatgatggttcaccactacaggatccatctagatatcgacatatagttggcaatctagtctacctcactatcactcgaccggatattgcacatgttgttcatattctgagtcagtttatctctgcgcctactttagtccattatggtcacttgcttcatgtactgagatatttacggggaaccacatctcgaggcttattctatgattgta

SEQ ID NO: 103358 - DNA, 644 bp, Zea Mays
gtgcgtacatactttgtttgagcatatgaatacaagactagacataatattgcttttttgtgtcgatgttgcttgaatatataattttgtagggagctgctgtgcgcgcaggtaattttagcctatgaaaacaactatagtatccctaaaagctggttttggggctgacttttttcacatgctcggctcctggagttgctctgtccgtcccttcttttgcggtcataaaattctacacaagcagggtatttgatctgatcctgaccaaactctgctcaagcgaagtccaagcgaaaaccttgcatcccaaatctgattttgcactccaagctgaggttgcctttaatttgcatatttgagctactagtgaattgaattcggccgtccacctctaaagttgctctatctgttccataccctggtactgtgagtctgagcaaaaactttttgaggaatcataatgactctttactgatggttcttcttagcccaaggttcagccattgtgacctggacacccataggccatagacaagaactttttctttctttcaatccataaacatgtgcccagcatcctccgctcagattactttggaagataacttagtgtgttcagttatctcagtttggttcatgctttg

SEQ ID NO: 103359 - DNA, 455 bp, Zea Mays
agtactttcggacagccctgatcctattttgccatttttctaaggcattcttccctctaacctccctattccaaacctctgctaccatttcttggaaaccatccctatgaagccatccaagttcaaatctgaacctttgactttttccccgaaaggatgcatttccagtttgtagcaaaagaggtgtgtggtcagagttttcacgagaaagggcctgaaccgacgccaatgggaatttttgttcccactccgaacttactagaattctgtctagtttctcataggtaggattttctcctgcactcacccaagtaaacttcctgccttccatttctagttcacggagattaagtgtttggatacaggcattaaaaagattcggccacctactatcatatctgtcattacttttctcttgtggtgatcttataatgttgaaatcaccaccaattaaa

SEQ ID NO: 103360 - DNA, 542 bp, Zea Mays
cgtccggatacgcgtatgcagaacctgttgtggcgcaaaacacaccaaattattatataccacaacaacaatatgttcctcaccctacatattagagccatggtgtgccatgcgatcataggccgagcgtcgttctcggtcggccatggcgggaaggctggcatagcaatgcccgaccgaatgagccctacatcccaaggaccgattgtgggggacaaatatcctcgggtccactagaaggctagaatgcctcgcgaaaggccttgggcctattgtttcgcaaggccatcccttcgtgggctaggggagaactgctggcagaatgggccaacacagggaatgagcgaacgcgggccaaggtggctcgtggggtttgagcgttatccatagctctgattcgattctcccgcgcgaccaccttggacatcggaaccaaatgagaataattcggcaagattgtaggaagataagttcaatcggttcactattacttaggtatacatcgttatcaacacgaatgtagtgccccacggtcggatata

SEQ ID NO: 103361 - DNA, 342 bp, Zea Mays
ggggatttggctaaacataattacttatcccaactatctagagaacacagacttgactttattgctctcatggagacggggcgtagctcattctcagaatctgctctgcgacattttagcgggggtgtcgattttctctggcaccatatgccacctagagggagatcaggagggatggtgttaggtgtgcatccgggtgtctatgacattggagctattgacgaaggggatttctattgtaagttccgacttcgaaataaggaagatggattcatatgggccctctttgttgtgtatggtccagctcaagaagatttaaagaatgatttattagttgaagtt

SEQ ID NO: 103362 - DNA, 483 bp, Zea Mays
gttgtgggcttcatcgagcagggtttctcgtgcctctcccactggcacacacaggcggttcctgaaccagaggactccttgcttgtctgtcctaaggtccggaagttgctccttgcgagctctttccataagcctggttgtctctgcgtcccggcgttgagccttgcatatgagatcttctagatttggcttgacttccaggctaccgttgtctcccagacatgcattcagctgagctgattctttcttccaatcttccagaaagtttgttcctttaaccccgaaaggctttcggctgagggcgtctgctaccacgttggccttcccggggtggtagtggatttcaaggtcataatccttgatcaattcaagccaccttctttgacggaggttgaggtccggttgcgtgaagatgtactttagactcttgtgatcagtgaagatgtggcatttgttcccgatcagataatgcctccatatttt

SEQ ID NO: 103363 - DNA, 454 bp, Zea Mays
ccgtgacgcgctgcgctaaccaagtggagagagaggcacatggaacggcgcacctgggcaacaagcaatcgtcgtaatccggccgtttccaagcctccatttctttacacgatcaccgtcaggcgacgcaagctggccgccgtgccactgccaccgtcgatggtcaaccctgcaatttattatcgctttgtgtggagggacgttcacggtcacgggtcacatcacataatagttatcccctcaggtaacaaaaaagaaaagtatcggccttcagctcatctcaccacattaattatggctgatagtatcatatactgcttctgctggtgaagacaaaataaaaaaggcggttcggttaaccaaacctgcatggtgttgctggacagatggtggcttgcatgacagtgcactacacttaaagttaatcgctttggcgatgtctgcaaatttggtg

SEQ ID NO: 103364 - DNA, 385 bp, Zea Mays
cgaggacattgagcacctattcttttcatgcccttttgcatctaacttttggaggatccttagtatttgctgggataattagctccctattcatcatcacttggtgcaagtaaggaacaattttcctcatcatttcttcttggagatctgtcttattgccctctgggtaatgtgcaaagcttgaaacatgaaaatcttcgatgtcactgaagcttctatcagtctttggacctggtctttcaaaaaagaagctcgacaacaaagcctgcattttagagatttggatgtcatgatatccctttgctagctatacaatgtgtatcctttgtttgttttgtttgcgtttggctcgtccagttggctgtctgcctgacctctcttagtc

SEQ ID NO: 103365 - DNA, 486 bp, Zea Mays
gtaagagtctggaggatcgaagcaagagcagggtcaatggcaggaggggtagcaggggtagcactagaactcccagcctcatgatcatgtgagcgtggaggcataggaggcggaggtggaaccccaaagacatcatcatcatcatcatcatgggctgctgtgccctgagtctcaaactgatggaaggtggtgtcctcggcctgagtatcaatcactggagcagatgctggcacaggatcctctggagctggacggtatgacccaaagatgaggcgagaggcctcaagagtaccctggaactatgggggccaaatcagctgagcaaagatgtgacacagataatgagcataaggaagctatcgacgagcacgtagaccatccagtactgtgtcctcgatctcacagatgagagaatccacaacatcaaactctgaatgagaaactagggcaccaaggagccaaagctgaatatgagcgacagcctcc

SEQ ID NO: 103366 - DNA, 524 bp, Zea Mays
tttaatttttttcatccatctcattacctagatcttgtctttagaggtaagacagaacaaggcacgtggtggcttaccgttggcattgagcacttgggttggtcggtcacacaacattgctagatctcttcgagctttcagattgccctttgttttttcaaaatgcatgcaggtgtgtaagagggcttcagcaacattactttcttggtgcatgacatcaatgttgtgcacaagaatcaatgacgacatataagggagctcccagagaccacatatatgtgtccagttgtggtccactctgaatccttcgtacttgtcccccttttcatttaagacaaggttgttcagctgagcatatatttctgctgcgttaagacgtttaggcggtcctttggtgaccatagtgttctttataaagtttttcttatcgctcctaaaggggtgtttcctgggcaaccagtgtcgatgacaatcgaagtaagtgatctttccaccatgagcaagacggagcaatctgtatctga

SEQ ID NO: 103367 - DNA, 303 bp, Zea Mays
cttcatttatttttattttctttacactgaaaaatggacggcgggttagtttgtgaaaagcatggggtcctttttgaatttttcgcacgccgaaggggtataggttcatgtgagccattggatcaggattggatgcgtgagattaaatcaaatcctttctgaaccggtacgcacatgttgtcgtccgatcacgatccgaaggttcagattttaaattgatgtgatctaatcttacccgcctgatcagagttggatgactacgacttgatccactctattctaatcccaaccttccaaacccgg

SEQ ID NO: 103368 - DNA, 456 bp, Zea Mays
attagcgagccacaattgcgcctgttgcgcacgttgcgtggacttatcctgtaccccgactatcgagccacaattgcgcctgttgcgcttgttacggaggcttattcgttgtcgtggccttgatggccacacacacgttgatgccagatacgctggagcttgtactcgcgtggaatgtggtggattattcgagcccctgaagtcacagcatagcgcaaccttcgtaaacattgttgtttaactctatattttatttgattgttttgtgtggcatcatatatttatttatattgccaagtggccataacaactaaatcaagctttatagtgcttggaaatctgggaaattaaattaaaatacaatgaaatacagataagttaattctctgctctctcctcatgcataaagttttacccgaagtaacccgaagatatataatataatgcatgaaagcc

SEQ ID NO: 103369 - DNA, 570 bp, Zea Mays
cgacgctacaagatctgctaaactatagcgtgtaatggacgctaaaagtagggatggcgacaggtttaaaacccgcgggtacagagattacaaacccgtacccgcgagattaatgttaaacttgtacccgctacccgcgacgggtagtgtatgttacccaaacccgctacccgcgggtttatggcacccgcgggcacaatcatataataaatatttattaaactgataaaaacctgtactgatcttagccaaaagttctacgagtttcttgacacatgtagtcttcttttatatcatttgattggcgccgctcgctcaaagctttcggggtggcactaaattgagatgcatgtgctctacagtctacacagacacacaatgcacaccacacatacgcaggcatgggcgctcgacgcaaactgttttaatagcagggcacagtggaaatgtgtttgctgttgccaagggccaaggcccattagctagctaccaaaggccgtgaggaggggactgggcggacgcttcctgtttcacgctgaggccgtgacgagggggttgtgtgcacggggc

SEQ ID NO: 103370 - DNA, 417 bp, Zea Mays
gactgagatagcttcatctcggaggtgatctgtagtgaactcttctcaggacagttacagaagtaatgaccttcacgtccacattgatagtaagcttttcttgaagttatttcttgactttccatgtttccctttttgtttctcggacctgatgcgaccacgaggctgaaattgtgtgcaagtaatagtccatccatcaatgtaacactcatgtgtttcttcttggggctaggcatccttatggtgtttcctttttggaatactttgcaattcatcaactgatagtgcattacgtacgagagaatctgttattagttgttcttggggagacatatgtcttttatgccagaaaataaaatctggttcttctgttttgcaatttcatttgcattgacttggcgacaaggaattccatag

SEQ ID NO: 103371 - DNA, 729 bp, Zea Mays
gaaaattataactaaccaaaataacaaatttgttgatgtacaggtagcacagtacatagcagaagcagtacatcaatcaaccgtgttagaaataaatgctacaaaaaatggaacagtcgattcaacaacacaatgccgtagcgaagtagaagcaatggcgagatccaattatctcttgaggtaaaccttgttggcttgtttatgtgatattgttacaattattggaatccaagaaacagtttagagcgttggtataaacctagaacccaatgttgattcccttgtactgacataaataaacaactaatttaggtggtggcgaagcagaggaaacacacaagcacaaggagataaaactatttcgtgagtacgagtgaaattagctcatggtagtaccacatttagtatcaaagataatataagtgcagcatttagaagcaaccctttgtttgtcgccgcataaaagacgtttatgaaccaaatcgataaaagcgttggtgcataggggaaggcagcatgtagcaggtgcaccacacgaatgaattgtggttatatgaagtggtatggcaccgaacaatctcatgtaaggacacaatggcgcagaaattgagtacaagacaaggcaagagccaattacctcttcggataaacccgagatatgtgatattgtagcatgtactgcaatccgaaaacgaagaggatgactagtgtaataaacatttgaaaaca

SEQ ID NO: 103372 - DNA, 358 bp, Zea Mays
gtatattggactacaagtttgctacaaacagattagcaagttttcatgcaaaaattcaagaaaaatgcctctgaagatcctcggccagaacaactgatgaagcttccaatgttacagtgcactgtgattcgtgcctggcactccgtggatattcgcagggaggtaactttggacgtgtagcgacctcgcggacctagcccaagcctagtcggagataatttaccagcggccgccgtggctcagtcatttccgccaccgtgtcatccatgcctcgctcctccctcactgtgtcccttctttacaaggtaaccatgcatgaacggtgtaatccatggccgtggatcgttagccggaccac

SEQ ID NO: 103373 - DNA, 377 bp, Zea Mays
actggtggccaccttttgtgtgccgccgatggtggtgccccagcatgtttgggagcaaagggtatggagaggattggacaaagcaacacctgtaatgaacaaagcgacacaagagaaaacaagagagatgggttgggccatgacccataggaaagagggagggggttatgtgcgctacagaaatacagaatcccttgccacatcgtatgtttgtgtggcatccaatggcaaaaatcggccacgatttagataatccggttttaattagctattaaaggtggatggtgtgctggactgctggtttgtgaaaccaccacacaaaaaagagggttacgcggagggagtaacttggacttctccgtccgtttccatggttt

SEQ ID NO: 103374 - DNA, 663 bp, Zea Mays
acttgtacttaattatatgcaattaaaaaagatgtccataatagatgactcctcttatttgtagctaagaaccaatgatttacggtctcaatgacaacatagggacgggtttcgctcgcgagatagcccaaggtgcagagattctacgtgtagatcgtaagtagtgaaatagtagaagcagcctaaaagacgcgtgacggacggaagtcagcatccggtggcatggcaatggcaatggcaatggcatgtgtgacccggctgttcggtgcgcgtctgcgcgggcagcaggcaataggggatgtctatctaggtgcgttccgtggtcgtccccaatgcgagtgttgaacaactatcaactctcggtgcttctctagctccaaagccaaaactttcgggggacttggcttgctgagagatcaaaagctagccgctgctgcatgcggcggcggccctttagctttagctttagcttggactgagagaagcacgaaagatcattcgttcggctcaggagaatgtatatttttttcctctctctctctcttatgagtagctttgagttttttctctctctttctatgtgcaaacgaaccctagcctagcctagccctttcactagcatgatggaaagcaattaaggccggccggccgggcggcaggagg

SEQ ID NO: 103375 - DNA, 406 bp, Zea Mays
tcaaggagattgtgtagtttaggtgtatggcacaattaagtcgttatcattgtctcggacattgttttgagttaagtaggttggtattgttcattgtagctaaaccgctcatatgaacggttgaagtgcatgcccaatattatacttgtctttcctcaaacgtgttcgttaaactccatgaacatcaatatctctctcaccatatgttcttctttgtttaatcttaaggatgatgcgtcgtagaagtccatcggttgttgaatccgattcaagtgacgatgccccagaaattcgtgaagacactcctcctcggtccagatccaagcgcgggcgcggatctggcaatgtcatgccaggtggtgaggcctctgggtctcatggacctcgcggacgaacgactaggaac

SEQ ID NO: 103376 - DNA, 376 bp, Zea Mays
ttgcacaacacataactcatactttggttagtctagcaactacaccaaagtactactcattgacaatcacttaacatcaactcgaaccataagagacaaatcaaccttgtgttcacaaaggtacggggtcgttttgacctaaataacattctatgctaaccctagggatctgaatctagaattggagcttaaccatatgttaaactcattatttataagctaaatccatcatcaaacacaccattttctcttctgctcggtcggcggccaagctcatggactaccaaaatatctctctctctctactcagtcaaagctactaggtcctcagctatggccttgacctgttcttagaaaatctcatctatggcaaggg

SEQ ID NO: 103377 - DNA, 325 bp, Zea Mays
ctctggtggtcgcttcatcataattaccttcttcatcaaacaccgcatcatcataaagacgtggacgaggaggtggtggtggcggtgcttgttgttgcgtctccaacatagcaagtctgtcgacgatctacgacaatcgtcgatccagcctctcgtaagtcttgccaaggttcatgtcaatgaaggcatcatgcactgacttgtggaccatctcctgcatttgctccttcaggagcttgttgtttgcctcaagatcttggcggctaacaaattcatcgaagtcagtagggatccttgcttcttcgtcgtcgtctgccattgaaac

SEQ ID NO: 103378 - DNA, 512 bp, Zea Mays
ggaagggaagccctattacataaatctagggattggacgagacagataggggcccaaccttatcatgttgcttcttgtccttcgggatatttgctgacaaaaggacttcttcggctaacatcgtcctcttccaccacgttattgtagccatgtgtgctatgctaatgtgccttgtcttttcttgcagcatacccttggttatcctctaggccatggagtggttgagccatgttcaacttccctacaggtgatgcacgttcgttcgtgtttttcctagaatggtcatttggactgtccctaacattagagctcttttgctgacatacaaactattatgatgtcattgcaaccacatacctgtgttagagtctgactcttcatttgtacgatcctgtgaatttcaatcccgacgggtcggcgcgatcctaccgacccctaggttgggcaggacagactctacatggtgtgagtttgtactccgaccctttagacgattggaggtcggatgagac

SEQ ID NO: 103379 - DNA, 503 bp, Zea Mays
aaagagttcagtgagtcgttaactttgtgcggaccgaacgaattggggtatggcgctcgggagggccggattcgctatttccgacgaacccgctgccgtgaggtgacctgcgcgccgtgaatcaacgacggaggatggcgacggtcttctgatcgtagattgaagaggggatgacgcagattaggtattaggatagcgtttcgcccgagtagtggggtctgttcgattccgatctcgcgtccatgggtcgatcacgatcgcttaatggtctaggccattgatctggcatcctacgcctgcgggtgagtgcgggaggtattgatggaccaatctaatctgggccggtcatcgttgatctagcggccaagatcaaatcgtaccccttcgccgagagattttcacttaagcccctggactatttagatttaaacctgccatgcacgcttggatctgcttgtgtcttaggaaatgttgccccaagacccctgtactttgcagaaaat

SEQ ID NO: 103380 - DNA, 398 bp, Zea Mays
gggcgcatgattacataaacgtgcaggggttaggctgaaatgttcttaagactcagtcacgctcagggtggacagcgggttaaatcatgtttcctccagggtttcttttgcaaaaagcgctggccgaaagggtatcgtatgagtatggccgagcagattacaatcaacggtccagattaaaagacaaatcggtacgcacagacatccctccgatcacgatctaacggccacgagttcaatactactcgatcccatctccagtgcccatccaaaatcggacggtacacggcggcttcaccctagattgaatcctggctgttcatattggatctaacggcacccgcgctgtcttctttcttactacagctaggacggcggcgcgtgcacacccgatggtg

SEQ ID NO: 103381 - DNA, 518 bp, Zea Mays
gtcagaccggggatcacagtttacctctcggtattggaagaagttgcacgagtccttggatacaagattgaattttagttcgtcttaccatccccagactgatgggcagactgagaggactaaccaagtgctagaagatatgttaagagcttgtgctcttaaacatggtggaagttgggataagagtttgccttatgtggagttctcttataataatagctaccaggccagcttgaagatgtcaccatttgaggctttgtatggtagaaagtgcaagactccactgtattgggatcaaactggtgaaagacaattatttggacctgaaattatacaagaggctgaggagcaagttcagcaaataagggagaatttgagaactgcacagtcaaggtagaaaagctatgctgacacccggagaagactgcttgagtttaaggagggagattatgtctacttgaaggtgtcaccactccagggtatgagaagatttaaagtcaaaggaaagttgtcctctc

SEQ ID NO: 103382 - DNA, 339 bp, Zea Mays
actagttcatgtcaaggattaagtctattgtactctcttctagcactataggcatagcccaaaactttcttcctagtattgttacttctattctatgactcatatatgttgcctcataagcccgtttaggtgtaatgactatcataggtctacacatagcaaggtaaggtaaactatttgcatgaacataacgagcagatacgaatgaatgtgaagctctagaataaaaaagtatagcagctagcatggaattaatgaagaacgttccaacgacgatgttagaaccatcctcggtagctttagcatcgatttgattaaccctggcgatgctaaaaccac

SEQ ID NO: 103383 - DNA, 624 bp, Zea Mays
gtttaccttccaaaaccaggtgtgacatggggtggccactggccccctttggttggacatccaatcaaagggcgaatacagggtcgagtaaggaaggactttatgagatgcccccaacgagccaagccctaaagtgggaccactcgccagaccagaccctagcaaaggacggttggatctcacttggataactcgttagcagttcaacgccctccatcactgcgccacctaggtcgatgatggacaatcctctcctcgaaggacaaaacctttccggggggagatgcgtgcaagaaaccaaacttatgaccaaacaatcgagcctacgcttatctcaggcctgaaaacgagcgcatgcccagctccgccattaactgaacctatgttaagctccggcccgaaagcgagcacatgcctagctccggtgttaactgagcctacgcctagctccgacagtaactgagcacacacttggctttggtgcatgaccaagccaaccatcacaaagaatggatctaccccaaagcgggaagctcactacactcaagataatcccctaaaacaatcctcacaaattgctcagggattgcatctaaccgatgcacttgcgtgcctccatgaacc

SEQ ID NO: 103384 - DNA, 538 bp, Zea Mays
gacaaaagtcacacaatacaccaacaatcatttcaaagaagcaaatcaaaatgaacacaaaggacaatgaactcaagcatactggcacaacacaatccaattctactcattcaacctaaacaaaaggtgagacaaggtttggaataagaaagatattataaagtcaaggagtcaggtaagaaatagcgaggagttagacaagacatatttgttggtggccaagagtaaaataagataaccatgaactattaaagtgaggataaatgatacaaccaaggatatgaagtgagttagggagaatgcattatcaaggagtaagtagagaggcaaagatttaatatattaagatagatattgcgcaagggtggcaatgcaatggcaagaaaacaaaagtataagaagtcaaggattatatagcaatattagggattagaaaaccactataatataatgtcacccttaccgatctagtcgaaaatcttaatactaaagaacaatcctatcaacctaaccaagaagtctagtaatagatccaaag

SEQ ID NO: 103385 - DNA, 588 bp, Zea Mays
gaagaaaacccctccagtttgaagtgtgacaccccagtgtcacctagggtttcttccttgagctaacccaaattattatcacatgtaaacctaatgaagggatgaacatcaaagattaagaacaaatatttttaatgagtcttctcaaactctccttaatcttgtcatgaaccttaaggaaggaaaaatctcaaaccctaattaatcctaagtaaaacaattaagcataaagggtaattgggagaaatcttgggggggaaaatacaaattttggtgaagaccaaattacaaagttttagttcaccaaataaccaacaaatcatagtaagaaagtttggccatttagtttttccgaaatccccaaatcagcccttgaaccatggtcccatgaacaaattcagaattctgaattctgaattttagaaaccttttccaaagatcaattgcattctctatttttcaaaactcaaagccaggaagtcccaatatcaaagttgtgccaaattcccttgaacacgctctagaaaaatttgaactcaaaccaaattcatttggcacggttttggcacagtttgacctcgggaccag

SEQ ID NO: 103386 - DNA, 347 bp, Zea Mays
tcaggggttccataacaaagccttccaaaaagaatgagaataaggcagagaaagacgtttcttcttcatcatccaaaggtggggtagagggtgctggccgatcttgagcaacataggcgatacttttgtaagcagttcttctgatagcaaccttccgatagatgagagaaaatcagactagaagagttgaatatgaaggagttgagttttgagataaaataagtttttttggcggaaaataactcaagttttgaaagactaactgggctttccatttctaactagtctaacgacctagggtcagcatagctttgataccacttctgtcacacccggttccagggggt

SEQ ID NO: 103387 - DNA, 555 bp, Zea Mays
gcgcttgtctaaattatatttcgtatcactcttttactgtataacaccgatcaattctctattcataataaaaattgatacaaaacaagaatattgtacccaactgtttgttgcaggctgtagcatctactagcatgtcattctaattcttaatgtcattgaccacttaaatgtggcatgatcaccagtctttcaactagtatgttttggataaaaactaagcagtatttttctggatatttaactggacaactggtcatgaaaatattttgatgatcatggtggcgtatgtatacatatagaacaaaaaaaatgcaagttgcaatatctttgaaaagttttcggcatcgaataggtactatcacattcataatgaatgccaccccttcaagttcctagtgagatactactatcattgatttgctcgcattacatctagatctagcattaccgtgttgctatagtttaaatgggaatttgcctctagcaccttctatgaaccattttgctaatatcccactttcagttttgcctagattaaaacataggtaaagc

SEQ ID NO: 103388 - DNA, 506 bp, Zea Mays
gtccaacgaaaaatggccacctgcctagatcttacttacaacaaagctgtcagcacggcgctggcattagaagccaagaatacaggccaaggaaaatcaaagggatttggaggtgacaggtccaatcagggacctaagaagcgaaccaggttggtaatctgaccttttcattagaatcattctttgcctcgtccaccctcctatccattcaaacagcctgttttcattcgtcctaccactgcccccacttctacaaatcagccgagtgcccctggtgctcgtttccccgccctacctagttcttcaactggctgcttcaactgtggaaagtctggtcattttataaaagactgtccatatccgaagcagaataagttcaacaatcaatagaactctgggagttccaatcaaggcaaagggaacatggctaataattcagcgggcaaaaatgtcaagaagactggacgaatttattatactcaagcggccactacaccggaaggaga

SEQ ID NO: 103389 - DNA, 447 bp, Zea Mays
ttcgaagtttaaggacagcgggcacatgaccatcgtcatcagtttccccctcttcttctcatcagccttgatgtaaaaccattcacctttccagctggttggccatttggtgcgataactgagaactagagcattcgtatccttgcgatatgcaaaattgtagcaaccaaaaatttcatgaagatcgtcttccctggccttcgtctagtagtgcaactcgtgcactcgacagaatgcttcagcatctgggctcatcccttggcttcagagggcccagatgaagacactaagcctaacaatggcgttaggggtcagctgatgaagatatatttcgaaatttttcaagacttaccctatcatctcattcagaggaagtcgcagtcctactctgaaaaagctcttgaaaaccactacttcatcattcttcggtgctggggtggtctcttc

SEQ ID NO: 103390 - DNA, 335 bp, Zea Mays
gttgccctcggtgcaacccatgctcaggagaagttgctaatgtggatctctagaagttccaagacttcgatgagtttgaagactaggttagtgatctcccccagttagttgcacgtggagggtcaagttatcttagtttacgttttcgtgtgagtatgttgaactatatgatggtaatgacaatggtttgtaatgcagtttaatactccttatattcgaggattgcgcaatgatatgtcatttgtgtaattgtgtgtatgtgattcagatcctagcacgtacatagttagcattcagtttgtcttgcgaaaccgggtgtggacatcttgtcagtg

SEQ ID NO: 103391 - DNA, 623 bp, Zea Mays
gcagtgcaaacagcggatgagcacgggtgttcccggcgatgtagggtagtctagcttaattgaatgggtcaaggagcatcagtggtatgcaggagtgccgaaacaagagagtagagggcaagaccggacctgaattgaactggccacggtgagagcttgttcacggtggcggaaacatatttgggggaactgagaaattcgtgggctttggttagtaattggaggcacgagctggtggattggatgctggaatacctaacggagccgagggtgtgctcaatttatagggctcttgagtggtggacggtgaatttgaaggaaacgcgcgacagccggagaggaggggcactagcgcagtgatttgtggcaattacgggataagaagccacgacggtcactggttaatgatcacaactcacggcgatgtggttaatggctagaggcgtggcacaatcgcggtgaagggcgcaaactctggtgacggccgcaaggccacgtcgccggtgcaagtggtcgaggaacagcgaggccacagtagcccgaactcatccgcgacttgatctttttcacgaccgatcgcaatctacttcccagtggcacgaatcacagcgaccagcgcgaat

SEQ ID NO: 103392 - DNA, 344 bp, Zea Mays
atccttgcttaaaagtgtatgtaggtgcaagaagccaatcactttcactacagatttataacatgtgtacatgtttttattttcccaatctataaacaactattgtgtacagttgacaaataattgcatgctacaattatgaccaccgccttcgtgatcataccctctaaatctaagatgagtctatattgtccaattttactccttttttgtcccatttgttagagatgatatctcatgtttttcatatgcttgaactgcacaagtaatcattttctgataacagaataacaaaagaattgttcctgaggttttggtttgtcaggctctccaaggtccaagct

SEQ ID NO: 103393 - DNA, 486 bp, Zea Mays
tgaacatgttgtgaactgttcttaaggacctctcaaatctatcctcagcttgccttactgcctgcttagatccaaccatccaaaggaacattcctagagcttcaattgaagtgctcttggtagtagattttagtccataggactctactaggaggtcatgaagtctgtggaatatagttgggctcgttctaaacatgttgtaacacatggttctatctgctatcttcctctacccattcctgtccagtaagtgctggtgttctatactcacccctattgcagtacttatcaaggtgcagtgcatggaggtacataccataaatcagagtggtgtcatcatcctcaaaaaattgagactccatttcatcctcacttgattcatcattactgaccaatggaacatggataggtcctgcggcctgccaacagaaaatggaataccaatttccatgttcctgtaccaaatgacatgcgccacaagctcac

SEQ ID NO: 103394 - DNA, 486 bp, Zea Mays
gtgatctagaggagaaataggaaatcacgctcatcaccttcctctaggcaaatgccaacgtattcgcatgggaaccatcgcagatgcctgggatccccagggaggtgatcgagcaccatctgaagatccaccctgatgccaaaccggtgagtcagaagcctcggagacagtccattgagcgataggacttcatccataaggaggtccggaagctgctggacgctgacttcatcgaagaggtccatcacccagtatggctggccaatccagtcatcgtccccaaggctaatgggaagcttcagatgtgcatcgactacaccaccctcaataaggcatatcccaaggacccatatccacttccacgaatagatcaaatcgtggattctacctctgtgtgcgacctcttgtccttcctagatgcttattttggtttccatcagatccagatgtctagacaagataggaagcataccacttttgtaacta

SEQ ID NO: 103395 - DNA, 277 bp, Zea Mays
gcctgctaccgcatttggtgccattggagaagatcttttcctggatgagtccgcaatgcggtgcaggatgccttcctgatctgcaatgcggtgcaggatgccttcctgatctgcaatgcatcagagggatctaaagcagaggatctttccagcattgaaggtgaccgggatgttgaaggctatagccatggagtcgttgtagatcaatgttgcaccccctacctggtgggctagctgtcggtgtttgtgacacgaccgtgcaccacagggttaccca

SEQ ID NO: 103396 - DNA, 1285 bp, Zea Mays
ccacaggacaggatgggagattttctaaggctcaagcctcccacattcgctggatccagcaatcccctcgatgctgatgattggctgcgcacgataaaaaggaagttagaagctatcggatgccctgagaatgagcgtgttcatttggctgctcatcaactttccaggatggccctatcctggtgggataccttcagcgctgccgtcagagatgctacctgggcagaatttgaaactgctttccgagaacatcatgtgccctaagggatcgttcatcttaaggaagatgactttcgggaactaactcaaggtggaagatctgtcagtgagtacgtgcacaaattcacaaaattggctcgctacgcgcctgacgacgtcagcacagaagccaagaagatggcccgctttttgaaagggctaagaccagaactcaagaccatcctcgccagccaagatttccttagcttctcgcacctctcaaacaaagccatacaagtggaaagggcaagggaagaagaaaaaggtcacctcaagaggaaattccaagtcctccgagctcagcagcaagaccggcaccagagaactcgatcctttgggttcccacccaagggaccaagcttcaatagaccagctatacccactccatcatgtttcagtcagcagagtcagagctccttttagcccccctcagtcgcaagcaaccagccaccagctaatgcctgttggcactgtggagactccggtcacttcaagaataactgcccccggttgaaggcatcatgaacgacttactccaactaggtgaatggcccgaagaatgccccagcacccgcctccaaggcaccttcctccatcagccagcagagcaagacccagtatcatggcagggcatgagtaaaccacgtcgatgctcaagaggctcaacaagctctgggagtagtgctcggtgagttccttgttgaatttgctcccgctactgtactttttgattcaggagcatcccattcatttatagccactagttttgtggaaaagcatggcattccctctacccacctagaaattcccttggtcacccaaaccccagggttagaccttttatgtcagctcaaatgctcccaagtcagaattcttttaagtggggtagtgttcttggcagacttaaccgtcttgccatcctaagggattgatgtgatcttaggaatggattggttaaccaaacacaagggcatcataagttgcgcaagtaagaccgtccttctcattgaccaccaaggaaagtcag

SEQ ID NO: 103397 - DNA, 635 bp, Zea Mays
cttgtcaggaaacttgtttagccccctatcacctctgttccgttcgctctgcttccttttccttgacctcccggtggttgtctcggtcggttccggtgcgccttgggtcggttccggtgcgtcttgggtcggttccggtgcgtcttggtatcgtgccgcagctttttcgagcatcacacgaaattgagacaagacctcctattcatgtaataaaatgcacaagaaatcatgcatgtgtaatagacattgtgaaatcagctaattaattaggttctgttacaccaaacgccatcctatttccactagcggttgtgttaagataaccgccagtggaaataggttttcactggcggttcccaagccgggcccacctgatttttttactggcgcacggtaactgaaaccgccagtgataatttatgggtgccgcaggctttaagctcttttctactagtgtgtacaggtggtagccaagcgttgtagtacgagcgtgtacatgtgcaacctcttttgaaccgcgcgtggtggtgaaagcgatgaagctttcatttgactgctgggcggcttcagccaatgccagattgacagacacatctatctagtttgttggtgatctgcgccattattgatagctt

SEQ ID NO: 103398 - DNA, 388 bp, Zea Mays
aaaagactaaaaaaataagttaaaaaggagtccctatgctcaaattaaattatagtcaatgttttggcttaggacttgggagcgagaagatggtgaagatgtgatgccctaaccaaaatcatcattgagattccataggtaacacatgcaaattcatttatggtgatggcttaacaattttctccaagtttagcaagacatagaaaagcacaagtacgccaacaagatcattcctgaaatatcaaatacatcaagtttatcctctaatgcttaacatgcttactgaaatacatacttgctcttgcctttagagtatcatatcaaataataaaaatgtaactacctctgcatggatcagaaacatacgtcaaactcaagtagctcagtg

SEQ ID NO: 103399 - DNA, 652 bp, Zea Mays
tcccacatcactttctcagcggactagaggtggaggtcaggtggtggactaacggtggtgggcgccttggcagactagaggggtgtcagatgcccggaggtgggtggtgtggtgctctattgtcggactcgcgtcgatcgatggaggagcccaacacgcaactgcataggccagagggccaggtcgaccgccggtggagtaggcgcgcagacgtagtgtcgcaagccctcgagatgcaatgacgatgcgaagcccagcgcaatgtacgacctacgacggcgatgcaccagcaatggtatgagcccagaaccacactcgtagctcgacacggaggtatgatagcgacacgaaggaactagaacggcgtggtgtgttgtgttgctcgtggcctggtgcccagatagggtttaggaaattcacgtgcttgccttgttgggcctcatgcctcacgtcatgtagtctacttgggctagcccgttcccgagcctagttggctagttctggttatctggctcacgagctcacacgagctggctcggctcacgagcggctcgcgagcctcatcgagccgagccgaaccgagcttagccgagcccgagcttatttttccagacctaggtagataggtaggtactatcacctatctaagcag

SEQ ID NO: 103400 - DNA, 306 bp, Zea Mays
tattaatgatatggcaatttgtaaatgctatgtaaggtgaacaatattaaaatagtgagtacactaggggtttcctttgtcggccttaagggtttcatacacttattttatggtcttgaatgaacttaacattttagttatcctttggatttttgctttgggcccttggaggatttaaatttgcacaccactaatttcccccaaaatttctcattttactttctattttgcttattattgagtgcttttgaactatcatgacaatttagaattttctaaaaatgttacaaaaattacagtgggtaa

SEQ ID NO: 103401 - DNA, 464 bp, Zea Mays
gggccctatgtgtcaatcgctatgatttagaatccacatgcacagcttcgcaaaattttaaaattatgcaaaaaatcattggattatttattcttcctattcacatcctgaaacttagggattttagggtgtgacaaatactctccaaatgtcctactcatttagaatcctaaagttagaagctcctctctggacactcactaaagattccaaaatataaagcattgagctacactaatcaaaatctaggctttcttagtttctagcattgttgtaatatcccttgcttcccccacccctaccttggtcctagtacctgccccttataattgaatatatcctttgtaaggcaaagtatcctgtgcacatgggggcttggcgcacatataacatttgggccttcaatctatcatccaacggtttcccttcccacctcaaactttatcaaaaaaacaccccacttc

SEQ ID NO: 103402 - DNA, 574 bp, Zea Mays
gataaatgcgttcccgacgactagtgggctcttagttcaattgggcgggtcgacgagcatcacaggcacatgagcacacttaaacgagggagcagaaggtttgcactgacctgaatcgagctggccgcggtgaggtgcgttttacggtgttcttgagcggatttgggggaaatccaaaattggagcttacgggtgcaagattggaggcaatactgggtggtgtggtgcgtgatgatcttgcggagctgacggcgggctcaatttataggcctagtgagcggtggtcgcgaatttgaagaaggacacgcggcggtcggaggaaggggagttcactggcgcagtggattcgtgtcccacgccgtggcaattactccggtgatcaacggagagtgagagtaggttacggcgatgtggtggaaaggtagagacacgcggcggatggtggtgatggcttaacggcggtgaggaccttatccaaggaatcggtgagcaaggggaggggcacgacgactagccggagtggcgtccagctcaacggcggcgaagatttttctaccccgcgacgttatctatc

SEQ ID NO: 103403 - DNA, 435 bp, Zea Mays
gattatgctttttcatcattatcacctttatccttgtcgcctctatatcttaccttgatgtttatcttataccggcctttaaaatatcctcttttctatctcaatctgagcattgtactttacctacttttcccttggtcgtatcctcttctttgtcacctgtgagtttttaactctatactttgttgggtttttgtttgttacttcctttacctttctcatcactctatcctaccttgtgataacattatgtctgttatctaaaatctccaatctcctatctcaatttgagagcggtgttttacttacctcacccttggcttatcctcttctttaccgcgtgtactcttgggcgcaacttcattctttgttgtactcataccactggctttccaatgccttcatcttttccttcatacccttgtttgttatcgc

SEQ ID NO: 103404 - DNA, 454 bp, Zea Mays
cttctgtgagcagaggagcattcagatcaagtacgcatcagtggcacacccaagagctaatgggcaggtggaaagagccaacgggatgatacttgatgcactcagaaagaaggtgttcgataaaagcgagaagcttgcagggaagtggatcagggaactaccatatgtggtctggagcctgcaaacccagccaagccgagctctacatggaaacactccattcttcatggtgtatgggtcggaggcagtgctaccaactgatctgatctttgggcgcccagattaacctttgaaagcatagccgaagcagaagcaaccaagctagaggatatcgatgtgctggaggaggaacgactaaatgtggtaattcagtcggccagataccagcagaccttgaggcgctaccacgacaaagcagtgcggcatcgatccttcgcagtgggagacttggtcc

SEQ ID NO: 103405 - DNA, 801 bp, Zea Mays
atttttgtagggcttaattctgagcaaggctttaaaggcccaaaagaaagccgaagatgaaagctgccagctagcgcttggaaatcttcgatcagaaattattacactaaggaatgaagctcttgaaaaacacaaaatactactctccttggtggatagattgaaaaccagtgaagcctagcttaacgcacaagtcgaagctcataaagccgaggttgaagatttaaagaagctcgctgaaatgaatgaaaatttcgatgttgcgaaagcaaaacaagaaataagtgaaatggaaacaacaagggtgcagaaaaatattgaagaacttcgggattccaaaagaaaaatgctatgaagtatccatgaattgtgcaaagaaacttaaagatagctttgcaaaggtgggtgcatactcatcggagcaaagatttatccgaggcgatcccgaaggagttattcaatggattggcgaagaggtcgaagcttttgaagaaatactcagtgatcatggagatttttgtgccttcgccggtgcccgaggggttgcagcagttttggagaaaactggttgtgaacatgttaatgctgcagcccaggcagaagccatcttctctgcagacgatacgaaggaaccttcaaccgaagctactttggtgggcgggaagttctatgtcgatatctggatgaagggcgaccgtgagatggccgatgaagctataaaaaagagtgaaaaagaatctcacgatgcacgagtggaggcaaaggaggctgaagaagctgctgaacgcgcgttgattatag

SEQ ID NO: 103406 - DNA, 376 bp, Zea Mays
gtcactgctggacccttatggctttttgtcgtctcagtttctgccgaaggactcaagatttctgatgtctttatttcttcagctctcggttcttctattttttcagtcgctggcacttcaatatttggcaggggagttggctctttagcttcggtggccgaagaggtctcaccagcaaattcaggcactatggccggttcaatataacgtggccggtgtgtgagaacctttacccttttcctcttcggcgccggctcactaggagcggctgaagcagtttccttcgcagaggatggattctttcttttttgaccccgcgctggatagcggtagtcgggggtagacaaacccaattgcatcaaatactcgattgagc

SEQ ID NO: 103407 - DNA, 385 bp, Zea Mays
gagaagggggaatccacagcaagcgggggaatccacagtgcactgccatctctcctcgccttgttttcgttttcattttcggtagatcacgtccctcatagtttgccatcacctacaccacgttgtgcaccgtctcattctcgggttagaacctcagtgcgggccgcacgcttcttgctggctatgctgcatcgccatgggtgtccgccgccgtcgctagatgacatcgggtaaggtaggataagcacggaccgttaaattggggcaggcaactgcgactagaagatggatccctgaccgttgatccggttgttggtgaaccagattacgttgtgtttatttaaaactagaaccattggatcgggatctagtgaccagggtcgcg

SEQ ID NO: 103408 - DNA, 395 bp, Zea Mays
atgtatttaaaaacagatgcgaaataaaaaaacctatagcattacatcgattaaaaataatcttcatatgtgtcggggttagccggatcataactctcatcaccactatcaaccatttcatagtcaacaccatctgaaggtgcaagttcgtcattaatgtcattgccttcaaggattactaagtcattctcattttgcacctcatcatcctcctcatcaataatcatttcaatatctacgtccattccgatagcttcggttaagtctatctcaaatcgcccttctagcccatcttcttagaggaactctccatcatatgtgtccgggtctaagttataatcttcatcgttagaaacaggtaatctctcgtgcggcgataccttatacacaacatc

SEQ ID NO: 103409 - DNA, 428 bp, Zea Mays
aataaatctaatctcagtcatccgcagcggagtcaccaaaaagtgtgttggcgcctttttgggccaaacactaatgatccctagaccccgctcgaggggaacgagaccttggggaacctctctacgagatggtagataaaatataagacaaataacactacctataatatggttttgaacttcacctctatgctagcaccttcttagggtcaactagcaatgaaccctaggtccttcacgtgatgtgcaggaccccaagtttggctctgcgaggtgccgattggtccgcgataggttgctggaccgttcgcggtaggcaccagaccgtccgcgatagggcggtagaccatccacgatggtgcaaagagctcttggatctcgccccccgggagggaccttgtcagggaaagattctaaggtcgtcatgg

SEQ ID NO: 103410 - DNA, 533 bp, Zea Mays
agcaccatacacattgatgaaattccaaatgaagccatttgctttatggaccacaagaattttgatcatgaattcccccatttctttttctctaacatcaaaaacatctgcatcaaaccccacaaggaggccaccagatctcccattcgcaggagtccagaaccaggcaaagtttctattaccactaatagagttcagccaagaatcctcaaaggttttttattggtttcttgtaaaccgataaaattatttttttcttttcttaagatatccttcaagaattagattttcacatccttacccaaaccctgacaattccagatgagaccaatcattttgaaatgttggggatgaggtcagaatgctctcccctccctttattaggtgtatacctaagtttaggaggagatttcttctttttttgcagatttttttatgacgaattttcctgcctttccttaagaccatcacattttccatatcagtcatttcattgtactcctcatcatcatggataatcttatccacatcag

SEQ ID NO: 103411 - DNA, 768 bp, Zea Mays
aatcaatgcaatgtatagaaaactacagaagaatatgactgccgaggaattgctgccttcgctatgggaaaaatgcaaggtgtgttatcttcataatgataaacagcgaaatgaacaggggagctatttgtaatctctttagtgtgatgcagaaggcagtgtacctcccacagtatttgatctttgttttccttagccaaatttgtcttataaaagaaatgctatataagggctagtttggaaacttaaatcctctccagaactcccgggaattgaagggaaaattaaactaatttccctctcaatccccagaaattctggaaggaatttaagtttccaaactagccctaaatgtgactgaagtaaggggaacggcttaatttttcttgcttgatgtgtcgtttgttgcagaaagagtttcttgataaatacgcaacattcctcaagttgatttcgaaaatatatcctgacgagaaggtgatatctgtgaacgaaatgagagatactctagcttcactgtagctatttcgttagaaggtaactttctgctctctgatttgtactgctttgccctgctacttgttttaatgcattgttcgttgcttgtgccaggttcgcatgtccgttggtttgcttgcgcatataagttgacctgattcagcatcatcttaggttcttgatcctcactgaaccaactatctgatatgtgatcccttaccaattatctgattcatggtctgttgtggaacctttaagggcttgttcaat

SEQ ID NO: 103412 - DNA, 581 bp, Zea Mays
cttctgaactgtggacacaattttaacaaagcccaggggggttctgcataaatgccaggactaaacggtaatggtcttataatggcacgggatggcgggttgattcacagaagagcaggggctcttttgcaatacgggcgagcgaaggggtacgggtagagctgagccgcccgatccaaacccgacgcaccggattagatcgcgcatcataaaacgtagacatcctttttaccgttagatccaacatccacggatgagagtgatcccgacccgactcacccatcaccgtccgatatcgcgccaacgttccagattgcatccgaccgaaggggtaagccgctttctaatcctggccgttttcgcaagatccgacggtcgcgacgctatcttcctctaccacggcggagaagggcgcaccggatgaatcacagccgttggtcccctaatcaacggacggtgagtcatcttcttcgtcctgttcgtcagccacgacgccgaccgtgcgcaacccggtgctgcgcaaacccaaacccagcgcgatcctctccaatctaccctcggtatccaattcttgcgctcgt

SEQ ID NO: 103413 - DNA, 378 bp, Zea Mays
cctggactggcgcgagcaagatgagcatgtttcttctccctctttctcttatgacgatgcttcttgtgtgatgccgccaccacttcctccgcctcccgctttcacttcttctccgccttaatagcagtttcttcaggaagagggggcacaaaaatcgtgacgttcccaagcccctgcaaaggcgcataataacgaaaaccctaacaaaaccaaaagagggagaggagaaggctcaccaggtaattcaaccttgcctggttgaagggcagagaccactcacgtccataaaatctgacatcacatttgttgtgatagtaaggatgtgggccaccacctcctccttcatcaggttcatgcacggagtggcgatcgtagttg

SEQ ID NO: 103414 - DNA, 601 bp, Zea Mays
tgccgctaggtatggagccggagaactcgttgctgtcaaggaacatgatctcaacgttcttcaagttcgtagctgcattccagggaatggtgccagagagcctatttccgctgaggtcaagaaattggatgctctccatcatcatgattggctctgggactgggttctgaagctggtttcctgcgagatctagaatctcaagatcagtcaagttcgagatagtagctggaagactaccggctatcatgttgtcagatgcagcgaatactcgcatattgcttgagaggttcccaacgtggtccgggacgagggtccctgcgaaatgattcgtgctgaattggaaaactgaaagcatcctgcagttggaaagaacagacaggaatccgagatccccgcgcagatggttttctacgattacaagtaacctcagcgagttcatgtcaccgatcgtcataggcaacggcccatccaacatgtttacttgcagctccaggttcgccatgttagacaggttaccgagagaagcaggaacatgtccagtcagtaggttgtcgtaaagaatcagcactgaaagctggagtagctgtccgaattctagcgg

SEQ ID NO: 103415 - DNA, 532 bp, Zea Mays
ttcgattgagtggacggaagagtcttcggatgaggacttggattactttgcggccttgaatgtggctgcggcggaggcttctccgcttgttgcgaatgctgaagctgtgtctggtccgagtgctgggcgtaggcggcgaagggcggtggcgaagcatagagtgagtgaggtggatggcggtcggcttcgtgtgggcagggctggcaagcaggaattgttgtcctcgccggctggggcgagtgtaggtgagggggagttgcgaagtctttttgagggtgaggagcttaggataatgctatttaactatagggagatgggaatcattccgaaggttgaaccgatgtaaggtgtgatgccctcgctgtaagtgtgttactatagtttgtatgatgaggttgtgcgccttcgcgtatccggctatgtctataggggcggtgcgcgcttggtctggtgcatttattatgttggtccggctgcgcctgtagctagtctgtgcgcggatagtttcttggtgtagacttgtgcatggatg

SEQ ID NO: 103416 - DNA, 372 bp, Zea Mays
gcgacatcaatttttgccatgttgatacccatcgtcagttggcagacattttcaccaaaccccttgatcaatctacttttacagatttgagaggggaattgggggtttgcttccctttttgatctaggactcctgtttggttttatttctctcttatgtttttcatgtagattttagtctttatttcttgattcatgtattatatttgcatcttatgtagtattttgagcttcacttgtataacatctagattgtaaccatgctcctagtagtatgttctgtgtgtacatgatgatgcaatggaaagcttggattctttttgctcatactgatacaattatgttgagctaagcttgttttcataattgtgaa

SEQ ID NO: 103417 - DNA, 1266 bp, Zea Mays
caaggacaacatcaaaggctggcgcctggaatggtttatcgtagagaatcatgggaattccatcccccctcgatcagggagacagccagatgttcgcgctcccagttggactgaatcccccaaggacttggagatagctgaggctagggttctgcttgcagaggttggcttgttgaaggagaagggtctaactactgaggctatggtcgccgatttcatttttaagaacattcagccgctgaaggatagagcgtacccagcttacttgtatcgtggcgttactgattcgacccgggttaccaatagaaggattcctgctgtggacctggtaagccggcttgagatgatccttagaggcaaggtgtcgaatgttggtgctcctgttgcgtattaagcctggaatctgcctcctcccaagacgttcatcagttttgtgtcaaatcctcctgccggggatagtggtttgggccttagagtgcggccctcttccgaggaggttgaggctttcgttgcttcgcttggtggaatccccaatgacgagaggcaggttcactttgagatgcctactagcccgagcgacgcagaaataagtgccatgctggataagttggctaaggattcctctgactcggctcctgctgaaacactagctgtagcactcatcctagagtctggaaaaacattggacattcagagacctgatactattcgcccgaaacgtctccaccaagctagtcatccaacttctcctgctgaagggaagaagaagaaaaagagacggcttcggcgagtgtcatccttgaatcaggatgccgacccttctgctcctgctgccggggaagtgccagtgccagtttttgttgaagctgaacccaatgggtgtgacccgactgatgctgaccccaatgggtgtgacccaattgttgttgatcccaatgggtgtggccttgatgatgctgacccaaatgggtgtgacccgattgttgctgatcccaatgggtgtggccttgatgatgctgaccccaatgggtgtactatccgtattattgatgaggatgaggaagaggaggaggaaatccccttaattcggaagaacagtcggcgctacatagccagcggggagagtagtggtgttccttctccagctttgtctgctctcgttggtctgcaggaattgtctctggcaaattttgatcagactcttgaagacatggtccctgaagatatgttgtccgagcccgcggatggtgaaatgatggaagtttg

SEQ ID NO: 103418 - DNA, 466 bp, Zea Mays
ttttttaggtaccctctattgtgcacttgctcccagactaaaaccattgttcctccatgctggcatttgctcaagcacatgaccgttgacattacttctttgaataaaagtctgaaacccgccaatgatggcactatctcagcaggaagagagcagtatcaattctgcacatgtcaaggccacaaacacgaatttctttcatttcttcacaattgacaacttctcactgtcccaattcaactcctgtttagaaagcactttatcgaaattatcatttacagtcatgcttaaaaaggcgtccattaagcgtcgcttaggcgctaaagtgggctcacagggcaaggcgtctacctcgccttgtccacggacataaggcgtccgctgcggcgtaaggtgccctcggggcgacaccttagggaatagggagggatttgagagggggggttaagtgaattggaccgcacgg

SEQ ID NO: 103419 - DNA, 652 bp, Zea Mays
aagctggtcgagggagggagtggatcccaagtctttgtgagtgattgagactagtgctaatatcgaaagtggagggcaaacggtgaagtggtgtcccctattttttggggaccctggactcctccttttatagccacaagggggagcccaggggtacaaaggtcttcgtaatgttgagagggggttaattcgagcccctgtagcggtatggccgtcgggatggcccttgtcctggctgttgcttttgatcaggaagaggatgtccgattcctgtatccgtgttttgaccatgcagagagccgaggctaggatcgggggctcggatgcgtacccaagcccatcctgtggacgagacgttcgagcgatagtggttgaaatagcgatcaacatggtaaaaagtgcatggtaatctggcccgtgcgtcagatggaatggtgtaaagcagacttgacaccaaccttgtggtttctgtagccatcctgtcgtcggtggtttttgcgggagggtgttcttctattaatgttgttggccgaggccatgttcgggcatacgaagacttctcccgaggccaaggttgggtttgagcatgggtacacagtcatgctgggagtggtcggaacagtagtccgagtggtctcctgcgggagagttg

SEQ ID NO: 103420 - DNA, 858 bp, Zea Mays
cttctcttggccatttcatcgaacatatgcatggcagagccgtagagctactgttggctctctctcccaccttcgcgcagcttctctccaactgggcacaagcaaccaaagccacacgagcaccatggccaacacggtggcctctgcgtcggttgggacgagctctgcgatcacacattcaccgccgtcggcaacaagttggtcctcgccggcagtggtacggtacatgggtgcgggaatgaatggaggagacggcacgcgaacagtgtttagcgagtggtcgtacgtccggcagatttagcgtctcggaggcagccgctaaattttagcgtatggtttagagtctcttgctggaggcgtagagaacgtttccatccgctaaatttggcggacaggacggtttagcgtcccttgttggagacagtctaacagtacagatatgagtgtttggggtgtacgagcggatgcggctaaatagctctaaaataacttattttgcatatgctcatggcatgcgtttaaataaagtcaatgcatacagtgatcgacgataagacgttgtgaccaatagaaggaagtaaatatcgtctactcatctcttgtatctttgctcggtaattctgaattcatcttttgcaccaagtaggactgcatgcgctggctcctcaaaacgatgaaacctctttcgatgaatggtgggctagagtcaatacgtggctgacttggacaggaaggggctggaatcgatgataattcctggagcttgttgatttggaatcatcgcagccgccagtgcgtattcgatggtatgtatccaaacctggctggagcattgttgctcgcctatgaagagatgcg

SEQ ID NO: 103421 - DNA, 833 bp, Zea Mays
tgtgacgccgtgcgggtccacgtgcagcctgtaaaggaagagcaggtgtccgtgtagccgtcgtcgccataccagcagtcatctccctcgctcccatgcctcaccagtgacaggtatggccgcgctctgtgctgcacgacggtgaatactttcctcccttttaatattttcttccttctctcctcaattcatgttcgccttattaggtcctacaaccgatagcttctccagcccgtctctgtcgttgttcgccactttggtttgggcacccacagtcgtcatgggagcgtgtggtctgctcctgctgcccgccgccccgtagacattgtctgtgactccgtaagtccacttttgctctgctagaccccctcatgtcgtctgcatctgcattagggtcagctccattggtgcttgctgcgttagggtgtttgttctttgcaacagctgtgttaccgtcggtcatccggtatacaatccatgtgtggttggtggattcttgctctttggtgcgtgtgtctgtgttgggatgggttccagatacctggatttgtgagggacaggctatgcatactgcatctttggttcacacagtttgttactttgtttcgatacttaggtgccacgtgcgtatagagcagttaaggtggatttgcatcctttagaagagtgacatctagatgtgtgtgggtttatggtcagtttttccctttggtcttagatgtcgtttctccaacaaaagttatacttatgctccatcctgcgcttttacactcgaacagttaaccagtaactctggcatgccagtaggatgtaaagggcatttgcaaggagtc

SEQ ID NO: 103422 - DNA, 352 bp, Zea Mays
ctgttcaaaagggtcaatctacctcccagactcaagaatctccctttccaaccagccagccttttgtccattttttccaacataggacaccaaagagatttactaatcttcttattgtcaattggcacaccaaggtatttcattggaaggctaccaacaggacaagggaaaatgtcagcatataattcagtgaattctttagcatcacccaaacaaaaaatttcacttttgtgaaaattaattttcagcccagacatatgttcaaagagacaaagaatgaatttaagatttctcgctccttctatacaatcttggatcatgaaaatagtatcatcagcatattgtaaacaac

SEQ ID NO: 103423 - DNA, 520 bp, Zea Mays
ctcagactttgccatcctgatttggtggtatccagctgtcaagtccaaacttgtgaaaaaattgtacccaccaactcctccaaaatctcttccaccaatggcataggaaacctgttcttaatagtgagattattcagtcgtctataatcaacacaaaaccgccatgtcccatccttctttttcactaaaagaactggagagccaaagggactagaactaggaatgattagcccagcttgcaataatgcagtcacctgacactctatttcatccttgtgaaaagctgagtatctatagggtttaaaattaactagcaccactcctggaaccagtggaatgtgatgatcaaactgtctagcaggtggtaattgagtaggaactgtgaaaatatcaacaaactccttcaacaacccttgaatatctgcatcaacagtctcatgttgctcctcctgcactttttctactaataccaaagaccaaacatcattccctgagatccatttttgcacatgtaatgctg

SEQ ID NO: 103424 - DNA, 455 bp, Zea Mays
ggccagtagtgtgatcaagtcccatgactgtgtcgtcgtgttatagactccttctatggtcagcagtaccaaaggcgcagaaaaggaaaggagcagcagcagcagcaaaaggaatcaggagaggagatatgatttaggcatagaaaaggaaagaaggagccgcagaaacaaaaggaatcaggagatatgatttagtttgttcctatactagcagattgcttaagaataaatgaggagagtgtttccctcaattaagagatatgatctagtttatttccctgttagtatatttccttaagtaaggtttccttaagataaagaggtgctagctatataaagcaccatagtttgtaataggggacatcgaagaagaatagatctcctagagagggcgatctccttcggtcacctcgactggagatcgacctcctctggttccaccttccccatagtcc

SEQ ID NO: 103425 - DNA, 428 bp, Zea Mays
cttatttgtatagtggtgtcaccgactcaacccgggttaccaacaagaggattcctgctgtggatttggtgagccgactggagatgatcctgagaggcaaagtatcaaatattggtgctcctgttgcatattctgcttggaatctgccagcttctaagtcctttttcaattttgtgtccaatcctcctgctggtgatagtggtttgggtcttagagtgcgaccctctcctgaagatattgaggtcctggttgcttcacttggtggccttcgcaatgatgagaggcaagttcactttgagatgcctacgagtccaggtgatgcagagataagtgctatgctggacatgttggctgggggttcttctgactcggtccctgctgaaacattggctgttgcaactatcccagagcttgaaaaaaccgtggac

SEQ ID NO: 103426 - DNA, 488 bp, Zea Mays
cgctcggggagattcctgatgatgaacggtaggtccattttgaggtgcccctgaatcctagtgatgcagagataagtgctatgcttgatttgctggctgaggactcttctgatgttgctcctgctgggacattggtggtggcgcccctcccagaggctggtatgaccttggatattcagaagcctgccagtactcgcccgaggcgcccttgccgagccaatcaacctgatccttctgctgatgagcagaaaaagaaaaagagacgcctccgacgagtatccagtttggatcgggacgttggtacttcggttcctgctgctgaagaagtgtctgtgactgaatttattgacactgaccccaatgggtgtgcccaatctgctgctgatcccaatatgggtgctccatctgttgctgatcccaatgggggtgctgcctgtgttgctaatgaagacgacggggaggaagaggatgaagttcctttgactcgg

SEQ ID NO: 103427 - DNA, 810 bp, Zea Mays
ggatgttattatgcgtcccatatggtcccgcttcggccttcgaaagccaaaggttgaaatcgatgaagccgccgaagcatgccaaaaggcctttggtactgtacgcttcttcattggtacaagagacttaattcaagaacatatagcattcagagtatggccgcttgtagagaactaggagatgccgaaggagactgtcactgaatctggcgaaggtgagctggttcgactgaagtataaattcagatatggggataaatttgatgaaccaaatgacgactggctcaaatgtatcgaagttacaagtgatgaattgcttgggccatattccaaagcagaagataatgcattatccacatcttttgggggtcgaggaaaaaagagattgaacagagtttttgatgccattggttttgtttaccccgattactgctacccactgtgaggacggggaaagaagaggaaagctgctgcttcggccaaaacagttgcttcggccactctagatgaggccgcgccgacgagcaaaaagttgaaagtctttacccaccagccacgctatattgagcctgccgtggtgcctgagtttggcgggaaaacttcttcagctgctaaaccaaaggagcccattcctcctacgcagaaggctgaagatccgactatgatgccgaaggtaccttcatccgagctagctgagtcaaagactgataaagataaggccgaagagccaaaagttgaagggacaagaatgttagaaattttaagccctccgacagaagtaacagtgtcgaaggcacaaaaaggttttgc

SEQ ID NO: 103428 - DNA, 392 bp, Zea Mays
agtatcagacagttatcagttgtgataagaggacaatcaagttggtgtccccactaggagaggaagtggtgaccgagttagtcctgcctgagccaaagaaaggaagttgttatcaaatggctgttgatagcagcgaagcagacccactagagatcatcaaggttgtgtctgaattcccagatgtgtttccaaaggacttacctggtatgccacccgagcgaaaagttgagtttgtcatagagcttcttcctggaaccacccccatttttaagagagcttacagagtatctggaccagagttggttgatcttaagaagcagattgatgagctgtcagagaaaggctacatccggccaagcacctcgccttgtgccgcccctgtcttattcgtg

SEQ ID NO: 103429 - DNA, 697 bp, Zea Mays
accagcaatgatgagggaggaaaagatgatgatgttgatctccctcctattaatgcacccattatccaggggttagtgcttcacagagcgcaggcccatcgttccaccaacgaacagatcattgatttcactgccagcggagggtttgcccttcttcaggatatgcgcttccaaaatcctacattccgtgttcgtgatgtcaggattgatggtaatcgcttctggactctccttcatgttgatttctatatttcagttatccttccaaagaagcaccagcccatcctccatcagtgttttattaactgggatggatgcaaagccattggtgatcctgagatgacacaggcattgagggcctgtgagcggaaaaggatgaagaccataatgacattccaatacgattggaatgatgaagtcattgcacaattttattctactctctggattaagcatgctgatgaggaaagtccgtacaactttccttatctcaatttctttattgaaggaagctggtataaggtgagctacaggaggtttgctcacattctaggatttactgatgaggatatctcaggagacaaaatcaagattcatgactttcgtcctcccaccaaggatgaagccaaggatcttcacatctctgagtctgatgaatattggaaatccaccaatctgcacaagtactacatgtaca

SEQ ID NO: 103430 - DNA, 579 bp, Zea Mays
gtgatattcattgctcatgatgctctctatctgttacgtttgtagcataacttagagttcttgaatcattcctccgcccaccttatttgtgaagttgatttccttggaatagtaagaaaataactcggtcatcatatcgacgcttttagaggtagctgccgagtgacttgaagacgacgtcggagttttagagataactgccgagcgaccaaagacgacgtcggcgtgtcagaggtaactgtcgagcgactaaggacggcgttggagttttcagaggtaacgccgagtgacttgaggatgacgtcggagttttagagataactgtcgagcgattgaacatgacgtcggagctttagaggtaactgccgagcgactgaggacgacgtcggagttttagaggtaactgccgagcgacttgaggatgacgttggagttttagagataactgccgagcgattgaacatgacgttggagctttagaggtaactgccgagcgactgaggacggcgttggagtttttagaggtaacgccgagtgacttgaggatgacgtcggagttttagagataactgccgagcg

SEQ ID NO: 103431 - DNA, 283 bp, Zea Mays
gatcgttacagcaagctttttggagaatcgctttcagatccacacgtctcagcccttgcagcaattttcggctggacggtggaagaaggggatgaggtgcgatcagcagaccttgctgatttttagacacctgggtgtatgtttctttggtcgcatccatttcgtattgattaataatgaacccttcatcaatcttgtttcggaacgcacatggccttaacaataaggccaggagagatattgttcgtgatgttattcaatccagccacacagaaattgtatg

SEQ ID NO: 103432 - DNA, 429 bp, Zea Mays
ggccacccttctgcaggtcagttcaagcttccttaattggtgttctagcattcctcatgtcccctgaagctcatcgacccattcgattgaactagaccgccttaaattgcctagaacaccttggattattctcggtttccatcgtcgtcgtgaacagacgtgctccggtccggatcagtgaaattagttgagggattagtgttggggagggttgatttaagtgacaagcaaaggagaagtctagtcgttgcgttctccggccagtatgagttcaccggaggtgtgtcgtcgccgtccaccgtcgtggacttggcactgcgaagaaacagaaatagaaggggttttccgtaaacgtcagtgaaacatataaatagtgtcgcgaccccttttctagttgtttaaaacgccaagggtctatgtgcaaactgt

SEQ ID NO: 103433 - DNA, 907 bp, Zea Mays
aggcgagcgacgctcggcaggcagggcatcccgcgaggccgcgacagaggcggcactccgctcccaccaacccacaacaccgatcccctcctcgccgagccgccgccggggataagcgtggggaagtgagcagccaaaatctaagacaccgatccccgggcgtgagtcgcgaaggtagcggcggagaaaagggcggagccacaacgcggtcgtgagcccgcagccaccggttccgtgcggctagacggagagagaggtatccgctcgctgcaccctcttgccgtgacccgcgagacgctaaaaaaagccgacgggatttggcaacttggcggtttggttcggctgtagcgtgcgtgcgtggttggtggcatacgcggccgtctcgttgcttttatttatttcgatccgttgatgtttgattctgcgtccgtccgtgcgctgcttcgtgaatctgctgtgtcgcggcggcggcggaggaatccgcaccgccgtgcgtggggttggtagatctgttcatccctgcgtgtgtttccgccgctgaggcgttttcttcgtaattcttttcgggagtgctctgttacgctgcggagtgggtcgcacgctcttttctggatgcctatggtgttgacatgtgggcgtagggaagggccgaagcccgaaggggacagccttgagctttctgcttgttttttcgggtgctttttaaatatgttttttcacgcatttctggttcccttttcccccgcgtggtgttgtagatcgatgaacagctaagcgaacaccatctgatgttcgtcgttgtttgactgttgcatgacaggttgcgaggcttgctgttcagccatgtcgacggcgcaagggacagcgttgaggtcggcgccgctgggcgcaggtcgttgggcccgac

SEQ ID NO: 103434 - DNA, 348 bp, Zea Mays
gtaacttgtctctgcgagctaatgatagtaaagatatgattacttaacagcatgggcacatgacaataatccgtgcatcctagctcgggagggacattggaggacttaccggacctagtaacgcgtcgtgaagatccagctaattacatttctatgttatgttaacccttcttgatagacaattcacatttagcctgcaagaaccaaccaaatgcaacataaatcgatggatgaataaaaataattcagctagaaacaatgatgatgactcatggacaagcagggtgaactatagcattcaaacacaccagcatccatcatgttttaaccaacatcaggtcactctag

SEQ ID NO: 103435 - DNA, 437 bp, Zea Mays
taaaaagagaaagaattagatcctaaatttaggagtttgttagatcctaaagtttaggagtttgtttcagaaatagattagtggctagaatagaaagataagaaattagatcctaaagtttagggggagttgttgcaagccaaggctatatatatctgtaatcggcacttgagggaattgaacaagaatttagtcatccagtcgtcttcctcttttccctgtcaagccgacggctagggggtataaccctgccggcgaagacggaccgagactacgagttgcggagtcgagggccagctaccttaggaaccaactcccttgacaacctggtatcgtcgtcacgtcgatcctcttccactcattcagatcagtcctccacagccaccgcgcccaaactcagccatccaccatcaccacagtcctctactgcctccgcc

SEQ ID NO: 103436 - DNA, 550 bp, Zea Mays
cgagtaacctcgagggtcgaggcaccgagcccaaagtcgagcaagacagaactaaaacgggggtcggtcgaaccgagagaaagccactcgagtggattctgcacctaggctaggactgtccgtcataaatgatcgaccgcattaaacacgtctacgccgggccatggcggggaagtcggtcctccttccacatatgatcgatgaacctaggccagaaccccactcatgacctatgaggttgtagacttgcgacccacttagggcctaccgaggctagacctgagtcccctagtggtctataagactcgcaacacgacgagccacgtcgaggttcaggctacgaaggccaggggtcagcgcaacaaaggaagggtaatgatgacgcctgagctcctcgccgcccacatgcagctagacttattaaagagcctagccagatagctcagacgatcaggacgaataccgacgaacacgtttctaccaagggtaaatgcttcgttctaccccgacacaatgaactccttccacgagaagccacttgtaaccggca

SEQ ID NO: 103437 - DNA, 453 bp, Zea Mays
aaatttctttagtgcatggtgcattgggtcaagacataaagttacttagacccctgataaggacatatcttaattaataatgatgcacatggatagcaggaccaccattttaggcaactgcaaaacatgttccttagacccctcttgccttcaaggccacccaagcactaaactcagtatgccatcacagatatgatatgacaacatgcaaaggaattcaaagcctctttcgtttttacacaccaatcaaattttgatgctgcactttcccttctatcactagattgaaaaagataacatttagttaattttgtagtttttctttctggagatgattgatctttctaatggaattagttagttatgacttcggttgtgattaatcacaactaagattactgctttgtggagttaagaatactagagtactactttgtaactgtctttttttca

SEQ ID NO: 103438 - DNA, 369 bp, Zea Mays
acagtagcgtttaaattgaagccagggcaagtatcactgactcaccagaggtatggtacacgcgtgaattcaaactgagggagcatgggaggtccggttgacttgagggcgctcttgggagtgttctgcgacaacgaggtgatgttctcgatgccatactgcagtagtgttcaatcagttgagcatgtgagttttgctaacactaaaggatgctaaaacatggcacagaggggcacaagataacctgagaagggctgtccacgatggggtgtctcacggcgccgttttgaccgattttggggaaattcggaattcacgagctatggtggatgatctatgtcacaccaggttttggaaggtaaaccgaat

SEQ ID NO: 103439 - DNA, 396 bp, Zea Mays
tctttgtctttgttctaatttggattgtgtatggtcctaacatgccttgggttgaaccatccaccgaagcccttagtcatctcggaatatctcaaggcctcgtcttttctttgtcaaacatcattgtctggtttgatatattcattcaccttctagagaagcttttctatggtccaagggtgttttctggcaaagtattgtgccaccggtcctgggtgaagccccttgatcatggcctcagtaactatctcatttgatactgttggtgcttgagcttaaagccatagaaatctttgaacataggcttgcaagtattcatcatggtcttgtgtacattggaaaaggcctaggcagtgactggcttcgtttggaatccttgaaagcttgtgatcaaca

SEQ ID NO: 103440 - DNA, 1117 bp, Zea Mays
gccgttccagttcctcctcccgttccacctgaccagctccggctcctcttctatttatacctcgcaaccccgaaaccctaaagcccgcactcgccgccgccatctgcatctacctcctcgtcatgtttggtttcagagatccgccactttcctctgcgttttttttcgggatccttttgtctttccatggtagggtgcgatgacgaggtacacacaaccctgatcaatcgcctccgatggcgatctgatgttcaccttttacctttggttcgtattcgctgagcatccgatcttcttcatctatcgaggccagcattttttgtttctttttttttcttgctcggtttgctttggatcgagggacctggggatccgccgcccttcttcgtgcggcgtcatccagtttttacccctcgaatacggcttgcaggcgcgtcctagccatctcgctctctgcataatcctctgcgagacccgggctcgtatgccacattcgtcgttgtcaaactaaacaaaaaaaataggcttttgtcgcgaagatcccagcagagaggtgcgctgatgcctccctaacaatcataatcttcgcagagaaacgctcatgatccgtggtttcgtggatgtgtgatttggatttttgttccattacatctgtttccacggcgacattttcatgattactgcagcgaactgaacgagggacctatggatggactgctctttgtccgtgttgtgccgtccaagtttgccttcggatagtaaaaccagcaatctggtcacgagatctcgcaagccttttcatgtttgtgggaatggtgtgccaatttgccaaattttgggtttctatcgttatcttcataggtcgtaattttgccaggatatagcgccggaaccccatactgaggtcgtcgttattgcagtcataagcgacgatgaaactttgaacagaccagaatgttcttgcagtcacaagtggttgtctaaatttggatattgaacagaattacttccagttgaacctaccgcttcaacaattggcatacttgcctgagtggctaacgatccatgcaatactgcactattattaattggagcccgagacaccacctcaaatttc

SEQ ID NO: 103441 - DNA, 363 bp, Zea Mays
tgcatgccacttttcctttgctatgtgcattgttaccaacttcttccctggtacttggcccccctgggatatggccttgacgtgtcgaggctggatgccaggattcttagggcgaaattggtgtcatggcccccaaggggcaatcttaactgggacccgacctgcacacagtcttgggtaggaatttttagtagcgcacccatagggtccgctagctggtacttcttatcctttgattcacgcaacatgaccgactgcagagtggtggggcatgtaggattacggtacttgaccatgctaagcgacttcacggccctgaagcaccccatcgtctggttgccgggtttggctactcaattcgga

SEQ ID NO: 103442 - DNA, 288 bp, Zea Mays
aaagagtgcggtaaggaaatactccatccaagatttgtggatcttgattcatctgatgatctagcttgatctttgaaggcttgagttggggctgaagaccagatttggcttgactcttatccttccttaacgcggttgatcctttcttcctcgagctttggtgtcttcatccgggtttgtgagcagatgggtagagggttcaatagctatatgctagatgcaattagttgtgtaacctgttttgtaggtcaagttgatctgtcattcttaatttagtgcagggtgaac

SEQ ID NO: 103443 - DNA, 378 bp, Zea Mays
cttgagctttcttgaaaggtccaatcatatctagcccccagcatgcgaagggccaagtcaccggtatggtctgcagttgctgtgctggtagatgttgttgctttgacaagtactggcaagcttcgcatcttcgaactaactcggctgcatcacttttcgctattggccaatagaatcccgacccgaagaccttcccgactagtgtcttggacgctgcgtgtattccatgttgtccagcatgaacctcatctagaagtcacttcccagtagatgagagaatgcatttcatgaagatgcctgatgcaccccttctgtatagcgtctccccaatgagtgtgtagtgagctgactgtctagcgatgtgctcggctgcatttc

SEQ ID NO: 103444 - DNA, 274 bp, Zea Mays
agtcttgggctgaggcccttgtatctagttcagaccactaggggcccattctaagttagggtttacacccctccattcctcttgtctgctcccccacctatataaactaccaccagccgccatttgagacttgggttttatttggttgtaagtttagctgctgctacttctttgcaaacgcgtgtgtcgattagaccacccgatttgctcgattcagaaccccaacttcgtgtgtattagatttctcctttgggcaaggtctatgtgttgtttg

SEQ ID NO: 103445 - DNA, 281 bp, Zea Mays
cacgggttaaacatcgccgtatcactcggcgtcaagaaactgatggtatatggtgattcgctagtggtcataagccagatgaacaaagactgggattgctcgattgactccttgggcaagtactgcgcagctgcgccaaaactagagggcaaattcgaaggattagagttccatcacgtggaaagagaccgcaacggagcagcagacgcgttgtcaaagttgggatccagtcgggcccagactccacctgggatcttcgtccaagaaatatcacagccgag

SEQ ID NO: 103446 - DNA, 930 bp, Zea Mays
cgcggtttgtgcatgcttcgtcagcttcgttgtccaagctggtggatattgagattaaaggcattccagaacatggttggtctctctctacagcggagcacatcttacgtggctcttgctggatttccgatatccaccaggattcggcacacaagaaaaacttttcatctttcctggtgagagcatggtgttttgatcctagaattctgcccacagaaatggatcttcatattattgaaccaggccctgccgttcttgagaagagatgtctatcttataaaatctcgatcggagtttgcccggtggatcttcagtctgtgagcctggatacaccgtcttcttctccaccgtcgtctgggaataatcacgatatgggaggtgatcgtggcggtcacgttcctcctgctcgtcgtcaaggctcttctgcggttcctcgacgacctgtccaacttcgcttgggcccgcggaccccatcgggctccggtcatgtcgggcatggatcaggaagtgtggaaacgtcgcagcctcttggctctggaatcaaggggtcgcactgggttcagcggccgccgcagttatgtttgatagaagccgaagaggctgtgaatgcaggaattattgtggagacattacaaccgcgtgtctctggaatcgaggagacttctcggactctgcagtcagcgcattcaagccttatggataccgttaagattgtggctgctggggttaatgtgtcgcgcggttccaaggggtgggaccatcctttggcggctgctgtgcatgggaacgagtttttggaattggccgaggagactgtgaatgcaggagttactgtggagatgttacaaccgtgtgtctcgggaatcgaggagtcttctcggattttgcagacaccgcatttaagccttatggattccgttcagagtgtgg

SEQ ID NO: 103447 - DNA, 289 bp, Zea Mays
tgggcttcatgagaattttggctgttacaacttcgcttaccgcaaggatatgaaggccccggtgctaagctaccgcaccaagtggccaactggctggaaaagtgagtggttctatgttaaagctgatgagaagaaaagggagaagctgaagacgttagtactgagcccgctgagtttgagctacgggttgactaggcccttgtatcgtatgtcgtcggggtcaccatgccaataggctgtggcagaatttagagttgtaactgagcagattggcactagagatctggtg

SEQ ID NO: 103448 - DNA, 1575 bp, Zea Mays
caactgtcatggtttcagaaaccaaggaccaataagatttatgttcggtgggggtgctagtgtgtgctcactccaaatgatgaatcgctgggattcgaatgaagaacctgggacatgatatttatactagttcggattcgcaccctactccaatgtagtgctgactatagtattgcaatgagtgcgttacaacaagtgtgctcgtgtgggaacaaaggagggggccctacccttttatatctcaagggtaggaccagatgagatctattttctactggagagagagattggttcccccgtgttgtcgtggtgggtcctccgtatggtcgtgtgtagctgtactcctggtatggcgatgtctgttactccggctcctgtagcgagtccatcctggcgtctttgtagtggtgcacggcgggttccacagattagtctcatggtgcagtcgtacgtggcgtggcttctcctgtcgtcatgagcccttcatctcctgttagcgtgcgtaggcgtacactcagatatggtgcgttattccgtccttctgatgtacgtgtcactgtagagaccccggtgcccattcagtgtgctgtgcgtttattcggacgtgggttgatggtgacgcgtcctatcataactgatgtggattagtagcgttggactctgatctttgcctcgctgggttgctcgacgatgagatggtcggtcagagctgattggcggagagttggtcatcagagttggtcattggagttggtcattgtagttgatcatcggggagttggtcagccggtctgcctcgtagagttggtcggtggagttggtcggtggagtttgttatcagagagttggtctgccggtccgcctcgcagagttggtcgacagagagttagttagctagtctgcctcgtagagttggtcgacggagttggtcagtggagttggttatcagagagttggtcagctggtccacctcgtagagttggtcatcagagagttggtcagcgggttcacctcgtagagttggtcggtggagttggtaatttttgaagggcccattttgggtacccggtttccgagtacccgacagttactctcaacctcaaaaaagacgaataaagtgcacacatacaaatcaccaaaatcgactactggtttgatgatatgagaaggttcatggtcaaattagaaacatgcctaaacaaacgggtcgaagtttggacactagactcaaaaaacacacaaaacacaaattgcacaaagcaaaggtggtatggccaggtctagccttccctagttggaccaaagttgtcctagccaagctgtagagtcagctcagttggaatcctaggccgatcgggattgaagggcgacctaactaggtccagcctgtttaatcaccaaaactttttctctaaaaatgaaaacaccttaaatgaacttggatcgagataaaattccgcataagggttaggaagggagttaggaaggttaacctagaagatcaattccaaaatctaaacgaaactccgcggatttgggaagttccaaactgaattgagcatcaagtgccctata

SEQ ID NO: 103449 - DNA, 487 bp, Zea Mays
caactgggagacttgaagaggaaggctatctcacaggggcagggtagcagcagtgttcgtcctcgctatgttccgccacagggtacacctactcgtccaggaggaggaccattcctagctcaatacgctccacaggggtctccacggacacctcccactcgtcaggctactcccactggcaccccaacgaggtttgcaggatagaagacaggccctacatgcttcaagtgcagtcagattgggaactatgctaatgcttgtccggtggggaattctggcacatcagctcagaacaagcaacagactcctggcaagggatactctatagccagggttaatcaagtcagcgcagatgctactcctgatggtgctaacatcgcacttggtatgttttatattaatgcaattcctgcaaccatattatttgattctggtgctacacattcttttatgtctgctcgttatgccaacacaaatgagataccac

SEQ ID NO: 103450 - DNA, 646 bp, Zea Mays
gtgcgtttgaattggagttttaatcttaaagccaaagttgactttgaaatttagaagcaaaatagaaataaaacataaaacaaaacataaaaaaaacaaatgaactccacctgggaccaagaggctaatgcatgttggccgaagtcctaatcgcagcccatgtgcacgttcgttttttttcttctttgttgtgttggtcatattctgtttcatcctgacaaagggtatgacattagccaggcatgtgggccccagctggcagattcatcccctttacttggatcagctcgtgcggtactcgtactgaatgccggttaatccggatctgagtgaaacaaactcaactttgtgggcgagatcgtgccccgccgttcgggtcctaagattcctcagggctataaagaaaagcatcaagcagcctcttccatcctgccatcgcgattcacgcggccggctcaacaaaccccgtaaagcgctcgtcaccaacgccgtagataccgcctcggaactcgccagggccgttcctacttcgacgagattcgttccatgccgaggggtatttagacggggccacccaggagagaaagagagggatagagagatctgctcgccgccatatttgtgcagctcgtgctctggatttgtt

SEQ ID NO: 103451 - DNA, 373 bp, Zea Mays
tttgaagtttgaatgagggtgaacatgtttgatctttggaagagggttggttttggacttagaaaaattctgattttccttttatgctcaactctttggtgaaccttttggggtttttctgaaacctttttggggtcacattcttactatttttagtagggtattaggtgtactacaatcgttataattggcccaagtcagatcatgtgatttttatagccttttggtcatactcacttatagtgctccaattgtccaaaggggtttgcattagggtttgggcaattctccccattatatgtgcatgataagccaaggcatgacttctaagatgggttgcacttacttaggatcttgattcccaagtttggcg

SEQ ID NO: 103452 - DNA, 649 bp, Zea Mays
gttgttgtcattggctttcccacattgttctgtaccaacatcttacaaggaagctaagaaacttattaaagcattgggacttggatatgagtcaatccatgtgtgtcctaacaattgtgttttgtttcgaaaggattatgcaaaaaataatgagtgcccagtgtgtggttcatcaagatggaaagatggtgaacaaagaaataagagtcctcagaaggtgttgcggcattttcatttgattcctagattgaaggggatgtttgcttcaaaaaaaactctgaggatgcacaatggcacaagttgaagaggaaagaagtggaaaatgagcttagccatccagctgatggtcaggcatggaaagactttgatagaaaacataattggtttggagaagatcctagaaatataaggcttgggcttgccatggacggttttaatccctttggcaaaatgagctcctcttacagtacgtggccagtttttgctatcccttataactttcctccgtgggtatgtatggagcaatggaacttcatgatgtgtctactcatccctggtcgggaatgtacgggaaaagattttgatgtatttctacaaccactagttgatgagttacaacaactttggttgggtgtttctacttttgatg

SEQ ID NO: 103453 - DNA, 469 bp, Zea Mays
cagatatgagcaataataatcttgaggcagtgacactccttataatcttccttcgaatctccagagcttgtgagtcatttagttatgtttatatgtgtacttaactattcccatttatgttttaaaaatatttttgggggtcttacttacctgctatttagaaatcttgttgtaaataacttcatgtgggacagtaccttactccatcttccccttactgacttgtaagttcatccttaccacctactctatttacaagtttacgttcttaaaccaacatttagcaatctttgcagaaatgtcaaaaacaaccaattcaccggttgagtacctgataaactaaaggggatcgataatctccaataagtacctttactgcaacagttgtggtgacttttatttgacacactatgttttgtataaaaccggctcagggcttttttaaatcctagatccgccaccgtccgca

SEQ ID NO: 103454 - DNA, 465 bp, Zea Mays
tcaggctgatctcaacatgaggcagagaagatggctagagctgatcaaggactacgacttggaggtacactaccacctagggaaagccaatgtagtagctgatgccttgagtcggaagtcacaatgcaattgtgttatgatggattctcgcatcaacaccccgtgtgatgagttgaacaaaatgaagattgaagtgattccttctggtgctttgtgtcacattttcgtcgagccaaatttgcgagaccaaataatcatggcccaactcagtgacaagggaatgcaaatcattaaagagaacctccatcagaagacagaaaagtataagtgtttccgccaagatgggaagggtatattgtggtttgaaagcagattggtggttcctaaaaataaggatctcaagaagaaaatcttggatgaagctcatctctccaaattctccatgcatccaggaagcaccaaaat

SEQ ID NO: 103455 - DNA, 368 bp, Zea Mays
ttttttaatacaactttacttatatttccttctaaagaccctcgttctcaagctaacacttcaacgaagtggtaaattgagaatgaaggttcagattttttaacttatgttgccttgtttttaatgtcatgtagcaattaaaaacaagatcacaacattggcgtccacctccggtgaactcatttctgcaaccacaacaagcttcatcatggcaccaaagaagtcagcagcagctagctctgtcctcacatccttggacatgaaccagggagaagaagcattgcagcaggcacacaaccaaaagaggaaggcagtcagtccgactcaaaagacgaagcacttgatcaagagatacaaaacctagaggc

SEQ ID NO: 103456 - DNA, 480 bp, Zea Mays
gttccagattccaccatctctcacatcaccgacgagcgccacagccacgagcaatagttggtatcaaagacaggatcctcagcgtgtgccgctattacttttcgtttaccgttggtcgccgccgtatacgttgtgcgttggtgagtttctgtcgtttgttgcgtagcatcgacgacgacggtcgagttcctctaaatcccacgctactcggtgtgattcgcgggcagtcatcacggtgccgccaaaaccccagtccaaaccaaattcgtgttggcggcgatggagggggcgtgatagggcgatgcagatcgatggaaccatgtcaccgagagcatcgacttgttgttcaccaagatggcgatcttcaacacgtccaagagcaaatgcacgtgaatcaagacttgggcgtcaaggccatggagcaagtcctgaaggacaaatctctcctcaccaagcagttggaagccaccggtaaagcag

SEQ ID NO: 103457 - DNA, 451 bp, Zea Mays
ggtggaacacaagttatgaagcatcttaccccgcatttacaaggttcttaccagcactacaggtggcaaacggtgaccggtgtgactatctaacgagcgtgggtgtgattgcaaaggagtacctgttctgctcgagagaaagttggagctctgggaaggctgactaaatatatatatgtggcacacaagtcagtaacaaatagcaatgctgaataagtgttccaagtactcgtcctagttgctgacccagaaaatgtaatagaacagttggaccaaggcacaagaaaggaggtacaagtatctaggtgcagcaagaaaacaggcttggggcaaaataatcacagaggtgcacagaacactaacgtttttgcttatgtgctactcttttttctctctttttcttgcgattttttttcaaatattttttttatatttttttattttgcagcag

SEQ ID NO: 103458 - DNA, 358 bp, Zea Mays
gctcactcagtccagatttcagaaaataagatcaaactttgtatacctttccacaagcaatagaggggagggtccttggtaatccttgagacggtaacaaagcatgatttaaagtttcagtagcaatatgtgcacatcgccgtttttgaaaagtgacatcgaacagggatcaatggaaagacactctagcccccacctgaaccctccctactgcgacttgatagtatttaagattgcaaagagtcattgaacaaaaaaaggggggcatcataatgataaaatgctggtaactgtaaactgaagaaaaatcacaaaggtataagttttcgtacaaataatgcttcatggtatcataaca

SEQ ID NO: 103459 - DNA, 341 bp, Zea Mays
gcggtcgcagctgacgtgtgagtagttgcatgctgctggactctggagctggatggactaggcgaagttgtctgttattaagggtttttaggactgatggaaaggacaccggtgcagccaggagcttatcccatctgtagcgcgagcggcgccgtacaggttttgttttgacgctgcgtcagctcacgctcatctcatactatctggatatgcatgggtgattgcacgagcgataagcttgaaaagtctatttccctcctgggttttagaataaactcgaggattacaatgcctggtgggttgccgttaagttgctcctccttgctgtggatgaggtttcc

SEQ ID NO: 103460 - DNA, 507 bp, Zea Mays
ctcataagcttctcccttctcttctcatcagctttcacataaaaccattcacttgtctagccagtgggccacttggtgcggtatccttttggtatgcaaaattgtagcatccaaagttcttttgcagaccgtctgctctcgccttggtctagtaatggagttctggactctacagaatccttcaacattagcactccttccttggcttcagagagcccatatgtacacactaagcttgactatagcatttggagtcagttgatgaagatagatttcaaatttcttcaaaacttcacccatcatttcatacagagggaactgaagccctgctctgaagaagctcttaaaaacaacaacttcatcatatcttggctttggaaccacttcgtctctggcgaaccttatcaactcatcatcatttttccaaaatatccaagcttcttcattaaaactaaatcttctaccttcatagtggatttcccaaattcaatttggctaggcttgctc

SEQ ID NO: 103461 - DNA, 660 bp, Zea Mays
gtgagagtaatggaacagaagtttgggttaattcgatgcacgaagacgcaaaagccccaattcgtagctcagcagctaagagggcctgccagtacctggtgggcaaatttctcagcaatccagcctgttggacatcatattacctgggatgagttcaagttggcattccgggagcattatgttccggagggagagctccagatgaaactagaagaatttatccggttaaggtaaggaggagatacggtgatgcagtatctcaacaagttcaaccatctctctcagtatgccattgaccaggtggataccgacttgaagaaaaagaattgttttatgagggggctcaatgacaggcttcagcgggaaatggcaacatgcttgtacctcacctacagtaaggctgtcagtacaacactagaagtggaagccgaaaatccggggcatagaaaatcaaaggggtttggaggtgaaaggtcgcatcaaggacctcagaagagaaccaggttggtgatccgaccttttaatcaaaatcgttcttcgcctcgcccaccttcatatccattcaagcagcccgtctttattcgtcccactactgcccccgctcctaccaatcagccgagtgcccctggtactcgtttccctgtccttcccagttcctca

SEQ ID NO: 103462 - DNA, 521 bp, Zea Mays
cttgagtcacccccctcttattatgtcgtgtgtcatgtatagtggtctgtatattttgctagcgaagtcctctatgatgccatggcaaggtaccttaagacgtagaagatttgtacataatccttgttgcatcctaaaagttgtgccattatttaatttccaagctgcattcaatcctagtggttacatccttcccactattagcgatacttcataacccgcattcaatagaatgcatcacaaagtgggaggcaaagccggcggagatcaacatcaactttgtccccctaccatgtagtcaaaagtcaatctcttgctaatttcatggctgaatggacccgggttcacacaaccaccaaaccgatgtcagattcccacccaagctagacccgacctacttaacatcacaaggggttggctttatttgttccatgggccccaggatatgaggtttaataagtttgaagagcttagcatagaaaggtcccaaagtagttttgcctcaaactctaggggtctta

SEQ ID NO: 103463 - DNA, 694 bp, Zea Mays
gcaattcccagtcaactgaacaaaaaactctgtccaatttgacaaggacaggggcttcacgctggtttgaccaagtaaagcggcctccatgcagggggatctccttaagagcaacatcttcaattaatcttctgaatcgatgcatcataggtcgattaagatttgaattatttttatcatacgcctgaagaataatattgaaatcccaaactacaagccacggcccattgcagacattcctgatatacctcagctcttgaaggaacataaccttttcatgatcatcttggggcccatacacacaagttagccaccagcaggtgccattctctttgcggaattagatagaaacactacgattatcaattctggaagatccagtgaaacccaaatgacttttccatgccaccacaataccaccactggctccaactgaagggagaaacacaaaatcagcaaaatctgcacctaaccacgagagaatagagaatctagagatctcttccattttggtttcctggatacaaactacctctgcccaaaacgaagaaaccagctctctcacaacattttgccaagaggacgagttgagccctctcacattcccacaaataatttttgatggatccattaaacaaacatcatcaacgcatccacaaggggaggagggggaaaagcctgactagcagatccc

SEQ ID NO: 103464 - DNA, 496 bp, Zea Mays
gaagtctctcgccaagaaaatggccaacatgcaacattacaatacaagttacagttacatacacacggcgagggcaccatatactacatcggctcaaccttcgggatgatacccatctccctataattgaatagcattatcctcaactcctcacactcaaaaagatttcgcagatccccctcacctatgctcgccccagtcgacgaggataacaattctcgtttaccaatccggtctactcgaagacggccatgctccatccccatacgacggcgcctaccacttcgcgaaaactcacccacactgtgtttcgacaccacccttcgccgcctgtgctcagcactcgcactaggaggatcagcagcctcaccaacctccgcacgtggtgaagactccgctgcggccacatttaacgcagcaaaataatccaatccttcattcgaggactcctccgtccaggaaaacgaactcccagactcaccatcagacacaaaac

SEQ ID NO: 103465 - DNA, 360 bp, Zea Mays
tcggataaaaccttagattattttgttgcgttggatgtggctgcggcggagacttcgccgcgtatggagggtgccggggatcttcctagtgcgggtgccgggtgtaggcggcgaagggtggtgggaaaacatagtgtggtgacttttcgcggagtggcaggcgccgtcgtatggggatggagcgtggccatctccgtgtaaaccgggttgataaacgagaattgttgtccttgccggctggggcgagcataggcgagggggatcttcggaagctttttgagggtgaggaattgaggataatgctgtttaattacaggaagatgggtatcattccgaaggttgagccgatgtaataggcga

SEQ ID NO: 103466 - DNA, 363 bp, Zea Mays
tagaatgaaaagagaaattgccaagtacatatctgagtgtgatacttgccagagaattaaagctagtcacttgaaggcagcaggccatttgcaaccccttcccataccatcttggaaatgggaggacatttgcatggacttcatagtgggattacccaatacctctagacatcatgattctatttgggttatcgtggacaggctaaccaagactgctcatttcttgccagtgcataccaaccacagggcagagaagtacgctgaaatttatgttgatcagatagtaaggttgcatggtattcccaagaccatcatatccgacagaggagcaccctttgtggcacgattttgggagcaattgca

SEQ ID NO: 103467 - DNA, 340 bp, Zea Mays
cttccaataactaccatgcaacactcattcaaattgactcagccggtggtagaattcgagccgatagcatttgcttgaatgtaagtgtgaaaataagggggatagtgtttcccgctaatctcatagtaatgggtactcagggaatagatgtcatcctagggatgaattggctagacaagtatcagacagttatcagttgtgataagaggacaatcaagttgatgtccccactaggagaggaagtggtgaccgagttggtcccgcctgagctaaagaaaggaagttgttatcagatggctgttgatagcagtgaagcagatccacttgggattatcaagat

SEQ ID NO: 103468 - DNA, 467 bp, Zea Mays
gtatggatccgaagcaatgacgccgcaagaattaaagcacgggtccccctgaacaaacaagttagccatccccgaagtcgacgaaccaacctccaaagatctcatcaacggagaccacgttctcgccctgcaggccctcaacaagtaccaggtccagatcaaagcatggcgtgacaacacagtcgtcccaagagaattcagcgaaagggacctcgtacttgtaaggaccacccggacagagtcccggggcaagctcgagccgaagtgggaagggccatacatagtcaagacaaaggcgtccccagtgcttacaggctagcaacatcatccggcgaagacctagaacattcatggaacatcgatagtcttcgcaaattttttatttaagatccaagtcccaagcgcctttgtaattctccaaactatgttatttgggcccactctcttttcctcccggggtgaggttt

SEQ ID NO: 103469 - DNA, 313 bp, Zea Mays
tagcgaacaccatatacctagtcctttagaacttactacgcataagagacttgggaactctctctgtctcacctgcttgtaacccctactacgagcattgagcaataaggtgcggtaatgctagtcaccaaagattggatgtagggacactttgcccgaactagtataaatcttgcacccactgagcacaccatccatatctagaatgtgtacacacaaatttacttatcagaactagttcgaaacaccgccagttagcgtgccaggtaggggccttacgcgttcttgacgtcctcttcttcaagttttggat

SEQ ID NO: 103470 - DNA, 495 bp, Zea Mays
aaatcacacgacagatatggctttgtacataacggcgtctgcagaaccaccaccttgagaaaacgagctaccaacgcctccagattggctagagactgtgtatccaaatcagactacaaatttgacaaaaaaatgtgcaaggtgatactcatgtggtagaaacaatatacatattgtaaacaagcaagatttgtttggggaaggacaaggttcctgatgggcaaacgacatcctcactatcagggaattgctagtttccagaaaaatgcttcctctgaacatccctggacactaacaagtacaaatatatcttcctcgatctttttcggcatcaataacattccacagaattatactaaaaaatttatccagctatcccattttagaaaaaactacttctctgccaacaatcatataaattaagactacaattatacaaggtctaaaggtcttaattaacatcaagtttcaagagatcacaagggcaaacataaa

SEQ ID NO: 103471 - DNA, 396 bp, Zea Mays
tgagtaagatctgataaaggtttggttcctaaattttggtgccttttgctccaactaaaccacatgtgataataggtcacagtgtgggtactcaggagaaacccttggtaacacatggggtgttacattattattaagcgttgcagaagcattagaatcagaatagcttcggcgcagaacgatggaagtgcaacgaagttagcttcgtcacaacaacataggagaacgacacaaggagaaggtgttatccaagttgctaagggcaaaagacaatgttgtccctatgatatttgttaactctgtgtaatttgtgagggcatgaatgtaatatcgtatgaagcagtatgactccctataaatagataaacagtgcgctgcataaagtaccttttggtg

SEQ ID NO: 103472 - DNA, 499 bp, Zea Mays
agaatgtgtggccattgcaggcttcctcggatggtgtgtctactactcctggttttgcagtccaacgcccaaagcgcgaggtagcatccagtaggtccacacctcaatttctgaattaattattaattattacaaccgcacgcatactaattaaatcagcacaggtaaaatagatatgtcgtgatcctatcgtctaggcgctccacctcagctctcctgtgatgcgattccccctccctacagctacaacttgctcaagcatgcgggaatgcagcagcagcgtagccggcatgcagtgatgctgcagggctggtagtggtacgataatgataagagtctgctgctgctggactggttgtacgatagtactactagtgatgagagggatactagctagcagctctgctttgcgttgctctgctctgccctgcgttgcgtccccgatcaaacgagagagggatggcccacgcagacgcagcagtgcccggctgtttgcatg

SEQ ID NO: 103473 - DNA, 478 bp, Zea Mays
tgcagttggataacgcagagggagtaagaaatatcacctagtggatgaactccggccactgttcactctggccgccgtgttcgcttagctcacgaccgcttcagatctacactcgctagagttatacacctcgcagccttgcaccacgtgcctcggcactttaaccacaccgtcgtgactcatgttagcccatccggtgatcgccggtgagcttgccacggtaattgccaccaatcgcgtgcgctagtgcacctccttctctccgaccgccaccgcgcaagttcaaattcactggccaccgctcatgggctctataaattgagcacaccctcggctccgttaggtattcaagcacccaatccacccgctcatgccaccaattactcaccagagcccctgaataagttcccccaattctatttttccgccatcgtgaataagctctcaccgtggtcagtgcaattcaggtccgttcttg

SEQ ID NO: 103474 - DNA, 528 bp, Zea Mays
cacggagcaagtctacgaggcgaaacaaacgaccaaacagatcggcaaggagtgaacccagactgacattatgggtccacgacggtcgtaactggacaggtcgccaccgaaccatgtccacgccatatgtacaataccaatgggggtcacgacatcaaaccctcatatcaggaaggacatgacgacacacctagcatgctcgcacatgatggagggtgacacaagcgagttgactgaacatgaaccttaaccataccgagagcatgttctgtgggacccatctgttacgacggtatgagcatagagccagctatagggacttgcatgacagatggatgtgatagggcgccgtgtgagaaatacggaagcacacgacctgttagaaggagccatactgatgaggacatcctccactattacccgttggcaaagacgcaattggcccagttgacccaattgtagtcggacggtgaccgtgtgagcctcagaattatcccatctcgcttaacttgggaggaggaagccact

SEQ ID NO: 103475 - DNA, 507 bp, Zea Mays
cccttttgcaatcaaatccaaattcttgtgaaatcagtagatccaagcacttgtgtgtgtccctgtgtgtcttttgaattcctctgcaggtcttgagctcccttgggagggtttcatacacacaaacaagccatttcaccctcgttccaaaaccccgcacgccacttgctcggtgaaatgcccaagccacacaaacttgctcaaatcaatcccagatttttccagcactttcatgacaccttaagtaacatattcgccaaatttcacgccaatctgatatcccagacaatgattttccacaaattcccatttatagcgattgattctgagccgagtgcgcaaacttcattttctccaccaaatttgaaaccaagcgcacacttcactcatattcactcatatatacttactcgttaagtatcggctcaatttcaagtcatttcatgccctatttcgaatttcaaaccttctatggcacaattccttgctcaaacgtcgttctcacgt

SEQ ID NO: 103476 - DNA, 408 bp, Zea Mays
tacttgaaaaatatcaaacaacagatttccaatttttcctatcttcttctttgcgcaagagcaatcattctaaaatttggtaactttttgcttaagggaaggggtggtagaaatttcttgaattaaatggcctttttcatgaagtaggggcaatgggtattattttgtagttttgaataggttttgcatttttctctggtggtttattccattaataatctagtaaaaatttatttgtccattgttgcacactttttggcttgcttatgatttaattggaaaatggctcaatatcaagttttatttgttcaacccacttaaaatgatgggttggggtatttatcatttttgcagtggtgtcctagtggtcacaagtctaatgaatttttcttatcaattttgaaattg

SEQ ID NO: 103477 - DNA, 346 bp, Zea Mays
catttttgttaatgagagcttagggttttgagttagggattaaggtgaatgcgctcgggtttgggttagaggctgaaattcataaatctgaatttcagatttctctagaaagcctccaattgaatggcctgtttggggtttttgaaaaattcttttggccaaactttcttactaacttttgtagcttaattagtgtatttcaacttttataattagcccaagccatgattccatgtttttcatggtgtttttaccaatttcccctttttcacttaaatggctcaattagggtcattttagggtttgggcatttttctcactttgaggtgcatgatatgattaaggc

SEQ ID NO: 103478 - DNA, 284 bp, Zea Mays
gtcaaatacaaagctaaataattacgaagttaaatctcaacagaaacgtatacctatacatctttcttgctccgcagcttctacaactctttttgcctcttctgaggcacgatgggcctcttcttcactatgcatgttagcttcatctgctatctcccttccaccgtttacccagacctcagagtaaaatttcccaccaagggcaatagcttcagttgagggttccttgatgtcatccaccgaaactgtaaattctagctgagttatagccttcgcatgttcac

SEQ ID NO: 103479 - DNA, 621 bp, Zea Mays
caaatttaggacttatgcacgacttttacaacacatcaaggtttgtgcataataactcggtgtgaattttttttcgtactgataacgaggagcgagtgacttttagctagtaaaactttgtgcattctaatgccctctttgtactctgttttgaagagtttggacaagagttgtatgatgcctttgcggaaagcttactgccattcgctgaacatgataattcgacgtgaggtggagttctatgagtacttctttgtttttaattttctcttcaatactgaaagttaaacaaaatcattgacgtgtgcttagtatacatcattaaattttctaagaaattctaggacccaaactttaaaaattgcataaaaaacaatggcttgacataacaatctcacatttattttgtagtctcgtgacttttctaatgaactccgtaatagttcaaaagcatcaaagagcagcacaccattgtttgagggtcctgcaggtgcaaaccagcctgcaagtattacagatagtcctgcagatgcatactccaagatgattactgttttcgttccacttcttgttgatgaggttgttctgtatttcattgcattatttttgttaaggcttaat

SEQ ID NO: 103480 - DNA, 430 bp, Zea Mays
aaaaaaccgaaggcttgcctttctagctcatatggtcggcatctgattcgaagcaaatggtgcctccactacttgctcgccgatagttcaatgatttcattgactctgtgatcacgttatcgagacgatcgaatgtgtcgctcaataggatagtccacaatgacccagagtccacgactatctgtgaaggtgccaaccctaggttctggccgttggccacgatcccttctaccgtcagtgaataggtcggtttagaggtggtctggaacagcggggtgtaaagaacatctgcgccctggccacggtagtcaccaagattcatgtatcttatgaccatctcattgctgggcagacagtagctgaaagctttatagttgatctgacttgaaacttgcttgaagaatgagatgcctgaggagccaaaaccaac

SEQ ID NO: 103481 - DNA, 1490 bp, Zea Mays
tgcagaagcattatgacatgctgatatccataattccatataaattctggagcatccacatttgagcacagtgtctagtcatcacatctcgtttacttgtactttgggtgtgttaacttgaacaagaatattttaccatctttatttgtttgcatttattctttgtaagttgtgttctatgatgctaggtaggtattggagaaggtgtttcaccatcagctgctacagatttaattgctaggtaagatcatatcctagtttggttcctttcttgacatttattgttgggacttcccttagtacaacatgtgtcaattttgttttctacataatggtgtatattgtggttctaatttctagcacaatatggcagcttctatattggtatttccccccatgcccctcttttaatattcagagtatgattttttttccatagctacttgtgcaaaatcatggtggtggctgcatttgtcaatcacactaattttttattataattcaagctgtttcgtatgacatacattttgaaattttgccagagtagttcaaaacttcaggctttcgttggcactcacatgcaggtccattccttggcaagaacgatcaagagcagttgctgttgtttttggtgggttgagctttggcagtgtcttagggtatgttgtattaagatatatggtcatttttatcgaaattaattaaatattccttaattgaaaaaatatacatggtccccactattttcatgatcctttgagcaacaatttacatacttccatgtatgtgctagcatgtaaaatgctgaattcaactaaattggattttcccccatctttgtatggctctaaacggtagcttacatactttctttagtaattgatggtaatgctgttttgtcctttaagtacaaagctttattcctgctcgaacttgttatgtatttggatgtaaacatagaagaatgcagtggaagttatttagaaggataaaatactaaatctattttttatgaactgcttgagactgttctgctggttttatttgtttcattcttcaaggcacatggatgaagagcaattttggcatccctagtatgatggaaaacttggttgttttctgcatcatcgcaaatcttgataactgcgcaagagtcaaggcctccttaacgatcagatgttaactttttttcttgttatcagaacaacattgctctacatttgtctgtatgactttgcagcttgaagtaatagcagaagctttgctacagttaatgttttatccgttttattacattgcagactcctgtttgcccctcccatcattcagaactttggctgggagtctgtcttttacatatttggccttcttgggattgtttggtaagcaaatatttatcagtaggtaccaaagaatctattgtgggtgaactttattttctgttgtatgcaggtgcttaggatttgaatctcttatagtgcaacggttcg

SEQ ID NO: 103482 - DNA, 895 bp, Zea Mays
ccgtttggacgcctgtataggctgccgggatgtaacaacgaaggtcatgtaatgaataagagaaacctttccagaatattgtcatccttttcatcctgagtctttctcaggtacggcaacgagctcacgtcccgacgacaatcgccggtggccaggggcatgacaatttgccatggttcccttgtggacgagtgggtcgattttggtgcttcgggtcttggtaagcacaagccgtcctagtttgtctttttgcccggctacgtgtagagcacacccggtgtgagtgtagggcaagaggttacatgtttggagttctacggtcatggcgtccactgttgttcggctcggcgccgccgttgtatggtttggaggagggagaaagcccctgcgccatccatccatggatgggcagtcacgattagagccctgaatcatgaagccgcgaccgttcgatgctagattggacgcttgtgattgaaacccgcataccccttcttgttttaattccatgcagcagatcttgagatcaacgacaccagttcgatcttagtgaataaagccacatgtcgtagatctctgatccaggggccagggtcgcgtacgggttcacgtaaatcaggatctaatctgaccctttgatttctgatcgtgcggccaagattaagtggtaccccttcgctgtggcaaattagcataagagcccctggacttttaggcaatcaacccgcagtacaagacaatatcaaaataattaccagaaggccctggattttgcagaatagaccctagagaactcttgaatagtgtccgcaacctagatagtaaataaaatgggataaattaattcagaaaaatgtttttctagtataaaataattctagaaacttgtttaatt

SEQ ID NO: 103483 - DNA, 465 bp, Zea Mays
gttgttatagagttgctcgtgacatggaccttgctagaaacatagagttgggtggctacacacagatggcaaggtggggcggtgcggcgaacgacaagaagaataggtgggatggccagcaggagcccagatgtcatggagaacgctaaggcgacatggtcgcgatggtgcctagtcatggcacagatgtggagctaggtgatgctgcatagacagagaggtgggggcgctgcacggcgatgacaaagaagatggacaggtgtgatggctggcagatgttgaagaagggcacgacagttgggtgggtacgtgcctatggtaagcgacccccacgctagggaagactataatgggcagatggagagtgtgatgactgttatgaccaattatttttagcatctagttggggagcatgtttgttggtccaatccgtaggcatggtaaagagcgccaggactaacgaac

SEQ ID NO: 103484 - DNA, 304 bp, Zea Mays
atgaagaattaactgctcctaggcaccttgaggctataaaaggaccccctgggtgccatggagtggtacccaagcaacacaccagaacatcacaagagcatacaacaaacttcgagactctgatcacactttgattcactcgagagagatttgagcacgttttgagttgagactctgtcggttttcattcatgcgcactttttctcacttgtgcgtgtggtcttgctgcatttgtgctcttgtgtgtgttgctactccctcccttactcttgttcttgattgtgatcatattgtgtaaggtgtg

SEQ ID NO: 103485 - DNA, 625 bp, Zea Mays
caacaaccataatcttatattaggcgtggagtcacatgcatcgctcttcgatcatgacatagtatcacaactatctagcaacagtggcaggcatacttgtcataggggcagttgtgtttagtcatattgatggacaacaaagtctgcgttgttattacagtgtagttggtaattgatgtagcaatatataccttataatatatcataatacactatcatgccacgtatggctatatggttactacatgtatcgaacaacagtcttgagtgtgcctactacctaagttatggcaatagtgtaccaatcaaattgtaacattgcacgacacattaaaattgatgtatagaaactcttttgtgaagtatcagtgttataaggttgttaggattaggcttagaacatggcatcatgcctctagagtcgtcatgcccttaatgggcgcctactacactcttttatcttatgaatgacttcatacttagtcactataggagtccctctatcttctcgggatgccctaggccctaggggctcagggtctagcctcttgaattgctagaggctagggaccttagcgatacatggggtgatagagagcactgagtgactaagggtgtgtcacac

SEQ ID NO: 103486 - DNA, 683 bp, Zea Mays
gggacgatcaagaagtcaaacgacgtgaaaacggcgtttgacagacaaatagagacataggatgattggaattcaaattgaggcacgaaacgatatgggattgagccgatacttcacgaataggtttatataggtcaatatgagtgaagtgtgtgcatggtttgaatttaggcgaagaaatagggttttgggcactcggctcggaaacgatcgcgcaaaacgggaattttggtgaaatttaagcctgggatctcggattggtgtgaaatttggcagggatgttgctggaagtgttgttaaagtgcctgaaaaatttgggttcaattggagcaagtttggctggtttgggcatttcaccgagcacgtggtgtgcggggatttagggtttcggtgaaaagcttatttggggtggaaaaaccctcccgaaggagctagaaacctgcaatggtgtttaaggcatacaaaggaacacattccataacaggaaaactccagatttcacagggatttgagattgcacaagggggtggtgaatagaatggcacagagactttgaaaccgagagcagggagaaagagggaaggagagtagctgctcacggaggggaagagcacgggcgaggtcgccggagcccagcggggacggtcgccgccggtggagatcgccggcgggggggaaatcgc

SEQ ID NO: 103487 - DNA, 496 bp, Zea Mays
tggtggtcctggggcgaaggaggcagatggtgaccatgcactaatcactagattgcttgaagtgtttgaggccgaaggtaaatttagcattggctcttgtaaatgaggttgaacatactatgggatataaggtgaacagtgcgatgatgtactgaacaccttctttgactaggaggattgagtaggtgacgaatcaagttccttctgcttgttatagtatgatggcatgtttttgtggtgtgccctttgtcctaaccacaaaacaagcagaatggcttccttggaggtgcattggaccttccaccaaaacttcggcctccccttatgcctctcatagcaggtggacaaaacacgttatgtgaaggttgctgctgagagcttgcttgctattgggaaattacttgctgctggcccaactgaccctgagactgggccatcttttcctcaccctgcatcagcttgtgaatgcttcgaacattcctagggtggaaccttc

SEQ ID NO: 103488 - DNA, 438 bp, Zea Mays
aaacatggccacctttttgctagctgatcaagttccagtgatcaacattaagttcaaaaatctacaaaacagaaatccctcctcatagtattgctatcaagaatcaaacttcatcagtagttcagtacaggtcatacttcagcataatataaagaccggatgtgatcaacaaaaggacccatctttattacatgcagcagaaatccatgccatacctgtcagcatggtccacagcaagaaagcaggaaaaatcattcatgcacgcccgcaataccatcttgtctcgggcacactagatctgaccgcacatgcacagtgcacttgtccaaacgagaaacggcttgcgtttagctcgagcctaaattccaggatttctacactaatgatcagaactttcccataatttcagtgcatgcatcccaatcctgtgcattcccc

SEQ ID NO: 103489 - DNA, 688 bp, Zea Mays
catatttttaggagatctaacatgaagagcattaactctacaacataagcgattcaacctctaccatgcttgaccgaacctattggctaacccttccgaaacaccctatccattcttcacatttctaatcatattgcacgtcataaacaaatttcactacacattgaccacataaacaacattatcacacataaccccaacttaaccgtagaggaagcgatgactacttcggcatgtcacctcctctctacagaccaaatcattattaactacattgatcgaacctcatatcatgcaactcttctaatttactatctcaatacaaccatatcgctgcatgcacttgagacactttcgttcaacttaacgcaaccaccaaaataatgaacttcgacacacaagtccgacactacataaaattatggtgaagcaccactaatattttgctctaaactaacatgacacaaccatttaatctctaattgttactaagatataatttaaacattccaagagacatgccagcttttgtttacttctaatttttactaactcttcttataattataaaatgggtgttattttagcaccatatgaaactatctaatttagggctggaatttttatgaggcacataggtaatgacaaatcatgtctaatgtataaatttcatatgctcaggttttat

SEQ ID NO: 103490 - DNA, 333 bp, Zea Mays
cttcgaagcattcaaagtacgggtcacttctgacagaggtctgggcgtgctattctggagcccagaggcatccgtctgattcgccaagtgggcagcggaactttctaggtaccacatcacctttgaacccagaacagcgatcaatcataggtcctggagacttcatcgttgactgacgagaccaacacgacagcaagaagagtccccagagaaagtaaggaccattcactacgatggcgcgtggtgccatgcgggggcaggcgctgtggcaataatcacttcgcccacaggcgtcaattacagattcgccgcccgcctaagcttcgccttgga

SEQ ID NO: 103491 - DNA, 399 bp, Zea Mays
cgcagaagtcgcctaagggtgcagccggactaagcacaacaagtgcgcaaaaatccgaagtctatcgcgaagactatccgcgcagaagtcgcctaaaggtgcagccggactaagcacaagcacgcaaaaatccgaagtctatcgcgaagactatccgtgcagaagtcgcctaaaggtgcagccggactaagcacaagcacgcaaaaatccgaagtctatcgcgaagactatccgcgcagaagtcgcctaaaggtgcagccggactaagcacaagcacgcaaaaatccgaagtctatcgcaagagccgcctaagggcgcatccgacccagtacaacaaaagcagaaacgacaacaagaccaattataatcatactggcacagcacaatcaatcacaccag

SEQ ID NO: 103492 - DNA, 284 bp, Zea Mays
gagcagtttgtgttatgctatatatgggtccatgaggttagtttcaaattttgacttgcgcttgaaagagcactatttctttcacaaagtttatagcaaaaccagtagggggagtcctttttatatcatgcattctcttttgctcgtcaactaaggttacaacaaaaccatattccttgcttgaaagagacatattactagggtagttgttttcttgtgcattctcttttgctcgtcaactaaatgtgattccttctgatgcaagttagcatagttgacatgaa

SEQ ID NO: 103493 - DNA, 1256 bp, Zea Mays
aaagtattaacatatccggggaaatggagacaatataatgacctgaaaatccaccaagttctctcgagtgggttgatacattttcagttaatattggtctagatgaaggaccagcagcaggatccatctgatgaagtttgttgtaacaaacttttccaacgcgcggtcaacggccagcgcgaattcggtttccttgcctatatatatatgcagccaccgtagcgttccatgcacatcttcatcttctccaaaggaaaaggaagcgctgatggtgtcttcatcttctccaaaggaaaaggaagcaatgctacctgctgtcactactcatgagaagcagggggccgattcgtccataccttgtccaaggaattcaacatcaacaaagtctttcccacctccaaataggggctcgcaacctcacggcaaacaagggaccgaagtggcggaaggaataaactgcgatccctcttgtttcatggaccaacacaagatgatcatagtcggtaaaagtgaggtccaagtcacagtcacatctgcaaccatgacggtggagcgcttcctgcgggatgtccgcggcgaggagcctaagcccctcatcgtgggtttagataccgaatggtttgaaaatgaccgtaagaagatagccctcattcaaatatgcgtcgataagaagtgccttctcttcaaggtgaacattgccggtgacatccccgacaacctcaagagtttcctggcagatgaagaccatgtttttgtcggtgttgcaattgctaatgatctggataggctacgggaaagccaccagatcgagctctccaacaaggtggagttacaggccatggcgccattcataatttcagatagacagtggaacaatgtgccaagcctggcaacactcgcacaagagttgttgggcgtggctattggaggtaaaggtacggacgtacgttacaagcattgggataacaaacagttgacagaaaaccaaatcaagtatgcatgcactgatgctgctgtaccatacatggttggggacatgatacagaaggagtatggatgtgaccttcacgtcacacaattcccttatcccagtaccaacttcatggacaacaatgaagatggggaagaagttcaaagatcacagttgcactttgtcgaagatccacaaacaaagaggattaaaacttgcccagcttgcccagctggtgcgaaacaaaagaatcggatgtggaatgaggtaatttctcatgttgtaa

SEQ ID NO: 103494 - DNA, 1020 bp, Zea Mays
gatcgatgtcgtatggccttatcatgatagcgcctcagagtttgctggtacctagctgactgaattactgtattcagtcattcttcttccaatatatcgatatcctccagtctagtagtttctgcttcggctatgttttcgaagatcagccttcgtgccccaaacctgagatcggcaagtagcactgcctccgaaccatagaccatgaagaagggagtgtttgcatgcaaagctcggctaggttgagttcttaggctccaaaccacatacggcaattctctgatccactttcctgcgaacttttcattcttgttgaagacttttttcctgagtgcttccaatatcattccattggccctttccacctgaccattggctcccgggtgtgctactgacacatatttgatctggatgcttttttgttcgcagaaatcgaagaattcaaagctagtgaaattggatcctaggtcagttatgatgttattcggtattttgaacctggatattatatcttgtatgaactccactgccttagctgaagtcagagaagaaatgggcttgtactctatccatttagtgaatttgtcgatggcaactagcacgtgagtgtatcctccctgagctttcttgaagggtccaatcatgtccagtccccagcacacaaatggccatgttacgggtatggtctgcagtcgttgtgctggtaaatgctgctgctttgataagtattggcaagcttcacacctttggaataactcggctgcatcactctttgctgttggccagtagaaaccagacctgaagaccttcccaactagagtcttggatgttgcgtgtatcccgcattgcctggcgtggatctcatctagtagttgcttcccagtggccgaaagaatgcacttcatgaggactcctgttgcgccccttctgtacagtgcttccccaatgagagtgtagtgagctgactgccttgcgatgcgttctgctgcagttttgtcatctggctcttcttcattttta

SEQ ID NO: 103495 - DNA, 509 bp, Zea Mays
cattccttcccccagaagttccggctgcgtcctgtactcgagtcctggtcggcatctgtggcaaagaacatttgaagtaaacataatgtgccagagaaaaccttccattttacattactataaaaagtaatgatacagactcgatattacataacaggatacattacccattatacaagagttcaacctattatacaatagtacaccctacaatacactactctacttttattacaccattattcctgctttccattactcttggcggcctcatcgtcaggtgtgggagtccagacgtcaaccaacctcaaagaaggagggggctcaaaaaggtctaactccccacccagcgcgcgtcccgcaacgtgagatggtccggcttctgcctcagcagggtgtgcaggcacactagggtgtaattgtgagtatagtatatggacttcctcatgcaacgtattgcagtagacctgcaggttatcaacagttgagctaagttctttaattcgggc

SEQ ID NO: 103496 - DNA, 301 bp, Zea Mays
cttcaaagaaaattcatcagcgaatcgccactgacgatgtcaagaaaccgtcagaatcagtggcacgctacctgcaaaaattgcagagagttctgacaaatcaatcaaaagcggaatcagcatctcgtggagtacgcacatggtcccaaatagacaatttcaaagtatgggaagaagatggaatgattcatactcgagaatcattacgtcttaaaatcaatatcccaatatacaagaaggaggcttatcctcctaaatttgtgaatgggaggccgttcttgacgacggtgcaactttctaa

SEQ ID NO: 103497 - DNA, 468 bp, Zea Mays
gcaaaatgaagattgaagtaattccttctggtgctttgtctcacatttctgttgagccggctttgcaagactagatcatcatggcccagctcaatgacaagggagtgcagattatcaaggagaatctccatcagaagactgagaagtataaatgtttctgccaagatggaaagggtatattgtggtttggaagcagattggtggttcctaaaaatgaggatctcaagaagagaatcttggatgaggctcatctctccaaattctccatgcatacagggagcaccaaaatgtaccacggtctaaagcccttgtattggtggataagaatgaagagggagatagcccgatatgtatcagaatgtgacacctgtcagaggataaaggcaagccacttgaaatcagctggagctttgcagcccctgtccataccttcgtggaaatgggatgacatcatcatggacttcattg

SEQ ID NO: 103498 - DNA, 457 bp, Zea Mays
caaaactggaccgtcacaaaaagcaaatgatgttaacgacactgtcaacttgcccgggcagacgacggattatgacataaaagtgccttcatccatgaccaaacctgatcgtcatagaatgaattcacttccatgacaatgcgtatttcgtcacataatggatacacatcgatgacgaaaatggatagtccgtcacaacataacaaatgtgacatgacccctatgactaattcggaatcgtcacaaaatcgtcacaaatctttatctgtgacgatacctacatatttcgtgacaaaatacgaacgtcatcgatgataagatctctactagtgccacggccctgagatcgaatgcatcacccaggagaatacgatctatggatcagattgcatcatgcgcccaggttgacggaccggatcggatcccagccgaacagatgcaccagacctaatctagc

SEQ ID NO: 103499 - DNA, 435 bp, Zea Mays
ttttactccactttttatatgggaccaaggcttgattacttaagaaaagttgcactcctattatagctttacaagtttgatgtattgaccctaggcaaattccttatgaactgaaagatataggattccaaagttgactcgatgcactagttttcagacttaggcatagggaggtatggggtgtcctttttgcaaataggtccaaacttcatcatttggcttgcaaatcctcaaatgtgagaaacacatagtttgtgatgttgtactaccttggtatttgcacttgggtccaaaagtgtacaaattttacacttagccccctagggttccaatctagggtttttaggggtcttttcagagtttttaacactttagggttttggtgctacccaagtccattaatggtgatatcttatgatcatttttaatgagctt

SEQ ID NO: 103500 - DNA, 473 bp, Zea Mays
ggacatgattctaaggggcagagtgtcaaatgttggagctcctgttgcctattctgtctggaatctgccacctcaccggtcattttctgagtttgtgtccaaccctcctgctagtaatggtggtatgggtcttagagtgcgaccctctcccgaggacattgaggctctaattgcccctcttcaaaatattcccaattatgagaagcaaactcattttgagatgccagctagcctggacgatgcagagatagatgttgtgcttagtatgttggctggggaatcttccgacttggcccatgctgagccgatggctatcacagctgggcaagaggctggcaaagcagtggagactcggaagcctgagggtgcttgcctaaagtgtccccgcctagttagtcgtctgactacacctgttgaggaaaagaagaagaagaggcagcttcggcgattgtcatgcttggaccaggatgcag

SEQ ID NO: 103501 - DNA, 306 bp, Zea Mays
ctcggcaggacgaggcagtcattggcttcgacgctgacgatcacccagtcggcgcgccaattctcccagcttgtgccaccgagggtggagatgtaggacacggccgagtccggcctcgtctgaaagtagtaggcaccaagatggtccctagccttcccagacttgaccagcacgaagaaatggtggaagagggaagtgcaaggcgccacccccacgaacatctcgcagaggtgggcaatgatggccgcctagaggatggagtgggggtgaggtgctgaagctggagcctgaactcctccaacaaca

SEQ ID NO: 103502 - DNA, 399 bp, Zea Mays
gttcccgaaaatgggcataaaggagtgcaatgcaggtgaagtacttgcacagtagaactatgttcaatactaatggcaaacgtcaaacctaaaataagatccaatccatcggattctgatatgatacagtcaactaattcatcttgtgtactacaacctaccacataaacaccacttagtagacacccttttttctttaatctagggaactgaacaaccaacttataagcaaaagatcaaagcaatgccatttcatggtattaaaaatggggttaagatgaaaaaacatgttatacggtgatgtaataaatgggtagagtttatcaggtgtaacaattttcggaacatcaagtaggacagatgcaatctggaagtgtctacccatttcctcccttcatc

SEQ ID NO: 103503 - DNA, 288 bp, Zea Mays
tttgcgatactaggtttcctataatcccctctattctaggcacaccaagatggcgtttctgtccactcaagtaaaacaccacacatcattatgccacatcatttctcaaaatataataaagaccatatgaaatttagcgaaattgcgtgagagaactgtccaaacataggttaaggttatatgacacctttttccaccatacagttgctaaaatgtaggaatataaagaattcaaagtaatagatcaacttttaaactaaaaatgatgtttccctgatgtcaatggca

SEQ ID NO: 103504 - DNA, 387 bp, Zea Mays
ggagatctgattccgaaacaacagacatgtggttacctgcgaacgacaactgactgttgggaccgatgggaggaatgactgccgcagcagaactctgcttcttccgcttgggcgccatcgcaatcttgctggtggatcgaacaagggcgaaatcttagggaaacaaatgagtggtttgaggcggaaatgtgaagttagggctcagaactcaaaagtgtacgtcgatatgagtataaatggggttttcccaggttgggcaccatttctaaaaagtgccaagtcatcactcgggaaagcgagacttctgacataactcagctgttacctctaaaacgccgacaacatcaagcaccactcggccgtcacctctaaaacgcagaaagtgtc

SEQ ID NO: 103505 - DNA, 300 bp, Zea Mays
cgggagcgaatttcaggttgggtttagaaaaatcccataccctgttccatggcaaagctcatgtttaaggttcgatcgggttgttctcacatgggctacggtgccactgtgtatgggtagtacaggggttatctcaatctgtttgagaaggccttcttaacgcaatggctggaagctgtcttgcccccacctctcctcccacaggttaattttttaggtttgactgaaaattagaaataactttagtttgtgttctgatagttctattttgactgaaccccggatttggttgctccatgc

SEQ ID NO: 103506 - DNA, 3112 bp, Zea Mays
tttgataaagttcactctagaccttaatctagcaatggttctttccaaagaagaaagatgaagacataataattttagttttttccgcaaccactcttcagccgtccacaaggatctgctgtcttgggcaatttccagaagatgtagggtcatcttggccaaagcaagttgagtagaaacattacccacagatttttggctccaggactgcaggtcctttgcaagtctcttaaatttaagggataatctctgcatgggacaagcagccaaaatagaagcattccaggaaccaaccaccacctcctgaaaaccttgcatcttgggccaaaaactctcaaaatgaaaacgcttctttcccttaaaggtctcattaagccttaggatcagaggacagtgatcagacatattagaggcagaactctgcagagaacaatcaggaaataagtcctcccaatcagaagtgtagaatactctgtccagcttgactaatgtaggaacatctctttgatttgaccaggtgaatcttcttccagtgagaggcaactccttgagggagtgattattaatccaaaaatttaagttgtccataagagttctattgatatttgaattactcttgtcatcagcgcatctgatcatattgaagtcccatgcgatcacccatgggccaggacaactggttctgaccagagaaagctcctctaaaaaagccaatttctcctcatctctatggggtccgtagacacccgagaaccaccaagcggtgttgttttctttcataaaacagattgacactgaatggttatgaattttggagtctatagcagaaatgagccctctacgccaggctatcaagatacctcctctagtaccactagaaggtaagaaaacaaaatccccaaactctgagccaagacaggaagcaacatcccagtgagagatagaattcagcttggtttcttgaatacacacaatagtaggcatcacacagtttattaatgatcggagagtatccctgcgatgagggtcattcagacccctcacattccaaaccagtatagcaaaattattcattgtgagatagaatacgacccatgtgggataatccacattacgaggcttgcagcagcccatcagctggacaaacgaggaactcctcatcagggatctcccatcgaaacaaggtagctaaagcctttatctgactgacggaaagaggcttatcaaattctctagcgcagcgttccagatcatccgcagaaacaggagcctgcccatttttcaaccctagcttcaaacaaatagtgtgagccgctgagttccccctaaggggaggaagtttggctacacgtcttgatcttcttggcacgaagttgggcgggatagactttctggctttaagctttggagatgaaggaaccgacaacacatttgtgaggggctttacgatcttgttaatgaatgtcatagccacctcctcctctgaagctatacgactttgcttggggtgttttcttcgagaatacacttgcaagaccttgcaaggctgctggaccagggcaggagatggccacataatgtccaaagagctgtgaaggctatcattctgctcaatagacaaatcatcagaatccactgagatctgagtacagactgtgtccagatgagccaagccaccatcctgagcaggttcagacaccataagagcagaagtcacagagtcatgagcttcaccaatctctgacagcactaatgagtcatccacttttgaatctgcaagagatggcgccaaaacagcaggcaccaaagcagaaactagggagccagaactcgaaacatcccacaaggtagcagagtatcggaatctctccaccctaggcgtcatccaactaatatccgaagtcatcaatagcactgcctgattaaacatacgggccagggcattaactgccaccgccccacccaaaacatccgtattaaagcatgcaagggggggcgccaaagcagccgtccttctgacagaacccgaggagccattcatcaatgaatcagagataaagggtctaaccccaggcgccgtcagctcagcatccgaagcaatcgggagagcgaggctatcaactgggccgcccttaacagagtaccagaggtcattaactgacgtctcaaccgagataccctcattaaagcatgcatggggggcgccaaagcagcagacaaactgccaggacccaaagagccaatcattaatgaagcagatatcaagggtcccatcctaggcgccgtcagctcagcgtccaatacagttgggagagcgaggctatcaactgggccgcctttatcagcattaatagaaactcgcggaccaaggcgagacttaaccgaagcacgaacagtcaagtcatggaaaccgagacgtctcttccgctgaacaatatcgcgatcatcatcagattgatccggcaatggtggatgagaaaggattgtctcacgtaccagccgatcatccaaacatgaagccaaaacggagataggatataccagtgatcggggatacaacgaatccacctcaaaagccacaggtggttcctcaacatgcagatccacaattgaagataacaatgtcggtacagggcaccatgcacgaagcttgaaaatagccctgttgttgtcatcaaaagaacttggaaggatctcatgaatcatacaaagaccaaatagaaggctctccactgtttcaaccctccaaagatgagcaggaattccataagctggggtaaggctccaccccctgaggccaaagcatgacgagaccagcgcttgatgttcagccggaggggggggacatacagagattgcccaccggaaagcacacgatccgctagctcgacacttgaaaattgaacaatgaagttgtttgacgccaccatgcgtaagtcgagcgcatcagcctcaaggttgaaacttgagatgagcgcatccaagacatctgccgcgcagaaagagccatctatagcaataaccgagacaagtaaagcacgccgaagctcttcttcagcctgagaaatgatcctggagcgcttgatgaaacacacctgacggacggaggcag

SEQ ID NO: 103507 - DNA, 608 bp, Zea Mays
ccaaccttgtcgggagcaaagttgagtgtaccttgagctttaagctttgccaatttgtttagcaatgatgtgaaccttggttcagctgtgaagttgggcctcctagagtataagcataagtagtatggcaaaacctacacttggccgttgtcaccataacccctctctcctttgatgaagcaacctcgatcttcttgaaatgcttctagcaagaagctctccttcctctcttagttgcaggagctatggcatcattctgactttttgatacttcatctccatccttgcctgccccttcaagtgaagcacatgaaggcatgcttactgataaatcatcattcatgtcaatcctgttaatttcctcttcatcctcatcagcctccaggatggcctacataaaccacatataagagttaatttgtaaatctctataatgcacttgcatattatttaccatgtgttgagtaaaaacgaagtactaacatgtctatggagggaggagcttccgacacactgttgcaatggttaccaacctttgcagattgacaatggccacacgttgttggtcttttgctaggtggcaacataggccccaccttgcgcttgtt

SEQ ID NO: 103508 - DNA, 1000 bp, Zea Mays
ggggaacatatccggtgctcaaaggggcacgttgcttacatgcacattttaaatctgtaacgtctatccaacatctaaccgaagcaccaattttacaaagaactcctttcaccttcctcctttggtcggaggggttcttaatcaaattaactgcagccgctggatgtgagatggatgtgtcagatttaaaatatgcatgtgagcaccgtacccctttgagcaccagatatgttccctatagggtgatgggttgaggcgcgacattagagtttggagctcgaggtggagcaggcgtttatgatgcgagcgtttggctgtgtgttagagttaaaatgctttgtttgatttttaacacatgactcaattcgtttgctgtgaatcagttatcggatttgatagtacaatgtcactgctgggtactgactgaattttatgctactgcctgagtagtgtgctgtacaatgtgattgcttaataatgtttggtaaagctttgttcgtctacttgtgcttggctattcacaccttggcctgtatcgtaatgtcaaattctatcaattgcattagtaactgttcttacatgtggagtgcaacaattagttgcctgtgaggtctcagttttcgtgagagttcgttaagctgatttaaccatgcacattatgatgctttgtgttatgatggttccaccttagtaattgatctgccctatgcttactagatttctgcaatagagggagcaaattactgggatgctgtgctgaaagagccattgcgtaaaccatgagctgtctctgttgtcatactgctaaaccacgagctgcatttttgtaaattgaaccctaagttattctttgaaacctgactgggatgcatttgaccatttgctgctgtgctatattttgataggcactgtagtatgctatatatccctgtgaattctggcctttttgtaaacctagttttttaaagtagtagtgctttggtttcactgtgtcaactga

SEQ ID NO: 103509 - DNA, 296 bp, Zea Mays
cctctcatctaatcgcagtcgttcttatcgagatctacagtcatatgcccaactcctacaccgtcctatactctgtcgtcgatttccatatcaatggaccccacgacttcctgctcccatcaacgcaacacggcagcggaagcagggctccacggtggtgctccagtcgatgttcacctgggttggtggcgacagtgacgttgtccacgtcgaagggcgacttggctgtcttcatgaagtccggcgacaaattctcgtagccccgcggtcgcccacgctccacaacccaccctagc

SEQ ID NO: 103510 - DNA, 826 bp, Zea Mays
cttacttgtaatgttttgctactgctgttacggtgttagatgtttccatgtttgcttacttgtaatgttttgctactgctgttatggtgttagatgtttccatgttgttgatgttttttgttttgtttttctaggttcttaaggaatcaagtgacgaggaaagggagcaagttgaagagatgatgaagtactaggtatttttgttttgttttgctgctgctgttacggtgttgcttacttgtaatgttttgctactgctgttacggtgttagatgtttccatgttgttgatgttttttgttttgttttctttgctgtattatttgttttgttttgctgctgttattttggtgttgcttactttcatgttttttgtttgatgtttgttttgatgtattatattgtaatgattagtattgtatgctactatgttttttttgttccatgtatgattttgttttagtttgtttttctaggttcttaaggaatcaagtgacgaggaaagggagcaagctgaagagatgatgaagtactaggtatcactccctctgcccctttgattttggttcgcatcattgtaatgtctatcatgatgtatgatttgtttgtgagttgttgatttatccttttttctagatttgtgtctgagtagcaaaattccagaagtgtttggcctcatgcaggcaactactgttatgtgagtacataaaatttatgtgtgttttttgtggaagaggtcatttttgctgttctacatccatctttctcaacaagaaaaacaagacaacatgttaaatattaacacaacaacttgtattattattttt

SEQ ID NO: 103511 - DNA, 400 bp, Zea Mays
cactgatgcggtgatagttcgggggtacttatatacacatgcctgttgtcggatggtttctaacagaaaaccctactagcacaacttttctccgcgtcttttctctttgaaattcctgtgcctcggtgactacgcttgattccgttcttgcgggaggtctcatggcgccctgaagaaaaagcaggggggtgcggcgacaatcatcccccgatcgatcccaacagccaactccccttctatggtagctgtgcctccgttgttttcgaatctgatctgcttcacctggtccagatggtgttctccgtatgaaggagttgagttcatggcacatttacaacgaatacatgttgtctaaatcctaggccggccccggattccaacctctctaagaccttgttcg

SEQ ID NO: 103512 - DNA, 326 bp, Zea Mays
aaatgctaaccctgctagttgcttatcagcaacctagatctagaagcacaagtttctagtatctcggaatctccgaatgtaatcattaaccgaatcctcatgtccttgtcgtaatgaggctaagtcaactaattctaactcataatctcctgagaaaaggtggttatgaaattttcattctaattcccccaataggtaatagagttaggtggcagggtcatgaaccatgcaaacgtggtaccagtaatgagaataattgaacgcaaaaaatcctatctatcgaccaattctcagcgggagcgcggaccgtctgcgataggcggtcg

SEQ ID NO: 103513 - DNA, 377 bp, Zea Mays
tcttctgtgactgggttgtggaatgacaggtcaagtgaatggatgcgatgggaacagggtggtggatgggggaaatggggaggctatgcagagataataaaacctccatatggcagggcctttgtcaatggcatgctgcattttcttgtcttcctatttcggacagaggaatatgtaatagttgcagtggatggccaagggaacacatgccgagtcctcccatggccatatgattttttccctgcagttggttttattggtcaatcacagggacgccttcattgtatcactcgattggttgaatgtaatcgtttcagcgaccctggtctgtcgatctgggttcttgaggactacgatacagaagagtgggttctaaa

SEQ ID NO: 103514 - DNA, 357 bp, Zea Mays
tgttaaagacgtaggaggaactagcttcagcatgaccgttgaagatatcaagggtccttctaaaagtgtactcggcgccgtgaagagatttttctttgagttatggaacaaaggtggccaacaactagctaccttggaagccaaagagtataccaagaaggttcatccttagacttgtactgccgaagcttcatttgtgaactttcttagatacatacatcgtttctctttctatagagcaaagaaatgaagaagataaagaaggtgaagaagtgataaaaggccgaagcatagttgaatcattaggccgaagagattcttgtattttgaaacaaatagttatgcagttcaagtact

SEQ ID NO: 103515 - DNA, 337 bp, Zea Mays
gcttccacgaattgcttgcgccagtgacctcttccttctccggccgccaccgcgccatcccaaattcacaggccaccacccccggagcctataaattgagtgtgccgtcgggtccgtaaggtagtcaagcacccaatccaccaagtcgtgcttccaattgctcaccagtgctcgccaatttgagatttcccccaaatcgatcccgagcaccgcgcaaagtaatctcaccgtggccagcgcacttcaggtccgttcatgtccgttgtcctcttgttttagcacccttacttgcccctgatgcctctcgaccaaaccgattaggctagaaccccttaga

SEQ ID NO: 103516 - DNA, 446 bp, Zea Mays
tttcattacctggtgaactattggaacggccctcaagaaatggcaacgtgattttttagatgatccaaagcagatattgttgcggtagggaacaattgttgaatggcaggcagcacgacgacatcttcctcctctttccatggtatactggaggacatggccgacatcaaagatctctccagtaccgcctccgcgttcatagccgaggtcaacaagcttgcccctaaggttggtatttggcacagtaccgacgcacccattcagccatccgacgtgatgcgaagatgcgatgaacaggcgcgacgtggcctcttcttcctctatccgtggcatgctggaggaaatggccaacgtcaaagacagctctagggccgtctacgtgttcatcgtcgaggtcgataaactcgcccatggttggtacttggaacagtatccacacatccatc

SEQ ID NO: 103517 - DNA, 362 bp, Zea Mays
gtccccaacacagttttgagctcccgaacgacctaaggcctaggagccatgaatgatgtaggtttcgaggcctttggtcaaaatagggcctccgatggggtcttcttccttagccccaaatttggtctaggagccaaaggagcaacaccacgagtcatagctaggaccttagtagtgcaagggccctaggcgtaacttgtagccgcccccttaggattcgtgtatgttacgatttaggggccctcaatagagcaaggggctccaatggtgcttgtttggtccctagggcctcggggggatcaagatcgcaaggggagccactggctctatcgaatagcctgagctattcatgtatgcaatct

SEQ ID NO: 103518 - DNA, 553 bp, Zea Mays
tatttcacccaatgtagccactcgaccatgcaccgggacggtcaccgctgatgcaacggaggtacatggcgatggtcttgttggcggcctcaaactgaccatctatctaagggtggaaggtggtgctcatgcacagcttgacaccaccggccatctggaacaagtcgtgccatacgacgctaatgaacaatgggtcaccgtcattgatgatagacatccgaaaaccgtggagtcagacaatcccagtgaaaaagacgcatgcgatggaggaggcagtgtaggggtggccaagaacaatgaagtgggtgtacttcaaaatgcggtcaaccaccgttagaatttttgacttgtcgtgtatgcgtgcggtgtatgggtggccaaaaacaatgaagtgggtgtacttcaaaaggcggtccaccaccgttagaatttccgacttgtcgtgtatgcgtggaaggctctcgatgaagtcaagggcaatgtctgacatatctttgggagggaacatcgagcgactaaaggagaccggccaagtgtagcgactcgatcttct

SEQ ID NO: 103519 - DNA, 737 bp, Zea Mays
attaccaccctggtaaagccaatgttgtggcagatgctttaagcaggaaagcccagtgcaattgtatgaacatggatgcaagagtcaccaccctatgtgatgagttgtgcaagctgaacctagaggtagtttcctccggtactttaggttatatttcagtggagcccaccttacaagagcaaataatcatggcacagattggtgacaagggtgttcaagtcattaaggaaatgatcaaacaggaggcagaaaaatacaaatgcttccgtcaggacagcaaaggaattctatggtttggagaccgattggttgttcccaagaaccctgagatcagaaagaagatattggatgaagctcacctttcaaaattctctatgcaccccggcagtaataagatgtatcatgacctcagatctctatattggtggaccagaatgaagagggaaattgctaagtatatatctgaatgtgacacctgccagagagtcaaggccagtcatttgaaggtagcaggcaccttacagccccttcccataccatcttggaaatgggaggagatctgcatggattttatcgtgggattgcccaatacttcccggcaccacgattctatctgggtcattgtggataggttgaccaaaatagctcatttcttgccagtgcataccacccacaagacagaaaagtatgcagaaatctatgttgatcaaataatgcgtttgcatggaattccgaag

SEQ ID NO: 103520 - DNA, 762 bp, Zea Mays
tcagaggggcacgagataacctgagaagggcttgccatgatggggtgtctcacggtagcgacggtgaccagttttggggaaatccggtgaacttgcgctctggtgaacgagaagggtcggctaagagtggactgggtttgtaacaaagagactgagcaaggggaacgctcaatttatagcgatcgtccgtgtgctttgcgaatttgggacgaaagtgcacacggtggtgaatagatgagccaccagagctcatctaccgtggcactcaacggagtaaagtctcgggatggtaactggctatctctcacgaccaacaacgacgtggtaacatggtctatggcgtgacacgaccgagatcaccgagggtccacgacaccgtcgaccgcttggccacgtcgcggagccagtgaatctcgaccgatgaactggtgtcagggactacgttcaccgcccctcctcgatcttttcaccccaacgtttatccataccgagctcactgtaatcttttccgatgagcacgaatcgcggtgtgggatcggcgatgaggtgcactatgcctctgatctttttcagtcattgtaccatcgcctaccccattcaacacgtctgacagagcaacttgaggggccttttcctttgattttcattcagcaaactaccaagtcgactataccaaagttgttccccctatataccagcttcaactttgtcacataaatcttggtcgtttactcactggatcaagcacaattcggctccaaa

SEQ ID NO: 103521 - DNA, 607 bp, Zea Mays
gagtaagcatgaagattgataataaatagttcgagtgcctttgagaatgaagtcttttattgatgatgtattttaccggttatagaatacaatgctgccccgatagcttttgaaatctagctaggggtaaaacttcctgagatgctctatattccatgaattccctatctccgtgccttccatttgagtaagtcgatatgaccctggccgagtgacttctgctaccatgaatggcccttcccatagtggcgacaatttgtgtcgtccttcccctgttagaattcggcgaaggaccaaatctcccactgcgaaggatcgatgtcgtatggccttatcatgatagcgcctcagggtttgctggtacctagctgactaaattactgtattcaatcgttcttcttccaatatatcaatatcctccagtctagtaacttctgcctcagctatgttttcgaagatcagccttggtgccccaaacctgatatcggcaggtagcactgcctccgaaccatagaccatgaagaagggagtgtttccatgcaaagctcggctaggttgagttcttaggctccaaaccacatacggcaactctctgatccactttcct

SEQ ID NO: 103522 - DNA, 539 bp, Zea Mays
caaactagcagaatgacagttctgtaaatagcgcagatttttcagcactagtagaaatcaaaggcgcgtttccaaaggagtaccagcaaacgagctcgaaatattctgaattttttatcactgatccaaaatcacaattgatggaagcacacaaaatttcacttgaaacaaagttgtattgtggcctagagaaaatcacaaaggatctctaaaattcttgaaaacacttaaacaattttttaaattatcttcccgatttttttgaatttttggaccgaaccataggccagtttgggtcaccctagaatggagtcaggaatctgctataaaatttgagctcaaacggagcaccgagcgaaacgttatgcccgttttacggaaggtaactcaagttatggttttctagggcacaaattggtaggaaccgtagcggtggctatatagcacaggggcacaaacctccctggtataagcaataggtaaacgccagatgatgaaacaaggaggggttgcaatgcaatgtggcttgcaacctaatc

SEQ ID NO: 103523 - DNA, 397 bp, Zea Mays
gtgacatgaatttcatcagcttaagttcaaatacggatacatatagagaaacatatacagtctgtctgtaatggtgatgatggttctcatgccagatattacaatgcttgctgttagacctttgctaccattctctatagatattcagttcatatgtgtagattgtctagaagagtactaaaaagacaagaaatatgctttgcaatttatctgtatggttgtgataactgtcgtgcttttgatgcattctaacgcaatgcaattgagtatctgatctgatgtttttggttctctaacattctgcaatttgttctttgttgaccattgttttctctcatctgctccaagcataaaatatcaggtactacttactataccctttgaatttgactactct

SEQ ID NO: 103524 - DNA, 590 bp, Zea Mays
gtttgcgtgtcggtttttcatcatcgcactggaattggaaatgaacgaaaagcttcactgaagaaggcggcgtttatcctgcttctcgtggagtttttaacatgtgttgtccctggccaactgtaaggcaaaacgttgaaggtgtgatactgaatatgacgatcaatccgatatgcatgagcaatttggatgtgtgtttttgtgaattctcatgcgtatgcttgaaacatgtgtctggtagtatttgagcatgtgtgcccactcttttgtggattatcatgtgtatgcttgaaacatgtgtcagcttgtatttgagcatgtgtgcccacttttttgtgaattctcatgtgtatgcttgaaacatgtgtctgctagtatttgagcaagtgtgcccattctttcgtgtgtgctctgtccatgttgtttggtgtacatctggtttgacagcggaacaggttgggcttagtgaaactggtgatcatgaacgcctgaatgtttctgttattcgtgctcatccctcacaacgaggaatagatgtgcaggcctggagctggagacaacattgaaaatttttgccaccagcagcagtt

SEQ ID NO: 103525 - DNA, 381 bp, Zea Mays
gtgtaatgtctgcatggtgggtgaagcgctcttgggcggtatgatgaagatacagataaccgaacttgccaagtgattacgcgcacctgcatgactctctgaggtcctttggacaaggacctgtaggtgggcctaatacattgggaggttccgtgacatcgaagacaccgtcggagccgaagccgataatcttgcaaccacgatgtcgaaaatcgacagacttatatcaaatgtggttgctaagaaagatgtagccacagtgccttctgataaggggaagagaattgaagagacctcttcagaagatatgaatttcaaccttcggaacttgggcggccaacagctttccgaagaggacatatcagaattgaaggaatttgc

SEQ ID NO: 103526 - DNA, 581 bp, Zea Mays
tcaccaactagcgtagttaatgagacgtacacaaagctgacgttatggccagtctgacggatacgcaaaatctactagaatgggtttcaatcgattcgtctaacccctttcgcctgcctccacctcgctcgaccccttggttcgatgcaggggggtcatcccgtgggcgtagtggagtcttaattgaattgtgatagacaaacactgcaatatctgtctgctgactcgtggccccctggggggcgaggatccgaacccaaatagtagcctatgagcctctgaaggaaacatgttgttccttgggaggcttctttttagtagcactttacgtgcaccaactagttgggtgttcttcacccctttgatcatgaattgtcaggatcttgtagtcccttgctcgggcagctcaagcctccgtgtccttttccctaggggcgatacataatgaacacgggagatcatcagacacgccagggcttcaataggctctagttcattgacaatcgttgagggggcacgacaactcgactctgggactcgtcactataagtgtgcatacctctcgacctcattctctcttt

SEQ ID NO: 103527 - DNA, 530 bp, Zea Mays
tgttcttcaggtttagtttctacttccacatggttgacctatacccgattgacggataaggcttggctcttatctcctgagacctgaccttgcttcatcgaagctggagtggtgtaagcagccctgttgggacagtagttggcataatgtccagcctatccacatttgaagcatgtcctgtttgttgatgcattaggagcaacaggtcccactggggtgcttgcttgaggaggagccgattggacctattgaggctattgtccagaactgccatgagcgagtgtgccttggggtatagaataatagggacaagtactacttccatcttgtccccggttagtagcctttcttttcatctcgcctagctaaactcgcttgtgctccagagctatagccttgtctagcagtttttggaagaacatgaatgagtgagacatcagttggtattggagtggcacgatcaatccttctagaaatagttccttctttttctcatcatcgtcaacttcaccaggagcataccgggatag

SEQ ID NO: 103528 - DNA, 328 bp, Zea Mays
gatggatgcctccgggtttctgaacagttcgcccaatcccctgtccgaggtgaccctcaccttaaacgcctcgaaatagtggcacaacttgcgcgatgccatgacgactgcgtaggaaattttttctaattccgtcatgttgcacttggaagtcgtgaggacttcggagacgtagtagactggcactgccgggtcgtgccctccctgtcttgctcttggaccaacactgcactgactgcatgtggcgaggctgcgacgtagagcagcagaggcagcaaggagtcggggctggtaagaattgctaattctgataggtgttgcttgagtg

SEQ ID NO: 103529 - DNA, 553 bp, Zea Mays
atgaagggtttgctataaatcattatagcaaagttgtagagctactatagtagtctaagtttgattaagtgacttagcccaagaactgtatagaaattggggtaaattgccctagaagtcgggctgtcagtcgggtcttgcacttaaaccagactgtctgtggtttctaaacgactttagagccgagttgtgcttaatgtagggagtaactgtacaagatctttatgacaaagttggagctggtatataggggaacaactttggtatagtcgagttggtagttcgctgtatgaaaatcgacgagaaatgcccctgaagttgctctatcagacgtgctgaatggaaatcggcatggtacagtaacctgcaaaagatctcaggttcagggaaccttgccaccgacaatctccgcacggtgattcgggttggctgtagtgattcgtgctcaatacgggtgagatgttaccgcgtggatgaaaagatctgtgggggtggattgaaccggtctcaccgtacccacttgcccgacgacgtggtcgcgtgaccaccgccg

SEQ ID NO: 103530 - DNA, 692 bp, Zea Mays
gggaaactagcaccaggggcactcggctgagttgttgaggtgggggcagtggcagggcggatgaatacaggctatttaaaggggtaggagggtggacgaggtgaagaacggtattgattgaaaggtcggatcaccaacctttgtcgctttttaggcccctggttggacatgtcacctccaaagccctttgacttccctgggcctgcatacttcgcttcaactgccagcgcggtgctgacagccctgctgtaggagaggtcgaggcaggtggccatcttccattgtagccggtcattaaggcccctcataaaatagttcctctttttcaggtcagtgttgacctggtcaatggcgtactgggacaaatgattgaacttgttgagatattgtgtaacagtatctccaccttgcttaagcttcatgaattcttcttgcttgatatggagcactcgctctggaatgtagtgctcccgaaatgccaatttaaattcgtcccaggtgacttgatggccggcatgctggatggccacataatttcctcacaaggtgctggcacggcctcttaactgctgagccgcaaataatggcttctgggtcttcgtgcatcggaggagtccaaacttctgctcaatgacccgaatccattcgtcagcttcgaggggatcttcggccttgacgaatagtgggggatg

SEQ ID NO: 103531 - DNA, 1575 bp, Zea Mays
gcagtcaaaggtgacggtgccacgtagggcacgaaggaggtcgccgggaccgatggtaaggagagagggacgtcgacggaatcgacatcgaggagagtcgaggtcaggaggtggggaactaacaagggggaaagtgtcctcatcagaaacaacatgtcgagagatgatgcgatgggtcagacgatcgaggcactagtaccccttatgatcagagttcccgaggaaaatgcagcaagtggagcagggcgcaagtttgtggggagcggtggcggaggtgttagtatagcaggcgcagcaaaagacgcagagtgcgtttaaaaaggtgtggtgctgaagatgacgaaaaaaggagtgagatgactagccgccttacaggggaggcgaatccggaggtaggtggcagtgtcagtgtggagacccccatcctagtaacgagcaggaagggaggcctaaaacaggaggcttccaatgaggttagtgatggcgcaaatcatgctcccggccttgccattctgagaggtgtacggacacgacatccgcaggtgcacaccgcgtgagagagatggcatgagacatgaagttatcgaactcccgcctgttgtcacgctgaacgcccgatggtgcaaccaaattgattcaacacccatgggaagaagtgagatagggtggcaaaggtctctgacttacaggtagtgagagaagtcatctaggatgaccagatagtagttgtaaccagaaatgcttggtagcgagaatgttcaaaggtcacagtggacaagatcaaaggggcaagcggttcgagacatggaagagggtaagggtaagccaatgtggtgtccaagctgacaagcatggcatggcgaggcaaggttgtcatgggggcaagagatggtcgaggtgctcgagagtctggagagaacgttgtggttgggggcccaagacaaaggtgccaagtggagccgagacagcgacagcaagggcgtagggtgtggcaacacgggatgagggaggtggggtggggaaacgaataggatacatgggacatgtgttgtcgcatcgagcgaccaccgcatgtgaaaagatcccgtgtggtgagcccctagagatcgaacgccatagaacagtggttgttagtggtgaagcgacgaaccaagagaaggttgtgtacgatgtcgggggaaacaagtatgttgttgaggtacaatagaccacgtatgactgtattacctactgaggtgacaggcagagttgacccattaccgaaaatgacggatgaagggaaggtggtgttgtggggatgagataaagagatagtatcgaggtcaagaatggtgtggtacgaggcgccagagtcagcaacccagtcggtgggagtagcagtagtgggttgcaaagacacatgatacgaggagagtcaggggaggcacacccaaagagttgctcagatgcccactagtggcgagcagactaatggcgagcatggttgacgatgaaggagagcgaatggtggcaaacctctcacagagaactgggttcatgaccactatcgcagccttgtcaggcgttggcgaaggc

SEQ ID NO: 103532 - DNA, 413 bp, Zea Mays
atttgtttgaggtatgcgcaacattgagacatggcaaacatcccagtgcatggcttgcttaccaatcaagtaaatagtagatatgtctgcttgagttgcagctactgccacaagggttgctatgatggaggctgcccagtatatggcctctgcagttagagtatctcgactttagtgtagtttagtgcgcaacgtattaacataccatagcaatggtcagataagcctatgtcagtttgtgcatagtgtgcttgtttttgtgatatagctcaaagaaaacttgtgaaagcaaactatggcaactagaggagatatttagtgtctgagccaaaatttagatctaaattgaactaagtctttcactgtctatagattccatgtttagtgatgcctaccaatcaaaccactctgtg

SEQ ID NO: 103533 - DNA, 1569 bp, Zea Mays
gtttagcaggcattggggatggagatgcaacatcaatacaccatggaatcttaggtgttgatctgcctcgtggccacgacgcgaggaggggcaacattaggggtccatcccacaagaggggaaagtcacaacatcagtgccaccacccctatagtggcaaaccctccaaatcgggtacttcaggagggagtacactgaggtatcgggctgttcctaagcctgggttggggttggtgtttttccattgtggtgaagcgcatcgccgtgccgagtgtcagtggagtgacaggtgctctatctacagccaggatcacaaggatgtggtgtgtaggaggaatctcaatgggaaacttaaatggtagccaatgacttcttcctcttcgtagggcactgtcaacatgatgtcaagcgctgagcaacaattttctgtaccaccccctcagcagcagttctatatgcccaggactcctcaattcgtgcctatgccaggtttcactcagtacatggccgtgcccactcctgcaccgatcgctcctgtaccattttagtttggagctccacgtctgcctcatcctgtgactctgtggggttcttctgttaatttcactctgggagcttcctcttctatgggtgtttctggagcatatgtgctgccctctgcagacggcagagatcagggagacgtggtgacaggtatggtcttagttgattcgtttgatgcccatgctcttttgactctggcgctagttttttgtttgtttcggagaattttgtgtcgcgtgctagtctatcggtgtagaggatgggtcacccaattgtggttagttctgctaatggctccattagtagctgttaagtcttcctgtgttgttccatcgttcttgctgatgaggtcttttcagctaatctcgtggtgatttccctggggccatttgatgttatcttgggtatggattggttatctcagtatcgcgtagttatatcctgtttttggaagacagtgttattgcaggcaccgtcgggtagggaggtggtattcttgggaagctctcctaagtacactctttcctcgtcccaattacttctggatcgttggtcaaggaagtcatgaatccttttctccatgatggtggaaagtgaggctgccttgcgggtgcaggacatccgtgtggtgagtgattatgccgacgtgtttccagcgaagctaccaggccttccactagagcacgatgcggcttttgaaatcaagctgattccgggtacgcagcctattcataagggtacgctgcctattcataaggccccgtatcggttggctccaaagtagcaggttgaattgaagcggcaattggacgatctgctggctaagggtttcattaggcctagcaggtcaccatgggctttcccggtattgtttgttgataagaaggataaaagcaagaggttatgtgtggtttatcgtgctttaaatcaagtgacaatcaagaataattatccgctacctcatattgatgttctctttgaatagttgagaggtgtccaggtattctcaaaaattgatttgaactc

SEQ ID NO: 103534 - DNA, 655 bp, Zea Mays
ggccgattcacgcaacaaccgatgctcttctttggtttaaacctaattcaagccctaatgagtgtttcccctcaactaatttcattaacgggaccctaacacactctgttcacggtgacagcggacaccacgggtaaccgaacacgtccccggcgatcctagggactctagctcaattggatgggtcagagagtatcaggagcatccaaggatactgaaacgaggactcagaggacatgaacggacctgagatgcgctggccacggcgaggtcaaaccgctcggtgttcttgagtgatttgggggaaatcccaaattggggagttctaggggatgattcgaggcacgggttgcttcactggttgcacaactacctagcggagcaagcggggtcggcaatttatagtaggcttgagcggtggcgtccaatttcacgacaatgcgctggcggccgaagaggaagaaggttactggctttcaccgtgactgctctccgacgatcaccgggcatgcatgacgagtttcactgcgacgtggtctagcgctttagcatgtggcgcacagcggtgatcggccaacggcggcgaggtctatcccggccgcacgacgagcaagtgggtacggtgaaactcatccgcgaccgagcctgagctgat

SEQ ID NO: 103535 - DNA, 445 bp, Zea Mays
agacaaaaaaaagagatatgcttacaagaatgacgatggaacatccgtaaatggttgtagaaacattggtaacgctcctagtatgccacttcttggccgcttggcataaatcattgaatattagctggcaccagtccatctcgtggaaacgatctatttcctcagttaaaagaacctcatggttagttattccccagcttgtggtagggaacaacaacctattgaacagtaacaggaagaaggatctgatgcttagatcatcgtcaaaccctttcctcaaatgatcttgaagagctgcaacaccaaattcttctttggataaaccaagttcagcccttaaattgtttgcagcaacagcttcatcaatgcctaatgcctttcctcccccagcatttggtaaccccaaaataaggtgcaccgtctcctttgtaatttttagctcctt

SEQ ID NO: 103536 - DNA, 710 bp, Zea Mays
cagtttcctattccagagtccgagaaaaataatatcgtaacctaacagcattttgatccaatctgcttgtatcttgcccagcattttgatccaatctgcttgtatcttgcccagatccgaatccctaaacacgaattgtttaaaattctgcagtataaattccaatcaagataaatcatagccagagattcaaacagggaataattattgcgctaaaaatacatcggaaagaagattatataataattaaggaaagaaagaaagttccaatcttctatctctgccgttatttttcctaagtacgtatgctgtcccaattctggtattttacatcgttcttatctcagccacgtatccttctccctgatccaaatcaagccaacgaaggaagcttatctctttcctatgcacgtcatcttcatctattccacgtacgtttcctctggtccatccacgttgctgctcctttctttattctgagatgagcgatccctggaagcatcttccgggtgtggcatttatctcccctcacacacgttctttgcttcgcttcggcaccgcacaggccctgctccatcgtcacttgtccctgcgctgacgctcgcatgctgctacgctcgctgtggctaccggtggtcgagctcctccctttggccgcgctctccttcgcttgtgccttacccatcgagctccagcgtttgccagcgtag

SEQ ID NO: 103537 - DNA, 348 bp, Zea Mays
gcgccagcagatttctctggtagagtcgcggacggtccgaccatctggcctagatggtccaccgaccacagagatgatattattgcgcttgttcaaaagaatttgtattttgaaacccaaagcgttgttagccctcatgcaaatgcgaacgtttatgctctacgaggcactaagttttacaccgatcaagttcattgacccctcttaatagtacaactgtctatcctattaatccggccaatttcttctctaaacacctactgactggcaaaaacaaaaacctatattttacctttgccttcacttgatccacaatcaatggttataaggcacaaagactttactgtt

SEQ ID NO: 103538 - DNA, 613 bp, Zea Mays
gaaaaatgtgtgcttaaacatgagaacattttttttacatcagatgtgttatgtttatggattaaatctggtattatttttctgcttttatttccgtagtaaataattagcagaaagatatgaaggatatattgtgcattcttaaatcgctctaaatatttatattgtgttgagcttttaaactcacgatgagtgattaaattgtatagtgggtactcggacacgtcgaccaggctgcgttattaatcggctaagttatggcatcaactatgcattggctgcgtcctggcaacacgacgcattatttgtgtcgtacgaacttggctgcgtcatgtgattgctagcactctcgtttattcggacagctcccgttgagtcgaaccgacatcactgagtcacgtatttttcgcatgccctgtaggcactgtatgtctgccgtgatcattgagccacaattgcgtctgatgcgcacgttgtgtggaattatcgtgtaccccgattaccgagccataattgtgcatgttacatttattacgaaggcttgttgtgttgtcgtggtcctgatggccgcgcacgcgttgaccccagatacgctagagcttgtactcgcgtg

SEQ ID NO: 103539 - DNA, 815 bp, Zea Mays
tgttatttgatactggggcaacacattcattcattaatgcatcatgggtagaagcacataatcttccaatcactaccatatcaacacccattcaaattgactcagccggtggtagaattcgagccgatagcatttgtttgaatgtaagtgtggaaataagggggatagtgtttcccgctaacctcatagtaacgggtactcagggaatagatgtcatcctagggatgaattggctagataagtatcaggcagttatcagttgtgataagaggacaatcaagttgatgtccccactaggagaggaagtggtgaccgagttagtcccgcctgagccaaagaaaggaagttgttatcagatggctattgatagtagtgaagcagatccactcgagattatcaaggttgtgtccgagttcccagatgtgttcccaaaggacttaccaggcatgccacccaaacgaaaagttgagtttgtcatagagcttcttcctggaaccgcccccatctttaagagagcttacaaggtatctggaccagagttggttgaactcaagaagcagatcgatgagctgtcagagaaaggttatataaggccaagcacctcaccttgggccgcccctgtcctgttcgtggagaagaaggatggcactagaaggatgtgcatcgattatcaagctctgaatgaggtcacgattaagaacaagtaccccttgccccgaatagaagatatgttcgaccagttgagaggagccagcatgttctcaaagatagatctgaggtcaggttatcatcagcttaggattcgaccctcagac

SEQ ID NO: 103540 - DNA, 338 bp, Zea Mays
ggaacacatctgggaactcggacacaaccttgataatctccagtggatctgcttcactgctatcaatagccatctgataacaacttcctttctttggctcaggagggactaactcggtcaccacttcctctcctagtggggacatcaacttgattgtcctcttatcacaactgataactgcctgatacttatctagccaattcatccctaggatgacatctattcctgagtacccattactatgagattagcgggaaacgctatccccttatttccacacttacattcaagcaaatgctattggttcaaattctaccatcggctgagtcaatttgaat

SEQ ID NO: 103541 - DNA, 577 bp, Zea Mays
atatgaaaccatcttcgtatcatatttcaaaaagacgtattgtgaaaaaatgtactaaatagtaaattcagcttagtttcatgatatatataaaatgtaaaacttatctttgtaacttgctacagatggtaaaatagaccaacatgtgattcgatcattaatgtcacacaacatatattttgctttaattcctatcattcacgcatcaagggctttagtaagctatacctatcctatgttgaatatatcagtacttttacatttatattgtcaaactttaaaaactcggtgacttcaaactgtctcccacgggtagagtaaaatatggatacgtgactgttgataatattgtttgatactgtttgtagagtgaaatttgaaatagaggatgtaataggacatcggctggagataaccttagatatttggactcaacaaaggaaactcaacatctaaattgcagtcctcacctgaaccctaactagattcagcctcccggtcccccaacccaaacccttgctgcctccgcctccttctgttctgccaccgctaccgcaacaacgatggcgacaagcac

SEQ ID NO: 103542 - DNA, 876 bp, Zea Mays
caggtatttgccccctgccggattggtcgacctttgtggccgagtggtccgacaatcttgctgggcctgtgcctggtgaccggattgaggggcactcaatcggtctagtactggaggtgccaacccattgaatacagatgtttggggtgccccccaagcgaggtactgtggcatcccaaatggaaatggtggcatgctccacatttgattcgagacatatggtggcggtatgtatttatattgatatgacacaggaggatatggaggtggaggtgctcatgcagacacattaggtcttaattgaacattatgacctcccgtcctttccgattggtgaggtggtccaattgggcttacctgctatcgttcctgagtaggtgagcgaggtcgctttggtggccggtcacttgggtcggccttctttttcacatatttagacaataattgatcaaaggtcgggccagatttgaccaatcgaccagctgccttgactgtgttagttttccacgtacctatttttggtcgtcgtggtttgaaggtacatggtcattgcggctcctgggcgttgccagaccgtctgcttaaatgatctggactatccggtgatgtcccggaccatccgcgtctatgtgccggatcgtccgcgatgcagggacgcgcgcccggttacctacttgtgcctgcccttgacgttggagatagtgatggtaacatttagagtttcccctccaacagcagtcttttctgccaccactttcttgcaagaacttttattattttcattggcctttcacgcgtcgccgatgatgaccttcttgcctttgcccttatcggccacgctgggccaaatcaggaattttttgtcatcgaagtcga

SEQ ID NO: 103543 - DNA, 397 bp, Zea Mays
tgcaggggacaacaggtttatgggcgggcaggggggtaatgccgcagatcacgactgtcgatcgatccgcgtccgcatcgctcggagctaaccgcagaccatagaagaatacgtagtggtcccagctgacagcgacagtggaggatacgctggtgatgtcacccctgacatcacaacgtcattagctggctgaaaaaccataaactatcgcggctacgtgactatgtggctgctaggcgggcccatctcgtcagtgccagtcgcacgttcagccggctcacgtcgcggcgcgcgcaaggcgatgggccgaggcgcgggagagcaagttttaaatgggccaaaagtgaggcaggcggcccgcgaagcttttattcttttctcttttttttctttctat

SEQ ID NO: 103544 - DNA, 544 bp, Zea Mays
agaagatggctagaactgatcaaagattatgaccttgagatccattaccaccccggaaaggccaacgtggtagcagatgccctcagccgaaaacctttcgggataaagggaaccaactttttagaagattggaagaaggaatcagctcagctaaatgcatgtctgggaaacaacgacaacctagaagtcaagccaatgctagaagacctcatatgcaaagctcaacgcctggacgcggagacagcaggacttatagcaaaagctcgcaaagaacaacttccggacctcaggacagatgaacaaggagtcctttggttcaagaactgtctgtgtgtaccaaaaggagaggcacgagaagttctgctcaatgaagctcacaactcagcctactccatccacccaggaaccaccaagatgtacctagacctcaaaaccagatactggtggagagggatgaagaaagagatagcacaatatgtggcccggtgtgacacttgccaacgaacaaaagccgagcaccagaaacctgcaggcctactgcaac

SEQ ID NO: 103545 - DNA, 384 bp, Zea Mays
gtgacacggtaagcattacagagctatgagagtgctcaaacgaggaagcaggggacagggactgaccgaaaaagggctggccgcggcgaggtgttcttcgcggtggcggagacttgatttgggggaagtttgaaattctagagctcggttgaacgattacgggtgggagtgggtgctaaggcttcacgatgacatagcgcagctaccccggccatcaatttatagagggcatcgacggtggccgggaatttgaagaaggacgcgcggcggtcggaggagaggaagggcacttgagcacgtgaatccgtgtccatcgtcgtggcaagctcaccggcgatgatctaacggctgtaaagagtcacggtgacgcgacagaggtgctcg

SEQ ID NO: 103546 - DNA, 290 bp, Zea Mays
tccataagactaggactcatctgatcctcttcaatagaggggtgctaaagatggttcacatcagataaggtttgtgtggtccccgttttttcacgcccgtgacgcgctcacttcagaaacattctcaagcaagagtttttgcttaggcgttgcttcaacaatgccttttcatcattgttctttttatccttcataatagacaacagactagtcatatttgactctaaaggacttaaagcagtgatagatagaggctttgtcattgcctctaatatttgagtagcccccag

SEQ ID NO: 103547 - DNA, 362 bp, Zea Mays
aaggtttagagttgtacacatgacctttcgaaggtctattgagaccatcagcaaatacttcagggaagtattgtatgctgttgatgaactgagaaatgaaatgatcttgccaccttcaactgctacaccaaccaaaattagagatagccacagatggtacccctatttcaaggtcagccatccaaacacaccattactaatcccttccttttcatgtgtagggtttgtagtaacaaatgtttgccctaatgtgtaggactgtattggtgccattgatggcactcatgtgctagcaagagttcttagaaatcagagagctgccttccttggcaagaaacacaccacaacatagaacatcttag

SEQ ID NO: 103548 - DNA, 288 bp, Zea Mays
tttgtactgaactgatatcatctggtagcttttggttggcggatcgcatggggtcttatttggttgcgatgtcggtgccggcgtgccgcaaagggactgaactttgtacacacatgccctgttcaacgtccatggattgcttgctgtgtcatctctgcgttcgcacgccgcaatgtgtgacagctagtacgtacgtgtagcatctaatgacatgcgattacgctgtcaatgcgtgtggttatgctaatgttttgtgtgtgtagacttcgacctgttcgccatctgctg

SEQ ID NO: 103549 - DNA, 432 bp, Zea Mays
gggggggaaataaactagactgatccacaaccctccgagctgaagaagaacaggcacagccgaaacagaggtcgtcatcagcgcgcagcaccaccgagtacggagccacgaaaacgaactctgatcagccagtgtgcattgccggtaagctggaagcctcgaccgttgcttcgtggcagcttccactgttggagctgtatcagacacgtcagtcaatagccagtgacgaagccatgggcccacagcggagagtgtttcagatggagccgtggatggatcagagtgacgcttgaagatatgcgaccaggtccaagatctggacgaggaaacaggagccgtgcattcgcatacccagcatcatcagtggacagctaggaacttggtccatccatactccttttctttttctttccagattagggcttgttcggt

SEQ ID NO: 103550 - DNA, 580 bp, Zea Mays
cagttgagccgatgagcatcacaagcaaaagagggtgtagaaacacgaacaaaaaggactaaagcggacctgtgggtggctggccacgacgcggtgcctcacggcggcacagatgaccgatttggggaaaaatccaaattcgggcgctacagtggatgatttgaggcgagaagcggtgtgttgggcgcgtaacaagtaggcggagcaggggttgcctccagtttatagaccctagctgagcttatcatgaatttcggattgggatcgagttcaccgcggcctggatatttctatggtggcctgttcaccgtggcacgcgagagggaaatggttcacggatggtaaccggttgcttgccatgaccacgaaagtacggtgaaataggcgactatgtgtctttcactgcgatcacggcaaacaccggcggtgatatttcactaaccgcacggcaagtgggcatggcgatgatctagctcaggcctacgttcttctcacccaagatcttttcaccctccatggttatccacttcacacagggcacaaatcgcggcggccggcgtgaatcgcagcgcggagatca

SEQ ID NO: 103551 - DNA, 1399 bp, Zea Mays
ccggattacaggtgtcgcggcccggcgtctgctcgtacagttggtttccttggctggtaggagtcgtggtgcatggtcacggccgcgccggcaggaccgcagcagaagtgatcggggagcgctcttggttgtggcggcggctccttggctgcggggtttgggatcctaggaagtaagcgtttggaggccagaagattcctgcatgtttaggtgagtatgcttgatgtggcattgtgcgtttcttatgtgtaggtttttccaggggaggattttggcgattgatagattgcatattggtgcggctttcatgatagtcggtgaatggtaggaacggctgtcgtgttttgtttgtgtgattctcctctgtcgcaggcgcaacgtgtgatttgttttggatcgcatattctctcactctctaaatcatcacacgtggacaattttcgtgaacgtgattcgcttcaatttggtccaaatttgcatattattacaaaaaaaaaccgttttagagtttaagcaaaactcatccgtcattgcattaagttttttttcttacgtgctttaaccttatgtacctttactaagtctaaaccgatcgcagacgattaattatatcggtgttcaagttaaaacttaaatatcactaaggaaaccttaccattggtttcagcaggtaatggcgtctactgcaaaggaaaaaacaaaggtgaatattgttgtgattgcattaccttaatcgcattatgcagaaacggaactaaactatattcattttacttgcctttcagggctgtcgaccaaaactttttacagccaaggagaagaaagttgcaaagagcacaaagaatccaggccgccatgctggttggttcacattcttattttccaaagttatgtctagctagcacgagaaattccacctggattttttttaaatgtctatttattaatagactttctggtaactataatctgtcatgaattgaccttaacacacacattctagatcactgaataggggctgaaattgtggtgatgagagacaactgtatgtttggatactttacaattggacacaggaatttgttcccagttccacaatattctatcacaatgaaattgtatcactacgattggcctgaaatcatgtaatgtttattcatctcttaattgcaacattgacttgaagacatcctttctaacaactgcactccctaatgtcattagctcttgtagttaatctgttgcaaaattacttttcactccctccccttctgctgttaagtgctaacagttctctaaaatgcatctcgagttcgtcctaagaccatggaaccagctactaactttctgggtgctcgtatataacaccagctaagcttgcgccaagttcttctaagac

SEQ ID NO: 103552 - DNA, 387 bp, Zea Mays
cacatagcattcagagtatggccgcttgtagagagctgggaaatgccgaaggagaccatcaccgaatctagtgaaggtgaactggtccggctgaagtatacatttagatatggggataaattcgatgaaccatacgatgactagctaaaatgcatcgaagttacaagtgatgaactgcttggatcatattccaaggtggaagacaatgcgttatccacagccttcggaggctggggaaaaaagagattgaacagagtttttaacgctattggcttcgtctaccccgactaccgctacctgttgcgggggcaagggaagaagaggaaagctactgctgtggccgcctcggctgatcctgtgccgaaggctgcgagcaaaaagatgaag

SEQ ID NO: 103553 - DNA, 611 bp, Zea Mays
tcttctttccttgtttcttgcttgctactgtgacaccccagtgtcacctagggttcttccctaagctaaccccaacctattatcacatgtaaattgagtaaagggttgaacatcaaaagaaaatttagagcaaaggtttataatgaatctttttaaactctccttaatcttgtcatgaaccttgagagagaaagactctcaaaccctaataaatcctcagtgagccaatttaagcataaagggtaattgggagcagtcatgtggggaaaatgcaaattttagatttgaccaaattacaaagttttagttcatcaaataactaacaaatcatagtaagagagtttggccatttggttttttaaaaattcccaaatcagcccttgaaccatgatcccttggagaaattcagatttatgaattctgaatttcagaactcttttcaaggatcaactacgttctctgtttttcgaaactcaaaaccaggagatccaaatatcaaagttgtgccaaattcccttgaacacgccctggaaaagtttgaactcaaaccaaattcatttgacacggttttggcgcagtttgacctcgggactagacattctgacactggc

SEQ ID NO: 103554 - DNA, 532 bp, Zea Mays
gagggtttgagacagagggttatacttgttcaggatttcgtcctagtcctgtgtagtgttgattgtaatattgtttgagcactgtgttacagctggtgcttatgtgggaagaaagggaccctacccttttatcgctcaaggataggactttacagaggagatttatttcctactggtaagagcgtgatctgttgccctggttgacgtagtgtatctgatgaatttggtagtgtcgtgcgccaccatactctcggtgtggcataccgctccacttgtttggcatacgggtccctgttgtgagtctgatgtatgttgatgtcctcatagtgacgcatggtgggtcccacgaggcaatctcatggtgcagtcatgcatggcgcgacctcgcctttcgtcatggaccttgcatcatcctccagcgtgcataagcgtacatccgatatggtgtatcgccatgtacttcctggcatactggtcactatatagactccggtgcttcggtcccctatgactggggttgaccggccccaca

SEQ ID NO: 103555 - DNA, 405 bp, Zea Mays
cacgctcggcagtttgtcaccataataagttgttgtgaagtttgacacctcctctagaatgtatgcctctgcaatggaagcctcgattttgcatttatttctacatttctttcgaatagtctttagacatctctcgattggatagcaccaacgtccctgcacgggcccccattcgtgcctcataggggagatgaagaatcaaatgctacattggattgaagaagctgggtggaaatatcttctcaagcttacacggtaacacgggtgccaatctttccaagtctgcaaccacagtccgagataactcttttgcacaaagctgacggaagaaatagctcaactctgaaagtgcttgccagacatgctcagggacatatcttcaaaccatcgcaggaagaatccgtt

SEQ ID NO: 103556 - DNA, 487 bp, Zea Mays
cggccggccaaaatacgtaacgaccatagtagtggtatatcttaaacaggacgatatgacgtacgaatggatgatgcaacagctagggatggtaatttgaactcttggatttgatatccgtcggatcggatatctaacccggcagagacatatatggatatatattttgacatgtgggtcagactcaaatcaggcccgaagtcgggtgagcatgaattaagatattatcttccatccgtagtttatcctttggatatataaaatcgaaccatagtgtatttttggcctagcatatacatagcaaagaataaaccctaacaccatgaacccccacgcctaacgctcccaattctctattcttggctgcccctactagcttcatgtgttgtgtcctgtggctccttctaagtcccataggatgcaccatcgttaacagctgggcccttcaaagctctagctagtatctctaaccacgtcccgaaagcgc

SEQ ID NO: 103557 - DNA, 618 bp, Zea Mays
actcacgctccacggtacgcaaccaatcttccgtgtccatgggatcagcagagtgggcaaagacaagggatggcccctcatgaattctgctcgcttgtctctgggcacctacgacatctggacttgcactagagtctgaggtgggggtggctgctgctgcacctgctgcatcgctgctaaggtctgaccaattgcttggactgcctacgtttgcatcatgaacatctgttcaactatcatcgggggtggcggtggcaactgctgctattgggctgcatcctcctggggtgcctgctgttccggctaagaacgccttgcacctctgtgtctgttctcagacatctgtagaaaccatacaatatcagatctgactctgtagtcttttagcataagaaaagatatacggaaatcttcatagcactaaacaattgatcatcttcactgaccgcttttcagataaagaggaaagtggaaataaatggattacccaactaaatgactgactttattaataactacaccaagttgtaggggacacccacactttgatgacaatcattacaaagatccaacttcattacaagttcatcatgacaagcattccaacatacgataagc

SEQ ID NO: 103558 - DNA, 652 bp, Zea Mays
aagccaaaactatccgaaccatccttctttccaagtcactttcaccggataccgcttcccagatacttgccaagatgtttcccggaaagccctccgacaactatgccagagctacaacaaggtgatctttgaaacccccttcgctacttcccacccagcaacaaaaatacacctacctggaggaagagactttaggccctgtcaggaggagaccctattgaggatgaccccaccatcgtctacatgactggataccttcacaccctcgataaccaatatgatgaccttgcctcccactgcactcacctaaactcccgggtggaaagcctggagcaaaaagtcagggaacttacaagggaaaaggcgtcccttcaagagagcctcgagatagcagaaggcgaggaaaccaatacccgtgaagcctaccgcactctgaagatggattacgacaagaaactgaagaagctcgcccccgcaagaaaaatccgcaagaagaccaaaagccaaggatgccagactgagcagaaggaagaagcccctccagccctacctcctaccaggataagaaactcgtccgacaccgaggaaatgtccctagctagccttgatgaccttctcaaggaatttggggacactttagagaaggagttcg

SEQ ID NO: 103559 - DNA, 374 bp, Zea Mays
gggatatagaagtcacccctatatgagtattcgtaagcatgcgaaatcgccttaagtcgttgctgacttaaatcgattgcttttgttagtagggcatagtggtcaccctgagtcaagtaagcgcgagcatgttgcaccgtctcaagtcgttgccgacttaagccgattgctccgttagtagggcatagtggtcaccccgagttaagtaagcgcgagcatgttgcaccgtcttaagtcgttgccgacttaagccaattgctccgttagcagggcatagtggtcaccccgagttaagtaagcgcgagcatgttgcaccgtcttaagtcgttgccgacttatgccgattgctccgttagcagggcatagtggtcacc

SEQ ID NO: 103560 - DNA, 509 bp, Zea Mays
gaaaagtatatcaaggaagcacttttcattccgatgaaacataaaaagaagaaatttatctggatttggagagatccttatttcattccgtacatagaacgactactttggtaatgtatacatatgaagcttttgagaaactaagaaacaattttattacggtgacaacttaactgatgataaactcagcaggaatagatcatacgcaagaggatgaacagttgcacatcgttattaggacatcattaacttaataagtcgctctatctaacctagcctaatccaaccgtagtagtagtttacacagaagtaacttctcaaatcctgttaactgcaacttaagaaccagaggagattcggtccagaaggcttctggatcgatggtcagaacccaagcaaagaactcgtcaaggatcaagtactaacccgctaggcgctagagatgacccactgccccagtgtcaagaatcctaaccagtcttaggcacgaggcgtgaccgcaggtgaag

SEQ ID NO: 103561 - DNA, 562 bp, Zea Mays
aagaaaaaggaaaaaggtgaatagtaacgggctgaaaccagcccgatacggcccataaccaggtgaaacgcgcccgcgccaacgtctttgcacagaggaccctggctgttcgaataacccgtaaagagtcatgtgcactattcctatgtgtcactgacattttgcgcagaggcccttcactttctaattcctcacgaattgaagtccccgaccgaggacggcggagcagcgactccggtgagccaagaccggccggaaaacgcaatgacctgtgctctggagcggttgacacctaattcgacccctaaaaatcattacccctcaaccaatttcaaggttctagcccctaatctctctgtccacggtgacaacgcgatcaacggacaacccgaagcgttcccggtgatcctatgtgttctagttcaattggccaggtcgagaagcatcacaagcacacagggatgctaaaacaagagcgaggagggcatgatcagacctgtggagagctggtcacggcgagctctcacattgcggtgttcttgaccgacttgggggaaatcta

SEQ ID NO: 103562 - DNA, 490 bp, Zea Mays
atcaggtattcgccaacccctcccctctagtcggttgctaatgatctagaattctagatgttgaggataactatggccaagcaccgcctactccacacggtggcgcttcaagtgatgagaatgagggtggcctaaatgatatggacttagatgtcggttaggtgatggtctactattctatacctcatcatgtttgagttattgagtttatttgtttgattatgacattggacttttagtttgtttggttgctatggaccgtttgtcaatgtggatttatcgcctatatctgtttgctatgaagtatgaacttgtactcttaatctctattctctaaattgctagtgattactaagtagtaactaccgaccttctattccgctggagtgttgatgcctaattggtgcctatcgccgtggctccgtgataaccatggactttcctctaatggcatatagtggacaagatccatgctcattaaattctagat

SEQ ID NO: 103563 - DNA, 302 bp, Zea Mays
tactagcatggcaatttctaggaaagtaaatacttgaggtatttgctcgaatgtaaacatgtatagtaaagtaaaagttagaatactcatcaatattttgttgaggtctcggagagtcgatgctcccaactaattctcgttggagcactcgtgcatgggtgtctctccattacttcgtgcaagaatgaagtgctatgtacgagctgctccaacacagtaaaccactcacaaccatatacaagtcctaagccaagtcatgcataaactctatgggtgatcaccacactcacgatcgctatcta

SEQ ID NO: 103564 - DNA, 489 bp, Zea Mays
ggtcttttcatcaggatttgaccaacacgaacaactttgtccatcgctttatcacacattgctttcatgataccatggtcatcctctaaaaccttaatgtcgcgatgagcgatttccaactcctgcgaaacaagtttcttcgaggcacgcaactctttgatgatagaatcttttaaagacagtaacttattaagccacaacactttagtctgggaaaacctcagctcatctatatgatggtcaagctctaacatagtaaagcaatgactcctctccaaagtagtaagggaactactggcatcacaatatagtttatccagactatcatgggaatcaagaagtctttgcatctcctcctacaggcaagaagagtactaaacatcgaagtaaaggcacgaaacaaaggcatcaggaacagtcagaaaaatctacctcatgggatctcttctctgaatcaagctgagcattcaaggaagagttcagggttta

SEQ ID NO: 103565 - DNA, 488 bp, Zea Mays
ctctgatgaccaactctgtcgaccaactctgcgaggcgaaccggttgaccaactctctggatgaccaactctgcgaggcggactggctgactaactctctgatgaccaactctccgctaatcagctctggccgaccaactcaccgacgagcaacctgacgaggcaaaaatctgagtccaacgctacagatccacgttagctacgacaggacgtgtcaccatcaagccatgtccggacatatgcacaacacatcgaatgggcactagggtatctacagtgacccgtacatcgaaaggacgggacagtgtgccatactgagtgtaagcctacacatgctgacaggtgacgaagggctcatgacgacaggagaatccacgccacatacgaccacaccatgagacttgtccgtgggacccgccgcgcaccactacaaagactttagtgatggacacgctacaggagccagagtaatggacgatgccataccg

SEQ ID NO: 103566 - DNA, 810 bp, Zea Mays
ttgatatgtcaatttgcaacatatttagagagagtgaacaatcaacacaatacacaaaaattgagggatgcaacacaattatataggatgtgatgataaaaacaatagaatacacaaacaagcccattattgcatagcataagatatgaaatgttactactggctattacaataatgtcatcacatcacatcattaaaaagtttatggcctctaagccatcaccacatgcatcacgagatagacgaataataattattacaaaccatattgttcattacataaattaaagagctcctaagatgagactccatctccccctttttggcaacaagaaccaaaaaaggagagagccaccaagcaaaagatcaccacgaaggcggaggatgatgcaaagcaaagaaatgatgcgccaggtgagatgcaaagtgttcttccccagactgatccgggggaggaacacttcctgaaggatcctagggcagaggatgagacgaggattgacccggatccccctggtagggaggcggggcaaactgctcacgatcatcaaagtatgtttcttcttcttcatcatcgtcagctaacataaaaggcaccccgtaggcctgctggtgccactcattgatttctggaggaggcggatggagaggcacgtcaggcgagcgaggggcaaaaggcatacccatagaggaagcttgacgacgaagattgtcgtcagtctccctctgacgccttgccagctcatgcacatctgcagaaatattccggcacatagaaaagaatgttgcaatcccatgggccaggcgggc

SEQ ID NO: 103567 - DNA, 378 bp, Zea Mays
tgtcttttgagctcctcctcatctactatacttgtaccggaatcatcttctagactgtatatcttctgtttccgatgtttgccattcgccactaactggaagtgtttcgtattatcatcaccttcaagcaggtgcttaaccttggctctttggaataaacgaatttcctcctctcttagaatgcaagacagtcgttcatgaatataggctttcaaagctagttcattaggcgataggcgaataacctccgcctttttatccagatcttcaattaaattagtaagtttaatttttttccttcttcattgttccagctgtgttttttgcccaccctctgaggtgctggcgtacaacccgtattttattctgccatttttc

SEQ ID NO: 103568 - DNA, 551 bp, Zea Mays
cgggggagggagacttgtattatcttgcaccaaagtgctcatagtaggggttaaaagtagtcgagagagtgagtgtgtcccaagtctctgagtatgattgaggcagagtgctaatattggggtgaggtgagttgtgagctgtgaagtgtgtggtcgtgaagtccccccgtagaaggcctcgggttcctccttttatagtcgcaaggaggaggccccagagtgcaagggtgtttgtgctacttgttgtgatcagaggaggcgtgttcgagccctgtagtggcgtggacgacgggatggctctcgtcctcgtgtccaagccatgtagcgacatggccagtgggatggtccttgtccttgcatcatcttttggtcaggaggacgtctgatccctgtagcatgttcttctgacggggtagagccgaggcttgactcaggagcatgggcatgcgcccgatccctaacatgtacaggggcgcgggtgtcgagttggagtagtcgatacaatgattagcatggtcttctgcgagattcgcgggagagtagatgacatt

SEQ ID NO: 103569 - DNA, 444 bp, Zea Mays
atccaagacacgtcagaacaattcacaacccaagccaaagtgaagacaaaaacaaccatactcaagggcaacaaaatcactcacaatcaacagggactcaacagagttccttcagaccgccagccccaagaggaggaaggggaggaagaagctttgttgggagataaaacactcagccaagaagactattctgcttattctattgggaagataaggggcacacaacaagaacctacaaagttacaattcaaaagcagaaggaaattgccgaagttgaggcaagacagaatcagccgaagcaggtcctccatactgcttcatcttattctccatacatcccagagtatgtacgcaaccaacaaccaatccagcagccttcagctttagttgcttcaacaagccattccccggccaaatgggtcctgcctcaaccacccacatcag

SEQ ID NO: 103570 - DNA, 386 bp, Zea Mays
ggttgctccgaatttgaggagaagaagatgagtgaggagaagaagataaccgaagagaagaagctgtatgaagagaagaaagttgtggaacctttcatcgctgggttttatgagtccatggcaaaaacaaatatagagaaaattactaaggagatcatggagggtttgtccaaagattctgatgatagtgatagttatgacatggagagtggggatgaagattctgaggatcggccctggcggccaagtcatactatcattggaaagtcgactattaaacagagtcatattgatgtcatgagggggaggtattttcgcgacatgtctattgtcagagttggaggagacagcactgcccctgctcctgaggaaaacgaagttgttat

SEQ ID NO: 103571 - DNA, 494 bp, Zea Mays
atatatcactcatataacctttatggttcattgtttcagccttattgctcttattcattgccttacttaagtgtcaagtttgtcgtgttttactttcccaatggcacatcgtacatttcatcacatgtccatgtcatctctcatttatggccttcatgtcaagctcaagggtttgtggactaagtaatgttgtatctcaataactaaaaccaaattaggactttcacatgtagaaaaaataatgatttttgctacaaatatcaaaagtaggtactcacaatataaatgagtaggataatttggaacttctatctaaaataacatattaataactcaataaagaattgttatgcaagaatatatcaaaaaattgtttgattacgatgaaatatattgatagacaataaataatacaacactaaaaacatgaccaaccaataactaataagaatagtgccaaacatggctcataaagctatgttcggttcattttt

SEQ ID NO: 103572 - DNA, 417 bp, Zea Mays
gagctgaaatttaaggagttaagggtaaatatatgctggtgttaagggcaggctgaatttacatacttgtcgcgtgtgttcgagagagaaaaaggacatttttggatagttcaattggtcatgtcaaagggaaatgcattgataaaaaaacatgacagtttaagctttgtttgcactggctttgtgtgctgtctgtcctatatatatcgcaaagttcttaagagaagtatttcacttcaataaaagcaacagattccccatgttccagcatctcttctccttcatcttcttttgtttctgcagagcacaattttgcaatgaagcgcaaaaggcagtagctcttcagttctctcgaggcttgcacgagaaagaagtctcggtatagtatctccgtctgagtcatttaagtaccgaacc

SEQ ID NO: 103573 - DNA, 470 bp, Zea Mays
ctgggggctggacatgatcggacccttcaagaaagctcagggaggctatactcacgtgctggttgccattgacaagttcaccaaatggatagagtacaagcccattgcctctttaacctcagccaaggcagtggagttcatacaagacataatattcaggtttgggataccaaatagcatcataactgacctggggtccaacttcactagctctgaattcttcgatttctgcgaacaacggagtatccagatcaagtacgcatcagtagcacatccaagagccaatggccaggtggaaagagccaatggaatgatactggaagcactcaggaagaaagtgttcgacaaaaatgaaaagcttgcaggaaagtggatcagagagctgccatatgtggtttggagcttgagaactcaacctagtcgagctctacatggaaatactctgttcttcatggtttatggttcagaag

SEQ ID NO: 103574 - DNA, 944 bp, Zea Mays
gacgatttccgctgcccttcgtgtctagtggtaattctatgacctataatagcagaagttcttggtttatgggctcaaaatttttgttttgcactaatattgccttcccataatccatcactattagcactagacgaccaaattttctaattataccccctcttaatagtacaatcatttattctaagtatgggtatacactctattgtgtcttgattggtaagatgaaatatcttagtttataccttggccttgagctcatgtgttttgcttttatctttcctctccatgttcaacaattgattatcttttgcacacatcaccatcctcttctatggttgtcagtgttgctgaactttggatgtggactttaacctatctcaccacaacacttagagtagaggttagtccactagttgtctcaattactaaaatcgtatttgcagcttttaggagtgacctagcaggagaagggaagtgcataggcatgtggctatcagcccaagaggcatgggaggggtagcaggcattgaaggatggctcggttcacataggtaaatgagttgatttgggaggaaggagcaactaggccgcttgtcttgggcctagaaggcgtgggtgggctaaagaaaatgaataggagggcgggcctagtgcaagggggagagaaaaggaagagatggaggctggcatgtggaaggggacaagctgtagcaagttggatatgacttattggctgattggaaggaggatcgttttccctttttcttttagagggtgaaaggtgggaaatttcgaaggatttcaaggagggatttaactatgtacaaaactacaaacaaaacagaagccaaaaaactaactaatgtaaatatgatccaagcattatgcatcacaaactatttcagtgctccatgtctaattgtaaccttactttgaataag

SEQ ID NO: 103575 - DNA, 610 bp, Zea Mays
aaaatgacatccaccgtccacgtacaatcacatgagtccttttcctgctcgtaaaagggtgaaaaacagagtttgtgtctaaaccaacggtggagatagtcctcgcagaccactagattaactagagccctataaaataactggccacaagatttcaggagttgtttctgttggcggccgcacaaacgtcaggttcgggaaaagctcggaaaagtagttcgtgctccaaaaccaaaaggttcgcgattggccactattgctttgtttgttgttttcttttctttcttccccgaaaaggctggacggcggctccgagctcactcgtcgccggcggctgttgcaggttctttctttttcctacccctacctcagttgcataagctagcacttcgtatcgtatgttgcttgatgcgctgatcggaaggttgtttcccgtggcgcttttcgttctcattggattggttattcgtcgtcgctggcgctggtttaatccggtggcgcgactaggttcatcagtccttagtttccaccaagttcggtcctttgctttaatccggcggcgcgacttgtttcatcagttagtttccaccgagttcgggcggtatggtgc

SEQ ID NO: 103576 - DNA, 555 bp, Zea Mays
cgtttaattacgtaaattaattaacgtgagcgattctaggcgaaacaatttattgtcgtgcgacacggcgcataactcagtaaacaaggtgcgcggaacggggcacgcgatacgcaatactcgctaaaccacaacgagtttataataaacaagtagtaaataaaaaacgtttaagtttgtattaatttaacatttatttataaaagcgcgagatgaactataaactagttttaattagaaggtcataagtatcgaataaaccactaattaaataattaaaacatgtgacgtgataaaatacgttgctaatatgaaatcggtgttgctacagagttgacgcgactgaaacaaatacagacaggtttatgacgcattatatattgaatagctaacaatttgtggctcataaacaattttattaaagtgcgtgaatcgcgactcgcgcgaatgatgatacgtgaacagcacgcgagactcactaactaaatgttgtttttataccaaacactaaatagatattaaatacaacatctaagtggttaaaatcacattgcc

SEQ ID NO: 103577 - DNA, 932 bp, Zea Mays
cctcccccccatattcactcaagtggtaccgtgtggcacgataagggggtaaaaacccaggtctgacagcataaccagcatccacaaggtaaaatttacctaacatcatatatcatatattagggcattgtagaccaatattaggggataccaaggaaactagtttttaccttgtggcacttttagaccatcttctctctcaagggcatcagcaaggataagggcatcatgtgttgatccctcccagccagcaagaacatatgtaaaccttagatcaaagtctacaacagctaagatgttctgtgttatggtgtgtttcctaccaaggaaggcagccctctgatttctaggaactcttgctagcacatgagtgccatcaatggcaccaatacagtcctacacattagggcaaacatttgttactacaaacccaacataaaaagtagtggtgtgtttggatttggctgaccttgaaatatgggtaccatctgtggctatctctaattttggttggtgtagcagttgaaggtggcaagatcatttctttcctcagttcaccaatagcatacaatacttccttgaagtatctgctaatggtctcaatagaccttcgaaaggtcatgtgtataactctaaacctttggttatgacctaccacatgtaaaaacatggcaacctgctcctctactgagctatgaatgctatctctcaatagttgcctagtgcgacaactgcataaaaggggctcttctcatcctgagtaagtcaacacactcaacattagtggattcataaatgaatctcaggttgttttgcctctcttggtctctttggtgcattgggccataagtgatacacctcctagcatgcagtcagtgcctcaaccatgcatccaaccaggctgacataactgctacaaggaccactgcctt

SEQ ID NO: 103578 - DNA, 1057 bp, Zea Mays
gtgaatgagagtttagagtcaacaaccatggttcaaatcttcatttgtgcatacttttagcctttttaccatctaaatatgggggatcaaaactatgaaggatatgtaccatggggcatccctgtagaatccaacttggatctactctgatctgataacctagagagacatccatattcgttttccattgtaactaatccctttctttggttataaaaggaaggagatacactcccaagggggacagaatacagagatagccaccgacaaactagacgtagggtattatctcttagtgaccccgaaccaatataaatcttgtgtctcttgcattttacttttagatcattgatcgagtacacacccatcacagattcttcaaacactatctaggattcctcaacaattggtgcactaggtaggggtagcactgatcataaccaatctagtggcatccatgtatcacaagcaagaaggtcaaggtgacaatctgaatttgaagatggtggaaccaaccctgaggacaatggttctgaaacatgtgacaccaaaagcagatccaattgaataaaaccaagtttcacagatccatggggatgaaaatccacctctgcaccaactcacacttgatgacatcatggagtcaggccaggaatatgtcgtcatcttcgatataagttataattccaactcttattctgacccttctactacaacaacaatgatactagatctaaacaaagggcttgaaggaggcgaatgccaagctattatagtaactcaacatctgcaaggacaacacaacccaggaaaagttgctagaagttagccatagacgactcaccccactaggaagcaatcaacaccaatgtcatagccaatgctgaaagggcaccccggcatgacaaattgagattcactcaaaatagcaacaaaagtaagaaaccatccaactttagatcagaccaaaggcatcaacgcatcacaccatcagagcagaattcggatgactcggtcgtggggtccctaaacgaatagaaatggggtctcggatcca

SEQ ID NO: 103579 - DNA, 787 bp, Zea Mays
ggcaatggtgcggcgaggccaggaacaacaccaacacagaggtgattgagagcacgtggtggcggtgcgaagttggcatggcgaagacacgaaacccacacatgggcaatggtggcaatgaggccgtgggtagtgaaagtgagcaggtggcagtggcacaacagcataggggccgcacatgctatggagggcgcaatggctgtgtgatctatagtggagtagcaacatgtggttgcatgggctgtggcgacttggaggctcaagagttgtcatcctcgtcgttgctattatgactgatggtttgccgacgatggtccaactcgactagatgtgaatcattggtttctctgcctcccctctgctatgatcgtgctatcaggtgctctattttggccgacaaagctaggatggttgtggtcagggcgaaatcctagatggcgacaattgtagatgtcgcttcctcttaggagacgtccactctgtcctatatgatagtttcattgtgtgaaaacactgtctatttgtgggccgacaatagcaccaccaattggtgttgcaccttcttgaaggtgttgtcttttgtgtctagcgccccatgattggtggtggcaaccacttgtggcctattagaagttggaactgctatgtccaggttgatgagcttgacaatgatggctcaaactcaaagttgtgtttggtttgtgtggtagtggttggcaaggagaaccatgtagactttttatctagtcggttattggacttggtggcatattggtgcttgacgagc

SEQ ID NO: 103580 - DNA, 477 bp, Zea Mays
taacgggggagggacgacacaaattgtcgccactatgggaagggccattcatagtagcagaagtcactcggcctggatcgtatcgccttactcaaatggacgacacggaggttgggaactcatggaatatagaacatctcaggaagttttacccctagctatatttcaaaagctattgagatggcattgtattctgtaaactaggaaatatgtcatcaataaagagacttcaaaggcactcaaattgtttactatcaatccgcattcttacttaacttagggtgaccactataccctactaacggagcaatcggtttaagtcggcgacgacttaaggcggtgtgacatgctcatgcttacttaactcagggtgaccactataccctgctaacggagcaatctgcttaagtcggcaatgacttaaggcggtgtaacatgctcacgcttacttaactcagggtgaccactataccctgc

SEQ ID NO: 103581 - DNA, 293 bp, Zea Mays
tgctggattgacaccatctatgtttgatacgctgcttgtgccatttgctttacttcctcaatttcatagctcttgctcactagcgcttgctagtttttcaagctttctgagcttcggtaaaaaagacgcattttcgtcatttttgaaggaaaaatgtctcaagacaagaaggtcgctgctgagacgaagttgactgaagaggagaagctttttgaggagaagaaggttgtgaatccttacattgttggatttatcgagtcaatggcaaaaacaaatacaaataagattactaa

SEQ ID NO: 103582 - DNA, 384 bp, Zea Mays
tgcacccacctttgcaaaactatctttcaatttcttagcacaatccaaggataatatctctccttcgattcacaaagctcatccacattcttttgcaatctttaactagtccgttcgcttatttcttgtttcgctttcgccacttcaaaatcctcattcttttcggcaagctttttctttaggttttcaactttggctttatgagcttcagattgtgcattaaactttgctttgctgctcttcaacctatccactaaggaaagtagaattttatctttttcgagggcttcattccttagtctgatgacctctgaccgaaggttcccaagggctatttggcagctctcgtcttcagcattcttttgtgcccttaaagcattgctc

SEQ ID NO: 103583 - DNA, 643 bp, Zea Mays
gaatgccaacttttcaaaaataaaaatttgcttagaaaccagtgatggatcgtcaggactagaacgctagacctaggacgaaaggccttaagaacagtggggaagataggtggctatataagtaggccatataggccaagcttagagtagtagggatgccctagaagcacccctctgatcggtgaggagacgttctttccagcatgcatgcattataaaacatgaagaaattaaaagttaaggaaaaatgcatcaaactatgaacctaacaagcattgttaataatggataacaagagatgggttggaatagataaatctaagttatcccacctccttttaacaactcggacacacgtttctccttacaactaccatagcatttacatctaaccctctttcacagatgacttcacccacccccgccaatggaggagacactcgcttcagttttgactacctttcccacgagggctttccctccatcttgtgggaggtgctctgctctgccggataccctaaaccccctctatatagggtgcaactatacaaggagcatcgagtgtcacgttgcagggtttggctgacccgagagtctcaccctctgtagcctgggtggcgttcccttgattccgagactatcg

SEQ ID NO: 103584 - DNA, 309 bp, Zea Mays
catctttggtttcggctggcccgattgtaggcaccttcggcactacaatcgattcttcaacgctctgcatggtgggagcagcttgttttgctttagtagttgaagaggtcccttcaccaaattcaggcactacgaccggttcaatatatcgcggccggtgggtcagaaccttcattttcttgcccttgggcacatcagtggtggccgaagcggcaatttttctcttctttccttgccttcgcaatgggtagtgataatcagggtatacgaagccaattgcatcaaacaccatgttcaatcttttcttgc

SEQ ID NO: 103585 - DNA, 332 bp, Zea Mays
cattcagtaattagattatcagatacaatagctcaatagtgaagtgttgaatagttagcagccacgaaacgatcgccacccgatcgtatttaaacatgttagaagaacttctatgataatactataatatgtatcttttatttatttattgcttggtatgtatattttttgatgtgtcttgagtttatatattggtaccatttttatataacaatactttgaagggactctattttaaatttgcctcgggcccctaaaatctccggacagccgctggctacctttatagcattagcctcaccttgatccttcatttcaaaactttggcatag

SEQ ID NO: 103586 - DNA, 305 bp, Zea Mays
atgggctaaactaaagtctcaaaaaagtattccgaaccacgaaaattttctattttttgatgcgtaggtattctagccaagaggtaattatcctaaacatgtacactacaagagcatctctaagagactaactaaatgactcgtcaaaccaaattttaactatttaacaacaaaattgctctccaacaaactagtatccgactcgccaagccatttggctctataaattgcccccctcttgctaaacttgacaagccactccgattagccaaactaatttaccagttagagagtccattggaagg

SEQ ID NO: 103587 - DNA, 294 bp, Zea Mays
gccatgtcacgggaggactcatttgttgttcctagtggtaaatactatctagttgatgctggatatacaaatggtccgggatttcttgccccgtaccgatctacacggtaccacttgaatgaatgggctattcaaggcaacaatccatctactacgggagagttattcaacctatgccatgcaacaactaggaatgtgatagagagaacttttgggatatttaagatgagatgggcaatcttgaggaccagctcatattttgatttagaaaaccaggtattcaattaaaattca

SEQ ID NO: 103588 - DNA, 439 bp, Zea Mays
ctcaaagcaaatcaagaaaagaaaggaaaagctaaaatacaaattgaggaggaatcgtcaagtgatgatgatcttgatgcaaacattgccttgatggtgaggaagaccaccaagatgttaaaaaagctcaacagagaaggcaacaagtttgactcaagaaagaagaaattcttttccagtaaaagaaatcccaattctgaaatggattgctacaattgtggagagcttggtcatcttcctcgtcaatgcaacaagcccaagaacaagttcaagggcaagaaagaagatgacagtgatgacgagaaaaaggaaaaaagattcttcaagaggaaggatgggaagcacaagaggttccacaaaaagaaaaatggaaaggcatacattgttggtgaatggctcattgacattgagtcatcaagtgggtcttcttcaagtgaag

SEQ ID NO: 103589 - DNA, 304 bp, Zea Mays
aaggtcggactgagccagtgcaacccatgttcaactgcaatggaagctaagctgaaactgtccaaggacagtgattcttctcgagttgattcgtctgaatatagaagtttgatggggagtctgaggtatttgttgcacactaggcctgaactgaatttcagtgtcagttatctgagccgttttatggaggcaccaagtcaggatcaccttgcagcagttaaacatttacttcgatatgtagctggcacaatggagcttgggctgttttatcccagaggaacacataaaaatgttttgatcacag

SEQ ID NO: 103590 - DNA, 523 bp, Zea Mays
gcaattcgtgggctcaggtgagtaattggaggtacgagcgggtggattggatgctggaatacctaatggagccgagggggtgctcaatttataggactcttgatcggtggctcgtgaatttgaaggagacgcgcggcggccggagagggggaagagtactggcgcaagcgattggtggcatttaccgtggcgggctcaccttagatgaccagacgtgctagagcgagtcactacaacgaagtacagcgtctaggcacgtgtcatccgagctgcaaacgactaactccggtgaacttatccacagcggctgtgacttaggcgggtacgacggttggagtagaatagtggccggagttcatccacggctcgatatttccttacccctttgcattatctaactgcgccgagcacgaatcaccgcagtgggcacgaatccaggcgcatggtcgccggtggtgagttctctacgctggcgttctaatccggtcactgtaacattgaaacctgattcagagcgcctaac

SEQ ID NO: 103591 - DNA, 296 bp, Zea Mays
ccgctacttatgttgcttcattatccaatcatctgtatgcccaggattttgcttgtgaagctcattgatgtgttgttggataaatggctccattatcgcagctgatgtaggatgctatgatgtgcctaaagtactgtattgtaatccagtgggatgaaggatttctgtcccatcctaccgcttccatatagtctaccctcgtgtcgtgatggaggcaaacctattgcaaccttgtcttttaggatactattgcagaatggaccttcgaactcaatggcctcttcggtacagtaccc

SEQ ID NO: 103592 - DNA, 415 bp, Zea Mays
gttacccaaagcccgagccaagggagcacacttgtgtccttctcacactatatgctagaatggaaagtgaaggaactcaaagttttagaggcattgttaagataagcattaatcataacaagaaagaaaccctagccttcatacaatgttcacccataaacaaggttctaaaaccctaattccctcttaagccattaaacactaaccatgggattaaaggggaaagagtgggcaaatgaccaaaacataaaaagggacctttaccaaagatgaagtgtattagtaaatctacaaaatttattaagagaagtattacaaaaaggcccaacaaaaaccttaaaacaattcaccaagtgggggagcacactatagccattcaaaaattctctaagaccccaaaaccacccctagccca

SEQ ID NO: 103593 - DNA, 586 bp, Zea Mays
ttaagtcattgccgacttaagccgattgctccgttagtagggtatagtggtcaccccgagttaagtaattgtgccggttgacagtgaacaattcgagtacttttgaagtcttttattgatggtatatttcctagtttacagagtacattgtcgtcccgatagcttttgagatctagctaggggtaaaacttccagagatgttctatgttccatgagttcccaatttccgtgccatccatttgactaaggcgatacgatccaggccgagtgacttctgctactatgaacggtccttcccatagtggcgacagtttgtgccgtccctccccagttagaattcggcggaggacgaggtctcctactgcgaaggatcgatgccgtatggccttgtcatgatagcgcctcagagtttgctgatatcgggctgactgaatcaccgtattcaatcgttcttcttctagtatatcgacatcctccagtctagtagcttcagcttctaaagtccactggaatttgtctaccttcttgagcaacttatagaatggtaagcccttctctcccagcctggatatgaatctgctcagag

SEQ ID NO: 103594 - DNA, 411 bp, Zea Mays
ggcccacctgtcatcttcgacacttcctcacaacagattaccccgtgcgctctggcgagtccacgccggggaactcggcagtcaccatggctccctcgcaatgatcatgcccacgccacggtataaagttgtccccttaggccgatccttcccctatctcacgctcaagcctttttcctctcgtcgtcacatcgcaccgccataatcgagcttctgtggtaggtgacgcactgccgctggtgacctgtgctcgtcatcgttccgcacgctctgaaagtcacctcgctgtgttcaccattatacacacattgtatatgtcatcttgggtggggagttgggtctccagctggcctttttggttgtcgtcggtgagaccaccactgtgggtgggtgggtgccggcactctgctg

SEQ ID NO: 103595 - DNA, 502 bp, Zea Mays
gtggtacgctaggcaggcggtgtccaaataaattaaccggttgatgtggtagttgtcgtgcgtgatttattgttagtgagtagtgggattacgagttatgtaaggattatgttagaaactagtaggcggcgtgtaactgtgttcgtgttgcgaataatagatcagtaggtattattggtgtcattagcaagtaggatgattcctgttgtgcgataaattttgaagggcgaaggacatgcatagtatgtcgatcgagttaaccaaaaatggtgttaagttgagatttatttgtgcatgaaaagtaataatgtgtttaatacttagaactcttagtcgatagtagaaattgacttggcttaaatagagaggtggtgacatgccaaagtagtcatcgctttctctataattataagtcgagccagtacaccttacgcgttccttgaatttcacctggcacatagtgtacggttgggttcattgcttcgactagatgtttccgaga

SEQ ID NO: 103596 - DNA, 430 bp, Zea Mays
gcaatgaaacatgcactggaaactaacaagcaacacataaaaatgtttctagcataccactagccaagcgctagtcacaatccccagcaaattacgatttatcaaacatttgttttctttgtaaaagaagggtaccccttctctaaaaaggtgctgatgtcaatttgtgaaattgagtcaatgttcaactgaacatatttataaacccactagcccgattcataactcattagcagaaatgaattgcctgatataacttgtgctaatcactagtccacgcaaaataatgcatgaaagatttagtttccctgactgtaaaaataattacgacgaactcatgagaaaagttcatggaccctttctcatttcatcctcagtgtctaacccatgaaatagatagcttctgattcatttcaagaacagaagtttt

SEQ ID NO: 103597 - DNA, 1354 bp, Zea Mays
ctcttctcttcttctcagtttcactttccagccgtcgccgcccactcttcttcctctctctccttcacaccttctccactccaaaaactcacttgtgccctctcatctttggaagatttgttggagatccgttcatcccggcgttctccatcatctccctcaatctcaatgggatttcttgactaaatctctggatcgaggtattgccctatttcatttctttttactcgatcctacgcgttcttgattatctaatgtatcattcgttgggtacattttagtttaagtacttgcaacacttagattatcttcatttgtcacgaacattgttagagtttagggatttgatattgttcgttgtagttgaaccgctcatatgaacggttgaagtgcatcctcaatatcttatgcgtctctactcaaacgtgtttgatccttgctcatcataggttctatttttttcttagaatggtgcgtcggaggaacccgtccgtggttgaatctgactcctctgatgaccaagaaatacatggagatactcccccacgctctagatccaagcgtgggcgaggaagcggaaatgtcatgcaaggtgctgaggcctccgggtctcaaagtgctcgtggtcggacaacccggaatccttcaggtcggtcccgacccgcgacaaatccgcaggcgtgggaggctacgagtgatgatgaaggtgggaaggatgatgaaattgatcttcccccggcccacgcccctgtgattcgagggttggtcctccaccgggcagaggctcggcgtgctggcaatgagccagtaactgatttcactgccagtggaggttctgctctccttcaggatctccatttccaaaatcctgcattgcgcattcgcgatgccaggattgatggaaaccgttttcggacgcttcatcatgtggatttttataattctatgatcctccccaagaagcatcaacctattctgcttcaacgctatatcaactgggaaggttgtgaggccattggggacccagagatgacacaggcattgagggcctgtgaaaggaaaaagatgaagagtatcatgatattccaatatgattggaatgatgaagttattgctcaattctactcaactttgtggatcaagccagctgacgaggagagtccatacaactatccttatctgaacttctacattgaaggtagttggtataaggtgagctaccgtcggtttgctcacattcttggtttttctgacaatgatatctctggcgataagatcaagatacatgatttccgccagcctactagagatgaagccaaagatcttcatctctctgagtctgggaagtattggg

SEQ ID NO: 103598 - DNA, 431 bp, Zea Mays
gtaatattcgttcccgtgattcgtggcccaaaaggttccttctatgcatgatttatgcacatttatacatatatttatgcatgcgtatatcgcctgtcacgtctcatccaggattcgtgactatcatatgcatggctgacgcatgctcgcgtacagtggtccgaccacgacctggttggcgtcctggctggggcttcccccactaacggaagcccagggcttccattacctcttcccctgggctctatttaactacaggaagccccgaccaggtgtgcagaccgcaccggatcctaatggcttattgtacctacctgtgcttacgctaaattataatacgagttatgctgatgtgtgtatgagtttatgcaaatatagtctgcgcatattacgtgaatcgggcccacgccgtcactataaaaacaccccca

SEQ ID NO: 103599 - DNA, 712 bp, Zea Mays
gacgtttaatctgtgttatgcatttcacataccataatacaccctccctggtggcatgcctagaatccccctagtcatatatgctttaagagggatgatcacagtgcacctcctgattcttcctatgtcgtttgcttggacgatcaaccacaagcttcttgcaacgacatatttcttgcacgtccgatgggactgcaacatcgaccactcatgagccgatctacattgactcatcatcgctaacatgcctaaaatggcaagggaaacactccaatgaaccatttaggaagattagacatatgaagatactaggattcatggtcaactataaccctatcaagtgttaaataccttcagacttgaccaacagtctagccaatggtatggtccttgatcaacatagttgtgactaatacaaccagagcctcactctattgctcaaccaagtccacattcaaagtcctcagtctcgcccaatctctaattattttccatgcatctccaagtccatgtgatagcagtaacaatacaacaaggacctatctctagtaagtaacaatccatcaatcaacttctaccataagtcccatagcatgttatactatgtgatccttgtcatactagtaggactcatatgatacaatatttatgcaggtgggctccaaagaactcctacaactcaacgcacatcaacataataacaagtgcatat

SEQ ID NO: 103600 - DNA, 648 bp, Zea Mays
ccttcggcactgttacctctaatgaagggctcaaaatttctggcatttttatttcttcaatatttgactcttcagccttacccttactagccttcgtctcaactagctcaactgatggtagctttggcattgtagctggatctttagtcctctgcataggggggaacaatttcttttgtgttggtggccgaggaggccccttcgccaaattcaggtatcacagccggttcgatgtaacgcgaccggtgagtcagaaccttcatcttcttcctcttcggctcagccgtgatggccgaagcagcaacctttccagcagcagcaatcttcctttttaccccttgccctcgcagcgggtaataatagtcagggtatacgaagccaatagcatcaaataccctgtttaaccttttcttatttcgactcccgaaggctttggacaaggcattgtcttcctttttggagtacgctccaagcagttcatcacttgtagcttcgatacacttcagccaatcatcatttggttcatcaaacttatccccaaacctgaatgtatacttcagccggaccaaatcaccttcgctagagttagtgatggtctccttcggcatttcctagctttctacaagcggccacaccctgaaggctata

SEQ ID NO: 103601 - DNA, 338 bp, Zea Mays
cataggcctcctagatggtctcgaaatgattctctatctcatccttttttgcttgctttgcttcctctgttatctctacaataatcgatgaagcctgcttatctggatgatgtttgagagccatgccccgataacttcttcgtatctgatcttcagtggccaagaacctctcgtgccccaacacaagtaatgcatagtgatcctgttgtcgacaaccagatgacttcttccctttgctgctaaaggtatcagaagaagtattaaaatcttggcttttatcatcctatgagacgctgggatcatcagtttcttcttcttcatgctgcccaagatcaaga

SEQ ID NO: 103602 - DNA, 341 bp, Zea Mays
gtttactgcaacacgttgcacgaggaagtccatatactatactcacaactacacccaagtgagcctgcacaacctgctgaggcggaagctggaccatctcaagtggcgggacgtgcgctgggtggggagttagaccttttgagccccctccttctttgaggttggttgatgtctggactcccacacctgacgatgaggccgccaagactgatggcaagcaggaataagggtgtaatagaagtaaaagtagtgtattgtagggtattgtagggtgtactgttgtataataggttgaacctttgtataatgggtattgtatcctgttatgtaatatcgagtct

SEQ ID NO: 103603 - DNA, 321 bp, Zea Mays
gggtatagtttggggaagcagtactactaatggaagctactcactatggttaatggtcgaagcacggatcactaaactggctcctgcctttttcccctcccccgggttgctctttaaataggcattgaaaagatcagagctagctggattcctgagtttacagggggataactatgtgcatggggtgtagtcgtggctcactcaagaaggcccaagccagtgttgcagggtgaagattatccatggcaaagggagggggtaaggataggagagcactgtagtggatatttctactagtgatatttctgctgatggcctgat

SEQ ID NO: 103604 - DNA, 307 bp, Zea Mays
attgataacaaatagtgatgttattaatagcacgacagtctacacacatacgccatgacccatctttcttgggaacaagtaacacaggaacaaagcaagggctaagagactcacgaatgtatctcttgtcaagcaatgcctgtacctggcgctgaatctccttcgtctcatccggatttgtacggtacggtgcgcggttcggaagctgtgcgccggggatgaggtcgatctggtgctcaatgccacgaagcggtgggagacccggtggtaagtccttgggaaagacatcagcgtactcctgcaaaag

SEQ ID NO: 103605 - DNA, 350 bp, Zea Mays
atgatgactggctaaagtgcattgaagttactagagacgagctacttggggcatactccaaggccgaggataacgccttgtccgtagctttcggtggtcagaacaagaaaaaattgaaaagggtatttgatgctattggcttcgtataccctgactattgctacccgctgcgagggcaagggaaaaagagaaagattgctgctttggccaacacagctgagccaaagggcaagaagatgaaggttctgactcatcggccgcgttatattgaaccagccgtgatacctgaatttagcgaagggacttcttcagctgccaaagtaaaagaaaccgttctgattatgcagagc

SEQ ID NO: 103606 - DNA, 449 bp, Zea Mays
tagaacatgtgatggccgatgcagttgatcgttacagtcgttcgttgttgaaatccttctcgggtagacaagatggcccacgcagtgcttttgagttaccccccagcagatcatgatctatgcaggtccagaaatgggggttcttgtctcgaatcatgagatcactggtgccagtgaccgatgttctggttaactcaacatggaatttagatgtgaaaaatgcagtatcatagatccataggccattcattgggggaaagtagccagcctcttgcagatgtagacatctagctgacctgaacgccaccaaccccggtgtcccttctcctgatagactcgcttgtcagcagccacagtgacgcttgatggctcgctcacatagaagtaggtaaggtgcgcctgccactagcatttaccgaactgactgacgtgttttaatgtgccagatc

SEQ ID NO: 103607 - DNA, 710 bp, Zea Mays
ttcgtgtgctggtgttgaatggagttcgtggagagatagactgcgttgatgttgtcgcagtaaacgagagtgctccgggtaagagagttgtggagcttctgaagaagttgttgaagccaataggcctagccacaccattgtccacacaacgatactgagcctccgcactcaagcaggagacaatgtgttgccgcttggataaacaagagaccagattgtcaccaaagaacatagcgtagccagatgtggactgacgtgtggccaagcactccatccaatctgcatcggtgtagcaacaaactcggccattgaggagcgacgaagaagaaggttgtagtcaagagtgccatgaaaatatcgaatgatacacttcacaacagtcggatatggctcctggggatcatgcatatggaggcaatgaagattgcaaagtagaagcaggaagccatagagtgtacagggcccagagttgttacgtctaaggacgcacctagtggcaggatccttcacggacaaaccgaaaggatcaaactccatagaactgattttcggtaatgaaacgacgaatagataacaagtgttgaataatgtcgtgatcaacaagaacattattaaggctaacactctggtacttaaattctggagtaacttatcttgacaggatgagactatgtatgctgaagtagcctgagtttcatcctgttgtcaaa

SEQ ID NO: 103608 - DNA, 845 bp, Zea Mays
ctttgtactctcctcctcggaagatgattgggactgtgatgaggcatacatcgactccactgaggaggaagtctcctctgaggagatcggaggagttggtagagatgtggctgcgtaacagcagctccaccaacgaggagcctgaggaggacctcgactgagatttcagcgacgatactagtgtggagagcttccttgacgtcgctgccgccaatgacggtggtgacaaggaggaactagagcgtaagcgtaggaggttgatcagatacctctgccttttatagataagatttcttatatagggtccccttgtagtcctgctccttctcgatgaaataaataaaacttttggtcaatctgttctatttgtgcttccctgtgcttgatatattttggccaatctacctgtgatgttcatgttccctgttcttgatgcatttgaatgacctcctcaccattcccattattattagaatgtttcggtagcgtcctattagcccatgaaaaacccccatcttcgtcatctctcctatggcgacggtactcttagctgactgtcattgggactcacgaacgacatcaacaagttttccttgaacgacgtgttgacttatgatgccctccgagcagctaatgacacctcgatgtgtgtatagtcttctagtcgttcatcgactttaccatttttatcattgttttttatctaaaggcgatggcaatgcatttgactattcgtccttttacatttttagatgataacaacatatcaagttttggctatcaacaacatttcttcaaatatttgccattgatattcctgctaaactagatgccttctaatgttt

SEQ ID NO: 103609 - DNA, 310 bp, Zea Mays
gcagcggatgaaaggaatcaaactgatccaaaaataaatctaaaccagcaacaagacctcgacctaggacacaaactcaatatgacgaaatctgaaaccaaattgtgcaaaggctaaggcaaagtctttagttcaggatacactaatggtttttaaagatatgacctaatgctaggactcttttctctttggattttttgtgcgttataggatgaacaaaatgaatctaaatgtaggattatacctcacaggcaacctgaatcttgataccacttaatagcgggcaaggcccagtcttccgtgaggtatg

SEQ ID NO: 103610 - DNA, 1144 bp, Zea Mays
ggtcaccccgagttaagtaagcgtgagcatgtcacaccgccttaagtcattgccgacttaagccgattactccgttagtagggtatagtggtcacccgagttaagtaagcgtgagcatgtcgcaccgccttaagtcattgtcgacttaagccgattgctctgttagtagggtatagtggtcacctcgagttaagtaagtgtgagcatgttgcaccgccttaagtcattgccgacttaagccaattgctctgttagtagggtatagtggtcaccccgagttaagtaagcgtgagcatgtcgcaccgccttaagtcattgccgacttaagccgattgctccgttagtagggtatagtggtcaccccgagttaagtaagcatgcaggttgacagtgagcaattcgagtgcctttgaagtctttttattgatgatatattttccagtttacagagtacattgtcgtcccaatagcttttgagatatagctaggggtaaaacttcctgagatgttctatgttccatgagttcctaatttccgtgtcgtccatctgagtgagacgatatgatccaggccgagtgacttctgctactatgaatggtccttcccatagtggcgacagtttatgccgtccctcccccgttagaattcagcggaggatgaggtctcccactgcaaaggatcgacgccgtatagccttgtcatgatagcgcctcagagtttgctgataccgggccgactgaatcaccgtattcaatcgttcttcttctagtacatcgacatcttccagcctagtagcctcagcttctgctatgttttctaagattaaccttggtgccccaaacttgagatcagcaggtagcactgcttccgaaccatagaccataaagaaaggtgtgtttccatgcaaagctcgactaggttgagttctcaggctccaaacaacatatggtagctctctaatccactttcctgcaaacttttcattcttgtcgaagactttctttctgagtgcttccaatatcatcccgttggctctttctacctgcccgttggctcttgggtgtgccaccgaggcatatttgatctgaatgctcttttgctcgcagaaatcgaagaactctgagcttgtgaaattggatcccag

SEQ ID NO: 103611 - DNA, 372 bp, Zea Mays
gttgttccacattatatggtcttcacttcctccataaacatcacagcccaaaaccttctagatcagccacaaataggctctgaaatagctatcaaaacacagaaatctaatttcagacactgttcacaatctgaaattcaaaaagtctgacagcctcactttggatcacctttttctcctagttgtatatagttccagggctgtgacacacaataatagttgttctattatacttattctacaagtttgctatagtggtcattaaccaaaacctcttggattccaaactacaatagcccaaagtttgctccaattgctgaaattcagaatatgaattcactaagtctgaaaatctacaatttctgacagctt

SEQ ID NO: 103612 - DNA, 340 bp, Zea Mays
aaaagatcatctatcagataatcagacattaaaggaggcaatgtacaatggatataatatggtctctatgttggtttgtttatatggacaaagatttagaaaatcactatgcattgatatgatcaagttaggaatataaagatggagattgaagtgaatgggaggaagtgtcaagccaaattgaataggatatgacattcaagcaaggttcacaatgttgaagaaataaattttgaatggatgttcaatgtaatgtgacttggagacagtctgatagggtgaagacaggcaaggaaagggctttgagtgactaagcgaaggtgaaggacaagcagatggc

SEQ ID NO: 103613 - DNA, 558 bp, Zea Mays
atacatcaaggaagatattttctgcaacaaccgagatccgaatccaagcagaagatgccaaaacgggcagccaaagtcgctctaccacctgctgcagctgactgacgcgactagagctctgcagctgccgcccgtgttcgccaatggatgaatctcactgcctccttttataccccgagtgccctgctccctcccttccctagcactcttcttcatttgcgcagaaatggtggcgagccgccttgtccctcctcctctgcgctctaggccgagtcttctccaatgtggagcaccatccatggctgccgaccacctttgctcccttgctctcccaccccacgacgtcctccaatatttccccgcgtcagctggacgccatccgagctcccacatggccgagctcccttattccctatccatcgatgcagccggcgtcgcacgtccagctgctctgctgttacgtggctgaaggttgaagatgactcgttgagtctatgacaaatgggcccagggcggatgtgagtgtactcaaaatttcagatttttgtgttgtgttct

SEQ ID NO: 103614 - DNA, 307 bp, Zea Mays
gttcttttccccccggacactggatgaaattgttctggtcagatagtgaccaagacaactcaaaggttaacgatctgtagccaaacatgcagtatcctcaaccagtcaacaacgatttacagcccagcaaacctccaaactatttatagccgtgcaagcctccaaccaactgacagagacaaatttcgcattctctgggccactgggtcgactgaggcggtaaactagaactacgtataccagacttgcatcccttcagcggttcagccatggttatggaataggttacacacttgttaaacttggc

SEQ ID NO: 103615 - DNA, 460 bp, Zea Mays
aaagatgcctgttgttgggacttgggaggaggtcgagcttttgtgccagaccatcaacacgtatgtgttttggcgagattcagtttctgttctcctattctgccagcccaaagtaatagactcaatatcgaacaagaatatagcctaggtaacgaacgattcgttgatactttgagagtttgagatgctcattttctttcttgtgtccattatttcttgcgtccagggctaaagcgaacttgattccaacgcccatgactattgatttgcttgtgtcagggagtaattctggtaacgacacgtgatagagcaaggtatggcgaccaccctaccttgccctattgtctcctccgcctagagcagatgacgatgatctatctccccatcatagcagcacacaagtgtagggttacgggcatggaacggattgcgtggcaacagtaccttccactgcaacaac

SEQ ID NO: 103616 - DNA, 272 bp, Zea Mays
tacaattcattgcttacagttgctcagaaaggtgagtaaggaatatatgaactgttaaataattaaaatgtacaagtttgaaaacatgatgaggctaataaggaagttacaacataaatgcacaactcatgatttgtttagaacaagagggacacacaagtcaagagtatttgcacatgttgtgcttaagcagtagcaggaattgtgcatcggtttgtttcaaacttgtacattgaaatgatactctctagcaggaatgatactctcctggt

SEQ ID NO: 103617 - DNA, 605 bp, Zea Mays
gaagattggagaggaatgatggtagacccaaggcagggggagctatgtcatggcttgacgagagaagatcatcaggaacaatttgaagggcgttgtcaggggtgatctcagccccgccagcagataacaggcctctcgcatctagcttgccgacctccaaggcaacttgtttgttcaaagcagtgtaagcatgcatcgccgtcgccccattggaccgaggtggagatgacccaacatggacgtccatggaggtgtgggaaggagagcccacctgaacaccctcgggggctgggtcacagcttgcgctacccacaagagctagatcactatcggcaacacccttgggggctgggtaactgccagcaccaccctcggtggctgggtcttctgtagtagccacctctaaggctgagggctcctctgtcacctccatgtgagtcgggcgactcggaccatcgtcttggcattgaagactgccctccaaagtcaacgatgcacgagacattgctcgggatacctccaatccaacgtctggaatttctgaacaaacaaccatcacatcatcggcagttggctctgacagcatatcctcagggacgacctcc

SEQ ID NO: 103618 - DNA, 366 bp, Zea Mays
cgaggccaaccctatcatcgtgttcacaggggtcatcgacccctaagcattggtcccatgatggtaactagaccaattcaatgcttcttgtagctctcaagtcattcttaggagagcttcaaactctattgtgttggtccaatggtgtcaacttggcatacgtagaatattcatcaaagcaatcccactaccatgtgcatgttaaacttcacacaggggcattagaccctaagagatggtccgataggactgccataccaacccaatgctgctaggagctttctaaacactttctgcaggagcgtcagaccatggtcgacattggtatgacgatcatcgaactcttgtcattggaccaagcatctc

SEQ ID NO: 103619 - DNA, 996 bp, Zea Mays
cagaattcagcccaaccggcctgcagaaggggaaaacccgcgtgtgcccgcgttgccggtcttgcgaaaaggcccctgatattttaaataacccgaaaagcttcccacaaactattcctagagtcactgacatcttcaaaaacacccctctagttctatttcttctccaaatcgatccaagactacgacgtgctcaccgtcgaccactctgctgctcgaaccggccaagattggtggtggctgtccaaattaattattgggcaagcattatggactcaatacaaccctagaacaagcttcaattgggtggttatggccctggcttagcctgaccacggcggcggggaataccgaacacaatttcatgtgttccaggtaattgagcgtggacaagcatagagggtggagccgatgagtatcacgagcgtatatgggtgctgaaacacgattaagaagagtaggagcagacctgggggtggctggccacggagcgcggaagattttcacccgttggtgactgaaaaggggaaaacggtaccgcgacgggtccaagtggaattaggaggtgaggttggggctacactgtcgcaaaggactgtggattcactgtgcgccactaattttgggagaggtggagaggattctgtgaattttgtgcttcaaccgagctcactggtgaagagatgaaaacctcgtcgtgggtggcggggctatttaaaggcgcggtggtccggctagcgatccacggccgcggattacatcgtttgtgcatggttaccacgtaaagaagggacacagtgagggaggagcgaggcatgggtaacacggcggtggaaatgaccgagccacggtgaccgtcggtgaattatctccggctaggctcgggctaggtcagcgggattgcgacacgtccgaagctacctccccgtggtcgattcttaccccaaatcactcagacacatccgattctatagtgcccctgatctttatcctcgc

SEQ ID NO: 103620 - DNA, 369 bp, Zea Mays
attttggtgcttcctggatgcatagagaatttggagagatgggcctcatccaagattttcttcttgagatccttgtttttaggaaccaccaatctgctttcaaaccacaatataccctttccatgttggcggaaacatttatacttctcggtcttctgatggagattctccttaataatctgcactcccttgtcactgagctgggccatgatgatctggtcttgcaaagctggctcaacagaaatgtgagacagagcactagaaggaatcacttcaatttgcatcttgctcaactcatcacacaaggtgttaatatgagaatccatcacaacatagttgcattgcaactttcgactcaaggcatctgct

SEQ ID NO: 103621 - DNA, 442 bp, Zea Mays
tgtatctcaacgcttgtaggtagggcttgtaggtagggtgtgttctacatagtgcatcagactaagcaacagaaaggcatctgacaaatggtccccaatttgatggcaagaaatttcctagaggaaagtcaagcatcgcattagttcaatgcgcgtagtcagactaagacattgaacgatcaaatggccgcaggttaggtataattgttagttgagtggttagagatatttataccgcttgtactcatccaagaaaccttccttacccatttgtgtttagttagtcacatatatattgaaagcaaaagagagtttacgtctagtgaagtgaatgagatttgatagtcatgaaattaacaagtataccttccacattataccctaaattatttagcacgtgtaaagtatccaaaaataaacttactcttagtggtgcaatgtg

SEQ ID NO: 103622 - DNA, 450 bp, Zea Mays
cgccattttcttggccttaccatatgggttgatcgggaactgcacgacatatatagtttatgctcagaactcgagaaggagaagtttgtaaactttaacctcatcttttgttaatgctagctagagaggcgttcaacttgattttagaaaggaactaaaggtttcagaaatcagaactgaactactgaccatgggagttccttcagcgatgggcatcttgtcaggctctccataggtcgcacatgtgctggagtagatgagagtcctcacattgtgtgcagccatggcttctagcactgctagagtgtttgcagtgatgttgcggtagtacctgttcgaagcggtttaagagagtattatgtgcaggcaggggactgaaaccgatgtatttgaaacgacagcttgaacacattatgtatgttaaaccagaacaaactcaacttctggtgt

SEQ ID NO: 103623 - DNA, 320 bp, Zea Mays
ctgtgggtgtcctgtacgccaccgtttggggccgccacgggtaggtgatgggctcgcaactgtctgatcttgtggctatgaccctgattaaaacctaggatgtcgtttcgggtaattgatcggggccataggctttgaatccaagggcgggtgtagttcaaggaagaaaagggctttctggccgtagatcatggatccgttgaccgtaggcatcatgttcgggcaggcagatctggcgcgttaatccgtgggtgaacggttcagtgtcgataaggtgattttaaatccaggataccgatagttgatcagacggatgtcac

SEQ ID NO: 103624 - DNA, 478 bp, Zea Mays
ggtggagaagacatgacgacatcgcctgagcatccctacacacggtagcacttcagcctacgccgcaacctacttctacgctctgccccgattagacgagtcaagagcacggtgggcagtagcacttcaacctacgtcgcaacttattcttgcgctctggcttgattatacgaggcaagggcacggtagtccaggagatctacacgaagaccagaagaagatctgttccccacgaacatctgactgatgcgatcacgtgcgtccgagaggccgatagactcacgctcggtgcgtgacaaaccatcgcaggaaagagtccgccccttacactgcaaaaacatccaaagcgatctatacggattactcaggggctaaaggactacatctagcagatgtgcacccgataggcaaatggactcacgcccagtgtgtggcgaaccatcgcaggaaagggtctgccccttacactgcataaaac

SEQ ID NO: 103625 - DNA, 1419 bp, Zea Mays
ggttataggatagaggaaggagcgagaagtaaataggcatgtcttaatagtattgcccctttcattctgcaactaaagttggggtagaggagataggattgcacaaaatatggaacaggaataggacaacttggctagagagaaatggcatacatgtgacagaaagagggaggtgacaatttttggtgtttgctggccacccaaaagatagtggcacctagttaaggcatgccacaacaacaacaggcataccttgaaagaagtagaaggatttcctggaaatcaatggtgaaaaagcctgtggatgtgatatctaactagcatcaaggagtaataagcataccaaatgtcaggtaaagcatcaataggggtgaaaacgggacggatacggacggatactaggtcatctcatatcctaccctaatacaattttctcggatacaggatcagatacggatagttaaaattcgggacggatataggacgagatcggataataattgaggcgggtaagaaacggatatcggatattacccggataggtaacggatattagtcggatagtccgtcctgatgatattaggttcccaaccatccaacaaataaataaaataataaatacacaattatatatatgatagctcaaatatagaaaaaatattaacaaaattgacacatacaattcaaagttgtttttgccgtgtggcgcttcaggcacagcgtcgtggtggacgaacagaggagtgagcgtctcagccactaaagatctcaggcaacatgctttggtctattgggtcacgtcattaaacaaattaacaaaagttgttttggcccaagactgcaaggcatgttaatggatgggctggccgactcagcttgttcgcatgtgcgatgtgcatgggctagccgacgaacgagtgaaaattgaaaaacgcgtctagcggcttgcactggagacgatccacggaagcagaaactgaagccgaccagccgggtacccgcaaaccgggtacccgtatcctacccgtactttccgggtatttgtcgggtagtggtcatcctgtatcctacccgtattcgactgatttatattcgggtagtatccgtatccgacccgtatacaaaattacccgtattcggtacccgaaaaaccgggtattttaagtacccgtatccggtacccgccgggtaatcccgtcccgttttcacccctaagcatcaaggagctataagcactgtgacataggacataatgtattataaccaaatgtttgaccatttgtgatatgttccttaaaccggcaaaacatatggtggaaaccatatattaggtgaaaagatgaagaccaattcaaaaggcatattttggtcattcaaaaacttttgaaattttggtatatctagagcgcaaacaaatat

SEQ ID NO: 103626 - DNA, 341 bp, Zea Mays
caagtagcctcgtatctctcaagttttcatggagcgtagatgttggtttttatccacatgtcatcttatcgacacattacttggtcgatggccgttactcctaggacccctaactcaccgaccttagatactcgtgccattcatagctttgccaccgtcaatctaaacgggatgcaactagtaacgcgttgccaacttttccggtttatctttggtgtttggggtaccgattctatccaataatcatcaccacaactgattaagtataaacgattcttaccttttttctcgcaaattccaacttacgtactgaaacaaaacttaatcagtgctaataaatt

SEQ ID NO: 103627 - DNA, 1178 bp, Zea Mays
gagctgtcgtgacaaggacacgagtgagcgggtgccgagcggtgcgcaggcagcagcactgcgaacggggacggcgagaaagaaatcattagcagggagggacgacgcggaaaaggaacatggagcctaatcagcaggacgatcggttggaggtcaaacactcctcctaattttcctcccttgattccgcggttgtagaatagtagtaagtactaggattgagaagaacgagagataagagagacctgagctggacgaccgacgcagggcagggcagggcagggcctgccgccctggtttaattctagtagtagtagtggtggtgctttgtttagcagttagcacagagagcccactcaaaccaatccccacgtcacgcgcacgaactgccgaggaagtttctggaacgcttgattggcgttcagccgatttggccgggaacgggggagtcggcaatcgcgtgacgttttcacgcggtgccgaaatccagtgtgcgatgtagtacgtagcccccaaccaaactcaaaacgaccggcaaataaatatcctgggcaaggtggtcggtgagttagggttagggaattggattgaattaaagcccagagaatggtgatcattgtgtctagtactactccaccagacccagagggcgcggattaagcggcggggcaatcagcaaaagctgctgccgccacaccgaggggcggtccggtcggagtgagctttgcttcggtccgaatcatctgataaaaaggtaattcgtcgtacgtgtcgcagctaaacttaaacctgtgatgaaccaggcaaagcgtgcgcatcatattcatacctgcaggtttgtttgatcttctctttactcgatcggcaggaacaccgatgaccaggcaacgcttccctttttctttctttctttagggcgggcccagggtctgacagtccgttgtgcctgtgtctgtccacaagggaagaagaatgggctgatgaaggaaaaggtgggggccaggcatgccagaaggataaagtgaggcccggttcggttcggttctggggagagtagtagtagactcagtcctcacgccgccggccgcctgcctccggctatggcaggaaatttgcttttccagaaagccaggcacgcagcgagagccgattcagaatcctaatcggatccaaacgga

SEQ ID NO: 103628 - DNA, 701 bp, Zea Mays
cgagctctgccgcgttgcgttgcgttgcgttgcgtccatccattccatcacacacacaagcgcgcgccgccgtcggttcacctcgtccgtccgtagtggccggcggggagatgatcgagctagcgcaccgcgtaccgccggcacagaaagctcgagtcgttgtttcacccggccatttcatatatcctgctctggagctagctgtagcaacggggaagtgtgggcatgcatgatcgatgtctcgtggttgacctgctgcccgtcagttcagggaaggagcgagcttgctagctagctaggtaggcagagatggtgaaaaggaagcaacaagggcctgcattcaccacgagtggtggtgcaccgtgcagcatgtggtcgtcctgcattcgtgtccgagtgatttacagagctccaaactccaagctagcattgtgtttgtcgctgcatcaacttcgtcgtcggtataacctgattggtaaccatcctggggcctagagtccgccataaacacgaagtaatcatctaagacatacaagcagtgttctgagtcagagtcaaaacccgagtcagatcagggttcgagtcgatggtgggcgaagcccgagtttgagttagtagtgcggtgaatttgggtcatcctgactttgtcatggtgtatatcggatcatcgaaagcttgtccgacggacacagggaccgtca

SEQ ID NO: 103629 - DNA, 844 bp, Zea Mays
ccatcgagggacgaccggtttattataataaagccgaggggctcatatgcaaacgttcaggccgaaggggtatggatgaacgagagccattggatttaaaggctatggcccagattagatctggcacaagcccgaactggtaggagatgatgacagcacgatcggggatctttggttccaatttcattagcacaagattgcatcgagtccgtccacccgaggatccatggtcataatccatcagggtgaagcggtatccagccttcaatcctaccccttcgatcgagaatctacagctatttcttggttcgactgaaacactacgaccgctcgatcaccaccgtcgatccacggacacatgaccacaacacatctcccccaaccctagtggtccaaaacaacggcacacgcatgcccagcggcgccatcgctgggaaactcgaactgatgcatgggcacagtacttccctaacccaagctggctacacgacgctacggactccacgaatcttacaaaggacttaccagagcgggagatgacccatagacgagtgcccacgacggatagaagattcgcagcatgggtcgatgcccgacgaggaattttatccgctccaaccaattatgcccgccttaccttctctatcgcaagtagcagcgaccgaagaacccgacgacgaaggcactcatggcctggcccctagcgcaacggcgcggcacacactctcttccacccgacgccggagctcccaatgcaaaatttgctcggctcaatggaaggatggagaaggaggcggtcggggatttatatatcccagtaggcggctccacggttaagcactac

SEQ ID NO: 103630 - DNA, 362 bp, Zea Mays
gcaaaactggatatattcaattttaaggctgattgttgctccttggatgaaaatgttaatagcagggctacgttttcttgtatcagtgaagatattgtggggaggtccacggagaaagaaactatagttgctatgttgacaacatatagtgaagaagagattttgaccatctgtatttatggttttggtggccttggtaagaccactcttgccaggttagctttcaatgatgaaaatgttgggggagttttcgattaccgagtatgggtctacgtatctatgaaatttgatctgaagaaaattggtgaatctatactttctgaaattgatgaaggcaactgtggccaccacggaaaccttca

SEQ ID NO: 103631 - DNA, 383 bp, Zea Mays
aggttataccagcttctgggagaggcgccaccaccaatgtcccggcaggagcagcatcagaagaatcctcagccagcaagtcaagcatagcacttatttctgcttcactaggatccaaaggcacctcaaagtggacctgccgttcatcatcaggaatttccccgagaaaggcaaccaaagtgttaacttcttcggcagagggtcgcactctaaggcccaaaccgccatcagcgacaggtggattcgacacaaaaagagtgaaggccttgggaggaggcaggttccatgccgagtatgccactggggcaccaacatttgataccttgcctctaagaatcatctcaagtcggttcaccaagtctacagagggaattcttgaaaac

SEQ ID NO: 103632 - DNA, 570 bp, Zea Mays
gtttttactgaccagatgccaagaaagatgcagtcaaccaagtccagagatgtgaagcctatcaattcttggccaagcaacatcatctgctagcacaacaattgtagactattccagtcacttggccctttgcatgatgggggctagacatggtcgagacattcaagaaagctcagggaggatatacacatgtgttggtagctattgacaagttcacaaaatggatagagtacaagacaatagccactctgacctcgaccaaggtggtagagttcatcttggagattatcttcgggttggtatacccaacaacatcatcacaggtctgggttcaaacttcaccagtgccgaattcttcgacttttgtgaataaaagtgcatccagctcaagtatgcttcggtagcgcatcctagggccaatgggcagatagaaagagcaaatggaaggatactagaagcacgaaaaaagagggtctttgataaaaacaagaagtttgcagggaaatggatcagggaactaccctatgtggtttggagcttacgaactcaacctagccaagcttggcatgg

SEQ ID NO: 103633 - DNA, 321 bp, Zea Mays
tcatgtggcaacttacgaatccaccagtaacaaaattgtttcctgatgctccagctacaatcctactatagcaatcactcctaaattcttactggattaggcttgaatcccatctcaaagatggctcaatcacactttcagtctgaattcagacttaaggcagtctgacagcccatcttagggccaaattatctcaaaacatttcatggcgccaaggtataattcctataacaaagttgtcctccttgtatagctctacaaacttgatgtgttgacctaggacaaaaacttcataatttggaagatatagggctacaaagt

SEQ ID NO: 103634 - DNA, 533 bp, Zea Mays
ttcaacaatactaagtgtttcccctattatagtgaaatgtcatgcacaaagaccatactccggaaagcaactggaccttagggtgtggcccgtcatgagttggctcctcgacatgaggggagcagcagtgggagcaatgatcccataggagacttggaggctagagtcgagcatttgactatggagctacgacatggaggcagggagcaagcgcgtgctagttgtcgcatcaccgagttgtcaggagaagtggaacgcctacaacaagaattggtgtagtgtgatgaggctatagattgggcagtaaccttgcggtccatagcttgggattgtgaggcgactgcctgagcccaggtggaagagctgagtctggccctagaaaaatctgcaagtgcacaataacatcctgcacgaagaagtgcacgtgttatatgaccggctgcacccatacgaaccaccagaagttgccgatatgggcgttggcacaacggaagccagtagagaaggaccttattgggagctagacatttttg

SEQ ID NO: 103635 - DNA, 869 bp, Zea Mays
gactgaagaagatgtgccatggtacagtgttctgggtggatcagaatgctagctcagctcaccgtcgttgatcgccgtccggattcgtgcagggtattggatggataacgccagaaaaagggtaactcgtacgtggcaccatctcctgagctcggccggagttactcaccggccgccgtgactcagtgagctctcgccgcgctgtcgcacatgctttgattcacctcactatgcctcttccttatgtggttgccatgcgttaatagcccacctcgtagccgtggatcgatcaccggaccgccgtgcctatatataggacagggagccacggcgaggtgctcgctgttcttcaagtaagcttgagtacaaccaggaattcacattgccctctccaccttctcccaaatcgaatgcgcacggtgaaagcacagcctctcacggtcctatagccccgatcccatctcccaatttcgcccagagccgccacgacaccgttttcccctttctctgtctccggcgagcgaaaagctctgcgctccgtggccagccctctttggtaaggtcctgtccgattcaagctttgttttagcagctctgagtattcatgaagctcctcgtagtggccgtttgaccaatccgagcgtagattactgggaacacaggatcgacaccacgggttccgccctaatcgtggacagatagtttccagtggggtttgtgtcgattaaatggatgttcctaggtcgccttaagccagtgatgcctccccggtagttagccgtaacagtcgtcgccggccatggccggtacggaccacgtcagggacgaacgacgagtgcgccatggccaggggtgtttttggagaagag

SEQ ID NO: 103636 - DNA, 279 bp, Zea Mays
cgacgggcagccaatgccggtgaactgatctgcgctggccgcaaagcatgggggtacggcggccagctacccgagttatccccaggcgaagatcttttgccccaaagcgctatccggtcactagtgagcgtgaatcgtaatggcggcgacgatcatggcgtggattcatcggcggcgaggaggggtgaacctaggatcatgttcaggttactgtaccatggcgcagtctactcagttgacctgacagaccaacattgagctcgattttctcctgatttc

SEQ ID NO: 103637 - DNA, 756 bp, Zea Mays
ttgggagccaaggtgcaccggaattgcactgtaattaccagaattacactggaattaccggaattataagcgattaactgttagaacaaatgcagttctgaaaaatagcaaaaatattccaccaaattccgaacccttacgaattgcattagaaaaaagacccagaggaagcacacgcgaaaagcagcaaatgtttcgcaggaagaggtcaaatcgttgggagatgtcctgtatgtgggggagtatcttttaggaagatgtacagatagggagaagaagtatgaagggaatggttggagatggccttccaaagcccgcaaattccaacccaaactgtccaaaattcagaaccacatcaacccgttgcatcccaggctcgcgcattcagtcagcccccatctcccccaaaccctagccctgaaaggccgaaaccagtcaaaacggcgtcgcatcgccgactgggcacccacagaaaggcaagccgcaagcgccaactccgtgcccgcaacctcccaaccacaaccacaaaacccgcctaaaaccccaccaaaacgggggtaaaacagcaccaatcgcgcccagaccgtgaagaagaggcagaggagacggatcacttacgtgcttgggtgccggggagcagggttcatcgtagatgctgctagaatctagttcgatggcctcgccagcgcgcggcagcgccagaggtagtaggcgctcgtatcggccgcttgcgtgggctagaattgggtgtgcgcg

SEQ ID NO: 103638 - DNA, 310 bp, Zea Mays
cctcgagtgcctacgtaggcacaaaaatcactcctaccagtgagaacttcgtcaaatgcttcgattttgccctcaatccatttcatcacaccctcagggtcaccacgaatgaaatttcgcttagccaagaacacgccaacactagtaaaagcattttttagtttgtctgagcattgcatgtcaaatgttatagcattcctccttcgcttatcgaagctcttcaacattcttttgaacccttgaccactcggtgtcggatatctcgcgcttcgatttccccacattgaagttctcaataacttcatcaagc

SEQ ID NO: 103639 - DNA, 720 bp, Zea Mays
tattggccaacaacaaagaaggatgcgacaggtttggtttagaaatgtgaagcatgccagttcctatcgaagcaacaatacttgtccacccaacatttgcaaattgttcctataacctggccctttgtatgttgggggctggatatgatcggaccattcaaaaaatctcaaggagggtatactcacatactcgtcgctattgacaagttcacaaaatggatagagtacaaaccaatcgcctctctaacttcaacaaaagcagtggagtttatttaggaaataatatttagatttgggatacccaacaacatcatcacagacttgggatctaatttcactagctcagagttctttgacttttacaaacagcagagcatcctaatcaagtatgtgtcggtagcacacccgagagccaatggacatgtagaaagagccaacgggatgatacttgatgcactcaggaagaaagtattcgacaagagcgaaaaacttaccaggaaatagattggagaactaccgtatgttgtttggagcctacgaacccaaccaagccgggccctgcatggaaacactccgttcttcatggtatatggattagaagcagtgttgccagtagatttgatctttggagcacccatgctaacatttgaaagtatagttgaagcaaaagcatctagattggaagatgttgacatattagaggaagaacgtctgaatgat

SEQ ID NO: 103640 - DNA, 965 bp, Zea Mays
cagtatgccatcgcaaactcagcgctacaaacatcaccggatgtggttgtgccgggcgatggaggtcggcggcgcccagctagaagcttcgagggagcgcgggagagaacagaagactgacagagcgcgtggcgaacagtttatagcgcacggtcacccagactccaaattaagcggacgaggaacacgcgctatattttagcggaggttttagcggttgctgttggagccataccggacgtccagatcctctatatttagagtacagggtgctttacagtctcttgttggagacagccttatagttgcggaagacaatatcccgagcggaggacaatggatcggtgagtttgttgcgatttcctaggagtttgttatgattcgggtccaggtgctacgaactcagctatggtggtttttcggagagggagaagctgacgaattggccccaccaatcagagacaaggcaccacgccggcgcgcaggtagggatactagagcgtggacccacccaacggtgaccaagatcctcatgcaaagaagaggagggggaaaatagagttgggccggcagtgggggtcatttggcccatcccgtccgggcagaggggtggggctgggccaaacggagtgggaatcggcccagagacgtgctttttcctttttttttctatttccactttctcttctccatttaaatccctattttaaatccaaattcaaacttaagttaggagctcaaatttagatgcgcaaacaaggtcccagcatgatatgcaaagtataatatgtttaatggatatatttattatcctatttaagtaaaggcttttagatatgcaacataaaaatagaaaataggtattcctttaaaatggtttctagtgtacaaaatcctttagagagtactttgttagaagacaatttaaatttaggagaaatgacttgagaggtagaaaatcctta

SEQ ID NO: 103641 - DNA, 343 bp, Zea Mays
gtgagaaccaggatgcggcccacggggcgcccctagctacaaatagatgactagtccacagattgtatgaatcgatcagttcaacaaaaacataagctaatagaaagaggtggacaattcacttatattatatttctacaatgtacatggatcgacgttgcaccagatatgtgatgttctaaatttctgtgtatgaaaaggtaatggctagattcttttatgtggtgataaatggaccccttgcctagtagcgttcgaccactaacaatgatatacctcttgaggctagaaaacagtctcaactcacttgcaacttgtagtttatcatttaggtgagattgtt

SEQ ID NO: 103642 - DNA, 346 bp, Zea Mays
gtagatagcccctctgtcgccggggacttaactcagtgaatgccacattgagcagtctacggtgactcctcccctttcttaccgctagctcttctccgcccaaattcgtcgtactcgcgaccgctctctataaattgatgccccagtgagcttcgctaggttattacgcgcccagtgcaccagttgtcgcctcttatcatccaccgtagcgtcccaatttcgcttttcccccaattccgttttccgcgccgccgtgagcttctcaccgtggccagatgcctataggttagttcaagcttctctgcttgatgttctagcatccattaagcctcctattgctcgtaga

SEQ ID NO: 103643 - DNA, 609 bp, Zea Mays
aaaagagtcaactataaagggaggatactcaaatgaaaaatgaagcaatcaagagaaacaacacctacttggataatgagatcttcaaaacaatcaatggtgtggttgtaagcattctaaatcttttttcattgagagaatactaggcataaaatgtttattgcaaatcttgtaagccttgatcaagatgaatggtgcttctccctattcgtctctaaagttgaatgcatctattcctttcatttcaattctttgatgcatatctctagggggagcctatttctatatcctgatcatatcgagactatcgctttatcctagtaatctcatatagtctcttgtatgagaataagtttctcatgaagtatgctactacatatcaatccaacttgttaaaatagcatatttactggattctcctacttcaaagcttatataatgcatatgttgttcttttgatcccgtctgttatttgtttgatcattgaatgaacacttatgtttcttagtgtcacatattctatcattcaatatctcttgatatgcactaagttaaaaggagaatccatgatacatctatgcaatttgtgatccatttgatatatactga

SEQ ID NO: 103644 - DNA, 283 bp, Zea Mays
actaatccagtcatgggttatgagctgttcgcaaccgtcggaacacattcgcgcggctggaattttaaaaagtgacatgtccacggcgtgcgaggttcgctctcgcctttaatatagaaaatttatgacaatctcttaaaagtacgagattaaaacatcgttccaaacctctagagctaattgttagtgttatcaactagataactaatagtagagatgttatattgttgtactacctccgttcacaaatatatgatattattgactttttcaaaaatttaat

SEQ ID NO: 103645 - DNA, 2348 bp, Zea Mays
tgaatttccagtcagagatgggcaagctgcaatgtcggtggctgggcgtttctccatctcctccttggcttttgccctttgctgcgactttctaactgaaaacgctgcttcggatgtctgcgtgtctatttatctgctctacactgcataaatgtgacgggcatttccgtgccccgtacttgcattgcatcatcatcattgcaccagttctgcggtacggtacagtatactgatgactgtaaaacttgttggtggggggcagcgtacataattgcaatccttgccatgaactcgtcttctttacttcgatctaggcaccactctgtccccttctccggccgccactgattctcctgcaaaccaaggacaggcttctagtcctcctcaatctgcatttgctcttggtccagtagctgttccaactggtagtagctctgaacttcctatgcgtttgtgacattatgctgtcagaccataatcagcactggagtgtaacgccttactgcattgcttcgtttcagcgccgaccactccatcggcgagtccttccccggagaaagccgcggctgtaagtcctgctgctcccacggagccacgaattgccccggctccagtggctcctcctaaaggtaactcatcttcctccgattctgctgttgtccctggagtcagatatgatcttccagtcctaatggctgcactgcaaactttatgttattgtagagtatagtgcacctcctccagttgaggttgcacccactgatcccaccgatgaggttcctccaccagtagctccaccacaagctgcagttggaaatcccactccaattcttcctgggacacctgcattgctaccttatgttcaggctcctgctccatctgtcgttctcaagcctaatccaccagtcgtggtgtcacctccacctgcgaataatcaaccaagtaggccggttgggtctggtatattttctgattgatagaagtgattaaggttcttgattttcatgaaacttttctttttttaaaaaaatctcaattcacttgtgaaaaatttctgcagtccctccttatccaccccctgcatcgccccctccggcaaatggcattccaccatacccaccttcaggaaggtttcctgctattcctcctgccacttcaggtaaaattcccctctctgaaagtacatcaaatcactcaggcaacatatatctcttgtcatttcccatttcttgaacagcagtcccacctccagccacatcacctgttattgcacaagcaccacagcgacgagcagatcctccaagtagagattataagaacggtgaggataaaatcacccagtttcatacatctgattgtgttttaatcccttttgtacttaatattggatgaatatttaggaaacgcagtgccgccagcaaatacttaccctcctacaaatctcaagaagcatcatgttccacatgcatcccctccaaagggatccactggtcaaactgtcccaggtcacaaatcaccagttacaggtaatctcagctattaaacttaggctgtgtccatttgaacattacaatgtagaattgtagattgacaaccaaaactacttgtttcaggatctgcgcctgcaacaagtcctttgccccagaacacaaacatgccttcaatcccgaagaatgcttcatcagtgccacatgcccatccctcaccaccaagtatagctccagaattggcacccactggtagatctcatgctcagggatggaaatccagtaatcccaataacaaaacaaatagattacatgccccatcttatccaccgcctcgtgctcaaggtttgacaatgaacttctatcggcagcctaaatattgtcacttctcaacattgatctaaaagactttgcattacagggcccgaggtctcacgaaccccaagacagactgggactaaaaactatactcaccatgcgcctccaccattccctcaaggtaatctacgctaacatgcgggtttaaagattgcattcatttcacttactaacaactttcacattgttcttttctgtccaggacaccctagctttcctgtacactccccatccccttcaccagcctcatcgaggggtcctgcgaacgcgaagaaaagtactttcagtgccttgtctctttgcttcacttattgttgtcttttcctcttgtcaatagaaatttacagaactgctggattccacaggaaatcatatttctcctactcttccttcaatccctcccctaccagagccaaaagcaccgtcagcgcatcctatttggacattacctccaccaccacctaattcaggtaaagttttctg

SEQ ID NO: 103646 - DNA, 547 bp, Zea Mays
aataaagggaaccaactttttagaagattggaagaaagaatcagctcaactgaatacatgtttgggaaacaacggcagtctcgaagtcaaaccaatgctagaagacctcattggcaaagctcaacgcctagactcagagacagcaagacttgtggagaaagcccacaaggaataactctcggacctcaggacagatgaacaaggagccctttggttcaaaaatcgtatgtgtgtaccaaaaggggaggcacgagaagtcctgctcaaggaagctcacaactcagcctactccatccacctaggaactaccaagatgtacctagacctcaaaaccaggtactggtggagagggatgaagaaagagatagcacagtatgtggcccggtgtgacacctgccaacgaacgaaggctgaacaccaaaaacctacaggcctattgcaacccctccccgtacctgagtagaagtgggaagaaataggcatggattttgtaaccggactaccccggacgcaaaaagggaatgactctatctgggtaataatagat

SEQ ID NO: 103647 - DNA, 436 bp, Zea Mays
ctttcgttgaagtcccacgccttgccagcatgggctttgcctcccttatttttgtagaagaatttcttcttctttctcttctttcctttcttgtcatttccttatcatcattactgcaatatggacattatgctatataacgaccgatcttaccgcacttgtagcacaccctctttccacggggcttgtagtccttttccttctgagttcgtagaaattgctagaagttcttgatgatgagggtcatttcctcatcgttaagtctagaaggattgatcaggagccctttgattggggcctcctcctcatttgttgccttaaagacaacaacttctagctcgatggtagtaacatttccttgaactaattcttcaagatgcttggactcattaaccatcatctcatggctaaggaatttaccaaacatctcctctag

SEQ ID NO: 103648 - DNA, 743 bp, Zea Mays
catactgtagcatggtgtgattcccttcacttagtgctagaaattcattgagtttgtggtccatgatggttgctggaatgtgatgccccctaatgactatcttgaactcatctgatgtaaccatgtggtcagctggctgcatggcgaggaaatggtcccaccacctcctagagggtccacgaagctgatgggcggcaaatatagtcttggccgcattggaacatgcccctgtaagtaatggaaactttgactccaccactctaagccatatgtctgcatccagtggaccttctacccttgtgaatagtggtggttgagtgctgaggaattcctgataagttgccgctgttggtggacattgatgctgctcaccacccccaaagtgttgaggctgttgctaatgctatgtgagctgtcgcaaaatctcattctactaagccatcagctcctgcatatttcctgttgttatactcatgattcatacttgaaaattgtgggaggaataatgagcaagtagtgagaatcttaaaattcctgatttgcttgcatttcacaacttgtaccaatagggtgagactcgaatcatatttttgaaacttaaaaccattagttttccattccttcaaaagaagttctaggggttacatttggttagaatgactcaactcactagcctagtacatcatgagtgcagaatctaagctattctgaggagtgctacttcctaacacttctatcctaag

SEQ ID NO: 103649 - DNA, 412 bp, Zea Mays
cttacactagcatggatggcgggtcgatttcttaattttgagggggcctctttgataactttaccataacttatgactgcggagtgctctggttcgcccgattgtaatctggcagccctgattaaatcggctggattatgaaacggtatcacattacagccacccgatcccggatctacctcacggatttaatgaagcttgattccctctggatcgctcgattccgcatctacagcccagacatcatcagggtgagatctagtccgatccattcatagaccgatctatggttaggattgcaccaaggtacaatgccaacgcctatctaatctgagccaaaggatcgggagtcaatggtatccggctcatccccttcctcctacgttcagacacggtggcggtccagccccac

SEQ ID NO: 103650 - DNA, 674 bp, Zea Mays
cctagccacatcacaagtgatgaatttagtgtgttggttgttgttgacactgaatgtaatggaaagtgttacctacccaatggtgtgtggatatgtcatgggatacctcccatggaggggacaagaatcgagcagtagcatgggagctgtagccaccaaaatgcacggactgatagaacattctcccttactatgctagccatgaggatatgggaggtcatggtgtcgatgtggtggtagtgaccaggagcaggaggacatatgcccaacgtaactaggacggtcggagatgttgaaggcgatgggggtagcggtctagttgaggcaaccacacccctgggaccttggcacaatggttagctcatcgagtcgaggcaaggtgtttgtatgacctaccttagtaatgggtaggccacatgttcgttggccacgatggcggtcgctaccagcacttaagggtgcttcgtgccttgctgctagagctcatggatcgtagcgtttgacgataatgaaggactaatgaggcgacgagacgggagaatgagagccacaaaaaaattctctacttgagagcacaccgtgacttgttcccaacttgaatccaacccctcgagactcaaaaacagagtagcactatgcagatcaatctagtgtcgattgactaaaccaaaatg

SEQ ID NO: 103651 - DNA, 1415 bp, Zea Mays
gttaaatttgattgggtggcatcgataatctacatacggatgagccaaatttgaagggagtgtcaataatgtttgtttgttcgccgtccaacaccacgtcccaacctcgcacgaggcaaaagacatgttgtaccgagtaattacgaatgacgatgctggagacaaaaaaacaccgccttctctcaggacaatgctccccatcccagtgccgacccttcgcaaacttgtcagggctgcggggctgggctgccacgccgcaaactccattgtagtggtgcctcccggttcggaatgattgcctcttccctcctgactgccggtggacgggcgacctgccgtcgcaactgtagcaaatctgttgtcggtctttggtctgtaatgctatcctgctgtctctccaagtctgttgtatggtcatacctatccctgtatgtcacatgtcgccgtggtgtgttccccctctgtcgtggtcgtagtgtgtcccctggtggtctgtcagttcagtcatgagtccgggttgtaaaaactgtgttgtgctctcgtggaacgtccgtggtttaggcgatccggataaatgcactatcgtccgtgatgttatctcccttgcctccccgtccgttgcttgcctacaagaatccaaactctgcgacctaagctgccttaaagcgcgctcgtttttgcctaaaaatctagccagctttctctgcctcaacgccgacggttccagggggggcgtcgtgaccgcctgggacagcgctgtgcttgaactcatgtccagcatctctcgctctttctccctcaccaccaccttcagctcgcactttgccaatgcgcccctcaccatcaccaacgtctatgccccatccaaccaccaggactccccaaccttccttgatgaactctcagacctcctccccagcatctctggtccttggcttctgatcggtgactttaatatgttgcgcggtgctgctgacaaaaaccagggtcacctggataaccacctgtgcaccatgttcaacagcaccatcgactcccttgccgttgccgaactccagctacaggactgcctcttcacctggtccaacatgcgttctgttcccacactcgctcgtctggatcgagcctttgtgaacaactcccacacctcctcattcccctccacctccctcaccaccctgcccaggcaaacatccgaccataaaccactgctggtctccatgtctacctccatccccaaatcccaaattttcagattcgaaaacgtctggttgcatcaccctctcttcctccctgaggtcctccctgcatggcaccaggagtttccctgttctgacgcggctgcccggctcgcaggtaagctcaagcacgttcgcgctgctgctaaacagtgggcaaaacggcatagaaacccc

SEQ ID NO: 103652 - DNA, 734 bp, Zea Mays
cccgagcccgccctcgggcgagggacgtattgagggaaatcctcgtctcgcctgaggtcccctctccacagaaccgtcgtttccgcctcgcccgagcccatctcaggcaatgaagacaacctcgagccaggcctcagtcaaaggtcataggggacatgagcattcaatgcacatacctaacccacgcgacatcgcaggcgaataggaacgataggaccatagtcctgtccactttcactgactacgatgacacgtgcctgggaataacggctactgttcccccacgccgtctgccaactcctgatgggacacgcgtacgacaaagagtggtatgacccccgggaagaaactatgcctcgcttgaggttggcctcagcctcgaaacaaactctgcctcgcccgagctcggcctcggctacctgccccccgcgaatcccatagaacgccactccttcaactgtatcctgcatggcagcgagccccaaagcaagctcggccatgacctcaggaagacttccgccttgcccaagcatggcttcggcctcgataataccaatgaaagaacgcccaacgtcacaagaagtagcaggactgacgtattaccaagagcttttctccatactcaccactactccaaccaatacgatttggatagcttccccatcagacaggctcaggtaagtaaccgagccctcagctctggcctcggctctgtgcatagtcaaagatacaaa

SEQ ID NO: 103653 - DNA, 636 bp, Zea Mays
aaatcttttagattaaactgtaaagtacgaatgtagagtatactccatatttatatgctagcacggtggtacgttatactccatatatgcataatataaacgttcgtgttatgtttcgatttattctatgctagcacggtggtacgttatactccatatctatactatttattaagacagcaaggggtaggctgccccattcccggttctgccatttcccattcccaattctgtcattcatagtggattccctgttctcagcacactcaaatcactcaaatccacgcgcctccattcccatcacgcaaaccattcttgttctgaatactctgcacgtcgaccatttcatagtggattccctgttctcagcacactcctccattcccatcacgcaaaccattcttgttctgaatactctacacgtcgaggtccacttgacagtctctctcttcctttgccatttcccattcccgattctgccattcatagtggattccctgttctcagcacactcctccattcccatcacgcaaaccattcttgttctgaatactctgcacgccgaggtccacttgacagtctctctcttccttttcatgtcgcaactcaacgttctctcgcgcaaaaaattgccgg

SEQ ID NO: 103654 - DNA, 500 bp, Zea Mays
cttaaagcgggggctccttcgctcgccatcaccaccagcttgggcggctccgagtataagtcttggcaaggttcgaagaccccggcgccctagagcgaagagtgtctcgtcctagggaagaccgtcatctgtgggatgggcccatgcggcgccccgctggccattcatgcccatttgtaagccccttcctggggtaaggcttatggtgtatttaatcatgttgtacttaacctcgttgtaatgacccccaagggggaatattcccgggctaaagcaggtaaccgggggcataattatacttaggagggtgtgcccacccacatggttacctataaataccatcgcattgtacattgatgggtgcttaacaagacgctgcaattccctacccactgttttgttgagcacttgagcattcccacttagggcccactccaccacgtgtcaaacattcccaacatttggtgctcactattcgtgcttcgacaaaccaatcccgc

SEQ ID NO: 103655 - DNA, 719 bp, Zea Mays
ggtctggtcgatggctaaccgtgactagtcggctgatcgttaactatatgactagattcgaaatattaggctggagccccatagcccctctttggatccgccactggctcgtaggaatgttctcacaactctgaactacacaatcactagcacaatgttacggcccgtggccaccagcggtgagacaaccgtgacgtgagcaatcgttgccgccgtcaaccgagacaacagcgaggtaggtgggatttctgttcgtattatttcctttctgccagtttcatcatacacacaagagttatacccgtgtcccaacgtcggcccatatcaatgttcccattacaacagcccatacggcccacatccagccttacacttcctattccacatccgccagcccctgaacatcttccagccttacccttcttgaccagccgacgatcgactatctccaatggaaccagttcatacttgctgaggtccacagaaaccggaagagtagaaaacactggcgaatagttagcagtaaaaggcttgagttgggaaatatgaaaaaccggatgcacctgggctgataaagggagatccaaacgataagcaacagacccaatacgttccagcactttgtatgggccaaaaaatttgaacgcgagcttgggacagggtcggttcaccaccgaatgctgagcatatggttgcaacttgagcaaaaccaaatcccc

SEQ ID NO: 103656 - DNA, 596 bp, Zea Mays
cccacacattgttttgcaccgagtggatgctggagtaatgcaccagttcacggagtgggcggagcgccggtagggcaccgccatgtgaggcactagcgccgcgagatggggatgcccagggtgggatatgagatctctggcattgaatcggatcgaatggttggaattaaaccatagtgttacccccctcgatgcttgaatcctggcggttgggcatccatcgaagggctgagattgggttctggcgtggtcggatctcgggcattgatttcggatccgagggttaggattgtgtatcggttaggtttggatttggatctaatccaagccactggtttgatccaacgactgtggtcacccgataccccttcggccaggctattttactaaagagaccctgggaagcatgggaattaacccgtagtccacacagaagcaagtagtagggcgttggggtcttgtaactttttgaagacggccctatactctcgtattttttatatttgcagtccaaaccgaactcacttttaatagaatgaattagaaaaattatttttatatagaaattaatttctagatcttaataaactcataac

SEQ ID NO: 103657 - DNA, 752 bp, Zea Mays
atatggcacagaaaacaagagatgagacgatcgagaggtcaaacgacgtgaaaacgatgtttgaacgataaaaagtgccataggaggtttggaattcgaattgaggcacgaaacgacgtggaattgagccgatacttcacgaataggtttatatgggtgaatatgagtgaagtgtgtgcttggtttgaatttaggcgaagaaaatgagatttgggcactcggctcggaaacgatcgcacaaaacggggaattgagtgaaattgaagcctggaatatcggattggcgtgaaatttggcaaatatgttactggaggtgttgtgaaggtgcctgaaaattttgggttcaatcggggcatttttggctggtttgggcattttaccgaacacgtgacgtgcggtgaattaggtttttggagatatggccatttgaggattgaaaccctcccaaagggagctagaaacctgcagggatactcaatggccacataggaacacattgcaccacatggattcactggaattcacaggattttgaattgggcacaaaaggtggaaataatgggtgcactgcctagagaaatagagagagagagaagaaagagggagaaggggctgctcaccgagcgagggcatgagaggagcacagggtcgaggtcgccggagaacagtggatgtcggtgaggggagatcgccggcgagagggagcaaatcggtagagaacagagagcagagagcacagaggaagaagagag

SEQ ID NO: 103658 - DNA, 532 bp, Zea Mays
ggcgcttggagtggtttattgttgagaaccatggaagttctctccccccacggtcggggagacagccggatgttcgcactctgagttggaccgagtcccccacggatcaggaggtggctgaggcaggggctttgctagctgaagttggactgctgaaggagaggggctgacttcagaggctatggttgctgattttgtcttcaagaacattcagccgttgaaggacagggcatacccggcttatctgtaccgaggtctagctgactcaactcgggttaccaacagaagaattcccattgtagattcggtgaaccgacttgagatgattcttagaggcaaggtatcaaatgttggtgccccagtggcatactcagcctggaacctgcccccttccaaggccttcactctttttgtgtcgaatccacctgtcgctgatggcggtttgggccttagagtgcgaccctctgccgaagaagttagcgctttggttgcctcgctcgggggaattcctgatgatgaacggcaggtccac

SEQ ID NO: 103659 - DNA, 398 bp, Zea Mays
gaggaggatgaaatccctctagttcggaagaacagccgatgctacatagtcagcggggaaagtagtggcgttccttctccagccttgtctgctctcattggtctgcaagaattgtctctggcaaactttgatcagactcttgaagacatggtcccagaagatctgttgtcggagccggcagatggtggaatgatggatatttgtgctgatgtgcctgatgccgggctagagttatctcgaacagcgtcccgtgcctcatcgaccttagagcacggtcttaagggtcaggaagctagtctggattgttctgctcccatggaagtgggtgaaggtccttcagccttagaggtggctgttacggagagctcgaccctcaaggatggcactagcatttaccc

SEQ ID NO: 103660 - DNA, 386 bp, Zea Mays
ttcaatccccgccgccggactccatcccgccgtcgtcctccatcgaaccggctcagcctgcccacgcctttgatccccacggcggcctccatccacgccggcgtcctgcatctgcgctggcagcctccctcccgcccatgtcttcgatccccacggcggactccatcccgtcgtcgtcctcctccgaaccggctcagcccacccgcgtctacgatccctgccggcggcctaaatccacgcccggcgtcctccatccgtgtcttcttcggtaagatatcattcttgagtagctgcattacatggcctacaaaaaaattacagccttactgcaagatggaaactttagtgcgtttttaacctctatataagttccactttcttttgtc

SEQ ID NO: 103661 - DNA, 445 bp, Zea Mays
agcaatttcattattaccatcacctataaaataacaatgttagtgggaaagcataacgaatatggtggttaaatggcagtatggtacatgtataatagattcacctttatacttattctgcagccaatcttgcatgcacattaaggcctccaagatatccgacgtaagatgattgtggtgctcactaagaacccttccactagtgctaaatgtagattcagatgccactatggtaactaggattgcaaatatgtcttttgcaaccttccacaaagtgggataacgtgtcccagctaccttccaccaatctaggattttgaagttttctatactgataggaaccaactcatcctccaaatacctatctaattcagacttaaacctcattgttgtatgccttctactagcaactcttacactaattgtagagaatacatctgaatgg

SEQ ID NO: 103662 - DNA, 775 bp, Zea Mays
agtaccaatgtgctctgcaataacttgaaatttgcccagtgcaatttggcttggacaatccggtttcatgtcgcaccggggcctagtctctctgaagattaattctaatgggctttgaaccaacttctctttcttctcatcaactttgacataaaaccatatagtcttccagccagctagccacatggtacgataactgataactggagacttcgcatctttgcgataagcaaaattgtagcagccaaagtttccgtccaagccatcttctctagcttttgtttgataatgaagctcatgtactcggtagaagccttcggcaaacagttctacccctggcttcggagggcccatatgtagatgctaagcctaacgatggcattaggagttagctgatgaagataaatcccaaacttcttcaaaacatcagcaatcatctcattcaaaggaaatcttaatcctgctttgaagaagcttttaaagactaccacctcatccttttccggcttcggagtaatttcgtctccgccaaagcgaattagctcctttttggcctcactgaaatagcctaacttcatcaacttaggcatatcatcttcggtaacggtggacctcccaaactccaggtggccgggtttagatggcacgacactataatcatcttcagattcatgttcctcagcaacaacctgctcagcctctgcggcaggtgcaccttcgtcagaaacatcttccgacactactaaccccgaccgtttcatcacttcggaaatcg

SEQ ID NO: 103663 - DNA, 369 bp, Zea Mays
aagaaatctaggtcatttgatcagaaatctaaggccacgattaaatccgccctaatataaactggtgagctatggagaccattggatcgaagtcgaagggcccagatttggtacaacaagtgccaaccgcaccctcatctaagccctccaccatgaatccaacggtcagggcagcccctacatcttagccgtttactccaaatcggaccgccagcgcttatcttctacctcccgctactatacctctctctatactatacgtatgcgagaccctggtgtaggtacagcaactccggcaccgccggcgtggaagaggagtctcaccatcgatggtgatgaggctggccgacgatggagtgtggatccccg

SEQ ID NO: 103664 - DNA, 304 bp, Zea Mays
catcactgacctgggatccaacttcaccagctcggagttcttcaatttctgcgagcaatgttgcatccagataaagtacgcattcgtggtacatccaagagctaatggccaggtggagagagccaatggaatgatactggatgcactcagaaaaaaggtattcgacaagagcgagaagcttgcagggaagtggatcagagagctgccatacgtagtctggagcctgcgaactcagcccaaccgagctctgcatggaaacacccttttcttcatggtgtttgggtcggaggcagtgctacctgcc

SEQ ID NO: 103665 - DNA, 514 bp, Zea Mays
cttctgctccggtttgcgatgaagtgccagcagaggtcctttatgaggttgatcccaatggtggcgtccatgttgaagttgatcccaatgggtgtaaccgtgctgaagttgaacccaatgggtgttacagtgctgaagttgatcccaatgggtgtaaccgcgtcgaagttgatcccaatgggtgtaaccgtgcctaagttgatcccaatgggtgtaaccgtgttgaaattgatcccaatgggtgtgaccgtgcaccagctgttgtccgtatttttgatgaggatgaagaagaggaagaagaagtctcgctgattcgtaagaataaccagcattacagaggtagtagggggaatagtgatattccttctccagctctgtccgctcttgtcagccttcaagaactgtcaataacggattttgatcaggcccttgaagatgtcattcctgaggatatgctatcggagccgactgctgacgacgtgatggttgtttgttctgaaattccagacatggg

SEQ ID NO: 103666 - DNA, 617 bp, Zea Mays
taataatgctccagcaggtcttgtaaaacctccccgtaaacccatcaggcctaggagctttatcagaaggtaggtcagcaataatatcccttacctccttctccaagaaagggctatccagctcactgagatccatagcaggcctatgacagcccaataaatcaatagtaacgctccttagaaaatcagtgcctagaaggttcgtaaagaaaccgtccagaacttcttgaatatcaccatgatttgtgtacacccttccatcctcctctagttttgaaatgaacttcctctttttatggtagacagcctgtcggtgaaagaattgagtattgacatctccttcttttagaaattaaatttgggaccttagacatgcaatagttctttgcaaagacgcaagcaccagacaatgttgtttcagctacccccataaccaaagctcctccctggacaaggatccgatatcctgcgccatctccagcctatgcaaaacctcacgactaagacccaactgggcattgacactacccacctatttatgaccccatgactgcaaacatttagctaatcttttaaacttcaggaaatcttctccaaggtacaataatcctgcaaag

SEQ ID NO: 103667 - DNA, 479 bp, Zea Mays
ttttattgagaacgaacactcacaatgcaactggttagcaactaggatgtgctttggtgtgtcgacttgctagctttgcttgattgtgaccatgcaacagagccatcctgttcctgcccactacctctgcgttttccttttcccttttcaccatgttcttcaatcaactctaaaagtgtggtggaggcattacacaacatgcgaataatatcttaatttggattagaattaacctatacaactataaagtataataaataagatgaagccatggttacctttttctaattcagccaattgctccatgtcctcctggatattaattggagtggtccttcgcaaccaatcctgagtgcaaacaagtgcttccaccatgaatggagtaagagatgtcctgaagtcatcaaggattcttccaaacgtgctaaaaactgattctgaagcaacagttgacaccggaattggtagcacatcacgag

SEQ ID NO: 103668 - DNA, 630 bp, Zea Mays
ctcgaattcgaccactctaagcaaagcatccaaggtaccccatatggcgccaccattcaaaacatgggtccattattggtcttaattaacacaagaacttctacctcggactaattgtctaaggaaactacacaacttgatatccagcatgaaacaacatgcaatgaagctcaaagtaagtcatagatgcaatcaaaacacgatttcacaccatcgaatttggatgcttacatcgacatcaatgtcctaaaacaacactcttttatgaaggggtaatatgcacgaagcacaacccttactagcttcaacaattcattttaattcaatggggaaacatccacaccagatgaatgtataagaagatcaaacacctcacctcaaagcaccacaaaacaagtagttctattgaaacaaaactcttaatcttcctaaaccttattctttccatcatgaaaagataatcatgtaatctcacattctttgcaccccacaaaagggagaaagcctacagaactaatggagcaataaagccgacaagaagccaataacattctacgcggcacagttcatcgaagaaatgccaaaaactccacaaagagcactgacagcacaacaacaacacaatacttg

SEQ ID NO: 103669 - DNA, 593 bp, Zea Mays
tggtggatttcgattctgtttccgactcccagaatccgcgttggttttgcttagttatcgcccttgcctttcgccaatgcattcagtttgccttctgcagtttgctaccacaataaatgtgtataatttgcttcctacaattgacgtctggcagcaaatcatttggacaacctacaacttctattcagaacagatagtatggttttgcagtaaacaaatggttacctattcctttccatactcaccaaaatatatgtctctcctagacctatagaccataaatctcatgtttattctgccaattaaggtgtgcttactctgccaattgaagtataggatgtttattccatgttcctgcttactctgccaattgaagtataggatgtttatttcatgttcctcgatacaacacaccttcatatttttcctattcgtgtttcatgttttactccatcagccatgtttcattaaaataactaatcgtgcatacctatttaccacacataaagttgatcacttcttttgtcagaagtcaccattattgctgcaataggtatgaccaccatatttcctccataatcaccatatttttc

SEQ ID NO: 103670 - DNA, 610 bp, Zea Mays
cacttcatccgtgattgtttggcagaagggagcatcaaggcgtgctacatcaacaccaaggatcagcttgcggacctactcaccaagccccttgggaggatcaagttcgttgagctttgctccaggtccgggatggtccagcgagccaacaagacgacgcacaagacttagggggagaattgttggaataagtctcgtggtttgtgggaaggactataacagtcttttggtctttgctacaggacagtagccctgcagtctgttggtccttgctacaggacagcagtcctttggtctttgttgaagttggtctttactacaggacaacagtcctttggtctttgctgcagtatggacagcagcagtccttgctgcagtgtggtgtggacagtccttttggtctttgctgcagtatggacagcagcagtccttgctgcagtgtggtgcgggcggttagcatctgcttttgtaaagcagtccttgctgcagtgtggtgtggacagcagttagcatctgcttttgtaaaggtgtaggacatcatctagtgtagccatagtgtaggacagcacctcaggagcatatgctcggcacctcggcaactccttgggct

SEQ ID NO: 103671 - DNA, 1127 bp, Zea Mays
gaatcaggagcagcaacaaaactagtaaatcttcaacttataaataatttatgtgtgaccttcataagattgtagcaaaaaatggtttgaccctgtatatactattgttttgcctttgtttacaatagagaccaactcaacaactgcatgtgatatgaagaaaacaaggacaatgtaattaatatctgaggagcgggaactaccttttcacctttatcagataactgagatagtgttctttggtgtacagatgaagacacaggatattcactgtttctctctggagatataatctgcatgttttgttctaatgaccctgagcaaagacttgcatcgggtttgtcgttttgcacatcagcagaattaccaacatcaatattaccacagtagttatcctgtgagaatgtaacagtcccaataatatcagtcaacgattttaagcacctttctagcctttcagactcttctatggtggaaactttgtgatgtggcccctcttgtgaaaacaacacagaaagggcactctcatacttaataccatgaagaaaatctttaagaacttcttcccttaaaggtctacccagatcagcatattttgtttcctccaacagtcttaatcgttcaagttcctgaacataataacatagaggtttagcagttattaacatttcatagcacatgtacacaaacaaagtagaaaacaaacctcccaaactgctacaagtgactgaaccatttttgtatcttctgttgtttgagaaagagaagtgtacatcttatatttctcatttaggatacctgaaggtggaactgaaatttataatgcatgttaaggatattaccaaacaatagtgttagaatgtgatagcgagaccttctactctagaatcagcttcaagcattgaagaactctgtcgaatagcgaagctcaaattggttcctcccaaatgatgcgaaggggcagaactacccaggatagaagaatgcgacactgttgaagatatccaaactgttggactatttatttctaaattatctgactgtgcctaccattgttagtccagaagaaaaaatgaagtttttagtacgaacaaagaataaagtctgaactcaaaataaaatgaata

SEQ ID NO: 103672 - DNA, 970 bp, Zea Mays
ccacccaaggggccaaacttcagtagaccagctggacccgccccatcacggttcagccagcagagtcagagctctttccattccccctcagtggcaagcaaccaacccccggcgaatgcatgttggcactgcggtgatcccagtcacttcaagaacaactgccggcaactgaagccaccaggacccgcctactccaactcggtgaatggccccaagaatacctcggcatccgcccccaaggcgccctcctccgtcagccagcagaacaaggccccgtaccaaggaagggcacgagtgaatcacgtcgatgcctaggaggctcagcaagctccgggagtagtgctcggtgagttccttgttgaatttactcccgctaccatacttttcgattctggagcatcccactccttcatagccactagttttgtggaaaagtatggcattccctctacccctctagagattcccttggtcacttgaaccccagggtccgaccttctatgccagctcaaatgctcccaagtcagaatccttttaagtggggtagtattcctagcgggcttaaccatcttgccatccaaaggaattgatgtgatcctagggatggattggctaactaaacacaaaggcatcatcagttgcgcagataagacagtcctcctcaccgaccagcagggaaagtcagtctcttgtcaggcacagccacccgccagtgacccaatgatgttcaatctagcaacataaagtatatcagtagtagaagaattcatggatgtgtttccagaagaattaccaggaatgccaccagaaagagaagtggagttctacatagatctgatccctagaacggcacccatcgcgaagagaccataccgcatggctccgaccgagttagcagaactaaagcttcaaattgcagaacttcagcaaaagggatacattcatcccagctcatcaccttggggagcac

SEQ ID NO: 103673 - DNA, 438 bp, Zea Mays
atttcatggcctgaatcagtgatgcagcgggagaaccctgaagcaagtagctagcggtagagtgtgtgtttgaatgtaatggcattagggcgtgtgggccctgtagcttgggctggcccagtagagtgcctataaaggctagatttgttactttgtaaacagctaagaaataacagaaatcaaaatatccgtacctcgcgtgcgtacctgagtccttcattttgttcgtggtaactctcctcgccgcagttaacctcacgtcgcggtggcgacgccgcagccacggggaggcgttacaatatccagcacatctccacattgtatcatgttggagctccacctgtattactaaatcccagttatcaagatatttgaacagggcagctaccgatggagcttcctgtatatcttgaaccagcagcgatcaactgaaacttc

SEQ ID NO: 103674 - DNA, 437 bp, Zea Mays
tgaagcaactgagaactttgaagttgaagtggtgaagcatgagatatgtgaaattgaaagatcaagagcgcaaaagaatgtcgatgagatcgtgcctccaaagaaaaatgttatgaaatatccatggaatgcgctaagaatttaaggaacaactttgctaaggttggagcctattccttcgagcagaaatttgttcgtggaaatcctaatgaagtcattcaatggataaatggtgaagttgaagttttggagaagttcttagtgatcgaggagatttttgtgtcgttgctggtgcctttggggccacatccatcttggagaaggctggttgcgatcatgctaaggctgtagcacaaccagacttcgccttctcagctgatgatatcagaaacccttcagccgaagctactaccctaggtgggaaattttattccgaa

SEQ ID NO: 103675 - DNA, 435 bp, Zea Mays
aaaacaccaacatggcacgttatcactcggctgttatttctaaaacgccgacatcaccagtaatcactcggccgttattcctaaagcgacgatgcggctctaaaggactcggctgttacctctaaaacgccaacgtcgcaaaaagggaaaaccactcggtcaccacctctgaaaatactaacagtaaatcagctgttttttctctatgaatatgcaggcaaatctaaaacgtgactcgatgattccaagtcgtttctcaagcattagatccaagaacaaaagctgcattaagcataaatacgatcgaccgatcgacgagaaagcaaaggagcgcacacagaatggggcgaaatcttcttcattataaagggaggggaagtattaccaaacttaaaaaaccaactcattatgagttggttttcttcccactgttcg

SEQ ID NO: 103676 - DNA, 341 bp, Zea Mays
cacatctgtggttaaaaatgttaatgctttagatggtgtccgctttttgctgttcttctagcagacttctaccttcagaacttttaattgttaatgtcttttctggtgcatattatcctacctggatggcggatgatgcagaactctcccctaaaaagtttgcgactttaggtgtgccgtggttagctgtaacccgccggggtgtgtgattctcccctgtaaaaaattcagacttagctagaagtggttatggatggtttggcgtattttccttttcatgaagcctttatgtctaggattagtttcactagcttccttctggtgacaaccttctaagtcgt

SEQ ID NO: 103677 - DNA, 651 bp, Zea Mays
ggtgcattaccatcctggcaaggccaatgttgtggcgaatgccttgagcagaaaggcccagtgcaattgtatgagcatggatgcaagagtcaccaccctgtgtgatgagttgtgcaaactaaacctggaagttgtttcttcaggtactttaaattatatctcggtggagcccacattacaagagcaaatagtcagggcacagattgaagacaagggtgttcaggttatcaagcaaatgatcaagcagaaagcagaaaaatacaaatgcttccggcaggacagcaaaggaatcctatggtttggagatcgattggttgttcccaaggaccctgagctcagaaagaagatattggatgaggctcacctttcaaaattctccatgcacccgggcagcaataagatgtatcatgatctcagatccttatactggtggaccagaatgaagagggaaattgccaagtatatatccgaatgtgacacctgccagagaatcaaggccagtcatttgaaggtagcaggccctttgcaaccccttcccataccatcttggaaatgggaggacatttgcatggatttcatcgtgggattgcccaatacctcccgacaccatgattctatttgggttattgtggatcggttgaccaagaccgc

SEQ ID NO: 103678 - DNA, 463 bp, Zea Mays
tgctgaaggaaagaggtctgaccgccgaagttgtggttgctgattttgtttttaagaacatccagcccctgaaggacagagcatacccggcttacttgtacagtggtgttaccgactccactcgggttactaataggagaattcctgctaaggatttagtgagccggctagacatgatcttgagaggcaaagtatcaaatgttggtgctcctgttgcctactctgcttggaatctgccacctcctaagtcctttttcaatttcgtgtctaatcctcctactggtgatagtggtctgggtcttagagtgcgaccctctcccgaagatattgaggccttggttgcttctctttgtgatcttcccaatgatgagaggcaagttcattttgagatgccagcgagtccagatgatgcacaaatgaatgttgtgctcgatatgttggctagagaatcttctgattcggc

SEQ ID NO: 103679 - DNA, 376 bp, Zea Mays
gcggactggcgggacacatgtctaggacgtgggggatgtgtatggagtttggtactcatgatggtttagtctcaaaaccacctagctctacggatggcaggtttcaccgagtttgggcctcaaaactcggcagtgtggttccggtgggaatcagaggaagcatgtggcgtcatcgtgaagggtgcatcgaggcgaagcaactttgtgtggagtgtgtgaacgtcagatgcatattccaagagttagtccatgttgccctcaattaagtggatgggctctatgtatctagtggtagtttagactagtgaaataacccccctataaataggctggagggctattgtgtgcaaccatctctttggctagctcatttgtg

SEQ ID NO: 103680 - DNA, 344 bp, Zea Mays
atttggtgagtgtgtattacggttgactttgatgaattgtgttgttgtgaagattttatgtgtatgttaattgtgaaaaatctagatgtaaataaaattttcatatttttttaccatgcataagattattttcgttggcacctacctagttaccgaaaataggccaaaataaatttcggtgctagtattgactgtcgaaaactaaccaataaaactttcagttatcgaagtcgtcgccgtcgaaaataaacgaccaaaatttcattagaagggccctagctatttttggtggcatccccttagccgctaaaaaataacatttacttttggccaacaatctagaa

SEQ ID NO: 103681 - DNA, 577 bp, Zea Mays
ctacagtggctggaggagggagaaggaacaggaggacacgcactgctactggctactggctactgctacggcaacacagcaaagcaaaaggctctctctgtttccgtgtggtgggtggggttggcaagggccaaggacggggcggggcgggacggctgcagtaacgtaacgaaacgaggcagcaggtaggcattggaacggaggaatccaatgccgccttgccatgtcaagttttgaggcttcgacaaacattccatcgtcgaacacaggaggcggacatggtcgccgtgacagaaatttagaaatgtcctttccaggaaaccgagaccgatgttgggagaaagaatcatatttttttttcgttgcatctatctttgaacttgcagttgctaaagctaggcgtagaagcatcgccggcgcgtggttcctaaacaaacactgtacaactttgtagagatgttactcctgctgtgaacgaagccttcctggggtgcgtgcatgtcgttgaacgggagcaccgaccgatggctcctaccgttacgtcttttctttttctttctacacatttttaatttgc

SEQ ID NO: 103682 - DNA, 711 bp, Zea Mays
ctactgatggtcacaagtgcggtggctgcttaatcttaaatcaagatagatacctgtttaatgaacagcacatgagactaactaaatcgatttcaaaagaatgaacccaattcagttccaactatccaagtaacctgcttcttcgggaaaaaaaagaagaagatctggagctatgccaatttattgtcttctgctagtgcaaggaattgggatcggtgatgttggtttatagcagtaattaagatagctaaattcagcagcttgtgttcatagctccgtcgtctctgcttgccacaaaaaaaaagatcatagtaaacttaaattcaattaccacaacatcatctactggccgattcgaagtgacttgctatcccaaatcttagttcagtctagcttcatgattgtctttgtgatctgatacctttttgcaagctttttccccctttgtgattgtctttgtgattctgattctgacgtagtttctttctttctacagaagtgtccgtgagaccgtgacgtgctctcttgtagagagtgtactgccacagtggacgaggtgacatgaggcgatgtactgcacagtggacgaggtgacatgaggcgctgttgttgtactatatagctagccgcgcaatcccaattccaattccatagctgcgctccgcgtctggctcagatgcacggaccctcgaccaaaactcaaagctgagc

SEQ ID NO: 103683 - DNA, 877 bp, Zea Mays
caattttgaagacaagtcgaccacaaagtcctctcgactgtcgagggtgagcttagtggtctgagcaaggttagtgaggtgtgccatggcatcgcattgcagggcctgtaggcggtacagtgcactcatacaccaaacagtgatcctcccaacttggtcgggatgcatggcccacacgtctttcacttggctcactcggttgcaccacatggggtcatccctcttctcagcgaggaagagtcccagtggatgcatcaccatctccaggggatgatatccacagaaggtggtcagggtcttcatagttgcggccttggtggtgtcgtctaccttgaacccaatagtctcggagtcaagggaacgccaactcggttgcagagggtgagcctccaaggtcagccaaaccctgcaacgtggcacccgatgctcgtcatatagctgcaccatatatagagggggtgtggggtaaccggcggagcagagcacctcccacaagatggagggaaaaccctcgtgggaaaggtagtcggaactgaaacgagtgtctcctccattgatgggggtgggtgaagtcatatgtgaaagagggttatacgtaaatgttatggtagtggaaaggaaaaacatgtacccgggttgttaaaaggaggtgggttagattagattgatctactcatttcgttattcatcatttgttaccttcatgcttagatgcatatttccttagtttctaatttcttcacatcgataatgcatgcatgctggaaagaacatcgcctcactgatcagaagggtgcttctaaggcatccctacaatttcaaggctggcctatatggcctacttatttagccacctgttttccccactattcctaag

SEQ ID NO: 103684 - DNA, 458 bp, Zea Mays
atgagcccacaaggacgaacaggaggaggagcgccgacgaggactagaaggccagagctccaccaagctaatacttagctaggactcaacctttcagcttctaagctccacttccaccccatcaagagatctgggagcctctcctccctctctcgactgcttttaacccatactactagtttgaccatcaatggtgtcggtagcgaaagccaccgatgactgtatgtagggacattttgcccgaaccaatataaatcttgcgccctccgcacacaccctctagagcccggaacacacacaataaatttaattgttggagcgaggtacggaacacagacaatttgtatgggtgatatcctcatcatcctcccctcctcttgaattaaagtcatccacgacccaagtggtggccaaggggtagtcaagcaaccctagggtgtacaaaaccttgaggccca

SEQ ID NO: 103685 - DNA, 396 bp, Zea Mays
caaacaccaaaatcatttagacaaataggttgggtccattttccttataggtagtagagtgggaactccgggttcacaattgcaaccgtcgaaccttcgagctgagtgatcacgacagttgttggccatgttctcgtggtcttgagagtggcatgggcctcctccccattttcttccaactgatctaggtctagacctaggtcgataaggtggataatagggaccaccgtgtcaaaactactatagcagtcggccgaggaggaggcactgacatggccacacatctagtcagcatggtggtggcctgacgttgcgcacgggtgaactagggacctagagcctatggacgttccagcacgggttgagccacgaccaactagggtttagtcgtggttg

SEQ ID NO: 103686 - DNA, 389 bp, Zea Mays
gcggttgcagagaagccacaaacagtgccagcgaggatcctgccagcagcgcgagaacctcggtgggttttcgtcccatgtaagatcgcgccaaagtcgagcgagcccaggaacgtcccgatgcatgtgactcagccgatcgagacctcacctccaacacggcgaactctgttgtccacatcacccacccgagtgtgggctcatataactcggcaaaaagaagcgagtgcttctggctctggcatgaccctgaaggcaccacaggagaccattccgttaactccaccctcaaaggagatggaggagtgcgtgtcaccacacctagctccttcttcccgaacatcatcttcatccacgaaagagtggagggcacacccatttctgacgac

SEQ ID NO: 103687 - DNA, 468 bp, Zea Mays
gaccagaagagacatccctgctgcaggtggccgaacagcctaaagctctgaaggagcaggagaaggagaacgaggaaggtgctagccaaacatgtcaagcatcatcatcgtcgactaaagcagcagcagcagcagcagctagcacaaacacacgacggaaagcaagctccagccgattgggggccctctggatgcctgtgatcggcactttgctcagggcttctgctataaattagcttggctgagccatggtggcaattttgtaggtcctgctagaattggcaacgcagtgccaccagatagctcgaaaaacgatcaaaactatctagatagggtgaaggttatctgcattggcagcgaattaagatttgcattgccatcttacttgtcttaagggctttagaaactagagacagctctaattatagtcacttatatgactcacgttctcccagtcacagaactccc

SEQ ID NO: 103688 - DNA, 337 bp, Zea Mays
tgccgatcacgtgactgctcacagagttgatttgtgctgcaataacactacaaattcatcttcaactaggctagtactgtgtgaacatgcttttatttactatgcgcgatttatctattgcttatatagtgattgctttaggattaattagtgattgctttaggattaatttaatattaaaagtgcacagttttctcatctaatttcacattgcttggctcatgtggacttgtcaaggtcaaggattcctctcctgacatcactttgacgtataattttgcgacagcgtaccttggatagtttgatgtgttctaacctctagatttcgtaatatact

SEQ ID NO: 103689 - DNA, 557 bp, Zea Mays
gtggttctatatcaaggccgatgagaagaagagcgagaagttgaagacgatggtcatgagcccactaagtttaagcttcgggatgaccaaacccttgtgcaataagaagccagggtcaccatgccagctggtcgtagcagaattcagagtggtggctgaacatatcagcactagggatgtagtgcaagaatatcaggccaacagggtgtctctaacgttgagttaatggagtatgccgaagctgaaaggaacaaggaagaagaatgaacttgttcaattgccctatcggttcaagtttgagaaacaattcaaagagccttgccaagagtggctagagatgattgatgtgacaccccagtgtcacttagggtttcttccttaagctaacccaaaccattatcacatgtaaaccattatcacatggattctcgtattgacaccttgtgtgatgagttgagcaagatgaagattgaagtaattccttctggtgctttgtctcacatttccgttgagcaagccttacaagaccagatcatcatggcccagctcagtgacaa

SEQ ID NO: 103690 - DNA, 409 bp, Zea Mays
aaaaaatgctcatcaaaataactagattatctctcattcaaatatctagcctaaccatatccatctcatcttaaaagactctaccctacacttatagatccatcttatcttaaaagatactctattaccttagtagatccacctaacttaaattagtctaatctagttatatccaacctaatccatattctatttaatctaatatgatccaatctaaagtgggttattaacaggttagttaatttagtggtataggttagacactgtctctacaaacatatcttaacctaaattaatgtcttccaccaactcgtccgtgaacaatgacctaacctacatcataggttgcctaatccatttgttcaaaaaagcaaagtaaaactctgtccaaacctacccacctcgtgta

SEQ ID NO: 103691 - DNA, 302 bp, Zea Mays
gcaggctttgtcttagtaggcactgagggcccagcttcggttttagtgtgacttatggcagtttcagcatctttcttcataggaggagttggtgtccttgtcgtctccatgacatcgtccagcacactagtcattctccttctcttgggagttgttgcagaagcttttgtaatcttcgacaattctgcttctgccggtggactcaagatttctggcagcactattactttttctagctctggttttttggtttcctcttctttggtttcggctggctcggctatgggcaccttcagcaatta

SEQ ID NO: 103692 - DNA, 498 bp, Zea Mays
atttgattccctttcttaatcaaaccttggttcaaagaaaaaccttgttcatttggactatggacacttaattgagccaacatatcctgggctgcctgatccgtgacataggaattgataacttcttgaatccaaactgatgtcacttctgaaacagactgcagagccatcacatgacccactctggacaaagcatcagcagctaaattctctttgccttttctatacacaattctgaattgcagccccataagctttgccatacctttcttctgcaaatatgaatgcaacacttgatcctccaaaaaaactcaaagctctatgatctgttcttatcacaaattctgcatgttgcagatattgcctccacttctccactgctaagatcagagctaaaaattccttttcatagatggacaacaactgattctttgtgctcaaagctttactgagataagcaataggtctatgtttctgcagtaacacaacccctattcc

SEQ ID NO: 103693 - DNA, 456 bp, Zea Mays
ctttggtgttcaaacctgctcctgatactgcatttgtctgtgcttcgccgtctaatagtgtctcgatgtctccggtcctaggatttcctttgttcctttccaaccttcaggtgagtgtgtccttactatgttctacctttatcaatagatgattttcttgttaacttttacatttgcatagtattctggactcagtaccagctcagctaaagtcgtgtggtgcccatgttcctaatcagattttatctctatcacaatggaaccctcttcttcttcagaagcagatagacgacctgaaggcttcgaatgccggttagtgggttgacaactcttttggtgtttgttgcttccctgcttacgttgcagatcattttcacttgctttttcaatgttgattcgacggtgttctgatgctgaagaaaggtgcgctcagagtcaggtagatcttgatcaagt

SEQ ID NO: 103694 - DNA, 774 bp, Zea Mays
tgtcttttgagaccctttcctattctattgttaagtcgctatcttttggcaatttgtactcttggtcttggtatgctcgtaccatttgaatcttgcatacccccaatgactgttcaagacatttcagttaacatgtccttgaccacccctatttcttaacgatccatgagtgatcagtttatgttgtacatccttcgtgatctcgttcttcctttataacttctcttggtaatgaattcttacttcaaccattctattgcaacctcacctatcttacccttgattgttttctccacttcgccacttcgcgagtcttgccttaactatatcctttgtcattatcaccttcacctttgacacctctatatattacttgatgtttatcttatacctaccctttaaaatatcctctcttccatctcaatctgagagttgcaacataccgactttcccttggtcgtatcctcttttgtgtcgcttgcaagttttaactctatcatttgttgtgcttttgctattcattgcctttacctctctcatgtttcgatcttaccttggtgatgacattacgtctgttatctaaaatctccaatctcctatccgaatttgagagtagtgttttacttatcctacccttggcaatatcctcttctttatcgcgtgaaagcatggacgtgactccattccttgtggtactcataccgctggctcttcaatgcattcatcttttctctcatacccttgtccattatcgcctttgacccttgcgatatt

SEQ ID NO: 103695 - DNA, 409 bp, Zea Mays
ttagaggataccgtaattccgcatctagtggaaaataccatgagtaagatcgtggaatgcacatgtgcttattcggtgaacttcaagtcctttggtacctcatcttattccttttcgggtctgtatgggtctttatccctttataggggttatcaaactttggtgttcaacacagactttgtttcttctggataggttccatctgggaacgataatctcaactaggagatattctccctacataggagagtgatcattcattaggaatgtattattcggtatgagatttatatgttgcatatttataattcaagaatatgagtcctccttggatctcatgacggatcttctgaatcctattaactgcatagtttaattcatgctatttgccagatatattacatagcgg

SEQ ID NO: 103696 - DNA, 471 bp, Zea Mays
gccaaggagatggtagtctccctcatggaggaggccacaggaaagaagcgcatcaagacgaactttatcgaccaaggagcggctctagaatcccatgatcacctaaggacgaagggtagcgacagggactcgtcaaaagtagggggagcgtgatgcgaagcagtagcgatggaacacaagacacgcaaaaccctagaggatgaaaagggagccaaagcagagcaatgcctctaccccaaatcgagagtggctaacccaccaagacgcaatcgtcggatcaaaggcaagtcccgataagcaataagtgtcctaactaacatattgccgatcttggtgaataggcctgggctaaacaggatacctacccctaagaacggataacacccagatcgaacctaggcactaggcgacaaccgcacgacacaggtatgatgctgaggctcgacaaccatgcgaccacgcctgggtaag

SEQ ID NO: 103697 - DNA, 488 bp, Zea Mays
caaaaacttccacagaaaggcgaacacacaactaaccagaaatcagcctgaggcttcagattggctccccaccatggcacacactagcatctagcgtgatgaaaggagaagcaccacaccgtcctccacaatactgccatctacctttttcttttcttctcccaaaattccccccagccaaccaatgttggtaaacactctcaaacaggcgagcgacgattagagaagccgagaaagagtggaaatagacaaaggtcctctcccccaaactatatttatatatgtttccccagtttggcaaactattacaataggatccattttgttatatacatctatgcggaaaagagtacaaacataagaaataaactacaaactattaggctatctccagcagctcccttatctcattcctcatcccacctcctatttcaaactcttttatgagatttttttgcaagaccagatgcacgatctgccttagagta

SEQ ID NO: 103698 - DNA, 547 bp, Zea Mays
gtttatggtatgtttcttgagatgaaaaatacatgtttaagtcttttggttttcaatttggtgccttttgctcaattatatgtacatgtgataatgtttacaaaagtgggtgtggagggaaaaagaatcctaggtaacacttggggtgttacagcaatccctttattcccgctttcctttttatctgagaagttatgtttgagagtgagtgaagatgatcgattattcagtgctatgaaatttccatatatcttttcttatgctaaaagacagagtcagatctgatgtgtgtgcgctttctatagatgtctgagaacaggcacagaagtggaaggcgtgctcagcaagagcagcaggcaccctaggaggagccagttcagtagcagttgccacccccacccctgattaccattgagtagatgttcctgatgcaaactcaagcagtccaagcgattggtcaaactttagcagcaatgcagcaggtgtagcagcagcaacacccacctcaacctcaggtgcaagttcagatgccacaggtgcacagaga

SEQ ID NO: 103699 - DNA, 1125 bp, Zea Mays
cattttcccaccaagtactggaacaccaagtactggcaggacatatcaactattgatcggtgaatgggggcttctgtgtttcagtacatcgaatcagtccgaatttttgttccatcacccgtactcattcatctgcttctagaggttctttagctttaacgaaaagcggtggacatgtttcagagaactccaagtatgtggtgtctcgtggcccttgaggttgacctctgcctccatgttgctgaaattgatttcctgccaattcacacaggaaacgtgtgttgtcagtggtagcgttgactaaggcagcgatagcctcaaccatggtaggaggtacaggtggcgggtttggagtttccaccctgccgcgggaagttcccgccccatcatgagcacgagttcttgatggcatctgaggaagaaaaacatcctgaattattacatgccaaacgtacaccatctttattacattgtgctgaactggtaataattatacatactcattagtacaactcaacttccttatttactttacataaggacactacttaaactacactactctaattatcttcgtctttggccgctccaccgccagcttcgggagaatgttcatcagcgaggttcatggaaggaggggctccaaaaaggtccaactccccatcaggtcctccattagctactccagatggtccggctcccattgctacaacttctggtggcacatttggatgcagcacggcatataacacgtgcacctcttcatgcagggtattacaatacgcttgcagattttccagggatgtgcttagctctgctacccgggctagagccttggcctcaaaatcccaggcgaaagagagcgaatttacggcccagtcaatggtcgtgtctcattctgcaatttcctgttgcgagtgattaacctccaatgacagttcagcaatgcggcggctatctcatgcacgctccctactcccgtggtgtagttccaacataagtcgttccaccctggcctccatatcccctattgggtcattgcttctgctgctgctcccttcatgtctaggggtcagctaatgccggggtacaccatgaggtctagttgctctccgttgggtggtc

SEQ ID NO: 103700 - DNA, 360 bp, Zea Mays
tttataacaacgcctgggattagccatacaggtaggcacgatctgaggcagtttctttgccttcgctagtgcccaagttctagcttcatccttgaattttcgaagagtgaaagggccagcaactgcgtgctggaaaactctttgattcatttctttccatatctcccaattcacttggttaatgggtggtctcaaagcttgtttctgcacattttgtgtgtgtgccagattagcccctgttcactggcagtccagttggtggctgcaatatggtgcaatgagacccagtccgctaacaagttctagatcctctttgtatagcagcacttgaccaaaaagtgactagccgtgccatgtgtg

SEQ ID NO: 103701 - DNA, 602 bp, Zea Mays
tcaatccatatgtgtaagtcatgactcttcatccctaagactcacaaagtagataagttcaccccctactcaggttagcagcataaccatcagggaacatcaacatcttgatccactaaagtacttccttcctctaggccctggttaggatgaaatcggccttaggccttctccatgtctttccaccacttggcggcttcatctcttggtttggtctatcacataacgctaccagatccactcttgcctttacgttatcctttgacttatcaggaatgtccataattgttgcccacagtgcctcggcaacattcttttcagtgtgcatcacatcaatgttgtgtggaaggagcaggtcgtcataataggggagccgagtcaagccagacttatgtgtccacatatgctgctcaccatatcccacaaaaccaccttctttattggccacgagcccatctatctgttgacgaatttcggcgccagtcatcgttgcaggtgggcgatctgtcactacgacaccttccgtaaagttcttgatgtctaggcagaatggatggtcaggagggagaaattgtcgatgtttatcgaaggacgaatatttg

SEQ ID NO: 103702 - DNA, 783 bp, Zea Mays
aaataattgtttgcttgtgatggttggttccaagaattggagcaaaaggcatttcaaacttatttgtctgaaatgtggtgtcaaatgatatagcatcaccaaaacattcgtaatccatgatagactgaccatcagcccaaaagaaattagttatacggccagttggcttatctatttgaatagcataaaaaaatgcaggatcctcaatttgcttgttcttcaagtattccaacagagtctgcgcatcattagattctaaatatttctttcgctctcgaccaatctcattattgcaatccatccttgagaatggaatattttcagcaccaccataaaattgcttcatgaattcatacacttgtgatggtttcatcccggcttcccgtatttgagcaattagtagtctgtatgcttctataacacgtcgttgagatcttagcttgcacgccttatttggactagctagataatggttgtgctcgggtacaatcttttggactgtccaaaccccttctctgctgacaccaaactgaatgctagcattacaacctgtccttgtagtaccaaatcctcgtttgctacaaacaaggagttttgaatatatggtcttatctgctcgacgctttgtatcgctccttctaacactgaattcaaccttaccagcatagatattatacatctcataagcatcttcctcggactcaaacgttattccaacttcaggtataacaacaggctgcaattctttttcatcaacctatcgtaacatgtgtttgaatgaaa

SEQ ID NO: 103703 - DNA, 367 bp, Zea Mays
aaatgcccctattcatctagtgtgagttacttaatgctgatacaaaggataaggccatactcctaattcactcaagcctaaattggtgacttcgatcaattcagccaactcagccatataccaatgacctacacattcttgataaattgcctaatctgtctaaaaaaattaacctaccagtttgacctacatattttcaatgatatacatcattgtttttccaagccctgcctaatacaaagtcacccaactgaaaattgacataacacactcaacctgtactaatctagagcttattcaatctaatgtgggtcacttaacaagctaacactagtgaaataaactagatcctactcctataaacttt

SEQ ID NO: 103704 - DNA, 341 bp, Zea Mays
tgtataatctatctatctccaccaaacatcaaacaagaatttgatctacatcatgtagtctacctcacccatatctaccttaaccatattcttcaacccgatgatgtaaactaaccccaaaacaatgagaccaagatcagagaagaaaagatcaaccttgtcatggaaggagagaagtcaaactcgatcatcaaatgcattaccacccagcggcgaattcttactcagcataaactttcttatcccaggctattcttgccctaacctacccaccttttatactacataataaagtggatatacatatatatacccatgccttcctaatcacctgctaattt

SEQ ID NO: 103705 - DNA, 445 bp, Zea Mays
gcgaaacagagagtgagtggattgtcgcgaagcggtgggcgtcatcgtggtgagatggagagtgggcgtcttcgcatggacgggactggtaggcgtgaattgttgtccttgcctattggggtgagtgtaggcgaggggagctacgaaatctgtttgagggtgaggaattgaggataatgttgttcaactacagggagatgggtatcatcctaaaggttgagccaatgtaatatatgatgccctcgctgtgtgtatgtaaccgctatttgtatgacaaggctgcgtgccgttgctgatccggccgcgcccgtgggcgacttctgcacggagagtcttttggaaaggactttgattttgcgggactattattccggctgcacccttaggcgacttttgcacggagggtcttttggaaaagacttcgattttgcgcgcctattattcc

SEQ ID NO: 103706 - DNA, 445 bp, Zea Mays
ttgtctgttctgtctttgtgcggttactctgatgctgattttgcgggttgtcgtttggaacgcaagtctacttctgggacttgtcagtttttgtggacttcgttagttttcggtcttcatgcaagaagactagtgtggctcagtctaccacagtggctaagtatgtaggtgctgctagctgttgctcgcagttgttatggatgatgtcaactttacgggattttgtcttggattttcatcatgtgcctttgctttgcgataacatgagtgccataagtgttgccaagaattctatgctacatttgaggaccaagcacattgatgttcattttcactttatttttgaccattctaagaaaggcgacatcgatttgcgccacgttgatacccagcgacaactagctgacattttcaccaaaccccttgatcggtcaacttttgcaca

SEQ ID NO: 103707 - DNA, 317 bp, Zea Mays
gtttgtatgaaggtggccatggggtagcctgcaattctgtagcttgggctttcttgacgaagctctctcttgtgcggcttatgcccttgctcgttgtcttatgtaatgtgacgcatctcttcggctgcttcatcaatctttttctagagctcggtcagccgaagcatcttctcccttcttctctccacttgtttatgaatagattctagatccctgttttcttggtccaactcttcttcatgtggtgttgggctaatagctttccttttctggcttcagacctcccttagaaggagcccatcttgattggtgtctag

SEQ ID NO: 103708 - DNA, 352 bp, Zea Mays
ctgtgatatctaacagttacggtctgagtgcatctgaataaccgaaccgttaaactcacttgtcttcaggaaaaaggatgctcgacccatctcgtcgtcagctacctgcggtgaagctaaaaaggtaagcatgaccacagatatcattctgattccatctccgcgcaatgaccgtaacaagttctctgctatcaaggcttgttctgttgctctctttaaggggtctgcacaatgagacaaactcatcattcttttcttctccaaacttcatcatgggtttttttttaacgtttccccgccttcgtccttcattccatacatgtgcatatattctgaaacgtttacaccatgt

SEQ ID NO: 103709 - DNA, 373 bp, Zea Mays
tgcaccagccctcgcctccaattagccaccgtagctcgcgaatttcaaacttcccccaattcggttctccacgccgacgtggaccaccgcgtcgtgaaccgccgtttccaggtccgttcacatccaccttaccctcgtttcagcaccctggtatgctagggatgcttatcaacccagccaattgaactagaccacgctagatcaccgggaacacctcgggttgtcttcggttttcgccgtcatctttgacagagagattttgagctagaattttgcaattggtagagggattagggtcgctaggggtagaatttggtgtcgaccaagtaagaagcttagcctttgcgtattccggccggtactggctcgccgg

SEQ ID NO: 103710 - DNA, 467 bp, Zea Mays
tgcttatattgtctcaacattgcaggttccaagcgtgggtaaaggagtgttgtgataggcttgatgatccaaggttaaacctagccattttgacacacaaaaccccaatgatgcctaaagagtggaggagcaagagtaagtgagataatcaaagtaatactaattatcgaaggattaagttgatgaggcatattatgaagttacaagagagttacggaacatcgtctaaaaggaataaggaggatttcgcctgcgattgtcagttatgcaggttccattgtggcagtgattgtaagttatgcaggacgaagccagtcagtctgtgggtgcccgccaggtgctccaacgcaaggggccgttgtggaagtggacgtcccgccacgagagtcaagtggtgttgtagggctcgtcaccgtcgggctttggtgacgtctatcatctgggccaccgcagcaagaagaagagac

SEQ ID NO: 103711 - DNA, 521 bp, Zea Mays
ttcgcatcactgcatttccattaatatcgactaaaaaccgaaatgtaaggatacatgttaagagatagaaaactatctaaatagagtaaaatacagtagcggtcctcgaacttagcatgttgtgcacttgagtcctcgaactaaaaaactagaaaaacgggtcccataacttggttggcccatgcaaaaactagaaaaagggtcccgtaacatggttttaaaacatccgaaacatagtttgctcaaatcggatgacgatatggcgtgtcacgttggagcgcactaataaaagtttaaggatctaaatgacacaacatgtcaagtatgaggacccaagtgacattgtatgccaaatttagggatccaagtgactctaatgtagcacactacgatcggtgtccgatttgagcaaacccggggacggttttggatgggcaccaagttctagtacatgttttcctggttttgagagctccagcacctaagtgatacaacatgccaattttaaggaccgctaatgc

SEQ ID NO: 103712 - DNA, 631 bp, Zea Mays
gtgcatgtttctggtgttccgcatgaatggctgacacttcttggcattctgggcactactcttgacatacaggaaggggattattcgcctgctggttactcttgacatacaggaaggggatctatgattggcactactattgacaaagtggggtatgagattacaatcactcccgagccgtcggattttgaaccagcaatgcctcccaaatttgacaaggaggatggggattcaggcgggggagagagaatctggtacgtcgagaaagaagcaaaaaagtgcgacaagctcctttcaaatttgtaagatagctcccatgagaagctagatagggttctcatgacaaccaacccacttgtctctgtacaggctttggatagaggcgtatcggatcatacgtccctacttctagatataagatcacccgctttcttgggaatacgtagaccgttcaaatttgagcttaactagtttactagataagatttttatgcttaaatttttatgatgttcggctgttctcgattcgttctgctatgatgttctgcttcgtctgttgcttgcccaatgcccctgcagatgagttgctgccgtaatattaatcactgacgaagccgttccacgaaggcga

SEQ ID NO: 103713 - DNA, 981 bp, Zea Mays
gcctggcccatctaacagttgaacgtcaagaatgtgttccttcatggccacctcgaggagatggtctattgtcagcagctgtctggctttattgactcctttggtcctaatcatgtttgtcagttgcagaattccctctatgaaccgaagcaggctcttgggaatggttccagtgctttgacacatacatacaccgcttcgagttcatcgcttcagcctccgacacgtccctctttgtttacaaagatggagacaatgttgcctacatgcttctctatgttgatgacatcgtcctgatcgcatactcgacacggctgttgtagcacttcaccatgcatctccacatcgagttagacatgacggacctaggtgctctcatcacttccttggcatcttcgtcacacgctccactaacgacatcttcctttcctagcggtagtatgccattgacctcctacagcgggtaggtatggccgagtgtcacactacatcaactcttgttgacactcctatcgatctctcttccactgacgacacgcctgctgctgatccgatcacataccggagcctcgtcggcgctttacagtatcttatgctcactcatcccgacttggcatatgttgtatagcaagtacgtctctttatgtatgatccccgtgagccccatctcatgttgatcaagcatatcccccgatatgccaagagcacactgtcctataaccttcacattggtactggcccgattcaatccttgactgcttatagagatgcagattgggctggctatcctgattcccggtattctaccttcgaccactgtatctacctaggagataatattctcttagtcctcaaaacgctagacgactgtctctcgctctagtgtcaaagcaaagtactgtgtcatcacccatgccatcgccgagtatgctggttacaacaactgctacaagaacttcacatctccgtttcttcggcgac

SEQ ID NO: 103714 - DNA, 418 bp, Zea Mays
ttcacatcccatatgttcttcaaagttatcaatgtcatctacatttcctgcttcagcttcctcttcactagctgatgtatattctccatcattagtgacaaggatcacacgattatttggacactccttaatgacatgaccacgacctccacatttgaagcaatgaataccactactcttggctgtagagcccactgatgtagaagtggatgctgctgatttagaacccatgattggagcagcagcgttctttccactataattgctttgaatgtgggatcacaagtcttcagttgaaccttttgacgaagggtaaaactcctaagcctaccatgtcaattcattcatattcggttaggagacacaaaaatgacacttgtgctagaaaggtaattagttcacctaaaactagcacaaa

SEQ ID NO: 103715 - DNA, 579 bp, Zea Mays
cggcagagcatctttcctgtcagtgtgtctgttcatccttgtatttgaccagaatgaagaaaacattggatgctacccatgatggaccgatgcactgacaaacagttgaaaccccaagttcaccacaccgaccaccaacaatacgggcatgaatgaacggtatggaatctgcatcctttgcaaattgcgatggaggaattcgcccatgcacagatctcaagacaatataattaactatctgttgcgattttgggtgactctgtaatatgtagtgtttggtttcagagtttagttggccgctcaattcaatcaccaacacctacaagaggaagtaaaacggaagtaaaacgaagtcgcaccaatacagaaatatcctctcaagatactgcatctttgtggtcccaaaaacaacccaaatggatcaagaaggaagagagtggtaccaaattctaggttggagcaatttcagcaagccactcatacactagccatcgccacatgtctaaaaattaagtttcataaaagcgagcttttttgttatagcaacagctaaggattatgaaaaccattactcacgta

SEQ ID NO: 103716 - DNA, 537 bp, Zea Mays
gtctggcctgagcagcttccaagttcttcttaatgactttgactttctcctcggcttcaagtactaggtcaggtccaaatacttccctttctccagcttgtgaccaatttagcggtgttctacaccttctcccatacaaggcctcaaacggtgacatctttaggctggattggtagctgttgttataagagaactctgccaaagaaaggcacttatcccaattcttaccatagtgtaacacacaggctcacaacatgtcctcaagaatctgatttactctttctgtctggtcgtcagtttgaggatggtatgctaagcttcttatcacatgggttccaagtgactcttgcagctgctccaagaaacgtgctacgaacggtgctcctctatctgacacgatagtccttttgtattctgtgcaaacgcactatttggtcaatatatatttctgcatacctttccgccctgtgggtggtatgtactggcaagaaatgagttgtcttggttagcctgtccacaatgacccaaatagaatcg

SEQ ID NO: 103717 - DNA, 330 bp, Zea Mays
atcggcatattgtaagcagcaacaaccattgtgaatgatatgaggaatcggaccttcaatcaaaacctcatcttgagctttcttaatcatacaagctaaaccatcagcaaccaaattgaacagaaggggagaaaaaggatccccttgcctaacccctttgtgagtagtgaagtaaggacccaggttatcattggttttgatggctactttgccaccccgcacaatcctcataacccaatcacaccaagtgttcccaaaaccttttttctccatcatagtatagaggaaatgccaatttactttgtcataagctttttcaaaatcaatttt

SEQ ID NO: 103718 - DNA, 444 bp, Zea Mays
cgacgtaggaatttggcgcagcacgacggaggtcgagcgactgcgcatcgaggctgaacctcgcagcgagcgcctcagacacatccgcggcgcagccagaattcgtctgatcaaagacagtgatgatcagagcccgccgaagattttcttcttcctggaggatcttcctggagtacttgatgatccgcgtggtcctacccgatgcatgaacaaagctttgttcggcacaatgctgggcgggcacctcgactgctgcttcctgatcttcgctattcctctggcttcctgatcttctcctcctctgaccacggcgggtgcgtttcttcaatcttccaacgtcatcaattccaccagcctcagctctgccagcagaactatcaccagagccagccatcccagaggactgggagacaggcctccacaccaggccccgtcgtggctggg

SEQ ID NO: 103719 - DNA, 629 bp, Zea Mays
atagaagtagcaaactcaaaaaccaaaaaatcttcaatactttctaataactagtactaaagtagatgctaattaagatgaaaggatacttatatatatgtaccgactactgctcggatagaagctaaaagatctcaggattattctgagaggggggacacgcaaaaacccgcggcgatgcccgtacaaccttttaggtgaatccaactaaccacagttactgccactggctagctagctggactggagtgaacagtgatgtatgtaccgctgctacagttgcttgtctgagatttcgatatgcatgtgcatggcatggatcgcaatcaaaagactgccctgccgatcgatcgacctccttcaattgtgcaaagacgaaacaattaggtatcctcggcaggatgcagcatcaagtaggtcgtcgtagtcatgcctagtgcccctgctgtccaatagacaatgagaagaagaagaattttgacaaaggttcgttccactgccatgtagctagacgtccaacgcaatggtgtacgtacagtcaataaccgtacagaagtaatttgggttctatatgaacaactgatggcacacggtggtagctgcgctcctcttcaattgtattcattgtg

SEQ ID NO: 103720 - DNA, 339 bp, Zea Mays
gttacttaatcgggttttacaattgtttactaggcaaactcttattagaccttaaccaatttagttcactaatttagcgagacgtgtactagttacctatatacttaggcacaattatattagctatattatctttactgcgtgttcaaccaaagtcaaaacgaggaaacagtcgactcaagaaatacaccacagagtagagcaatccaccaaacataataaaattaggacagcagcacagcagttgcttgtttcagttataactcacacgttatttatctaaacatggtgaacaaatactctttagaaatcttattaaacactctctaactttggtat

SEQ ID NO: 103721 - DNA, 315 bp, Zea Mays
ctatgtgttaatattgttactcggcgactctgtataaatttccatgtgaagtatgattgaattagtctatgtttgcgatgtgtggtgtagtggtggtatgaaaaatgggttaggaatcgatcggccaaatgccaagtttggttagagttgttttgttacttgggaatgtgtggtgaagtgatggcattactacgtagccgtcacgtcatctattgtgtgactatgcttaagtgtgtcttgatataagttagagtaagtcaagtctctaaaatgtggaaattcttgaattgtatagaagctaaaatgtattaattg

SEQ ID NO: 103722 - DNA, 347 bp, Zea Mays
ggaaaagctggttctcggtgccaaacatatggattctctacttgattctcccttcttcacaccgtgatgtttcaacatggatggagaatcgactctacggccgtgtcgtgaggaagcgtgcgatttccacagtactccttcacattccgcacgctggtgtgcaatgctgttcgtataatttaagcttgagtatagcgtggcaaatggcaagggatgtgttaactcatgttttgaacaatatatttatgtgccagtgccattgcaattggtaagtgtaccttaaatcctcatgttttgtcagatgtcaacaatacgataatttggatatttaagcgtatagacttcag

SEQ ID NO: 103723 - DNA, 677 bp, Zea Mays
ctgggactttaaagccttgcttagaattaagccctacaaaaacaagggatgagcacatacaaataaagaaataagctacaaaaatagtctgctttccgacaagtattctcacctccagactattataggcaaggttgtttgcgagctagtctttcatcattgcagataagcctagttcaagcttcggataccctacattgtctgccatctcccaacagacatgaatctctttattgtcaggcagacaataaaggaagtcatcttcgtcatccccaccatacaccaaggaccctcgagggtactgcagatccctggtgtaatgctgcacttcggtaatttgttccttcgataaattttccctgaagcatgacgcactatgaattccaattcctcggtagatgctccaggagcagggggctcagattcttccatagcaccctcttttcctaacattaatgatccttcagcaagcttcgaatgtactacttcaccaccctcctcaacagcctccgaaggtcttgcttcggcagggactgagggcccagcctcaaccaaagcctgcgatgtgccagcttcagcagattactttctgcactaggtgcttcagtagagacatgagttagcgcctttgccgattacataacaacgtctagtacgctggccatcctcctcctttt

SEQ ID NO: 103724 - DNA, 295 bp, Zea Mays
ccttctacctccgtcggccagccatggtaatcgcacgctatcttctacctctagttcggcggcaataacaccgcacctgccctaggtcgcgacaaacccgagccccagaaaccccgcccaaggagtagcatcggtatggagtagttacttggaaaggagaaggtagttctcaccagaaatcctatgcgccggagttgaagctcttagccccgcgaccacatcaccaacggacaacagcacggaccggagcacacgcggtaggtcttacctttggtggggatgcaggcaaacacaa

SEQ ID NO: 103725 - DNA, 733 bp, Zea Mays
tcatcatttggctcatcaaactgattcctgaaccggaatgtgtacttcagataaaccagaccaccctggctggaggcagcggcggcctccttcggcatttctcactcgctcgcaagaggccatactttgtatgcaatatgctcttgaaccaagtctcttgtgccaatataggtgcacactatgttgaaagccgcctgacacgcttgcacatcattcccaagtgcagtggatggcttcctaatatcgaagcaagatcatatacggcgttgaataatccttttcacatcctccctttgactcaggtcatttttcacataaaaaccattcttgcatccaagagcctggccacctcttttgaaacatgggcataggataactcgcctcagatcgaggcatgaagctgtaacaaccaaaattattgtggtattgttcctttccagttgccttcgtctcataagacaactcatgaatattgcaaaagcatcttgcatccggttccagtccttggctcctcatggcccagataaaaacccccactttaataagagcttcatgggtaatctgatgaaggtatatctcaaatgtcttcaaaacatcgactagcatcttatgaagcgggaagctaagcccaaccttcatgaagctcctgaagactaccacttcatcgctttctggcagcggaacagtgtcctctcccccaaccctcactatagacacatcatgaaaatatttc

SEQ ID NO: 103726 - DNA, 335 bp, Zea Mays
caaagaatgatcaggtgctcgatatagaaagaggaagaagaaaaacaaatacaaagacttaaagcaaagatatagctaggatattttattttgccaatcaaaacaatagagtgggtaatcgaatttaggataagtagtggcagtataaagagtggaactcaaagtttaaaattattacttaagtgccactaggtgaattaagtccatgcatgagcattaaacctactgaagtcttgaaactccaacttagacatatttgtgaaaatgtaaactcatatgcataagtttaaaggacatgttggagttagaacatgggcgaaatatagacaaaaaag

SEQ ID NO: 103727 - DNA, 443 bp, Zea Mays
taattccctacatcctatttgtagcgtttgaactgatggaagcagagctgaagattacacactcagttgtttttgagtaggaggaccaactagctctcccttgacgttggttatagtgggagtttcgctttaatactaaatgtctcactttgtggaaccttgtcatgagcttgcgtgactgtctttcaaaatccatttctatatttctccactcctcccttgtatagcacaagaaaatggagagttacacgtatgttggatagtgagccctgcatagccgaggttcaactactcctaccttgttgtagatgtagatctatacatagtgcaagtctcggtaatgccataaagtcgagcatgtattactgcggtggcagatatgtcgtatcatagtctacaccattgggtacaacattgttgataaacaatatagttgcatgtac

SEQ ID NO: 103728 - DNA, 595 bp, Zea Mays
taaaaattgaagaactaagccctctaattcgctctgtcaggcgctctgaagaaaggtttcaatggtacaatactgaaaaagatcagtagatacaccacacctcgcacccggtgacctccatgcctggattcgcgtcggcgcttcgatttgtgcgctctggggtgcggattatgaccgacagtgaaaagatcttaccgcagatgaggtcgtgtgctggctgtcgtacccacttgctctgcggccgaccgaaatgatcctcgtcggtgttggccgcttgccgctcgtgcgccacgtaatctgtggtgttaccacatcgtagtagaccaccgtaggtagcctatccatcctgcgatagtgccctggtgaatgccacgatagataactccggtgactcctcccctttctcattgccctcccttcctcgcctaaattcgtcgtattcgcaaccgctctctataaattgagcgctcagcatgttccgttaggttgttacgcgcatagtgcaccagccctcgcctccgattagccatcttagctcgcgaatttcaaatttcccccaaatcggtcggaacgccgccgtgagacatctcatcgt

SEQ ID NO: 103729 - DNA, 536 bp, Zea Mays
aggaagtagggtattacgctcttcaaagcggcccgaacctactgaaatccgcttgtctctctctctctcatgcccaagcacgaaccatcgagttacgatcctcaacactgtcctacccaaaagcaccatgagggtacccctaggtgtgcggtcggatacaaaacaccgacaactggctcactcgaaaggagaagtagggaagaagaaggtgaatgaacaagaacaagtggggagagcagccaaggcgaccgggctatttaaagaggctaggagacgactgttcacttcctacccgctcaccgaacggtcacaagaattcaatagcgattcaaaccgcctagaaatgagtctggcatctggcgccgctacgcgtaacacggcaccagatggaatcaaagtcaatcgctcaggcaaagtattacacctctccatcatatcaagttactatttcaggactacacgatggacatcttttactgagcagacatccattgggcacacccattgggtgtaccgcccggattcttcgatatttt

SEQ ID NO: 103730 - DNA, 387 bp, Zea Mays
cagaattctcttaagtggggtagtgttcctggcggacttaaccgtcttgccatcccaagggattgatgtgatcctagggatggattggctaactaagcacaaaggtatcatcagctgcgcaaataagaccgtccttctcaccgatcaccaaggaaaagcagttttctgtcaagcccagccgcccgccaacgatccaatgatgtttaacctggcagaagaaaacatgtccgtaatcgaagagtttgaggatgtattctcggaagagttgcctggaatgccacccgaaagaggagtggaattctatatagacctcattcttggcactgtgcccatcgcaaagagaccataccgcatggcccccacagagttagcggagttaaaactcca

SEQ ID NO: 103731 - DNA, 340 bp, Zea Mays
cttgttcttctgccgcttgaatatgtttaggtccaaagaactgtcttcccctagtctgatccaatatagaggagtcctgcacttcctgccttatagagcctcgaacggtaacatcttcagactggcctggtaactattattatatgagaactcagcataaggtagactcttgtcccaattgctaccatgctgaagggcacaagctctcaacatgtcttgcaatacttgattagtccttttagtctgaggtggaccgaactaaaattcaacttcgcatccatattctcatgaaaacttttccaaaatccgggggtaaactgtgatcctctatccaaaatga

SEQ ID NO: 103732 - DNA, 604 bp, Zea Mays
aacatagcccacacatgctagatagagtcatgcatgagctgacgatatgtgtccctatctcgcaggttgcgatgatgaaagtgaaatgtgcccttgggccatttctagttgttttgataattagatgctcaacacattactatgaactaacaactcaacatatgagcatgagcacaggcgtttgtaaagcaaattgaggattacaagaaaaggcatcctttgggcttgaaaatgggcatactaaaacatctatggatcaaagtgaaaaaggtatgcttctagcacttagtcatctgttttaggtactaatcatatttgtctaagtgttaggggccatatggagtcgagccaaaaggatcaaaagaaagttggaacaaaaaggaacaagttcggctggactaggcagcaccggacagtctggtgccacccaccgaatagtccggtgtacactggacagtctagtgtccgtctggccaaacagtccactctcgggctcggccaggcttcctcggctaaaaatcaccgcagtccgcatggagcgccggacattccggtgtgaagacagccaatggctacctgccacgtcagccacagtcaacggtca

SEQ ID NO: 103733 - DNA, 497 bp, Zea Mays
ggaggatgtaaaagatataatttagcgtccaatacgatctcgcctcagcatccgaaggccctctattgtgaatagtgacaaagctcaagcctgcctggtagccttcaacattgtgtgcagctacatttgcaccatagacttggtccaagagaatatagcttccaaagtatggccccttgttaacgaatgggaaatgctgaaggagaccactgatagctcaagcgaaggcggtctagtttatttgaaatatacataccgctacagaagtcaatttggtgagccaaatgacaaatggcttgatgccattgaggcgaccactgatgatttattgggggcttacacgaaagccgaagacgaggccatgaatgtttccttcggcgcccgcagaaagaaaaggctgaatagagtttttgatgttatcggctttgcctatcccgattactgctttccggctcggaagcatggggcgaaaaagagaattgcatcatcgaccccct

SEQ ID NO: 103734 - DNA, 626 bp, Zea Mays
cgggcaggtagccaggagctgagggcaccagcgagggggacttgcgccagatcaggttaggctatctccagcagcagcatctgaggagctggcaccagaggtggggacacttcgactgtgaggagcaggcaggggtcagcaccatgtaagagaaaggggctggcaatggagaccaacatgcaaagcacagatgatgccaatgagaggctgcaatggcgaaagaaaggaagcatcagaaaggatatgccgaggattaatttggtaattccatgatatgattttccgtacatattttctgaaatggttttgcacctattggataacattatctaagttaaactagtggcaatctaacgggaggggattccagtggtagttttccaatatatgtttttaatggcaaatttcaaataggattcaaatcagtagcaaatatgcatttgtccttttcattatcgttaccccttcgcaagacttgaagtcacatcatatgctgtttttgccatcagctggcgcacctggtatcagtagtgttttggtttttggtttgctggtcccgagaaggaacaccactgcattcaagcaggaggttgccagcagtaaggctggctttttttgagagaata

SEQ ID NO: 103735 - DNA, 598 bp, Zea Mays
tgaactattaaagtgaggataaatgatacaaccaaggatatgaagtgagttagggagaaagcgttatcaaggagaaaagtagagaggcaaaggtttaatatatcaaggtagatattgcacaagggtggcaatataatggcaagaaaacaaaagtataagaagtcaagggttatttagcaatattagggattagaaaaccactatattataatatcgctcttaccgatctagtcaaaaatcttaatactaaagaacaatcctatcaacctaaccaagaagtcaaataatagatccaaaggatccatagcaaaacttcttgcggagtggggataagacagagaatagggcattgtcgacagcttcgaaagggttcttctagcaaactttgcttcaagttctgcaatcctagcttgatcatcttgcaatgcttctcattaaaaccttctaataaacgaagaatcagacaagaagggttgaagataaaagagacgagttttatataaagtaagtttttatgaagataattaagtcaagttttgaacgactgactaggctttccatttctaactaatctagcgacctacggtcacattgcttt

SEQ ID NO: 103736 - DNA, 1053 bp, Zea Mays
gctctggcgatgacacgagaagaaagggaaataagtcaaaaaaacatccaaaagggaccttcgcgaaaggggaagcagtactaacccatgacacggtggtccgcctgcaacagacggtcacagagaccgaccccctcatcgtcggcagcctcaagcgctatgtaggtggcggctagactctcccagatatctaaaggggactgtgacaagaggatcgtgatcctaccttggcaaaaagacatcccgaattcttttctttgtcccatcgagatcacctagctgcataaagaagaggataaggtaagaaccatctcgagaatcaaggggtaaggaggaaagagcccatacctcgaatcgttcatcttctaccggagtggacatagcactgggggcgctcctatgttgatgtttgccagagtccataaggggccacgaagaaaccacccctcgatgaagaaatcaaaacaagggaaggtgtgataaaagtgccccgggaagggattatttatagaaaggtggactgtgtgacgaagcaacgcgcgaatgccaaacgttgtgcataaaagaaagcaacgaatcagcatcgcccacgaaaaagctacggaaatacgcggtgaagaacagaacaccgtccgaccattcatcagcccacgaagggagatactctcggcgaaatgattcctgatccctaggacccaccagttagagagtgcacagagggaaggacccctgatctctaggtcccgttagtcacttgggagaggtggatacgtcaacccgagcctggggtcagacgtggtggaacctgacgggagaggccaggcatgtcagaagagaaccactcgattggatcccacattcggccccaaactgaccgccataaatagccaaccacatttaaccatgcctggcacagagccacatcacgggtgttggttcgcttcccactcatggcctctcaggtcgcgtagcactcatgaactacaagcctcccggactgcgacgtattaaaggcccacacgcccctcgacctacgacgcactcatggcctat

SEQ ID NO: 103737 - DNA, 706 bp, Zea Mays
ggagatgttcttgcgtccattccgatattgaatgaaaggcaacgtcaagctatagtcagaaaaggattctctagtattcttgacatgacaattgatgcaattggatgtcgaatacttctttgttggctcatgcagaagctagaccccagagacatgactcttcgtattggtccagacaaagaactcaaaatcaccaagcagactgtccatcagatattgggtcttccaaatttgggtggtggaaagccccttaatattgatgaagcgaatgctgcggcaacacttcgggcctcattgaatattagcaaggatgagtttgtttatttcaaagctccaagacagattgaggctaggccaggatgatgatctttctatcagatgttttttttctgattctcttcaaccggctgctattcccaatagctagctggtctatttctttcaatgaggttctacttatagaagaaatggagcgattccctcaaattgattggtgccatctaatttttagtgacttatgtgaggctgcacagagatggcacaacaggagcattaacaatgtgtcggcgacgatatatggttgttccatcattgttcttgtaagtttcataattaatttggcaaatcttttattagattaatcaattgcaatttgagaatacatagatatattatgtgtttacgttcatttgtatatgactctcat

SEQ ID NO: 103738 - DNA, 366 bp, Zea Mays
gagcttcatgaaagctgggcttcgctttcctctccataaggtgttggttgagcttctaaagacattcgagatataccttcatcaacttacccccgaagctcttatcaaagtggtggtttttatatgggctatgaggagtcagggactagagccggatgctaggtgcttctgcaatattcacgtgttatcttaccagacaaaggcaaccgaaaaagaacaatatcattacaacttcggctgttacaacttcgtgccccgctctgaggcaaattatcctgtgcctacatttcagaagaagtggccaagctcttggatgaagcaatggttttacgtaaagaatgatctaaatcagagggaggatttgag

SEQ ID NO: 103739 - DNA, 369 bp, Zea Mays
attggagccagtgttacatgaaacagcgacatgcatgatggtaatgttgtcaggcgtgactctgcatatgttatgtatatgtacgcttttgtttgcacagacaaggaaagaccccatagtatgtatgttttacttgtcgacaggggaggatcaattcaaaacgcgtatataatcgtctcttttggaacttagtggtgggttgtttctaagaggtagcagacagatcgagctagctctgcttggttagttgctggactttcagtaaactggagcagcgcacggctagctccatttgattatatttgtagcatagcacgcaccatctcagcttatagagagagatgccggtggactattatgccccccggt

SEQ ID NO: 103740 - DNA, 606 bp, Zea Mays
ccaataacagagaaacacaggggctagcgtgcaaacattcccaagactcagttttaacgcatggtggacgacgcgttgatatctataaacgacaggggtccatttataaaacattcccgcgaaggggtaccgcaacatatgggccacaggatcgaacgcggacggctcagattttatttaacgcgatctattctactctgttgaactctagatggatggtctggatcttagcttgaatgcgacgaccggagatctgatctccaccgtccatcacgtgaccatcggcacacgggcacctagccatccgcgtggggatcaagggtccagacccacctcgcccaatccatacggcggcgcgcccagctccgccgcggtagcctcgccgaaataccatggttcggcacgctggagccctagacgcatgacgaatcgatcctacgcgctcaccagacgaaagcggaacggttggggacaaactcattggagattaggagacggttgtagctgtccacgagctgctcggattttgcggtcaaggcaaacgacggcgaggaattgcaggtactctaatggccttcaatctccctggatgtcaccacagcgaac

SEQ ID NO: 103741 - DNA, 936 bp, Zea Mays
gcttcttctcgttctctcctagctccagagttggtcggctacaaattaaggccaagtcttttctagccttagggttatcttttgttttgtcagtgatattcaggcaagtactgataatgctttcacccatatttcattcctggtgcatgacgtcaatgttgtgcatcagaatcaaggctttcacataagggagttcccatagaccacatttgtgagtccaattatgctcggttccaaaaccttcaaaccgatttccatgttcgtttagtttcaaatcattaagtcttgcaagaatctctggaccactaagacgcttgggtggtcccctcgtcacaatcgtgtcctttctaaaagcgttcctctcgaacctgaacgggtgatcctgaggcaaaaagcatctatggcaatcgaagtaacatatctttccaccaaacttcagccggaagcataaagtgtcttcaccgcatatcggacatgttagaatcccatgacaactccatccagcaacgataccataagccataaaatcatgaatcgaccacaaatacgcagctctcagggtgaacttctgattcttataacaatcgtacgcctcgactccttcccacaaaactttcaagtcttcaatcagtggtctcatcatcacattgatctttgttctaggatgatccggaccaggtattataagacacaagaaaataaattcatatttcatgcaaagcgctggcggaaggttgtatggaacaacaaagacgggccagcatgagtaggacggtgcagttagattgaaaggcgagaaaccatccgttgccaaaccgaggcggacatttcgcacttcggcagcaaagctggaatcaaacgcatctagtgccttccatgcatctgtatcagctgggtgcaccatgacatcgggattctcacgtacgccttctttgt

SEQ ID NO: 103742 - DNA, 824 bp, Zea Mays
gttttgggtatacagattaactacccataggtgcatacaattaggattgatgaggtggaaacttagagaattgtggatggttttaattgcaaggcgaagaactttgccatgaaatatctaggacatcaattaggtacaagaggatggccaagtaagagctcggtgaataaaacaggcaaattagagtaaaggttagagacttgaaagtgttgtcaattatcttatggaggaagatcaatgttgatcatttcaagtttgaccaataccctatgtatacaatgggctattggattcatgaagggattcagaagagattagatcaaattagagggagatttttcttgtgaaggtgtgggaaataaaaagaattatctcatgatcaaattagcgggtggggcttcaaaagagtttatcggtctaggtttcgttgatactatagtcataaacacaatgctttagctaagtggatttatgaagatccctctgcacctatctgcaacactaggcgatggatctcgaactaatgctgatattagtcctagttcaaaacaactagggtaaaaccaaaaaacgaagatccttcctctacttgtgatagatggtaagttggtaactacctttgcttcataaaaaaatagttttgcatagcgtcttcaaatcattagttgttataaagtccaagctactaggttatataacgtccttgttgtgtaacatcgatatataaaaaggctaatacatttattttgcgtcacttaacgcccgtactaaggctatctccagtagatattctatctcatctcctattctaaatttcactctgc

SEQ ID NO: 103743 - DNA, 666 bp, Zea Mays
ggaacatcaacatcttgatccactaaagtacttccttcctttgggccctgcttaggacgaaatcagccttaggccttctccatgtctttctaccacttggtggcttcatctcttggtttggtctatcacataacgctgccagatccacacttgcctttacgttatcctttgacttatcatgaatgtccataattgttgcccaaagtgcctcggcaacattctttttagtgtgcatcacgtcaatgttgtgtggaaggagcatgtcgtcataataggggagccgagtcaagcccgacttatgtgtccacatatgatgctcaccatatcccacaaaaccaccttctgtattggccacgagcccatctatctgttgatgaatttcggcaccagtcatcgttgcaggtgggcggtctgtcactacgacacctttcgtaaagttcttgatgtctaggaggaatggatggtcaggaaggagaatatgtcgatgtttatcgaaggacaaatatttgccaccctttttcaaccaaatgaacctaagagcttccttgcaaactgggcatgggaacttaccatgaacacacgaggcgcagaatagcccatacaccggtaagtcatgcatggagtactggtaccaaacatgcattctgaagtttgtcttcgtggctc

SEQ ID NO: 103744 - DNA, 300 bp, Zea Mays
cttgataattgagatagtgctttgtgtgagagctagtagaaaaagcgtgtgctgcatcttgtgatctttgatattggagttttgactcccattgagattgtaaatctagcaagagccttggatcttatggagcgtcttgcggagactccagcctctcgatcgagttaataaaagcaagagtacttaagtttgatctttggaatcacttgagagggttgaaagagatccaactccttgggatgcctcaacagagacgtaggttatgtttagaaaacgaactccggtaaacaaatcattgtg

SEQ ID NO: 103745 - DNA, 328 bp, Zea Mays
gttggtaataacaaagatgggataaaattgaaaggacattgcttgcttgtgacgaaatctgatgttaatgaattatttgcttccacttctgttgcctatgccttggtatgcaaggatgctttgatttcaattcaagatatgcaacattctttgcttcctgttgttgctaacattttgcaggagtattctgatgtatttccaagtgagataccagagggactgccacctatacgagggattgagcaccaaattgatcttattcctagtgcatctttgccaaatcatgcgccatataggagaaatccggaggaaacaaaagaaattcagc

SEQ ID NO: 103746 - DNA, 409 bp, Zea Mays
tcgtgaccatttccattgatccaaagagctggatccagagatcatcttgtatctataccaactatgagcactcgggccttgaaaacgtttcagcctttcaagtttctgcacccgattgtctacggtgagtaccccaagtcgattcaaagaacagtgaaagacatcgactacgttggagtcaaccagtacattgtgtattatgttcctgattgacaaccaaatgctacagctcggcttagctactcgtctgactggcacattgaatttgtctgtaagtctgcctagctccattgatatctaaactgtaagtactttatttgatggttgttttggaaggagtaaatgtgtgtgtttctttaatcctaaactttcttaacatctattgaccctgcagatgaacgcaacggtg

SEQ ID NO: 103747 - DNA, 305 bp, Zea Mays
atgaactaactagtttgctaagtacatggttacatgattagaagattgaatttggaagatcaaatgcacaaaaaatagctcagactcagtaaaaaaagggcatgttgatgaaatgggatttgcgccatttcaacatttggataagttataaaggtcctagaaacattttggaacccattgaaataggtggaaagttcatattcagaatttggagtttcaggggccatttgaagcaaagtatggaagagaaagggcaaatgaatttagagaatcaattgagccaagacctatgacttagaatgttt

SEQ ID NO: 103748 - DNA, 507 bp, Zea Mays
gaagaattcatggatgtatttctggaagagttgccaggaatgcctctggaaagagaagtagaattctacattgatctcctcccaggcaccacaccaatcgtaaagagaccgtaccgcatggcccccacagaattggcagatctgaagcttcacatctcataacttcaacagaaagggtttattcatcctagctcatccccttggggagcaccagtattgtttgtcaccaagaaagatgggagcatgagaatgtgcattgattaccgatccttaaatgaagttacaatcaagaacaagtatccactacctcggattgatgacctttttgcccaacttaaaggggccaagtatttctccaagattgatatgagatcaggataccatcagttgagaatcaagcaagcggacattcagaagacaacttttgttacccggtatggtcagtacgagtttacagtaatgccctttggactaaccaatgcacccgccttcttcatgaatcttatg

SEQ ID NO: 103749 - DNA, 463 bp, Zea Mays
ttggggatgggtctccagacaactggggcccactggtcagtaaaagggtaagggaaccatctaccctagaagcactggctccataaaagccctaaggcatcgagcctggggtcaggcaaggcagagctagagaggggggctagacagagaggaagccactcgagtagattcctcgcctcgctaaagactaacccgccataaatgaccgactatattaactacgcctgacatcgagccacagtaggagagtcggtccgcctcccactcatgacatgtgagcccctcggcctacggtgctctcatgacctattaagcttaggcctgagtgtgcgggccatctacaggacttgcaaaacgacaagcaacaccgagacccaagctacggaggctaggggttggcatggcgtagaggcagtaataatggtgccagggctccacgccgcccatactgcctaccataaat

SEQ ID NO: 103750 - DNA, 552 bp, Zea Mays
tgctatactgaagaaactggcgtggatctcctaaatagaggcacacacccctactcatgcagtcactgacacctccacatcctccttcgctgtaatcccattgaacccagcaactgcttgatcttttccctatccatttaagagcagccggggggaatctttttcatttccaagcctagccaaggtcaccgtgggtcattgtggctcacatctatgcaacagtataaccttctctttcccaatcacaccgaaggcttacccaagtttcttgcttggcgctgccgtgagtttggtgaccatgtcgccgacatctcaacctcatgtggtcaagtgagctcggtatggtttaacgcctctagtttagcgttccgatgtctatgtttgttggtgaagctcaccgaagttgtcgtttagccattactgctatggttagattggaacgcgggctcgacgtcgcagattgaccccacgaactgccccagtgtcgaccgaccaattcccgccggtcctaagttggctcacgtgagcatcgtgtattgtgtgaactactag

SEQ ID NO: 103751 - DNA, 667 bp, Zea Mays
aaagtattgaatcacacaagcaatgcgttcagcaatgttaacaccattatgatacacttggatcaatttaaaacctatcacagacttctttaattcacaatcagcattaacaaaataagcaacaacagtaatgtaatcttccttggcattaccagaccatatatcagaagtcaagcaaatagaagacacaccaggaaaaacatcatcttttaagttctttaatttttcattgtatagcttagccaagtctctagcagttgtaaacctagataccctaacatatctagggttgtgagcatgttgaatgtaattatcccaagcatctgtgtcagctatccctaaaggaagatcaagtctagcaatcaaacgacaaagctcagtcctagccacctgaggatcatattcccagtttctaaaagacccatcagagttcaaagctagtctagtttgaaccatagcagcatgatcagacttctttttacatgatttctggtgcctaagcaaatgtccagtgccagcattagaattagcactcaaccgagccttgcaaaatttgcaaataccagtaatgtgcaccttcttaccattacggttttcagtgacttcagtgaagtcatcccaaacagcagatcgacacttaccagtgctggaagaagtcaatgaatca

SEQ ID NO: 103752 - DNA, 412 bp, Zea Mays
cggagggataggataacgttttggctagatcagatcttggtcataagatggagcgttagtggattagattagatctctccctaataaaatctagattgtatattcaagatcggacgaccctgattagaaattgagataatgttttgatccgatgaaaactgggcatcaatcggggatctagcagctggaaatccataccagttcaacgaggggatctaattcgcgcctttagttgaagatctagcggccgagacacgctcatacccctttggctattgttgttttgcgtaagagaccatgcgttcctcaaaaagcaacccgcagtccaccccagtgcaaagactctcacgaattagtcctaagaattctgatttagaccctacagtctccaaaaatataaactgccatcctt

SEQ ID NO: 103753 - DNA, 571 bp, Zea Mays
ctgggagtcaaccaatctgcataagttctacagatacattaactctctctgcagaatgactctcattccaaaagaaggtaaccaaatgaatgtcctgggagagagcaaggtcttgctctcatttatgaagccaaatagttcagaaagtatcaatgtatttgacatgatttggcaagaaatcattcatgctgcctgcttccctctcaagggatgtcttcacgcccccttcattatgaagatgattgaagtggtgactcagtttcgctttgacaaaggaacaagacatctctcatacacccccttctggattgatccaaacaatccagcagggcgtctgaggaaagctccctctagctctcgtggacctgctactgccggcccctcgcgtccatctcctggtcgcggatctcccacaccacgtggtcgtggtcgaggtcgtggtcgcgggatgggtgcacgtctgacccatggtattgtagcattcttttccatgtgcaggaacatatcttccgatgtgcatgagctggctaggcgtcagcgggagactgacgacaacctccgtcgtcaagct

SEQ ID NO: 103754 - DNA, 600 bp, Zea Mays
gtgatagagggttcaggactctgtcagcacatgagtctctaacgccgctatccacctacgctgcttcggtcaatgatgctgctaggcaaactctgtggtctctcaaccacacctaccggcaggagctgcacaatacaaagtataggcatcttcctctacatattcgtggagagaaccagaccaacattgtttcaggtggagcaaatgaagatcgcctcaacaccttagctggtgtggtggcaggtcttaacaccgacctagatagtgctaccctggacctctctagggtacacttggagctggaggatgcacatgcaaggatcggagccctggaagctcagcttgatggaaggaatcccccggaagttcaagtcccagctatggcgttatcccctccccgtaagaggatccgctatggagaaccaggatccatcaccaggctgctttagatttttcagttatgttgtaataagttagttttcgcggtagacgaaaacacctttatattattacgctatcaataataacaaccatgtgatgatgttgtttgaaatgtttgatttggatttttgcttgagtgcaatggtcttatggaatgat

SEQ ID NO: 103755 - DNA, 1230 bp, Zea Mays
tctgtggtcgttaaaaatagaatccaacgttgccttcacgacgaccacactgattggcgccaatacctacctctccccgcgcgtaaacagaaaaagaattaacacgatctaaaacaaccccgcctgaatcaaagcaggggcagccacaacgtcttcctcctcccctctcgttccttgttaatagatcaatctgcgcagcacggacagccacatcgtcttcctcgtcccctctgtaattcctagccagccaccacgtcttcctcctaccctctataattcctaggtcaaagggagcaggggcagccatcccccatcccttcccttccaggtcgcaaccatcttcctcctcccctctatattttttaggtcaaacagagcaagggcaggcatcccccatcacgtcccttccaggtgagctcgttttcctcccccttcctaattcttttgttcagatatctccgacggtctttcctttgcatccagaatcatgtagtaaatcatgtagtagggcgctggttgaactgctcctcctaccaatgataataatcccagaggcaccgactagatgcattcgtgccaattcaaaaaggcagcatgtccagaattgtaatgcagtggcccagaattgttagaagtggtagctgcaatgatcttccctcctccctagaacaacacccccctcatccgatgtgcccctaatttatattttggaaccacacaaggcagttcgtccaagcaaaagggtgttcctgctgtaatcttcagagaatatatgttaattagttagattacacaagtttatatgttaattgtgaggcatagtggctgatatgtgagaagtgtatacagaaattacttgtatcaaatgggaattcagaccattgtggttgtggttgagatcaaaatctactacagtattttagtttaattagtgatgctgctagaacaatttacttttcagtgttgtgtttcggttaatattattcatggatatcagtttcagtttatatcatatattttcctgttgattggcaccttactatttaaaaattgtcactccattgtttgaattataccttgagatctctgattctctgatgcatgtgttttggagctgaattcttttatggtgtttgtcaccttggaacacagaatcatattgatctttgcttttctttgcattgctcaacatcatactcatttactgtaccatttttatcagcttgcagt

SEQ ID NO: 103756 - DNA, 334 bp, Zea Mays
gatgaacctgcaaaactagcctaaagacaataatactcgtggatgtgtctagtgtaccatcagaaaaggtacctagagagcaggtaagctatgtctgtgtgtcaggatgtaacatggattttgataaaggcaatgatcgaaacctcaagaaagacattaggagtctcattaaagacgtataggatcttgcaagagtcaaatacacaagatggaagaagtttagatgaatacacatgaagaaacaaaaaacagatcaataggcgaaaccggacgtgtccgtacatgcatcgaataaaccacctatttggcaggaaggctttgtcaaaggtcctcg

SEQ ID NO: 103757 - DNA, 649 bp, Zea Mays
agattcaatagacagtatggatatggctgttctcaagctcagagcgtggtgtttctctccggatagcctgccagcggtattagatctacatgtttaggaacctcttgttgttggggaggatggatccattgtccctcgcactttggtttatcccatttctgtgagggtgattactcctggtgattggccggcaggggacatgtctgaggtattgccttctgttatcgaagatgaagatgacaaggatcagtttcagcagaggcgacgcattattgggcatgatctttcagcttggccctcggtgcatttgaggcttgggccacgaacctcttcttcgtcggctgctgaacctgtcgaggacgcattacccccggttgtgttggctgatgagttggctgtgcctgggtctgttgcccctgttgacgcagaatttttcccatgtgcttcagttgaagtgttgttggctcctgggcctgctggaccagttgatgatacaattctcccaaatgacttggatgggtctgctgtaacatttattcctggtgctgcggttgtagagttgacggcgcctgggtccgctgatccagttgatgctgcaattctcctgagtgccctggctgctgttgattccaatttgtgcgctgcagac

SEQ ID NO: 103758 - DNA, 1034 bp, Zea Mays
gccagccttccatcgcgccgactactgggacccggttgtcagcctcttttctcctcttcccctttctccttctgagcgacttgcgtgtgggcccgtgatgtcagctctcacccaaactccgtgtggcccacttaccagtccatccgtgcggcgcgctcgctaccagccatatccgacatttggaacccgcgtactagtcacattgtgtgagcacgggctctgccggtggcgcgcttgtgtcaacccaatcttcctaggcgttgttgcaatgccatggatgtcggatctgccgtggactgagcttcaatagagtcacgcaattctaggatcctctgcatgccaggcgatgattccgcgcccattgccccttcccccatgtacacgaccgatcaccccctggttggcccacgtacgggtcatgcccacggcaaccatggatgcgaaatccgcgggaatccttgccaacgtgcgctacctggccggattataggtgtataagtaagcgagctctacggccacctcccccacccgttcatgtcgtcgaagaccctctagacaccctcaattgacacggcgacgtgccagtattaccgccatccgcccctccctgtggccaagccttccccgcagcttcaatcggcggtggtctccatgtttgaattactattccgatagcaaatcacgagttggttagggtcgggatgcaccagcacgccgatctggcatgctccggtgatcctccgccgggggagccctaacgtcgcctccacttgtgccggtatttagaagatgagtccctagccgttggatcgggtgggtgcaggtaggattagatcctgataccgattcggccacgttaacccgtgaccgtcgataggagatccaaggttccggatggggtgtgtggtcaggtggccgatcgcccgttgatcctgccacgggtggctgggatggcgtgggaatactctagtttggcaaatctaatctggcgcgtccaattctgatcggacggccagaactctccaatactcttt

SEQ ID NO: 103759 - DNA, 1141 bp, Zea Mays
catcaatgtctccatgaggggatcaggcgcaaggagccctgtcttcatcgcactcgtcggaggaggcgacgacggctctacctcaatcagaactcagaagcatggctgtcagggtaccggtggtaagccagtcccaggcggatgaagacgcaagcttcagtgcgggaggaagacgtgaagggaagacaggcacgcacgctgatggactacgacggagccaacgggtgacgcggcccaacgtccggctcttgggccgtgagtgggtgaagtgattaggcccagacctgtgatacggagggggggagaatatttgcggcagcggagaggaggagaggacagactggcatttggaacctgaacccggctgcgtccggcgaaccgacggtgtgccgtcgtgtaaccatcgtacctgctacctccataacttcgagagaggatccgagcgccgggagcggtgctcaactcattcccaccaccgtgttctaacatttggtattcagagccttcgatcccgagctggagttcccgaagcacgagtacttcaccaggttgcaagccaaggcaggggatatggcgcctacgcgaatcgaagacccgatgatgcaactcatggtcaaaatcgatgaaggtaacaaggagatgcagaagaggatggaccagttgcagaccacgatgactggtatggaggtcaccatgaaaggagtagtaagcgatcaaatcggatttcagaagtggaaaccagagatggaaacgagggtgaaggatctaacggagacattgaaggatgtccagatgaaggtagatcaagtcgctctgaatataccagtgattcagtctgctggtggggttcagatcgagaaggggatgcctgcttccgctcatctggaagcatcggcgtcagggacggcgcccggaccaaatcgccatcactttgctgatatacaccggaggccgggtgttacggagaatctccgcacacccgctccggtcgaaggtacgcaacaacctgctggatactttccgtctttcattgattgggggtctgtaggaagaaattctatagccaactggtctcaggtgtcgggtccggccattcctaacatgaattttccagtgttcgatggaactaatcctaaactgt

SEQ ID NO: 103760 - DNA, 540 bp, Zea Mays
gagaaacaaacgtttcactctaggagtgagaggcatgtactgaagctgtttatgtgcaacctttgtcaccaccttctccccttcttcatttacaagctccacgtacctcgacttcccacattttaagcatttctgctctctgtcatgttccttccaaaaaagcatacagttgtcctggcaaacatcaatcttctcatactccataccaagaccttcaagcaatttcttggactggtacatatctttgggcatcttgtgacccgtaggaagaacctcgctaatcaaatccacaagctccttgtaacaattaattgagaatgcaaacttggacttaattgacatcagccgggtcacgaattcgaggacagtcacgtcagtgtgcccgtgaagaggctcttttgacgctttgaggaggtcgaagaacttctgaacctccggtgtaggtgaatcatgatgatctagggccagttcaggctgcagatcctcaagcatctggtccatcctatccacatcttcaccgtcatcaacttctacttctgc

SEQ ID NO: 103761 - DNA, 500 bp, Zea Mays
acaagtaaccaacaacgaacttgcatcttcagatggtgttgactatgaaatggttgatagtgatgatgagacttatgatccagctaaccccgatcatgaagaatgttttaatcgatgtaatactatattttatttaattcacatttgtttctaaatacatatttttatctgtgcatatttgcttactcttaattgaaggcgatggaacaaaagatggtgggcgttgggatgaggccaagaagggggaggggaggaggagcactcgtaggatggaggaggcgcatgtgtcccagaaggatgaggacatgcatcggtaggtggacaatgtggtgcagcaggccaatgtcgatgcagcatagcaggatgacgacgatgatgcgtaggtggacaatgaggaggcgcaacaggatgcctctagttctagcacctctggtttgacgtgactttacttgtgaggtcacgtgagtctccctcagtgaccgatacttcgtgataggcgc

SEQ ID NO: 103762 - DNA, 717 bp, Zea Mays
caactctggtctgccccttcgcatcccgcactggaccaaacagaaatcggtatccgttcacggtaacagataccaggcacactaatttccatcaccgttaccactactgttgccgaaccaaacaacatcttggtgatcgttgggatgtgtttcagtgcaatagaatagaattaaccaaatgtagttcgtagaagttataatggagccgaaggtagagatgaaaattcgctagcacacagaacgatttaaagcaaaaactcaagaaagaaaatcgaaaaggtggcatgtgtgccacgtgacgtggtgaccgctgtgtgtttgggtgcaacagaattaacatgacaatgcagtttacacaagtcataacacagttcacgaaagtcaaacggaaggtgtcgatgttcggatccgtggacctaatcaaccagtagtcatccaacactttctgtataaggataaagaaaagaacaacagacaacaagaccaaatccaaccattatccctcttcttttttccgtctgtgtataagtataaggctcttttaaagtggaatgtattctgctaatgtgcaccacgacacggagtttagatgaaatcccggtggacctttggactgctttatctcatcccactatagaattaggggttcacaagaactttgacatctttccacgagagctggcagatcatccactcttcattgaaaagtgcgtaaat

SEQ ID NO: 103763 - DNA, 419 bp, Zea Mays
atggctttaatgtgatcgcatcatgccttctccaagatggctgaaattccccgcgcaccagaaaacgcgcaaacatccccgcgatcactcaaaatttcttcgaaggcttcgacttcttcacttatccattcaacgacgccctcggggtcgcctcgtatgaagttttcttcagcagagtagactcccaccttggtgaagctagttttcaatttcttcacacaatccaaggatttctcgaagcacctttccttggattcacgaagttcttcaacatttttctctagcttttatctttctctagacctttgtttcttagttcaatcacctcggaccgaaggttgttaagagccattgtacaaccttcgtcttcggtgctcttctgagccctcaaggcattactaagaattaatccctgtaaa

SEQ ID NO: 103764 - DNA, 910 bp, Zea Mays
caggagggtcaccacaaccaggccatttgtgttccgcaatgtcgagattgtctctatgacgatcgaggccttgccgtctccaccacccatgctcgctgtcagcatggtcaccactagcgaccccagcgcccctcccggtggctctgtggttacgccaacacctagctgagctgcaaactctactgcgcgctatgacgctgacctattataataatattagcacagtttacatgtcttccaatcctattcagcatcaacgtgccaaacacattgagatttatctccatttcgttcgagaaccggtggccttggggtctattcgcgtacttcacatttcgacgacgtttcagtttacagacatatttagttatttaccaaagggctcccagtttctatcttcacgagtttgggtccagtctcaacgtttgtctcatcgacacttgtgactacagggtggtgttagactagcatattgtatgagtacacgctaggtatagcaggcagactcgtgtatatagtagactgccatatatgatgtgtgcatgtatgatgtgggtatgtgctaggtataacaggtgggtccttgtatatggttagcgagatatgaggggatctcgtttggttctgtttttataagatactcctctctctccatatatacatgcataactaagtgctaatcatcacccggggtgatggacctcatggtctatcacctgtactaaaaggttcatcccaactaattaatcatgccagccacgcgcgattaatcggagcagtcgtgcgcgattaacggggtctgcaccagggaaatcaatcggatcagggaaccaaccgcaccagtcacgcgtgattaacgagactgatccgcccgccgcccacaacgcgcaacaccaaatattcatccatt

SEQ ID NO: 103765 - DNA, 453 bp, Zea Mays
gttttgcttccatgttcaagatataactaagtgataatctcctagagggggtgagtagacgacacctgaaatttaaacacttataacaaaattagattccaaattagtggttagagcgagagagaatagaattagagtagggagcgagttcttcttgtacatttgctcaaatgattttggaattaactttgggagcaacactcaagatttgaatcaacaccaatgcaagagaacatagagaggcaattggaagaacaaatcacaagagaaatcaaacacacacaaagacacaatgttttcatttaccgaagtttggttccaaagaacccacgtctccgttgaggtgcccctaaggttcgggtctttttcaaccctctcaagtgattctaacgatcaagcttgagccctctagatcatgatgagagatagagtctccatagggcactctgaaag

SEQ ID NO: 103766 - DNA, 518 bp, Zea Mays
gtaaaagttacgttgtatttgtatcctttgggtgcctctgtgactgtgactgtgaggacacatacggtcagatacccgttgctcaaccccagcaaggatgtcaagaagatcatataaccttgttcgccgtacttcgcagtaaaatagaatgcaggaacgagaataaagcgtgcgagagctgctgctgtggtacacttccgagatctcagcttggcaatgaagggcacatatatctgcctatgagatcccacgcattgaacatacctgaaaagcacacagcagaggggactaaatttcatgtggaacgctagattatgccgaaatgtaggagctagtagtcaccgtgtgtcagtaaaaaaggaaaaaaaaacatgaaagaaaccttaccaagtccccaggccgtgtgtcttcagatgggaatccggggaaaatagatagtcaagacatatcagaaagatatcgaacacgtaatccatgttctgcagaagcagttgtttggtgcttaatcgcacatgttg

SEQ ID NO: 103767 - DNA, 484 bp, Zea Mays
cacagatttgtgcagagtgagagttgctgtaaggctccggccgaagaattcagaggatttagctcatggtgctgactttgatagctgtgttgagttgcagcctgaggttagcttgtccaccccatttaaccttttcattttttaccagtaatcactatttttttctgcagctgattgtgttggtggtcttgttttctgtagtccaagaggctgaaactgaagaaaaataattggagctgtgagtcctacaaatttgatgaggtcttcagtgaaagtgcttcacagaaacgtgtgtatgaggcagttgcaaagcctgtggttgaggcaagtcatgcattccagatgccactaattaatttagttgttgcaaaatagaacaaattgaaagatgtagatttgctagtgctgtaacctggagtaacaaatgtttacaatattttgctcatggttgaatcacgataataattaattattatttttttca

SEQ ID NO: 103768 - DNA, 327 bp, Zea Mays
atatttctagagagactgattgggccactgcagtactagcttatgtctaactcattcccatctttccaaagacttctgaacaaggccatacctctttatcacaaacatgttcagttaggaaagatgaagtggaaggccatcacccagtaacaagcaagcaaaagtagtcgccctcactacactcaacctcaaggtagcccaatttgttcaggagggaagcagccatatcaacaccctatttagcagtcaccacaggccacacctcagacaccacgccctcgtcaggctgccctagtaggcaccccagcgagacctactggccagaac

SEQ ID NO: 103769 - DNA, 421 bp, Zea Mays
attaatagaaaattacataaatctaatgattattatgtccccatacatgttcaaccaaatcatttagtagttgtgtatacatcgatgtgtctgtcatctcgttgtccatttgaatcctagctgctaggctcggggttgcattgtagtagatcgacgggccgactgtagaatcaactgtctcatatgtctcgtctaaatcggcatcacgctcgccatcgatgatcatattgtgcaaaatgacacatgcacgcatgatcaaaccaagagtacgttgagagtaagaacgtccaggaactgctataatgttgaaccgagatttccacactccaaaagcgcactcaacatctttgcgccatgctgcttgagcatttgtgaataactgatgtttctcactttgtggaagcggaatacccttgatgaa

SEQ ID NO: 103770 - DNA, 740 bp, Zea Mays
tccaggatgctcaggacgtggcagtaggtatgtttccagtcgaatcctacccagcaaaagtattatttgatactggtgccacacattcttttgtttctacatcttgggtagaagcacataacatccccatagaactaatgattccacctttaagagttaattcagttgggggaaaagttcagtctgataggatttgtccaaatctaagcattgaaataagggggatagacttccccgctaacctagtagtaatgagaactcaagggttatatgtcatcctagggatgaattggttgcacagaaatcaagccactatcagttgtgacaagagaacagttaagttggtgtccccatctgaaaaggaagtagtaactaagttgtacttgcctgaactagaaggagtctgtcaccatttatcagtagatgacaaagagtccagtctgattgaggcaattagaattgtgtcggaattccccgacgtgttccctaaagagttaccaggtatgccaccggaaaggaaggttgaatttgccatagagctgatcccaggcaccacccctatctccaagagagcctatcgagtgtctggactagagttggtggaactcaagaagcaaattgatgagttgttagagaaaggctacatcagaccaagtacctcaccttgggcagccccagtgctatttgtggagaagaaggatggtacgaagaggatgtgcattgattatagagctttaaat

SEQ ID NO: 103771 - DNA, 546 bp, Zea Mays
ttgagttcttgtcccttggctacaactaggacatggtactcctcccacccatacaccacaccgacaacgactatagcttcttccagcttggaggagcacgaccgctcctgctttcttggctagaagaggggcacccagacctccgtcgtcgtccctctcgctagaagagacaaagatagaacaatcacaactgcaccgcgggtagtgcttccagtggagctagtgcttctgggtaggcaaacggcgcagactcccttgcgagggacctggctggtgtcattctcgtgccaagaacaacgacgactacacgtgtagatcccacgacaagtccatcagcccctccttccgtgattcgggaggtatgatcgacatcgctctctttccctttcaggatgagcaatgtcgccgcatcctacttctcttcggtaggtactcacatgagtgcatataccgagcttccaggacaccatctgtagtcaacactggacctgctcacaaccactccaacctcgaatcgcgtggacttcgaggaagaagatgacatgt

SEQ ID NO: 103772 - DNA, 508 bp, Zea Mays
gatgactccgcgatacggctgctcggcgaagtcttcctactttggtgcttggggtgattttggtggtgtgggttcgggtgatgcggaggcggaggcgggggtggaacaacttgtacttcctgatggtggtgatatgcgtggttgggtagatgttggacgtggtcgttgttgtagggttggtggtggtggtggtggtatgtgtgcgcgatgactcgctggttgtcggttggctatgctcgagacatcctatccctggtggcctttgtttccgggcaataacttgttgggtgcgcgcagtcctcgccatgaaacaggcagtaaaatctgcgtggttgttgcacccgtccttggccccgccctcttgtgcctgccttgaagttggcggatcacggtgatgcttgaagttgcagagcctgcgagcttcgctcatccaggtagttgatcccttggaaagcggtaacatgcgggatgaagggcccgcgctgaggtatgaagaggtctccggctg

SEQ ID NO: 103773 - DNA, 558 bp, Zea Mays
tcgaagtctgtagggatccttgcttcttcgtcgtcgcctgccatcgaaacacaaaaacaggaaacaaacggtgaaggttatccctaataatctcactacacgctcctctcgggtggaacacaggaacacgctctaatgtatcttaccaagctcttacaagtgtctgacgaaatacaagcaaataatggtacaatcggaggatggttcgtgatacttaccaagaggtagtgaaaccgcgattgcaaggtcaaatctgtattgatcagaagatatagtatgtggagctgtaggacatgcacaatatgtatgtgaatgtggaacaaaatcgagtgcagattagtgaagttcaataagtgtccaaagcacaagtcacaattgctgactaagaggtgtcctatcgaagcacaacaagataaaagtaacaaactagcagaatggcagttctgtaaatagcgcagatttttccagcactagtagaaatcaaaggcgtgtttccaaaggagtaccagcaaacgagctcgaaatattctgaattttttatcactgatccaaaatcac

SEQ ID NO: 103774 - DNA, 391 bp, Zea Mays
gcatctgaggtagttaaggtggtcagtgataaagttttgattcgttgcatcctgggtgatttttttttgtacttacgacctgtttctctcgtttatccatcttgtcaacctcttaggctcttactatagtatgtagttggtggcttggtgctattcccatgccaaagttatagccatgatataacagctaataaatattatgcataattccgatgctttcagagtctgaatcaattagttgatatattggaatacctttttgttatggttgcctcaattctttgacacatattttcatgttgctgttgtcaatcccttggagatgcttgctcttgcaaaagaccaagtaatgaaaaaatgctgggaacccagcctccaaaaagttgattcc

SEQ ID NO: 103775 - DNA, 757 bp, Zea Mays
tgaatatttttgtgagggcttttcactggtatattatatgactccgcctcgttaaatacctcaccccccaggaggaaaagagcgcgggcctgagcagcattgtttgtaggattacatgggcgcgtaggccctgagacttaaacaaaaaatttcgaagattatcgatgttccaggaatgctctaagtcttcaccagatgatgttgctagcctgtacgcgctgggggatgccttcgacttgacaatgaatggaccttcccatttcggctccagcttgccccgtgattctgttcgggtggtccagacgagtacgaggtctcctttattgaattctcttgggacaactgcgttgtcgcgccaggccttggtttgagcctgatatttgtcgagggcctgcagggcgaggacgtggtctccgtcgatgagatctttggaagttggttcgtcaacatcggagattgctgatgtgtttgttctgggcaacccatgctttatctcttgcgacgtcatggcctcggatccatacaataggcagaaaggtgtgaacccagttgcccggcattcagtcgtgtttagggcccataccacttcaggtagttggtcgacccatttgccctttttatcgtcgaggagtcttttcttgaaggcagtaaaaatcttgccattggcacgctcaacgacgccattggattgtgggtggtacactgaggcgaagacaggcttggtgccgatgaaaaagcagaaatccctaaagtcttg

SEQ ID NO: 103776 - DNA, 288 bp, Zea Mays
ggcggccggaatgaaagggtgagtcaccggcgcgacttacagtggcacttactggttgaggagctacggcggtcatcgtcgagctggtgcggctagtggcgacgtgtttaacggatggaagcgtggcacaatcatggcgcagaacggcaactccggcgatggccaagaagccacgtcgccggcgtaaaaggtgagggacagcgaggccacaatagttcatacccatctgcaatgagatcttttcaaggccagcgaaatccattcacccacgacacgaatctcgtctcc

SEQ ID NO: 103777 - DNA, 292 bp, Zea Mays
aatttatatggcacactgatctgctgtaaaataacttgtgatttagagtcagctgatgcaggctagcaatctttctttactcctgaatggagtcctaatgtagaaacctgattacatcgtttgtatctactcaaagagaactgtgtttctaggacacgacctgcgatgcaaacacaccagagaactccacccagagagtcgaagatagggaacatggagagagagtgtggccggccttgcaccttttgcccctccagtagatggagagactcagccgaggcgcgcagggagc

SEQ ID NO: 103778 - DNA, 544 bp, Zea Mays
attaaaagtaaggtatggatgatgccacactaagccataatgactcctccaccgctgctgtccggcaaaccatcacattctatgacgcgggacgtcgagcaactcctgacttggggcactccggtcccatgtgacaaaatcccccattcccattcctatcgtgcaaaccatcacacactccggacgttgcgcccacgtgacagccacccttagttttgcacacaccggacccacgtctacttgcgcaaaaagttgcctcaatttgacactggcaggagcatttgaccacgattgctttctctgaagaaggaaggcttataagccggtagaagctatgttgactggccggtatggtcataaaaatgtgtaagccgtgatgacgacataggtcgtgtgggctgtgtttctttggtgcggcccaagtagctgccaggaggccgcacgcttcttaccctgacccagcttggctttagggtcagtctcccttgctttctctgcccagcaagccctcgccctctagctcttcctgctagcgccatctccg

SEQ ID NO: 103779 - DNA, 286 bp, Zea Mays
ggctgctcgtgagaggagagagtttagatccaagtacaagagcacgcttagggaaattgagtatgctagagcttcagttatgttgtccgacgagactgaatgtgatgagtgcgctctacacatgttgaacatcaccactttacagaccaagtactccaccttgctagatgagcgtgatgagttgagatctaggtctatcctgttgggtgtgtataccgtttgtcctagcttgcagtctgagctagcagagagagaagctaggatagatttgcttgagaaggctagc

SEQ ID NO: 103780 - DNA, 613 bp, Zea Mays
atctcaatcttttcctgaacagtttgctctgccgccttttcttcaggtgcggcaggctctgtcattgtgggcaccgaaggcctagcttcggtttcagcttgaacttgtgtagcttcggtttctgtttgcccactttcggtttcggtctgcgatttggcttcattcggagtgactttctttgcaggaccatggcttagtgcctttgtagtctctagtacagcatctagcacgttagccattctgctcctcttgggagttgcggcagaagttttttgcacctttggcaaacctgccattctcaatggactcaggatttctggtatttttgtcactttttccacctgtggctctttggccttattatcttcagccttggctggctcaactgtagtcatctttggtactacactcggctctacagcgctctgcataattgaaacactctcttttgctttggcagctgaagaagtaccttcgccaaattcaggaatcactgctgcttcaatgtaacgcggccggtgagtcagaaccttcatcttcttgcccttcggctcagctgtgatggccgaagcagcaatctttcccgaagcagtaatctttctctttaaccctc

SEQ ID NO: 103781 - DNA, 358 bp, Zea Mays
attttgtgtaccagaaagataccaaagctcctatgattggttatcacaccaagtggccgactggctggacaaatgaatggttttacgtgaaagctgacacgaagaagagggagaagcttatgactatggtgatgagtcccttgagactgagcttcggcatgacacgaccattgtgcaatatgcagctcggctccccctgccagttagccaaagtggtatttagggttgttgcagagcatattagtactcaggatttggtgcaagaatacgtggcaaataaaacttttccaacgttggtgggtggggaatgccgaagaaaaaataagaagggaataaatatgaatttgtatgacttccc

SEQ ID NO: 103782 - DNA, 382 bp, Zea Mays
cgcgggttgggcgaacaccagcgtgccgaccagggtcgaacacgtgtgcgcattcattctgcctgagttgtagcgcgtgtggtcattcatccgagcctgctcttgccttggtcagtgcacaaaacctcttctcctccctataagctaccgatcttatgtgggggtcataggatttggcctactggtttcaaagatttggagctctgaagtgtggtctatctcccagcccgagcccgaggcaaatctttggttttgtcgtgtctagggctcacgtcccaatgccatcttcagatatgtgatagaggggttagttagacacgtctttgttaatgggagctttaggattagagctaaggatcaaggtgaacatgctcggttttgg

SEQ ID NO: 103783 - DNA, 504 bp, Zea Mays
cagacattgaagaacaagttggtggacgcccctatcctagctttgcctcagagtggtaagcgtttcacagtttatacggatgcttctcgaattggtcttggctgtgtgttgatgtaggaaggcagagtgatcgcttatggctcaaggcagttgaggaagcatgaggggaattatccaactcatgaccttgaattggttgcggtgatctttgctctaaaatcatggaggcactatctttatggcgagtcttctgacatttacaccgatcataaaagtctcaagtacattttcactcagaaggagctgaatttgaggcagtgtcgatggctcgaattgattaaagattatgatttgtccattcattatcaccctgggaaggcaaatgtggtggctgatgcccttagcaggtctagggttccaaaagtggccttgcctttgatcgctgatctagaccatttggggatcgctttgtgctatgtcggcaccgctagtaaggagtctcgg

SEQ ID NO: 103784 - DNA, 653 bp, Zea Mays
tttgggcattgcatcctcttgctgttagaattgaggtgtgacatccccttgctgttgggaatgacgccatgagacattgtatttgtaagacatagtaatttgcctttcagccctctttgcaaaatgaaccaactcagtgagacatgtgtaattttccatatccactttatcagcaatgggtttattgaggcccaccagaaaccgagccattgttgattcctcagcatcagttatccctgtacgaagtaagcacatctccaattcctgaaaatatgcatcaacactgcgattaccttgcacaagacgtttcagcttcaaatgtagatcacgagaataatatgcaggaacaaaacgacgtctcatttccctcttcatgtcttcccaggttatacggtcatgcccaactctatgatattcagtatggatctgattccaccaagttatggcatagcttttgaactcaatggctgcaagctttgccttcttttcagcagggtattcatacaaatcaaatatttgttccactttggtttcccatgcaaaatagtcatcagcattctccttgccgctgaatggaggaatggacactttaaccttgctcaaaccatcatcattgtgacgttgttcaggatgacgccgctggtgatcaccat

SEQ ID NO: 103785 - DNA, 381 bp, Zea Mays
aaaatatattatagtgttagtgaatactagaaaaggtatactgtactacatatcattatgtgctattttgttgccgtgctcacccaagcaataagcatgacccgtaaagtgtatcgaaccatatagtagctgaaatcttaaacaggatatgatctaagtatttcgtgagatgttgtgctttagacctgccgggagagagacctgttggaatgatctccaacacggctatggttggtggtcctctgtcacactgcactataaataaagatggtaacacgcacagttcatttgagtcgcattgtccaccgacaaaaccttaaatcagaccgagagggtgcacatacagtaataggaagtcgatactgttcttctccgtcacca

SEQ ID NO: 103786 - DNA, 603 bp, Zea Mays
gcgacaacacgtttggttggtggaacagaagccatgagttcatgatgtggagacatcgcaatgttatctacatgaaagcttagcggagacaggacaaagtgtgcactttttcaggtgctcatggagttaaagcaagattggtgctatataccataagactttcggttcctttcaagttcaggaatcattaggacggggaacacccgaattatgcttcctaactacgtaaattttttgaactgccttccgttggaaagtacattacaacacacatgaccaacgaggcgtttgctgtaattttgtgttaccaccgccgtgacggatatatctatactataccacggtataattcatcagtttaaattttataaaatacatttaactaaattactctcacactcgtaacattcacaaaattcaccaaataaattacactcaaacataacataccattaaaaccaacggttcatatcgctggataatcatctctctcttaaccattcaaattcaatgaacaatattattcatcgctcccctaccgttctcaccctcctccctctcccttcgcgtcatcgccgctcctctccctcactcgtgttgccg

SEQ ID NO: 103787 - DNA, 780 bp, Zea Mays
gtgaataggatgttaatggaaatgtacttccacaaagtcattgacatctgaaaatgtagtagacctgccaacctgcgccaaaactcaatggaggtaagcaatgagttagagagttatgtgaatacagtatcaatgtctttgaaaagcctatgtgaaagcgactaaaacaagtgaactgatgtccattgtacaaacagtagaaaacataaaacccatcacagtcaatataaacacaactccattaaatcaaaactttcacactaactacagataacgtctgcttttaggtcttgtaaccagatgttatgaacagatactatagttgtacaacatagtgtcaagctaagctgcaagtccatttattcgagcattttcctgtctcattttagtttagcttgttttcattccacgacaaaaataggtcgagcagttatacaattttcagaaccaacaaatgcaacagaaaatacattgatctgacaatgataaaaaggtctgctattgtatctgttgaacaaacatggagaccagagggttatctgtcctaagacctagaatgttactgtacctgctttcatataattgatgaaacacataaaaacattattgaagtaagaataggtggagtaaacatagatcaactcactacaatgaagaaagtagcatgcaaaatttaaaagttatagagaatgatataagactggtgtgattaccgcattgaaaagcctcacaactcattcgccagcgaccaaaaaatccatgttaaaaaagaacattttt

SEQ ID NO: 103788 - DNA, 3066 bp, Zea Mays
gagggggggtggagggaaaaggggtggccacctagggttttgtgggagaaaagaaccgacgccctagatgacttctgtctttgcatccaacggcccacaaccctttcccatatccacgcaccgaagatcaacttttggtcaactttttttgggatattacaaagatgatcctcccatctacccttccaagacagaacacaagcaagcaacatgtcttccatggtttggatagttcgccccaactgaccatcagtctgagggtgaaaatcaacactaagagaaagcttggtacccaaagcactatgaagactctcccagaaattggatacaaatttggagtctcgatctgaaacaatggacttaggcaccccatgaagcttgattacttctttcatatacaagggaactaactctgaagctgaatttgtggtcttcatgggaataaaatgcgcagaattagttaagcgatccactaaaacccatatagcatccctgccctgaggagaacgaggtaagccaaccatgaaatccgtagtgatatgctcccacttccaatctggaatttccaacggcttcaataaacctgcaggcctcttatgttcggccttcacacactgacacacctcataggctaccacgtacttagaaacgtcaaccttcattctcttccaccagaagttttgcttcaaatcccggtacattttggtttcgctagagtggatggtgtaaggcgttttatgagcttctctcgagatatccttcttcacctctgatttctgtggcacacaaaggcggcccctgaaactaaccaaatcattctcatcaatggtaaactcacggggtttaccatcgccgatcctctttcgagcttcctgcaacaaacgatcctgctgctgtgccacacgcactctctccagaagggaggattggatgagcatctgagtctcctctctagcgatgccgacatagcacaaagcaacacccatgcggtccagatctgcaatcaaaggcatggccacttttggaacaccggtcctgctaagggcatcaaccaccacatttgccttccctgggtgatattgaattgatagatcataatcctttatcaactcaagccaccgacgctgcctcaatttcagctctttctgagtgaaaatatacttgagactcttatgatgggtgtaaatgtctcaagattcaccatagagataatgcctccacgaatttagggcaaagacaacagcggccaactcgaggtcatgagtaggataattcccctcatgcttcttcaactgcctcgagccataagcaatcactctgccttcctgcatcaacacacaaccaaggccaatacgagaaacatccatataaactgtgaaacgcttaccactctcaggcaaggctaagataggagcattcaccaacttgttcttcaatgcctgataactgacctcgcaatcgttggaccagacgaaaagaacacccttctccaagagtctagtcaatggcttagtaatgctggaaaaatttggcacgaaacgccgataatatccggcaagccccaagaaacttcggatttctgagacactagagggtctcttccactccacacaacattggcattcttggggtcaaccataatgccatgctgattaatcacatgacccaagaaagcaacttcagacaaccaaaaggcacacttcttcaatttgccatagaattgattcttcctaagagcacccagaacgagacagagatgtcgctcatgctcttcctccattttcgagtaaatcagaatatcatccagaaacaccaccacaaagtcatccaagaactcatgtaacatcctattcattgcttccataaaagcagcagaggcattagttaagccaaaagacatgacgataaactcgaaatgcccatacctggtgctaaaaggtgtcttctcaatatccccctcgcgaatcctcaactgatgatacccagagttcaaatcaattttagagaacacctgggcacccctcaattgctcaaagataacatcaatacgaggtagcggatatttattcttgattgacacttgatttaaagcacgataatccacacatagcctcttgcttttatccttcttctcaacaaacaatactgggaaagcccatggtgacctgataggcctaatgaaacccttagccagtagatcatccaatttccgcttcaattcaacctgctcctttggagccatccgatatggggccttatgaatcggatgcgtacccgaaatcagcttgatttcaaaagccgcatcgcgctccgatggaatgcccggtagttccactggaaacacgtcggcataatcacacaccacacggatgtcctacacccgcaaggcagcctcactctccaccaccatggagtaagagattcccgacttctttgaccgacgatccggaagtaattgggacaacaatgagagagtgagctttggagaacttcccaagattaccacctccctacctgacggcgcctgcaataacactgtcttccaaaaacaagatatggctgcgcgatactgagttaaccaatccataccccaagataacatcaaatgaccctagggaaatcaccacaagattagctgaaaatacctcattagcaagaatgacggaacaacccgggtagaccgaacaactactaatggagccattagcagaactaaccacaattgggtgacccatcctctgcacggaaataccagcacgcgacacaaaattctccgaaacaaatgaaaaactagcgccagagtcaaaaagagcatgggaatcaaacgagttaactgagaccgtacctgtcaccacgtctccctgctctctgccatccgtaaagggtagcacatatgctccagaaacacccgtagaagaggaagctcctagagtgaaattaacagaagaaccccacagagtcgtaggatgaggcaggcgtggagctccaaacttggatggtacaagagcggttagtgcaggagtgggcgtggctaggtactgaggaaaagcctgcataggcacgaac

SEQ ID NO: 103789 - DNA, 345 bp, Zea Mays
ccctgagccaacaaattgaactttaccatagtatttaggctagactcctcgccgccgacaagctcttccaccctcgcgcgcggccacagtgactccgaccatctctgaccaccatcagcccatcgacgtgttcgccaggacctcacaaacctccatggacacatcactggagctagatcgccgccgataagcccactgccctttttccgctgcggttactattccagtgaggttaggagcgcaggttagatagttcacaagcttggggggttttctgcaatgtcagtgacttagataaatagtagcccagggacccgtctataaggaacgcaggaaaaatacgcc

SEQ ID NO: 103790 - DNA, 930 bp, Zea Mays
agcgctcccacttggggtaggtgctagtgcagtttcgtagtgttttggagcatgacaatttggttctgcttggcccccagcaatatttagatgctactttcaccgcggttcgtcataatgacgcctggaatcatcgggcccttttttcaaccacgagtgttggtttatgcttctggggtttcctctggattaccgttcttctgaatacttgcaagctgccattgggtcgtttggaaggttgattctttcggaggaggatcggagtaatgtttctagaactttgcttcgtgttcgtgtcacttcccttgaggaagttccccaatttattgttttttcggaggctgagggcttcgttggtgactcttggactgttcagtgtgagattattcagcaaaacatgcttggcgggcaggctcaagatgaagaccccattcccccgaccccggaagatggacatcagctacccctggttttcttcgggctgggtcagcccatgcccccggctgggcttgacctaaacttcctccggagcctgtgggtggagaactgccggctcagcaggatggcattggccagggggattgggaccagtggatcgagaacgtccaacccaaccaacaaattccacagcccatcctgccagatgtgcaacccattcaaccggacgaacttcaactcagtaaccaacactcgggcttgtcctcggatagctcctttggtgctggccagattgcacctcttcagaatggccatattgttgagaatggacatgtgctgccagaggatgggattgctttcaatgctgccccattcaatgggcctcaggaggttgatggcccggtgcttcaagtggaccataaccctgatattgctgagctgcctcatcaggcccatgttggggatccaaacaataatcactttcagaattta

SEQ ID NO: 103791 - DNA, 358 bp, Zea Mays
gtggcacatatccttgtgatacgggcactgggcgtcgaggatctcgtccaacatccgtgcgttgcctcgtggcataccgcggggccgagtcactaggggccagcaacatgcacttcatctctcatcctcttttctggttgttgtttcccttccctctttggcacctgggatgcaggcttcgtgtgggcaatgaggttcggggcccactcgttggcggtgatgtagatgtttgcctctcagaaaagctgttccaaggtggctagagccttttagaggatggctcggatgaaagccgagtcattaaacccacgatagaagtcctcggtcacgacgacctccgtgacatcggggatgtgat

SEQ ID NO: 103792 - DNA, 526 bp, Zea Mays
tgccgaaggcacaaaaaggtcttgcggccaagagaaaaaggatggccagtgtactagatgtgctggagacggtgaaggcttcaagctctactccagggaaaattgccaaggcatcgaatgtgccaattgaaaccgaaacaaaactgaccgaagccaaagctacaatgagccaggccagcgccgaggctaggccttcagaacctgccaaggagaaaccctcagaaattggagaaaaggcagcggagaaagaagctatagaacagattttgcctgaaaaagttgccgctcccactcctgaagcaccttccgaagaccttagttatattattcggcatgcttcgggaaaaagattatctgaagaagaaatttttgaagctaaacactatgcccgagaactgaagtacccgaaaggggccttagtgtttaatggtacagatgaagatgatttcttgtattgcctcccagacaacaaagaattatccgttgccgggaaatggccagaagtatggggtttccgaagctcgaa

SEQ ID NO: 103793 - DNA, 573 bp, Zea Mays
taacaaaccctagaaaatacgcgagaatacaattcagaatttatttacaaaatatttagatcgtaccaaaaactacaaaactctaagcaggctaggcaactggcagcgaacctaaatcagaggctaccacccagcacctaactgcacataagcataaaaaactgaagttcctgaaatatccgagtaggaagccaaggaaatgtgatcaacatgtggataacggagttcagttaattaaaaatagctatgtgaaggtacccaaaagaagccacacatgggatttgagtttaatacacttcacagttttgactccaccatttcaaggaaaacacaataatgcaccggaacgacagaagcacaacaccaacacaccctatgtgcaacgtgtagaagaacataaacagaatactatgccactgaaaacaagtatatcactgacataatctgagtgcagtgtgtgtagcaagagaagtcacagccgtctacaaaccacgagggagaagcggaaaggcacggcaaggaacaaacctcccaaaaggaatcagcgatgagcagtcttctgcgaactctgtc

SEQ ID NO: 103794 - DNA, 391 bp, Zea Mays
ctagcgcttgaccttcagctaagtttgcaaatagtggagagcgttatagaacattgatatcattgtgagatccgggtaaaccaaaaaaaggtgtgccaaatccagagatctttagatgcgaccgcttctaagataattgtaggttctcaaacgtgaccagaaaacataccatgatgtgttgttgggcagttcttccacttccaatgcatgcaatctatggagcccagcataccaggaaaacatctccccactccaatctctagtaagcgacttgtgtcattctgattaggtgatctcaagtactcattttcaaaaatttcgaccactgccttaacaaaatttctcagactctcgatagcggtactttctccaatacaaatgtactcatcag

SEQ ID NO: 103795 - DNA, 403 bp, Zea Mays
tttatcattgtagaggacacaagctaacaatacttggcttaaggagacgactccatataagttcataacttctaaacctctaaagtaggaataaaaggctacaccaaattccagtagctattacgcgtgaacctatcagagtcgttgaagtaccactcatcactaacatcggcgcagtagaactcgtcttcatcagatcgatgagatagtgttggaggggtcaacggagttgttggttcaacacttatgtcacccctcgtacttagcaatttgtggaaatgcttgcacttttgcctctaaggcatcttgttgtagaaattctagtctttatttgatggcaaataaggtcttagctacgatctcttcatcattcatgacccccagtgatttggtggcatcctcg

SEQ ID NO: 103796 - DNA, 491 bp, Zea Mays
actatagtacaccatggtttggggacctctgcccatgattttatatactattggtttctctgtcaaacgaaggaaatcaagcatgttcatgacaatctgtttgaactgataaataaacaagaataaaacagctcccccacacacaaatgtttttgaactgatcaagcatctggcatagtataggcatgctcacgtgtacctttaaaaaggaacctacttgttacccccacaatactacataattttccctgtgcaagaatctagcataatctgctacttgcatccctatttagcttacccatacttaagcatcatcgatacaacaacccatgtcaatctgctactccaaggtttagacagactatcaagcatacagagacatggcagtgccagacttgaagtgaagcaatgatggataggttatattcatataaattagtgtctgcaccacatacttatttaattaaaagaaaaccatgaggagatccaac

SEQ ID NO: 103797 - DNA, 1252 bp, Zea Mays
aacttattcatgcagattactatgaagaaaaacatttttgacatccatctgagagagtttaagaggatgaggctcaactgcaatcaaagtacgaacaatagtcatatgggcaactggtgcaaaagtttcagcataatcatgcccttgagtctgttggaaaccacacgtccattgtcacattgcacatctttaatggtgatgccaaactgtgttttcacataggcgaaaaactgagtgagggtcgggaaagtatccgatttcaggcgtaaaggaaaagtccataagtaatgggagtaattatcaagaatgactaaataatatttgtagcccgagacacttaaaataggggacgtccacgaatcacagcgaatgagatcgaaattgttaaccgcacgagaagtagacgtacggaacggaagatgaacacgacgactcaactgacaggcatggcataaagtggatctagcatccttattacacatagcaatgactgatgcgagcttggatagggtctcgtgaccaggatggccaagacgacgatgccaaagtggagtggagctggcgacgaagctgtgtgcagcagggaggcacatgggttatagcggcccggagctattgcacctgacgatcacgtttcgagacaacatatccttcacagagcaaccagagggatcaaattcaatggaacaattattatcagtggtaaaccggcgaacagaaatcatgtaaagtggtggagccagtggaaatgactggaagaagggagccgtcaccgacaatcacggaggaaggtgtagtaagagagggagttgaagtgtttgatagggtaccggcgtttgaggtcatgtgggaggttgcacctgtgttgaagtaccagccgatctgctggggcggagtcagggacacggtgctgaagggactgggcacccaatatggagtggccgactatcccaggatgccatagggaacctgggaaatacctccctgcagagcgtcggtctgcaggttgtgctgcagtggggcaccttcctgtccttgtagagtgccatgaacatactgttgggtctggtgggccagcagtgcatggtgtggggcgatggaggccggagcagcgtagatgacctgttactgctgggccggcggagccagcagggcctggtgctacgccaggagagcctgctattgttatggagtcggcgctcgtggaccggaccacatttgaatggccctagtccaggggttttggagggag

SEQ ID NO: 103798 - DNA, 467 bp, Zea Mays
ggcagaaccatgtgggtgtgaacgcctacagtagtaacataaggaagggaagggcatgcttacatgtagcacaagttatatgttagagactgcagagcatctgcggtgaacttgttgtcatctcgtagcacatggtaatgcgtaggacggcttgttccctgcaattccacgagcagctataatcttcagattcctcatttgggggaaaaatgtctgaattagttgtaacatgctacacacataccttggccccagcatggatgcacacgaagaaatcaaattctgttgggtggcagatattattatcaactacggtgcctgcaaattccataaacgtttcagcaaaagcattgtaaaaaaacagcaaatgcgcctgcatccctaaccagcgcgaatattcccactcttgtccgcgtattggcaaaaaataacaccaactgaattatgtagaaagtgttttttaaaga

SEQ ID NO: 103799 - DNA, 434 bp, Zea Mays
gttctctatatggcttgttttccaacataatgtacctccatttctgaggctcacagagacacatatattaatgatatactaatacaccaattaatattttcagaattattatccaactgtaacaaatttgacagcagagtacagattacaaaacatgcaagccaaataaggttactggcaagctaaaaacaagaagcaaccaaactgaaatgaataaaaccaaagaaggagaataccgcgtacgctatagcatgcaaatggataaaaccaaagaaggagaacaccacgtacactatagcatgcaaggcaaaatggaacaatagtgtgtctcaccttttcaagacgttggagcagagctgtcttgaactgcctaacgccacggccgatggagttctgatccagccggtgtgccttctcaaatgcatagaaccgac

SEQ ID NO: 103800 - DNA, 405 bp, Zea Mays
aatgttttgattcaattcgtaattcagatacaatgcaaataaaaggagcattgtattttttagatgcatgtggaagctaatatcatttgcatgtcacataaataatgttcagtttcgtagcctccaggcaacattttctaaaccaaattcatttgtaaacacaaaaatgaaacatggaaacatgaatacaatttgattcaacagtataatttgatctgttgattgaatagtataatgttgatgtactataattgtgatgatgcgaggaaccgtccaattaactcgaactatcaaccacttgttgggctcaacttcacctaattaacttggccatccatagaaaaacactactctatgtgtgttctagcactcacataataattatcacagtcatgtagcatcaca

SEQ ID NO: 103801 - DNA, 278 bp, Zea Mays
catcaccctcgatagttgacttagagaagttgttacatgcacaagctctgataatacagaaagcatctcaactcacctcctcataccagcaagtgttggcaagtcgaaacgtcactagaaatgaaacagctgatgaacagacacaaaaggatgcacacaaacatacaaatgatcttggaacatgttgttgttgtgagtactatgaaattccttgtcgctagatcagtacaaacgaaagtgaaactaaaaaacagaagaaccggattttgttttctggc

SEQ ID NO: 103802 - DNA, 792 bp, Zea Mays
tgcaaatcgttttggtattttgcttcatttttgtttgaaacggagcatgcaaatcgttcaggtgagcagaagaagaagaagaaacccaaatgagtttaacataggcatccaggacttattctgtcaatcaataagtctcattgtctgactagttgtaatgtaaaaggagaacacagagagtagtcgacagtcttgataagcatttgaaatttgcctaactttggagttggtcagaattcaatcagatagatatacatatggaatctcttttagaggggcattgctacccttttcttcgcaaaactcccttcgctcctatggtaccaaaatgcttcatctgagctctggttttaggtcacgaagatcccatagacgaagcttacataattaaccctaaaacagacttgctaacgaatagaactcattggtttgagtacctttgtttaggcacatcttcttctgtctcgtcgttcaatcgcacgtctgtatgatccatactacttacttatttttggaacaatctcgggcgcaacgctttccgacccagagttgggtgaagcagacctttttagagggcacttttacgtttcgacccctcaggagacacgggtcatgtgaagcgtggagtgggtctattctcgagttaccgtggtctttgttgtacctatgatattcattcctgacattatcctactcatgttttcttatcataaatcacattgttggattttttgtagagatcatttcttcataaaaaatatataggtattatactttgttattaccgaaaac

SEQ ID NO: 103803 - DNA, 423 bp, Zea Mays
ctctatatggtaggaagtgcatgactcctctatattaggaccagattggaggaagatagttctttggacctaaacttattcaagaggcagaagaacaagtctatataatcagggagaacttgagggtagctcagaccaggctaaagagctacgctgataatagaagaagaccactggagtttgaggaaggcgatcatgcgtacctcaagatgtcaccacttcgtggaatgaggagatttaaagtcaagggcaaattgtcccctcacgttattggaccattcagagtttttaggtgagttggagagatggcctatcaactcgagctacctgataatctatcggatgtacatgatgtctttcatgtgtcacaacggaagaagtgcttcagggtacctgaagagcatctatcagtggaggatctta

SEQ ID NO: 103804 - DNA, 450 bp, Zea Mays
ccaaggttgtaggcaagtatattgacagaacacatcgaagacaacgatctgattaccatgtcacaaaagactttcaactaaaagggagaaaagaagcaaagagctcaccagatcggagacatacaagaagctccacgtcttcttgctgtcgcgtgtacactgtccaagggcaccttcaacgtctgcaacttggcgacagcagggagagaggtggcgatgacaattgatggcgtagaggtgaggatgagatagataggacaacaaccttggggcgacaagtgagagatgtcgcgacggcggtgggtgagggcatcgacaacggtggtgggatgaggatggcagcggatgcaatgtagagcgagaacgagagtcacggggtgcatagaacctcctgtcagaggagtggaaccctagccccatcgaaaccatcggtacatggacttagaaaac

SEQ ID NO: 103805 - DNA, 615 bp, Zea Mays
tagttctctattttgtaaaccaagtctgtttgtgtttcagagaggtgtggtgttcagatttgagcgctcagagaggtgtccatcttatactcgagcatcgcaagatctgggcggggctggcgcgtagaatgggaagtacttgagcatcgcaagatccgggcagggctggcgcgtagaatgagaagaatgagatggcggggtggtcctgcacttacgatgggatgcaggccgatggtggtcctgtgcgctggatggtgacgaggggattggattgtgattcgttccatgacggcgagacgtggattgcgtttggggcgtggaggatataaaaggggcatgtgtggtgcatgggaagaacaattggacggagtacgaccgatttgtattatgaatgttgtagtcgccataaaataaattatattccaccgttccaaactataaattattttgacttttttaatattgattttgttacgtacctagatttatgttagttttagattctataaacataaatagatacgtattatttctgtcattgttttccatgaacattcgatagtttttcctcttgttgcaacgtaagtataaccatatttgctagtaaatttaaag

SEQ ID NO: 103806 - DNA, 859 bp, Zea Mays
gaaaatgtggagattcgaaaacccgaaggtgcctacccaaagcgttcacgccgagtgaaccgcccgactgcacctgtcgaggagaagaagaaaaagaggcgactgtcgtgcttgcatcaggatgctggtccttctgtgccgatccctgatgatgtcctagtggacgccattcccaaggttaacgtcgaaggttgtgatgatgcgtaggctgctggcagcgtgtttcacgaggatgtagaggaggaagaagaagagattccgctgatctgcaagaacagctgtcactatagaggcagcgacgggggcagcgatattccctcccaaactctgtcggcactcgtcaaccttcaggggctttcgatatcagactttgatcaggcactggaagagatcattcctgaagacatactatcggagcctcctgaagctgacattccaaccatctgttcagaggtcatagatggtggactttcgctgcttgattctgccaggcaagaggtaacccgggtggtgtcccgcgcatcgtcgacctcagagggcagtcttctatgcaaagacactaatccgagtcatccaactcccatagaggtggctgctgcataagacccagcccccgagggtggcgctggtagttacccagcccccgagggcgttgtcggtagcaacccagcccccgaggatagtgctggcgataatccagcctccgagggtgttcaggcatgctctctctctactgcttccatggatgtccacattgggtcgctcccaatctagtccgaggaggtgacagtgacacgtgcttctacgactttaactagtcaagtcgctttagaggtgagcgagccagacgacaggagcc

SEQ ID NO: 103807 - DNA, 413 bp, Zea Mays
gttagattgaaatttagttttcaaaattgaagctatttgctacttcaacttgaaagtataatccagatgggggtcgcatacttgaattctcaaagtggggatgctttacatcgattgtagagaactctctaattctgggttatgtaaattataatctttggtccttactccttagttaattttttctgaataaggtaattttttctgaataaggtatttattatttgtaacgtagacataaactccagatgtactatcttcagtccttagtttttattcttctgaatatagcatagttttttacaaaggatgttgacatatacctttctcaaatcatttggtatttgggattccaatagctgttctggagtttcctagaaacagttaacaagacctgctcttgtagctagaat

SEQ ID NO: 103808 - DNA, 564 bp, Zea Mays
ctattggcttcgtataccctgattaccattatccgctacgagggcaaaagaaaaagaggaagactactgcttcggccattgcagctgagctaaagggcaaaaagatgaaggttctgacccaccggtcgcattgcattgaaccggtcgtggtgcctaaatttggcgaaggagcctcttcaactaccgaagcaagacagactgctccaattacgcagagcattgaagaaccagctgtaatgccgaagacgcctacagttgggccaaccaaagctaaagatgataagaccgaagagccacagattgaagaaataatgaaaatgccataaattctgagtcctccaacaaaggcgaaactgctgaaggtgcaaaaggcttctaccgcgactcctaagagaagtaggatagccaacgtgctggatgctgtgctggagactacaaaggccttgagccctgctcctacaaagaaaattgctgaagctgccaaagcacaagctgaagccgaaactgggcaagcagaagccgaagctacaaaaactcaggctgaagccgaagctaggccttcag

SEQ ID NO: 103809 - DNA, 605 bp, Zea Mays
aggcgacacctttaaaacactggtcagaacgaaaactagtactgcctaaactgtgcatattattctagcaagggcacataacacgatgcagaaactgaaacgaaagccttttaactgaaaagtcattgcaagcactgttggctggcatttcaaataagcaatggaattttccttggaaaggataccaaataaaaaaaacttgcttatagactacaagttcatgatgaatttcaacagtggcactacttcattggagaaaagttactgttattctgctacgaatcaaagagctagtccaattacatcacatcaaggtgcaattatcagaaaattagcaggttagttacacgtaccagatgacctagaaaattttggaagtgcagtatgtggaaatccccgagctgtgtggctcggacccctgaatctgaggattagcgaccatgcagccagacagcaaataatcaatgctataacagtagacaaaacaacaatagcaatgaggctgccattcacttttctcttgggacttcttacatcgaccccaaggggcttcacggcccttgcatttctgttgttgccaaacgccccatccccaacaccttgcc

SEQ ID NO: 103810 - DNA, 681 bp, Zea Mays
tcatgcatactattatttttatatattcttacctttatatcccaatgtctgtttaagacatttcagttaacatgcccttgaccacccttatttcttaatgatccatgagtggtcattttattttgcacatccttggcgatctcattaatttcttgtgacttccttcggtaatgaattttacttcaacccttctattggaaccttacctatcttacccttgattgttttatccacttcgccacttcgcgattcttgccttaactctatcctttgtcatgcattttgttattattaccttcaccttagacacctctatatcttacttgatgtttgtctcctacctgccctttaaaatcacctctctcccgtcttattctgagagctatactttacctatctttaccttggtcgtatcctcttctttggcttgcgagtttgtaacttcgtccttagttgtgcttttgtttgttattgcctccacctatcccatctctcaatcttaccttggtgattacgctatgttcgttacctaaaacctccaatctcccacttcagttcaagcgtggtctcttacttatctcacccgtggttatatcctgtactttaccacttgcaagacttatcttaactctattcttgggttgtaccaagattcctagttttgtctatgcacttttacct

SEQ ID NO: 103811 - DNA, 528 bp, Zea Mays
attttctctggttttataatactctggactgggcctcaaattcataaaaggctaggggcctcggtgcgaaaaactctaagactcagcatcacccgcgcttgaccgcgggttattttccctatttcctgagggttctttaacaacaatgcttggacaaaagggtatcgctcgttcctgaccgcacgatcttctattgaccgctaggattagacttagtctttcacgaaccggtatgcaatcgcagtcgtcggatacagatctgacgctccagatctataataactagccttcgaatcctatttgcacgatctcagatccacggtctgaaattaaccacatgaaaggttatatcctatctaatcagggtcgtccatgaacggatcaacggcacaggcactgtctccttcccccggccggctaatcacggcggcgcaacacactggtgatctgtactgccgcgcccagggaaactacctcgagtctgaaagcgtctaaatgatgcgaagattatggcgaagacatgggtga

SEQ ID NO: 103812 - DNA, 730 bp, Zea Mays
agctggagaaggaacatcactactctccccactgactaggtaacgccgactgtttttccgaattaaggggatttcctcctcttcttcctcatcctcgtcaacaatacgaacaacacaccgatcggggtcagctctggccggattacacccattgggttcaacatcatcaaggccacacccattggggtcagcgtcagcagggtcacacccattgggatcagctccagtaaaaagttccactggcacttcctcaacagcaggagcagaagggccggcatcctgattcaaacatgacactcgctgaaggctcctctttttcttcttcttcccctcgacaggagcggttggatgactggccgggcgaaggcgctttgggcgagcaccatcagatttttgagcatttaaggtttttccgggctctgggatagttgcaacagctatggtttcagcagggacgaagtcagaagaatcctcagccaacatgtctagcatagcacttatctctgcatcgcttgggtttataggcatctcaaagtgaacttgcctctcatcattggggagatcaccaagtgaagcaaccagagcctcgacttctttggaagagggtcacactctaagacccaagccactgtcactagcaggaggattggacgcaaaattgaaaaaagtcttggaaggtggcagattccaggcagaatatgcaacaggagcaccaatattcgacactttg

SEQ ID NO: 103813 - DNA, 320 bp, Zea Mays
cacactccacctgtgactgtgacagcctcgtgtgcggctacgacaaatcggtcccgactccgggagatctatcacgacagaatgagcatcagaaaggaagcgtacgttgctgcactgatactgaacttcacagctgcactgcacacatgcagaacagacaacgagttcaaaggctagcagcctagcactaagtcagaaagctagcagcgtgccctatccagaattcataattaaaatgtcaactgttttctgtaacttccggtcgcatcttgctctcaatcacagatgcccagatcagtcagtacgcaaacgcaagtata

SEQ ID NO: 103814 - DNA, 590 bp, Zea Mays
ggttagtttgtgtattgacctttacctctaatgatattgctagagatgtctgtgaatggtttgcgaccggcattatgtcccatctgatctataacaagaacagcacccgagaaaacatgagaataaaaataatactgcaagaaccaagggtgaaatgatatgactgcaataaaccaagcgaatagaagatcaaaaaagatgcccttggtaatagaggttatagaaacaagcatcataaccgagagtaaagagataagacctagagagaggtgataggagaacgattttggtgtccgtataagatattgtattatattccaagtttgaactgcatagatggatatgggtgacgcgctaagtaattgttttcataactctggtgatgtggaatatcttcctggagcacgcctagctcctatagatgggcttcggtataccgaatgtacattaaatttgtttcggatttgatctgtatatttgacgtaatttcacgagcgaagttactaatttaatgtcaaacatgacacaacattaaaacaatattagtgttctcaatggaaaacgtacgggctaaacgattgatgttccac

SEQ ID NO: 103815 - DNA, 635 bp, Zea Mays
ctgttatgttgtgatgccttatggtctgaaaaacgccctgctaacatttgttcgggcgatgagtaagaccttcggggatctgatccgggacaaggtggaggtttacgtcgatgacatcgtggtcaagactagaagggggtcgaccgtagtggaggatctaaccctggttttcgacaagctgcgggcaacccgcaccaaactgaacccggagaaatgcatcttcggcgtctccgcaggaaagctgctgtgtttcctggtttcataccggggcattgaagctaacccagaaaagatcaaggctatcgagataatgaggcttcccgcccgtgtcaaggacatccagaagcttgcgggatctctggctgcccttagccgcttcatttcaaggttggctgagagggcgctgcctttcttcacgcttctacggaaatctggcccttttgcctggaccaaagaggcagagcaagccttccaagaattaaagcaacacctaacttccctgctgatcttggtagctccagagccaggggaaccgctatacctgtacattgcggcggctgcggaagcagtgagcatggtgttagtcgccgaaagggcgacaccagaagggcagggatctgagaacttggaaccag

SEQ ID NO: 103816 - DNA, 674 bp, Zea Mays
gagggaatccaagagttgtcgtagtgtttgagatagtgtttgagagggggtgaacttgagccccagtagcagtatggccaccacccactccttggcatattggcctttgataatggacttttatcctaaaggcccataaacattctcatgggtcatggttgcctcttatgcatatattcaacaataagaaatagcaagatctaccaaaaatacagatctacaagtgagagaaggaactacgaaaaagttttagtggaggttcgccttatttccttttgacgaacagaaaagagagatgcaaaggagtaacgaaggttgattgttcttaggttcaatgatgacgttttggtattatttatcaaagaaagacacatttaagtgagtgtggcaagggtctaagtttttgttgttgcgggataataaaaaagcactggcgggtcataactaggtatatttattagtttagtttgtttacaagtaggaattcgaagatgacaacattagagagagacaagaataggcagtcacaaatgtaagtacaagatttagaagtaggtaaggtttatgcatgacgagatatgatagctagagctacctgatattagaagaagaatagcttgtgcgttttgcgagataggttccaagtaaagacattaaggttggcaatattttca

SEQ ID NO: 103817 - DNA, 289 bp, Zea Mays
gtcgggatgggcgtggaggtggggaggtgcctggacctggcaagtaagtgggggctcaggctgaacgggtacacctacaagtgccttgtgcaggcgcatctgaggagtcgggaggtgtggaaggggttcgaggtatatgagaagatgcggaggaagggctacaagctggacatatttgcatataacatgctgcttaatgcgcttgccaaggctggaatggtatgataatgatcataaatttatatatttagtgatatattttgtcatgctgggctaactttaggaagta

SEQ ID NO: 103818 - DNA, 427 bp, Zea Mays
ccggatcgtgtgtttgcacggattgcccaggaccattgtttctgaccgaggagccccgtttgttgccagattttgggaacaactgcaagagtctttgggaaccaagctcatcagaagttcaccttaccacccacagactgatggtcagaccgagagggtaaatcaaattcttgaagatatgctgagggcttgtgcaatcaattgtggcaagaactgggataagcacctctccttagcagagtttgcttataacaacagttatcaatccagcctaaagatggcacctttcgaagctctctatgggagaagatgcagaacaccactcaattggtctcagcctggagaaagagaagtttttggacctcacttagtgactaaagtcgaaaggaaggtcaaactaatcaggaagaatctagaagctgctcag

SEQ ID NO: 103819 - DNA, 1109 bp, Zea Mays
ctgggaaatgccgaaagaaaccatcactaaccctagcgaaggcggcctggttcgattgaaatacaccttcaggtttggagaccagtttgtcgaaccagatgatgactggctgaagtgtgttgaaaatactagcgatgagctacttggagcatattccaagtccgaagataatgcactatctgtggccttcgggagccgaaaaaagaaaagataaaatagggtttttgatgctattggatttttgtaccctgactatcgctacccgctacgggggcagaaaagaaagggtgcaacctctagaaaggttgctgcttcggctgctccaagcgagcctgcgccgaagagtgaaaagttgaaagtcctcacccaccggcctcgttatattgagtcggtcgtggtgcccgagtttggcggggaaacttcttcatctgctgctctaaaagatccaattccttctacgcagaaggctaaagaaccgaccaccatgccgaagcacccccggccgagcaagttgaggcaaagactagtaaagataaggccgaaaagccaaagactcaaggaacaaaaatgttagaagttgtaagcccttcggcggaagtaacaatgccgaaaatacaaaaaggtcttacggccactcctaaaagaagaaagatggcaagtgtactagatgtgctagaaacggtaatggcttcaagctctacctcagggaaaattaccaaggcttcgaaaatgcaaattgaagccaaaataaaactgaccgaagccgaggctgcaatgagctaggctagttccgaagctgagccttcagagcctgctaaggagaaaccctcggaaattggagagaaggtagcggaggaagaggctatagaacagactttgcctgaaaacgttgccgctcctactcccgaagcaacttccgaagaccttgattatgttattcgacatgcttcgggaaaaagattatctgaggaagaaatttttgaagctaaacactatgctcgagaactgaagtacccgaaaggggccttagtgtttaatggtacggatgaagatgatttcttgtattgcctcccagacaacaaagaattatccgtctatcgggagatggc

SEQ ID NO: 103820 - DNA, 346 bp, Zea Mays
tctggagtagtcatcatagcctgttttagagcaacaaaagctgcctcagcctctgcagtccacacaaaagccttgtgctgcaatagtctagtaagtggcttggcaattactccataattcttaacaaaccttctatagtacccagttagacccaaaaatccccgcaattctgttactgacgatggagtgggccatttcctcaaagcttcagttttagaagggtcagctgctacaccatcctgagaaatcacatgacccaagtaaatcaattcagttttaccaaaagcacacttagaccccttgagaaaaaaatgatgctccctcagtttagtgaacaccatcctca

SEQ ID NO: 103821 - DNA, 457 bp, Zea Mays
gatccttataaccagctgccagctgtattattaaatttgcgctaagccgtatcagatttcagtcaacgtattaagctgtatcagtgttaagtggaaaataatcctgttgtttggcacaatgattaaaggtaaaagtgataatgcagctgttggtgtgcgattgaggagcgagtctgtgagtgtacactaggaaaataacactagaacaatgcagtcgacacctgccacctggtaggatcggcgtgacgaaaccattttggtttcgccaaaaccagttcctggattagagcaaaacaaagccgagaaggagcaaatgagcgaggagagaccgccgaaacagcggcatacccatcctcctacttggcagatgctctccacctctagatatggtttacaacttacaacaaaatcggcaaatcgcagaggagagggggaaagaaaaagagcagaagacgac

SEQ ID NO: 103822 - DNA, 413 bp, Zea Mays
ggttgaaggtaatgcaggaaagggttctgtttgctggaatcagcccttcttttctcgctcctgttgaagtcttaaattagtagccgatggttggtttttcagatataatggacaggctacttaaagatggtatactatccagggcaagcaaagatggttatacggttaaccaggtcagcctaatggactgcttttgtttatcatatcttatgatgttattctcttatttgtaaaaaaacgtactaccttcactaacaagacatatgaatgttttcagaaggctgatccaaaaacaccacatataaagaaggaggccatcatgccagatgtatcaccaactaatgtaaccaaacacaacaatggggatctgctatatatgaaggtgaaccttttttgacccaatagaatttgtc

SEQ ID NO: 103823 - DNA, 548 bp, Zea Mays
tggttgttcatccatagagcttggtgggcaatctgctgacgagttatttacaaacttagcactctgaatgttgcactttttacttatagaccactgtgcgcgcttctttcacttatagaaccgagaaaggctatctaaaatcaaaacatatggttgtcagctaacaagccaaacatgagtaaccactaagtccttttgaccttaccgcacctcctccatttcctcagtttggcagtactcccgagtgttctagacttggtctgctcaatgttgagtgctgctgagcgctacccacttccgagctctcctccctgtagtgctcccctccctgccaagcgacgctgtgcactgctcactaaccaagtaaccaatgccaccgaggcaccgaggcatcctctgtccccgcctagctctctctactaagcaacaccgagggttattcactgtcgagcgttggttctctatccctgtgcagctctcctctctgccgagcgatgtagatggctagtcactgtcgaacgctagtcctctgtccctgcctagctctc

SEQ ID NO: 103824 - DNA, 276 bp, Zea Mays
ctgaatgccattattattttcctgttgttagaatccaacagaagctacaatttgcagaagtaaatgcagtgtgatgatttttgaaatttctttttatttcgcgaggcatagagatcgccctaagatgagtaattgcgaatgtgcttgtgttggatcgagtaggcgtgagtgtgccgtgccgattcaagtcactaccgactaaaaccgaccgctctgttagtagggtatagtagtcaccctgagttacgtaagagtgagcatgtcacaccgccttaa

SEQ ID NO: 103825 - DNA, 1636 bp, Zea Mays
ctaaccagcgtttgccatcaccaaatcagacaccagccgctgaagcagcactggattccaatgtgccagggatagagccctttccaggatagaagcaccctgcgacctcagctgaccaaccatttcatcaaccaatgcctaacattaaaaacaaatgagtgtaagaacaatatcacacctggggtacagccagatcagtaaaaaccaagttacctggaggttggaaaagaacgaaggaactcccaagtcgtgggaagttaattgatggctcgatgaaggatcaccaaccagaacaaccggcaatgcatcagtggggaccaggtcagtatcatcagcagaggtcaaaactctgtcatcaggagcgctggcctctaaggcgacttcctaacccaaaacttgagctgctgccatgcaaccagaatgcggaggagaagaccctacgtgaacgtccatggaagtgtgaaagggagaactgactcggacaccctcggaggctgggtcatagctcgcactacccatccgagccaggtcatccccggcaacaccctcgggggctgggtaaacgctagcaccatccttgaggttcgagctctctgtaacaaccacctctaaggctgaaggaccttcacccacttccatgggagcagaacaatccagaccagcctcctgacccttaagaccgcgctctaaggtcgatgaggcacgggacgctgctcgagataaccccagcccggcatcaggcacatcagcacaaatatccatcattccaccatctgccagctccgacaacagatcttcttgggaccatgtcttcaagagtctgatcaaagtttgccagagacaattcttgcaaaccaatgagagcaaacaaggctggagaaggaacaccactactttccccgctgactatgtagtgtcggctgttcttccgaactagagggatttcatcctcctcttcctcatcttcatcaacaatgtggacgatacacccattgggttcagcatcatctagttcacacccattggggtcagctttagtcgggtcacacccattagggccagcttcagcaaaaactggcatgggcacttcctcagcagcaggagcagaaggaccagcatcctgatccaagcttgagactcggcgaagatgtctcttcttttttttcttcccctcagcaggagaagttggttgattggcttggcgaggatgcttcaggtgaacactatcatacctctgaatatccaaagctttgccagcctctgggatgggctttgcatccagtgtttcagtaggggctgcgtcagaggaatcttcagccaacatatccagcatggcacttatctcagcatcacttggattcaaaggtacctcgaaatgaacctgcctctcgtcatcagggatttcaccaagtgaggcaaccaaagcactaacctcttcgggagagggtcgcactctaaggcccaaaccgctatcaccagcaggaggattcgacacaaaattggtaaaagccttggaaggaggcagattccaggccgagtatgcaataggagcaccgatgttcgacaccttgcctctgagtatcatctcgagccggctgaccaaatccactgcaagaattcttctgttggtaacctg

SEQ ID NO: 103826 - DNA, 648 bp, Zea Mays
tactcgtttcttccccatggaagaaccgtagcctcctctgttcaaatcgattccctagcagctctgccccctcccctagatctaacccgcatcgcacccattaatggaacatccacctccatatgtgaccgatgcagtacaagaaaggtgattgcactcagggccaagacaagcggaaactatggacggtacttctacatctgcccgacatacaaggtcatattgggatttaagtgtgtttggactgtaaactcatgtgtggatttgattttttttgattgatttgtatatgtttgcagcgtgatggtagtggttgtgacttctggtactaggaagatgactatgagcaatatttgatggagaatggccatgttctacataatcatctaccaatattcagccaagcagagaagatgattactggtgaagctgatgttttaggaagttgtggaatgaagagggaagatagaaaagcagatggcctgatggttcaaaagctagatttagtagtagggttacttagttaagattgttgtgccactaaaaataatatcagtcttatgtgtgtgcatttttctgattaatctatatgtaaggattgtttgatgtgagttatggtggtaatgaatgaaaagagtactcagattc

SEQ ID NO: 103827 - DNA, 631 bp, Zea Mays
tgtctctggacatccatatccgcgacttatatccgatatctgaaatcgtacccgttacccgctatggacaacaaacagtatccacatccgttacccgcggacaatggatatccgcggatatatccgtttgcccactacacatacaaaatatttaaatccagcaaattcaaacatgatatcatatttgtccagcaaatttaaatatgataaaaacataaagccatacagaatttgtccagcaaattcaaacatgatatcatatttgtccagcaaatataaaattgtctacggatatcaagtgctacccgtatttgggacgggagtacaagacattttaacggatattcgggtatttgggtatggatattgatttttcgtatccgttttaaaaatatccacggatatcaagtgctacccatattcgtatccatgggtacagactcgtacccaaaaccgtgcccaacgggttttttatccgcgggtacgcggataaatgacatccattgccatccctaccagtgaccgctagagagctaaacttgagtacttttcaacgaaaacttctacttcttccttttaaattggacaatcttcatagcttttctatgacttaaacaaacttaagtagagt

SEQ ID NO: 103828 - DNA, 560 bp, Zea Mays
tagcaattcaacatttggtaaacattaggaaataaaaaaattgatgaataaaaaaatggagtcgaagtgagcgaagctggaggtaagccctaatcacccgtgcacggaggaggaagttacaaccaaaaacctaaaatcgaagccctaatatctagccgtgttcaatggaatcagaatgagatgcaaaagacaaaacctagcacgaagaacacatagccagagaagtctccgtacctgcgtggatcgtcgacacgttgaggattgggtgtactggagatggtagcacacgtcgggaacaccacgcgacggccgtcagtaatagtgctgatggggaatgcgacactccctttcacctgtcgagggcgcgatctgttactggaggaatcacatggcgcagtgaagagcgtagacacgtggagaaggatggactgtaaggtacgcaccagaaacaggatcgtagtcgccggtgtacggagcggacactcgcggggaaagagaagcagtggcgtgcagcgctatccagatctccgcccaagcgcccacagagaagctagcgggcc

SEQ ID NO: 103829 - DNA, 337 bp, Zea Mays
aataggggcggtgcctggtataagctctatggcgaattcaaccttcctttcaggtgtcatacctggtaactccttgggaaacacatctgagaattctgatactacattgatagcctctgatggtttaatctcctcaatatgggcggtgacttggtgacaacttcctttccttggtccagacaagaccaactctactaacacttcttctcctgatagggacactaacttcactgttctcttgtcacagctaagactggcttggtacttggttagccaattcatccctaggatgacatctatagttgtatcctggttacccgtaactattcgatcagcg

SEQ ID NO: 103830 - DNA, 454 bp, Zea Mays
tctcgacaaattaggacagaggtttacatcagccgatcctttggaggagatcgacataggaaatgataaaattccaaggccgacttttgtgaacaagaccctggagaccgatcctagagatgaaatgatcggtctattgaaagaatattctgatttctttgcttggaattacactgagatgtcgggattaagccgtgagatcgtagagcatcgactgcccattaagtccggtttcagacctttcaagcaaaaagctagaacatttcatccagaccttctcctacgaatcaaggacgaaattcatcggctgatagaagctaattttattagaccttgcagatacgcagagttggtctccaatattgcgccggtggagaagaaagaatcaggtaagctcagagtatgcattgattttcgcaatttgaatagagcaactcctaaagatgaatatccc

SEQ ID NO: 103831 - DNA, 458 bp, Zea Mays
gcttgatttaatttagagcagataatttactagacgaataaatccgaattagaaatccttagacgtgatttctcagctgatgagcagagactgaattattttgcaccaaaaactttagctatcaagatctgcttaatttgtccgggacaagaatcacaagaccgagttgagctttccaaacttgtattcgtttcgtcgattaactttgaaccgacataagatctgacattcacgaaaaattattaaagtctgatctttgtaaaaaaatttgagatagcccagatcgataaagatgaaaacaatgtcgaatttatgataagcagagacaattaagaaatagagactgttattatcaccgacaactcatgattaaatccatactcgtcgcgcgagaaacaaacacctggggtgttacagcgcatctgctagatgtagccaccgagcccctgagtaatcca

SEQ ID NO: 103832 - DNA, 409 bp, Zea Mays
tgagttgtgagcttcctcgagcaggacttctcgtgcctccccttttggtacacacagacgattcttgaaccaaagggctccttgttcatctgtcctgaggtccggaagttgttctttgcgagctttttccacaagtcttgttgtctcttagtctaggcgttgagctttgcatatggggtcttccagcattggtttgactttgaggctgtcgttgtctcccaaacatgcattcagttgagctgattctttcttccaatcttctaaaaagttggtcccctttatcccgaagggttttcggctgagggcgtctgctaccacattggccttaccggggtgataatgaatctcaaggtcataatctttgatcagttccagccatcttctctgacggaggttgagatctggctgc

SEQ ID NO: 103833 - DNA, 674 bp, Zea Mays
gcggacggtggcggcaatttatagcctctaacggcggtggcgcccaattttaccaggatgtgctggcggccggagagaaaaaggcactggtacgtggaacagatggctttcaccgtggcggctcctccggcgatcaccggacatgcataacacggttagccgcgacgtggtaaagcatttggacacgcggcggacggcagggatgactcaacggcagtgagatcttatctgatcgacgatgagcaaaggggaaaagtgcggcggctagccggattggtgtccagctcaacggcggcgatgatttttctaccccgcgacgttatccatttaccctaggcacgaatcgagacgccagcggcacgaatcgcggcggagagatcatcggcggcgaggttctgaaccttatcctccaggggcactgtaccatggcgaggatcattcagtgcacctgacagccaaagtttagggcgaattttctctcaattttatgtagtaacatgatcatcaccctttagcaaagttatagctctatgatccagctaaaatattgttatagcaatcctaatcaaattctttctcgatcatatttgaattcatgcccaaagtcactgcaattgcactgtcagtctgaatttcagacattaaacagcttgacagcccaactttgggtgaaa

SEQ ID NO: 103834 - DNA, 510 bp, Zea Mays
cggaacacaagcgtaggccttggcgtaggttgcggtgtaggccttagcataagttgcggcgtagtctaatacgctgtcgtgggtgtctagacggtgtcatcctgtctcctccgcctatctcctcgcgcctcgggaacgcatgaggaacagtagaggccataatgaaaggcgcccaaatagtgcattgagttaatggtcttgccttggtaacgtgcgggcaatagtgtaccccatgtgttgtagactaggcgcgttgtgtgcattaaataaggggtacgccacatgccactggcgtgggcaagtgcacatcccactcgcacctatagttggtgggacctaggtcaaagacttatgtcagacgccgcccggtggcttacgtcaggtgtcctcagccacgtgtcagcaccagacctctgcttaggtagggagtaggcctaggaagatgtggtagcgtggcaccctcggatccctcctgacttgggatccagaccatgcttgagggggtccagg

SEQ ID NO: 103835 - DNA, 296 bp, Zea Mays
ctgagtttgatgaagggacctcttcagcggccaaaataaaagagaccgctcctcctgcgaagaggactgaagaaccggctataatgccaaagttaccttcagtcaaggtggttgaaacgaaggttgataaggctgaaaagccagaaattgaagaaataacgaagatggtagaggttttgagcccttcagaaaaggtaacagtaccgaaggtacaaatgggttctgtcgtaactcctaagaggaggagaatggtaaatgtactggatgtgctagaaacaaccgaaaccttgagtcct

SEQ ID NO: 103836 - DNA, 303 bp, Zea Mays
gaaatggaaaagttaaatctaggtatggtacaacatagaactttgacacagttgaagcttgagtcaattcttctacaaagaatcattgatgcccaaagagacaataagggtatgaagcatattcatgagaaaatggaagccagcaaggaaaattgcttcaggaaagatgaccaaggaataatatggtttaatgatcgcatagttgtgcccaaagatgctaaggtccgccaacagtttttggatgaagctcatcttagtggatattccaatcaccctgggagtactaagatgtatcaagactta

SEQ ID NO: 103837 - DNA, 370 bp, Zea Mays
gtgaactgataggttcctaaggcaaatatgtgtaaggtgtttatagtaacactttatcccgaaaggtgttaagcctgcgcaaaaataagagataagtgtacttgttttatgcatgtgatcgacgattgggatagtcgaggcgaatgaggagtatgattaatccggttagagtcactatgctgttgatgccttgtgcgtaacctggggcacgtatgtgcgtgtgtgccgtggtgtattatagtggtggtggcgtaagatatttgattgagatgtgcgggtatatgctgtgatatggttatactcacgatgagggaggatgtatgccttgggtaacacgacgcttacgtcgctgttgtataatcgaatgaag

SEQ ID NO: 103838 - DNA, 456 bp, Zea Mays
tcacatgtgcaacatcgacttatgaaacctttacaacctacaaaatatattccaaatactttttagtggcgtcgatcaccacttcagtatttcaggaaacctggtagcattacaatttttatggcagtaatcacagacactccctactgacacaaaatctaaggccaagagattaaaaaaagggtacggggattaggcactgcacaaatttattaacatatctactgcaaagatgaatctcactgttgtgtacctgttactatatacaatgttgtttatttttgtccatgaaccgataaactgcgacaatttgtgtgaagaatgttgatttagatttagcttttcctatatgcttgacatgttaacacaaaataaaatcaatgattgaaggtgtaaacatactcatcggatggcccaagctcgccagggcacggtcgagcagggagaaagcggacg

SEQ ID NO: 103839 - DNA, 351 bp, Zea Mays
cttttcaacgcttccacttgtgtgaatgtgggtaatgggaaaactgctgtattctggaaatctagttggatccatggtcaagcaccaaaaaacattgcaccaagtctttttaacaaagcaaaaaggaagaacatttcgactttccaggccctgagaaacaaccgttggatccagttatgctctccctacgatggtgcagaagaattcaaggaattgctcggcctttggcaggccatcaatagtacacacgagctcaacgatctagaagactccatttcttggagatggacagaagatggtgagtacattgcaagcagcgcttataagatccaatttgcagcaaattattgc

SEQ ID NO: 103840 - DNA, 883 bp, Zea Mays
cagtagatccgactagattgccttccgagtctgtcgcctctcgtctcgggctcgctccacccctgctcgatatgatcccttagaccagtcaccactccacctcccactacactagctcctgccactcttgagccttacaccacacctgctgcacccactatctccaccacaccagcttctactgctcctgctcctgcttctgctccacctcgcttctgggagcatgacgagactaaggtgcgtcctcttgctgtggacccgcgtctgctcgaccttcaaggaccacaactatcagggtgcatcagtttagacacgtgcaagtggactcttggttgcttgctcagcgggatccgacagctgcaccactcttcagtaccaggacccaggagtccttcttcaggtcttagttatcagctcagatagctctgcaggctcaccgatgcctggatctctttgcttttcgtacagcgaccggtgcagattctgagggccacatcacatatctgccaggattgtactctctgctgacttttggtggccgataagttcaggagtgggtctgagtgttttaagccacatgatggattgaccctgaccatcagtggatgaggtttcggttcgagcgtgaggacgtcactctacatacagctcagacccgagagttatttggattcctgagtcgatgacgaggcttcacatcatgtgttatggtacctcagaccctcctcgtagtcctcatggtggagtagctccttgcatcgctcacgccgctgctctgttccgacctccgtttaaagacagatctcgatgttctcctactaacttcaccccagcggcaaagtttctctctgagttgatgaggcgcaccctgctaccgaggatg

SEQ ID NO: 103841 - DNA, 393 bp, Zea Mays
ggcatgggaggagactgggatccaagagggtggcgacgaggataatcaggatccagagggttggtgatgggagacgtgatccgcagtaacttcctcggatatagaccgagggtggatgcctgtagccgtaagtaaatgatagaaattaaagcaaaatgatgatttaggtctcttgtatgacacattaatgattaggtcatatatgggtccattttgccatctatattaagtagcatatataagttttatatttatgtcatatatatcatcaaactaagctgaaatcactatttactacgttttttataatacgtcttatcagaaatatcatacgaagacaattttaaatttagaagtgtctaatatccacactaacatctaagacaatcttta

SEQ ID NO: 103842 - DNA, 385 bp, Zea Mays
ttgtctgggcttggtatttgtttagagcctgtagggcgaagactcggtctccatcgatgagatcctttgaagtgggctcgtccacgtcggggacggctgaaggaactgttcgtggggacccatgttttatttcttgtggggtcatggcctccgatccgtatagaaggcggaaaggagtgaacccggttgccctgcactcagtcgtgttcagtgcccagaccgcctcgggtaacaaatcggcccacttgccctttttttcgtcgaggagcatctttttgacagctgtgaagatttttccattggcgcgttccacaactccgttggactgcgggtgatagactgaagcgaaggcaagcttggtgccgatggagaagcaaaaatcctt

SEQ ID NO: 103843 - DNA, 541 bp, Zea Mays
cctatacagtttgtccaagctattgcgagaagaggacaacgcctgattctcatcccttagccattggatttcctcttgtggatgggacaattcttgacaataggttgacagcatggaataagaaacttgaagctctcgatgagttaccttgtgagttttattttccatgtccaatttcgactacaggggcgagttcattgcacgtacaccatcaaggaatttggtgacttggttgagtttggctttgagcgcatctcccctcgacatcagaacaccaccgagtcaaagctgagaaagcaccacacaattatgaagtatatgtatgagtaagagaagaattagcaagggtggataaaaatgatttaccgacatttgctgccttcgggtcatcaatttgcttctgaagagtagcaggatcccactacgataatgaggatatcactttggcacctgagccgcttgtgcctttggctggatggctacatggtccaaaacacattgcaaagcaaaaatcagaagatagaacatccatcaaaaaaat

SEQ ID NO: 103844 - DNA, 449 bp, Zea Mays
atctgcgcttcagagccatcggatccaagtcctgcggccatgattagatcctaccgttgaggaatctgtatgtgccagggatcgttggatccaagatctacgggtaaggttctatcagacaaaggggtatccttgattcaatctcagccgcacactgtccatcccacggccgaacggcttcttcatcctccatacgtctttgcctggggccagccgtgcgctgcacagccctgatgtcgaccttccagcaggagcgccaagcatcgcgcgggtgcccgcgatggggagcaagccggccggtgatgccgccgagggggaggagtggaagtccatcagcggcgagagacaccggtatgcgggccaaggcggacgaggagagtagcgaaacggcggtcggatctcactgtcactcagctgcctcgtcttcctccctcaagctctcgattcac

SEQ ID NO: 103845 - DNA, 313 bp, Zea Mays
gagaaccattgctatggagtaaatattcatattcattgttattaagattggagtttctactgaatttgcatggcagattgtctcactgttggcgtccagatatatcaaagtggtctgtattttttgtgttgactgtgcaagatatgtgctactttgcgtagacgggactggtggtgggcagtcgcattgcatctgttcggactgttgcaatccatactccatatagacaaaatactgtagaggtcgtagcaagctgcagcgaacatgctctttctaactgtattctgttatgttctgaaaatcatactacctc

SEQ ID NO: 103846 - DNA, 371 bp, Zea Mays
gtctttatttgcatgtttcaaactctttgtgcttaacatccacgtttctgaactctgagctactgtttcagtagttattttcatccagtttgatattccaacagtgcaatgggtgtagtactatctgaaaaggaaaggcaaaactttcgattaatgcctatagtacatttctaaacagatgttcatctttgtttagtacctctttgcatgaacagttctatagaggcattaccatgatcttctttgccatcaatatatcaaatccactcggaaccagaaaaaacacaacttttttccctactgagtgatagttcttgctgtataaatttcaagaaaatattgcagtaaacaaatagtttaagagcgcatgg

SEQ ID NO: 103847 - DNA, 472 bp, Zea Mays
gaagtcggagattatgtgtatcttaaagtttctccaatgagaggaatgaaaaggttcaaagtcaaaggcaaattgtctccccgttatattggaccattcaagattttggaaaggaaaggagaagtagcatatcagttggaactccctgaccgactagcagatgtgcatgatgtgttccacgtatcacaactctaaaagtgcttaagagtccctgaggaacagttacccctggaagaacttaacgttaatgaggatttaacatattctgaatatccggttaagattttagacacctcacgccgaattacgcggagtaaagtcatcaagatgtgcaaagtttagtggagtcatcatacagaagatgaggcaacttaggaaagagaagatgaactcagaacagagttcccccagctattttcagaagatccctaatctcgaggatgagattctttttagaggggtaggttttgta

SEQ ID NO: 103848 - DNA, 372 bp, Zea Mays
gagcagggcccagaggaaggaagtactatagtggatcaagatgttaatgttccgtgatgggtatgctgctaacctgagtatggggtgaacatatctactctgcgagtcttagggatgaagagtcattacttccatatatggattgaacaaattctccagcgacggttcaaggatatgtccctgagcatgtctagctagcgcttgcagagatgagctatttctttcaccagctttgtgcaaaagagttatctcggacaatgattgtagacttggaaggaatggcacccgtgttacttgtaagatggagaagatctttccacccggcttctttaatccaatgtagcaattgattcttcatatcccgtatgaggc

SEQ ID NO: 103849 - DNA, 886 bp, Zea Mays
acgaagaggaggaagaagaagaagtcccgctgatctgcaagaatagccgacactataaaggtagcgagggggtagtgatattccttctccagcgctgtcagctcttgtcagttttcagggacttttcaataccagactttgatcaagtactggaggaagtcgtccccgaagatatgctatcagagccacctgccgatgatatcccagccgtctgttcagaggtcccagacggtgggctttccttgcttgactccactaggcaggaggtaactcgagcggtgtctcgtgcatcgttgactttagagggcagtcttcaatgccaagacgctagttttagtcacccgactcccatgtggtgactgaggtgccctcagccttggatgtggctactacagaagacccagccctcaagggtgttgccggtagtgatccagctctggtgggtagtgcaagctacaaccctgcccccgagggtgtttaggtgggctctctttcacatgcctccatggacgtccatgttgggtcgtccccccttggtccgatggggcgatggcggttcgcgcttccacagtttcaaccggacaagtcgccttagaggtcagcgagctagatgcaaggagcttgctgtctgctggtggggctgaggttaccctggatagtgcccttcagatcgttccttccctcgtcaggtcatgactcaactcctcctgccctgggtctagcactgttcctctccaatctttaggtgagtcggcctcttgctttatgttgttcatattagcgaattatctttcttctactcatctgtctatgatcacaggcttttgttgatggaatatctgcccagctgagatcatgcggtgccgctgttcccgaacaagctctg

SEQ ID NO: 103850 - DNA, 310 bp, Zea Mays
aacagtgctcctctatcagacacaatagtcatcgggattccatgcaaacgcactatttggtcaatatagatctctgcatatttttccgccttgtgggtggtatgcacaggcaagaaatgagctgtcttggttagcctatccataatgacccgaatagagtcatggtgtcgggaggtgctgggcaatcccacaataaaatccatgcaaatatcctcccacttccaagaagggatggggagaggttgtaaggtacctgctaccttcaaatgactagccttgatcctttggcaagtgccgcactcagatacat

SEQ ID NO: 103851 - DNA, 474 bp, Zea Mays
atgcaatctcttagaatagatggttaaggcttactccaacggagcagctatccaggcaggcaaaggtaaaatgactggccgctgagcattgtagctcaaaattgagccttccaacagaacagctatacacgccagccaaaataccaggaggagagagaaaacggcattctgcctgctcttcgagcgccaggcattctcttcccctgtctctgacaagctgtcccctcaatcatttgccttgcttcattctttcttttttcctctgctgttggatgcacgtcgcggatagctgggcaggcattcgggaggggccagccaaagagcaaaatagctgccagatttggctggcacctgttggagtgagtctaagaaactgcaacatacaaccctgtgctcatacaaccctaagctctaaaacattaatgcagttaagagataatgtgcatagaaagccgtgaagagacagactttttg

SEQ ID NO: 103852 - DNA, 753 bp, Zea Mays
aaggggtcgtggcactattcttgcgtttcactgacatttatggaataccccttctatttttatttctttaccgcgccaagtccacgacggtgaacggcgacgacaaacctccggtgaactcatactggccggagaatgcaacggctaggcttctcctttgcttgacacttaattcaaccctccgcaacactaatccctcaaataatttcactaatccggaccggagcacgtctgtccacgacgacgacggaaaaccgaggataatccaaggtgttctaggcgatttaaggcggtctagttcaatcgaatgggttagggagctacagggaacatgaggaaggctagaacaccaattaaggaagcttgaactgacctgcgaggtgttcacgcggcggtattttgactgatttgggggaaatgggaaattgggcggctctggtagacaattggaggcaagtgctggtgtgttggatgcgtaattacctagcggagttctctgaggcttcaatttatagaactcaacgttggtggcactcaatttggaggagaagcgctggcgaccggggagaggggaggttaatggcgcaaggaattcgtggctttcaccgtggcaagttctcgggtgatggacaggcttgctacaccggttcatggcaacgtgctaagcttccaagacgcgtggcgcatgatcgttaagcggctaacgccggtgaggatcatcccggccagccacagtccaagtgggtacggcgg

SEQ ID NO: 103853 - DNA, 387 bp, Zea Mays
gaatgtgggggagaaatccttagatctaggggagcaattccctaagttcaatatatattaagttaaatgactggcattgatgaaaaagtcttgattgacattaaaagtaacatgcgcgtgataaaattttagcaaatgctaagtttatgtgcatactaatagtatgtgacctcaagaaaaataaagttttctgaggtaaagtcaaggaagtggaatatcaatcatgagattttatcgaaatatgcaactattgttttagttcacatttcgaggggtggagtaattcccattaagttgttttagttcacatttcgaggggggcagataaatcccattaagaattctatttcttctataagattggaattaagtaatcttggatatgat

SEQ ID NO: 103854 - DNA, 507 bp, Zea Mays
catgcttccaccattcataaccatagcaactgtctcacttggttggtcagacttgctggtctcatctacaacatcacccttcttcttagccaattcttctaaggcttctccaccttgagcaagttgctgcagtaatccctcatgtgtgtgtgtttcaaattgcatctccccgtcccatgccactttaagacccatttcactagacactgggtatgtacttgcttgctgtggcattccaacaaacatccatgggacattaggcacaacatcttggtcacaattattgtgccactcatcacccaccccatgagctagctgttgcactaggccatgtgaatctgaaccaaataccctaccccataccatcttctcagcataattttcaccaaacactgagaaattggtacctccaagtatcactggaacatagttgtgactaccacgctcctccgtcttccgcacggtagctgcaaccagttctgcctggccctgcagtctatgttgtcc

SEQ ID NO: 103855 - DNA, 752 bp, Zea Mays
caggtgctaccttaacgtctctcctagagtcccccgtagtaaaaagttccatgctaactgagtggtttaacaccaatgcaagaaatcctggataccgacacctaacatactgtgatttccctactgagtggtcctggcactcttcggatcgactgtggcgaaaaagaaccccttgtcacaaaattggacggatgtactacgttcatccaacggccggtgaattgtactacttgtgcatgctattgatgatagttaaaggtgcaacgagttatgttgatctaaggacatttagtggcacagtatatgctacctttcgcgaggcatgtgaggcaaggggccttcttgagagcgataacgaatggagccttctctttgacgaggccatcgtctctgcctcatcgcaccagctacgccaactctttgtaacagttgccctccattgctcgattggcaatgtccatgctttatttgataagtactggctctatttcacggatgacattcaccgctcactcacccacgcactggccaatccgcgctacgttgtgccaccggaacaacttatgccgctgctgataaagaagctgacacaactgttttctaatagcggagggaatattgaagacttcaacttgcccaaactgtctgcacgaaatgatcccatgtacgaaaataggctgcttaacgatgaacttgacgttgaaccgttggtgttgtccatgcaaggccaatctcttctgtcccaactaaat

SEQ ID NO: 103856 - DNA, 972 bp, Zea Mays
agacctcgtcctcgtccggaccacccggacagagacacggggcaagctagagccaaagtgggagggcccattcatcatcaaggcgaagacatcccctagcgcgtacaagctagcaacggcctccggcgaagaattagagcactcctggaacattgacaatctccgcaaattttttgtctaaacatttagggcccacacgcccttgtaattcaccaaacaatgtcattccagcctgcactcttttcctcttggggggtgaggtttttaacgaggtggagccatgtaatataccagcaaaaacccccgcaaaagcaaacactcaaacacaacatgtcgaaaaagaccgcatggacagtcttcagcattcgaccactccgaagaaaccgcgagaggcagcgcagactaccctcacgtgcgacacaccgcgcaaaagtcgcctaagggtgcagccggcatagcacaaaagagcggcattgaagtcttttacttaaaagacactccgcgcaaaagtcgcctaagggtgcagccagaatagcacaccaagtgcgttaatcgaagtctctcattaaaaagacacaccgcgcaaattcgcccacgggcgcagccggaccaacacaggcgtacgaatacggcaaacaggccacattaccatataaattacaattacaaacacacggtgagggcatcacatattacattggctcaaccttcaggatgatacccatctccctgtaattaaacaacattatcctcaattcatcaccctcaaaaagcttccgaagatccccctcgcctatgctcaccccaatcggcgaggacaacaattcttgtttaccaacccggtctactcggagacggccacgctccatccccatacgacgacgcctgccacttcgcgaaaactcacccacactatgttttcccaccacccttcgccgcctacacccagtactcgcactaggaagatccccg

SEQ ID NO: 103857 - DNA, 572 bp, Zea Mays
ccttgaagttagcataaagcaagcttccggcgatgtggtgtcgttgataatgacacaagtccgcttccagcttcggcaagccaatgcttttggaaagggttctaacaattttggcttcggtgcggttccgaaggcatcttaatttcccttcgttgaccccaccaaaaagcatagcccccgatttgtatccgcaagatatggcatattttctcaactcctctttttcggcgtccgttaattcttctccaagcaaattttgaaagttaaaatcttcttcttctgaaatttcatcaatttgctccttccccttctccgttgccgtattcactgtagccacggtagcttcctcttcagtcattttcagcagtatgttgtcaataacctcaagtgtggtttccaggtccgactcttcggtggccctggcttcggccccggtagcttcggcttcgccggattcagcttcagcagttttcatttcagtagcttcggcttcggcagtttcagcaaaaataatttttgacaccgttgccggtggcggtgtctgatggatcacatctgttacttgaataatt

SEQ ID NO: 103858 - DNA, 352 bp, Zea Mays
aattaagtctaaagttggactgacaggttactaaggtctgaattttcagacagacagtgcaatcactacgactttgagcataaattcaactatgatccagcaagaatctgcccatggctgctgtgacaaacctgtagctgatctatagctctacaattttgctgcagagcatggagtatgttaccattgaaaattgagagaaaatcgtgctccaagtcgctctgtcagttcatctgatgggtgttctccatggtacagtgctctgttgaggatcagatcgaccgccgtagaaaagatctcaccgccggcgacttctttgccgggattggtgccgcggccgtgtgggtgttgc

SEQ ID NO: 103859 - DNA, 636 bp, Zea Mays
ttctcatccgcggacttgctctgcccatttctcctttcttccgcggtctccttgatttctatcgcctgaatctgacccatctgaatcccaattccattctgcaagtttctgtttcttgttcatttatgcgaagcctttcttggagttttgccccactttggcctttggaagtatctttaccactgtcggcctgggatggccggggggcagcaccagctggtgggggcgcgagcttggagatgtgccgcgggaggaagactgattacctcgacatccccctcaaggacagcatcaagggatggcgcttggaatggttcatcatggagaatcatgggaattccctccccccacggtcagggagacagccgaatgttcgtactctgagctggaccgagtcccccacggatcaggaagtggctgaagcaggggttttgttaacagaagttggattgctgaaacaaaggggtctgactgcagaagctgtggtcgctgactttgttttcaagaacattcggccactgaaagacagagcatatccggcttatctgtaccgaggcttggctgactcaacccgggtaaccaacagaagaattcctgctgtggacttagtgagccggcttgagatgatactcagag

SEQ ID NO: 103860 - DNA, 817 bp, Zea Mays
gcctccgactccacctcccgcacgaaggcggccgcatcccgtccccgtaaatcaacaacgaaggctaggctccgcaccatctgatcccctaaagtcggcatcgggcgaggtctgacctcgcctagatcccacccatgcaccaacggccacattccgtaggcaacaaatgcttccactagatcccgatcgctgctcagccgggccgcatagcgaagggcctcctcgttctgatcccccttcttcactttaaattgtgggaaggccacatagcaatgcgagcacaaaatggtcaggggcaaggcaggcaaccttcgacatccccccggcgccatgtgaaaccaaaagtcctacctgttgccccacttattctttgcgcaaggaacaatttcaatcacatcggccgatgtctcctcggtgtgaacgtgcaggacccaaattgcgcaatcaaactacctatctttctcttctgccaatgcaagcaataattcttggcgaagacctcagcagacaactctccatcatacgatgacacaggctagacatacttcgccaatgcaaccatagcgttcagcgtcaattgatgaatttgaatttcaaacttcctcataacttccactatgaatcgatgcgtcagtaagcgaaggccaacaacgaaaaatgcctcgaacacaaccaactccccctccggctctaggacatcttcatccctcgccgccctcctaacttcgttcccaaaataacccagacgctgcatctcgagcatgtggcctgagtaaattcgcgatgtaccaaactccattgtatgcccatgctatag

SEQ ID NO: 103861 - DNA, 362 bp, Zea Mays
atgaagcaattcttcttcttcaggtcagtgtttacttggtcaatagcatattgggataaatgattaaacttgttgagatactacatcacagtatctcctccttgttttagtcgaataaacttctcttgtttcatgtgaagcactccctctggaacatagtgttcacagaatgctagcttaaattcatcccaactgacctgatgtccggctggttgaactgctacaaaatttccccaccaggtactggcagggcctctcaattgttgggcggcgaacaacagcttccgtgtttctgtgcaacggattaatccaaacttctgctccattacccttatccactcatcagcttcaagagggtcttc

SEQ ID NO: 103862 - DNA, 552 bp, Zea Mays
tcggagaagacgattagcgatccggtggtggcagtggagctgctaccggatcacactatcgagttcaggacctcaaggatttacttgggtcgtgtgcatgaaatgcaacgtttgggctactttggaaatggtgtggggcgtgctccgggggctgaagaggtccgcgagccagagggtgaattggtagtttttgaagcatttttcactgctggacttcggttgcctgtgaccagttcataattgaactgctgcaaaggttcgaggtacagattcatcaactaacgtcgaatgccatggtggcgctggcgaagtttgtgtgggtgatgacatcgtacaacggagagccgtcggtcgaagtcttcgctaagaactactgtcttcactggtagaaaaaggtgattgggggcctcattacacagtttagatcttgcaccttcacgccgaggaccggaaagacatcgggtgaagtggttgaaatcgtgtcttgtgctaaaaataaatagggtaattagtgggacttttggttctacatggcactagaggacattgagg

SEQ ID NO: 103863 - DNA, 553 bp, Zea Mays
ggtttgggaatttactcctttattacaagggccatacatgatttacaaattacaagaggctaaaaagcctgggaatttcttatctaaaaagtcttgcgtttcccatatagcctcatctcagaatgttggttccactgtatcttgtagaacttgagagtttttctccaggtaaccctatcctttttatccaagactcgaataggttgctcagaatatgtcaagtccggttcagggacaacatctgtcacttcaatgattcgatcgggaacccaaagacacttcttcaattgggacacgtggaacacattatgtacagcagacaaggtttcaagtaattggagtcggtatgccactggtccacattgctcaagtatagggaaaggaccaatgtaccggggtgcaagctttcctttaaccccgaaacgtgatacccccttcattggtgaaacctttaggtagacatagtctcccacaaggaagtataagggcattcaccgtttgtctgcataactcttttgacgagcttgagctttcttcaaattatgaattattc

SEQ ID NO: 103864 - DNA, 381 bp, Zea Mays
accgtatcgtgtgtttgcacgaattgccccggaccattgtctctgactgaggagcccaatttgttgccagattttgggaacaactacaagagtctttgggaaccaagctaatcagaagttcagcttaccacccacagactgatggtcagaccgagagggtaaatcaaattcttgaagatatgttgagggctttgtgtgatcgattgtggcaagaactgggataagcacctctccttggcagagtttgcttataacaacagttatcaatccagcctaaagatggcacccttcgaagccctatatgaaagaaggtgtcgaacacccctcaattggtctcagcctagagaaagagaagttttcggaccagacttagtgactgaa

SEQ ID NO: 103865 - DNA, 314 bp, Zea Mays
tgcttatctaaaatttgctcgcggatttcatcattcttgggcacaactatgcggttgttaaaccatacaacaccttgatcatctcttctgaagcagttggctttaccggcctctattttctcatgaatgtgtttcatacccttatcatttctttgtgcgtcgattattctttgcaggaggactgactcaacttcaagtgatttgaagttccatgttgaatcattcccaggttcaacttctccatttcttggcataacgtaatgtcagaagtcttcatcgtcagacaatggcaggaagccttgcgacttaacgca

SEQ ID NO: 103866 - DNA, 323 bp, Zea Mays
cgattggtttgcactaccaagcaaacagtcagagagactaatgacccttaaagatggtatcatattcagtatatgaggccaatcaccagctatccctgagagatttacataacgcatgccaaggtactgcagcagaggtaggtttgttaaccaagtaatgtcctttgagtatatgccatatgctaaatatgaattgccaagatcaaggtactgcaacctagataggttgcctaactgaggaggcacgctacctttgaatggtactccagagagattgaggtatctcaagttcttcatggagcccaggaatgaaggcatacgcc

SEQ ID NO: 103867 - DNA, 777 bp, Zea Mays
atcgatactgcacctctcactatcccttgctggcgacagatgaataacttggcatggattcctgggaccatcccagttgagttgcaggatgttgtttgtgagcatggtggtactgctcattaggcttaggttgctatcgaggaacagtttgtcgaaaaccatgaggatcatgttctccacctcgatgtagcctttcggtttcgtctagggagtcctctctgtcatcgagtactcgcaccagatgataggcatggtgacctccctctgtgaccttggggagcctgtctttgatcgtgcattcatcctcaaccttctttgtggcctcaatgagcactacgatcatcttcacacttggatcacttgctcggtcatgttcctatcctttcacaaggttcacaatgacttcatacttgaggagctcaccaaggggccacttccttgctccaacgttgctaccactctctacaactccactctcaggggctagaccttgcactcgtcctcttccactcctactctagggggattgtcatcgtgctcacctatcccttacatgtttgactctatgtatcctccccacccacctaggccaagggggtctaggggaagaggtcgctatcaccggaaaggcgaccataatggtggggtggctaccgggatgctccttggccctccatctgcaactcatggaccggtcgtatctctatgtggctcggcccatccctaggtggacattcctagcgtcttcctcccccacagccgactcacttgacgatg

SEQ ID NO: 103868 - DNA, 298 bp, Zea Mays
attatgattgcaacaccaggaggcagggttgccacctataaactcaaccggcaggtgccaataaaattgggtagcatcatatttagaaccacactccttatcatgggattggagagcatggatatcatcttagggactgactggttatcgcggcatcatgccttgattgatgttgcagcaagagccattgaaatacactcaccaatttgtggagaaatcactttgtacctacccaaccagggttgtacccattcatgtgccctcaccatgatagagtcacccgtggcacggattctag

SEQ ID NO: 103869 - DNA, 338 bp, Zea Mays
ctctaatcgatcaacaagacatttatttatccgatgggcatggaatgcaataattgataaagcgaagcatcacattgtcatacaacaaaaatcatgacaacaccgatagatattatccactaatcgtttaaaaatattaaacttacttctcgctttgccactacaacaccctttagtcacatgaccatcgggagcatccttcacaaggttatacgacagcaacctaaacgttgtgttacacaatacatacattttgcttcattgtgagtataaccatattacgacatatacccgcacacctgaatcaaatatcttacgccaccactattataatgcac

SEQ ID NO: 103870 - DNA, 576 bp, Zea Mays
gtgaggcagacgcggagctccaaactgagacggcataggagtagacggtgcaggagtaggcgcggccagatactgaggaaaaccctgcatcgacacaaactaagaagtccgaggcacataaagctgctgcggaggaagaggaactgaaaactgctgctcagcacttgacatcatgttgatagtgccctgagaagaggaggaagtcaccggctcccatctgagcttcccattaggattccttctacacaccacatccttgtggtcctgactgcagatagaacacctgccactccactggcactctgcacgacgatgcgcatcaccacagcggaaacacaccagccccagcccaggcttaggaacagcccgaaacctctgagtacttcctcccgaagtacccgagtcagaggattttccacgaaaaggatggtggcgctgatgctgagacttgcccctcttgtgggctggacctcccgtgttgcccctcctcgcgtcctagccatgaggcggatcaacacccgaagacttctgcgactccatggtatactggtgttgcatctccacacccagtgcctg

SEQ ID NO: 103871 - DNA, 282 bp, Zea Mays
tgcccgccataagaagtaaccgcccaaacatacttcgccagcgcaaccacagcgttcggcgtcaactggtggacctgaactttgaaccttcgcaacacctccgccacgaagcgatacgccgggagacgaaggccggcgacaaaaaaggcctcaaagacaaccaattcgccctcaggctcagggatctcctctgcacccgaaacccgcccgacgctgtcaccaaagtatctgagccgctgcatctccagcacgtggaccgaggaaatcctcgaagtaccgaac

SEQ ID NO: 103872 - DNA, 793 bp, Zea Mays
cataaaatgtcaccatggatgaacttaagtagcatccaaaccctagaagtatcaaaaaccctaaatagaaccctggaaaaccctagactaaaaccctagggggctaagtgcaaaactagtgcattttggacctaagtgcaaaaaccaaggcattagggtaccttaagtcatatggttcacatacttggggattcccaagtcaaaaggtgtgaattggacttatttgcaaaagggccacccttgtgctcaattggttaagtctgaaaatagtgaagtagggctgactttagggctctgtagatccaaatatattgagaatttgcctagggtcaacacatcaaacctgttgagctatcataggagaacaagtttacttaagtgactaagcacaggtgctgaacagaaattggagaaaatgtgcctaaagtttaattgtcagactgtcttaagtctgaattcagactgacagtgtgtttgagccatctttgagcttggattcgaccataatccagtcagtaattggctatggttgctgtagtaagattgtacctggatcattaggctacaactttgctacagaatgatggccttgttgccatgtaaaatcaggagaaaatccagcccaaatttgatctgtcaggctgaccgaatagaggttccaatggtacagtagcagaaaaaaatctcaggtaccgcgcatctcgccgccggcaccgatccgcgccgtgatttgtgccgtgatccggttaagcgctcgacgagcatctcctcacgacgatattcttgatccggg

SEQ ID NO: 103873 - DNA, 372 bp, Zea Mays
gagccaaagaaaggaagttgttatcagatagctgttgatagcagtggagcagacccaaatgagagtatcaaggttgtgtccgagttcccagatgtgtttccaagggacttaccgggtatgccaccagagcggaaagttgagtttgccatagagcttcttcctggaaccgcccctatctccaagagagcctacagaatatctagaccagagttggttgaactcaaggagcagattgatgagctgtcagagaaaggttacatccgaccaagcacctcgccttgggccgctcctgtcttgttcgtggaaaagaaagatggcaccaagaggatgtgtattgattaccgagctttgaatgaggtcacgatcaagaac

SEQ ID NO: 103874 - DNA, 418 bp, Zea Mays
tatctaaacggtccaagtatggaacacgatggatcagatttgaacccttcctcctgagttcaatggctaagatcacacccacctgattagttatcatggtctaatctccattgccctcgccaggatcaatgactaccaccatacgttcggctcatgacgttcgaacgagacggcgcccgtgctcccacggtggtgccatggccagaaaatccacacagaggctcagtttctttgtactcaaaattgatcggtgctacacagtgcgagggctagggcaaacacgtggggaatggtatcaccggaaattacgtggcccagcacatccgcccacggcacaggcggctccgaggcaaactcccaactccggtgaccaattcctatcccccaggcccccaatcctccccaaatcgatgctacc

SEQ ID NO: 103875 - DNA, 677 bp, Zea Mays
gagacggtgagagccaagacccagacattatgatgcatccatcagatggcgatgcttggaaggctctggatcgttttgacccagaatttgcaagagacgctaggagtgttcgtctaggcttgtccactgatggtttcactccttacaacaacagttccacttcatactcttgttggccggttttcatcgtgccctacaacctcctcccaacaaatgcatgaaagaagggttcatatttcttgcccttattattccaggtcctaaacatcctggaaagaagatcaatgtattcatgcaaccattgattgaggagttcaaagagctatgggtaggggtaaaggcttatgatggtcatcgaaaacgaatttaccttacgtgttgtatatttgtggtcaattcatgatttgcctgcatatggtatttggtctggctggtgtgtccacggtcgactgtgttgtcccatatgcatgggggacacacaagcatatcgactagaacatggtaaaaaggtctcattctttgattgtcatcgacggtttcttccatccaatcacccgtttcgaaatgatacgaagtcatttagatgaggcataaaagttaaagcgggtccaccaaaacgtttaatgggtgaagatatcatgatacaccaaaacgtttagatagaaatcgtttgaacc

SEQ ID NO: 103876 - DNA, 610 bp, Zea Mays
caaccactgaaggacagagcatacccggcttatttgtatagtggtgtcactgactcaacccgagttaccaacaggaggattcctgctatggatttggtaagccggctggagatgatccttagaggcaaattgtcgaatattggtgctcctgttgcatattctgcctggaatctgccaccttccaagacttttttcggttttgtgtccaatcctcctgctagcgacagtggcttgggtcttagagtgcgaccctctcccgaagaagtcgaggctctggttgcttcacttggtgatctccccaacgatgaaaggcaagttcactttgagatgcctgtaaacccaagtgatgcaaagataagtgctatgttggacatgttggctgaggattcctccgactccatctctaccgaaaccatagctgctgcaactgtccccgagcctgaaaataccttgactactcaaaaacctgatggtgctcgctcaaagcgccttcgcccagccactcatccaactgctcctgccgaggggaagaagaagaaaaagaggaggcttcagcgagtgtcatgtttgaatcaggatgccggcccttctgctcctgctactaaggaag

SEQ ID NO: 103877 - DNA, 312 bp, Zea Mays
ggcctttaacactgtgtgcagctatattggtaccagatacttggtccaagaacacatagccttcaaagtgtggccccttgttaatgaatgggagatgcctaaggaaaccgatgctagttcaagcgaaggtggcctggtttatctgaaatatacctaccgctatagaagtcagtttggcgagctagatgatgaatggcttgaagccattgaggtgactagtgaggagttgttgggggcttatacgaaggctaaagatgaatccatgaatattgcctttggtgcccacagaaagagaaggttgaacaaaatatt

SEQ ID NO: 103878 - DNA, 565 bp, Zea Mays
atttgtgtggttgagacttgtatgtgaatgtgaatgaacaatcgtgttttaagacttatgtgttgtgtgttataatttaagagtggacatggatgagtgtatgaccaattatatgtggacaagattgtgttttgtgtacttttgtgaatgagacttgtatgtggatgtgaatgaacatctgtgtggttaggatttgtgtattgtgagcttttccgattacagttaccgtttcccgatcaatttcgagctattttgctcggatttatccgttttcgatataccggaatttaccggccgttatccgtttccgactttcccgtttaccgattccgaccgaacaaaaatttatgcgggtgaaaacggtgagaggttttttccgaccgttaccggccgttttcatccttattcacaccgctacatacctccttaatcggctacccaccaaaacccttgcttatggcaccccccattttgccctcttcggctctcaccctacctatgaccacctccgcgtcttcggttgtgcgtgttaccccaacatgtccgccaccgctcctcacaagct

SEQ ID NO: 103879 - DNA, 417 bp, Zea Mays
gcctcctggcaggtgggcttagtgggctgtagactcatgaggagaggagggggttaagggttgctgcaggcctacatggtggcccaatatcatgtcttttctttttctcctttttaacaaaaacgcttaagcacacttaatcacgattaattgcgcttaagctttttcaccaccctagcgcgcgctcagcgcgtagcgctttcttgaaccttggtttatgatcacattgttttagagatgtttacacttgctatttttaatgactgctattttactgtgttgacactttgcattacaccataaacagaacttggaagagttgattatcacattcaaccaccagaatacccaatattattggatttagtattcggaatctgtaaatgatatgaaaatggaaactgtgtagctttgcta

SEQ ID NO: 103880 - DNA, 837 bp, Zea Mays
tgataatattattacaattacattatgtactaaattaattagttatgtgctgacagaacttcaacaagtgcaactgcgtatagaaaatgtaactggttgaaatgacactggcaatggcaattggattggagatgtgatgaaatatgatggatcggaatataggttgggatcccagtcccacagtggagaagctgtttccaaataccaaactaggaaacatcggtaacgctctaatcagaactggtacaagcgcatagtgactagcattattcttttttttctccccaagcgtctcgtcatttgattcttctcgagacatagatatctgactccacctgccttcttccttgagcatatgatgactggaagaaatcatttatctctcctctctccactctcctctcactccccctctctctaccgaccatgacatacacaggtactcctatcattcatactaccaaattttccaactaagaatcatctagcagttgccactagctaggaaactagggttcagcttttgaagagaaaagctaaagcaaagctgcaaaggtgtgacacacacacaggagtagtagaaggaagagggcagtagtactgtatatacttgagcaaatatgcgaagaagccttcttaagccccaacattctatatatcttcctgacaccaccagggggacagcatcatcacgaccattgaacaaagatgaaaggatgaagaagcaatgacaagagcatcaatcaagattacctaactgtcaggttttaaactttgaatcatgatgaacacagtttcctagctagctactccaagctttatatttacttctagcaa

SEQ ID NO: 103881 - DNA, 572 bp, Zea Mays
ttccatcctacaaaaccgaccctatctacaaaacagatcctatctctacaaccgaccctatccacaaaacagatcctattcacaaaatagatcctacctctacagccgacaatatccacaaaacatatcctaactctaaaaccgaccatatccataaaatagatcctatatctaaaccgaccatatccagaaaacaaatcctatctctaaaactgaccctgtgctccatagacgtcgtttcggttcctgccgatttgtgcctttgaaaaccataacttgaggtaccttccataaaacgggcataacttttcgctcggtgctccgtttgagcacaaatttttacagcagattcctgactccattcctaactccattctacggcctgattggttcggtcaaaaaattcaaaaaaatcgggaagataattaaaaaaattgtttaagtattttcaggaatttcagtgatcctttgtgaatttctctaggccacaatacaactctgtttcaagtgaaattttgtgtgcttccatcctttgtgtttttggatcagtggtaaaaaattcagaatatttc

SEQ ID NO: 103882 - DNA, 416 bp, Zea Mays
ccgatctggtgctccggctttggtaagtgcttaatctggtgttagttcttgtgatctgttcttgtgatctatgtttgtgatctgtgttcgaaccctaaaccctaatctactctactaccttgtgttctgtgattttagccgcccgtgagggaccgatctggtgctccggctctggtatgttcttaatccggtgcttgttcttgtgatctgtgtatcgtaaccggtgcttgttcttgtgatctgtgtaccaaccctaaaccctaatctactataataccttctctgattatagccgccgtgaggaaccgatctggtgctccgggtttggtaagtgcttaatccagtgcttctatttctgatctgtgttgcttcaaaccctaatctactctactttaccttgtgttctgtgagttgag

SEQ ID NO: 103883 - DNA, 442 bp, Zea Mays
catcaccctccaccaccatagagtaaagaattcccgacttccttgaccgacgatccggaagcaattgcgacaacaaggataacgtgaactttggagaacttcccaagaatatcacctccctacccgacgatgcctacaataacactgtcttccaaaaaaggatataactgcgcgatactgagataaccaatccatatccaagataacatcgaatgcccccaaggaaatcacaacaagattggccaaaaagacctcatcagcaagaatgacggaacacccctgacaaactgaacaactactaatggagccattagcagaactaaccaaaattgggtgacccaacctctgcaccgaaagaccagtctgcgacacaaaattctccgaaacaaatgaatagctagcgccagagtcaaaaagagcatgggccacaaacgaatcaact

SEQ ID NO: 103884 - DNA, 460 bp, Zea Mays
tgtaactgaccatcccagtcttaagcaactattactccacttttcatgcagtaccaagcaaaccttatttaagaatacttgttcactattgtatggtcttccattttactatagaaaccatagtccataactccatagattagccacaagaaaactccaaagttgagcaaaactcactgaaattcagttttagataactgaaccaagtctgaaaataaagtctgacagcatgttttgggacgccattttctccctgttgtaagcacattcaagggcatgacccttaccaagggttactcgcccaacatttatatccatgtttgctacagaaactagagcctaaaagcacatggattgatcaccaaggagctccaaattggccaccatttactgaatttcagttttagttaactgaaccaatttcagtcacaagtaacctaacagtccattttcagtcaac

SEQ ID NO: 103885 - DNA, 700 bp, Zea Mays
gcctgaacgcagacggtgtttgttcttctcaagccagtcctcctcggcgagaaggagtcgtcctgccttatcgacgaggtgttcgacctagtcgtcgaatcgatcctcggccgcacgcagacgccccaccagttcgtccaccgagagctgcttgagatcacagaacatttcaatcgtgacaactacctgggtgaagcgcgccggaaccacccgcaggaacttcttgacgacgcggacatcttccacgacctcgccaagtgctcgaaggttgccgacgaggttggtgattcgcatcccgaaatcttcgaccgattctccgtccttgaacttgatgttctcgaactcttggagcatcttctgggcgttcacctccttcacccgatctgcaccgagccgcatcaacttcactgcctcccacgcctccttcactgtgctgcgcgcgccaagagactgccacatctctttcggcaccgagcgcaggagcgcgctcatggcttgacggtcatgcgccctcttggggttgatacctggactgatcacatcccagatctccagcgcctcaaagttacactgcattaacatcgcccactcggagtaattatcacgagtgaggagtggccacatcagtgaactctccttcacgccgccaccggaacctgatgcttgattcatggtgttcgacggctgtcgtcgagggaga

SEQ ID NO: 103886 - DNA, 425 bp, Zea Mays
ccgaaggagaccatcaccaagtctagcgaaggtgaactggtccggctgaagtatacattcaggtatggggataagttcgatgaaccaaacgatgactggctgaaatgcatcgaagctacaagtgatgaacttcttggagcatattccaaggcagaagataatgcactatcctcagccttcggaagtcgggaaaagaagagattgaacagagtttttgatgccattggcttcgtttaccccgactaccgctacccgttgcggggaacaagggaaaagaggaaagctgctacttcggccaccccagacgaacctgtgccgaaggggaaaaagttgaaggtcttaactcaccggccgcgatacatcgaaccggccgcgatacctgaatttggcgaagggacttcctcggctgtcaaaacaaaagaaac

SEQ ID NO: 103887 - DNA, 457 bp, Zea Mays
acttggcaatttcccttttcattctggtccaccaatataaagttctgagatcatggtacatcttgttgctacccgggtgcatggagaatttggaaaggtgagcttcatctagtatcttctttctgagctcagggtccttgggaacaaccaatcgttctccaaaccataaaattcccttgctgtcctgacggaaacacttatatttttctgccttttgcttgatcatttccttaatcatttgaacacccttatcctcaatctgtgccctgactatctgctcttgcaaagtgggctccaccgagatatagcttaggtcaccggaagagacaacttccaggttcaacttgcacaattcatcgcacagggtggtaactcttgcatccatgctcatacagttgcattgtgccttcctgctcaaggcatctgccacaacattggccttgccaggatggtaatg

SEQ ID NO: 103888 - DNA, 617 bp, Zea Mays
gtatagcaccattttctccaaaccatttcaaattttttagggtgttgatggaggtgtaccatgatgttgtgtgccggtgcaatttttatgactagtttaactattaatgtaattatttgttattttactaaagaataagtggtaaaaaaaccttaggtagctagaaaaatctaaaaacttgcatgtacactttattttgttgtacaatgttgacaaaaaaattattttgttatgacaaagtgctgacatacatcctccgaacatgcatacatctctcacatagagcctagttactcagtgagagatgttcatgcttgtgatggatctatactaccactttctccaaatccttttaaattttaatgggatgtttattgaaccaacctatgatgttgtgtgcatttatgcatttttcagacctagtttaccaattactgtaattatttgatgcatttcgtaaagatatttcttacaataccataacctagctagaagaatctaaaaacttgcatggaccatttattttggtgtacaatgttgacaaaatagtttcaattcattcggacaaagtggtgacacacatcctaagaaaggcatacatctctcatataaggcta

SEQ ID NO: 103889 - DNA, 802 bp, Zea Mays
gcgagggcgagcttcttcagtttcttgtcgtaatccatctttagggtgcggtaggcctcacaggtattggtttcctcaccttctgctatttcgagcctctcttgaagggacgtcttttcccttgtaagttccctgactttttgctccaggctttctacccgggaggttaggtgagtgcagaggagggcaaggtcatcatattggttatcgagggtgtggaggtatccagccatgtagacaatggtggggtcatcttcgacagggtctctacctgacagggcctgaagtcttttcctccaggtgggggtattcttgttgctgggtggaaagtagcgaaggggggtttcaaagatcactttgctgtagttctggcatagttgtcggagggcggttcgggcaacattctggcaagtatctgggaagcggcatcctgtaaaagtgacttggaaagaaggatggtttggatagttttggctttctcccaggtagactaccatagagcatttttccattccgctctcgagatactccttccagacgtattctggcttcttatggattcccatgcaaagcgcacaactttgcaacaggtgtgggaatccttccacctctgagcagtaggatgtcctaatggccagagagtcttccatctggaataggaaaagaagggtctgttaatatcggggaagaggagggaagacttttttttcttcggggtaagaggtattttcttttagggcaagttttagggtcagggctgcgacctacagccagtcctatggctctgataccacctgaagcg

SEQ ID NO: 103890 - DNA, 641 bp, Zea Mays
taaaaatgtggttatggggatgcactctgaaaaggcgtcgggtccagatggtttcatagggatattttataagtgttgttttgagctgattaaggtcgatctatccaatgcaattcaggatttctataatcatagatgcaaaagcctgcatcttgttaatgaggcaaatatcactcttttacaaaagagggagggggctgacaggatcgacatgtttagaccgatcagtctcatcaacagttttatgaaaattttaaccaagattttagcaaatagacttgcaccaagaatgaacgagatcgtctccattgcccaaaacgcattcattcagaaaagatcaattcatgataattttctctatgttcaaaaagttattgagaaacttcataagagcaaacagacagcactttttgtcaagcttgacatatcaaaagctttcgactccatcaactgggcatatctgttagagattttaagagcgttaggattttctcagaagtggaggaattggattgccacattattgggctcttcctcctccaaaatcttaatcaatggccaacaaacaaatgcaatcaggcacatgcgtggtgttcgtcaaggggacccgctatcctcgttcctgtttattttagcaatgg

SEQ ID NO: 103891 - DNA, 277 bp, Zea Mays
atcgagagcatcctctcggataactgctgatgagctgctgcctggcgggtctgctcggctgccaagtgagcctgctgctgagtgagtgtctgaagaatcgaagcaagtgcggggttaatagcaggaggggcaacaggggtagcactagaactcccagcctcatgagcatgtgagcgtggaggcataggaggcggaggcggaggtggaatcccaaaatcatcatcatcatcaacaacaacaactgctgcatcctgagcttcgaactgatgaagagcag

SEQ ID NO: 103892 - DNA, 346 bp, Zea Mays
ggcaatatcaaggtaaccaaattaccaaacaaaacaaatatgaatactagaactggacagtggagagtggacaattcagatttcagaacatcattgaacattcagatttcagaacatcatagaaattatgaatactagaattgtcaggcactcagatcacattttagaattaagaattcagatttcaaaacatgaactgaacatcactcactactcactacataacatatgatgtagagttgcagacttactagtatataaatgccaagtaggcaagtatagaactacagacttactattgacctaaagaagtagagcctcatccaattgaaaagcagcatcacta

SEQ ID NO: 103893 - DNA, 442 bp, Zea Mays
ctcccaaggttctcggttctgctccggaaatcagagtgggaacaacaactaccaagtacaacgctttggacaacaaggtcagaggagcaaccaataccagaaccagtagagaagtagcactcaaaccgtcaaaggtctagtgggcaacaacagaatcgtcaaggaagcatcgtgaacacactggccaagaacaacaacacaactaccccagttcaacctaatggttgtttcaagtgtggcgaacttggtcactatgccaacaactgcctaaagcataatcaacagacaccccagaagaacaacaaccagatgactgaccagaacacacctgctcgtggatctgcacaaaacaagactccgcagaaccagagtagaggaagagtcaatcatgtgacagtggaatcagttcctgaggatgccgacgtggtgtatggtatgtttc

SEQ ID NO: 103894 - DNA, 693 bp, Zea Mays
gataaatcctggcatttctgcattgactatcgggccctcaataccaaaacagtcaaggacaagtttcccattctggtggtcgacgaactcttggatgagttacacggtgcctgcttcttcacaaagttggacctccacagtggatatcaccaagtacgcatgcacccagatgatattgagaagacagcgttccacactcatcgaggtcacttcgagtttctagtcatgcccttcggcctcaccaacgcaccgtccacatttcaggccctcatgaatgatgtcctgaaacccttcatccagaagtttgtcctggtcttcttcgatgatattctggtatccagctcttcctgggcagcgcacttacagcatgtcagggaagtatttacaacactccgagcaaacaagttatcagtcaaacagtccaagtgttcgtttggcaaaacatcagtcgcttacttgggtcatgttatctcagctcagggcgtttctatggatttggataaggtggcagcagtagaagtttggccgcgccctcggtctattcgggcacttcgaggttttttgggtctcactggctattaccgcaagtttatagcggattatgggtccatagctgcacccctcacggctcttctcaagcgtgaggcattccgttggtcggtaagggcagaggaggcatttcttcaactcaag

SEQ ID NO: 103895 - DNA, 281 bp, Zea Mays
agactgttgaatcaagaacaaactttattaaggaagcttgcccagttattcacaagaatcaagagaattaatggatagaagggggccggttcaggcgactaaagaagatgtgccatggtacagtgttctgggtggatcagaacgccagctcagctcgccgtcgttgatcgccgtccggattcgtgcacggtattggatggataacgccggggaaagggtaactcatacgtggcgccatctcccgagctcagccggagttattcatcggcgaccaccgcatc

SEQ ID NO: 103896 - DNA, 432 bp, Zea Mays
tatagttgccaagaatttcgttacacatggtttcgatcatttctagccactttttgcatggcttcttgaactgtttttcaaatttaaatcgataagggagccgaacaagttcgtacttctttccccctcctttttcttaggcattccccaggcactagaggtcgaaaatgttctatttgccaagtactcttgtactagatctatagtgctgatttcggcagctaccactttgaattccacctcggctagctggcatggggagccaagttgcatgtggcacaagggtgttatcatcccgaagcttaatttcattggactcatgaccatagtcatcaatttctcccttttcttctcgtccgcttttatgtagaaccattcacttgtccaaccggttggccacttagtgcgatagccaattaccggggcattcgt

SEQ ID NO: 103897 - DNA, 276 bp, Zea Mays
caaatttcacatccttcaaccctcgaactgaatcatgcttggataattgattcaattgtctcatatcaacatgaccaagtcttctgtgccatagccaatctagtgaagtcttagagaatagacaagttgtaagctttgcctcattagatgaaaaatcaacaagataaagattttcatgtctaaaacctttaaatattagattgctaccattaacactagagatgagaacatcatcaacggtaaaattgcaactaaaacccaaatcacatagttgag

SEQ ID NO: 103898 - DNA, 430 bp, Zea Mays
ccaccttgccaagcccttgaacttttccctttgaattatccccaaaagtgattttatcttgttcatcaacattttcatcaagtgaggtgaacatccttgggttgccagtcatatgttgagtgcatccactgtcaattacccaatggctcccaccggtcttctaattcacctaataaacaaataaatcaagcttcaattttgagggccctattttgcataggaccagtaactttctcaatcaaggactttgcaacccaaatttgtctaggtctactcttgcttggtggacctaggaatgttactttgactttcccatttgctacttttcttagaacataatgcgcattgaaagcaaatggtcttgagtgctttggtaagggagttggtggtgtggctttgcaattgtgggcaaaatgtccttctgattagc

SEQ ID NO: 103899 - DNA, 606 bp, Zea Mays
gatttatctgttagctattccttgcaacataaaacaatagatgatcccatgtaggttaacttcttatgtcccaatgcctccacacaagaaaattagttgcaatatcgtgtcttcgtacctggtgcaatctctgtttttttgcttccatgtttctcttatctggcttctcatggtaaccccaagctccatgtagtgctgctttggtagttaagttgatcgttcaagattctgaaactgtagccaccaccatttctgaatcagtgcacagaactattgatgcgagtataaatcatcttccgggagtatataaatcagtctttggtatgtctgttgcaagctcctagatatatggagttgctggcaatggcaagcacattttaatcactgaaaattacaatgtaagcactacactagttactgaactggttagcatcagtagttccagaaaacttggtttctcctatgctgcttcctgaggtagacgccgagcagcttgtagtacgtccagcgccgcttcccgccggcggtctccagcagcacctcggagctggcgtggaagccgcccttgccgaacgcctcgaacacgatggggtccgtagccacgac

SEQ ID NO: 103900 - DNA, 303 bp, Zea Mays
tgggattgcccaatacctcccgacaccatgattccatttgggtcattgtggacagattgaccaagacagctcatttcttgtcggtacacaccacccacaggacggagaagtatgcagaaatctacattgactagatagtccgcttgcatggaataccaaggactatagtatctgacagaggagcaccattcgttgcacgattttgggagcaattgcaggagtcacttgggacccatgtaataagaagctcagcataccatccccaaacagatggtcagacagaaagggtgaatcagattttgg

SEQ ID NO: 103901 - DNA, 280 bp, Zea Mays
agagggagtgctccatatgaagcaagaagagttcatctggttaaagcaagggggagatactgtaatgcagtatctcaataagttcaatcatttgtcccagtacgccatcgaccaagtgaatactgatctaaagaaaaagaattgtttcatgaggggacttaatgacaggcttcaacgaaaaatggcaacatgtctggatcttacctacagtagggctgtcagtacaacaccgacagtggaagccaaaaatgtcgggcatcgaaaatcaaaggggtttgga

SEQ ID NO: 103902 - DNA, 1234 bp, Zea Mays
tcgagtatactcttaggggggcctcatcagcagatggatcgtcaggttggggcgaactcgcgccagcctgttccagcggcccagcaacagacatgtgtcactagggcgaaacagggaggacaaaatccggtgatcccgcagtagtcggcccatacggcccagctaagccaggacgacccaacgaggataaaacttgaggattgtttatcttctccacagatggcacaactggcaccgcctcgggtgcctgcacgccgtcaatgctttctgttggtatagcctcaccaggcacgttaaaccctagattatcctgaactgacaaaacagcaatgggaacaactggatcatgatcatggcagcggggagataaatcttccaaaatgttcttcgaagttgtcatgcttggaacttgagtggcaaaacggggtgagctcaacctagccttctccagcggctcagccaaacttctgcgctgaggtgaagaaggtctaggggaggtcagcagcccatcaccaacacagaaagcagctaaatcggcacctcagtcatatccccatgcacatctgcagttcgttctctgcccgctctctgatgggaaccgaggcgaaggtggacagactgatgctgcaaaggacccagttgtcggttccgggggttggactgaccccggacatcctcgtcctcctcatcatggagctcatcctcatccgaaggagatagactgctctccgagagaaactgaaggggagccggaagaacggaaatgctaatcttgtaggtcagacatctcgcctcctgattaaatggcccctgctcaatgatgtggaggtccatatccctgtgaagcttcatcagatccaaacaccatgcccgaagcttgagtgaggagagatcagacttgctcgcagaggcgggatgcaactccaaaatgtgataggagtcgtggagaagctccttggctgtggtcagaccccacgcgtgcgctgagatcccacggatctcaatatccatcaaatgaggcagtgacgtagccgaagcgtgtgtaaatcttgtccactgcttgaacacgagcgagaacatagggcctctgaatggccttccttcgttaagcactcttatcgccacttcttcatccggcaaaaacagaaggaagtcttccggcatggtttgatgaatagacatgtcatcaatattgaggcaatagcgacgcgccacttcttccagcacatccgag

SEQ ID NO: 103903 - DNA, 518 bp, Zea Mays
gtcctcgagtcctggtcggcatctgtggcaaagaacatttgaagtaaacataatatgccagagaaccttccattttacattactatagaaaagtaatgatacagactcgatatcacataacaggatacattacctattatacaaaagtttaacctattatacaacaatacaccctacaataccctactctacttctattacaccattattcctgctttccattactcttggcggcctcatcgtcaggtgtgggagtccagacatcaaccaacctcaaagaaggagggggctcaaaaaggtctaactccccacccagcgcacgtcccgcaacgtgcgagggtccggcttccgcctcagcagggtgtgcaggctcactagggtgtaattgtgagtatagtatatggacttcctcatgcaacgtattgcagtaaacctgcaggtcgtcgacagttgtgttaagttctttaattcgggcctgagcccttgcttccttagcacacattagcaaacgagactgt

SEQ ID NO: 103904 - DNA, 477 bp, Zea Mays
agacaaatgggtaccgttgattcttggagtagcggttgtgattcgatatgcgggacgattcggtctgaatgatcagaaccgtcggatccaaatcgcgcgactgtgattggaagccaacttaatggtcagggactgatcgaggatcgttggtcacaaatccggtggtctggtgagcatgttgatttgggttgtgtgcattgttgttcccgaaacgggcatgccagattagacccgagatacccccattaccaggttccgatctaaccgttgatcctagatcaagcgggtcctattcaatctggggtgctttaaacctatgtcattgatcttcgatctaatggacattgtcgcgtaccggttcggttgaagtgcgatctaatctggcgcgtaggagtttgatcggacgaccatgatccatccaaaccccttcggccgtgcaaacattcaaaagaggccgtaggtttagttagaataaac

SEQ ID NO: 103905 - DNA, 540 bp, Zea Mays
gggaagttgtctttgtcctagctgtccaaatcgagacaaatcttgtgccaagtcgtgtcaaacaacttagggttgggttcaaacttttccagggtgttctagaggtattttggcgccattttgtcaattgggccaagtggttttaagtttgggatcaaggtgagcatgtttgatctttggaaagggggtggttttggacttagaagaattctgatttttctcttatgctcaacccttttgtgaatcttttggggtttttctgaaatctttttggggttactttcttactattatttgtagggtattaagtgcactacatcttttataattggcccaagacatgatcaagtggttttcataactttttggtcatacttacctatagtactccaattgtccacagggggtgcattagggttttgggcaatttctcccccttcaatgcacatggtaagccaaggcatgacatctaagataggttgcacttacttaggatcttgagctccaaatttggtgtacttttcccaacttaagtcacat

SEQ ID NO: 103906 - DNA, 549 bp, Zea Mays
aggccccagatttcaccgtggatacgacgaccctcggtggtagatggctctggcatggagcgaagcaagattgcggcgccaacgaggttttggctagccctgtgaaaggacgggggtgtctcggttctggcattctccatgatccgacagtggatgtcgcgtgccttggcgtgtgcaccttcgtcaagagccttgcctgctgcctcttgttctagaatcaactaaagttgttacaaccattgttgctcttccctgagcttggtgtgcaacttgcggagttgctcgaggtgggccatgtgactcctcggaggggtctgaacgccaccgggctctcctgcctccccgtgtgtgggggtgagacgttatcttcctgaggcatgccgagctagttcccttcatcacgctcctcgtgatctgcacggaagcactctcgagttgggtcgtaaccccctcctcggtgttgtagtcatctgagctatcagagagcaactcgtggcatgcaaataagaattttagcatggactcgggataacggagctcaaagaagtc

SEQ ID NO: 103907 - DNA, 741 bp, Zea Mays
gtcattttacagtgatctactatccttgcagcatacgccttttgacaaattgttatttcattttccttttgtctgacctccatgcccaagtagtagctaagaagacccaaatcactcatattaaaagaatgcatcatctgttgcttaaattcagtaattttattcactgatggcccacaaattattagatcatctacatagactcccaccaccaggagagaatttccagcccctttttctgtagacagcatgttccactacacacttgttgaaacccaaagagaatagctctgaatctagtcttgcattccatgctctaggtgcctacttcaagccatataaagctttactcaatttcagtaccttacttggcttcactggatcctgaaagcctgggggttgaagtacatatacttcttcttggagatgaccattcaggaaggctgacttaacatccatgtgatggacttcccaattcccatgtgcagatagagctagcagaacccttattgtttccagtctagcaacatgtgcaaaaacttcatcaaagtccacccctctctttgagcatatccttttgcaaccagtcttgctttgtgctttagaacatttccacttgcatctttcttcagcttgtacacccatttcagtcctattgctttgtgtccttttggaaggtcagaccatgtccaagtgttgttgtcttcaatagactgaagttctgcagccatagcctttttc

SEQ ID NO: 103908 - DNA, 317 bp, Zea Mays
ccgaagctcactatgatttgatgatgatgccttggaggttgccgatgttttgatgccgacacttttcaagaattggtgtgagctgctctgggacagcaccttcgacacaaggtgcacactggatgctggcatctcaccttcagcaacaggttcagccctcaaagcctccatatgagactgaaatatcatggacaaaaacagttacatgttaatgctaatgagcaacagcaagatgccaattgttagttattgcaataatttgaggcatgtagagatgacaaattatagcagatttgtcgctgacaataatgtgaaaa

SEQ ID NO: 103909 - DNA, 275 bp, Zea Mays
gcagaagtcgcctaagggtgcagccggactagcacaacaagtgcaaagaaaccgaagtctactgcgtagactatccgtgcagaagacgcctaagggtgcagccggactagcacaacaaaagcaaaaacgacaacaccaaactgtctgcgccaagaccgactatacgcgcaccagcacagcataacaaaacacaccagaccaagtacacaacgccttcgcaggcatagacaaacgagggcgcacaacctcatcaaacaagcctttacacatataca

SEQ ID NO: 103910 - DNA, 647 bp, Zea Mays
ggcttttggccgatggtccacatttgatgaaatttgatgttttagtgtgtttttaagaagatagcttcaaatgatgtgtttgaatcgcaaacttcggttgacttcccatcagtgaatggaaggccaaagaagggggaagagactaaacatgaaaatgattgaaacacctttagacgaagagacaaataaaatacgaaggaggaggggaaaagacgtacatgacgcttttccctgcgaaaggacataattgcctgtctctaattgtatagagcctccatatagacgagtggtcattcttgtaattttgtgctaagatgtatgtaacctcgactctataaataggtgtatagtgttactgctacaaaggtcagtcacttatatgccctaagcctatagcaccttcgcacgagagggcatccaaatatttgtcgtcttcgagcacctaagtcatcttgagagaccttcaaaggtataacatttcgaaggtctcgtatgtagtatagtattttttatctctattttatgcagtaaaagaaaaaggaagacgtgtatcctcatgcaatctgaaaacacatttcacttatgctatttcgtcttatatgcaatgacttcaacaccagtttttccatccacactcctctccctga

SEQ ID NO: 103911 - DNA, 847 bp, Zea Mays
tcagcaaaagagataatgcgaacttgaagttgcttgcttgccactcattcccgaacaaaatgaaaatcaacttcaatatgcttagtacgaccatgaaaacgagggttagctgtgagataggtagcccctaaattatcacaccataaacagggtacccgagactgaggaataccgagttcaccaagaacactctgaatccaaataatttccgcagttgcattagccacggccttgtactcagcttcagtactagagcgagatattgttggttgttttgagcactccatgatacaagatttggtccaaagaagattgcaaaacccccagtggagcggcgatcatcagaattaccggcccagtcagcatcagaaaaggcactcaaaaatagagaaggacttctacggaaataaagaccataccccaatgtgccacataagtacctcaaaattcgtttgactgtagaccaatgttgggtggtgggactatgcaaatattgacaaactttgttcaccgcaaatgagatgtctggccttgttaatgttaagtattatagtgcaccgacaacactacgataagttgcgacatcttcattgctcaacatggtaccgtctgaaagtgataacttctcattagcagcaaggggtgtggagacgggcttacacttgaccataccacttcgaagcaaaatatccttggtatatttttcttgagtgaggagaagaccatcagagctctagtgaacttcaatacccaagaaatagtgaagggggccaagatctttgagtgcaaaatcagcccttagatcagagagaagagcatcaacaacctctaaacaggagctagcaac

SEQ ID NO: 103912 - DNA, 694 bp, Zea Mays
ccgagttgtcatatccaagctagtaaagtacggaatccttgctaattcatttagaatatcatcaatcaagggcataggaaacctatttttaatggtcagataattcagtttctatagtacacacaaaacctccaactcccatccttcttctggactaatagcacaggggatgcaaagggacaaatactgcgcacaatcaaccctgcagataacaactcagctacttgcttctctatctctattttgtgtaagagaaaatacatgtaaggtctggagttaacaagtaaatatcctagtaccagagatatatggtgatcatacactctagaaggggggagttcagtaggaactacaaagacatcttcaactcctacaacaatgcatgcaaagaaactaggaactgctaattcctccttctctacctcctgctccagcatcattggtgcccacacatcacttcccttcaaccacttattcacctacaacatagaaacttcttgagatacctctctctttgcatgtacccatctcccttcaattggactggaaccctttatccacaaaggttagcatcttcctttgccaatcacactacatgaggctatgcgactgcaaccaatcataacctagaatcatgtcatacacctctaactccaacactctcaaagaggttgtataagtgtgacctcctggc

SEQ ID NO: 103913 - DNA, 624 bp, Zea Mays
gaaaggcctcacacagatgtacaaagatggaaacttgcaagatggaattagggttcagatgagtcaagttcaattcatagaaatcaaggaggccgcgaaaaagggagagacgagaagagcaaggctgtggataaggaaaggaatgtaaacgacagattcatgggtatcctctgtcggaacggtgaccccacggcaaatttgccaagagtagagctctttcagaagcaaaaccccaacactgacaagatgaaggaggtcagattctaagataacgaacatgtggttacccgcgaatggcaactatctgttggggtcaatgggcaggatgattgttgcgacagagctttgcctcttccgcttcggcgccatcgcaatctggctggcggaacgaacagaagcaagatctcagggaagcagaggagtggttcgaggcggaaatgtgaagttagggctcagaaatcataaacgcatgtcgacgcaagtataaatggggtttcccgggttgagcactacttctaaaaaagtgtcaagtcattactcaggaaagcagaacttcaggcataactcggcgccagtatcatcagctatcgcttggcggttacctctaaaacgccagcacatcaa

SEQ ID NO: 103914 - DNA, 273 bp, Zea Mays
gctaattggcctgaaatcaccagccgacgaagcgtccatctttttagggatcaaaataatgtaggaggaattcagctgtcccaatctctgaacattgccctggtggatgatagacagagccgccagcagatccaccttaatgatattccaacaagatttatagaacctccctgtaaacccatcaggccctggagccttatcagacggaaggcacgcaatagtgtccaacacttctctctctgagaaggggcactcaagatcgctgagatccac

SEQ ID NO: 103915 - DNA, 362 bp, Zea Mays
caaaagagaaatgttcacaaaatgaagctatgcgagagcgagtttgaacacccttactaatgtcacccacaatttgatcaactgggtgatccttcacaatagaatgatggattcttgataccatttgagaattgctagttgaagcatgaggagggaccgaatgagttgaagtatcttgatcatgagcatccacaatttcatcattttgttggctttggtgattttcttcatttagggttgaagaggatggaatgacaaccacactattatcatcatcatcttcttttggctttatttcaccaatagccattgttttcatagcatttctcaattgagttccaccaacatcatcaagattatcg

SEQ ID NO: 103916 - DNA, 449 bp, Zea Mays
gaaaaatggaaagacatatattgttggtgactggctcactgacattgagtcctcaagcgggtcttcttcaagtgaagaagagaatgatgaaaaagttgccaccattggtcgggacttctcttcaccaccaccatcaccctcatccacttctcacctatgcctcatggctaaagatgaatgaaaggtacaaattgagaatgatattattgatgacagtgatagtgatagtgatgatgagtttgcttcaccttcctatgatgaattagctgacttaattaaagaatacactcaaatcattaggaagtcaaaggctaaatgtgataagttaaaggataaaaatgaatttttaactgccaagtatgacatagttgtaaaagctagtgatgaaatgaaagaagaaaataaaactatgtcatccactgcaaatgagctcaaatcctccctaaaag

SEQ ID NO: 103917 - DNA, 1243 bp, Zea Mays
ccaaaatcacaagctaaatcagtcaatgaactgcacttcctgaagtcctcagaagctacaggctctgaggctgcccccttagcattacacatgtatagtttgcttctgtttgcattaatccagcttgttccaggttctttctttacctttcttgatttcatcagcttccttacctttacagcgtcttcccaatgcccaatcgtcctatacacattttcaagaagaacatagctcaggtggtattgaggctccaattccatcatcttctttgcaacccttactgctacatctgggttagtatgtgtggcacaggcaccaagtattgctgcccacagtgatgaatcatctctaaattgtgacttgtttacaagatcttcagcctcttctagaagctccactctactgaggaggtcaacaatgcaattgtaatgttcaataccagggggaataccatagtccttgctcattgagttgaagtagttccttccctcttcaaccatcccagtatggctacaagcaaaaagaacaccaatgaaactgatgtagtctggcttgacccctcctctaaccatctcattgaacaggctgatggctcgctcaccatggccattctgagcacaaccacaaatcatggcattccaagtaatcatgttgcggacactgctcattttgaatactctgtaggcatagtctactgcaccacattttgcgtacaggtccacgagtgcggattcaacaatgacatctccgcatcctctcatcctcatagaacggcagtggatttcttttcctagcttcactgcagacagaccagcacaagatcgcagaagagtccctaagctataccagtcatcgtcctgctcctgcatatgcatctgtcgaaacaacgagagaaccttctcatgcttcccagtttgacaataccccccaagcagggcacaccatgaaactgcattcggagccttcatcctgtcgaataccttgcgtgcatccaccatcataccacacttggcatacatgtcaagtgtgctgctctccacgatgacgttcccacacaggccacgtgtcacaacctgcgcgtgtgcctccctaccctgcctcgctctcttcatgttcccaagcgccgacatcatagagccaaatgtgcagccgtccggccaaaccccatctgtcctgagcatagcctgaaaccaccgcagggcctcgtcgaaccagtcgttccgcacgaatgctgatatcaacg

SEQ ID NO: 103918 - DNA, 590 bp, Zea Mays
cgaaacagaaagcagattgaaattcaaattcgaaagcaagcaacatccttaaggacaaaactctcgttcactcgaacagagccatgagaaacaaccttacctctagacttatccccgaatgtgatgtattccttaccaatcacggggtcgaggctatagaaccatttgttgcttctggtcatgtgacacaaacagctggaatccatgagccacatgttctccaggcttctgtcctacattaatagaaagacacggggttagcaaatgacacaacattagggttagaatactgagaataataccagtgatgcagcatctacccataaaaggtgttaggaaaacaccagtcatccctggtatcgacggggaaagcaatcaccacaaaaaggaaactatggtcagctggggaagtaagaaccaactcctccgccacaaggtccttggacatatggcacacgactagcattccactgagcatgaacaccatgtggtctctctgcctaaggcctagcaacaagaggcaaagaacctctaggccttgtaggacgtctttaaacatgaagatcatgaacaccatgagaaaggtggat

SEQ ID NO: 103919 - DNA, 950 bp, Zea Mays
gaaccttcggaggtttgcaaacgtctcttctaggtagttgatgaggttgtcggattttttggttttcataatgatatcgtcgacgtagacttccatgttgtgcctgacctagtcggtgaagcatcagagcatacatcactgatatgtggccccgacgttctttaggttgaacaacatgaagacatagtagaacgtaccaaaggtggtgatgaacgttgtagcatgttggttggactccttcaaagcgatctggtggtagcctgagtaggcatccaggaaggagagttcacgcctggcggtggaatctacaacctagtcaatacacaggagcgaaaaaggatcctttgggcatgccttgtttagccccgtgtaatcaacgcacatcctccagctcccattcttcctttttacgagaacggggttcacaacccacactaggtggttaatctctttcacgaacccatccaccaagagtttgactatttcctcgccaatggccttgcgcttctccgcgtcaaaacggcggagccgctaagcgactggtctcgttgtaggccgaatattcagggagtgctcggtgagctccctcgggattcctggcatgttcgtgagcttccacagttggctcgaaggaagttgacgagggtgtctccttgtttgtcagagagcgccgccccaatctggacgctctttgaagtgtcagtgtcgtcgatcagaatgtttttcgtgtcttgcgccgacttgaacatgccgaaaatgactttgggggcgttaggcccgtcttgcgggtttatgtttcactgtagttcatccaattcccttgcagcggcctgtgctgatgtgagttcatagttggctcgttcacccgcgtaagccacttgaaacgaggtagacgtcgtaatgacccagtgggggtcgggcatcttcatcttgaggtatgtgtagttggg

SEQ ID NO: 103920 - DNA, 1049 bp, Zea Mays
gttggagttaaatggactcaaagtctagctgtcagtcagctcagagtctgaacttttactaaccgtgacatggggtgaactttgggagctcttttgaagataatccattgagtgtttgagcatggttactatagcaagattgtaactggattatagggctacaactttgatacagagagggtgtctagtcactacatgaaatttgaagcaaatcgacctacaaattgctctgtcagaacaactgaaacaaccctgatggtacagtgtctgcagaaatatctcaggttcaagcccccctcgctgctagtgatcttgcgcttggattcgtgccggtcgccgtgattcgtacctagcacgcagtagatatccacggggaggtaaaaagatctcacgggggcgcggatttggtcacgatagaagcttatcaccgtgcctgtagccgtgcgacgtggccggaccgaaagtgtcactgtggaaactctggtgacccaggttatgccacgccgtggctcgttgctatgtggtagtaaccgcggcacatttaggattaaaatctttgagtcgttgcaccggtgaatgccacaaccaagccaccagtggtctcccctctcttcagccgccagcgcgccatctcaaattcacgggccaccgccctcgggtcctataaattggacgtgccatcggctccgctaggtagtcatgcaccgaatacaccaacccgtgcctcagatcgtccactagagcgccccaatttgagatttcccccaaatcggtcaagaacgccgcgtgtttgagctcgctacgttcagcgcttcgcaggtccgttctcaccctccttgctcttgttttagcatcccaatgtgcttgtggtgcttctcgacccggccaattgagctaaaacacgtaggatcaccgggaacacttcgggttgtccgttgatcgcgctgtcactgtgggcagagagattaggggctagaaccttaaaattggttgaggggtaatggttattaggggtcgaattaggtgtcaactgctccaaagcaccggta

SEQ ID NO: 103921 - DNA, 336 bp, Zea Mays
ctgttgcaactgctggtgttgagagaatcttttcttcaatgaacttcataaaaaataagctaagaagcaagatgggacaaaaaaatttaaatggatgcttggttactttcattgaaaggcaattcttcttgcaagtcaaggatgaggacattatcactcaatttcaaagcttgaaggatcggaaggttgtcttgtaatatgtaagcttccttatactatttaatgttctcctgacctattatttttacgtgagttatgatttagtttactacttttgtaatgtgtatgttctattatatgctatgactatctatacgtgaatcaattatatatatg

SEQ ID NO: 103922 - DNA, 643 bp, Zea Mays
gttgtagcccctcagccggtgagtgccacggtttcacccgcgccagtaaccttcttcctctccggctgccgcgcgtctccgttaaattcactggccaccgctcaagcatgctataaattgagtgcacccgcggctctgttaggtaattacgcatccattgcaccagtccttgccccggattatccaccagagcctcccaatttctctcttcccccaatatggttctccacgccacagtgtgtaggctcaccgtggtcagcgtactccaggtctgttcgtgctctctgccctcttgtttcagcatccttaggttcccctgatgctcctcgaccaacccgattgagttaagctcccttagatcgccgggaacgcattagaaggtcctttcgtcacacggtcaccgtggacagagcgagttagaggtctgatagtgaaattagttgaggggaaacacttgttagggtgtgaatttggtctcagccgaagtagagcaccggtcattgagtgattcgaccggtatgcgctcgccagagctcagctctctgccgggctgtgtcgtggacctggcattgtagagaaacagaagtccgaggggatttctgtaactgtcagtgagacaggagaatagcgttgtaaccctttt

SEQ ID NO: 103923 - DNA, 688 bp, Zea Mays
ctgggatcagtgtgtgtacccactggttctatcgagacctgacactgttcagtatctgatattaacatcagttccaatcttgctcctgggtgaaaggacagtacatcttgcatcctaacagaatggccttgatactgaattgttatccatttgtttgcccagtcaattttcattgggctgtattgcgtgaaccagtccatgccaaccactagatcaaaagatggtagtggcaaaaattttagatctgcagagaattgtactcctgacatgacccagtttgctgcaagtaaataatgttcacatttgagtatctgtccattagccacttgtactgtaattggagtagacaatttgtccacaccctgcaacagaggtaacaatttggaattcaaaaacgtgtgcgaagagccagaatcaattaacaccaacaattcctgattctgcaacattccctgcaaccgaaatgtgctgggagtatcgtgaccggcccatgcagccatagataaaaccatcattatttgttgttcaggttcagaaacttcttcagttgtttcttctgaacccaatagttcccagacttcctcaatagcatgcaattgcaccgtagtagcacatctgtgaccatgagaccatttctctgcacatcgatcacataagccccttgctcttcgataacttttgagtgaag

SEQ ID NO: 103924 - DNA, 420 bp, Zea Mays
gggccgtctgatgggcctcccactgggtcatcctatgggatgggcggggaggatatagccgggttaggcaagcctgatccaaggcgacaaagaccaacgtccgagttaggcgctactgaagcactgatatctcgggtggtgcagttgcaagcaccctgaggagctaagcattcggcgataactcgggcgagaaggtgatcaagactctggatatataggactgcaagcagcgacaaaggagataagtgaagtagatagtgatcacaacttgtaaagggataactctttgatcgggtatataaggccgagggggtcccctacaaaatcatctcatcccacatcatctcaccccatcctcatcgacagcagctgagccatcacaaagctcatgtgtaatccccatactctagaaatcaatac

SEQ ID NO: 103925 - DNA, 400 bp, Zea Mays
tacacatatgcttgctaatgtaaggaaggaggtagcaaatcaagtcactgttggccgcactagatccccacctatcttctctctcatttggtcaagaagtctcccatgcttgtagatgaaccttgacaccttctttgccatattgatacaagtactgaaatcttttatcttagcaatgtcttccaacatcaaatccaagcagcgggcagcacaaggtgtccaaaacaaatggggcatcctatccacaagaatcctacctgctgccttgaagttggccccattgtctgtgacaatctggaccacatattccttcccaatcttgttgatttgcttctccaataaatctgccaacatttgagcaatagctacctcacttgaagcatcaacagactcaagaaag

SEQ ID NO: 103926 - DNA, 275 bp, Zea Mays
ttagcatgtcgccacctctctatctaagccaaaacaatttctacctacaccgaccgaactttcgtgttgagcacaccttatattaccttgtctcgcatacaaccatgttgcggcgtgtactcgagacacttctgttcaattcaacgcaatcactactacaacacacttcggcgcacatgcttgacaacatttatcaaccagacgagtcaaacaccaaactaattattcgcaactctcgacctcaaaaccccaatcataggtcacataatttacat

SEQ ID NO: 103927 - DNA, 1065 bp, Zea Mays
gaaatagcacaaaagagggtaatattagtaatgggaatcatgctttattggaattagttactgagtacaagtggtagcattccatctagagctcatggtgttgctacggataaaactttcggagatgctcgatattccaagagttcccaatcggagtaccgtccatttgtgatagccgataggagaccggtcgagtgacctccgtcaccacaaagggcccctcccagggtggtgatagcttgtgacgtccttctcctgacagtatcatgcggagcactaaatctcctactacgaaggataaaaaacggacctccttgtcatggtagcgccttagagtttgctggtacctagccgattgaataaccacattcaatcgttcttcttctaacacatcaatctcttcaagccgagttgcctccgcttctgcgatatctttgaaagtaagtctcggtgctccaaacgctaggtccaccggtagcactgcctctgagccatacaccataaagaaaggggtgtttccttgcagtgctcggcttggttgagtccgaaggctccagaccacgtacggcaactctctgatccatttccctgccagcttctcgtttttgtcaaagaccttcttcttgagtgtttccaggatcattccatttgctctttccacctgtccattggctcttgagtgtgctactgaggcgtacttcagttggatacatttttgttcgtagaagtcgaagaattttgcgcttgtgaagttggatcctagatctgtgatgatgctgtttggtatcccgaatctgaagatgatttcctgaatgaattatactgctttagcagcaataaaggaagctataggcttgtattctatccactttgtgaacttgtcaatggccaccagtatttgtgtgtatcctccttgagccttcttgaatggtccgatcatgtccagcccccagcatgcaaaggcccaagaaactagaatggtctgcaggcgctgtgctggtaaatgttgttgcttggctaggaattgataggcttcgcacctttgcactaggtcagccgcatgtc

SEQ ID NO: 103928 - DNA, 844 bp, Zea Mays
ctcaggtttggggcaccaaggctggtcttcgaatgcatagctgaagcagaagctaccaggctagaagatattgacgtgctggaagaagagcgattgaatacagtaattcagtcagctagataccagcagaccctgaggcgctatcatgataaagctatacaacatcgatcctttatagtgggagacttggtccttcgccaaaatctaacgggatagggacggcacaaattgtcaccgctatgggaagggccattcatggtatcggaggtcactcggccaggatcatatcggcttactcaaatggatggcacggaagtggggaactcgtggaatatagagcacctcaggaagttttatccttagcaagactccaaaagctattagagcaatgttgtactctgtaattggaaaatacgtcatcaataaaagatttcattctcaaaggcattcacactattggttatcaattgacttcgactagacttggaatcgacacacttactcgacttggggtggccactgtaccccactaacggagcaatcagcttaagtcggaatgacttaagacggtgcaacatgctcgcgcttactcgacttagggtgaccactataccctactaacggagcaatcggcttaagtcggcaatgacttaagacggtgcaacatgctcgcgcttactcgacttagggtgaccactataccctactaaccgagcaattggcttaagccaacaatgacttaagacggtgcaacatgctcgtgcttactcgacttagggtgaccactataccctactaatggagcaatcggcttaagtcggcaatgacttaagacggtgcaaca

SEQ ID NO: 103929 - DNA, 300 bp, Zea Mays
tcaaattcaacctttaaaaaagattcatgagtcagctcacctcataaatcatttttgagagacgacaatatggcttaggctcttgtgtctcccccctttgtcgctcttcgatttgttcttggttgttgggtggtccttcactgctctatgttggttgtggattgatattgttgatctggtccatttggtggtctcttgttgcggtttacttcggccctaagtctgttttaggccttctatatatcttttggctttctttgggtaactagctttctataatgtagctctttggagcatatt

SEQ ID NO: 103930 - DNA, 391 bp, Zea Mays
ctcatagtttcattagccaaaagttcagtgctaaatgtcaactgcctttctaccactcaaaagggtcatttatgatagccacacctaggggtaaaattgcaactaatcaattaaaccaaagtgtgcctattcaactgggaagccacattgtcaagaccacccttcttgttttgggtttggaaaatgtggacattattctgggagctaattggatgaccctgcaccaagtagtgctggatgtagccagccgcatcgtggaaatcaattccccgttctgtggaagtttcaccttaattctgcccagtcaaagttctactcaatcatgtgctttctctatgatggagttgcctccgaagaagattccagtggtctttgagtatgcagacgtctt

SEQ ID NO: 103931 - DNA, 336 bp, Zea Mays
gtttagctttttggcagatgtcacactgtttaacaaactgttccacatcactctttagccctttccagtagaaaaactgactgacccgataataggtcgcctttaccccggaatgaccaccaatagcagtagaatggaaggctataatcagcttggtttgtaaggctgagttatgagctacccagattctattatggtacttaataattctctgacataatgaaaatccttgttcatccggtgaatggactgccaatctagtgagtagctcttgagcctcggggtcggttacataggtgttcaacaactcctgcacccatagaggtcgaattgcgg

SEQ ID NO: 103932 - DNA, 1120 bp, Zea Mays
atttataacttgtcgaatgaacatcttatttgtatatcatgtgttacagggttactatccaaggaaaacgaaatcctctttctccccaagtcttctcacttatttcccttctgctattcttcaaagcgtcccaaattctctttttttgtatttgctcgcactgaatcccagaactcatctaatcggagctgggatgcaagggtttataaatatatatactttcttccactaaaacattcattttctgctcccctcaagtagctgaaccctttctgaataatgttgtaaaacaatcctgtctgacagagacaagatctttaccaattctttgtagactctattgttcaacctcatttgcactaaactgcaactcagtgctgcttatggttcccaaaacaatagcctaataaccagactgagagtatcaatcatttattccttgtgcctacatagtttttgcacacaacactttatttcacatggcccctgggtgttcactttcagtgtattatttggttttgaactgccacaagggtatgttcatgttttgtctgaaggcacacataggtgacttctgaaatgctacaggagcgaaaacaatttccagatttgctgttaagagcacaaaacaagatgaaactatgtgctattttggacatgtctgagattttcacttcctagatggagaacaggtttagttcaagcttcagtctcatactcgaactttggttgcccaccgtccattccccaatttggcactattgtatgtggcccttttcaccatcttcaaatgcattggatcttctactaacaaatgtggcctcaaccttgtcgcactaacatacatggaacaccaacctgttatgattagctggcacctagtctccatttcttgcacaaccatggacagagaataaaaatgaggagcttttgaacatctaccataccaccactattactggaatctcacacaaggaaaaaaatgtgctggtgagaagtgaaattggcataaaattgtcttaacaaataattcagtgcctgagaggagctagataaatccatatcaataatggaccaaactgcttgttagactatcagtcacgacagaagtgaaattggc

SEQ ID NO: 103933 - DNA, 621 bp, Zea Mays
tcgggagtgacggtttagcgggctcttcggcactgctttgccacggggtgatggcgtcgccgcgcgaactgtgggcgctgtcgtgttctgtggccctagggaagaagacgatggatggcccttggttccgtgatgagcggtcaggattataacacaagtgaacgtttcgtggaggaaatcgaagccgtgggatgataatctggtggttcggattgaaagtgccttaagtagttttagatcgttgatcttggatctagcggttgtgggcgagtgcgggttcatctaggatggaaattaatcggggtcgtagatttcgaacagggcggttgtggttagattgggtttcataaaatctgggccatcagatctcgatccagtggctcattgcatgtaccggttcgtgtaacaaaagatctaatccgaggcgcaaagttctgatcctatgaccgggacatcccaataccctttcagacgtgtacttattcaaaagaatccatagcgaatttcaaaataaacccgtcgtccacgtagaggcaaagagtagtgcgtatatgtcttaaaagttgtatggagcaccctggaattcttcaaaatagtatacgcagtccaaacaatctatta

SEQ ID NO: 103934 - DNA, 430 bp, Zea Mays
gttcaagcccattgcttctctaacttcatctaaggcagtggaattcatacaggacataatattcaggttcggaataccgaacaacatcataaccgacctgggatctaatttcactagttcggagttctttgatttctgcgaacaaaaaagcatccagatcaaatacgcattagtggcacgcccaagagccaacaggcaggtagaaagagccaacgaaatgatattggaagcactcagaaagaaagtcttcaacaagaatgaaaagttcgcaggaaagtggatcgcagagttgccgtatgtggtctggagcctaagaactcaacccagtcgagctttgcatggaaacactcccttcttcatggtttatggttcggaggcagtgctacctgctgatctcaagtttggggcaccaagattgatcttcaaaaac

SEQ ID NO: 103935 - DNA, 336 bp, Zea Mays
ggtccatctaactcgacacctttattgcttaattaaaatctttgtaaggcatttgtgataaatagagggatgcaatcttagcttggccatttagtttatttttatatttgttttggttagcaggcgtgattagattttagaaaggactattcatcctctctagtccatcatcttgatcatacacgcttccatcacccgcggccggcggctctcgccacctcacatgtcacccacctctcgctgccatcccttgaccccatcctcccttaatcatagggtagccatcaaccactttatcgtgatgccccactgccaaccttttctaaccgttgtctc

SEQ ID NO: 103936 - DNA, 321 bp, Zea Mays
gatcatttggctaaccctgaaacaagatcaaaggtaagcgaaattggttagtttgaggactaaaagggaaatgggatagatagccatttctacctattttggtgattaagtatccaacacagcatcatggactaactcatgtgctaagtgtatgagagcatgatcactattatgcaatttgaaggtttccagtccaaaagagttgaaacaaggactagaaatgcaactttgggtaaatggtaaatctatgaggtttgcactcttagatatgttacattggcctattactatgtttctagcactagtatttggtctctaact

SEQ ID NO: 103937 - DNA, 539 bp, Zea Mays
ctagaatattcatctttcaggggttatcacgggtcattacaacgtgattaagtacatacacgaacagacacactatcaagtctgcccacacagtggcttacaagtgggaccctacagcacgggtcatttatatacggggcccccgattacaataacgagcgggtaacaacacgcggtcacggtggccttcgccattccctgctgggactgagggaacgcctaagccttcgcccgctctgggcactccatccgccatggggctctcgctcttcagtcttcgtgctctttagtcttcattcgaagtggtactgtgggggattttgaaatgtgacaattgaaaggagacattttactgtgggactgttgagttcccgaggcgctgtccccggcctataaaaagttgtgcctgggctgcggtcttttacccgtctgtgcgcgcgttaaaatcctagttttcttctctttgcttgcttgcctctttcgctcttgcgctactggtgatctagcccgcgtcaagcaaactgctcgccgccgccgac

SEQ ID NO: 103938 - DNA, 881 bp, Zea Mays
gaagcactcagtatatctggtattacaacaaatgaaagagggactttcatttatctactaaaaccaaaaaagctgatatgtcgctattgaaaataaaaaatttgaaaccaaccgagacatagcattagtattaggctcgctgccggctccgttttaagtactatacttgcttcgatagttcgatatgccattatgaacatgtttggattcgggtgttccacaaaaaatagattatgtgccgtctatccattacgtagctttgcatcagcaggccaaccgagaatcagattttcaatcttaaacaaggacaactgagaagcagattttaacggaaaacaaatacagggctccgaatgccacaaagctgctgtcgccggaggataaccgactaacctcggctgctacaacatttttccaaacaaaagcatgtttttttcttaaattattggaagaaggcaatgcaaagaaaaagagagatacatctgatgcagaacgaataagcatatcctttcaattgtgctacaagcctacaacatcctgatgcagaacgaatacacaacccatatccagataataatcaagcacagcaccacactagtaaaaatggagcttggagcaaggtttactaatcaaagagatataaatttccctgaagggtgtttgtttaggattataatatgcctaaattaaataatccaataaattttgaatgaagttttaatataaaatttattggattatttaatctggacagattatattcacaaacaaataccccctaagtctgtgagaaaaagcaattcagctgcaactgtggaaacatcttccggacctcgaaagtgtagtagcagaggagctgaacgtccgagaatggagggtcg

SEQ ID NO: 103939 - DNA, 762 bp, Zea Mays
actagatcggggtggtcagcgcgagctactttcatcgacgtccggaacgtgcattggggagggggacttgcgggacatgtttgagggggaagagctaaggatgatgttgtttaatttccgggaggtgggtcttattccgaaggtggagcctatgtgatatttttgctgccctcactgctcttgttgcgatagtgagtgaaagcgctaccctccccctcttcgcaatagagttgtgagggtaacagtcgtgatttgtattattgtgcgatggtgccgttaagccctttgtttgttatttttttgtgattgcgtgttgtatgttgtgcttattgcgagttggctttgatttgtaatcgttttgtgtcatagggaatattgtgcggcactttaataggtttcacccctaggcgatatctgttatgagagtttcttttgtaggggacttcacaacttgtcggtggcaacgcgcagctacacttttgtcctactgcacgcttaggcgacttttgcttggacgtgtctttctatgaagacttcgcacccctgtgggtgatgtcgcgcacttattgtgcttgtccggctgcacccttaggcggcttttgctcggacgtgtctttctatgaagacctcacaccctgtgggtgatgtcgcgcacttattgtgcttgtccggctgcatccttaggcggcttttgctcgcatgtgtctttctatgaagacctcgcaccctgtgggtgacgtcgcgcacttattgtgcttgtct

SEQ ID NO: 103940 - DNA, 427 bp, Zea Mays
gtgaatgaagagagagagtgtgaggggtatataaaggagcccccaaaagctggtggccgttggggaatcctgtctgaaaaccgattgaaccggttgaaccgatttccaccagggtggttctcggctcactggctgactcagccagagagtggaccggttccaaattcgattgaaccggcctaaaatcggttgaaccgattttccaacagtctgcacacgactttttctaataggactgacaggcagactggtaggacagaaagtggcagagggaacagtgcaaaaaccggttgagccggtttttagtccggttgagccgggttttgaaattggcgaatagatttttagaaaactgaagagaaccatgaggaaatcttagtgggaagtgacagtggtttttccaagagcattcatgatctagtaaaat

SEQ ID NO: 103941 - DNA, 485 bp, Zea Mays
aattcttgctctcatcccttcatttcaaaaatggtttccccctttccttctctcagaagtcaaatggaggttcgctgccaaaccagcttttgctagaatgaagatggtttccccaagttgctgagagcatgcacagtccgcctcggaatcaggagccagccagagtatgatggtcgtgaattcgtcgagcatggcacagagaagtgtgtcatgactgtatacattggatccagtccgcaccatgtggaatggagtgtcactgctgctgggcacagattcaaagacacctgccaagtcatcgctcgcaaggcattgagggccctatgtcagatctatgaagaagtggccgacaccccgctcatattctttccgccctttcagagagaccatctagtttggatggccaggatgcgtgcattggaaggtcagcagccgcttgaggacgacctcacagtcgtgtacctcactacatacctgctcacctg

SEQ ID NO: 103942 - DNA, 706 bp, Zea Mays
gccaaatcgaattagagaataattggacaagtttgccaaatttagtctaagtctagaagcaccagaccggtccgatagagcactggatcgcttacgcatagaagactaaaatttgtcaaatctggtggcacaccataccacttgtgtagagagaatgtaaattagactacagtcattggctatctggattggtccggtggcgcaccttaccatatgggttgaacaagtacttttcagatctcaacggtcagattcgatgtggcgctgacgtggcaggtccggtggtacacatgactagtcactatgcaattgtatagttagaacaataacccggtacaatggaggttagaggggccggtggtacgctagaccagactgtagggagtctggtgcaccatctgacagtgtagattttgtctaaccacaccaacagttgtttaggcagttagggctaaaaatacccctaaccaacacattgaagacacatgaccttgagagcacctagaggggggtgaataggtggtcctgtgaaatcaaatactaaatagtccaaagttggttataaaaatgttagttagatcaaaaccaagatgctatagtgagaactcttcacttgattgctcctttagagtgagtattaaacttatgaacagtagcacaagtgattaagtgagaactcaagaagagaaaccaatcataattaaaa

SEQ ID NO: 103943 - DNA, 636 bp, Zea Mays
gtcagtctaggaaattctgaactcgattcagtctctaaagttgtgttctagtattttttgttagtattggagctgtttggtgtctgatccaaggggtttaaggttgaagtctttatgaagaattggtagagggttgtttaatcgaccagttttagtaagtatgctccccatgttactatgggaaatcgtgggattgaaggaggtgaacaaggagagattagagttcaacaggtactgggagttgcaacagaaatctgaagaaagatcttcacatccctgctgtcctccacttatgtgcacaaactgagatagacttggggtgggcagtatggggctcgagattcagtccccctctgcagaaaaatattagttttgcacctgtttgagcctaccacagtagagtttttgtctgtctttacttctatctgtattcagtggattggttggatatttgtggacagtgagcccttatctgctctactctctatttgaataactggacaaagtagatatttgagctaagtcgtggctggtgtggttgttgagcatgaaagccacatgtgttagtccctgttgtgctgtcaccttggaactcttcaccactaggatagctaaacctgaagacgtctgccttcc

SEQ ID NO: 103944 - DNA, 652 bp, Zea Mays
ctaatattcaaaggttttagacatgaaaatctttatcttgttgatttttcatctaatgaggcaaaacttacaacttgtctattctctaaggcttcactatgttggctatggtataggatacttggtcatgttggtatgagacaattgaatcaactatccaagcatgatttagttcgagggttgaaggatgtgaaatttgaaaagaacaaattatgtagttcatgtcgagccgggaagcaagtggcaaatactcatccctacaagaatcaaatgtctactcatagaccattggaattacttcacatggatctttttggaccaacatccttcatgagtattggtggtaattcctattgtcttgtaattgtggatgattattctagatttacttgggtctattttcttcaagataaatcaaatgtatttgaaacctttaagtcatttgctatactggcccaaaatcaatttgattttgacatcaagaaagttagaagtgataatgggtcggaattcaaaaatgctagaattgatgaatattgtgatgacaagagcattaaacgtgaattctcttccaaatacacaccggaacaaaatggaattgttgagaggaaaaatagaactcttattgatatggctaggtctatgttagccg

SEQ ID NO: 103945 - DNA, 478 bp, Zea Mays
agaaaagggggagaacccaaggtgatttttgtgtttatctcttgttcattttatgcggcaatccaattgtttagatgttgcgtgtgcgatttggtagaagggctgtccagaattttaagggggtggacgaacagcagcagaattagtgatttctgggcatttttcatggagaattaagggaaatcagtttgggaatcatgtagaactttggcatacctttccaacgagtatttatgcgctcaatttagagttataaattaaaagttatcaccgtttgaaaccgggtaggtggctgtccaaaaaaacagattttcagggggatgaacagcagcagtattagcagtttctggggatttttcgggagtaattagtgttaatcagtatgagaatcatgtagggctttatgctatctttccaacaagtacttatgcgctcgattcggagttataatttaggagatatcgttgtttgaatccgg

SEQ ID NO: 103946 - DNA, 428 bp, Zea Mays
gggctgaccaatgccccggcttatttcatgtacctgatgaattcagtgtttatgccggaattggataaattcgtggttgtcttcattgatgatattctggtttattccaaaaatgaagacgaacatgctgagcacctgcacgttgtgcttcaacgactgcgcgatcatcatctttatgctaaattgtctaagtgtgagttctggctgagggagattaaattcttgggtcacacaatttctcaggatgggatatcagttgatcctgagaaggtgcaagaggtaatggattggaaacccccgactacagtgaagcagattcggagttttctgggattggcagggtattatcgacgatttattccggatttctccagaattgccaaaccaatgactgaactattgaagaagggagtcaaatttgagtggag

SEQ ID NO: 103947 - DNA, 456 bp, Zea Mays
gccgcaggctttgagctcttttctactagtgggagtcaccagaggcggggcgacgtcggccagagacacgaccgacgagggaagtgcgtgggaagagaggtagaaagaggaggtcacaaggccctatgaaaacgttaatgttcggtgtctagaaaggtggcgccgaaaataatgttattttcgactgctaggtgcaaggccaccgttttttacactaactttcggcggccgttagtatccgacgaaaattagcggttattttcggcgtccagtgcttggccgccgaaaataatgccggccgccaaaaatgtgtgttcttgttgtgtcggtaaagaatcggattccgatagtgtttgttcaggttcattgtacatttttttcttgttcatcacttcgtctagactccggagcgagtagagatggttctcgatacttatttggatgttaatttttttt

SEQ ID NO: 103948 - DNA, 385 bp, Zea Mays
tggataccaattgttagggttcgactggcactcgtattgattggtagtaatgtagcggaattacagcagaattaacagagagtagcaggaaggggaagaaggagttctaaggaactacaataggagaatcagctctctctgtcatttcctgcccttcccacgcgacgccagtggaagaagtatactctccgaacgccagtcatgccacccactcaggcccatggacccttgtgctcttgacgcgttgtctcatactgcgcctcggcccactcgcaggatcaacaggcggcccactgcttgtgtttccctgatgctgcttctgcaagacggctggcatatcgctctctgttgtagcactgctgacacgagagcatcattagcgctc

SEQ ID NO: 103949 - DNA, 574 bp, Zea Mays
atttcagcggcccaggtccagggaaaaacgcgcacgtgcccacgcccgcgctggaaactttgcagaagggaccttgtcttcttgaatatcccgacagagtccaaggcactatttaacatagtcgctgacaactgcagaaattaccctagacttctattccttctctaaaaacacccttggccatggcgcgcttgccgttcgcccctgacgacgcacgaactagccctggccggcgatggctgctatggctagtgatcagggaagcacaaccgactaaagatgacttcagaacattcatcaatttgacatgaacgcactgagaatggtatgcccacgagcacggcggaaaccgcaaccacaagctcgtgttcccgctccatcagggccgaattgagtgaacgggcaccacagtgagcttcacaagtgtgcaaagccatggaaacaacacttgaattggataggaactcagcagagtgggctagccacggacgggctgttcttcgcggtgcgacggaccaatttggggggaattcaaaattcgtgcgctctggcgaacgattgagggtgggattgg

SEQ ID NO: 103950 - DNA, 497 bp, Zea Mays
cgaagatcggccgtggaggccgagccatgttgtttttgggaagtcaactgtcaagcaagggtagatcgaagcgatgaagggcaaatattttcatgatatttctatagtgaggaccgaggggaaagcatcattcctcttcctgaagctgatgggtggttgtctttaaaagcttcatgaaagtcgggcttcgcttcccactacaaaagatgttggttgaagttctaaagacattcgaaatataccttcatcaacttaccaccgaagcctttattaaagtggggttttttatatgggctttgaggagtcaagggctagagccagatgctaggtgtttctgcaatattcatgagttatcctaccatacaaaggcaaccgtaaaggaacaatactataacaacttcggatgttacagctttgtgccccgctctgaggcaaattatcctgtgccaacattttggaagaagtggccgagctcttggatgaagcaatggttctac

SEQ ID NO: 103951 - DNA, 519 bp, Zea Mays
acagacagtggttgtgaagattgggagatagactttctagttgaggggatcataactttgcaggaggcaatgaacgagttggtcctttggcatcgatgcaacattaagttgggtgatgagccgatcttaagccgtctatcgcgtcataagtcaccaatgccgaattcaacaccaatgcaacagaaaaatagttcgatcattccataccccatggtgcaggaaaatatagaatcggcctccacaaaaaccgttgaaacaatcatatcacctcttgcgaaggaactcgatgaggggacgtagacaaaattgttcctcagaatgtcgatgcggacatcagaaaggaagcaaaggttgacaccaatgttgaagggccaactacttcaaagaaatttcatcagtgaatcgccactgacaatgtcaagaaaccgtcagaagctgtgacacgctacctggaaaaattgaagagagttatgatagatcaatcaaaagcggaatcagcatctcatggagtacgcacac

SEQ ID NO: 103952 - DNA, 340 bp, Zea Mays
cgaagtgccaaagcttattgaaagtgcagaggctggcccattagtcacagaaacaactcctgcgatgctgatcgaagctagcgcaggcccgatcaaagagccagaatcagaaaaggtagcagaacaaccaaaggtgctgaccccaccagccgtaacagggctgtcgaagccatcgagcactacaacagcgactccaaggaaaagaagaatggctagcgttttagatgctgttttggaatctgtgaaagcaccagtttcttcttctgccaaagcatctggggaaacatctggagacacaaaagaagcaactatcgcaagtgcggctactgttctttctaaa

SEQ ID NO: 103953 - DNA, 368 bp, Zea Mays
gcacccgctcctacctccgattagccaccagagagctccaatttctctctctccccaaattggttttccgcatgccgtgaaccaccgcgtcgtagccagcccattgcaggttagctcgagcctctttaattgaagttctagcttccatcatgtcccctgttgctcacagaaccatccatttgaactagaccatcttgaatcacccagaacacgttgagttatctccggtttccatcgccaccatggacagagagattaggagctagagctttgcaattaattgagggattatgatcattaagggtagaattaggtgttagtcacaccggagcaccggtcattgcgttttccagtcggtataggctcgc

SEQ ID NO: 103954 - DNA, 767 bp, Zea Mays
gtcgactatcggtagcttctcaagaaaggagctattgcgtcattgtaaaacagggcattctacgttggtaaagttgcgttgtccgtatgtgcctcagtcgtctgggcttcccaggtcgctctttatggtgggcggcgaagagctctggcaccatcattgtcgtctctgtgtcgcgccgaccccttaccgccgtagcctggatcttgacgcgatccgtcgtgttgcgggtcctgtaggcggccagtgcacttaggcctaggatcgatatgtcttgagtgggtcgcagacctagacgctcatagatcatgattggaaggtggaccgactctccctctgtagctcggtgctaggcacagttaatgcaatcggtcacatacgacgggtcagtcctggttcaggcatggaatccacttgagtggcttcttctcgatctgctcgacccccctatttggctccacctcactcgaccccgggctcagtgcctcgggactaaccgagggcaggtccttctggggcgaacctttctcttgccttctactaactagtgggtcctaggggcccgaggatcattttcccaacagtaagcaacatgtgttcaagcctccctgtcccggctccttcccctctcccacaacgacaatggaaacgataccgacaacagggatatgagcatgtaggatggcggaaagaccctgtcgagtcaggagagcgcgaacacgacgagtggcgggttgtcgagacacgtcaccaggcgagggacatagttg

SEQ ID NO: 103955 - DNA, 824 bp, Zea Mays
cgggtatcaaacacatgctctatcactcgcatgcgcagcaggctttgcattcacgcgtgtgcacatgcagactttgcatgtagtggtggcatttgcatgtacggttgcatgcgcagctttagttgcattcgtagttagggcgttcgcgcgtgtgcacatgcaggctttggattcacgtgtgtgcacatgcaaactttgcatgcagcggtggcatttgcatgcacggttgcatgcgcagctttagttgcattcgtagttagggcgttcgcgcgtgtgcacatgcaggctttgcatgcacgcgtgtgcacatgcagactttgcatgtagtggtgacatttgcatgcacggttgcatgcgcagctttagttgcattcgtagttagggcgtttgcgcgtgtgcacatgcaggctttgcatgcagtggaagcatttgcatgcgctggtttagttgcattcgtagttagggcgtttgcatgtgccggtttaggggttgcacgcgtgcggcgtggtgcgtatgagatttgaccgcggcgggcgggacttgcatgtacgcagaggacggggcttgcatgtatatagaggcttgcatgtacgcagaggacgggggcttgcatgtatgcagaggacggggcgcgggtacgaatctagtctacattagcctcttaatagatagtatatatagaagatagacagatggcagagaaacatcctctatatttaggtaacgtttttcgaaaatgttgtaagtgagaaaaactcttatatatttagcgtaccaaacccgttagaggtttctaatggagtcggtctaatggcgaggcttga

SEQ ID NO: 103956 - DNA, 438 bp, Zea Mays
ggaggccatggggtagcctgtaattctgctgctagaggagaagcatcatcgtaggagtgaggagtcctaggtcagcaggtctttcgttgatggtcgaccggcaccggtaaaccacctcccctgccccttcttctctctcccactttgaagcctgaacgtgaagcgctctgcactcaaactcggtaggctgctagtgatagggttctcaacttccagatccagagatccttgaggtcaccgacgctggcgacctgtagcagcaaagcagagtagtcgattcttagatagagtcgattagacgaatggggacagcagtccgttggtgcgcgcaaggtgttcaacactagcacatagaattttagtcaacaactagtcaactattgtgtgttattaaatattgtttctatgatttttcagagcaaatgagaaggtttttcc

SEQ ID NO: 103957 - DNA, 346 bp, Zea Mays
gttctccaacaagttttccacctccatcatctctcatcgaaagatcgggcacccttctacccgttgggtttatcacttcgccccaacttggtcccggaggcatcctaaactctcttcggcaacaccaccgaagagcagcgcccctggctggtacccgcaagatatagcatagtccctcatctcttctttttcagccttagacaactcttgcccaattatgttttgaaagttgaaatttcttttttccgaagcatcttcggcaagctccttctctttttcaggcatcttcccccttttttcaggcactgtagccggggtttcctcagcagctgcagcagtttcttcc

SEQ ID NO: 103958 - DNA, 427 bp, Zea Mays
accgctgctaggctagaccgtccggcctcatgcccttacagtccgaccgtgtgcaggggcatgggttgttcccatatagttggtcgacgatgtggttggctgttataggagttcatcggtatcccataaaggggctgggattaggcatgcccatttgtagccgatgggtcctgtaggtcttctttagtgtggcatagtgtgatggaaaattagtaatagtagatttatcaaatgcacgtgctagcctcctataatcctcttgtacacccgtaagatttgttgcatctgttctcgttgttcttctacgtaagatcgaagagcttggatgtcgtcgggtttacttacaacaggtacgattgtagcaggacgtagactcgccaggttgtattccttctgtcggataagcttctagttttggtcgaccctg

SEQ ID NO: 103959 - DNA, 558 bp, Zea Mays
ctctgttcgtctccatagcctttccttccccagcagcgcatactattaggtggggttttctatcttgtttatcttggccggtttcaatgtccggctccaatgtcgccgtctccttcgctcttcttcttaatcgtgaagagatggggtccgcctgtgtcggatctacaaatggcagagttgttttttttttcccaaaaccgcatactggtagttagggttttccaacctctcgatcttggccaccgtcaatgtcgctctcgccctcgctcttcttacccgcgacgagaggatgtcagtctgtgccagatctaccaagcgcatagtttcttcacaggcttggagaccgaagtagcgagtcactgcagtcacacaaagtcggccaaaccctgccattgcagtctgagtcactgcagtccgagtccctgcgatcacacaaatgcacggccgtctgagtatgagcgactagcgattcggccaaaccctggcaccggcatggcagcagctcttcgtccttcggttcgactcggtcccaactgctggcctgcttcttgtgccgac

SEQ ID NO: 103960 - DNA, 551 bp, Zea Mays
tgaggttgtttaagatggttagatattgtttgttctctctccatttcatgtttacttctaaatcagtttatccaagataggtttgtgtattaggattttttgtttattagttgctaggaaagtttggtttatatttgttatgccaatttttagtaggtatatacaaataccgaggccaccactaccaactacttggtagccgtgtgggaaagtgggcttctttcgctgtgaatacagatgtttctctctccttgagacagggaaaacacttaagagcttatttcattatttcaatttctattgagtgatggataaagcgtatagcgtagatttagcgtttgattatttcaagtttaaatgatatttgtcatgatcaatacatatcactaaacattgagttttttattaaccttcttcggatccacatctaacccatctcggtttatgatatggcccgagcacaggacctcgctgatccataactcacattttctcagcttggcatacaactaatgttcccgtaacatttgcaatatcttcctcaaatggtc

SEQ ID NO: 103961 - DNA, 500 bp, Zea Mays
gccgcaaaagtcgcccaggggtgcagcgagatcagcacaggcgtgcgaatacagccaacatgccacattaccatacaaattatagttacatacacacggcgaaggcattatatattacatcggctcaaccttcgggatgatacccatctccgtgtaattgaacaacattatcctcaattcctcaccctcaaaaagatttcatagatccccctcacctatgctcgccccaatcggcgaggacaacaattctcgtttaccaatccggtctactcgaagacggccacgctccatcccaatacgacagcgcctaccacttcacgaaaacttacccacactgtgttttgacaccacccttcgccgcctatactcagtactcgcactaggaagatccccggcaccctccacacgcggcgaagactgcgctgcggccacatctaacgcagcaaaataatccaagccttcatccgaggacttctccgtccaggaaaacgaactcccag

SEQ ID NO: 103962 - DNA, 649 bp, Zea Mays
cgccgttctttggcgacgattagcgaaaatgctgccctcccccctcacaaaagaactatgatggtcatatttgtggtgggtaaatattttgtgtacagtgtatactgtggttgtaacgtgtattgtgcgctgaattgcgattggtggcatctttgagccctttgtgttgatgtttgtttgtgatgatttcgtggtatttgttgtgcctattgtgagtttgctgcaaccttaggcgattttggtgtggatggacatgtacgtgtcctagacaacttcgcaccctgtaggtgatgctgcgcccttgagtggcttttgctcgggcattgtgcgtctcatagacgactgtgcaccatttgggttacgcatctgttgtgcctatccggctgcacccttaggcgacttttactcggatgaaaatgtcttgtagaagacttcgcactctgtgggtggtgtcacgcacttgttgtgcttttctggctgcacccttaggcgacttttgctcggatgataatgtcttgtagaagactttgcaccctatgggtggtgtcacgcacttgttgtgcttttctggctgcacccttaggcgacttttgttcggatttgtcgcacgcgatggctgccgaggcttgctattgcggtgactgttttg

SEQ ID NO: 103963 - DNA, 603 bp, Zea Mays
cgctgacatatctcataggcggccacatacttagaaacgtcaaccttcatcctcttccaccagaagttttgcttcaaatccctatacattttggtttcgcccgggtgaacggtgcaaggcgttttatgagattctctcaagatatccatcttcacctctgatttctgaggaacacaaaggcggcccctaaaatgaaccaaatatttctcatcaatggtgaactcatggggtttaccatcgccgaccctctttcgagcttcctgcaacaaacgatcctgctgctgagccacgcgcactctctccagaagggaggattgaatgagcatccgagtctcctctctagcagtgtcgacatagcacaaagcaacccccatacggtccagatctgcaatcaaaggcatggccacttttggaacaccagacctgctaagggcatctgccaccacatttgccttccccgggtgataatgaatggatagatcacaatcctttatcaactcaagccaccgacactgctcaaatttagctgtttctgagtgaaaatatacttgagactcttatgatcggtgtaaatgtcgcaagattgcccataaagataatgcc

SEQ ID NO: 103964 - DNA, 616 bp, Zea Mays
catatcgtcgtcgaggagaaagtcatgggaggcgtgggaggaggcgtctgaggtggctgcaaaggggaaagtggtctcgtcgaatatgacatggcgagaaatgatgatgcgacatgtcgatagatcgaggcaacggtaacctttgtgcgaggggggatatccgaggaagacgcatgtcgtggagcgaggggtgagcttatgtttggaggttgcttgcatgttggggtaacagaggcacccaaaaacacgcagatggttataggttggtggctgattatgtagacgagtgtatggaatgtcatgctgaatggaggaggatgggcgcctattatgaaggtagcaggccgtcaggagtccctcggccgaatatgcgggggatagggaggcatggagaagcatggtgcgaatggaattgttgagtgtgcggatgatgcgttcggctttgctattttggggtgatgtgtagggacaggaggagcggaggtgagtgccttgagcagcgaagaatttggtggtggcagtgttgatgaattcagccccgttgtcagcctgaaaacattttatgggagagctgaattgtgttttggcgagcgcagcaagctcaactaagtgttgg

SEQ ID NO: 103965 - DNA, 441 bp, Zea Mays
ttgtgaaacaccaaaaggcccatcaagcccaactgactaaaggtgatggtcaggctattcgctagtatgccctatctagtcttgattatggcccatctctagtgaaaggaaattagagaaacgtattaacatcagggagtcaatcgatggtctagtagtttccaaggcatctcctgttggctaaagatccactaccttttgatctatcaccatattttgaattgggctattgtgacatcgcataaagctagagatggagctggcgacgcttcggtagtcctaggaacccctcaacctgttctctctaaataatattgtagatccttcaatgttaaataacatggtttgccaaagttcaccggtgatagactgaacatgtggctcttccatagcagcatgcaatgaaccccacttatcttcccggaacagtgatgagatgac

SEQ ID NO: 103966 - DNA, 377 bp, Zea Mays
cttttcacaataatagccaacatgtcaaccactatattgaaaagaatcggagacaacgggtcgccctgacgcagtcccttcttagtctcaaaagtattccccgtgcaattattaactttaatggctacatgacctttcttcataatagcgtccacccaggcacaccatttatcatcgaatcccttcattcgaagagtttgtctgacaaacggccacttaaccttgtcatacgctttttcgaagtcaatcttaaaaacaaccccatcctgctgcctcctatgaagttcgtgaagggtctcgtggaggaccaccactccctccataatattcctaccaggaaggaaagctgactgtgtgggactaatgaccttattggc

SEQ ID NO: 103967 - DNA, 376 bp, Zea Mays
tagatgggttagaactaaacatgttaggagaatggaaagaccacataaacttagcttttggcacaaacttttgaactaggctgtagggtgaatctcttagtatattctaacctgggaaaaacctgtatgagcaatgcaatgaatgaatgattatattcatttggttcaatataattttgtttcattattcccctcatgatatgaagtcactacttgaaatcttgggtcgaagtaacaacgacaaaatttctgtttttagatggtagctagacctcgtcgtggacaaaacgagcaagttcccccaccacctcccccagctccaacgatgcaggaattatggctcaacagaatgaaatcctgcggcacctggtgcaac

SEQ ID NO: 103968 - DNA, 352 bp, Zea Mays
gtgcaatccaaaatatggaaagctaggtctatgagaaagaaatagatagggaccctaaggtcagtaactaggtaacgttgcctaagaggacaatgaggagttaaagatccaaactatacttacactactctgcaaagaatttttcatggttatcctgctgataaacaaacacaagaaagaacttgcttcaagtgaattctaaaagtttagagggctcctagaggtgattggtggaacacctcgcaagccagctatcacctatgggcctaccagacgacgggtcgggatacataggctgcactcttgttgtaaccaagaggggctaccaaccatagttgtgtggataggatgg

SEQ ID NO: 103969 - DNA, 642 bp, Zea Mays
tatgaaatttggagataatcgccctgcaagtcgatgtgtcagatactctgaataggcctccaatggtatagtgccacacaaatatcaacagattcagggaatatcgccgctggtgaccctacgccacgattaacgtcggcgatgtgattcgtgctcactatgcccggataacgcttcagggttaaaagatcttcgccgtggatggtgccaggggctggccgctgtacccccttgccttacagccggctcagataagctcaccggagttggctgcctgccgatcgagtgccacgtgccttgaagcttcaccacgtcgcagtaagccgctctatattgctggctcgtcgccggtaagcctgccacggtgaaagacacgcaactattgcgccagtgatcttccctatctccggccgccagcacgccatgaccaaattgagagccaccgctctgggatactataaattgagcacacccctagctctgttaagtcatcacgaagccaaagcatccgctactgcctccgattagccaccagagagctccaatttctttctctccccaaattagtcttccgcacccgtaaacacctcgtcgtggccagatgcctacaggtcagttcaagcatccttgcttgatgttcta

SEQ ID NO: 103970 - DNA, 1101 bp, Zea Mays
gttcatgatgctttgttaatcggctaacttatggcattagctcaatattgactgcgccctgacaacacgacataatatttgagccgtatgaacttggctgcgtcatgtgattgctatgtcgcactctcgtttaatcggaccactcccgttgagttggacctccatcgtcgagtcgcatatttttcgcatgccctgtaggcaatgtttgtctgtcgtgatcatcgagtcacagttgcactggttgtgaacgttgcgtggacttatcgtgtactccgaccatcgagccacaatgcgcctgttgcgcttgttacggaggcttattgtgttgtcgtagcccagatggccgcacacgcattgacgctagatacgctagactttgtactcgcgtggattgtggtggcttgttcaagcccctaaagttaccttatgcgtaaccttcataaacaattttgtttggctctatattttatttgactgtgttgtgtggcattatatatttatatatcgccaagtggccacaacaactatatcaagctctatagtgcttggaaatctgggacattaaattgaaatgcaataaaacacagataagttaattttttgctctctctccttatgcataaaagttttacctgaagtaaacccaagatatataatgcatgaaagcctttttggcatagcagatctcacacattgggattctattagtaagcaaaagaccttaccaaatgaataaaggctataaatcttagttatatattgctcaaccagatgttggcacattgctatttgttgctgaatgacatgaagcgaactttaagataaatgactagtacattagcaacacgaagttgcgagtatatcgaaaggtaattttgagaaattttcataatgtttgtgtgaaaaaccattgtgtgttcccgtcgaaccactttactcgtcctatctaggacctctatgcttgtgttgcatacatctctcagaattttagatacttaaaatcgttgaattgacttgttatagtcctttgactggtatggtataattttaagccaaatggtaaaggtcaaacttgtagggacatataaatggggtttatgt

SEQ ID NO: 103971 - DNA, 552 bp, Zea Mays
ctccacatcttaggacttaggtcgggtgcactccgccacccggccgaagaatttcctctccgacagtatctttggacttgtcatgcaactggctatgttttgattttgcttgcatggacaaagattcatgtttgctgttatttgcgttatcggggctcttgctttgctctattagtcatctcttcactttaatattttttggtagcatgttaaacttaagaatttgggttggtaaagaatgccttttgaattgtcaataaactagttcatttcttttggtcgaatgtacatctgtaacgttatttacttgaatgcacatgttacttccgatgatatgatcgcatcccagcatcggtttgttgctcttcctttgttaattgccttaatccagtcctttaaacttccgtatatgtttgtgttatagatacctttgtccctccccggtcaagtttttttactatatcagtgatgaagatgatttatcttgcttgtcagggctaatggcatatctaatttgttctgcatttagctcgaggacctggaccaagcagc

SEQ ID NO: 103972 - DNA, 351 bp, Zea Mays
gctaggtcagccatagattcgatagtggacggttgagatcaggtgaccgcgtacctttttgcacggtcagatctgcgccattgccatgggatcagacgaatctgatcggacggatcggtgcagctacagggtagatgagatctgtgccatcgatttctgatccggtggtcatcgtcgtgtaccgattcacatgatgctaagtttaataggggtcgttgggtttggatcaaacggcctcgattctgtgataccccttcggtctgggattcttacaaaagaacccctgcccttctgggatatcaacctgtcgtccagagtcagctggttctgaggcttataacatttttacgc

SEQ ID NO: 103973 - DNA, 287 bp, Zea Mays
caggaggacaactttgttgggatatggcctgtcactaagcattacacttcaatcttcgagacgggacacttcccaaacctgttgtaggatgtactgcatgcgctaggaacctacgcccgacctctatatgacacaaggcgagtgtttgagcctccttgggcttgttactacatcactcgtgtgcatatcagagtgatggatgcaggagacagaggttttaggactctatcagcccatgagtctctaacgtcgttgtctacatacgctatttcggtcagcaatgctgc

SEQ ID NO: 103974 - DNA, 409 bp, Zea Mays
tgtgaaaccgtgtgaaccaactggccacaaatgccagctcctcatcctcgaggctctccacctgctcctctgtaatggtcaacaaagaagacaaagcaaacataacagtgggggttataaaaagaaccacctccagagtctagggatgtggtgggtgcactagggttctcaatcttagcctaggtctggtggtcaatctcagtggacttgagtttgctgaaaagctcatccacggcgactatctcatagttggtagactcgatgatcatcgagaccttcacctcccaaaccctccggtctagagcatgtaagaaattcagtgctctctcatgattatcatagggaagttgtgccttgttgtcacacatcttgttcacaatcgacaggaaccaagaaaacatcgtattag

SEQ ID NO: 103975 - DNA, 548 bp, Zea Mays
tataagataagacatgatgaccctagtgatgttaatgggggaacctagaagagagcgatccattgctaaggtcatgtgatactccctataataccaagtttgaagcatttgttttgaaacaaataacatggaaaatgatgatgtggcaccaaaaagaacttaaggatgatgatatgttgaggcaccccactgatgggtcctagtggagaaaagttgagagaatgtacctagctagagttgtagaggatgcgaggaacataaggtttggtttaagcatggatgacatgaatccttttaatgaaatgagtagtagtcagagcacatcatggcatgtgactagctttatgtatgtataacctaccttcctgtctatgcttgaagcagaagtttattacgatgctagggcttatataaggcacagtgcaaccttgcaacaatattcatgtgtacctaaatccattggttgagtattttttattgttgtgatccaaaagattgcgtacatggaatgagcacaaacaagaggaattgtatctatgagcttttct

SEQ ID NO: 103976 - DNA, 580 bp, Zea Mays
taaagtttgacttatatgctccaaccggagggaatgtttttggcaacctagtaacggtaaagagcttaggaagaacttattctcacaaaaatatcagtctattgtttagttgagaagaagtttaaccccttttctagatgggtattcaacttaacagtccccatcaaaaagatggtataccaaatgattgagaagtgagaattttaaatgtgccctagtataagctagagattgttagatttaatatgtgcatcacccatattttatttaattaaatcgtgttactcctaggcacatattaaatgtgtcccccgttcatggctcttgggaagactagggggcccatggttctcatgatgtctaggagcgcccatgatcttcaggatgtttgagggccccctatgcccgttgagagccctaggacgctctagggcacataggatgcctacccctgtgtcccttgaaatgttaagggggtctatggcaatttgggaagcaagggacccttaaggagctttggaatgtctagggggctcatggcctttgggtgccagggcctcttgtgcctcttaggatgtct

SEQ ID NO: 103977 - DNA, 689 bp, Zea Mays
attatgtgtatctaactcacaggaaagtcctccaaaaagttcaagtgaaatagagaaaaaaatagagaagaaaagctaattgcatcctatctaggtgcaccagaccagctacaatactagtccgatggtgcaccggaccgcctccgtacgtgaacagacgaccttcaggaattatatttttataatttatcggaccttgatcagttcaagtctggtggtgcaccaaacctcagcccaacaactacttcgcgggcgtgctagctacccaatggctaggtgacgtggcacccgatccggtagccgccagaagggaaaggcacccaattagatcatagagtccgactacatgactcagtctagtggcgcaccaaaccggtccattgtccccgatttatgtgtagtttcctggttttgattccaacgactatgagaggtcttggagctatacataggccctcccacaacctcagcagtacacaattgataccctaaggtagcaaataattgtagaatcattctctgtccctctctattatattttgtgttagttttagtgcttggcgcgtgatgtagccaaaacatagagttgtgcgactatgtagaaaggcgagcaagatcttgagcatgttattgcgttgtcgagctatcaacctgtgatagtcgcaattttgatatactacaacattgac

SEQ ID NO: 103978 - DNA, 463 bp, Zea Mays
acttctagttttgagacccaaatctaactttgacaattcaaaatttaatattgccatttacttattttcaagaaatatttctaagttaataaaatccttattaacgacatttatttagaccttagaaaatgtttttaataaacccaaaataagattgtgggtgtttacacattaacgccgtggacgggcactcccggtgcttccttgtccgctctgaggccgctatcgtgatcctcgaagctcgctgatgcttccccaacctttgtcgagttctccttgttcgtcgttcgcctccgccacgccaccccaacttcactagagttccgtcggtaactgttcttcatagtcatctgctagcgccgcttctacccccttagtgaggcctcagatacgcttcctttcttcgtagctttctcccaagcccttcctcggtcggcttggcctcccagagtgccgttctggc

SEQ ID NO: 103979 - DNA, 521 bp, Zea Mays
ctacttctcaccttcatggtgtttcctttcaaagcgcttgggtgctagcaacttttcctttgccacaatctcactacccttgtattttgcctttggcttcaaggactttgtcggagggccccctctagcctccttttcactaatcactcaacccctatctataattcttactttgcatttcctctgcaatctagcatcatgatcgacaatgaggttggggtagtctagatattctaagtcatatgctttgatcacacgattatgtattctctttattgccactcactatcgcactaagtagatgatctctttcacaatatagttgcataaaactttgttagcaactgtctccaccataatgagccactcattgctcggctttatgaagatgctgaagggattgaatttataaggtaactgaatcatctctcgagcttcaatctccttcgtgttgtcctcatcttttggcttaggtatctcctagccaactttcataggaaatacatggtaggcaatatgct

SEQ ID NO: 103980 - DNA, 291 bp, Zea Mays
cacatatggtttagcctcgaggcacatgttattctggcataggctttgcttggtcaaaaagttaggcaagatagtgcttacaacctctcgtagtcacatgctttggataatacttgtgtttagttgtaaactctgaaattcaataaaaattgatgaaacacaagtcccaggttcatctttagtatgatgattgaccgatgtttggggtagttcacctggtatacacttgttagcacttagttgatttcctacttgtaactcctatgtgctattgcagtggtgtacttcttc

SEQ ID NO: 103981 - DNA, 509 bp, Zea Mays
ctgaaggccttcaactttggctctatgagcttcggattgagcattaaattttgcttcgtctttcttcactctgtccaccaatgaaagtagaattttatctttctctatggcttcatttctcagcttgataacctctgaccgaaggttgccgagggctatctagcagctttcgtctttagcattcttctgcgccctcaaagcgttgctaagaattaagccctgcaaaaagaagaaagataatggatcatcacgagaataaaatacaagataacctatttttaagttcataacttccgtaccttcagactgttgtacgcaaggctgtctgcgaggtcatccttcgacatggctgagaggccagcttcaagcttcggaaagcccatattttttgccatctcctggcaaatggatatttctttgttgtctgggagacagtataagaaatcatcttcgttggtgccattgtacaccaaggcccccctcaggtatttcagttcccgagcgtagtg

SEQ ID NO: 103982 - DNA, 495 bp, Zea Mays
aggagacatgggttgcttcttccaatggctctttagaggtttgaggctataaatagacccacaaaccagccccgtcaacacaccaactcgcctaagactataatattcactcctaagcattagagaagcacaccaaagtgatccaagcacccatattcgcgagagagagctctgctacagttttgtgcttgtgttagttgatcttttggtgttggtctcgagatcttgtgtgtgtttcttcctcactcttgcttccattggatttctagctcccatcaacttgtgcaaggctagcaagagactccgatctgtggagatccttgtgaggagacaattttagtgaaatctatggtctcaagtttgatctttggatcacttgagagggttgggtgcaaccacgtcctttgggacaccacaatgggtacacaagctctttggagttgaacctcggtcaaacaaattgtcgtgtcttgtgttccttattttctacaattt

SEQ ID NO: 103983 - DNA, 457 bp, Zea Mays
ctatggtttcggaggaaaggggacatttccacttggcaagatagagctccccctctctgttagcgcaaaccccaatgcaagatcagagcaggtgaccttcgacatagtcgacatggtctattcatacaacaccataatgggcagagggtccatcaacaaacttgaagcagcaattcacgactctacttgtgcatgaaaattctaggccccttggcacaataacaaattacaaggaccaacaaactgcccacaacatcgaaagagacttcgtcctagagtagcacaacgtccattgcctcatctttgaggacgaaggccacactgttccatgtactgagaaagcagcaccaatcaaagcccaaattcaaagcaccgactaggccaaaaaagttcccatggacgcctcaataccaaatcagacagtgttaatcagcgaagacctcacctaagatcgaga

SEQ ID NO: 103984 - DNA, 366 bp, Zea Mays
cagccagaggccacaccttgaaagttatatgctcctacactaagtccctggtactaatgtagttgcacacatcaacaaataccgtcaagcagccttgcgatttttctgtattcacaatagcaagcctcctaagtccaaagctggatcggataggccactggattacatccttaatatcacttctttgactcaaataattcttcacataaaaccacttcttcatccatgaacctagccattttttccgaaaggttggcacatgatgccttgcatcagaccggtatacgaaggtatagcacccgaagttattatgatattgttccatcccggtggccttcgtctggtaggacaactcatgaatattac

SEQ ID NO: 103985 - DNA, 314 bp, Zea Mays
ggcgcagctgaatggatcatccggtgcgatcgtttgtgacgaacacttctaggactctaaactccttcatcctcaccaaggccatgtccaatggcaacagtcatcgactcagtacgggcagagtcaaacgattctcctgccagcagactgagaacaacgttcaccttagcctcatcagtgctagtcagcatctggaaatgggtctatctctccacttcaggaagattccggaatggagcaatgaaagccgcaatgtcctctaaggagggtcgcactctatggcccggactaccatcttgaataggttgttggaa

SEQ ID NO: 103986 - DNA, 358 bp, Zea Mays
gcaacctatatccgttaaattacaatgatactggcaacgtttaacatgtgttgcaaaccgtatacgtagagtaaatacgatcatagcaacatttaccatgtgttgcaactgtatgcgtagagtaactagaattcttgtaacgtttacatgcgttgtaaaccgtatctgtagattaattttggtacttaagcaattttgcaactatggccgacccgtgataaaatttaactcgcgggtctcaccgatatccgacccgtgataaaatcaggtcgggtacgggttttaactttcacccgcgggtcctggcggatatccgaaattatttcagttttcacttttccgcccactagaaaccggc

SEQ ID NO: 103987 - DNA, 277 bp, Zea Mays
gttgggtttgtcgttttagctttctgactccgcaactgtaattgcttttgagcttcgaccgtttgttgcaatcatcgctggaatggccgaagagaagaaaagcgtagatcccgcactccctggtttctacgaagccatggaaaggaccaatgttgagaaaattactgatgagatgttagctgggatgtctggagactcaagtgacagcgagggttttgatattgagagtgataacgatgatgttgaagatcagccatgaaggccaagtcatgttgtg

SEQ ID NO: 103988 - DNA, 715 bp, Zea Mays
aacaattcaataaacagtagtagaggataggcgaccaactttcaattttgtataaaaaatcgtacactggttattctgtttattaattcttgacgacaaataaaattcagtccacatcatggttggatctgtcagcccacatcatccagttcttagaaatcactcaagaactccacaaaacgcaccaactaagtatcacattaagcaacacaaaaaaggagacagaagaaagcacacatgtaaggcttcgacaaaaaatgggtagaaagtttgcttgtcagcccaaagagagaaaatcctctcattcagagtggtgcatgacttttgcatcatcattgcccttacaacctagcttccctttccataccaagaagaagaggaacaatagatgagataacagatcaaacttcaaacagtcaacacatgatgacaatcaaaatacagaacatagaagagaaaacaaattcaaatcaaacaataaaaataaaaacagaagaaatgacgacttggctggctccaacggacaaatgtggtgatgtcccaaggcaactccttagctgttgtgacagcatcgacagggtaggactggataaccactaagacaatacatgtgtattgactacctagtaaagcacaatttacgacaagacaaaccagggtatagaatgtagttttctagctcagaccaatgtgtcaacagattcttaagtctgca

SEQ ID NO: 103989 - DNA, 510 bp, Zea Mays
ggaaagtggatcagagagctgccgtatgttgtttggagcctaggaactcaacctagtcgagccctgcatggaaacacacctttctttatggtctatggttcggaagcagtgctacctgatgatctcaagtttggggcaccaaggttaatatttgaaaacatagcagaagctgaggctactaggctggaggatgtcaatgtactagaagaagaacgattgaatacggtgattcagttggcccaatattagcaaactctgaggcgctatcatgacaaggccatacgacatcgatcctttccagtgggagacctcatcctccgccgaattctaacgggggagggacggcataaactatcgccactatgggaaggaccattcatagtagcagaagtcactcggcctggatcatatcgtctcactcaaatggacggcacggaaattgggaactcatggaacatagaacatctcaggaggttttacccctacctatatctcaaaagctattgggac

SEQ ID NO: 103990 - DNA, 303 bp, Zea Mays
atttctgttgatcatcctaactgatcttgtttgatgacctctctttttcacctgaatctggtaatcattttccttgtgaatcatgttgtggccttatcatccaaatctctggatcctttaatgattccgccctattatctggttatctgctataacctgttctcaactatcggatgttgatcttgcctaagtctctcatttctggtcattctcatacccccttcttcgaggatcatgacactgttttgtcaatttttatctctaaatggtgtatccattgggttcaatggatttcattgttat

SEQ ID NO: 103991 - DNA, 733 bp, Zea Mays
gcctgtgcatcgctgcgtcgtcgagtagactgtgcgaaccaaggagagagggagggcaaaggactcccggtgtgcagcgaacctggagataactccctagagggcagggtactcttgatgccttgtcgacgtagtgtgggagggccgtgcgttcctgttctcttcgaccggcgtcgtctacacctggatcaccggtaagaataccatattcctttcgccaggatccatgcatcgtgtggcatcaggtgcagcgggtgatggggcataggatcgctcggctcggttagaggtaggagaaggaaagtatagccgtagatctccaaatggacatactggattagatccaaacataacggttcgccagagttaaccctagtcgtcgatcacgacacgtacggctgcgattagatgtgcttgctgtcggttcggtcagggtatggggtccgtccgatctagattcgggggtgcagatagttctcgcttattttaaatctggttcgccgatctcacgatcaacggctctggtagtataccggttggaatcaaatgatcggccggatctggtgcgtccgtttctaatcggatggctgtgggttgccgataccccttcatcttgcgaatcttgcaaaaacaaccctgaactttatatgaatgaacccgccatccgtgcggggagaatatgagtcttgggagaaattgcgagttagcccctgacatcttaagaaatattgtg

SEQ ID NO: 103992 - DNA, 319 bp, Zea Mays
tctgagatggagcgttctaatccaaacaatacaaagaaaagaagtaagtatttttggtactgtcgttagacacatcaccagaatctaagtggggaaaagggtttcgaacatggattagaatatgttgatgataaatttatattggcagagcaaggcaatgcatgttgtgccccatcatctgtgactcctagtgaagctcgtcgcatccgtgacatcctgcaagttccaagttcagatctggtcgccactgtatctttgaaatttaccttcacagttactattaacatgtcagcattctcagtgacaaacagagtcttct

SEQ ID NO: 103993 - DNA, 300 bp, Zea Mays
ttcggctcttatgcatgctccaagtaactcatcgctagtcgcatcaacacatttcggccagtaatcatttggttcgtcaaattggtctctctatctgaaggtatatttcaagtaaaccaatccaccttgactagaccctacagcagtctccttcgacatctcccaattatccacaagtggccataccctgtaggctatgtgctcttgaaccagatctctcgtgccaatgaaagcacaaacattgttgaaagccttttgacatgctttggtatcattttcaagcgcagtagtcagccttcg

SEQ ID NO: 103994 - DNA, 740 bp, Zea Mays
gagcgaaagcaacacatgtttttctcactcacttgcaatcagacaaccaacaagattccccaacatctatttttcggctctagcggcctccatttcccttgcttcctgtgctctcttctcattatccgccttcattctccttcgctctacacgcatcgggctatcacaatcctgtgattcggtatacctacacatttcctgtctgcgatatttgatgtaggaatcgaccagctgagatccacatcacatcttctctcccacgagtctcttcgacctaatcgtatgcatcaccttgtctttaccaaagaatgtctcccaattgcattttctggtctcctacacaaaacaaacaataagtacggatgcaacaatacatctcatgccatcaagaacaaatgtcaaccccttcgtaatctaccatatggccacaaaaataccctacatcaagctccgaaggaactagtccatacttagtttcaacacaacatttgcagagtacaggattggacttgcactcttccgcccgctcattctttttcttctcctttgcctctggctcaggccaatgggacctaggcccatacaaccactctctaaaatacacctacgtccatcgtatggttgcaggaggatacattagtaaatttgtggcaaaactgacaaaattgtgaacatatgttgtgcacttacataattactattgggacacaggaagtactgcgcagtctccagatatatca

SEQ ID NO: 103995 - DNA, 333 bp, Zea Mays
cccgagtatgctacgatgttgccgccctctggctgatgtagcgtgaacaaggtgacggtgattgttgttttgatacccataataagctaattctgattttggttctatcattgtactgaccgctcacctgataaactgagagttatgagtatggtttcaggtcaggttatgtacctatgttccactctttcatcagatcagaatttctttagatagaaaggtttacgtgcaatggaatccatattttcatattgcaaagtacttagtttattttgggtgctattggtagtttttatttgtttttctttttctttccttctttggctatttttt

SEQ ID NO: 103996 - DNA, 441 bp, Zea Mays
aaaaagtgcagggtctctttaacaaaaatccacggccaaaggggtacggtgaattcttggccgttggattagatttagatggccgcagatcaaatctgaaccggtatccatcaacggtcgcgcaatcaaatatcaacggctatgattttaaactagcgtgatctaatctgctctacccaaatcgaattggacgggcccgatgttatgaggcaaaggagtatgtggctatctaatctcaaccgttcaagtttagatcagtggtccacggcaatcctaccccatctatccctcttcttcggttcctggacgacgacacgacactccctcacggcggagctcgccggcgacactcaaaaccaggttccaatgcaccagccataaatccacagcgtgctatacgtacaacagaaaatagcgaactcggttgaccaccacttatca

SEQ ID NO: 103997 - DNA, 698 bp, Zea Mays
gttgatgttactaaattcataatatgtagttcattctatttgagataatcagataatagatttttatgtataatattagtcaaagtgccacatatgtttgttttcctcaaacagtaaaaaagtgtcgtattggaggcctgtcaatgttcctaatgtactctatatttacaattagaggtttggttgcacaatttatgaataaaaatatgaattcgaaaaatgaatggacggacttcaaatatgtaacataattgagctccaagattgacaatgtccttttgttaactacatcagccttgcatgcactcttattttgagccgtaatctttaactttgttgacttgtggaaaatgactgtcatccgagcactcggtgcagtgagttcctccagtttagctaaatcacctatgtcacatatgtaattatttcacttttccctataccttttagaaacaaataggtcactatatgcttgcttatattcaactaaccttaagatgtttttgtctgttttctgtagtcatggacgcgagggtcactttctactagttatagtgtctgctcttacgaaaatagtaaatgcatggctgactaattttactggtttgcactttgtagtaaaaggggaagagaatgaaagctgctaaacgtattattttggtcaatggcaaagtctacgtgtctcacttttagctccg

SEQ ID NO: 103998 - DNA, 387 bp, Zea Mays
ttcaactcctggaaggcttgttctgcctcttcgttccaagagaagggcccggacttccgcaacagcttgaagaaaggcagtgccctctcggccagccttgaaatgaagcggccaagggcggctaatgaccctgtaagcttctggacgtccttgatacgagccgggggcctcatcgcctcaatagctttgatcttctccgggtttgcctcaatgccctagtacgaaaccaggaaccccagcaactttctagtggagacaccaaagacgcatttgtctgggttcagctttgtgcgggttgcccgtagcttgtcgaagaccagggttaagtcttccactagggtcgaccctctcttagtcttgaccacgatgtcatcgacgtatacttcc

SEQ ID NO: 103999 - DNA, 631 bp, Zea Mays
cgggtagtatttgcagccgaacacccgtagatgctcatacgccgaaggagtgccatgcatggcaaggtgcggcgtagagaaggcaagggtcttggttggcaggatgttaagcagtcctgttgctgtggagagtgcctcaacccaatacgagggggcatagatgcctggaacagaagggagcgaacaacattattaatggaccgaatgatgtgttcaactttaccgttctgaggtgaggtgtagggcagtacatgcgaaggtggatgccctggcagagaagaaaggtatgagcactggagttgtcaaactcgcacccgttgtcacactggatgaccttcaaagtggtgccgaactgggtagaggcgtaggtaatgaaggtcgctagcgtgctgaaagtgtcagatttaacacgaagaggaaaagtctacatataataagtgcaatagtcaagaatgaccaaataatatttgtaaccagacacactaaccactggagatgtccacatgtcacattgtataagatcaaacttattaggcgcacgagaatgagaagcatggaaaggcagtcgaacgtgacgcccaagttgacaagcatgacataaagttgaacaatcctctaaattgaaagtgac

SEQ ID NO: 104000 - DNA, 462 bp, Zea Mays
gctggcccaagtgacttcagcattcacagcacttagcacaagatctcacctcacattatattgtcctccgccaaagccaaatctctctaccatctccactgaacaactcctacgccattcatttcagggaaagaaaaaaaaacacctctgaagatgcaatttacaattcgaaaacagtcaaatagaagttgcaggctcacatcatgtaggaccacagtttgcaaaatttccataaaggttacatcagatagtctcaataaatatgcctaatttctgggagattaataacgtcgttcaaagtcaccttatttttgcctggccattaacaatttctgaaaattctcatggctcataattgtgcgcagaatgcatttaacctagtttattagcgaaccttccgactccgccctgtccctgtcacgtccgtcaataaaggccctcatcacatcaccagctttgctt

SEQ ID NO: 104001 - DNA, 738 bp, Zea Mays
cgaccctgtgattaccccgttgtacagtgcatgtcgagaatatagttggtaactggagacaacaatatttaggtccaccaaccctcggctacctctataaatactccatcctgtagccgcacaagacacgcttgacaagacatttgcgctcctagcctgctgtttttgtcgtgccacctgtctctttgctcccgagtgttaaacccgtgatttttcgtgccaacatttgacgcccatagtttatgctccgaacatcaatacccacgatgactcccaagaaagtgaccacagggctagctcctctctagacgaggccactaaggcggccctcgctgataagaaaggcaaagtagccctcacagacaacaacttgccccttgtagctgaggacaacggggccgaggcaatcaacagcatacagccttggaccgaggacccgcctaccctagaaggcaacattcacacttgcatctccgaagacctcccccgcaatgacccgccacctggattcgcacctttgggattccacctagtccaaggggaccaagacaatctcagcagaagaccaactaaatctgcatagtcttcacatcaaaactggccatcttcggagacagggaggtactcacagccaagagaccgagaaccaacatgcaagtcagaatcagacagttgatcatggaataagaagagaagccaagggcactggaacatgaaattgcagaagatgcagcacga

SEQ ID NO: 104002 - DNA, 771 bp, Zea Mays
agagtgcttgcaacgtctctggacaagggagagggcaagtcttcgtccatgaatgatcctgacgataatgtcataatgaccctgaccctggccttgatctccgatagagcatgcaacataggggaatgatggtcagggtcgttgaccccagaatattgatgcatcggcctctactaagccgtcagaggctagatccagcgatgcatgaaagctcgcactagccacactctggagaggcctcgctacttcaacgtcttgaccattgttagtaggttccctatctcgattttgaggctcacctcccctccacgctgccattcatctgaggacaccggttcatagccaatgaacgacggagcacccgtagccatgttcctcacatagaaccactcgcccctcatacccacgcaagagggaagagagatcttgaaatactccgccttctaactggagcaaacttgaatgacggttgatctgatgaacagttgatcgccacggctcagggacacctgcgcactaaagaagtactaccacaacctcaagtggggataaatgcccatgaacgcttcacacaacaaaatgaatcacgctatgtggaggacgacattgggatggaggttctagatctctacctggtagtagtggaggagcccgcacatgaacagatgaaagggcaacccgaacccacgctcatataaagacgcaagcatgatcacttcatcatccctcgggtgaggcacctcacccttggcttctagcctccacctcgag

SEQ ID NO: 104003 - DNA, 507 bp, Zea Mays
caattatcaaatacataaaaaaatgaggaagaaccagatgacaaggccacggcagaacgcatcgtgagagagtcagcccactataccatcatagggggtctactatatagaagaggtgcaggaggagtcctcatgaagtgtgttcactcggctaccggaaggcagctgctggatgaaattcatgcggggcaatgtggcgtgcatgcagcatcaaggacatatgtagggaaagcttccaggtccgggttctactgaccaacaacagagaatgatgcagcagagttggttcagaagtgtgaagcatgccaattcttatcaaagcagcaacacttacccgcccaacatttgcaaactattcctgtaacctggcctttcgcgtgctgggggctggacatgattgggccattcaaaaaagttcaagggggtatacacacatactcgtcgctattaacaagttcacaaaatggatagagtacaagcccatcgcctctttgacctaagcaaaag

SEQ ID NO: 104004 - DNA, 424 bp, Zea Mays
tgaattgaggctactagcgacgagttgcttggggcatataccagacccgaagatgatgccttgtcctcagccttcgggggtcggggcaagaaaagattgaacagggtttttgatgcaattggcttcatatatcctgattactgctaccccttgagaaggcaaggaaaaaagaggaaaattgccgcttcggccaccactgttgtaccaaagggcaagagaataaaggttttgacccaccggcctcgatatattgaaacggctatagtgcctaaattttgtgaggggacctcctccacagctaaagcaaaaccagatgctcccgcagctcagagtgctgaaggatcgattgtagtgccgaaggtacctatagtcgggcctttagtgcgtagcttcggagctacatcaaccttcatctcaaccatgc

SEQ ID NO: 104005 - DNA, 1094 bp, Zea Mays
caaagaggactggtgctccccaaggagatgagctgggacgaatgtaccctttttgttgaagttctgcgatctggagttttagttctgctaatttagtgggagccatgcggtatggtctctttgtgatgggcgcagcgccggggatttgatctatgtagaactccacttctctttctggcggcattcctagcaattcttccgggaatacatccatgaattcttctaccacagatatgctttctgctgctagattaaacaccattggatccttggcgggtggctgagcctgacaagaaactgactttccttggtggtcagtgagaagaacggtcttatttgcgcaacttatgatgcccttgtgtttggttaactaatccattcctaagatcacatcaatcccttgggatggcaagatggttaagtctgccaagaacactaccccacttaaaagaattctgacttgggagcatttgagctggcatataaggtctaaccctggggttcgggtgaccaagggaatttataggtgtgtagagggaatgccatgtttctccataaaactagtggctataaacgaatgggatgctcctgaatcaaaaagtacagtagcgggagtaaattcaactaggaactcaccgagcactactctcggagcttgctgagcctcttgagcatcgacgtggtttactcgtgccctgccatgatactgggtcttgctctgctggctgatggaggagggtgccttggagtcaggcgctggggcattcttggggccattcaccgagttggagtaagtaggtcctgatgccttcaactgggggtagttattcttggagtgactggggtctccgtagtgccaacaggcgttagctggtggttggttggttgtgactgagggggcctgaaaggagctctgactctgctaactgaaacgtgatggagtgggttctattggcttattgaagcttggtcccttgggtggaaacccaaaggatcgagttctctggtgccggtcttgctgctgagctcggaggacttggaatttcctcttgaggtgacctttttcttcttcccttgccctttccacttgtatg

SEQ ID NO: 104006 - DNA, 377 bp, Zea Mays
ccttggatcggtggcagatctagggactagtagggttggattgaaggagcatccagaaatggcactgctagtggagtatatccgagcgagcggcgagggttgcggtgcggagggggaaaaacgaacctttggcgcttcttccccgagggcaagaaggcatgatcctgctcaggaagtttttgcgcctgggtgctggacttggtcctgtagcccgttgcctccttccctcgactcgatccacaccgatcaatcggtcggcctgccggcggcctggtcgaggctgctggttttggctggctggagtttgactggatgcgagagggaggaggggaggaggattgagggaggaacggagaaggagagccctagccccgccg

SEQ ID NO: 104007 - DNA, 492 bp, Zea Mays
acaagcacccaacacaatactaactatgttacacaccacccattatcgatatagtcatcaaaacacctctcagaatatccgcaagctcaaaaccaaacttcaccacataaatacgactaatttccgtttatgcgcacaacataacactacacgagataaggcgccgttataaacactttacgcacaaccacaatatcatgaaaaagaaaagaggaaattccataaacattgtggaaccaaacacaggcaacaaccagaatctggaggtcaccatcgcaacgctctgcgcgaaaaataagaaaatcatcgtaattaatatttgtccaatctgtttatcaactagacggtagtagaagcggcttggcttaccaagactgcgagcacaacaacgatttccgatttaatcaatacgccgagcacctggtgggcgacacatcggagcttcattttcttctccatccaagcatcctggtatttctcctccataatttc

SEQ ID NO: 104008 - DNA, 775 bp, Zea Mays
ccgtatccctttgctttgcggccggctcagataagttcaccgggattggccgccgtcgatcggatgccacatgccctaaagcttcaccacgtcgtcgtaaaccgctctatagccctggctcgtcgccggtgagtctgccacggtgaaagccactaatcgtgtgcgccagtgcccctcctcctctccggccgctgcgcgtctccgtccaattcactggccaccgctcaagcacgctataaattgtgcacaccgtcggctccgctaagtagtcaagcacataatccaacaactcgtgcctcaaatcatccactagagcgcgccaatttcaaagttcccccaaatcggttttcaccactgtgaaagcatcctcgccgtggctagcttgttctaggtttgtttatactctctgctctcttgtatcagcttccttaggttctcctaatgctgctcgatccattcaattgatctagactgccctagatcaccgggaacatgtttgttcatccattgtctgcgatgtctccgtggactggacgaattagagctccgctagtgaaattgattgaggggaaacagttattaagggttgaattaggtatcagccatgtgggagcaccggtcatcgcgtatcctggccagtgcaagctcaccggagttcctgctccgccgtccacggtcgtggactttcccttgtgaagaattagaaccttgggggtctctgtgcaaatgtcagcgagacagaggaacagtggggagggctctttataggtatttc

SEQ ID NO: 104009 - DNA, 393 bp, Zea Mays
gtcagatcaggatcggagggcccaaatccatctccatataaaccatcgtgtagctttcaatatgagccctggattttctctcatttaacatgcaatctaattccatagaaagaacaatactaagaagtccagattcttatgaattgaaccatggtcttttgtggaataaaatctgccatccaatttctgggataaataaaatacataaaccatgaaatagtcttttagtcattttaagtgtaaaatttatataaaatatctaggaaacttaggaaattcatatattctctgtttcaactccaactttattgtgtggtttgtttccatctttggtgtactactattttattcattatttgcctatatgtatgttttgctgcgaatagaagcgag

SEQ ID NO: 104010 - DNA, 443 bp, Zea Mays
cctcaatcaatttcactagcgaagctctaaatcatcgagtccacggggacaacgcagacaacaagtgaacaagcgtgttcccggtgatctagggcagtctagctcaatcaaatgagtcgagcagcattaggagaacctaaggacactaaaacgaacgatcagagagtatgaacagacctggaacaagctggccacggtgagggctctttcacggtggcggaaaacagatttggggagaaagagaaattggagagctgtggtggctaatcggaggcaggagcgggtgctctggtttcgtgattatctaacggagctagcagtatgcttaatttatagtgttcaagagtggtggcctccaattttggattggcgcgctggcggtcggagaggaagaggggcactggtgcacacgattggtggccataaccgtggcaacctcaccg

SEQ ID NO: 104011 - DNA, 307 bp, Zea Mays
gtaggggcgggtgtatggccgttggattaggatcgtgtggatcagggcgcatgccagtagggtgatgtggtcttctgatctgaaccgtagatctagatccgagggccacggatggatatcggcttcattaaatccttacccttgatcttagatccagtggccgtaatcgcatacctcttcatttattggcgatctgatccagaccgtcagatctggatcgtgcggccctagatccccgataccccttcgccgtgtacatttattaaagagtccctctgttttcggaaaaccaacccgcggtcctcag

SEQ ID NO: 104012 - DNA, 573 bp, Zea Mays
agggctgcactgtttaaaagggggctcattctagcctcgcgaaggcgccctcgttggctcggacagttctgaacgacgacagtcctggcaaggttgaaggttgggcttcatagggcaaagggtaccacgcgcgggtgaaggcagcatcgcccaatggcggggcctaggccgcggtctaccgtcatttgggcccatttgtaagcccctccatggggtaggattcatagtacgtttaattagactatacttaacatcgttgtaatgaccctgcaagggggaatattctggagcagtaataggtaaccgggggcataacagtatttagatgggcacacccacctactcgattaactataaataccctcacactgtacatggatgagacacgcttaataagacgctacatttccctgcttactgttttgttgagcacatgtgctccctctttctcgagtgattgggaccacctaaccacctatcagttagttccaatatgcggttcaggagacaaagaagaggaagaagcaaatgatgaaggtgacgacaaaacgccgcaaaattctgaagataaag

SEQ ID NO: 104013 - DNA, 359 bp, Zea Mays
gtctacccataatcctacgctgaggtacctagagcccctggccttgtatcccaagggcggtccggacctaggccatctggggctcagagtcagagcccctaaatgtgctaaggacccatggcagttatgtgtaatgttgtctcatgaccaaaggatgtgtcaggtccactagggatagtacgaccctgaaagattggccccacatctaagtgctcgaggataagtacatagcaaaagcttaatggataagtcttgtgtaaaacacattaatttgtgatgggcgacattacaggcctaatagtcgtgttggtgtgctattgccacgacttaggttgtagggcacttgaaattactatgtt

SEQ ID NO: 104014 - DNA, 635 bp, Zea Mays
ctttagggtatgaccgcttgtggaaagctgggatatgccgaaggagaccaccgccgattccagtgaggatgatctgatctgattgaagtataccttcagatttagggagaagtttgatgagccagacgatgactagctgaagtgtattgaagctactagtgatgagctactcggggcatactccaaggccgaagataatgctttgtccgcagctttcgggggtcggggcaagaaaagattgaacagggtatttgatgcgattggcttcgtataccctaattaccactacccgctatgagggcaagggaaaaagagaaagactgtcgtttcggtcaccccagctgaaccgaagagcaaaaaggtgaaggttctgacccaccggccgcgttatattgaaccggtcatagtacctgaatttggcgaagggacctcttcagctgccgaagcaaaacaaactgctccgattgtgcagagcgctgaagagccgactatagtgccgaaggtgcctacagtcgggccaaccaaagctaaagatgataaggccgaagagccacaggtggaaaaagtgataaaagtgccagaaatcctgagcccaccggcagaggcagatttgccgaagatgcaaaaagctcctg

SEQ ID NO: 104015 - DNA, 586 bp, Zea Mays
ttatatgatcactcccctgaagggtggatcggcgaagtcctcctactttggtagtggggggagtggtaagtgttggtttggatgctgtggtggtggtggtagggctaacctttctcagtgttgaaggcgttgttgctatgggaagatattggggttttgctgctaggggtaatatgggtgctcattttagtattgatgctggtggtattgttgcagctgatagctatgagcgatgactctttggttgtctgccggggcggccatagccatttggtcctttatcgccttggtcttcaggcaatccctggttgggtgcgctgagtcttcgccatggaagacatagtagaatcttcttggctgctgagtgcctcgggcctctgcctctgtccctagtcgcatcgccaccgcggccttgtggggggggggttctctcctagttgctgctggtttgcgatgttatgtatctgaagctgaccacactcttgctatgatgggtcctactgtggaggcctgatccatgtcttgctggattgcagagtcacttttggcattcaccgagactcaacttttctttggtggagttctt

SEQ ID NO: 104016 - DNA, 591 bp, Zea Mays
gttttaagggttataatatcatattttatagttgatggggtgatgcagtaaactcttgatatattagggggtggacttttaaaaatgacacatataaaacgtcttcgcagcagttgggttctagttctgctgcccaggtctgtaggcatttgggtttctgtgatgaaaacgagaacatctctcttgaggatgccaatggatatgcaaagctattcgagaatggactctcaagtaaccatattgttgcagtagctgcgctatttggctggcaggtgcctcttggtgggcaatgctaggcctttttgctgtttggacttttcaggttgcttatattctatatcaatgttggatagctgttttttgatttagaatgtgagaggccttaatgaccgggcgaaaagggattctattaaatcagtggtggttgaccttaggccttccattatttgtttgcaggaaaccaaattaagtaacatttcagattttgatatcctctcaattcttgggactggtttcagtaactttgtattcaaactagctcagggatccatggggattgttggttgtttggcgtgatggatctttctcttc

SEQ ID NO: 104017 - DNA, 562 bp, Zea Mays
gagaccgaagacatgcgggccgagctgctgctgaaacttgggctgtggtccagggaggaataaaggagggggcgcggagaagaacaggctcgaggaggggcgcttcggaaggatggcccggcccgatagagctcgagtgctgggctcaaatgataagaagggggaacaaaggacactggattgtttttgtccttttgaaggatatgggcccgtgaatgctttcgaaagcatttttctaattccgcatgcttccattctgaacattgcttaagctattgaattataaacatgaaaaactctcatctttgaaaaccacttactatctttcgacacacacatcttcaaactttacgtcaaaacaagtttaaactatttggttttaaacttttagaatataattcaaaacccctcttaaactccatgctggaaactatttagactttgatcttaaaaccacttcagaactactttcaaactaatccggacttagaataacttaatttatcaagccattttggaacttaatttacaaacattattcacgttttttttggaaataaat

SEQ ID NO: 104018 - DNA, 678 bp, Zea Mays
atcttcgcgaatttgggcatgatcactgcacaagatttgctcccccgacagagctttgtcgtttatgtgtggaagtcaagcggtttggggctgtatacagagagttgtcgtgtcacaaaggtggcagtgtcacaaggtcgagtcccgaggtaaaaccatgccaagatcgtgtcaaacggtggagagaggtttccaaactttgccacggtgtgttcaagggaatttggtgcctctttgctatttggacttgtttgatttgagttttgaaaaacagagaacgtggttgatctttgtaaaggggctgaaattcagatttctgaatttctgaatttttcccaagtgcaatagtttagggcctagtttggggattttgaaaagttcaaatggcaaaacttccttactatactttgttggttaattagtgaactacaactttgtaatttggtttttaccaaaatttgtatttttttccaaagacttttcccaaatgtcgtttatgtgcttaaatggttcacttaggattaattagggtttgagagtttttcttaccttaagattcatgtcaagattaaggtgagtttcttaagatgaaaaagactcactataaatctttgttcttactttttgatgttcatcccttcatttggtttacatgtgataatggtttgggttagctta

SEQ ID NO: 104019 - DNA, 693 bp, Zea Mays
cgcttcttcgcttggactcttttacacaatagagtgttgacagcagagaaccttcagaaaaggggatgacctcacaatccttcttgttgtctctgtaattcgacctttgaaacgacggttcatctctgcaaggactgccccttcagcagggaggtgtgggacagaatcttggcttgggcgaatctttcgtcctttaaggggatctatggctctgattcattgtacgactggtggagaaatttgagaagtaggtgcaacaagccttcgagaagatcctttgatggccttatcatttatttttggtggagcatttggttagagaggaacaatagaatctttcacagtcagcttaaatcaacggagcaggtcgcgctagtggtcaaagagttagttggttgtttccatggcctggctggctagtaggtacgcttagtaggtccgcttagtaattttgttcaggagttcgcttctagtcttgtaagtcgtcttggtttcttgtaatttcctgttagtcctactccttctaatatattggagcggcaagtcttttgcctctccctttcaaaaaaacttcagtatcactttttgtgagctcttcaacaggatggttgaaagaatcaagatgtctaaaaagagaatgaatttgccaaataggtttctctaaatattttttcctataaattagagcttatt

SEQ ID NO: 104020 - DNA, 491 bp, Zea Mays
aaagtcaccatcccaagggttaacagcaatatatgcgtacgtacgtagtgtgtatagctgaacgtacgtgcatggtaggcgtagacacacatgcaactactatacacgagcgggaggtgccaggcaaaggcagcgatcgtcatggtcggcggcggcaccagaacactcacatgtacgtacagatcaattccatcgtatcttacaggaaataacattgccgatgcatctctcagatcaaatacgaacacgtttaagttcctagctagctcttcctcctaccccacccatggcgtacctcaacctcgtccatggcaagaagaaacactaacttatattagttgctgctacctctaccgcgcgctagcccagtttggctagccagccggttacgccttctacatcgcggcctgccactgctcctcctccgctgcccgtgcttgctgctgttcgtcgtcgtcgcacgccggctcgttcaggtccgccaacggccg

SEQ ID NO: 104021 - DNA, 510 bp, Zea Mays
tagcaagtgaaaccctttaaaaaatagcatgtgcttgatttgatgtttctagcccttgtgtgttttacacttgaatttacacctgcacagtttgtaaacccccataacttgactgctataccaacccaagtttccttgttcacttgtttatgtcaaaaaatggtttactatctattcatgcaaaccatatctagcctcaaattctttttggaaaccttgtccaaaatcctcattaaattctcctctgctcaacccagaagccatctaggttgatgacctctcttttcacctagatctagtaaatctttgcctttgtgaatcatgttgtggctttatcatctgaatctctggatccttcatcgattctgccccgttatctggttatctgctataacccgttctcaagtatcagatgttgatcttgcctaaatctctcatttctggtcattctcataccccccttctttgaggatcatgacgttgttttattgatttttttctctaagcagt

SEQ ID NO: 104022 - DNA, 447 bp, Zea Mays
cctctagtccataagtatgcatgtttgaatcctttacatttgacgctgcaactcatatgctaacgatgacccaaacaatttaactcatatgccaatttattaatgaaatttatgtcattgtgtagtgaagatgccaaggggaaggaggaagcagaccattgaaagcaatgaggagtatctatcagaggaccatgtagggcaaaaaattcacagaaaactcttgcacatgaatcagatagcgagatggaagaagaatcttttgccgtaggtggacatcaaagtggtgaggtttctgaaatagagcctaattcaaagaacccaactgatatggatgcagacattgaggttgaagtcgaaggtactgaaataagataacataatttttaagaatagtcgtaatcatccatttgtaaccatttgttccattatttttgcattttgaccccg

SEQ ID NO: 104023 - DNA, 695 bp, Zea Mays
cggcacagcagaaatggccgaagtagcagcttttcttttcttcccctgctttcgcgagggatagctataatcagggtatacgaaaccaatgacgtcaaaaactttattcaatcttttcttgcctcagcctttgaaggccaaggtcattgcatcatctttggcccttgtgtaggccccaagcaattcgtcactggttgcctcaatactgctcaaccactcatcatttggctcgtcaaactggtctttatatctgaaggtgtatttcaagtaaaccaggccaccctggctagacccgacagcagcttccttcggcatttcccactcattcacgagaggccatactctgtaggcgatgtgctcttgaaccaagtctcttgtgccaataaaagtacacacaatgttgaagcttctcttgcatgcttctatatcattcccaagagctgtggttggcctcctaatgccgaagcgagaccaaatggggcgctgaattatcccttttatgtcttccctctcaactaagttattcttcacataaaaccattcttcaatccaggctccgagccaccttttccgaaatgttggaactgggtaacttacatcagagcgaggcacgaagccataacaaccgaagttgttgtgatactgctccttgccagtagccttcgtttcatacagcagctcgtgcatattgcaga

SEQ ID NO: 104024 - DNA, 575 bp, Zea Mays
aagaagtcgtcgtgtaggaaacgccaggtattgggcctaagattagctcttttggctcaatgaaggtaaatgttcggattttgtaagagttgagtctattttaaagggtgtggtgttaattttggttttgatgcaggggaggaggaagtggttgaactgcctatccgtgacaaaatccccatagccagcctacagcccgagccgaagccaagttcggagccgaagctgaaaacaaccactgaataaacacctccgaaagggaagaggatgactaacgttttgaaggccatccttaaacctgcaaaacctaaaaggctcgctgagaagaaggttactctaccttctccgtcaaaagatagtgtgcccaaaattgagagcgaaaaaataaactagtgggaacacgtatgatgcgccgaagagggatgctgctccagaaaaatctgctacttcaaacacttacaacattttagatgtattaaaagaaaagttaagggagcaagctgagggcttcaaagatgaggccactttaattatcaaaatggagccagctggaccacatgaatatatcattcgac

SEQ ID NO: 104025 - DNA, 621 bp, Zea Mays
gcatttttctcaagtctcaccgaccattaatagaggcaacatgtattatgttcggctccattaatccacctaccccttgccttaggcctacaccatctctagttctccacccactccctagtgagggtcatcacacctagtatttaaaggggccaagcattcataggcaatagcaacaccatgtcggcagagatgaaggcattgcttgagattttcaccaacgacattgctaagcacatggacatggtctaggagcaattcatcaatgttgatgcccatataagaaacatgaataaaggaggctccatgaaggaccctaacgccactgtcatagccaaggcgaagttgaaacgtgatcccaccaccaaagagctcaagatggagaccaagcaagatatggataccactagtaaggagaagatggaaggctccaagtcatctaggacccaagaatgtggagcttgtgatgaacaatttgtttgttaccccattagaactagaggtgccacatgtggcacttatgcacccatcgtatgatcacccaacaacaacctcatgatccttattggtactccgactctgctaccacatgttgttgttcatgatgtatgatgacaagga

SEQ ID NO: 104026 - DNA, 606 bp, Zea Mays
cgttgatgggacgcgttactgtgggattgtgggtttcttgaggcgtcactccgtgcctataaaaacccggcctcgaccaaggcttttgcctgctcgagttaacgctggaaaaaaccctagcttttacaaccgctcgcctgccctccttgctccttctctcctttgccacaggtgatctggctcgtatcaaggaaaccgcgcgccagcgccgacggtacgtgacaatgtcatcctcttcttcatctgctgcgagcgcgtcgccggccacgctgtcgtttgaggagacgttgagcgatttggcggtgatagaactgcagcccgaccacaccgccgagttcgggacctcgaggattttttcgggccgcgtgatggagatgcagcggctaggttattttgggaatggtgtcggacgggctctaggggcagaagaggtctctgagccggaggggaattggttgtttttgaagccttttttgctgctggtctttgcctcccgacgcatcggtttgtagtagaggttttgaggaagttcgaggtacaggttcatcagttgacaccaaatgtagtggtggcgcttgcgaactacgtctgggccgtctcctcata

SEQ ID NO: 104027 - DNA, 873 bp, Zea Mays
cgacagcttcgtcaatagcatcattagcaattttgattatattgagcgcctccttgatagatgggtcaacttcagtattatatggctcggggggtggagaaagctcagctgcattgaaacacaaatatctattctgaagctaaaaaacttacgaaactcagctataaagggtatacctataagtctggcccgctcaacagcttcctcgacccttttggcctcttctaatgcatcatgtgattctttctcattctttttaatagtttcatcaccaatttctcgtcaacccttcagccatacttcagaataaaatttcctagaccagagtagtagcttcgcctgaagggtttctaacgtcatcagtcgagaaggcaaaatctagctgagctacagccttagcgtgatcacaaccagccttctccaaaatggatgcagccctacaagcaccgggaaaggcgcaaaagtcccctctgtcactaagaatttcctcaaaagcttcgacctcgccattgatccattgaataatttcatcagggctgccacgaatgaatttctgctgggaagaaaatgccccaactttagaaaagctgatcttcagacttttagcacattccatagctatttcatagcatttttccttagcagcacgaagctcataaacatttttctgttcccttgatcttttaatttcacatatctcatgttttacttcttcaaccttaaagttctcagttgcttcgataactttcttctttagctcttgcatctcggcttcatgagttttatcttgaacagaaagcctggcctcgctagattttaatctttccaccaaggagagaaggatttttatcattctcaagagcttcgtttctc

SEQ ID NO: 104028 - DNA, 606 bp, Zea Mays
tccacgtctccattgctgttcttttcctttcggcgtattaactataaaattcatgggttgatttgatctcccttgtccaacagcaacaacaactcgtagtgctccggcctctgcattggagcgccatgatcacacgctgccgggcaggccctaccttcgggaaaaaaaaaactgcatgcttcttgaatttcaaaggactgtatctgtatgtgtggtaataaaccatgcatcctgtaaattaaattggggtctactactagctagctaggctacattattgggcaaaagtgaacaatggccaccttcatgtgggtacaaaacagaggccccaaacgggagacaggtaggtcagttggaactagaacacggcagcgttccgaactgtgaagtgaaaccctaccacatccatcattccgaggaacttgtggcggtccccacgggccacgtccctcctgcttaacattcccccctcaaaaacctggtagtggtagtacctcacttgcagccaacaaagtgtccaaggtaaatcacacgtcaagacaaaagccttggtttctgaacagagacaagtaaagccaaggcacacggaaaaacgaacaaagcggc

SEQ ID NO: 104029 - DNA, 988 bp, Zea Mays
ctttatgcagtcgtgttgcttgattggattggaacagtagtggtatttctgtacttctgttggaaactgatcgaatgcactgtgggcgtttggctgctcagttttcttagttcacttcacctcgtcaactgatttttttccagcagttcctttcgccagattttttctgtgctcggtttaagcacttattagcttatactttatacttggtgtttttgttgctcttgttgtccgttgtttaatgatctgccatgctgaatcgggtacgggaagggcctataaaagacaagggaggagagaccggttcggctttgcttgttggaagacagagcaagaacagaggtactgttgcaccgaagtcttcatccaggccacgcaaacaaccttttcattcgcatataagtcaccaggaatcctgaatggccacctaatgcgctgtcacggcatgctgctatcaacttgttttggggagtaacattgtgcccaatccatatatgatttttatagcgcagaacaccgtccaccaaagagaagctaggaaccgatgaaggggcgagcaacaaatgagccttgagacgagcagcgaaatcatcctgatcatagccagactccacctctagcaaccagtgtggtgttgctgaagaaattgtagcacaagacgcatcatgagaaggttcgcggaagagtgcgtcggccacccgattgtccgttccacgcttgtacacaatacgataattgaggcccaacaacatggaaaacacccgctgctgccaagcagtatgaaggcgctgttccgacaattgtaccaaactgcgttggtcggtatggatgatgaattccttgagttgaatatatgcacgccactgagacaaagccataaggattgccatattttttcgtacgttgataggccttgtgatttaggaccaagtgccttactgatgaaggcaatagggtgaccatcttgagtcaacacagcaccaattcc

SEQ ID NO: 104030 - DNA, 422 bp, Zea Mays
ttggttgttcccaaggtccctgagctcagaaagaagatattggatgaagctcacctttcaaaattctccatgcaccccggcagctacaagatgtatcatgatctcagatccttatactggtggaccagaatgaagagggaaattgccaagtacatatccgaatgtgacacttgccagagaatcaaggccagtcatttgaagacagcaggccctttgcaacccctccccataccatcttgtaaatgggaggacatttgcattgactttatcgtgggattgcccaatacctcccgacaccatgattccatttgggttattgtggacagattgaccaagttagctcatttcttgccagtacacaccacccacaggacggagaagtatgcggaaatctacattgaccagatagttcgtttgcatgg

SEQ ID NO: 104031 - DNA, 489 bp, Zea Mays
ccaagactagccgttaggatgtctctctccctttgtggcttaaatgatccttggctctgcttagctgccattgcatatatgtttttcacaacttctttgacatttggatcatcaaaagatacacccgcctcagtttccctgggatttctagcacggatccaattagtcgtcctttcaccaagttgctcagaaagcgtcggcaaccctgcgaccttcttctcagcgtcttcttgtctccatttagaaaattgacgcttgtaaccacctgtgcctaagcggtggtggtacttgttcttcttagatagtatgaattttgcctcgcttagagatatgaattcagggttgctcctctgctctagaaatactgcccactgaccttctgagattttatatttttttgtcgggtctaggactttctttgcaaattttgtattcatctcagacctccagtttcgaaaattgattgcaagctgcttcatcgtgtattcc

SEQ ID NO: 104032 - DNA, 402 bp, Zea Mays
ggaccaatgtatcgaggtgcaagtttcccttttaccccgaaacgtgatatacccttcattggtgaaaccttcaaatagacatagtctccctctagaaaatacaagggcatccgtcgtttgtctgcataactcttctggcgagcttgagctttcttcaaattatgaattatttgctgaactttttcttcggtctcttttaccatatctggcctaaagaaacttctttcactaggttcagaccaatttagcggagtacgacaccgtcacccatataaagcttcaaagggtgccatcttaatgctttcttgtcacttttagtagcctcgctgtcaggagtaggagaccattcatacagcaacttcatagagggaggtggcttgaacaagtccagttcaccaccga

SEQ ID NO: 104033 - DNA, 1410 bp, Zea Mays
atcatgataccttgggaagagcgatttgggatggattttggcgaagctaggtccggcaagagttgatttggtggctagatggggatagacaggccttgttcaccaatcagatggagatgatttgagcgaagtgagagaccgatgtaggatgtgcacctttggacacggtggactgcggtgacacatttggctatggctgtgttggatctaaaagcaaggaaaaaatgcaatcacaaccagggatcaatttcaacaatcttatgttagtgctcacatgtactaacaaaatgatttgcaataatcgtactttaatatgttttctttggatttaccacaaaactttgttggcataggtgacaacggctgccgcgacaactcctcggtccaggtctccttgcccatgagccacaggcttcgacaaccaagaacatggtccatctggctcaaagtaggtcttcgctccgaggctaatacaatacatggccgcgtggaaagtttttagttgttataaagaagtgaagttatgtttcctctaaatatatcctcaaattgtcctaaattcttgtttactgtttttatgtttatttaattccccaagcttgagtattcatcatatgtttgaattgcttactgagaaacattaggtggaaattatatagttttgatacatgttgttatatgaattgattactgagaaacattgggattctgtacttgtacttataagttttaaaactgtcatattgtcctggcatcttggaagtagtattccttgtaattattttgtttacattagtttggaatggtgaagttaggacttctttgttaccataagatagaactggtgtgagttaaaaatgtttctctcatggtctgcatctagcttcagcatttactacaggggtggatctaggatttgatcatgccccgagccggtctatttaatctactagagttgtaatgtgttttgatctaaatgtaatcaagttatacagagatatatggatcacatctcgggccacagaccgggtggcctgcccctgtatccgctcctgatttactatggtgatgtaataacgtaatataacacgagcatggttactacatattgtttaagactttaaatgcagtgcaaaatagagataattcacaatgtttcacgtctcttctaataatcactttcacatggacttgtgctcatcatatttattttactttcagtctgtagcattgaaaaaaatgtatacaatctcctaggactgtgaatgcaaaagttcagttctaggggctatgttgcttatttgctctttgccgatctattctagatgactagtgcaggtactaagtgatctggtggagactgtaagactcgttgatcaattctagatgattagtgcaggcacacttgac

SEQ ID NO: 104034 - DNA, 494 bp, Zea Mays
gacaaaggtaagcgccgcctattccatatcactggacttcatggcagttagcggtatcaaacattgacactgagccagttttgctcgagtatggaggggagaataaacaaggctaaccatgtcggttcagataagcatgtttcaaagcaaaagcaacatagagcagtgaagtaaaggaactaaccgtcatttttaagccccaactttctgcgccttatgtagaacagatagtagccaaactcagaggactccatacagatgcacagcccatcggattcgtctacccactttccgtttccctgatagccgaacaagtacaaaacttatatgaggagacaaaagagaatcatatgcttattccaatattccatgctttgcttttgtgcagtcccaaggaaggcatcactaaggaaataagttcctttcactttatttatatgaagaacttttattgaattcttcttctagatgaatctggtcaaaaagaaatttaa

SEQ ID NO: 104035 - DNA, 469 bp, Zea Mays
ccccgctggctatgtagcgccgactgttcttccgaatcaagggaatttcctcctcctcttcctcatcttcatcaataatgcggacggtacatccattgggatcaactttggccggattacacccattgggctcaacatcatcaaggtcacacccattgggttcagcatcagtcgggtcacacccattgggatcagcttcagcaaaaaccagcactggcatttcctcagcagcaggagcagaagggccggcatcttgattcaagcatgacactcgacaaagacgtctctttttctttttcttcccctcagcaggagaagttggatgattggttcggcgaggacgcttcgggcgaatactatcagacctctgagtatccacagctttgccagactcggggatgggtgctacagccagtgtttcagcaggggctgcatcagaggaatctttagccaacatgtccagcatggc

SEQ ID NO: 104036 - DNA, 542 bp, Zea Mays
gttgggtgttgttatcaatcaaaatgatggttgaagacagaggtgcaaacttaaccttttgccatctatctacaggattattggtacactcctatgtagaagcattagatcatatccatcatacttgtgtactactgtcctttatagtgttaaatcagacgattaatccgccctagatcttaggcacttcgatacaagtagggctactataaacaagtaatggaaattcgatcaaatttgcgaagcccactgttaataatggtaaaattctatttttctcaccgactatcagcgataaatcatgattattagttgtctgattaggggcctgtggatgaatacccggaagtgcctatgcttgaacagttgggcttagttttgtccattaggttttcaagatatcgttgtgttctggactagactccagaattcacgctcgtgccaccgaagaggagctagcactgtcaactctcatgtctcatccttgcacggccggctcgcatccttgcttcgctgctggctatcatcatcaagccgctcaa

SEQ ID NO: 104037 - DNA, 634 bp, Zea Mays
cctgagcatcgcgatctcatcgcttccgctaccatggagaggaatcccctctacgacaacgattcttcttcctcctcctccctagcctcctctgttcatgctatcagtaatgattctagcaacaattctcttccaccgctagccaatgttgtctcgccacgcgactgtctagatggttaacattcgggagcacgtccctttcacgctagagctaaacactgactatattcaccaaatttggtctccataaccacatcaatgcatgatcgttcccctaaatgggtgatgaacaatactactgtcgcatattggacctacaccacctgctctcatgacctccaaagcatggtgatgcaggctaatgagacaacctatgatgcctggcactccattgaaggtctctaccatgacaatagagccacatgtgccgtttacattgaagttgagttccattctctctgctaaggtgacatgaccatccctgagtacaccgactgcctaaagaacttcgccgacaacctatgcgatgtcggccaacttgtctccgaggctcaacaagtcctaaacatgctacgcggtctttcgctcatgtacaaccatgtcatctctaacattactagcaaggatcccctcc

SEQ ID NO: 104038 - DNA, 551 bp, Zea Mays
atcaaactctttgctaggagtcggcgtggggcctttgtttactagcgaggactcaccctagccatcctcactttgggccttcgctctctatgatgacgtctctgctgcatatgcggtggggaactttgccccctattgaacgatgagcccatgcatctgcctccgtttgcccttggcttgttactctgcatcaaatatctttgttgatcgataagtacaaggggtggtcaagggctggtttcgtcttcaatccaacagtagcccccaagggatgggttcaactacatcagccaatcttgaagtccttttgaggatacgaacaaatgatgcccttgatcacaagttgaaccactcatcagggcatttgaaaagtaaccttggggcacgacgtgatgtgactagcgacattttagtttgtgtcgtttcgagtttttatgtgggttggggcctataaatgttgtcgtccgtgggacactaggattacttttggcctcaatcttcatcgctttctctcaatgtgcgccgcgcgtcggtgctgtgttgtgtctatg

SEQ ID NO: 104039 - DNA, 463 bp, Zea Mays
gtagatataaattaaagccaagcaaatagcctgctgctcatcaataaaaaaaaggctgaaactgctcagtctgaagtctcctagccacgaagaacaaacatgattgcaagtgtactgtcaccgcagtcccataggaattatttgcatcgtgagtcgtggcatttcacctcaccgccgcatctggagggaaatacggcacacgtgaagctgtcacacactcacacccccgtactcgacgccagtgacgtgtgtgggtgtggtggatccactcgagtcaccggcccctagggtaaacatgtaccatgcatatgcatggactcccagagcacggccattttccattccaacgccaggtgcaggaacacaacagtgtgtcctttggattcctgcctgccttgcctgccatccgagatccgacgtcacctgtgtctctcacttgagaaccaaggacgcagagctactg

SEQ ID NO: 104040 - DNA, 597 bp, Zea Mays
gcgagcagaaaatttggctctagcaggccaaacaagcttagtgacatgtgacttttttggctcgtcccctgagttacctctgtcatgataaacattatgtggctcaggtggccggctatctttatgtcagccttctgcactaggacggtcacaggtggcttccggtatttcggacggttcgacctatgtggttggacggtctgtgaagggattggacggtccagtactatacctggactgtctagtcatgctggacatcgcctatgagccttgtggtgcactctatgtgactcttgacggtatgatggagggtcatactgtttgagatcgtgactggcctgtttggccatgctcagagctgatccaccatgtagcgaagatcacaaagtggttggaccagatataagttcatcggcataccgtaatatggctgggactaagaaaactcatttgttgctaatgtgtttcacacaactgttttggtggccacctgagccaaaacctagattcttcaatctgatgcagcatctacttattcacattccatatgaggcaaaggttggtggacctgtacaatataggtggatgtatcacatt

SEQ ID NO: 104041 - DNA, 549 bp, Zea Mays
gtgatctacattatttcttgggcatagaagtgaacaaggtacgtgatgggattattcttactcaagagagatatgcttcagatttattaaaaaaggtaggaatgtcaaactgcaaaccagttagctcaccattgtccactagtgaaaagctatccctgcatgaagggtcattgttggggagcaatgacgccacacaatacagaagtattgttggggctttacaatacttaacactcactaggcctgacattgcattctctgttaataaggtatgtcagttccttcatgctcctacaactgttcactaggcagcagtaaagagaatcctcaggtatatcaaacagtgcacaaagttgggtctgcatatacacaaatcaccctcaactttggtaagcgcattttctgatgtagactgggctggtagcattgatgatagaagatcaaccggaggttttgcagtgtttctaggatctaatcttatttcttggagtgctcgtaagcaacccacagtatctagatcaagtacggagtcagaatataaggctattg

SEQ ID NO: 104042 - DNA, 579 bp, Zea Mays
gggctcttcttgggaagttgcgaccttgaagtgaactagaagcaccgattgcatcatccacatgagcccatgcaagatcatccccttctctaactgtttcattttgactgtccacccactcattgtcccattggaaatcctctaaaattaaagggttaccaatatttccctcctcacgcaatctttggaacatagctgccatctttctattgtattggatataaaccaaattgtttaacctttggtgctccaatttgttcctttttttggtatgaatctttttggtatgaatctatgtgccagctcacttgaggcattgatagactccaagaaaaatgtgccagttggactattgacaaggaaattgatcaagtactgacccctcctatctgtccaaccatcagacgtaagtgtgcaaccaaattcagtccaagccaactcatgagtctttcttatctcatctacactattctttgtcttctcaagcaatgacaccctaacatcatgatatgaaggtttcacatacccaggaccatattgcccaactgcctcaagcatgatctcaaaggcccttgagtt

SEQ ID NO: 104043 - DNA, 734 bp, Zea Mays
ataaaagcggcaccatgacagcgggatgttgaaaaagaccgcggagtcagtcttcagcatttgacgctaaaacagtcactgcaacggccagtctcaatagccgttgcgtgcgacaagcacaatccaagcaaaagtcgcataagagtgcagctggatcatcacaacaagtgcataacagcacccaagggtgcgaagtcatcctagagacgcatatttttatccaagctaaagtcgcctaagggtgtagctggattagcacaaccagtgcgtaacaacacccaagggtgcgaagtcatccccgagacacatagttctatccccacaaaagtcacctaagggtgcagctggattcacacaacatgcgcatcacaaaaaggcgaagtcatcacctagacaggagataataccctaccaacagtcgcctaacggtatagtcggatcaatacaaacgtattaatgacacccaagcgcacgaagacgctaacatctgcaacttagcgcatataccacaatgaaagacacgccatatttcaattacaagatgcgcattgcgcgcaagaaaattgtccacatacatgtccccacagtcgtcctttggcgaaatggggcgagggcagcgttttcgctcatcgtcaccaaagaacggtgatggcaacacacattattacattggttcttgtttcagaataagaccgacttctcagaaattaaatagcatcaaactcaactctttg

SEQ ID NO: 104044 - DNA, 465 bp, Zea Mays
cgacaatagtgtttcctgccatgccaacacgcatgggtgggaaaatttggtggccaaatcgacggccaatgcagcgaccaaatctgggcacaaaaatgtaattggcgtgggagtactggcaggcaaatcctagacttgactgaaataagtggcatatgctcgatcaaagcccaaactctggcatagccgacagcaaccacgtcataaagttgtcccaaaaagcaagattaacaagcgtgtctgcccaaataactctaccacctacaactaaagtctaatgagatttcaacatatgtataaccaaaccaaaaccagtggcaagttataagatttgctgtcgtggatcggcaacatatttcgaacaggccaaaccaatgaacctaccaaaaggcaactcaccagcaccttttatgtcatctagagtgcaagtaatgtaaaactactgttgctagcttcaaccttaaa

SEQ ID NO: 104045 - DNA, 591 bp, Zea Mays
tggttaagtctgcatttcagtgtgattgcctcaacttgaagcccttgtaactttcaaattatggggtttgtgccctaggtcaccacatcaaaattatagcccaattataggacaacaagtttgcttaagagtgcaagccatgttcttgtgaaaggttgggagataattgagcctgaagttggactgtcagactgcttgatgtctgaaattcagattaacagtgggatgacatgaacttagggtttgattttaagcaagatccagtgactttttgtgggagcacattgtagtaaagttataaatggattgtagatctacaactttgctacagatcattgggtatgttgccatgaaaatttgtgagaaaatcgagcctaaactatgactgtcaggcgtcataaactgaatgtcccatggtacagtaaagggtaactgaagaagatcctatccctctgctcgtcgtcggtggtccgtcaccgttgatcaccgctcgccgtgattcgtgcgtcgtggccatcggataaacatagctcggtaaagatcctcaccgccggtgagctggacaccactccgacggcctcccctgccttc

SEQ ID NO: 104046 - DNA, 329 bp, Zea Mays
gctactcaaaagcaatacagttagttgtttcttttcatacatgagaactttggtacatttttgttttatacttctttcatccccttggataaaaagatagcattctttgcacagaatatcgcttgcttgttgagaaaggtaataatggagattgaacgccgcatttctactcaagcagaacacataagaaatgtaaggaatgctattttatacttatttttcaaattattcttgttgtaactcttacttgtatggcagcaaaatagccttatcagagcacgtgaagagaaatataaatcaaggataagagtactagaggcacttgcaag

SEQ ID NO: 104047 - DNA, 601 bp, Zea Mays
cttcctctcaggcttcatgggattctttcttgttcttctttatagcttcgtcggctaattctcggtcgcctttcatctaaacgtcggagtaaaatttcccgcctatcagagtagcctcagccgagggatccttcgtgttttctacggtgaagacagcctccgtctaggttgcagctttaacatgttcacacccagatttttctaaaattcctgcaatccctctggcaccagcaaaggctcagaaatcaccacggtcgctaaggatctcgtcaaaggcttcagcttcttcgccgatccattccatgattccttcgggatcgcctctaataaatttttgcttagatgagtatgcacccaccttcacaaaactatctttcaacttagtgcaatccaaggatttttcataatacctctccttcaattcccgaagctcatctacattcttttgcaatcttgccctagtccattcgcttatttctttttttgctttagccacttcaaaattttcattcttctcggcaagctttttctttaagttttcaatttaggtctatgagcttcagactgcgcagcaagattggcttcactagccttaactctg

SEQ ID NO: 104048 - DNA, 435 bp, Zea Mays
tgctacatcaaactctgaatccctcgtatttccattagtcgggcaagaagaagaagaaagcagcagcagctttcgatgtagccggattagggactcagctcgttgtctctccatcgttggcaacttggtccgcaatctcattggcaccacgagatcgactagcaattccattggctggcacgttctggcagttgtgttattagtctatactaactctatacacatcgcagccaatccggacatagaccataacaaaaatgattaagagattcatatacgtcgttagcataccggcccataaataaaaccgacaaaggcgtaggcttaaactagagcgcatgattagctcggggcatgcgcactcactggcaaaaccttagagggttgtatgcaaccagacaagcagaatgatccatggacccgatgccctcccac

SEQ ID NO: 104049 - DNA, 425 bp, Zea Mays
cagggatgtgccttgggtaatttggccacttttttctatttggtccaagtggttttggcgccagcacaagggtgaacacatttgatctttgggctaggggtggttttggggacttagagaattttgaatggctctagtgtgctccccacttggtgaattgttttggggtttttattgggcctttttgtaatacctctcttaatatattttgtagacttactaatatacttcatctttggtaaaggttcccttttgtgatttggccatttgcccactctttcccctttaatcccatggttagggtttaatggcttaagaggggaattagggttttagaaccttgtttatgggtgaaaattgtatgaaggctagggttcctttcttgtgatgatcaatacttggcttaaccatgcttctaagctttt

SEQ ID NO: 104050 - DNA, 700 bp, Zea Mays
aatttctgttgaatacaacatatatttagtacgaaggcatgttttggaatgatactactttatcaaaagagagagaataacttacacgtgcacacttctcccacaaatctggtttagctaatataatccccatagtctcattccatcctataccactctcattctttgcgttgcttatggccttgtagcttgctttcaaatctttctccttgtcttgaagttgttgctttgtgaaatgtgctgaggggaatttctcattgaacttacaagtgatgcttctccaaccatctgaggtccaaccattctgtcccttaaatcggacatcaaccttgtgctcagttaatacttcaattaaacccttctcatataagaagttccagttcaccctagatgcttcatttgccattactattttaaattacacataaaaattaaattgtgtgcaagaagtacataaataagatacaaatattaggtgcatcaagtacataaataacgatacaagtgctatcacatcaactaaacattgtgtgcaacccacatctgcatcgcaatgtcatcccttaaaatgtttccatcaacagactccgagccggtagggtagttgatttctccctccgggacatcgacatattgagacggttcaatgttgcttgggaggtgatctagccacccttcctagccattatgctgtttaatt

SEQ ID NO: 104051 - DNA, 385 bp, Zea Mays
cgaagggctaaacgctcggtgttaactcggctgaggaaatgatcgaacaccggataagcagggttataggtcatgataaaggaggagatagttagaatatatagtgatcacaacttgtaaagggataaccctctgttcacatatataaggctgagggagtgcccctacgaaaatatctcatctcatcatgcactagtcttcatcaaccacacctaagcatcaccgcagctcgcttgtaatccgtatactcccgagcaattccaatacacaaccccaataagaagtagggtgttaccaattctagcggcccaaacctatataaatcctcatgcaaatccgatgtgtccccgcacgtaccatcgagtcgcagtcaacgacgtcgtcc

SEQ ID NO: 104052 - DNA, 803 bp, Zea Mays
ttggtgaagaagtcacgatacgatgctctccagtcggccacatggttggctaggggttagtctcctctataatggcaaccgattctaggccggtgggttcatgcccgcaagtcgactgtccttctagtgggcttcgtcatatcggatggttggtttaaaaaggtcgatcgcaaagatcctcggagggatgctcgtttgtcccgacgctaattttgcgagggtgtctgttgtttcgttgtctcaccgagggatgtggttcagttcaaggccggcgaatcgttcctccaaccgtcgaacttctcgatagtttgccggcatcttgggatcgtggcattccgaatctttcattacttgccctacgatgaactgggatcccctcggatgtctagacgtcaaacacctagctccacgacaatgtgcatcccatttatgagggcttcgtactcggccacgttattagaagcttgatagtggagtcacacgatgtaccgcagtcgctcccttgacggcgacataaaatgaggctgccaccagctccccctttgtcatcgacccatcaaaatgcatgatccaacatttctcggtgattcgtgccggctctaattgggtttcggtccactccgcgacaaagttggcaaggaattgtgatttgatcgttgttcaaggggtgtaggagatcccatatcccattaattcaagagcccatttggcgatcatcctagaaatatctggattttaggtcacgtcgcctaggtggaacgaagtcaccacggtaacagttcatcgtgtaatgccttacagga

SEQ ID NO: 104053 - DNA, 583 bp, Zea Mays
tgactgctccgctagtagggcgtagtggtcacccaagtttagataagcgtgagcatgtcgcaccgtcttaagtcattgccgacttaagccgattgctccgttagtagggcataatggtcaccccaagttaagtatgcgtgagcatgtcgcaccgccttaagtcattgtcaacttaagccgattgctccattagtagggcatagtggtcaccctgagttaagtatgcgtgagcatgtcgcaccgccttaagtcattgccgacttaagctgattgctccgttagtagggcatagtggtcaccccgagttaagtatgcgtgagcatgtcacaccgccttaagtcattgctgacttaagccgattgctccattagtagggcatagtggtcaccccgagttaagtaagcgtgagcatgtcgcaccgccttaagtcattgccgacttaagctgattgctccgttagtagggaatagtggtcaccctgagttaagtatgtgtgagcatgtcgcaccgccttaagtcattgctgacttaagccgattgctctgttagtagggcatagtggtcaccccgagttaagtaagcg

SEQ ID NO: 104054 - DNA, 332 bp, Zea Mays
cgcggtctgaggtgcaattctgctatcaaagtgtcgaaatccggcggttcgacgatgtttcttggtgtcccgcatccttttctcggtaagagtgcatatcccttaccccgtgctgctcctttaccccgtgttagtagtagatggttattattacatgttagtattagttgcataattatttgcattgttgtagatgatatgtcagatctagtatgggagcatgaagagaaaattgggtctgattttaggtgcaagtattgtcgtgaagacaagagtggaggcaatgctacatgtttgaaggagcatctagcatagagatggttgaatatgaa

SEQ ID NO: 104055 - DNA, 697 bp, Zea Mays
gtagaactattggtagttcatctatctcatgttttacccctatttggttgaatctgagctgattctttcttagaaactgaacggttgaatcttatgaacctgtgaatcaaagactaggcaaactagttagttcgaatggttgtgatggtcatcaagcaccaaaatataagaaatggtttaaggccatttccctttcatgggcccttgtaccactcatcctcgacatcaactccaccttctattctcggtggtgtaagtccttccttctaactctcaccaaattctcattggactgacacgtgctttctgatgttgtccaccgctcgcccgactggattcgcatgaacgtcgttattctgacttggatcaacggcaccatcaccgacaacctcgccgatacgatctccgagcgtggcgcctctactcacgtcctgtggcttgccatcgagtcccaatttctcgggaaccgcacgacgcgcaccctctacgccgaccaagccttccgctccttcactcatggcgatctttctgctgctgagtactatcgtcgctacaaaaagcttgccgaagattttcgcgaccttggcgagccggtctccaacaagactcttgtcctcaacatcatccacggcctcaacgaacgctttcaagcgctcggtcttcacctccatcgcacctctcctctccccactttttt

SEQ ID NO: 104056 - DNA, 297 bp, Zea Mays
gcgtctcagagtctgctggtatcgtgctgattgaattactgcgttcagccattcttcttcgagtacatcaatgtcctccagcctagtagcttcggcttctgctatgctttcgaagaccaaccttggcaccccaaacttgagatcagcgggtaacactgcttctgacccatagaccatgaagaaaggagtgtttccatgcagagctcggctcggttgggttcttaggctccaaacgacatagggcaattcccttatccattttcctgcgaacttttcatttttatcgaagaccttttt

SEQ ID NO: 104057 - DNA, 902 bp, Zea Mays
atttattttgctattgagtagctaaaatttggcttgacgagttatttagctagtctcttatagagagacttatgtactccatctttatgcatggggccggccggctggtccaggtcggcaaaattcccatcttcttcgtgaatgaatgaaagaaaagaagcctgaaaagaggagaggacagaagagagaaagaatgcaggtagtaggtaagctagcagcagcagggcatggggctgggcctagggatgcgtgagatatataaaagccaggaccttcacgagggtgcaggcaggcgtgcaggagagagagatggactttgttgagacttgagagagaaagagagagagagggggtatgaaagccacgcggggcagcagccatcaatccatggatggaaacctagctcagctgcttctccttcgttgctttctctctcactcccgctgatcgatcagttcctctgatagcatggccatggcaacaagtactagctagtactcgcacccacatcagccttgcagttgcatatgcatgcgtcgcctgctcctgctgcggttgctgtagtttgttgctgcacccccgatcgccattattctattcctctctcatgcatgcatgctgcatcaccatatattaccctatttagtaaccaccttatccatcatatatcatatgggcagaccccacctcgctcgcgccctagcagttattagtttataccatgccaaggccctttgaatctttgtcctcgtcgagcctccagccgtcaactctctttcgcaataaatacccgaaatgtgatgatgatattagagccagacacggggcaagaaataaaccgtatgaccaaatcaaacaagatcttaaaaaacactactgttatatataatgcaagtttcata

SEQ ID NO: 104058 - DNA, 697 bp, Zea Mays
gaaaaaataaaaacatttagatatattagggttaatatcacatattataattaaaagtataatcattgggaataaaataaaacaaacatttgattttagagtcttttcaaatattgggacatccatgaccgaatctttttcacaaacgtttccactgaatacctgtattggaaacatacgaagttggtgtacatgtgaacttgtatgcaatattttatatatgcttcatacttaaagtttgtatgaaaaacttacctgttccgatactttattatcatctgtacgaacatgggttggctgatcgtgatgctgaagatcaggggttcgaacaggaggagtggatacagggtcatttgtcgggggcgatgaggtagtgggtgggttatctacatttggacaataaaatgataaaatagttgatgctgatatgaaccagaaataaaaatgttccataataaaataatggttatacatacatattggaacaaactacatccacataatatcatggtgcgtaaaacaaaatgagagggtgcatctaaaatcaaatgaaaggtattggtgatgtagtaatgcaaatgaatgcataagtaatatataatatgttgcataaataatgtatttaaaatcgtatacctaaatacaactttagtttgaattatccgtgagctgaatatttttttaaaaaaataaacat

SEQ ID NO: 104059 - DNA, 467 bp, Zea Mays
gagctgatctcgcaggtggcgaacgtctcttctcaattcatttatttggtcgccatctgcgacccatatatccgtcctgcggcggagttccgcttggagccaactcacttctgcttcgaggtcccctatcgaatcgttgcttccactactactattatcatgtcttggggccagctggtgacatggcacaccaatcggtccagtatgtttgcgcgcagttctcctcgtgcgcggcggcatttttctaagggggaaaatttgattagtatagttcttagcatgatgcatgtataattacagaatcaaccttagttgattcacaccttctatatgttgcactcttactacctggtctttaaaataaactcttcagaatacttaggtaagaatggaagagatttttctaggtaagtctttagaaaatccttttgaagatgcctcataatatctgcagagaagggcttcgc

SEQ ID NO: 104060 - DNA, 404 bp, Zea Mays
gttggatacgatccatgtggaactgtcagctgcgggtggttgcctgtctctctgattgacccttcgtctctctcccggccggctgggccatcaattgttttttttccgttagcgataagagagttcttaatcaaccagagagcaagctgcagagtattatggcgacgaggacgacggctgtgtgtcgctcgttccttcccggccatgtgcagtgccggccggtgagattcttgcttgcttgctgcgcctaattgctacctgcacgcacgcacgcacgcgttgcatgtttccatgggattaattgagccgttgctagtgtgataatgtgtgcgtattcgtcatctctactgcaaaaccgtccctctgcatgcagttcgtgttgtcttcagttaaacctgctttcc

SEQ ID NO: 104061 - DNA, 778 bp, Zea Mays
cacagagcatagtcacgtaggatggcgggttgattcttatatagtacagggactctttgaaaaacacgcagccgaaagggtatcgttgaatggtggccgtccgatctaaaccaagggctcaaattaaatcagtctcacttgaaccggtaagcagtgctagccacacgatcctgcgcggatggctcagatcggatccgcaacccagcaaaccggtatgcactcacggccctacgatctaccatctacggtcgaggatagcgcctgaccgcaacccatctaattcgtctgctaacgatccgatggccaggaagcttcttcctccccaaggctggacgcggcggtgaatgcacagcgcacggcgacacctcaccggagatacataatctctcccctctggttccctaaatccgaatctgacgggtgctagacagacggggcgttattgcgaataggttggggagaatcttaccataggtagaagtcacaagtcgtgggtccatggcacaccacggagcattgaggcccacggcggcgctaaggtacccggcgagcaattcctactgcgccaaagctcgaatcgtccctaccgaagcagctacacgaagcggaaacaagcacgaagctattggaggattgctcaccgagaatcgcccgcgaagatgctctgcccacggtggtcagcggattccagaggaggaatggacggcggcgagaaattctttggtccagggcgacgcttacgccagatagcaagcttgcgtacgatcctcggtcactg

SEQ ID NO: 104062 - DNA, 484 bp, Zea Mays
ttgcgagttgtgacatgatcgtctgacatcaaagcgtgaaagacgttaataaatctgttcaggagaagcagtcatctagcgtggcaagcttggaattgacaatgagtgaggtggacactggtagatctagtagcagggtcaaaggatgatttcttttaccaagtatgcttgcattcgtgaggtgatccttttctcttcttacctgtttttagtaaaaatagaagtagaaactgtaatcttcccatgagaaagacgagcttcttgagatctagatccactcaatgagttgtggcctgtgggttttggaaaggtttttgttttagtcgagcatcccatctttgcagctgaatttcacattttagtaaacaacagctaattggaccatagaaggttgatcatattgcatctctttttttcgtgaccatgtctaagcacatttttcattaggaggaaggagagtttacaacacacatcttagtaagca

SEQ ID NO: 104063 - DNA, 925 bp, Zea Mays
tcttgatactaaaattcctcaagctctcgaaggtttctactaattcaaagatcaaataactcttatctttggtcttgatcaccacatcatcgatgtatgcttccatgtttctatgtaactgggatgctaggcatttctagattcccctattatatgtagccctctttttctttaacctgaatgagatagcagaataatagtacacgccgaatggggtgatgaacaaagttttgatttggtcttattcctttaatgagatttgatgatacccagaatagaaatccaaaaaggagagtaaatcacaaccagaggtggagtctataatttgatcaatctatggtaaataatgagagtaaatagcatgtccatgaagattgtggagttgtaataattctcacctttggggccagagtctcgatgagtgtaaaggggagatgttggttcacggatgtacgaaccatcaaagaggatgaatacttcgatctaaagcataatgtgcaggcaaacgaatatcagggccattagatggacacatgacagtggaaacagagatctgtggattaaaaagatgaatagagtaccttctgcaaacagagaataatcagaactgatgcaatctgtgatctacgagtgagtatgacgatgatccccttcttcaaatgacatataggtcatagagatcataccatcgttagcatgatgggatttgtgtggcttgtgaaggggtggagggcaataggaatggaagaacttactcgtaccagtttagtggtgtctgtgccctcctggacttcaacaaacaacattctagcaatgatggcgacacccgacagcctgtgacatgagggagagaacctaagtagtgaatatggaggagatgtgctcgagcgatggtggagaaggaagttgggccacaaagcttacc

SEQ ID NO: 104064 - DNA, 293 bp, Zea Mays
attaaaagtaaggtatggctgatgccacactaagccataatggctcctccgccgctgctgtccggcaaaccatcacattctgtgacgcgggacatcgagcaactcctgacttggggcactccggtcccatgtgacaaaatcccctattcccattcctatcgtgcaagccatcacacactctggacgttgggcccacattgtagactacgggcgctcacgtgacagccacccttagttttgcacacaccggacccacgtctgctcgcgcaaaaagttgcctcaatttgacactg

SEQ ID NO: 104065 - DNA, 426 bp, Zea Mays
gactgagaaaggtgttaagtgttgaacaagtacttagtgaaaagcttgaaaggttcaacgtagtcaagctggcattccatataaattgagtggaatatagattatggatatcacaagtgaagtcaaaataatggacattgcaagttgggattcaatgtacatgacttggagacaggttggtgaaccaaggacaaaggcaagaaggacttcgagggactacaacaagggagaaggtcaaaaagaactgaggaacctaaagctaaggtgaacaagaggttcttgcaagattcaaggttgatcaagttgagaagagttatgttgcattgaagacccaaacataaagacatgacttgaagccatacaggtaactcatatgcattggatggttcaagtcataaggctcaagactacccagctcgagtgaag

SEQ ID NO: 104066 - DNA, 838 bp, Zea Mays
tgcacggatcacctctaccccagggcatgacgaggaggggcggaagggattgggcaacaaccatcgttacagccagcatcacagaggctgctttaacctcgatgaggattgagccttgagccccccaccgtcggggcctcaggctttcggttgccacatcctccgggcactggtgccacagaggtacagggcgcctaccaacatcatgaaatatttgggagaatcgaaccccgtatctagctaggagactacaggctgacgtgtcaggcgggaggggtggaccatgacgacttcataatccaaaacctccctctgtacttgccagactcagcacaagcatggctcgaaaacctaaagcccaggtgtattcacaattgggctggccccaaggaaagtttcgtcggaaactttagggcacttacgtgcacttgggcaaccccgtgggacctcaagaactattgacagaagtcggatgagatcctgagagactacatctaacgcttctcacgactgtgcaacaagctgactaacctcgctaacgtcgatgttatcagtgccttcatctcgagaaccataagcaagactctagtacacaagttaggacaaaagagcccacgaactatgaaggagctccttgatatcgtgaataaccacacgccaggggaaggcgcgatggaggcaatgtttgaccactgcaagcaaaaaaaccaaacacgacaaaggtcctgactaaggatttggaggcaacctaacaagaggaagaaaaatcgcagtcggccaaaatggagggaagcctctagccgaggaggccactaacaacttcgaaaaattgctcgag

SEQ ID NO: 104067 - DNA, 377 bp, Zea Mays
gtgtgagacaccatccccagtgataagggcatcaatggggccctaagtcaagggctaccatgcatgaggggaccacatgagcagagcaatcccttcaacgaagttccccactgcccctagatgtagctctagcacaagcctatgatgttgctaaagaggtctgccctgttgcaattgataggtggaacctgatcgggaaggaattacgggctctcaaccagattcgagaccagttggaggttgtcatccaagagtcctaggtagccatagctatagatgccctccgaaggacaagaatggaggaggatgcactaaaggccaaagaggatgtgttgtctgtctgcactgcaacctcccaagcttataagcagacagaa

SEQ ID NO: 104068 - DNA, 423 bp, Zea Mays
gcttcaccgacacccacctcgtgtttgcgtgacctttcggggtggggaatggcgggactcgtcgggatttcgtcgccgaacctggtggcgccaccgcagagccacctgtaccgtgggcggggtacgtaggcgtcctatatccaggtaaaagtcccctggcactttcgattcgtactccatgcgatgttgcaacattcggatttgagcttggggccctggcgtgcaatgtggacaacaccggccatggcgccgtcgtccctgctcgagggccaccatgcgtggccgggttacgtggggaaggaacccccggcaccgttggatgctcgttgggcggacccgattaaatcgctccataacccttcgtgcgttgagggtgaaccgtccgatctgaattctgtgacccagattcgatctcggatgttt

SEQ ID NO: 104069 - DNA, 983 bp, Zea Mays
cttgagggggatgtcgaggtactctattttcctcccgcgacgaagctacagattcgcgtcgccatcgagctggtgctgtcccccatccatcctgggccgacaatgatacaggtacttccagagactgaaatgggggagaatcccgagataggcctcacacagatgtacaaaaacggaaacttgcaagatggaattagggttcagatgggtcaagtttagttcgtagaaatcaaggaggccgcggaaaaagggagaaacaggaagagcaaggccgcgaataagaaagggaacgtaaacgatggattcctgggtatcctctgtcggaacagtgaccccgcggcaaattcgttaagagcatagctcttttggaagcaaaaccccaacatcgacaaggtgaagaaggtcagattctgagataacgtacatgtggttacctgcgaatggcaactagctgttggggtcgatgggcgggatgattgccgcgacggagctttgcctcttccgtttcggcgccatcgcaatcttgcagtggaacgaaaaggagcgagatctcaaggaagcagaggagtggttcaagacggaaatgtgaagttagggcttagaaatcataaacacacgtcggcgcaagtataaatggggtttcctgggttgggcactatttctaaaaaagtgccaagtcatcactcaggaaagcaaaacttcaggcatgactcgacggttacctctaaaacgccggtatcatcatctatcgctcgacggttacctctaaaacgctggcagaggtgaacatgactcggcggttacctctaaaacgccagtatcatcagctatcgctcaacggttacctctaaaaatgccgacaacattagacgcaaggatgaactgtcaaacggttaaacagaaaagcagcaaaagggcgatgttcactcggagcaaccgaagttcttcattaagtagtggagggggttttcacaaactcaaaa

SEQ ID NO: 104070 - DNA, 382 bp, Zea Mays
tggaacttcatcgaggtaggaaagcggaatatttggatattcctcaaaaggataacaacaaatgttggcattttgagttgttcactttagagaagcacaacaagtccctccctgctcgcttagggaggcaacctgatgtgaggttggatagttggatagagggaccaaccaacttagagtctatagagatcattgctttgataatcgagattgccaatctaaaaggtagaggtctaacagctcaggctatgttgattgattttatatattgcaacattcggtctttgaaggaccaagattatcctgtatacttgtatactggagtcaaggaccctgcccgattgaccgacagagcactctctgaagaagatgttgtgcttcg

SEQ ID NO: 104071 - DNA, 732 bp, Zea Mays
atttttttaagcatgtaaataactgaataggaataaactcgtgaacagttttagtttgttgctgtcagacattattgccatttttttatttgatgctactgctgatacagtttctgacattcttgtgcattctggaaatatggtgggatgtacagttcctgtgttgcactacttgtctacttcgtccactcatccggaaacctgcagacgatgaatgaggatctgctcaaaacgtatcatgagagagctgtttccactgatgctcgctcgctaatcactttgttcagagaggtcaggtcttcccttgcaaattttccaatgttcttcaacatgttggaattccttatcactaaacctctgctagttgaagttcagatctgcccttcattgttagtgaaacgtcgtggccaaaattagtactagtttaagaccatttttataggtagtctaacaaaatctatgagctcagcagtgtttcaactacgcttcaagttcctgctttacctgcaacaaaatgtatgacagtatgagcaaccacctgtttcagtgctgcatacaagtcggtttcaggacagctgtttcagtgttcttggataaaaaaagaagaaggcatgctttgcagctgacaaactcacagcagttaagtggcagttgcttatcagcatttgtcctcgagatggctgcacttattgttaaccttcaggtaacagcctgcttttaactaccgtctgc

SEQ ID NO: 104072 - DNA, 439 bp, Zea Mays
cttgtatatcattcccaagggcaatggatggcctcctaatgccgaagcgagaccatataggacattgaataatccccttaatatcttccctttcaaccaggtcattttttacatagaaccactcctgcatccaggcccccggtcgtctcttctgaaatgtcggaactgggtagctcaccccagagcgaggcatgaagttgtagaaaccgaagttgttgtgatattgttcctttccggtggccatcgtttcataggataactcatgaatgttacagaaacattttgcatcttgttccaatccctggctcctcatggcccatataaaaatccacatcttaatgatagcttccttatcggtcacaatttgaacaacacaactttctccaacatctttaacaacaacttccttaatgcaatcactacaccatgacacaatttt

SEQ ID NO: 104073 - DNA, 392 bp, Zea Mays
ccactctgttgcctgagtcctctttcctctaagcatttaaaggtacaggggaaagcccccacgacctccctcaggcatcgcaggcagcacatcccccatggaagttgaagcaatggaggccggtggaggatgtacctgggacccaacaacctccgcaaacgatgatgacaccccggattaaccgaccgccaccacaacactctggggcaagacggccagggacgtcagcatcggggagatgattgccacctccaccactggagctccacccgtagcgatcaccctggtcgatggggctctctccaggacggatgttggggatggcgcattcaggaggaccacctcagggatagccgcatcgatgaactcttgagcgaccagggaggtcggcg

SEQ ID NO: 104074 - DNA, 271 bp, Zea Mays
gaagaacttctcccttcactctgattaacttatattttgttctaccctctaattgggatcaagcttggtttttaagtggtaaattttaggtttcgcttattgaccctgtctaggtgattttcaattggtataggagcctatcgcttcatttagggtctaacaacttgaagcgattcggtggaaggatcccacaagctcaaggaaaaggaggtaaataaggaaatcgagaagcaaaaaggaaaagaggagggatttgtcaactcaagttccc

SEQ ID NO: 104075 - DNA, 402 bp, Zea Mays
ccttggtgtacaatggtacggacgaagatgatttcctatactgtctcctagacaacaaggaaatatccgtctgccgagagatggccaaaaatatgggatttccgaagcttgaagctggcctctccaccatgccaaaagatgatctcgctgacagccttgcgtacaacagtctgaaggtacgaaagtgatgaacttaaaaatagattatcttgtcttgtattctcgtgctggttctatctttttgtagggcttaattcttagcaacgctttgagggcgcagaagaatactgaagatgaaagctgtcagatagccctcggtaaccttcggtcagaagttatcaagctgagaaatgaagccatcgaaaaagataaaattctgctttcattggtggacaaagtgaa

SEQ ID NO: 104076 - DNA, 924 bp, Zea Mays
gactcataatgagtcggcttcgagtttgtgttacttcccatattacgaatgaaggatgcagttgctccatataatcactgttgtttgcttttcatctgtgcgcttgaaagtttgtccgtgcgcttgacagtgatggcattttagaggtaatgcccgagtgacgattgcagtctttacttttctgaactatgatctggcactttagaagtaatgcctgacctaaggagcccatttatactcatgcccacgtgcttttttgagttccaagccctaactcactttttcctctgtctcttctccgcttttctgaattcttgagccctctcgttccgcctgagagattgcgatggctccctagcgaaagagacagagcgtcattgctccgatcattccacccatcgatcccaacagtcagcttccgtttgctagtaatcacatgtccataatttctaaatcagctctttttcatattgttgagactggggttttgccgccgaaagaactgtgttcttggtggatctggcgcgggtcactgttccgacagaggacacccacgaatccgttgtttatgtgtcactcctcatccgcagacttgctcttaccgtttctccctttttccgcagtctccttgacttctacgatttaaatctgacacatttaaaccctaactccattcttcaagttgctattttcgtacacctatgcgaggcttttcttggaattctcccccattttggactctggaggtatctttaccgttgttggcccggcatggctggaggacagcatcagctcgtcggcggcgcaagtttggaacttcgtcgggggaggaaagtggaataccttgacattcccctcaaggacaacattaagggatggcgcctcgagtggttcaccatggagaatcacaacaaatccctcccc

SEQ ID NO: 104077 - DNA, 424 bp, Zea Mays
gagtgtgtgaatcggggaaataactgagttatgttgattggacgtgatgtgtaaatttaaaaattgtaggtttgtgtgtagggtgtattattgaacatgtatgtcgatgtattataatagtgattgcgttagagtcgtttgaagtattttgaatgcatcccgaatatggttgcattcgaaatagggaaagagacatgtagtgcgctgaaaaggctagattgattttataggtcgtatgaaaaacgttctattaagtgtatacgtcgagtgtgctaaatggatcctacgtatgcagagtgtagtgtattggttaggcgaagagttttggaatagacgagtatgaggcgtgcagttaagtcgtgattgaagtgcaaatcctatgcaatgtgatgggattcgtgattatataggagttgtatttgtt

SEQ ID NO: 104078 - DNA, 602 bp, Zea Mays
ttttgaagggtccaatcatatccaatccccagcatgcaaatgaccaagttacgggtatggtttgtagttgttgtgccggtagatgatgctgtttcgacaagtattggcaggcttcgcacctctgaactaacttggctgcgtcaatttttgctgttggccagtagaaacccgacctgaagaccttcccaaccatggtcctggatgctgcatgcactccacattgcccagcatggacctcatctagaagttgctttccagtatctgaaagaatacacttcatgaggactcctgacgcgccccttctgtatagcgtgtccccaatgagcgtatagtgagctaactgccttgcgatatgcccggctgtatttttgtcatctggctcctcttcattccttatatatctgatgatcggctctctccagtcatcaggatttgattctggttggctcagagtattgcattctcctacccgatctgctgaaatgctcgggtgcggcacttcttggacaaaaactctagacgagacctgagtccgactggaccctagcttagacaatgcatctgccgctgtgttgcggtctctctccacatgatgaaactcc

SEQ ID NO: 104079 - DNA, 337 bp, Zea Mays
tttcggcagcgaagaaggcggttgggcgaaaaaagtgaaggattgttactattatgcaagcaattgaagaaacgccaccgccggcctcaaggtcaaaaataacaccagctaccgaagttgctgcctctgctgaagctgctccacccgaaactacaactgtcgaagctgcaacttccgaagctaccaatttggaaagcacattctctgatattgataaaatgctcttggatatggcgacggaagaagctgttgcagctgccgaagaaaccctggccgtagtgcctgaaaaagggaaggaaatcgccgaagatatttcggaggaaaaaggcttcaattt

SEQ ID NO: 104080 - DNA, 525 bp, Zea Mays
aaagttccatataagatttttttctctatgaaagatcaaggtacgaatcatgaattcaccaatttcgttttcacgcacatcaaacacattagtattaaaaccaaccaataaaccaccagacctaccattagggggggcaaaaaaccaagcaaaaggcttgctgcatgccagcgaagccagccaagaatcactaaaatgacttttttgagtttcttgcaaaccaattaaatcaactttctcatctctaatgagttctttcagaaactgaactttagtactagtcccaagaccctgacaattccaaatgagacctatcatcagaaatggtcaggggggagaccaaaattctctgcttcccgttttttattaggtgtatacctaattttgggggaagcttttttttgctgttttttttacgatgtttgatttttcttccttttctaaggaccataacatccaggagatcataatcaatatcgttctcataatcaatatggacattactatccacatcgtctatatcat

SEQ ID NO: 104081 - DNA, 282 bp, Zea Mays
aggcatgataggagacggctcacgggcaggcaaggtcactgaaatgacagaagaggtgagcacgtattagtcacatagtcataagtatatgaaatgtgaataaatacatacatagagaaatatggcacagaaagcgagagatatggcgatcgagaggtcaaacgacgcgaaaacggcatttgaacgagaaatagtgccataggaggtttggaattcgaattgaggcataaaatgacgtggaatggagccgatacttcacgaataggtttatatgggaaatat

SEQ ID NO: 104082 - DNA, 501 bp, Zea Mays
tgttgggccggcccgacgtgagtgcatacatgtccaaatggacgtgctgggccggccaaacacgagcacaacatgacttaaccgttaccatgcatgacacaatgaagtcgtcgtgccgtgccatgccggcacgtgggctgctagagccgcccaagcacgacacgactaagcttacacaggccacgtcgtgttggaggcacgatgatcctggtagtaacgtgcccatgttcgtgtccaatatgtaaaacacaccattcaactctattttcatcgcacatcatagaaatcaaatttcaatgcccaaatgcaacaatccaacacagaaacaaagcaggtctagcacaacaatccgacataagaacaagtattcaagcagttccaaacatgactaacctatacaacaaagaacaacaaagatcatagggggcagagacaggtgggcgacgcagggtgaggcggtcgccggagtagaggcggagacaagcagtgcgccgatgtgga

SEQ ID NO: 104083 - DNA, 404 bp, Zea Mays
gaaatctgtttgagttaaaagaaagaagcatcctatgtcacataccctgttatgcttggtcagttgatgatggcaccagccgaactaacactgcacctggaaatagcctgtttgaatgattgtggatcatgatcaaatgtggtgcaatattttattattattgtagtatttagaactaaatccaaggtgcataccctgttatgttccttgtcctgtttgattgctcatgctttattggaagtcatgtagttgacgatggctcatcagtatgagtacagctaaaatcacccactccatttgatatatttaatactagttaaaaagtatcattgccaactttatcctgttttaactatgtagctcagcattcatttgtattttagtatggattatggaattgcact

SEQ ID NO: 104084 - DNA, 674 bp, Zea Mays
tcaatagcaacctatctagcgtttcctccactgccatttccctttcttctgattctaacgcttcctcgaaacagtcccgaacccccccttgatcccggacagatcccacatgactagcccgcagtttagacataacaatgtcaaccccatgactatcatcacccaacaaaaacccaacagtatttaagtgagacgcaacttgccttgaagttaaagcaaaaatacacttagagttaccttcgttcagtcgcgccttaagcctttccgcccgctccagagttgattcgtccattgacgcgccccttcttttgctagaccgggtggacttgctacccgccagcatttcaggaatggcagccaactcttgagcgctgcaggacacgctttgatacggttccactgccccgtcttgagccacttgctgcccacccgaccctgccaccaatcccattccaccttcctcatccaaagccgccccctgagcagttccagtcttggattgatgggtaaatgatcccccagtaccagcagctggagcccgatcacccatcttaccaagctgaccaggaccaaccccattaagatcatcgccatcatcatcccccaacaggtcatcatcatcatcattgaaccccctctcaacattatcagtctcaggcagaagccccccattc

SEQ ID NO: 104085 - DNA, 528 bp, Zea Mays
cgaacataccatgtcaactagccattggaggttcccgttgccaaccattgatgcactatgtatcgtatgtgttacccagtgatgcattaaacaagtctggtgcttgtactagacttgtgtgtttttacgtgcttttgagtgtcgcatacagtgatttggtcgatgctgcaccagacatgtcttgtgccctttgttcgacttattccagttaacaccttctataagtgtcatacctagtggggcgtccgatgcaccaccggatgggtgtgatgcctagattctcctgaagtcaagtttgcaactctctctacatgtcatataaagtgtgacatctggtgcaccaccggataccttggtgtattctcagttgttttgaatcgtttctttggccgaacttggtgggatccctcttcgaagttgtctagcctttgataaggagggtgacgatagagacaatatcctccatttaatgacagacatgatcgagatgaagtccccctcgagcattcgttgctgccttcggaacct

SEQ ID NO: 104086 - DNA, 331 bp, Zea Mays
gggtggcggccaagaaggggcaaaagggggaaagggccaccactagggtttctttgagggagaaaagaaacgacgccacaaatgactctgacttagcatccaacggcccacaatccttttcccacatccacgcaccgaagatcaacctttggcaacattttttgggatattacactctacccccttaaaaagaattcgtcctcgaattcgaccactccaaacaaatcatccaaggtaccccatatagcacaaccattcaaaacatgggtccattattggtcttaattaacacaagaacttctacctcagactaattgtctaaggaaactac

SEQ ID NO: 104087 - DNA, 533 bp, Zea Mays
gagagggaggatgtgaagggcgtaatctagcgcccccattcgatcgcgcttcggcatcaggagaccttcgatcgcgggtggtaatgaagctcaggcgtgtttgatggccttcaacacagtgtgtagctacattggcaccagagatttaatccatgagcatattgctttcaaggtatggccccttgttaatgattggggatgccaaaagaaaccgctgctggttccagtgtagtcggcttggtttatctgaaatacactgatcgctataaaagtcagtttggcgagccaaacgatgaatgcttgaagctgttgaggcgaccagtgatgaattgatgggggcttatacgaaagcagaggacgaagccatgaatactgccttcggtgcccacggcaagagaaggttgaatagagtcttcgacgtaattggattcacctatcctgactattgttttcccacacggaaacaagtaacgaagagtaagatctcatctaaagcctcttccaccgcaccgaagccaaaaaagactaaagtt

SEQ ID NO: 104088 - DNA, 416 bp, Zea Mays
aagaagagcgtgatgcagctcaacagtgcttgaaagtaatcagagggtccgtgctcttgctgaagcacgagcctcatgattgtaagagtcattcttttactatcactgctgcatcagggtcgctctacctcctcgcaagtatttactatcaattatatattttaaaaaaccaaatgaacaaacaaaccgaaatttcaggcaacaccccctatttcagattgtgcaagcataatgaaacagatcaccaaaagaattcatagaaaaagaagggagagggattcaagatcctagaggattggtgcatctcaaatcgaatcgagaggaacaaggtcgcaacgcaaagaaaggcgcaagcagagatgagcagaccggagggaaaaacaggagacgaatgctggcggcggacgcgaatgctg

SEQ ID NO: 104089 - DNA, 504 bp, Zea Mays
tggattactgtagcttcaatttcggtcggctttgtttcagcttcggtttgcgcttttgaagcctcggcaattttccttgaaggagtagagctcaaagtctttactgtttctaacacatctagtacatttgccatccttctcctcttggaagttgcggcagaacttttttgtgccttcagcactgttacttctgatgaagggcttaaaatttctatcgcttttgtttcttcaatatttggcttttcagctttatctttatcagtcttcaactcagctagctcggctgagggtaccttcgacattataaccggctcttcagtcttctgtgtgggaggaacgggttctcttggttcagcagctgaagaagcctccccgccaaactcaggcaccacgaccggttcaatatagcgtggccggtgggtaagtaccttcatctttttacttgtagccttcggcacaggttcggccgaggcggccacagcagtagctttcctcttcttccct

SEQ ID NO: 104090 - DNA, 326 bp, Zea Mays
gaagtgtcttaaacaaaacctaatgtaagacggtttattggacaaaatgacgtaacaaattccttttttagacggttataaattaaaaaatgtcttatttaatatcttttaagacggtttataaccatcgtaaaaacggaacatcttttgcgactccatcaaatttggacacatcataaacgtcttaataactaaaaattaaccgtctcatataacacgatttgtagtagtgaatattggaactcaaaagttatttgatttctcaaacaaaacacagtttcaaataccatggtttacaaaaacgtggtatttttgtagtttttgaa

SEQ ID NO: 104091 - DNA, 289 bp, Zea Mays
aaagtctggaacaaattatggcgttgctgcttctctgatgattcaggatgagaactaagaacacgctgcaccatgatgcttcaaaggttcactgtagcatcaacaccaagcatgacatcatcattagcagcaacatcactagaatcatcatcgtcatcctcaccatcagaagcactaatgtagccatcatccgtagcaatgtatgttcgctgactcgggcaatccttcttcacgtgaccaatcccatgacaatggtggcaaacaatacccgaagaatgaacactggaag

SEQ ID NO: 104092 - DNA, 341 bp, Zea Mays
gcagagccttcgccacgagcggagggttccgaggagctaccgagcgtgagttctaggtataggaggcgaagggcggtggcgaaacggagagtgagtgaattgtcgcgaagtggtaggcattatcgtagtgagatggagagtggtcgtcttcgcgtggatgggactggtaagcgagaattgttgtcctcaccgattggggtgagtgtaggtgagggggagctgcgaaatatttttgatggtgaggaattgaggataatgttgttcaactacactgagatgggtatcatcccgaaggttgagccaatgtaatatatgatgccctcgctgtgtgtatgtaaccg

SEQ ID NO: 104093 - DNA, 527 bp, Zea Mays
tttactcgaacttcgaggagcaaagaggagtcaaaagtcgtcgcttcgtgttcggcgattgccgtttcaattctacagggacagggacagttgaaaagacacaactgttcaacatgaaacggtctccacacggggctgagttaaggctacagggacagttgaaaagacacaactgttcaacatgaaacggtctccacaggtggctgagttaaggtgccgctagtggaaagaagatttccactggcggttcgtaagacaaccgccagtgctatgtttttcactgacggtttcttaagcaagtcgactgtgaaatttgtattataaatacccccacccccgacaggaatagctagctcgcagccaacttccattggaggcgattttggagttccaaattatataaaatacaagggtcgaggttttgatcttcattttttggaggaaggttgctaagaaaggttggttttatgtttcattgtcaatttttgttcatattatttatcattttagccaaattttgtatctat

SEQ ID NO: 104094 - DNA, 628 bp, Zea Mays
catagtaagttgttgtgaagtttgacacctctagaatgcatgcctctgcaatggaagcctcgattttgcatttatttctacatttctttcgaatagtctttagacatctctcgattggatagcaccaacgtccctgcacgggccccccattcatgcctcataggggagatgaagaatcaaatgctgcattggattgaagaagccaggtggaaatatcttctcaagcttacacagtaacacgggtgtcaatctttctaagtctgcaatcatggtccgagataactcttttgcacaaagctagcggaagaaatagctcaactctgaaagcgctagccagacatgctcaaggacataacctcgaagaatcgcaggaagaatccattcaatgcatatgtgaaagtcatgactcttcatccctaagactcgcagagtagataagttcaccccctactcaggttagttgcatacccatcaaggaacattaacatcttgatccactgaagtacttccttcctttgggccctgcttaggacgaaatcggccctaggccttctccatgtctttccaccactaggcggcttcatctctttgtttggtctatcacataacgctgccagatccactcttg

SEQ ID NO: 104095 - DNA, 834 bp, Zea Mays
ttcggggcgccaaggctgatcttcgaaagcatagcagaagccgaagctactaggctggaagacattgatgtactcgaagaagaacggctaagtgcagtaatccaatcagcacggtaccagcagactctaaggcgctatcacgacaaggccgtgcgacggcgatccttctcagtaggagatctcgtcctccgccgaattctaatgggggagggacgacacaagttatcgcctttatgggaaggacccttcatagtagcagaagtcactcggccaggatcatatcgtctcactcagatggatggcacggaaattggaaactcttggaatatagaacatctcagaaagttttatccctagctgtatttcaaaagctatcgggacggcgatgtactctgtaaaatgggaaatatgtcatcaataaaaaaggcttcaaagatgctcagtttgttcatgatcgacttgcattcttacttaactcggggtgaccactatgccctactaacggagcaatcggcttaagtcggcaacgacttaaggcggtgcaacatgctcgcgcttacttaactcggggtgaccactatgccctactaacggagcaatcggcttaagtcggcaacgacttaaggcggtgcaacatgctcgcgcttacttaactcggggtgaccactatgccctactaacggaggaatcggcttaagtcggcaacgacctaaggcggtgcaacatgctcgcgcttacttaactcggggtgaccactatgccctgctaacggagcaatcggcttaagtcggcaacgacttaaggcggtgcaacatgctcacgcttacttaactt

SEQ ID NO: 104096 - DNA, 428 bp, Zea Mays
gaaaaagactaatgtttcctactcgtgtgcatcatactacaacaactaagattattgagggagaacctatcatggctggtatgtttcttgtgaaccatcaccttgtggttgtcttatttgattccagatcctctcattcctttatgagttttgcgtttgcacatcggtatgagcaagattctagagaaatgggtttaaatactagataagttcaacagggttgatgtcatagctaatagagtagtatgtggagtaaccctttgattagagggcagggtctttcgtgtaaatctaatagttatgccacagctatccttggatgtaatcctaggtatagattggatgaggaaatggaaagttgtcttggacacgggaaataggctcgtatccattcgagagccgcaaggcatggggttgtaccaagtgac

SEQ ID NO: 104097 - DNA, 538 bp, Zea Mays
gtgaatttgtcaatagaaactagtacatgagtgtatcctccttgagctttcttgaagggtccaatcatgtccagtccccagcatgcaaatggccatgttacgggtatgatttgcaattgctgtgctggtaaatgctgctgttttgataagtattggcaagcttcacacctctagactaactcggttgcgtcactctttgctgttggacagtagaaaccagacctgaagaccttcccaaccagagtcctggatgctgcgtgtatcccgcattgcccagcgtggatttcatctagcagttgcttcccaattgccgaaagaacgcacttcatgaggactcctgtcgtgccccttctgtaaagtgcttccctaatgagagtatagtgagctgactgccttgcgatgcgttctgctgcatttttgtcatccagctcctcttcattctttatatatctgatgattggctccctccagtcatcagaatctgactctggttggctcagaatattgcactcttctgcccgatctaaggaaatgctcg

SEQ ID NO: 104098 - DNA, 378 bp, Zea Mays
tgtaaaacttgcccttctaacgacccataaatgcaatagaggaatcatccctcctagtgaaaatcataccatttttcgtgaatggacaattgtggccccatttcacacagtttgatataaacaacaaattataacttaaggaagcgagaaagcaaactagtacaagccacaatgggatatcagtcgatagaatgatttatcttaagaaccagaccccgccaaggagccaacatggccgcattacgcaatcggacccctccaacaatttagcgagggtcgttgcagaaaggagcatgataaaaccagagtggtaagggcccctctcgcgttggcgcgtgaaagagatccccttcacatattctcttgtctcttcagagt

SEQ ID NO: 104099 - DNA, 615 bp, Zea Mays
cagcaggaccggcaccagaagactcgatcattcggacttccacccaaggggccaaacttcagtagaccagctggacccaccccgtcacggttcagccagcagagtcagagctctttccattccccctcagtggcaagcaaccaacccccagcgaatgcatgttggcactgcggtgatcccagtcacttcaagaacaactgtccgcagctgaagccaccaggacccgcctactccaactcggtgaatggccccaagaatacctcggcacctgcccccaaggtgccctcctccgtcagccagtagaacaaggccccgtaccaaggaagggcacgagtgaatcacgtcgatgcctaggaggctcagcaagctccgggagtagtgctcggtgagttccttgttgaatttactcccgctaccgtacttttcgattctggagcatcccactccttcatagccactagttttgtggaaaaacatggcactccctctactcctctagagattcccttggtcacccgaaccccagggtcagaccttctatgccagctcaaatgctcccaagtcagaatccttttaagtggggtagtattcctggcagacttaaccgtcttgcca

SEQ ID NO: 104100 - DNA, 428 bp, Zea Mays
tatttttgtgttaaaaatcaatttcagatattatttatatggttttccttattctctggactgagcactaaaaacagataagtacagggtctaacgcgaaagaaacccatgacacagacttaccccgcggtggatggcgggttggttttaggaaactataggggttcttttgcaactcatacggggcgaaggggtatcggccaacgagcaccgttggattcaggatcaacggcgcagattacacaacccactttatgaaccagaatcttatcctggccatcagatctaggatcagcgacccgaaaccacccacgcccgattcactcgcctagcccttgatcttccgattaacgccccagattcgaagtgtccaaaggggacactcaagatctaatctgagccgtacacttgaaatcccgcgaccctgg

SEQ ID NO: 104101 - DNA, 383 bp, Zea Mays
acggtgtaaggcgttttatgagcttctctcaagatatccatcttcacctctaatttctgaggcacacagaggcggcccctaaaacgaaacaaatcattctcatcaatggtgaactcccgtggtttaccatcaccaaccctctttcgagcttcctgcaatagacgatcctgctgctgagccgcacgcactctctccatgagagaggattgaataagcatccgagtctcctcgctagcggtgccgacataacacaaagtgattcccaaacggtctagatcagcgatcaacggcaaggccacctttggaacctcggacctgctaagggcatcagccactacattagccttccccgagtgataatgaatggacaaatcataatcttt

SEQ ID NO: 104102 - DNA, 990 bp, Zea Mays
tgaggtcggcttcgaagagagccttgatttgatcatactttgcttggtgctctagaggcaactcttcatacgtgacatatctgtcttgcactggtctacacgcatttgtctgagtgttcgctatctggacagctcatgttgaagatgttgacatagatggtcccaccggatgtgccaaaatgtgtttccacctgaaacccaccagcgagagacgacaaccaacatgaggagacatgaggcttttgggacggctggtgagcctcagtcccttggtcaacgactcaaatcctggcgtacgacctagcttcgaggtttgcctagcgtgccacctgacctaaacccgatcaggagggtgtcgacgtgctccgagttggtttcttgcgtacacaaacacatgcaaacgtcagtccgagtcgttttcggctcgacgggtcatatcaactgtgagaagccgatcgtttccccaggcttgcattggatccacgcatcagcgacgcacagagctgatggctcttgagaccccgctctgttcacaccaggtggatccaaaccactatggttaaggtttcaccgcacagtcagatcatccctcacatagtttggcctagcaagcatgatggacatctaagcgctgaccatatcataggcctaaaaactagcgcaagccgattcccgaaacaatcccaattagagccgacgcgaagtgtctggcacgttactggaacatccaacttgtatgcatggcaactatgcatatattagacagatctttgacgaatcaaagactaacgtgatagatcatatctaccaggtgagacaaagctaggaaccgccctcgcactcgagaactcacgtggggctgcgaagcattcataattggcaaacatcatgcacacatgacgaacccggcgtaactttcttgtaaatgctacgataactagtgcttcttgccataaaaacgcttcggtacgagagaacacaaagatttaa

SEQ ID NO: 104103 - DNA, 399 bp, Zea Mays
tacagagggagttcttctgttggtaacccgagttgagtcagctaggcctcggtacagataagccgggtaagccctgtccttcaacggctgaatgttcttgaaaacaaaatcagcaaccacagcctctacagtcagacccctctccttcagcagtccaacttcagctagcaaagccccagcctcagccacctcctgatctgtgggggactcggtccaactcggagtacgaacgtctggctgtctccccgaccttggggggagagaatttccgtggttttcaacgataaaccactccaagcgccatcccttaatactgtccttgagagggatttcaagataatcagacttcctcccacggcgcatctctaaactagcacccccaaccagctgatgctgccc

SEQ ID NO: 104104 - DNA, 522 bp, Zea Mays
ccaagatgagatgatgttcaccttgttgatgtctatggtgacaacgttcaccatgttgatgtccacggcgatcgacggacgacgtcccaaaggttggcgaccgttggcatcccaaagcagcacttcaaccactttaggtgaaggttgtgtgcgcggagggcatcaaggacgagatgaacatgttgtacgtgctcagaccatgatgaattatagatcaaaatgttatcaaagaaaacaagcatgaagttgcagatggaagggctagaggacttcgttcataagcgcctagaatgtggtcaacacattagagaggccaaagagcatgatgaagaacttgaagtgactatggtgtgtcatcttctcgatatcatcgggatgcatccgcacctcgtgatagtcgaatcgcaagtctagcttggtgaagtacttggcagcatggagctcatcgatcaaagggatggggaacttgtccttgtacgtcttgtttagtgtggtgtagttgatacaaaacctctaggatcc

SEQ ID NO: 104105 - DNA, 849 bp, Zea Mays
aaattaggcgtacttacatgtccactgcctaggctggtgacaaaggagggtacaactacgactaattactagtctcctatgcactaataacaatacgaagacacgttgatgcagtaatcagtacatggacacacgttgaaagaaagcatgaacaaataatagggctattcacattaccttggctgaagtggatcttggaacctcacacgaataacccgagttgatgcggaaatctgaagggtacccctgtttcgttcggcttctgggatatgaagaacaaaaacgttagtacatcgatggtaatcagttctgatgtactgaaaaactggacatggtgtcaatctactagaatccggttattgaaatgtaatattgcgtcggcagctaacaaacaaaaatagggtacaagtaccaaataaacaaataatagtgcaaaacacagttcaatggtttcccctaaaccgtgaccaacaatcgttgaacaccatctctgcatcacgttgctaggagtcaataaaggggggataaacatcttaaccacggacgtacatgcaacctaaaccctaatcatgacatggatatgcaacggatccggaaaagcacaatacgagaatgcgatgggggagacgaagatggtacctgcgaagacgccgagatgcgaaaggggggaagtgtccaaggttgacgatggcagtgggagttgacgacggagttgcggctcctcggtcaaaaccctagcgcagtgaagggtgacggagccatcaaaacgactgcggcaatggtcagggcccttttcgaaacgaggcagccgggggaggaggacgagcggatacgaaacggaatgcaaat

SEQ ID NO: 104106 - DNA, 379 bp, Zea Mays
ggagtagcagaggcagagattagaggtagaagaagggtattggggagacggcggcggccaagacagccagcccccaggtactcgtattatctttctgttgtttgatgccctctctgtctcagcgttccccggtttatacgccttattacaactcagcccaacagacctacacaacccactccggcccaaatactttcacgctacgacgctttactcgttgtggacgcgcaacggcttcctcctcggactcgccctccacgtatttgtctgcacgaccgacgtcctggctgttggagctgacattcccccggtcttgaaacgccgcttgtccccaagccggcgcgtgtggaaacctgtcctgtaatgctttcaaatcttc

SEQ ID NO: 104107 - DNA, 341 bp, Zea Mays
taagaaaaaaaaggaacaagctcagataacacgtatgtcgtcaaaggttcagatgactgcaccggacccaccagtgcttctgattttcgtcacagcttgctacgtgtcaatgcgttcagagtaagctttatatcatcaattagtgcttgttctctgggcggtgtggtacttgtattgctagcgactgtggcagaggcgtagacgcgtagtgatactgtgccgcatgaccgactgggctcgtgcaggaaccttggttctgtttatacgcatattgagccttttgtggagtgtttcatgggccatgttttcgtgtggtgggctaaatttaagcaacaagtcca

SEQ ID NO: 104108 - DNA, 384 bp, Zea Mays
ttggaaaatctatggtgaagaaagggcatatcgaggcgatgaagggtaggtattttcatgatgtatctatagtgagagccggggaggagaactctatctcagtccctgaaaaagatgaagtggtagtttttctaagcttcatgaaagctggaatatgttttcctttgcataagatgttggtcgaggtgcttaaaagatttgagatatatcttcatcagcttactcccgaagctttagttagaattggggtgtttatttgggcggttaaaagtcaaggcttggagccaaatgccaattgtttttgcaatattcaccagatcttatatctgacgaaggctactgggaaggagcagtaccacaacaactttggttgttatacctttg

SEQ ID NO: 104109 - DNA, 641 bp, Zea Mays
gtcggagcaagtgctcaccgcgtaacacatgccatcatgggccaaccttcctgtgctgccaatattgtgcaacatccgttagaattcgaaacaagcctcctagcgccaaatcgctcctcaccggcggaccttggccacgtgcaggggtggtgccaccctgttcggcgttgtgggtagggggatagcccagtgtcgtccgattcgatggggacgtcctggattggatggtacaatacctcttcggttattttaatccaggtcgtgcgatcaggttcgagtggtctagattagtgggtcgcgtggtcatatctcagacgttgattccaaatccgacggtatcaaatctagcacaggttcacgcttcggtttgatataatcctggtcgtgtaactctaatccatcggctcacgatcgccaataccccttcggccatgactccttgcaaaagagaccctcgggatagtacatatgaacccgtattcataccgaagccctcgaatttaactcttaaaattgcaaactagtccctacaaattgcaaaatgatccctagagccattgttttaatatataatgaaccctaaaacttgctttatatataactaacatgctttaactccaatttgacccgttcaaattgtg

SEQ ID NO: 104110 - DNA, 471 bp, Zea Mays
attgtgttctttcgctcgctcgtgtctttgtgattcttgtatgcgttactgcgatttgctcttgtgtgtgtaatttctctccctactttactctaagttataactctgatcttctgtacgtaaggctacaagaaactctaagttgtggagattccttccgaaccggaatacttgtgatataaggaagagtagtgtttccaaaacctcgctctgatgaagagcctgcacaacctaatgtgaatcgggtttttagacagtgatcacacgactgctcgccaagttgatctatgatatcaagttgatctatgatacccgtgataaaaaaaacatgataagtttgtcgctcacgtttaatttactatttgtatataatacctttttttggctgcatatctaatttatgtagcagttagtttgggaattgatttaatcttgaaagtgcttcatcatctaacaagaaatcactctccc

SEQ ID NO: 104111 - DNA, 761 bp, Zea Mays
ttgatacgaaactggtaaaggccttggaaggaggcagattccagccgagtatgcaacaggagcgccgatgttcgacaccttgcctctgagtatcatctcgagccggctcaccaagtccatggcaggaattcttctattgattacctgggttgaatcagccaggcctcgatacagataggccggatatgctctgtctttcagcggctgaatattcttgaaaacaaagtcagcgaccacagcttctgcagtcagacccctttctttcaacaatccaacctcagctagcagagcccctgcctcagccacctcctggtctgtgggggattcgatctagctcggagtgtgaacatccggctgtctccctgaccgtggggggagggaattcccatgattctccacgatgaaccattccaggcgccatcccttgatgttgtccttgagtgggatgtcgaggtagtcagtcttcctcccatggcgcatctccaagctcgcgcccccaccagctggtgctgccctccggccatcccaagccgacagtggtacaaatacttccaaaggccaaagtgaggcaaaacaccaaggaaggcttcgcataaatggacaaaaacagaaacttgcagaatggaattgggattcagatgggtcagattcaagcgatagaaatcaaggacaccgcggaagaaaggagaaatgtgaagagcaagtccgcggataagaaaaggaacgcaaatgacggattcgtgggtgtcttctgtcggaac

SEQ ID NO: 104112 - DNA, 584 bp, Zea Mays
tgtctagaacaaatgagtctagtgctattgtcttgatctctttgatcgattttgcattcggttgaggttttgcactttctatttcttcattgtcttcatatgatattgcgaggacgtgaacgttactttgtcctagcgaagtgtcttttgtatgttccttacttccatttggtctatgaagactattatgaccccattgattacaatcgttttcatgtataagcatggatgactaatattggctttgaaggtatttatatttcgtgttcaaaatattgtgttatatggtaacacatatcaaaaacatcgaacactatctattcagttcatgcattgttcatagtgtgggatgatacaggtaaatttattttgcctacaccatttactccctccaatttcctaaacgaagtcattttggacataatctcacataccatggagtgattaactagaataaaattttctttgtttgcccttattaaataccttccatggccataatgtccagtaaagtcgtccttcccaagtagctattgcctataggttggatgccttttggtgccgagtttgattcttacctaacc

SEQ ID NO: 104113 - DNA, 665 bp, Zea Mays
ggaaaaatttggcacaaaacgtcgataatatccggcaagccccaagaaacttcggattttagagacactagagggtctcttccactccaccacatcagcgacattcttgggatcaaccgcaatgcactactgattaatcacatgacccaggaaagccccttcagacagccaaaacgcacacttcttcaatttgccataaaactgattcttcctaagagcacctagaacgagacgaagatgccgctcgtgctcttcctccgtttttgaataaatcagaatatcatctaggaacacgaccacaaagttgtccaagaacttatgtaacatcctattcattgcttccataaaagcagcagggacattagttaagccaaaagacatgactatgaactcgtaatgcccatacctggtgcaaaaagctgtcttctcaatatcctcctcacgaatcctcaactaatgataaccatagttcaaatcaattttagagaacacctaggcacccctcaactgtttaaagagaacctcaatacgaggtagcggatatttattcttgattgtcacttgattcaaagcacgataatccacacataacctcttgcttttatccttcttctcaacaaacaatactagggaagcccatggcgacctactaggcctaatgaaac

SEQ ID NO: 104114 - DNA, 422 bp, Zea Mays
gctagctattcatttgtttcggaggattttgtgtcgcgggctagtctttcggtgtagaggttaggtcatctaattgtggttagatctgctaatggctccattagtagctgttcagtttgttaggggtgttccgtcattcttgctgatgagatcttttcggccaatctggtggtgatttccttgggggcattcgatgttatcttgggtatggattggttatcctagtatcgcgcatttatatcctgtttttggaagacagtgttattgcaggcgccgtcgggtaaggaggtggtattcttgggtagttccccgaagttcacgttatacttgttggcgcaattgcttcctgatcgccggtcaaggaagtcggggatctttttctccatggtggtggagggtgaggctgccttgcgggtgcagga

SEQ ID NO: 104115 - DNA, 593 bp, Zea Mays
ataagatattgtatgttctcaagaagaggagaaattcttatttccatgtactttaatagacctttcaggtttatttttgaaagaccatgtagtcatgaacatcaatcgtaatgttgaaccgaggacgatttgttgtcaagaaggggagaatggatgagaacattactggctcggatatgaccatgttaatggctcatgttacaaaggtgaaactcttccacgttgtaacttcctttgatatatttgaaaaattgatattgcgtcgtaaagtgtgtttttatttgtagaacttcttacatggatcaagcaatgtgttgagtgtacaaggaaggcattaaagaacaaagaagttgattggggaccaagtaatgatatttccaacatccccaagtagaaaaccacgccatcagatttgaagccatacttgagtgaggagtacaagatagagtcgaggacaactctactgcaagaaggggtggatgctgaggacatcgcttccattgatacaacaacaacgacaaccattcacaagttactaagaaagactcacacccgttcaagtgaacttaattattaggtgatctcgttccttg

SEQ ID NO: 104116 - DNA, 391 bp, Zea Mays
aagtttgtgtggaccccgaagtgtgaggaaagtttccagatcataaaggagaagctcacaacttagcctactccatccacccaggaaccaccaagatgcacctatacctcaaaaccagatactggtggagagggatgaagaaagagatagcacagtatgtggcccggtgtgacacttgccaatgaacgaaagccgagcaccagaagcctgcaggcctattgcaaccccttccagtgcccgaatggaagtgggaggagataggcatggattttgtaaccggactaccccggacgcaaaaagggaacgactctatctgggtaataatagaccatcttaccaaggtagcccacttcatcccagtgaaaactacctttggaggagccacccttgc

SEQ ID NO: 104117 - DNA, 510 bp, Zea Mays
gtcgaggttaacagtacattttatgttagctgcatagcggtctggaaacttcaacattttcaaccatcgaaatacttcttttcgctcttccggctttagacaatatggagctcgtggtgtcctctccttcccattaggatttaatttgtcctcaaggctagggcgatcgcaaagattagctaaatctttcctagcattgatgttgtcttttgttttacccttaatgtttagacacatgcttatgatgctttcagcaacattgcactcttggtgcatcaaatctatgttgtgtggtaaaatcaataccttcgcatacggaagttcccagagaaaagaaatatgagtccagttgtgatcttgaccatagccttcaaactcatgaccttctgcagccctttgaagggcacgatgttgtatcatgatatcttcacccattaaacgttttggtggaccgtctttaacttttatgcctcttctaaatgacttcgtatcatttcgaaacagatgatt

SEQ ID NO: 104118 - DNA, 384 bp, Zea Mays
ataaaccatgcaatatcgcgacgtcagaccattcatgctattgtatatacgtgatcagtgtgtgcgtagatctaggttggtttgagattaggaaagtattgctgtaaattcgcgataaatgtgggatggttaccgcgtaaatcgtcgatctgttacgtaacgacgaatgaggcccaaattacggcgtgaaaaacacacgctctgatcgtgctagggttctggctcgggtggatttaatcataaaacgtgaaccgaaatagcgtaaatgaatatgaaatttacgtaaattatagacctgtttcgtaacagcgaatggggcccaaaaattacggcgtgaaaattgcgcacgttcgatcgtgcacggattctagctcggtcaaattt

SEQ ID NO: 104119 - DNA, 351 bp, Zea Mays
taggaaagctttacgaccccgtctagaggccggaaaggaacaatcaatcctatgagccatatagggcaaatggcaatgcaccacacaactcaaaccaatgggggaaagacaacatgctaatatccagccaaccccacctatgtttaaccagagagccggtggtctcgcaccggctgccatcgatatagtgagggaggaaatagccggggcgttccgagataagctcggagtaagcatggtccctggggagaaatcatatcggaaaccttatgacagccgatttgatcatcacccatacccacagggaaccaggatacccgaattcgcaaaattttcgggtgatcaaggaaa

SEQ ID NO: 104120 - DNA, 365 bp, Zea Mays
tagtattgcagaggttgttttcaaatctactaatgaagagtaagcatcaattatacctacttgagtcatcgcatgttgctgttgtatgaaagagtagaagtagtcctattgcgccttctaatgcttgtcatgccgtcttagcccctcgagcagcctagccacctccaagtccttggtgggctatcgagaggaaatgcccgagctacagaacaaagaattcgtcctatgagctctcacctccattgagttagtcatttcattgaaaagtatgtacctacaagtgttttgaaaacacacttagggcatgatcatattaataacacttgaaaaattgataagttattagagataactgcacatgcatg

SEQ ID NO: 104121 - DNA, 593 bp, Zea Mays
aaaggtctagtggttaccaacaaaatcgtcaaggaagcgtcatgaacacaccggccagaaataacaatacaactactccagtccaacctagtggatgtttcaaatgtggtgaacttggttattatgccaacaattgccctaagcacaacccacatacaccccagagcaacaacagtcaaagagttgatcaaaatacacatgctcatggtactgcacagaacaagactccgcagaaccagagtaagggaagaattaatcatgtgacagcagaaacagttcctgaggatgccgacgtggtgtatggtatgttccttattaactccatacccacatcagttttatttgattctggatcatctcactccttcgtaataaagtcatttgtggaaaagcataaaatatcaaactatcctttgaagaggaaactactaattagatcactaagaggtgaacttaaagccactcactcatgccctcagactaagcttgagattagaggaataagctttctagtagagctgataatcttggaatcgagtggaatcgatgtgatacttggaatagactacttaaccaagtatcatggagtaata

SEQ ID NO: 104122 - DNA, 394 bp, Zea Mays
aaacggggtagctaaaaggaagaaccgaacggtgtgtgacctagctaatgctttgttgcaaagttcgaggatgcctaacatctggtggggcgaggcagtactcacagtgtgctatgtcctaaacagggtgtcgcctcgtaaccgtgaggccacgccctatgaaggatttaaaggaagaaagccagatctttcgcatcttcggacatggggctgccttgaaaaggtgaatgtcccgttgccaaagaagagaaagctaggacttaagaccatagactgtgtcttcctgggttatgcacataacagtgcatcttatagatttctagtggtccattccgagacgagcgaagtcgttgtaaatgtcataatggaatctcaggatgtgacattctttgag

SEQ ID NO: 104123 - DNA, 339 bp, Zea Mays
actccctggctacgaagggcccaaatataaacacttaatctaacgatagcattaggggtcagctgatgaaggtaaaccccaaacttcttcagtacaatagcaatcatcttgtttagggggaatcttaaaccagctttaagaaaacttttgaagactactacctcatcttttcctggctttgggacagtttcttctccaccaaaacgaattaattccttcttggcctcactgaaatagcccagcttcaccattttaggaagatcagcttcagagatggtggactttccaaagtccaaatgactaggtttacttggcaccccgcagttgtattcatcctcg

SEQ ID NO: 104124 - DNA, 297 bp, Zea Mays
cgactcatgaatctcttcatcgtggtgagcaatttggtcctctaaatgttgaatgactaaatgatttcttgctatatctgaatatttgttcatcttgtatgttgaaaacgtaaatcttgaatggatgaagtgaactttgaatgacgagaatatttgttattacgcgttatgggagaacaacctttttaaagggagcatgtgcatgttttaacttctggtcagctaatggtccgattaatttcctggtaccgtttgtttcctggtgggctgatccgacgattagaccatctgattcag

SEQ ID NO: 104125 - DNA, 455 bp, Zea Mays
ttaaaagcctgggaaggaggcaaattccaggccgagtatgcaacaggggcgccgatgttcgataccttgcctctgagtatcatctcaagccggctcactaagtccacagcaggaattcttctgttagttacccgagttgagtcagccaagcctcggtacaaataagccggatatgctctgtctttcagcggctgaatgttcttgaaaacaaagtcagcgaccacagcttctgcagtcagacccctttctttcagcaatccaacttctgctacaaaaccctcgcttcagccacttcctggtccgtgggggactcggtccagctcagagtgcaaacatcgggctgtctccctgaccgtggggggagggaattcccatgattctccactatgaacctttccaggcgccatcccttgatgctgtccttgagggggatgttgagataatcagtcttcctt

SEQ ID NO: 104126 - DNA, 772 bp, Zea Mays
ccttgaagagtcagtaagggaaaagctgaattgcagatggctctaattgctcggctgcagcacccttacattgttgaattcaaggaggcttgggttgagaaggttttgtagttcaggaacttgttcttaccttgtttcttctgtttgaacttatttagttgacaaggtgagttatgcagggttgttatgtctgcattgtcacgggctattgtgaaggtggagacatgtgagtgtgctttggcggtcatccttttagttgcaacataaccacatttagttatgagaacctttgtcttgtttttcagggatgagctgatgaagaaatcaaatggtacctactttcctgaggaggtatgagaagacttgtgcattttgtttatctggttgaaggaaggaaatcatccacattgcacttataacaccgaataatcttcaggtattgcttaaatggttcgctcaattggtgttggctgtagattacttgcactcgaactatgtcttgcaccgtgatctgaaagtaagtgaaacacaatagatgatcatcattgtcaattttttatgcaataaatggtcatgactcctcaaacttgcagtgctccaacatatttctcaccaaagaccaggacatacgccttggttagtctctcacaacaaatacagtaatgcaagtctgtaattgacatattacatctgtttcttgttatgcttcagcatatcaagttatcttattacctggtttccatgcaggagactttggcctggcgaagacttt

SEQ ID NO: 104127 - DNA, 898 bp, Zea Mays
caagtctgaactgtatatttttttcctcctctttgcggatacttcacgtttttattctgtgttgcgtagagcgtacgtgagtggtcttggtttgtttgattttgcccttgagcaggcggactcagttgctcaagtcttgattgcccccatctaatcaccggagcacagtggctttgcttgtatctgcagccagttcgtctggaaaggtttttttatctgtttttttaaggttgcttttgaatagtgatcgtatattcgcgctttgcttgcacgtggtattcttttctgttcttagccgcaactattcatcggtgtcgaacagagatcctttttcagcgtgaacttggctgtttttgagcgaagtatgtcgtgcatattttgagtggcgcaagtccgttggcttccacgcatagctggcatatgtgtgcaagcgactagtcagaggaaaaaaagtgagtgttagtgccttagtggtgcttaacgacctgtatctgttctaacggaagtttggcaagtgacaacttatgctatgctagtacaagctattaccggccatgtgcatggaaagtgtcggttagatatgccaaaatatgaacatgacacttaaaatgataaccagggagccatttgcactagaggtcgctaaagtttggctgcacttcatcctatttgtctctcacgcctatgtgctgatatgctgtgctaagctggcatgataggactctttggcttcttcaaagcattgatgccaattgcaataagcgtttctggctccaagttgactattcactctatcttttggtggtaccagatcagatgaattgttgtcgctctattcgaaggtcttttgaacttactggctatgctttacagcgattatatgctttggcaaaagtat

SEQ ID NO: 104128 - DNA, 347 bp, Zea Mays
tgatggcttcggcagttccgttctgcatggtggacatagtgcttttaactgctctgtcgtcttctccagttttggctcttcagctggttttgccctagcatcgaatggcatagggcgacctggttctgttataggagctaccccttcacttagctttggcacgtcgaccgtctcaatgcgcttgggtcagtgtgtcaaaactttaacctttttcgacctcgacacaagagaagttgctgagataacagctttcctcttcttcccttgctttcgtgagggataacaataatctaggtacacaaacccgataacatcaaataccctattcaatctctttttgacccgag

SEQ ID NO: 104129 - DNA, 442 bp, Zea Mays
cgccccctatgcatccggacgacatcagcaagatggctttccatacacatcacggaaaatttgagttcctcggcatgccctttgggttgacaaaaacaccctccacctttcagtccttaatgaatggcgtccttaaatcctatattcagaagtttgtcttggtatttttgatgacatactcatcttcagtaagacatgggcagaacaattgcagcatgtgaagcaggtattcctggtcctccacgacaacaaattgttcctgaagcgctccaagtgtttctttggggaggaaacaatgtcctacttagggcacatcatttccaaggacgacgtcacgatggatccagccaagatcgaggcggtggaggcatggccttgaccacaatctctccgggcgctacggggcttcctcggcctcaccgactactacaacaaattcata

SEQ ID NO: 104130 - DNA, 518 bp, Zea Mays
acagataagaccggtggtgcttgttgggaggaagcaggaagaaagaggaagaaatggaggaagaagaagaaagaaaggaaataagggtgccgtatgtaggcggagtgacgcaggtgtatcatgtggttagcggtttgaataaatgtttgtacacagagccagtgcggatgatctgcaaagttaggcagagctcccacgcaaagcatactgagggagaaaatggttttgcttgtttcagatgttgtaggtaacagacccaataaatgtctcacccgtgatttgattctttatgcgcttttgcaaaattaacctaaactgtcatgccttatgtcaaaattttataacttgttcggttgactgcgccagttgcatggcttatacaagagtcaagacctttcccattttccccaacagtactggaaacaggtaaagatctctgtaactgtgttgctgtcggttaaagaaaggcacatggaatccgggaagctctcattgtgtgcattcgatggttcagagat

SEQ ID NO: 104131 - DNA, 1426 bp, Zea Mays
caagacggtggtccttacagtcgtcgacaaattctccaagtatgcccacttcatcccgttgggctagttttggtggctcgagcgttctttgacaacattgtcaagctccacggcatcccatgttccatcgtcagtgacctgaccccgtcttcaccagcactttttggacagagctattcaccctctctggcatcaaactgcggatgagcactatgttccacccgcagaccgatggacagtctgaggtaaccaaccgcatcatgggggtttacctgcgctacctcacgggagatcaaccaaaaagctagctacgttggttgccttgggcagaattctactacaacacgtcattccagacaacactgcacactaccccattcaatgtggtctgcaggtgcgaccctcttactctattgtcctatgagcagggccaatccagggtgccatctgtggacactcaactggtggaacgagattccttccttgcagagataaaggagaggttgttgcacgcccaggaaattatgaagggaaactatgatgcacaccatcgtcatgtggagtttcaggtgggtgcttgggtgtggctgcgcctacatcatggcatcacaaccaccctcaatgataaagctaaggggaagctagctccaaaatattatgggcctttcggagtgctggaacacattggtactgtggcgtatcgtctggagctgccacgtaactcgcgcattcacgatgtattccatgtggttttcttgaagaagttcgtgggcaagctgcctacatctgtggcacctttgccgccttaaaaatagcaaagtattgccagttctagaaaaagtgatgtgagttcgactcaacaacggcaactgggaacttctagttcaatggaccaggcgttccagttctgatgccacctgggagttgctaacagaattcaaagactcctttccctcatttcagctcaaggacgagttgtttcctgatgaggggggaagtgttgtggacactatttgggcgcacctaccagagacgaagaaaggcagaggcccaggcgcctacagcagctaactccctttaagggatagagcttatctcttcagttagttagctagttttatggagtctatctcttcagtcagttagctagttttatggagtctatctgttgtagtagatcaatctactagtttattgctagtttgttagactgcctggcatctataaaggcagggtaggcgtcaaggtctaggtagaggaattacctgactcctaggagtagccggcacctcccccttttgtaatcctcttccagttttccaataaaaaattcctagttcccccaacaatgatacttcctctttattccgccaccgagataggatgttaattatgtttttggaactaaagatttaataattctaaa

SEQ ID NO: 104132 - DNA, 294 bp, Zea Mays
aagaatgtcaatgcatcttaaaattatgggaggaaagatttggcctattgttagagatggatttattgtattaaaggaagatgaaccttcactcaatgatcatgaaatgttctaaccaatgatcaagctatgaatgtattctatgatgcattagacataaatgagttcaaccgcatcaaaaatctcacaacggctcatgagatttggacaaagctaatggaaattcatgaaggaaccacaattgtgaagagtgtaaagttgtatgtatgcaaaggtaagtttgagcaatttctc

SEQ ID NO: 104133 - DNA, 272 bp, Zea Mays
ccgacttgccgcggacgcgagggagggcctccacaaaatccatcgcgatgtccgtccagacaccctgtggcactggtagaggaaggagcaggcccgccggttgaaggtgctcggatttgtattgctgacacactgtgcacacgcgcaccatgtcctgcacccgttgcttcatgttggggaaatggaagtcacgtcggagccggtgaagggtgcgctggacgccctcgtggccatcttcatggaccgcccccatgatctcctggagtagcggg

SEQ ID NO: 104134 - DNA, 410 bp, Zea Mays
gatatattatctgaaaaacaatctaaactattagatatcccttttggtggaaaagttgttgttcttggaggtgacccaaaacaaatattaccagttatagaaaatgcttctaaatcacaaatcataaatgcctcaatattaaggtcatatctctggaatcatataaaaatattatctttacatgagaatatgcgcttaaaaaaactacaatgtactgattcagaaaataatgaatcaattgattttaataattggatattaaatgttggaaatgggagctctagcatatcagaaaccgatatagatgatgacgacgaagattgcactatagttgaaataccatctgatttgttgattactacaacagacaataaaataaaatcattagttcagtcaacatacccatgttt

SEQ ID NO: 104135 - DNA, 1033 bp, Zea Mays
aggtgatgttgcgttggtcgtatgcgtcttggttgcccggtcatatatgatcgtgcttatttatgatgggtggcgtgggggtgaagagtctttggttccatcattgtcgtcctagcgttgtatcgacccctagctaccatagcctgggtctcagcatagctcgtcgtgttgcggagtctgtaggcggtcagcactgaggcgtaggcttgatcggctatgagtgggtcgcgatcctaggagcctgtaggttatgagtggaacatggactgattcgccctctatggctcagcgctaggtgcagttaatgtggcacagtgggttagtcctattaggcgcagtcgcgcagaatccacttgtcacagggcaacccctgccccctttgatcgtgaggcattgccctctatggattcatcgtgttcgggcctgatggcccctcttcccctcccctaggaataccgggagtgccacgatgcctttcatgcggcgtaagaggatgtcaaggccgaggccaatgtctgacggtcgtgtggctggtaggttgctgtcctattgcctttccattcctcgttgcgcttttcactcctttcctgtcttcccctccttcatctctggaaactaagctagtgaagttgtcccactgggtgggtcaagttgtggaatacgtcggggcccatggttcctccctggtggagcatttggacaatgtcccgtgttgcatctaggatattgtcgacttcagcgtacaccagggggttgccgtggcgttactcatgggggaacttcggtcgagctacactcctcaggacatcgtgctaggggctaaatgacctcttggtgggctatggcgaggatgctagccgcgttgtggaccgtctgtctaccgatgacgatgtacgcagtgcttcctaagttgtggggtcgctatcgaataaaattagtctttatttccccatgctgccttttttgatgtgtccaagatttatcttcgtcggactcttggtgctccttccgtcgatttgttctcctagtctgc

SEQ ID NO: 104136 - DNA, 633 bp, Zea Mays
ttctacttctaacccttcacatgctatgtttgctctttcttctttgttgacctttatagaggagaaggtggaaagccttggggatggggagctagcgcttgtgtccagtcggttcacctggttccataacaattgctagaatcggtagcgtggtaggtcgaaggattgatgcttcaactgcggtgactctgactactttgtcgccagttgccctcaggagggcaagcaggaggctggcccgcgcaaccactactctagtcggtgcaagggcaagcaggagtacacatccggcaaacacaagtctaagggaggattcaacaacaaggcactcaagaagaagtacctctagaaggctaagatcaaggagcatgccttgctcacctctctcaatgatcacgaccacgactccgacgatgtagcatcttccttgagcgatgaggagatcgagaggtgagttgaggacaagctgaatggactctgcttcatcgccgtcaccactgtggcctttgcaccatggcccttggagatgatgcgatgagcgacgactgccaagacatcggcgatgtgatacacccagcctaggtggggttagctgaggcccaacaaattagggttgcccggagcccaacagtt

SEQ ID NO: 104137 - DNA, 404 bp, Zea Mays
atgtctgtcgttagagacatgtccaaatccaatctccgcggcatatttgcaagggacagtcctgttgcaaactgcaggccttaacatcatagctatccattgatattctcttgcgtaggatgaagtcatgcatccacttggatgtcgtatatggagagggagatcagcggtgctgcatacctaactgaagccatctcccaagttggtgccatgtcattttctttcatgttcgtaactgcatcgcctgtccctgcttcatgtgttgcgacgaaaaattcctgataatcatgtatttggacgcgtaatacagtgtgtacttatgatggatcaggatcactgaagtgtaagttgcaacaatacagaaataatactgtgtcacaaagtggaggacatattgtcactaa

SEQ ID NO: 104138 - DNA, 561 bp, Zea Mays
attgagtaaaatttacaaaaaagtgtcgatctagaatgagttgttaccactattttggtgctacccaagatgttgtctatggggtgatccctttgcacactttgatgaactcgaggatgtggcactagagattgatgttgaatacacccatcatcctcttgttcttgtggagctccaccatccaccacttcacaaatcattaatgcttggcatctctgtggttggatgggttcttcttgagttggatgacttgaagttgatggctttacttcgatggagggttgatcatccaccacccttgtactcccatttgcaacttcattggtcatccaaatctttacctcatcttcatctttctcttgtggcctcacttcaccaattgctagctttttgatggccgcacaaggtggttcctcattacctgccatatcattagaaacttgcccttgcaagtcattagattcatcaaatgtcacatctaccactatttcaacaagaccagtggagttgttgaaaacacgatatctgtgagtatttgatgcacaaccaagtaagaatccc

SEQ ID NO: 104139 - DNA, 354 bp, Zea Mays
atttatatacagatcataaaagtctaaaatatatttttacccagtcaaagctaaacatgaggcagaggagatagcttcagctgattaaggattatgatttagaaatccattattacccaggaaaagccaatgtggtggcaaatgcactaagtcgcaaggcttcctgccattgtcttacagtgaggacccctgacatcacattatgtcaagaaatggagaagttaaacatgggaatgatacaagatggaactttgacccaattgaagcttgaatcagttcttctacaaaagattattgatgcccaaagaagtgacaagggtataaaacatattcatgagaaaatagaagccggta

SEQ ID NO: 104140 - DNA, 582 bp, Zea Mays
tggaggtgccccctagcctgaatagacaaagggactatgcatgtatcatgggttcatcgtcgtaccattccatatttgaacatgacaatatatcgacgatgagtaggtgggtggaagtatcctagcatcataggatgaataggcgaggcttgttgcgtcacctttcgggccattttattcgattgttttgttttagaaggtgatcggggtttctttgtcggccgatcgcaaagaacgaccttcttgctagcatatttggagagcacttgatcgaaagtagggccggctttgaccaaccgaccatatgcgttatgtttgctttgcccctgtgtccacttttttcctttgtgtgaaggttgacgcctctgggcatgggcaccggaccgtccacgcaaaggtgtcgaaccgaccgctatgcttgggtcaggttgctgttctcggctgctcaattgagcctgccccccggtgcctctcaacttgttagtcttcttgtccagagccttatgaggaatcactccttgcgatatgtttagcatgcaaggatcaccaatgatgatgctttcgcccttgcctttatcggcc

SEQ ID NO: 104141 - DNA, 468 bp, Zea Mays
taacagccgagtgatcgatggcgacgtcggcgttttagaggtaacagccgagtgataacgggccatgccggtcgctttggaaacaatggccgagtgaagtctggtaacgtcagcgtttttagaaataaccgctgagttaaaatgggccgcgtcggctgttttggaaataacgaccgagtgatgatgtggcacgccgtgttttagaaataacggccgggtgatgacatggcatgcccgcgttttagaaataacggccgggtgatgacatggcatgccaacgttttggaagtggcgcctggcccgagaaaaccccatatgtactacactgtcgcacgcctccgcgttcagtgccctagtttttgcttttctgcatccaagccttctctgctctcctgcaatattgcttccgctccgctcgctagcgaggtgaaatggcgcccaagcggaaagcttcgagttcgtccgtcg

SEQ ID NO: 104142 - DNA, 413 bp, Zea Mays
caactagctcagctgaaggtagcttcggcattgtagctggatcttcagtcctctgtgcaggaggaacaatttcttttcctttggcggccgaggaggccccttcgccaaattcaggtatcacagccggttcgatgtaacgcgaccggtgagtcagaaccttcatcttctttctcttcggctcagccgtgatggccgaagcagcaacctttccagcaccagcaatcttcctttttacccttgccctcacagcgggtaacaatagtcagggtatacgaagccaatagcatcaaataccctgttcaaccttttcttattccgacccccgaaggctgcggacaaggcattgtcttcctttttggagtatgctccaagcagttcatcacttgtagcttcgatacacttcagccaatcat

SEQ ID NO: 104143 - DNA, 556 bp, Zea Mays
tctaaatagccgcatggagccccatcccacggcgacccggacagcgagggaggtagtagatggggcgcgcggtgttggcacgccgggcgtcgggtctgagagcagagagggggcgtgcgcgcgttctagagatggcgttcagcgcaccgagctgcaggaggaggaagccgcatagcatcggcttttatgcacaggaggggcaagtccgagtgaatgttgttggttcacggcgagaaatccgggcggagtttggttgaggcgaccgtggaagtcgcacatttggttggagatcgtttagggaagaagataacactgtcagctgggacccacgcgtaggagacctggtgggcagtgggctgcgcggagtggtaagtgggccgagcagaggaaaaccggcccaggtggttgtttcgtttgttctctttttttctaattttattttcctttccaaatttaagactccaattcaaattcaaattctgtttgaacttaaggtttcccaatattcaataaaaatcctcatatgaagataacgcctattatttatttataatat

SEQ ID NO: 104144 - DNA, 419 bp, Zea Mays
taggccagagcaaatttggccgaaaccgaattcacgtcctaaccattgtttccccaggttaatttcaagaagggcgacctaatttgctctggccatggtgacagcacgaatgatcaaaggaacaacgtgttcccgatgatccatggcagtcaagctcaatctgaggggtcgaggagtttgaggaggatctaagaatgctagaacaagcgatcaaggcgctggaactgacctggaataggccagccgcggtgaggtgttcttgcggcgtgttcgaaccgatttgggggaagttagaaattggagctcactggtgatcaaccgaggacaatacttggtggttgggtacgtgatgatcctatggagctttgggaggcttcaatttatagagcgcaacagcggtggcgctcaatttggccgag

SEQ ID NO: 104145 - DNA, 298 bp, Zea Mays
gtgaaactgggagtgggttcataccggagggaagaatgctctgaagatcccgttcacggcgcagagcggaccgcgacgacaatttccggccaccaattccgggggcccggacgctccccacccgttcgagctccacggtgaagtccccccggcaagcaaagaattgagtccatctacttcgcgcgcgagaaatatccgcacagggcgtttcataatctctctccctcaccgctccgctcgatggaggtgctccatgcccgattctctctctccggcgaggtagccatcagctacatca

SEQ ID NO: 104146 - DNA, 365 bp, Zea Mays
caagaaatcaaaccaaaaacgcgctccccgaggccaccaagggttgaatcacgattcgcccgggccctcgctcaatggttgctcaaaattatgtctcgcccgagcccatcctcgggcggcggccgcgcccatgtgaaatcctcactcgcccgaggcccccctttatggaaaacaatttctgtctcacccgagctcatctcggatgaaggacagcctcgagcctggtctcggccaaagttctcgggaaccatgaagacgtccacattaaatgcgatgatatgaatatatgctccatgtgataccacagtcaaaagagggcgatgagatcgcggttccatctactttcattgactacaatgacgtcc

SEQ ID NO: 104147 - DNA, 940 bp, Zea Mays
gttattgttattcctgggacctgagcgagcatttaccatctggttggttagaaagtgaaattcttagaggagtgaggagtaagaaagattctagtggggaatagcttattattaaagttaagtttgttttttatatgctcttatggccatcattccataagaccattgcactcaagcaaaaatccaaatcaaacattgcaaccaacaccatcacatggttgttattattataggcataaatttaaaaagaggtgttcatcgtctggcatgaaaactatcttattacaattataacttaaaaatttaaagcagtctggtgatggatacgggttccccatagtgaatcctcttgcggggaggggacaacgccatggtggggacttgggcttcagggggatcccgaccttgaagttgagcttctagggctgcaatcctggcgtgggcatcctccagctccaagtgcaccctagagaaatctagggtggcactgttcaggtcggtgttaagacttgccactacaccaactagggtgttgaggcgatcttctccagttccacctggaacgatgctggtctggctccctccactcagacgcagaggaagatgcatgtacttcgtgtcatgcagctgctgccggtaggtgtggctgagagaccacacagtccacctagcatcgtcgctgatcgaagcagcgtaggtggatagcggtgtcagggactcatgagcagatagagtcctgaaccccctatcccctgcatccatcaccctgacgtgaatgcgagtgatgtagtagcaagcccgggaggctcgcacactcgccttgtctcatacaagggtcggacgtaggttcccaacgcatgcagcacgtcttgcagcaggttggggaagtgccctgtctcgaacattgatgtataatgttcggtgacaggcccaaacccca

SEQ ID NO: 104148 - DNA, 377 bp, Zea Mays
tccacgaaaagcaagagcctacaaaaggagaaatcttgcaatgcctaacatgatagacaaacgcgctttatatgcctcctcttcggctgcacttgtcgctaaccatacatgagctacactttgtctctaatttgcaaaatcgagggcacgtttcctcgcataactatgagaaccatcaattgcttggacatgttccttgaatacatcctttgctttttccaattcttaaacccaactttagtgaatgtatctttaccaaagttgttggttcttggaggcttaaataaaaaagcaataaaagcaataagctgcatctttctgtacactatactctaaccaatcaaactgtttgaaccaagattcaacaaagcctctag

SEQ ID NO: 104149 - DNA, 630 bp, Zea Mays
gtcgggaagagaccctaccgaggatgaccccaccatcgtctatatggctggatacctccacactctcgataaccaatatgatgaccttgcctcccattgtactcacctaaactcctaggtggaaagcctggagcatcaagtcagggaacttacaagggaaaaggcgtcccttcaagagagcctcgagatagcggaaggcgaggaaaccaacacccgtgaggcctaccgcaccctgaagatggattacgacaagaagctaaagaggctcacccccgcaagaaaaatccgcaagaagaccagaagccaaggatgccagactgagcagaaggaagaagcccctccagccctacctcctaccaggatagggaactcatccgacaccgaggaaatgtccctagccagccttgatgaccttctcaaggaatttggggacactttagagaaggagttcaggagtaccctagatagcactcgcgtgtaatgaacttatggtagttgtatgctgtaatgaacttgtgtaatgaataaagcaactggttaaaaaaattggcatgtgcatggtagtaactcttttcccctggcagatggcttcggataaaaccacgcctaccgcctccgggattggagcag

SEQ ID NO: 104150 - DNA, 850 bp, Zea Mays
aagaggaaaaggcgtccctccaagaaagtctcaaaatagcagaaggcgaagaggccaacactcgtgaggcctaccgaactctaaagatggactacgctaagaagttaaagaagctcgcccccactaagaagatctagaaatagaccaagagccaaggatgccagactgatcgaaaagaggaagccccgccaacattgcctccctccaggatagaaagcttgtcagacgttgaggagatgtccctggctagccttgacgatcttctcagggagtttggggacaccttagaaagggagtttggaaacaccttagaaaattctcgcgcgtagtgtgatctgtggcaactgtatgcttgtaatgaacttgagtgatgaataaaataatgtgttttaaaaaatatatggcatgagcatagtagtaatcctttcccccctagcagatggcttcgaataaaaccacgcctaccgcctcagggattggagcaaggtctcccctaggtgctgaaggagaagtcggtggagaagggagtgaaactcacctccccgcacctccggaactgccattagacttagcccaagttctggccaaccaaacccgactcattgaggtcctcaccagaagccttgagaaccagcgcccaaatggtggaagacctcaggacagaatgggagaatttctaaggctcaagcctcccacattcgctggatccagcaacccactcaacgctgatgactggctgcacacaataaaaaggaagttagaggccatcggatgccctgagaaccagcgtgttcatctggctgctcatcaactttctgggatggccctatcctggtgggataccttcagc

SEQ ID NO: 104151 - DNA, 486 bp, Zea Mays
ggtttttttctcctctacattggggggggggctttttccacgttaaacaatgtgcctcctttttccccacctacgatcctaacaattggtatctagagcaagggtttaacacattatttcccgcagtcaccgcctgttcttcattgtgtgtggaagttgctgccgccggttattcgtcttgtaagatcaatcttcacatcaatttctagatctcgtctccagtctgctgtgtggcacgctcatccagggttgtctccactcttcagcggtatcacgtcctactcggtctacgggtatcttgagtcgctaagggctattgcagccccctacaatctgtcgtgataggtcctatcatagcccctgtgatttgaggattgcgtgagcaatgttttgctatttggcagacatagatgaaggttgttcttactcatttatgtgtacaaaaagcgttgcaaccacgacctactgacatggctgatgataaat

SEQ ID NO: 104152 - DNA, 343 bp, Zea Mays
gccggggggtgggggtcaatacttaattaacttgcaaggcatgaaatgtgcagacaatgaaacgcagcaagtggctcaacttgatgggagctctcgttttggatccatcggtgtgggtcgcagcttgcttctttagcactcactcggaggcccagggctagtacggtttgtaactttgtgcgcagatccacacatgtgaaaatgacatgtactgtacacgcatgatacgacagtagcagcatagtagtagaaaaggaaatgtaccaggccgtgtcttttcaaatcaaatatatatgatgatggtgtgtgtaatcgatctattgctactcgtgtaagctaatca

SEQ ID NO: 104153 - DNA, 443 bp, Zea Mays
gcgtggttgctcggctttggaatctagtaatcgacattgtagcctatgaccctaagctaaaatagccattaccaataatcatggcgacaaggttgcattactcatggttattagttaatgatgtaccgttgatgtagaaactgagctcgacaccacacatcttgacgccgaggtcaactcctatgccacaaccacgacttcttcctctcatgctctctatttctccctagctcgcactctctttctctcaacatcgcccctgcggccctgcccctgccccttcatcgtcgacaattgaccctacaccttgtcgtggttgtcatcctactcctcctcgttagtcgttgtcctctctcccactagcattgtttgtcagttctatgtggttgtcttccccaaccaccactaacccacatatgaatacgggttgtggtgccagcttt

SEQ ID NO: 104154 - DNA, 654 bp, Zea Mays
taagtcatacctagtggtggcaatgattcttgaatgataactcaagtctcaaatctaccaaagatcccccaaactcatattcaagattaggcacaaaatctcatcaaaacgagttgggggagagaagtcaaatccaggacaaagcaatcaaatttaaattagagatataaaggcagaggtcatagtgtggttaaggccacactataaaaaacacatagaagcaacaatacaaaactcctaaagaactctataacatatgagaaaatggaagttaaaatataaggtaaagagatggctagttggtgtatccctttccccgtatttaaagagtttttcacattcctaaatgatacctagatgcacccttcgcgatggctccacatgcagcctctaattccctttagaaccacactaccaggttttgaaggaaaacccacaaaaatcgtcgttagatagttttgaggatcaaccaccatatcatcgcagatagtgtactccatacgtgccccacatcctggacacacgtcccattgatcctcatgtgtgttagcatcataatctgctccattatattcacatgcctattgatgtccccaagtatcagccaccgtagttggttactcgacttctctagtcccttagtcaagatccaac

SEQ ID NO: 104155 - DNA, 337 bp, Zea Mays
aaataatttcacttttatgaaagttaatcttaagacctgacatctgttcaaaaatacagagaataaacttcagatttctggcattttcaagatcatcttgcagcaaaaaatagtgtcatcagcatattgtaagcagcagcaaccaccagagataatatgtggaatgagacctttaataataccttcatctttagctttttgaatcaaacaagcaagaccatcagctgccacattaaagaggagtggggaaaaaggatcaccttggcgaacacccttgtgtgttttaaaataggggtcaaccacatcattagttctgatagccactttaccacctttc

SEQ ID NO: 104156 - DNA, 344 bp, Zea Mays
tcagctcactacacactcattggggagacattatacagaaggggtgcatcaggcgtcctcatgaagtgcattctctcatctactgggaagcgacttctagatgaggtccacgctgggcaatgtggaatacacgcagcacccaagacgctagtcgggaaggtcttcaggtcaggattctattggccaacagcgaaaagtgacgcagccgagttagttcagaggtgcgaagcttgccagtacttgtcaaagcaacaacatctaccagcacaacaactgtaggccataccagtaacttggcccttcgcatgctggggactggatatgattggacctttcaagaaagc

SEQ ID NO: 104157 - DNA, 402 bp, Zea Mays
caggcgggaagaggttatccgcaaggccctcgtgagaccacctatctggatttctctgaaacccgtccacccctattcgtcaaagcagaagatcccctagaagctgatgagtggattcgggttatcgagcaaaagtttggtcttctccgttgctcagagacgcagaagccgttgttcgcagcacaacaactccgtggtcctgccagtacctggtggggaaattttatggctattcaacctgacaaccatcaagtcacctgggatgagtttaaagcagccttccgtgaacactacatccccgaaggagtgctgcatatgaaacaagaggagtttatgaagttacaacaaggcggagataccgtcaaccaatatctcaacaaatttaatcacctgtcgcagtat

SEQ ID NO: 104158 - DNA, 296 bp, Zea Mays
aacaaatatcctacaaagccttcatgaaaagaaccacctcaagacttcaaatgatgaagttggagaatattcgtatagaaccacctcgagagggcctggcaactttgtgagcgctaaaggtgaggtgtcgacaagctcatcaagtcaaccagtgttaggaggagccttcatgcttggaggtagcttcaccatggtcgtgatatatacactttgggagtgacaatggtcatgcttccctaaggcctatgagggtaaacaatgcaacatccctagggcattgcacacccaagctagac

SEQ ID NO: 104159 - DNA, 920 bp, Zea Mays
catcattcaaagcagtggaaaagaagggaaattgctccttcgtcaacaatggttaacctacgatgttgagcgtctctttgacaaagaattatgaaaggatgctgcaactttactcgctgctatcaaacggtaaagaattcctcatacaagacctacaacaaggactatgggactaatactattacttcgacaacgatatttcttatgcaagaccttcgagtttgataatgccacttcagcgaaaaagggaattttctttatgaagcgtgaaaagaagggaaggtgtttattcgccttcagctcaaaaacggtatggatggcattttcacactacacaaagaaatatattacatcatgagatacaaagcttgcaattgtttattacatcaaaaagcatacaaaattatgtaaatgtttttatgcatagtctaattatcctccttcaggaccctctcagcagcttcgcttagaagtctatttacaccttcatcaattgttgcattcactattctaatttcatggagggtacccttcggggctggatcgtcgttagggttgtatggctctggaggaggagacagttcagctacaccaaaatataagcttttgttagatatgaagccaatatacttacgaggctaaaataagacaaacgtacctatacgtctatcgcgctcagtgacctcctcgacttttattgcttcttctgaggcaagatgagactcttcttcatttcgcctaatggcttcgtctgccatctctcgaccgccattcatccacacttcagaatagaactaagggcagtagctttggctgacagctccttgatgtcagtcgctgaaactgagaagtctaactgaattacagctttcggatggtcacagccagctttttcaagtaaagatacaactccccgagcg

SEQ ID NO: 104160 - DNA, 349 bp, Zea Mays
gtctcttccaaacttaaggaacttgcttctttgctccgcaatgtatactaatcaagtgaccttcatcatcgtacttataaaatggttggtcttctggattatttcttgggtcttgctttgcggtcttcttctctagttggtctagacgcttcttgacatttgtgattcatatgtccttcatctttgcagtagtagcaagcacctcttttttgagatctttgcgagtcaacttggcttgattgacagtacatgatagatgattgagtgtctgtatctgaaatagctaagcctaattgattctcttgtttgggtataggaaggaaggaggggatgaaaagattgagcaaag

SEQ ID NO: 104161 - DNA, 407 bp, Zea Mays
gcaatatttgtctcatcagggttctcatcaaaatgtctctttcttttaatctcccgtcttttatgaaaagatgtgtcaatatccatctcatgtgcaatgtctttggctgtttgtaatgcgtctaagaaaccaatttctctataatttttgaagaaagaaaccaacccttgcactttatcaatagcatcatcaatgagcatatctttggcttgcaagtgcttgcttactatattgacaacaaatagtacctcataccaaatgactattgccactataaattcatactctccaagtttgttattagccaaacctgtagcctcgctgctcgttttcgcatcattgtcagcatctgccacctagtataaaaaagtatgtgttataattggacaaacatgaaagtattaaac

SEQ ID NO: 104162 - DNA, 610 bp, Zea Mays
gaaagatcttctcgatagaatagttggagtgatcaagaagagactaaaatatatggttgatgatactctcattgttgcaggtaagggatgaaatgagaattgttcaatttatgttcttttttgttgaatttgtttctaataataatcttgcttctttctctagctggtgcacttgatcctaaaacattatatatgactaagctttcaagaaaatcatctactagacatgcagttacattggctcttaagaagcttgcaagctcatctaagattgcatctgctgcaattgagcaatatgctttttctgtgaaaaaagaggattatttgcaggggaggaagtcgaacgttcaacaactaatggacgcatgagtgcaggtttttacttgactcattattatgcctctttggtggtggcctttcaattttagtacttttattaaatggtccgtgttcattttttgtagctgaatggtggagtgcatatggaggagagcacaaagaactacaaatgcttgcacgtcggattgtttcacaatgtctatcctctagtggatgcgagcgaaactggagcacatttgcattggcccataccaaactgagaaattgtcac

SEQ ID NO: 104163 - DNA, 331 bp, Zea Mays
tatttacggaggtttatttctaagctagacgggaagattgatggcttcactcctatccttcggcttaaaatgatgtcgaattcacccaggggtagaacagcaggaagcgtttgatctcatcagaaagtatttgtcttcggctcccgcattaaaagcgccacaggtaggagtaccgttcagattatacattatagctgaagataaggttattggagctgttctgacgtaagagaccggaggaaaggagcatgtggtaacctacctaagttggaggctggtggatgctgaaatgaggtacacttttatcgagaagttatgcttatgcctgttt

SEQ ID NO: 104164 - DNA, 424 bp, Zea Mays
ctgagtagatccaagaccactggtattgccattcagaggcctattgttccccccagcagcaaggatgatgaacccggatcctctgaagaacaggtggccaggtgggggagcctcactttgatgatgataatgatgacgaatctagtacctcggcagggttgtaaggctttggcctcccctttttgggccgaaaagtgtcttctgtgccccggttggtggatattttggtggtgtcccacgtatagcaacatgttaactgttggtgttggcgtgcatgtggcgctcttttggtttacagaaactaactctggtggagtcgatgactctttgttgttcgacatggttaactttggtgtctggaacttctgttatttattatgtgggccctgtttggaaattttttgttgagcccctttgaagtttt

SEQ ID NO: 104165 - DNA, 825 bp, Zea Mays
aaattgttcaaccatatctttcggtcaaacaagatgtctaatgagtgaagtatattggtaccgatctacgagaataagggagattcaaagttgtactaattaccggagaattaagttgataaagcatattatgaagttgtgggagagagttattgaacatagttttcgaggaataatgaggttctctatgaaccaatttggttttatacttggaaagtcaatcatggaagctattttcttgataagacaagtgatgaagcttccatgttaggatagaactgatgctgttcatgacaagtatggacgtgttaggatggttaatttcaaaagctaatctagaaaatctgctgcaaccattgtcttctagacctttgcaacacagagtgtccttgtatgctgatgatgtgatcatgtttttgcatccaaaagaatctgatattcaactggttctaaaaaatttagagatttttagagaagcttcagggctgaaaaccaacatccaaaaaagcagtgtgtacccaattagatgtggggaagaggaagtggcgacccttcaggaatgtctcccttgtgagatctcttctttcccctgtaaataccttggcctgcctctgtctttgagcaagctttccagaaatcaaactcaatacataatcgacaatatttctgaccagctccctgggtggaaagctgacttgatgactagagctggaagaaaagtgcaagttcaatatgttatgacaggaatgatcatctaccttgcaatagcggtggacttacctccaagagttctcaaggatattgataaaattaggaaaggattcc

SEQ ID NO: 104166 - DNA, 273 bp, Zea Mays
ccaattagtaaataggaatgccttgcttaaggaccaagtagaaaggctaaaaattgaaaatctagccattcaagaaaaacatgatatgcttctatgttctcatgaaaaccttatgaatgatcatattatgttagacattgctcatgaggttgtgatagaaaacttaaaatcccaacaacctcactcatgcacatgtattcaaattgaaactatattatcatgtgctaatgcttgttgctcgtcagcaagcaaatcctcctttgagctagaatt

SEQ ID NO: 104167 - DNA, 704 bp, Zea Mays
gtcgggtgctaaaggccgcagtgattagttgatcttcttttttagtataattgcccaaaatttcattgcacatagcctcaatcatttctagccactcttggcaaggctctttgaattgtttctcaaatttgaagcgatatggcagccgaacaagttcattctttttctttgttcccttcagcttcgacatgctccattcactcaacgtcggaaataccccgttggctaggtattcttgcactagatctgtagtgctgatatgtccagccacaaccttgaattctgctacagcttgttggcagggtgacctcgacgtcatgcggcacaggggactagtcagtccgaagcttaaactcagtggactcaggaccatcgtctttaacttctccctctttttctcatcggccttgacatagaaccattcacttttccagccggttggccacttggtgcgatagctaaataccggggccttcgtatccttgcgatacacgaagttgtaacaaccaaatttctcatgtaacccgtcttctctagccttcatttggtaatgtagctcttgcgctcggcagaaagcttcagcatttgggtccattccttggcttcgaagggcccagatgaagacgctgagcctaatgatagcgttaggggtcagctgatgaatatagatttcataattatccaaaacttccccaatcatctcg

SEQ ID NO: 104168 - DNA, 1090 bp, Zea Mays
attaatagcccttgcagcagacctttatagcagactacaatggcgtgtacgagcgatcaacgcgatcttcctcaagggtatgcccttgaggtttcttgaaccagcttctctctaaggtatgacttagagaaaggtgcttgacggagaatttcttgcgatggagcacacaaatattttttttacagtatttaacatagaatttcgatttccggggataatttatacatatgtgtggagtataattatttttggcatgatgtcgactttagcacttgtttctgatttagtatcaacaacacgagtcgaggaatattattcttctgtgatggtaaagaatctagggaatactgcagtaacatgggggttcttaccttgcaatagacctttccgatgggctacaacgacgtatataatcgtgcagtgtgatctgtcttaagggtatgcccttaagactgtgtatgaccgaatgacgcgatattcctcaagggtatgcccttgaggtctttggaaccagtttctctctaaggtatgccttagagagaggtgcttgatggcgagttttcttgccgatggagatggagcctggtgaagcagtaatttctcgatgtagaatttcaatagcctactcacactcctcacgcgaggtgacctcacggcagcctcaaagcagtagcttttgcgatgtgtatgatggcacttttgcgtcgagcagcaagcgcggcagcctgacagcgtcctttctttttgtccaatcccctgaactcagcgatgtgaccttgtatttataggccgaaggagcttagtggtacgctagcgtcgcatcgcatgggagaaagaacgtgtgttcgtgcctggtgagtcagcggaagtggaggatgtgcgtcgtgcgcgcatgggagcgagcgcgcgcttgcttctgttcgaatgagcgcgaaaaattgcaacggcttgttcgcgcacatgagatggcgggctcaggcgcgcgcgaaggaaacaaaaaaagtctgaacccattatgtgttctcgagataggcaccactttaaataacatatccacattcatttcagaaatattgattctcaatattga

SEQ ID NO: 104169 - DNA, 483 bp, Zea Mays
tcagccttctgtgtaggaggagtgtgctcctttggagcaacagctgaagaagtttccccgccaacatcaggcaccacggtcagctcaatgtagcgcggccgatgggtaagaaccttcaacttcttgctcttcggtgcagactcatctaaagtagctgaagcagcagtcttggctgaagtagcagccttggtagaagaagcagtcttcctcttctttccccgtccgcgcagtggatagcagtagtcaggttacacaaatccaatagcataaaaaaccctatttaatctttttcttttttcggctcccgaaggccgtagatagtgcattatcttcggacttggaatatgctccaagtagctcatcgctagtattttcaatacacttcagccaatcatcatctggttcgacaaacttgtcaccaaacctgaaggtatattttaatcgaaccaggccgccttcgctagggttagtgatggtttcttt

SEQ ID NO: 104170 - DNA, 765 bp, Zea Mays
aaaaattcctgtgactcagagcgttattgtactggacggcgggtttattattaacaagcccaaggactcttttgtgaaacagacaggccgaaggggtatctggtaattggagctgtctgattacaaactagcggcctagattaaaactatgattccacgaatcagttactcacatccaacgtccgatccatgatcgaaggccgaggattgcttgcgatcccgacaccctcccggccgcgcgatccctgatcaacgcgccagatccaaaacgacgacgaggtatctagaatctaatcgtggccacccgtccgaggaacaacggccgagacgcttcccttagaaatctaatctcgctcgtcggttactagatcaacgacaccgggcccttcccctacctccggtccaacaccggcgacctacagtgatgtcgcggcggggacgccataatcggaacacccatcacgccccatgctgcacaactactagtcgtgatgatcgcaaaatgaaattgacacgatggcgagttcggtaaagggagttctaacgatgctcacgcagcgccgactcctgccaatgacgcgctccagacttgtggcctcggcatcaaattgacggtgcccaggtcgcactactacccagccaccaccttcaacgcaatcctagagccaatgtggatccacccgactgcgcacagggcaccaatttgtggagagcacggtggacgacgacggggggccctggcggctactagccctctctctggca

SEQ ID NO: 104171 - DNA, 755 bp, Zea Mays
gtttggatcctcgggtctcacagggccacaagttagtgggagaatgacattgagtctgcctgcccaggtaaatacgctctcaggcgaccctctacgtgtcaagcttaggggtcgagcgaggcggaggaaagtgggaggggttgaacggatcaccaaaaacacacttgagtaggttcaatgtatccgtcaaactgctctcaccgccagcattttgcacatgacacatttattcagactggcggcaagatgtgacgtggttaaagtcgggcttcctccactcataacctacgggtcctaggcctaagccctactcttgacctatgaaccctaggcttaagtcccccgatgtcctacaagcctagggctgagatccactcataaccaatgggttcaaagcctgagtccatcgacagtctatgagcccacacgacgacaaggggagactggtagccaagctacaaaggcagaaggtcggcatagggagaagcaaacaagaacgagtaatggttatgcctagacttccgtcgctagcacggaacacacgcaccctcgacaatctcagaaacatgtcaggagacccacacgagaaaggatatcgacacacaacaaggttttagcaggggtgaaccgttccttttgacccaaacgttatgctcccttctaggagaagctatctgtaatcacctcccccttgatctataaatggggaggttttgccccaagaaggggaggccctcgagtgagaagaacacgag

SEQ ID NO: 104172 - DNA, 567 bp, Zea Mays
gcagtagttctagcagtttctgtgtttttttcgtaagaaattattggaaatcagtttggggatcatgtagaactttgtcttacctttccaacgagtatttatgcgctcaatttggagttataaattgaaagttattaccgtttgaatccgggtatgtggctgtccaaaaaaaaacagatttttcagggggatgaacagccgcagtattagcagtttctggggatttttcgggagtaatagggttaatcagtataagaatcatgaagggctctttcttatctttccaacaagtacttatgcgcttgattcggaattatattttaaaagttatcgctgtttgaatccgagtatgtcgctgcccaaaacaggaaaaacagattgcagggtttattttgtggaccgtttaggggtaattagatgttagaatttaatcataaattgtatacaaaacttgtggggaattttatgtagttgtctctggagtttttgtttgacaccactgctgtcttaattttaaagttatggaattgttaagcagcgccgctgcagtttggttggtgtggggag

SEQ ID NO: 104173 - DNA, 817 bp, Zea Mays
ggcacttcatacctttgaagcatccttttactgctgcttcggtggctcacgtgttcatgcaacaagtataccgtttgcatggcttaccatttgctattgtgtcggatcgagaccgaatttttacaagtcaattgtggaagagtttgttctccttgacaggcgttgcattgaatatgagcagtgcttatcacccacaatcggatggacaaacagagcgggtcaatcaatgtctggaaacgtttatgtgatgttttgtgaatgcctgtcctcataaatgggtgcagtggatttatttggccgagttctggtacaatgtgagttggcattccgctcttcagctatcaccatttgaagtattgtatgggtacaaaccaaagcattttggcattgatcttcaggatgcttgtccagctcctcagttagctgattggctccaggagaaatctgtcatgtccgcattggtacatcagcacttggcgcgggctcaacagcgcatgaaaattcaagctgacaagcaccgatcggagcgacagtttgcagtgggtgacaacgtctacctcaagttacaaccttatgtgcagtcctcgttagcacctcgctccaatcagaaacttgctttccgtttctttggaccttttctggtcatcgccaaagttgggtcagtggcctacaaattggcgttgccagcttcatcgcatattcacccagtttttcacgtttcgcaggtaaagaaagttgttccttcttctgtgaccgtggatcagttgccggtgtcgttggtaggtttccagatccctgaactggtgttgcaaaggtg

SEQ ID NO: 104174 - DNA, 713 bp, Zea Mays
gacaagtgcttgctgcatgtctgaagagaagaagatgtctgaggagaagaagatatctgaggaggagaagatgtctgaggagaagaaagttgtggacccttttctcgctgggttttacgaatctatggcaaaaacaaatacagagaagatcacaaaggaaataatggcggatttgtctgaagattctgacgatagcgatgattatgatgtggaaagtggggatgaagattctgaggaccggccctggcggccaagccataccatcttcggaaagtcgaccattaagccaagtcaaattgacgccatgaagggaagatacttttgtgatatgtttattatgagggttggaggagacaacaccgcccctgctcctgaagaaaatgaggttgttgtcaacagaagctttatgaaagcgggtctttggttcccattaagcagatttttggttgaagtgttgaaggtatttcagatctttcttcatcaacttactcccaaagctataatcagaatgggtttgtttgttttggctgtgagaagccaagggctagaactgagcgtgaagattttttgcagtatgcacgaactgttgtacgaaacgaaggccactggcaaagagcagtatcacaacaacttcggttgttatggattcattgctcgttctaatgcaagctacccagttccaacatttcagaaaaggtggcctaggtcctgga

SEQ ID NO: 104175 - DNA, 1201 bp, Zea Mays
attttagtctagcaaaagctacttatcaccatcactgactattacaatctaacaaaagctacttctcaccatcaactcagttacattccagggaatttctcagcgatgaacattgtgatccaatgtaatttgtgctcaaatggcaggttgtagaaagctttgccgatgtgaggattggccaccagatgagcatagtagaaagatatatgtgcagaattgaaaccaggcatttgattcagcatgtcaaatagatcacttggcaactcattatcaggcttagcaaccaatttgatggcagcggcaagattctcacctacacttctgaaagctgcaactagcccttcatcttccattccagctagcttggcctttttacttgatctggtagcagaagatgttgctccttgagtgcttgtcccctcagtttgagcatgagcagtaacatcatcttcttcttggctttcacccacattctctgtacctagagctgcacttgaatcttttgcaaagtttccagtagccatgctattgccaaatattgattccatctctctatagtgcacaaggggcttgttcaagaaatctgcatcagacttgtgatcctgatcatggaggagaaattagtcaatgtagaactagcagtagacaataaatcaagaattgatgaaaggtggtcaattacttggacatagctgttgtagtgctcattatcaagtgtaatcatgcaattatcttcatcaaataaggcagcactcaacttcttcagtttaattatctttgcataccttttctgccatgtttttaaatggttcttaacttgttcaccattgattctagtgctgaatttttcattaatagccctggcacaaccattgtacatatgtttcttgaagccctttgatgttttcaaaccagcagccaccaagtcattgaggtgacagagcattaaagaagacattgctgatgtccaggtggcatgaccactagttccccccagcccttcaactacttcttccattgttctagcatacaaaaataaattcagctatgagaaaattcagcaccaatacatgtagaaattcagcaccaatacatgttaaaattgagcaccaacacatgtacaaattcagtaccagtacaatataagcaatgtaccaacacatgtccatagaattgttattcaacatcaagtgcatgtcca

SEQ ID NO: 104176 - DNA, 372 bp, Zea Mays
caaaaaccgtcagcgcatcacaggcaatgtcgaggaaccaatcctaaccacaagtttggcggtgacgacatgctacgaaaagctaaaagaatggtaagtttgatctagctatgtcgatcaacaaatagtacgattgcttatgaatgttttttgtttatacaagaagctacaagtggccaaaagcttagtgacattgaggtctaccaggagggccacaaaggaccagaccctaacaaccctgaccagctctgcagccagacaaccacgaatcagatggtgagttttggcccaaaagtacaaacgttcaaagtatagaaattcttgcatttgtaaggttgtgaatgatgtataggcggcatatggggaggagat

SEQ ID NO: 104177 - DNA, 1017 bp, Zea Mays
ccaaaagggaggattgaatgagcatccgagtctcctctctagcggtgccgacatagcacaaagcgacccccatacggtccagatctgcgatcaaaggcaaggccacttttggaaccccgaacctgctaagggcatcagccaccacatttgccttccccgggtgataatgaatggatagatcataatcctttatcaactcaagccactgacgctgcctcaaattcagctccttctgagtgaaaatatacttgagactcttatgatcggtgtagatgtcacaagattcgccataaggataatgcctccatgattttagggcaaagaccaccgcggccaattcgaggtcatgagtcggataattcccctcatgcttcctcaactgccttgagccataagcaatcactctaccttcctgcatcaacacacagccaagaccaatacgagaagcatccgtataaagtgtgaaacgcttaccgctctcaggcaaagctaagataggggcgttcaccaacttgttcttcaatgtctgatatctgacctcgcaagcgttggaccagatgaaaagaacacccttctccaagagtctagtcaaaggcttagcaatgctggaaaaatttggcatgaaacgccgataatatccggcaagccccaagaaacttaggatttctgagacactagagggtctcttccactccaccacggcagcgacattctggggatcaaccgcaatgccctactgattaatcacatgacctaagaaagccacttcagacagccaaaaagcacacttcttcaatttgccataaaactgattcttcctaagagcacccagaacaagacggagatgccgctcatgctcttcctccgtttttgaataaatcagaatatcatccagaaacacaaccacaaagtcgtccaagaacacatgtaacatcctattcattgcttccataaaagcagcagggacattagttaagccgaaagacatgactatgaactcgaaatgcccatacctgg

SEQ ID NO: 104178 - DNA, 414 bp, Zea Mays
gaatcatccactagaactccccaatttgggatttcccccaaatcacccaagaacatcgagcggtgtgacctcgccgtggtcagctcgtctcaggtccgctcataccctctgccctctcgttttagtgttcttgtgtgcccctgatactcctcgaccaactcgattgagctaagctaccttagatcgtcgggaacgcgttagtttggtcgttgatcatacggtcaccatggatagagcaggttagagcgccgttcatgaaattagttgaggggaaacgattgttaggccttgaatttggtttcaactgaagtagagtgcccgtcatcaagtaatccggccggtacaagctcaccggagctcgaccctgcgctgttcgccgtcgtggacttcgtgcggtgaagaaatagaactcgg

SEQ ID NO: 104179 - DNA, 333 bp, Zea Mays
tgttccaagtgacttttgtagttgctcccaaaaatgtgccacaaacagtgctcctctatcagacacaatagtcctcggaattccatgcaaacgcactatttggtcaatatagatctctgcatatttctctgccttgtgggtggtatgcactggcaagaaatgagctgttttggttagcctatccacaatgacctaaatagaatcgtggtgccaggaggtgttgggcaaacccacaatgaaatccatgcaaatttcctcccatttccaagaagggatgggaagaggctgtaaggtacctgctaccttcaaatgactagccttgattctttggca

SEQ ID NO: 104180 - DNA, 433 bp, Zea Mays
gtggatatgttccggccactaatttactccgaccaccgtacccgagctagtcacggttgcttcggatgagttcgccggagattgccacctcgcggtcttacgccatgtgcccgggcatcttaccacgtcgcggttagtcgtgttaggcatatctggtgatcgctggagggaccgccacggtgaaagccacttagcacttgcgccagtgcccctcttcctctccggccaccgcgcatctcaatccaaattcaccggccaccgctcttgcctgctataaattgagcccgctgtgagctccatagggtagtcaagcaccaagccaccaaaccgtgccctcaatcgatcaccagagctcgctaatttctcattccccccaaatccgttctctgtcaccgtaaaagagcctcaccgtggtcagcgtgttctaggtccg

SEQ ID NO: 104181 - DNA, 413 bp, Zea Mays
gaacgtctttcctcttgtgttgtccctgtcctactagttcctaagaaagatggatcttggagaatgtgtgtggattgtcgagctattgataacatcaccgtaaggtatagacatccaattcctagattagatgatatgcttgataaacttagtggtgcttttattttcactaaaattgacttaagaagtgtctatcatcagattcgtatgaaagagggagatgaatggaaaacaacctttaaaacaaaatttgggttgtatgaatggttggtgatgtccttcgggttaacaaatgcatctagtacatttatgagattaatgaatcatgttcttagaacattcattggcaagtttgttgttgtctattttgatgacatagtaatttacagtaaatcccttgatgaacatgttga

SEQ ID NO: 104182 - DNA, 874 bp, Zea Mays
agattaattagctttcttgatggtaatgttggatataatcagattttcatggccaagaaagatgagtctaaaatgtcctttatttgtctaggctttattgggttgtttgagtgggttgtaattacatttggtttaaaaaatgctggtgtcaattatcagaggactatgaatttgatctttcatgagctgttaggaaacactatggaggttacattgatgatatagtgttaaatcgtctgaatttggttctcatataactgatttgcgcaaagcctttgataagatgtgtcggtatggtttaaaaatgaaccctcgtgtcgggtgtgataattaggggtaccaaaccacacccccaaaatgcgcttaaagtcctaggaacacccttgaagtacacccctcgaggtctaggaatcacaagcttcacctcgcccgaggtccgtgtcgagggccatcaccaaactccgtcccgaccgagcccccgtgggaccttccaaaacctccgactcgcccgagctcgatctcaaataggtcacgctctgaggcagatattcgcctcgcttgagcctcccacaccctagagctcccatctctgccttgcctgaggtaacctcgccctaggaccgccgagttcgcctcacccgaacccgtcccaggcgacaaagacaaagcgtgttcgaaggccgatgggggacagccgcattcaatgcgcatacctaccctgcatggtgctacaagtgcacagcggcaacgagactgtggtcttgtccaaacccaacaacatgattacgcatgcgccactgtacacgcacgccgcctgtcatcccctgatgggacatccaatatgatagaagagtagaccagcccttgggcgcaa

SEQ ID NO: 104183 - DNA, 358 bp, Zea Mays
aaacgggtgagtgtgatcacatttactatgctcaactacctgctgccaaaattgtttgtgcctccgaagcttcccatccaccgctgcttcaaaagccggctttggctacgtcatcttagaccatttccatttcactcagatggctaggattcacaccaccgcaaaactgatcacacctacctcttcggaggcatgtcaagataccctacccatctccgaagctatgagggctttgtcatcatcaaggccagctctggagttgccgaaggtcagaccttcaaagccaagatatattgaaattggtcgttccactttgagggagaaggaccttcaatctattaagaagcttagttatttt

SEQ ID NO: 104184 - DNA, 604 bp, Zea Mays
ggcatgtgggccatctctatattctgtttctccacagtatatgcagatataaatccacgggaagctctagtatcaaagagtactgcgacagggtgagagttgatctccaacgtacctgatagcatggtgacatcttagatgtctcagcgatgacatggttcatgttgccaaagatagacatttgttgcccttggttttgtggtgccgccattgatcttctgttagggagccacgattgcaggttcctctatggacagaactttgtgtggtagcccattccaccacacttgaaacaagccttgactgctagttctcctgattgccgcctgccttggggcgttggcaggtgtaccggtcttggagcattggcaggaactggttgttgttggcgttgccctctgccctactgttgctgcaactgacttgcactcccctagaagtgactagggcggtgcttaccttgtggggtaccgttaactagggtcgcctattgatcacaatgaaccacgcattgagcttgcacttctgatttttcatctcttcccgcttgtacttagtcatgatggccctatcgaccaagtactggaagttggtgaacgtgtgg

SEQ ID NO: 104185 - DNA, 333 bp, Zea Mays
gatgattggggaagttttggataattatgagatctatcttcatcagctgacccctaacactatcgttaggtttagcgtcttcatctgggctcttcgaagccaaggaatggacctgaatgctgaagctttctgccgagtgcatgatctgcattaccagacgaaggccagagaagacgggttgcatgaaaactctgttacaacttcgcatatcgcaaggatatgaaggccccggtgcttagctatcgcaccaagtggcagaccggctagaaaagtgaatggttctatatcaaggccgatgagaagaagagggagaagttaaagacgatggtcttg

SEQ ID NO: 104186 - DNA, 384 bp, Zea Mays
atttaatggttatgtcatggtgttctaaagataaatattgcttcatcatgattttgtgtgatgtcggacatgtgtgccgaagtgttttattttggtgaatgtgtttgttaattgtgtggtagttctagcgcgcgaagtaacttggatgaaaattagtgagtctacttgttagtcctcatttgattattttaactctaacaattggtaaggtgttagaataattcaagtctctagagcaaggcgattcttgaattatataggagctgaaatttgttgattgctgttttgggctgcacgtactgttttcggtgtgctgtatgtttgatgaactaaattgtgttttctgtagatatatgctatagaaaggtggtagataactttatt

SEQ ID NO: 104187 - DNA, 1326 bp, Zea Mays
gaatttaatccccatttcaaagctttatcggtcacagacactgcctgcagccaccactccaaggactccgacccgggttgaggtgagaggacagacagacccaacctttgcagaaagtagaaccaaaattgcctagcaaaaacacttagctagaaggtggttaatagtttccttttcctgatcgcatagcacacaaagagtggggtgggggagattccttttagccaaccggtctgctgtccagcaacggttatgagcaacaagccacatgaagaaggaacattttggggtagcccaccctttccacaataggtcagctgtcccaaataaggttaaacctagaaaaaggcatcataggctgatttggccgtgtattgccctgaattagagagcctccacaggtgtttgtcaggaattccttgctgcaggattattccctctaactgctccaagataagcaagaactcctgtaggatttgcaaagtaagggttccatgaatgtccctcaaccatctccaatcagccaaggccttggctacagttcttttattgataattctcttggaaaccgatctgagaagatgaggagcccaatcttgtaaacgtttgccccacagccacctaccttttcaaaatagcgttgacttaccatcacctagcttagttaccgtggccaaagagaagaaactgtggaccgtggaagctgcatgcagtttgaaaacagcccaaggtttgtccggctcggttttcctgagccacaaccatcttaatttgagagaccagttaaggcattgaagattcgaaatcccaagaccaagctccttaggccttgttactttcttccaagcagcaagacaatgccctccttcagcattctttctgcctcaacataagaatcctcgcctgattttatcaatgacatgaattattccctgaggaagatccagagccatagcatgataaattatagttgcagttagcacatactgaaccagaacagctctcccagctgtagtcattagatcagccggtccagccaggaaaaaggtcagctaccttgactaccagaaattgctgttgtgccttggacaacttcttcaaagataggggcaacccgggatatttgaagggaagccatccaccttacaagggggctgattctgaatggattctattagttttggcgcacaatgaataggaagcacactactcttctgaatgtttgtcttcagtccataggcctccccaaatagttgtaagatctttagaatcagctcattctctgcaggtgaaggtctcaggaagggttgaggaccacatcgtcag

SEQ ID NO: 104188 - DNA, 502 bp, Zea Mays
atgcttttgggggatttgaatgttctggtctatgtaaactgaaaccatttcagctactacaattattattctgttatgttggagtatgtatgcgttactttatatcatgttacatgttcagttctgttcatttatatcatgtttcatctgcctctgttgcatagaatggggagtgattggaaccaggtgatgtctcaatatggaagcttccttagccagattgacgagcagcctatgggaactcaacattctgaatttccagttgatgggcaagccgagggctcaagaataccagctgttcctaagaagccaactcaaagaacaaagctagcaaacttcactgctgatgaggacactagggtatgccatgcttggcttgctgtaagttgcgatcccattattaacacagggcagaaacgtcaaggattttggagtagaattactgaagcatacaactcaagacgaggaacattgcccgaaaggtccacaaaatctttgatga

SEQ ID NO: 104189 - DNA, 287 bp, Zea Mays
tcttcttcctcatcatcctccacagcggcaacacaagcagcacacccattgggatcagcaacagtttgggcacacccattgggatcagcaacagtttgggcacacccattgggatcagtgtcagtaagaccgattacaggcatttcttcagcagcaagagctaaagtgccgacgtcctcatcaaaactggatactcgccggaggcgtcttctctttttcttttgctcatcagcagaaggctcgggctgactggctcggctagggcgccttggacgagtgctgacagg

SEQ ID NO: 104190 - DNA, 271 bp, Zea Mays
attcgagttctggaccaaagggacaggatcacccgaagaaagactctcaagttttataagatacagtggaaccagcattctgaagatgaagctacatgggaaacccaagattttctagaaaagaattttccaggctttctagcctcttgtaaattgtaaagtctgtatagttgtgtaataaagaagtaacccccacatcacccctgccttgtaccaaaattaaggaaataaaaatgtgatgcgtttcctttaccattacctaccctaggat

SEQ ID NO: 104191 - DNA, 639 bp, Zea Mays
gttttgtaaaaatccactggtgttaatgttaagttgaggtttatttgtgcgtggaaagtaataatgtgttaaatacttagaactcttagtcgatagtagaaattgtcctggcttatatagagaggtggtgacaggccaaagtagtcatcgcttcctctatatcttgagtcgggtcaatacgcgttatgagttcatgatttagaaagtaagcgcatgatggtttcgagttagaggttagtggtttacgattcatatgagttggtcggtgtgcgaaaatacttgtgagtatgcgtgtttataaaaatgtggcagtgcatgttgtgtctcggattgcgataataataggtaagccgacgtgtatgttatttagcgggctatgtcgttgctctagttaaccgaattgttagatggttgggttaagctcgtggtcacggtgaattgctcgttgtggtctaaatgtgtatggttatgatcgcgggtaaaaggtagtagtgctcatgtgatgtctaatttaaaatgcaaattattgtgtgaagagcgcattaataaacatatatgtatcgggtaaggttattgtgataaatgtgttgtcgattgtgtatggcaattctaatgcgcgaaataacttgtataaaaatt

SEQ ID NO: 104192 - DNA, 572 bp, Zea Mays
caacaagtgtgtttatgtccctagaggaaagagggcctgcccttttatagctcaagggttggaccttacagaggatatctgttttctacgagagagataggatcctctaggttgtcgtgtgggctctccgtagggtcgtgtgtagccttacttcggtatggcgtatcgtctcgctcgttcgtcatacgaacccctgtagttagtccgtcgctgacaccttcgtagtagtgcgtggtgggtcccgtgggtcagtcccatggtgcggttgtgtgtggcgtggctctgtctgtcgtcataggcctgcgtcaaccgctggtgtgcgtttgcatacaccctggtatggtttatctgttgcgttctttcgggcatgcgggtcactgtagagactttagcgttgaggcccttacgaccggggttgattagccccatgagtcagtgagggtatatccatggacacatggggggtgttccatcgtgtctgccaaagacattttggtattgtatgtacgatccagacgtgatttggtgatgttgcgtcttatcgcagccgtcgtgggccgacaacgtcggcc

SEQ ID NO: 104193 - DNA, 522 bp, Zea Mays
gaaggcaaccaaaattagcgcacctcatttccataatcagcattgttctatttggcaagccgaacctgcaatcaaatttgggcgcctaccatctttgtttttggcaagaagcccactttcccttacacgcccctcctttccttgttcagggatctgggtgcgcccatttccttgtccaacactttttgtttttggccagcggcacctccatatttggtgcgcctaagttttctaattctggctatttgattttggaaaccaaaccttgtttcctcatttagggatttggtccgcccaggcatttttggaagctatcttgggtgccaccatttccagctggtgttttggtacgacttctccaccttttgcacacctcccttacactccccctccttgcctagttctgttcggttttacttggttccagcagcattagctacgtgtttgcacccttattcaactttacatttgctgattgattgtgctaatccttgctctaaagtgcagccttcctacagctcc

SEQ ID NO: 104194 - DNA, 410 bp, Zea Mays
atgggaggacatttgcatggactttatcgtaggattgcctactacctccaggcaccatgattcaatttgggttattgtggacagattgactaagaccgctcatttcttgccagtacataccacccataggacggagaagtatgcggaaatctacattgaccagatagttcatttgcatgggatacccaggactatagtgtcaaatagaggagcaccatttgtggcatgattttgggaacaattgcaggaatcacttgggacccatgtagtacgaagctcagcataccatcctcaaacagatggtcagacagaaagggtaaaccagattttggaagacatgttgagggcatgtgtgctacactatggaaaggattgggacaagtgtctttctttagcagaattctcttaca

SEQ ID NO: 104195 - DNA, 508 bp, Zea Mays
ccctttttaagcaaatttgtcaaaggtctcgcaataattccataatttttgacaaacctcctgtagtaacctgtcagccacaagaaaccacgaagttcagtcacatttgtaggttgttgccattccttcatggctgctgttttcattgggtctgtagatacccctgttgctgatattatatgtcccagatatgtcaactcctttctcccaaaaacacacttcttccttttgagatagaattgctgctctctcaaggtttcgaacaccagtttgagatgttccaagtgtttttgccaactgggactatacaccaatatatcgtccaggaaaaccatcacaaatttgcgaaggaaaggtgccaacaccaagttcattgcacactgaaaagttgcaggagcgtttgtgagaccaaaaggcattaccctaaattgataatgtccttgatgagttttaaacgcagtcttgtactcttcaccctcccccattcttacttgatgatatcccgctg

SEQ ID NO: 104196 - DNA, 292 bp, Zea Mays
ggtactccagactgtaggacccggatagatttggatccctagatcgacagagttggagtctgtaataattcttagttcaatgtctcagtctagtcagtctagttagagttagtttgcttatcttttgttggatgcttgttatgatggacatgtactgaagttggatctttgtaatgattgtcaccaaggtgtgggtatcccctgcaacttggtgtagttattaataaagttagttatttagttgggtaacccatttgtctccactttcctctttatctaagaagctatcaat

SEQ ID NO: 104197 - DNA, 451 bp, Zea Mays
tgtgcgcagaaattggacccaagatggcatcaaaactgtccaatggaatggcgtagcagggaattgcaaagtgttcttcaccgatgaccactagaatgccgtctgcgaacccggtgcaatccaccttgtccccatttgctatggtcactcttcttcctagactagggcccattacaatgtccaaccgctgcaaggtggtgttgtcaaggaaattatgtgttgatcctaaatccaacaatgttgttaggagatgacccctgatggaaattagaagttgcatggtgtcttctttctgagttcccattagtgcatgaagtgagatgatgggctttgctgctgttgtgtcttcttcatcagtgaccgtgtcgtccgtataatctgagacttccaaatagaatagccactgacagcgatggccacggacatactgctcatcacagttgtaacagag

SEQ ID NO: 104198 - DNA, 367 bp, Zea Mays
agggtgaaattatcctcggcaaggggggtagagataagatggtattgtagtagatatttccaactggtgatatttcagtgatgatcacagttctgaacatccctgccctcttctcatctctatcttctctctattccaaagtaagacacggcaagggaaaaaatcagggatagatatttctgcacttttgaatctacagctcttgactgatcctcccttcttctgtcagccttttctccttattttgattaagaacaggttagtcaccattaatagaacttgttcactaatcaagggtctgcaaagttactataggtttcttggacccaaacctcatagattacaagttatggtacccaaaaaacag

SEQ ID NO: 104199 - DNA, 506 bp, Zea Mays
gtgcggtctagcttaatcgaatgggtctacgagcaacagggggcttgagggaggctagaacaccaatcaaagaagcttgaactggactgcagagggctggccacggcgaagtgttcacggtggcgcggaaaacgtatttgggggaaatacaaaattgggaggctctggtggatgatccgaggcaagggctggtgtattgaatgcgtaataacctagtggaactcactgcggcatcaatttatagagtcctacgacggtggcgtctaattttgagaagttgcgctcgcggccggagagaggggaaatgtactggcgcgggtgatcgtggctttcaccgtggcaaagcctctagcgatggacagacttgctactatggttcactgcgacgtgttaaagctcctaggcacgtggcacaccgtcggtaagtggccaacgccagcgaggatcatctcggccggccgcagacccagtgggtacgatgaacccaccaatgaccgagttcgagc

SEQ ID NO: 104200 - DNA, 393 bp, Zea Mays
gcttggcacaccagaccagtctaatggcgcaccagaccgaagttccagagagccctacaaatgcgactttagcggcctggcgctccgagggctcaccgatggcacaccagacctcttttctagagaggtctagaaatggaggactcgagcagatggcacaccggcccagtccggtggtgcatcaaactagtcggatccaacggctatctgacacatggtaggttgggtggtgcaccgaactgggccgatgtcacgcgggagggtaggtttgaagcaggtttcgctgattatggttgaccgttggaggtctaatggtgtagcgaaccaggcatgtacatccacggaaagcagattttcagcaatttgctcaacgactctttgaggagatttggg

SEQ ID NO: 104201 - DNA, 650 bp, Zea Mays
aaatatcattgtaaatagtggagtttgaaatctaaggtgtaatagaaaatatgctggagataacccaacttcctatagttgggaggcccaaatatggaaaccattcatttgttttggatgggagggtttttcggcaaacgggctccaccaacctcgatacaggtgtcaatggagacccgatacccgttaactcatgagtaatttctgtattttagggttagagtatgggaatattttaatctccatgggcatatttttagggaaaattctccccccacattaggtatatgggtatgaatacgggaaaatagaacccaaacctgaatactcatgagtaatatttacctagtaaaattaggtatgcatcctaatagacaaagtccaaaaactaacactaactcttccaacccttttaagtacccatcccacccaaccgagtcgacccgccaccaaccgcccaccccatccacgtgtcactttggtttgttgttttgcatagttaaataatgttttcttgttgtgtatatgtcagattttttgtgatgtattattgttaggtgtcgtgtgtcagttaatgacatataaaatataatgcgatcatacttttttgtcgggaatgtagaccttacccgaatgaggatgagtttgag

SEQ ID NO: 104202 - DNA, 339 bp, Zea Mays
atccctaccgctatcttctaatattgtgatttttactccttgcaggtcactaatctgtacattgaactgttaaaggagagggaaaaaggaacccaatataggtttttgaaataccatttcttcaatacataagcattaggtacctctggacagtcagtgggaggcaaaaagtgattaatataaaagctgtttgtcttcagtagatgtggctataatgttgcaaaaacataaactgtagctgtaatatgtgatgccaggatccctaccgctatcttctaatattgtgatttttactgcttgcaggtcactaatatgtacattattgaactgttaaaggag

SEQ ID NO: 104203 - DNA, 298 bp, Zea Mays
cacgttatacgactcctgtgactcacccctctctccggccgccagccttctccttcaaaattcggagccaccggtctcggacactataaattgtgtgtgtcgctaactccgttaggttgtcacgaagccagagcacccgccctcgtctccgatcatccactatagcgccttaattcgggtttcccccaaatccgttttccgccccgccgtgagcacccctccgttggccctccatcctgtccctccacccgcctacttagttgccgttcttgagcccttgtatgttgctaaagcttac

SEQ ID NO: 104204 - DNA, 883 bp, Zea Mays
tgagtttattaccttcggcatacatttgcatacttcatcacatcatcttttgcattcatacaaacatacattaggcattcgtagattcatcatcatgtcataaagtataaagcattaacaggaaaagtgtgggttcctgcctttaatgagaaaacacttcgaatacagaaagagacttcgtctcaaatgaaacttcgttgaatacgagggtgctttgatgtgaactaaaataagggaaggtgtttttcgccttctgctaaaaaaactacgaacattggttttgtccacagcaaagcagacatcacacgaatgaaaggtaaaataacattacaaagcatttataaatatttacaattctgttcacattcaattacaatccttcgacaaataatacacttcttgcacaaagaatttccaaaaagtttttctacagatatcaacaaagggaaggcctctaaagtcttcggttcaaacctaactttgattcgataaccttcggagccatcaccctgaagaatgacgaagaaaagggtagtgaggaatctggtaaggaaaaatgtaaaataaaagaatagaggtaaagagttataccttgttgagcagtttacgagcttcgtctctagccagctctcggccaccctttgcccaaatttgggtgataaatctgttgcctatccttcgagcttcggctaggatatcaacgaggtctgatgccgaaaggttaaaatttggcctgttaacggcccttgcatgactgcacccggcttttatgaaagcggcggccgtaccccgagaagccactagcgcacagaagtcaccatggctagttatgacttcgtcaaggacgtcaacctccttctcaacacattcaagtgctccgggc

SEQ ID NO: 104205 - DNA, 380 bp, Zea Mays
gttcaccaggttcagcttctacttccacatagttgacctgccctcggttgacaaataagggctgactcttgcctcccgaggcctgaccttgcttcatcggagctggagtggtgtaagctgctctgttgggacagtagttagcataatgtccagcttgaccacacttgaagcatgacctatttgttgatgtattaggagccacaggtccagctggagtgcctgcttgaggatgagcaaattgggtctgttgagtttgttgcccgaaactgccacgagcaggtgtactttgaggtgtagtataatggggacatgaactacttccagcttgtccctggttggtagctttcctcttttctccaaactcagccctcttgtttttc

SEQ ID NO: 104206 - DNA, 327 bp, Zea Mays
cgaaactgttgagtcccccaaccacaactgggttgccgaagctaataactactgcaacaatgactcctaagaaaaggaggatggccagtgttttggatactgttttaaaatctacaaagataccgactcctgcttctactgaagctcccgaggacaaagctgaagacttgagagaagtacccactacaagcgcttctcccactcacattgaagctaaaacttcaggggttaagccagcagaactagcaaaggaaagtcttcatgaaaagccaacattgcttgctcccgaagcaccttctcaagttgatttagaatatattgttcgtc

SEQ ID NO: 104207 - DNA, 355 bp, Zea Mays
cccgtgtgaacaccaactatatccctctgccacgccaggctcctgtcgacccagtggtagaagaggaagtccctatggatctccatcaccttcttgtggagaatggagtgattctagaggacaactcagaggagattctagtgacacccaccctattgttagaatcgctagcctttgcagttggagcgtcatcttcagcaccgcaagcaccagcagcccaagcccctgctcctgcaggcgacgatccagatgattctggtgatggtggagatgatgaagatgaagaggaataaaaaatcaacaatgaggatgccaacgatgagcaggaggacaacttcgttgggatatggcatgt

SEQ ID NO: 104208 - DNA, 457 bp, Zea Mays
tatctaataaaagaggtgtaggaatgtcacaagagacaccaagatcagccaataaccaccatagccaaatactttcagcagtaatagtggaaagagcttgaagtttttgtttagtactagatcgagagatgggtgcttgtttcttggattttcatgcaacaggagaagatccaaaaggaatacaataacatgtaatagagcgtcatttagttgcatcactttcccgagtggcatcagagtaagcatgaagttgtacagggctatcaacaacataaagtaaaaaattggatcttgtacctcataaatatcttaacacatgaagcaaatgaccataatgaactgaggtcagggcagatacaaacgactcaagatatgaacaagatgagcaatattagttctagtgattgtaaggtaaacaagactgtccacaatatggtgatagcgagatgaatcctct

SEQ ID NO: 104209 - DNA, 421 bp, Zea Mays
catgaggccggaagtgttcatccatgacatcctcaatggatcatacagcggggctttctttgtgtcaaggttctgtgaggccctctaatactttgctacaatgttcgacgcgatggacaccattatgccgcaggaaaaccagaataggttgctggttgagcagtggttagcaatgtgtgtcatgaacatcattgcgtgtgagggtgtggaccgggtgtcgcggcctcacagctacaagcagtggtaggtgagaagcgaacgagcagggctgaggcagcttccattggatccgaacattgttcagatgttcaaagacaaggtgaaagaggaataccacaaatacatagtgatcaatgaggatcacgagtggctcctcactggatggaaagggcgagtgctctctgccttctccacgtggacg

SEQ ID NO: 104210 - DNA, 275 bp, Zea Mays
aaactggtgaaagacagttctttcggccagaaagtatacaggaggcagaagaacaagtacgacaaataagggagaatttgagaattgcacagtcaaggcagaaaagctatgtagatacccatagaaggctactagagtttaaggagggtgatcatgtatatttgaaggtgtcaccaatccggggcatgcgaagattcaaagttaaagggaagttgtctcctcgcttcattggacccttcgtaatcctaaagcgagtgggagaggttgcatatcaa

SEQ ID NO: 104211 - DNA, 275 bp, Zea Mays
tgagtggttcatgatgtattaaggtaccccagatagatatagatacacatgcatcatgtagataggtcttttttacccaaccatatgctagaaaaagagaagagtgacgcgtacgtgtgaaaattgtttctatagtagtgtagtgcatgttcccggtccgcaagcacaataaatttactccattatcttgacctcaaatgttcgatatgattggcagtggatgactaggccaagaagtaagaacaaatgagctaatgtatggcatgatatatgct

SEQ ID NO: 104212 - DNA, 347 bp, Zea Mays
gcgccgtgttcttcacctcctgttgttccattctgcttccatgcatcagggaagcagctagctagctagctagtgctgctgcactacgatctgaaggcatctttttactgttggcgatcagtgagaggagcatgtgccatgttgttgagtgagtgtggagcataattgctcacggcccataccatataatgccaacggagacctaatacctagtagctttagctagcctgctgataaagtgatatataatctagctagaggtgtactaaacagaatattgattcttaattattgacaatgctaactagctaactagctagtaactatatattggcataacattcctt

SEQ ID NO: 104213 - DNA, 578 bp, Zea Mays
ctttttgcgattggtgcggtgcctgggattagatcaatgtagaattctacctccctttctggtggcattcctggcaattcttctaggaacacatccatgaattcttctactacagatatgctttcggctgctagattaaacaccattggatcttgggtgggtggttgagccttacatgaaactgactttccttggtggtcagtgagaagaatggtcttatctgcgcaacttatgacgccattatgcttgattaaccaatccatcccttagaccacatcaattccgtgggatggcaggacggctaagtctgccaagaacactaccccacttaaaagaatcctgacttgggagcatttgaggtggcatagaaggtctgaccttggggttcgggtgaccaaaggaatttctagagatgtagtgggaatgccatgcttttccacaaaaccagtagctatgaatgaatgggatgctcctgaatcgaaaagtacaacagcgggggtaaattcaactaggaactcaccaagcactactcccggggcttgctgagcttcttgagtgtcggcgtggttcactcgtgc

SEQ ID NO: 104214 - DNA, 493 bp, Zea Mays
tagagataagtgtcatgctggacatgttggctgaagattcctctgatgcagcccctgctgaaacactggctacagcacccatcctagagtctggcaaaactttagatactcagaggtctgatagtgttcgcccgaagcgtcctcgccgagccaatcatccaacttctcctgctgaagggaagaaaaagaaaaagagacgtctccgccgagtgtcatgcttggatcaagatgccggtccttctgctcctgctgctgaggaagtgccagtgccggtttttgctgaagctgatcccaatgggtgtgacccgactgatgctgaccccaatgggtgtactgtccgcattttttatgaagatgaggaagaggaggatgaaatccctctaattcggaagaacagccgacgctacgtagccagcggggaaagtagtggtgttccttctccagctttgtctaccctcgttggtctgcaagaattgtctctagcaaattttga

SEQ ID NO: 104215 - DNA, 375 bp, Zea Mays
tggcggtgctactcgtttgaaggagcgaggcaagcatatctagaattgttccttcctcttgaaataaagacattctttgttggtgagttagacaagacaaagcaaaagaagagggaaaggttcaacagaggcaacaaatagatgaagcaacaagaacaaattatggtgaagaacaagatgattatggtgttgaacttcaggctattctacatcaatctcgagaggagcacgaattcagataaagagctggtgcacgatatgataggggtggtggaactgggtcaagtcaggggcaccataaggatttggcccactgcctaagatgtttgcaaggacccggtcacaagtttcagagcaggttagagactactatct

SEQ ID NO: 104216 - DNA, 415 bp, Zea Mays
aatcagaccaaacctaccaaagatagaaatcctcctttctatactagtacaacatatctgtctatctaaggaagagacctctagttgccatagaagactatattgctatactagcctggataggagagcctcacgcaggaggcagccaggaatattaccaaaactgtctaacagtactgattgcagaggaaccaaagaatttttcattaagtgcctccaaagactaagaggtactgttggaataaatgcttaactatgaggggataacctttgcataataaaaaagtttagttattagttgttcttaagggagactcgctctctgcagactccaaaaaaaacacgcctagaaatctgaataatattgattgaggtcagtcaggataatattagccttgtttttgttttcccttca

SEQ ID NO: 104217 - DNA, 454 bp, Zea Mays
gggtagaagcctccaccgaaggatccatagtatcgtcagcagaaagaacagattccggccaggccgcgaccttgacatgttcacacccagccttttctaagattgctgcaattcctcaggcaccggaaacagcacaaaaatctccgtgatccctaaggatctcaccgaaagcttcgtcttcctcacctatccattggataaccccttcggggtcaccacaaataaatttctgttatgaggaatacacccctacctttgcaaagctatcttttagcttcttcgcgcaatctaaggattttttataacactgttccctggaatcacgaagctcttcaacattcttttttagccttgaacttgtccattaacttatctcttgtttgccttcgcgacttcaaaattttcattcatttcggcaagttttttctttagatcctcaactttggctttgtga

SEQ ID NO: 104218 - DNA, 441 bp, Zea Mays
aaaaccgcaatctagatataagtatctaatagatagagtggtagaagaggcaatgcacgagggtgaggtcgtaggtttgattcctacctgccgcatagcttgtgaaaaaaagccgcgacttgtactagtgatttcttggtggttctcaactgcctgtgaaagaacgatttctatagacatctattactgacggttcgccctgtaaatttaggttccaaactgtctccgttgagcttttttatactggtggttgattttaccgtaactagcggaaatgaaaaactgcagcgcgcttggttctctcttgcccatggctcactcacgccggaaaacattacccggctaaccatggtaaaacagtttagcttttctctgttggcgaaggacacactttctctagctcgaatgtaatatatattgtgtcaaacaaaagaataatgc

SEQ ID NO: 104219 - DNA, 596 bp, Zea Mays
gagtgaggagttagtgcaggagagtggagcattgttgatagagtttgtggttgaggactcactagagctagtggaaaactagatgttggataggcaagcttgatgaagtgatgctttgctagcccccctcccatctcccttgaagttgatatagtcgatgatggactagttgaccattgatgtcaagccatcgtccaccatcttgccccatgtctagcctcgctcttcatcgaacatgatgtcgtgcatgatgtgcatgtgctttatcgtaggtcgtggatgaggtatgccttgacgccatcaacatagtcgatgaagacccctagcatactctatccatcaagctagttggcatggttgagcttcttggcaaacaccaaacaacaaaacacatggaggtggttgactgctagcttgcgatcgtgcaagggctcatatgggttttgacatcaagggccttggtgggcaagcgattcagcaggtggatgacagtcatcactaccccgcctcggtagataattgatgtccctttatacttgaagaaggcgtgagtggtggctaccaccatctagttgtgatgattgatgacattgttc

SEQ ID NO: 104220 - DNA, 1137 bp, Zea Mays
aaacgacgattggctgaagtgtattgaagctaccaccgatgagctgcttggagcttactccaagaccgaagataacgctctgtccgcagccttcggaggtcgggggaagaaaagactaaacagggtttttgatgcgatcggcttcatataccccgattatcgctacccgctgcgagggcaacagaaaaagtggaagattgctacttcggtaatcccagctgagcctgtaccgaagagcaaaaaggtgaaggttctgacccaccggccacgttatattgagccgaccgtagtgcctaaatttggcgtagggtcctcctcagcagccgaagcaacagaaactactccgattgcatagagcaatgaagaggcgaccgtaatgccgaaggtatccatagccgagccagtcaaagataaggttgataaggctgaagaatcaaaggctgaaaaaataatgcaagttccaaaaattctgagccatccgatagaggaaacactgccgaaggtgcaaaaggcttctgctgcaactcccaagaggaggagaatgggcaacgtgctggatgctgtgctttaaactgcgaaggttttaagccctgctgctacaaaaaaagttgctgaaactccaaaaacgcaggccgaagccaaaactagacaagcagaaactgaagctgtgcaagctcaaactgaagccaaagatgggcctttagtgcccaccgagatggtgcctgctgaccccaaggaaaaacgacagagcagattgcatctaaaaaaattgaagctcttgctcctgaagctttgaacaaaagtattgactacattattcgtcatgcttcgggaaaagaactatcccaagaagaattgttagaagcacgacactacgcccaaaaattgaaatatccgaagggggcgttagtgttcaatggtagtgacgaagaagattttctgtactgtctcccagataacaaagaaatatacgtttgccgggagataggtaaaagcatcggattcccgaagctggaagacggcctttcgattttatcgaaggatgaacttgctgacagcctagcatacgatagcataaaggtataaaaactaactttgaatttgaaaatgagatatttcatttgtcatactcaattc

SEQ ID NO: 104221 - DNA, 464 bp, Zea Mays
tggagcggcagtctgtggagaatggatatctttgtttggtcgccatgtagatctcctggcttgccatgaccttgcccggtctagtcgaagcagagcgcaggggtaggttgcggcgtaggctgatacgctacacatgtaggggtgctcaggcgacatcgtccagtcttctccgcatgtcaccctttgcctcagtactgcgcgggctatagccagagtcatgatgatagcagccgaagcggtgcagagagtcaatggtcttgcctcggtaaagcatgagttactatgtggcctacgtactatggatgcactgctgccactagggtgggcaggtacacgtcttcttcgtatttaacgcagaggcacactacactcagaggctgacgttgggctttcccgatggcttacgtcacatgtcgtaggtcaagtggcagcattgggcttcgccttatgtggggagcaatgac

SEQ ID NO: 104222 - DNA, 523 bp, Zea Mays
ctgctgtcattaattggtcttcttttttggtgtagttccccaaaatctcattacacatagtttcaatcatttccagccattcttggcaaggttgcttgaactgtttttcaaatttgaatcgataaggtaattgaacaagttcatattttttctttgttcccttcatcttcggcatcacccaatcactggatgttgggtacgtctggttggctaagtattcctgcaccaagtccctggtgctgatctgttcagccactaccctgaattctaccttggccaactggcatgctgaccctatctgcatgttgcacaggggtctggtcattccgaatcttaaagtcaatgggctcatgaccatcgtcatcagttttcccctcttcttctcatcggccttgatataaaaccattcacctttttagctggttggccatttggtgcggtagctaagaactggagccttcgtatccttgcgatatgcaaagttttagcagccaaaattttcatgcagatcgtctgccctggc

SEQ ID NO: 104223 - DNA, 346 bp, Zea Mays
ggaaatagtgttgaatgcaaaaacaatgtgcgggtggagagggcgagatgcttgccaacgtcgaccaaatgtgcttgtaagaggcttcggatgccgaagagggtttggcaccgcccgattcagtcgcaaggttccggttagtaaggcatcgggtgcggctgtgaactccaggtgcttcgctgatggagtaatggaactggaatatgggggtagtagtggtaccgtgattttaggcactcgattgttttcctttcagccatgttgtgggtctagtgcgaatgggtgcgttgatttcaatttggttgaaccatgtcggcgttggaggggggcaacacgtatgcctggc

SEQ ID NO: 104224 - DNA, 448 bp, Zea Mays
cgagagaggaggagcgcgggcgcgagagggggggggggagtcgcgggtttgggccgggagtcggcccagcagggggaggagaaggcttttctctttttctttttactttctaattcctatttcccattttgcatctttttcttttgaacaaattattttgtagatactctaagtgtttagaaaatagaatctaagtgaggtgctttgtgatcaaacaaaatgtatgcatatgatgaaggaaaatttagtggaggactttagaattagaggatggagggaggggtaaaaggtggattagggtttcaaaccttggttaggatttttgggatgctacaaacctaccccacttaaaggaatctcgccctcgagattcagacggggctcgagaaaaggtaagggtattccttcctcagagagtcctcactttcccaggtggcttcctcttccc

SEQ ID NO: 104225 - DNA, 674 bp, Zea Mays
tcccgacttccttgatcggcgatcaggaagaaattgcgccaacaaggatagcgagaacttcggggaactccccaagaataccacctccttacccgacggcgcctgcaataacactgtcttccaaaagcaggatataaccgcgcgatactgggataaccagtccatacccaagataacatcgaatgcccccaaggaaatcaccaccagattggccgaaaagacctcatcagcaagaatgacagaacacccctgacaagctgagcagctactaatggatccattagcagatctaaccagaattgggttacccagcctctgcaccgaaagaccagcccgcgacacaaaatcctccgaaacaaacgaatatctagcgccagagtcaaaaagagcatgggctgcaaacgaatcaactgaaatcgtacctgtcaccacgtctccttgctcactgccatctgcagcgggtagcacataagctccagaattacccgcagaagaggaagctcctggagtgaaattaacagaagaaccccactgagccaccggatgaggctggcgcggagctccaaactgagtcagcacaggggtagacggtgcaggagtaggcacagcctgatactgaggaaaaccctgcatcggcacgaactgagaagtcccaggcacataaagctgctgtg

SEQ ID NO: 104226 - DNA, 876 bp, Zea Mays
ctttatttgacacaacccctactggaaattatccagccatgatcatggcggaaaccgagctcaggaacacgcgttcccgccaactcatagccgaactaggtaaacgagtgccaccgtgagcttcacaagcatacagagacatgaaaacaatgtttgatttggacggtgtcttaccagaatggattggccacggttgagctgctcttcgtgatggcggagaccagtttggggaaagtttgaaattcaagagctcaggtgaatgattaagggtgcgagcgggtgctatggcttcacaaagaactctagttttactgcgcacacttaatttgagagaagggggcagaggtagcacaaattcttgcttcggttcaactcactgtgtgctggatgttcatacctcgccgtggatcacgggctatttatagccgcggcggtccggcgatcacttcccagccatggataacttctttagtgcatgcctagcacgtagaggagaggtacagtgaggtaaatcgaagcatgtgtgacagcgcagcgagagctcactgagtcacggtggccgccggtgaataactccggctggactcggggtatggtgccacgtacgctttatctaactccggcgttatccgttccttaccgagcccaaattggaacggcggcggcacgaatcgcggcggtgagatttttttggcgctggcggtctgatccatttcgggacactataccatggcgagctccatttcagttaacctgacagagcgacttcagggcaatttttctctcagttttctatagcaacgtgaccaacactctacagcaaaattatagcttaatagaccagctccaactttgatacatcgtgcatccacaaac

SEQ ID NO: 104227 - DNA, 498 bp, Zea Mays
cttcatcatcatgggcatgtcagcttcagacacaatagatttctcaaaatctcgatagctaagttttgttgggatcaaaatactataatcttcctcatcctcttcaatattttcttcttcagcaatggtatgttcagcttcggcaacatgagtaccttcgtcagtagttccctctgtcacaactagacctgattgtttcatgacttcggaagttggtgctgtctcggtgacctcggtctcttctccctcacgagtcacccttgcagtcgaacgcactctggccatctaatggattttttgtggttttaacgaagtcgatgtttgcttttgcagttttgatgaagctcactctattgacgaagttatctctaaatgatgaagtgctcgcttgagagcgcagtgaaaaagcttcggctatggttaaattttttaacagcacaatagtgcaatggcaatgaatgttgtggtaactctgcaccaacccgtctatttatatag

SEQ ID NO: 104228 - DNA, 355 bp, Zea Mays
ccgagttatccaattggagcttccctccttgacacaaaagaattgaagtgctaaaaatactgttataaattctagtaataagggataatcaatcctgaaacttgggttgcaagtcacccaaaggaaggcctaagtatgtgaaggggagggagccaatttgacagttaagtgtactagtaaggatcttcatcttgtcagcactcacatctatatgaataatgctagattttagaataataaacctttaaacatgtggtcatcttgtatgtgtttagcatagctttaaaaggaaaagttgtttttgactggcctccattattagtaaagtatcatcaacatactagaggatcaagaa

SEQ ID NO: 104229 - DNA, 516 bp, Zea Mays
aaagaagtcattatgcgtcccatctggtcccgctttggcctctgaaggccgatggtcaaaattgatgacgccgccgaagcatgtcagaaggcctttagtactgtttgctccttcattggcacgagagatttaattcaagaacatatagcattcagagtatggccgcttgtggaaagctgggaaatgacgaaggagaccatcactaaccctagctaaggtggtttggtccggctaaaatatacattcaggtttggtgataagtttgatgaaccaaatgatgattggctgaagtgtatcgaagctacaagtgatgaactgcttggagcgtattccaaaaccgaggacaatgccttatccgcagccttcgggggttggaataagaaaaggttgaacagggtatttgatgctattggtttcgtataccccgactattgttacccgctgcgaggacaaggggtaaaaagatagattgttgtttctggaaaagttgtcgcttcggccatcacatctgagccg

SEQ ID NO: 104230 - DNA, 541 bp, Zea Mays
caattgcatcgtcgacacaatataggatgtagattattcatcatcttcaatccttgatttcgtgcaaccatcgatggatgatgtgattgacgatccaaagtaagtaattgtccttgttaggagcgcctaggagcaaccctagataatggccgcaatgcaaaatggctgcctgccaataaaatcgacagttgcaccagtgacctcgtcgttgcaatcatcgaaaccattgcatggaacaagatcatgacaaaagataatatatctgacttcgtcgttagatttatttagcctaaatcttgaacaaactaactagatctaaaaactacgaatgaaagatatatattggatctcctttcttcttacacacatgcgatgcacctgacgaaggaagaaggaaagaggccaggacgacaggagcaagtgcgctgatggcggcaggcaatacgcggccgcgccctgctagctacttcgtttttagtcacactgcaagctagctcgatgtgactgcagacagtaatggctaccagcttgattggcaccg

SEQ ID NO: 104231 - DNA, 732 bp, Zea Mays
ctgaaccatagaccatgaagaagggggtatttccatgcagagctcgactgggttgagttcttaagctccaaaccacataaggtaactctctgatccactttcctgcaaacttttcatttttgtcgaacactttcttcctgagtgcttccagtatcataccattagccctttccacctggctattagctcttgggtgtgctactgatgcatacttgatctggatacgccgttgttcgcagaaatcaaagaattcagagctagtgaagttggatcccaggtcagttatgatgccattcagtatcccaaacctgaatattatgtcttgtatggattccactgccttggctgaagttagagaagcaatgagtttgtactctatccatttggtgcatttatcgatggcgaccagcacgtgagtatagcctccctgagctttcttgaagggtccaatcatgtccaatcccgagcacgcaaatggccatgttataggtatggtctgcaggtgctgtgctggtaaatgttgttgctttgataagaattggcaagcttcacatctctggactaactcggctgcgtcaccctttgttgttggccaatagaaaccagacctgaagactttccccaccagagttctggacgctgcatgtattccacactgtccggcgtggatctcatctaatagctgcttcccagtaaccgaggaaatgcacttcatgaggactcctgtcgcac

SEQ ID NO: 104232 - DNA, 465 bp, Zea Mays
aagtcgggcgctggggagcagttgcctcctccgcctgcctttggcctggataagccggtgagctttgtcgggcgttgtggaagaattgatcgggctgaggaggaactccgtcgtgcactgatcgtcagtgttgtaggcagggaggattctggctgcgccgtggaggtgcgtgacgcgatcgccttgaggttttgccttgaagcagggtcgctccgcatacgtcgtgctgcgcctaattctttcctagtcttcttcccctcggttgccgtggctgatcgggtgtttggggaggggcaatctcttcatgtccctccgctcaggttgcatattcgaaggtggtctcgtcaggctttcgcttctggaggtggacaaccgcttgtgcccgttggcgttgaacttcgtggaattcttgcgcatctctgggggattgaggcggctgaggctgttcttggtgcattctgtttg

SEQ ID NO: 104233 - DNA, 592 bp, Zea Mays
agcaccacaccaggctccttcttcccagacatcctcttcatccagggaagagtggaggatgcacctatttccgacgatgagcccaccatactggggaggagcccccatgcacgccgacgccgaaacagacgccataacgtacggcgtcaccacgaagccggggaatgggatccagcacaagctgtttcctgggacgaagcctctgaagtaggggaatccccctgacgacagagcgctccgagaataccacaactctcgtcgtcatgatcatcgccacgcccaggaatgcgagcgggaacaagctgaataggacgctaggctccaacgagggaacccgcttctcccttgaaacctattcactaactttgctcaagcactgaatacgccgagtgaagtcggggggggggtcgtagctcagatcgccaatggccaaccatgcaccccagacgcgaagggttatcgacaggtcctcacccaagcggcgaaccaccttctccccctcgctcaccgctgaatgacctacgccatgccaccaacagtcgatgacacacgcggagcaacatcaatgcttcgcgtgatcgcctgcatgagg

SEQ ID NO: 104234 - DNA, 335 bp, Zea Mays
gacccgccttcaaaaggcttttgtaaacaaccacctcattttcttcaggagcaggggtggtgctgtctcctccaaccctcacaatagacatgtcacgaaagtatcttcccttcatggcgtcaacatgactttgcttaatagtcgactttccgaagatggtatggcttggtcgctagggccggtcctcagaatcttcatctccactttccacatcatagtcatcgctatcgtctgaatcctcagacaaatccgccattatttccttcgtgatcttttctgtatttgtctttgccatagattcataaaacccagcaagaaaagggtccacaaccttc

SEQ ID NO: 104235 - DNA, 538 bp, Zea Mays
gtccgctagagaccatactcatgctctcaaacaccgactcatatagttgtcaattccgttcgactagaatcgacggttcgctgcctctctttgcgataaatcctgagtcagaccttcttaggactcgaacacgagtcgatgacacccttaacgcttcatgcgtcagggtcctcgtcgctagtgtgccagtcactggcttccccttgctccgtctttcgccggagcgaccacgagccctacgcaaaccgaccatagaactctagaattcatgactaacttgtcgtgggtttttcggtccctgccaaaggaaatgaacaagttcaaggtcttaccggagaggggccctcggtgcacactccatttcctggtcagggtcgattcgaagggtggtctggtccggtgcgtcgactttagacgattttcggtcccttcgatattctcgagcgtgggagggtggccctgtgttaatcaagcaagcaaaagaggagagatatcagtgcggtcatgtctactggatggacacaaatgttttgacagg

SEQ ID NO: 104236 - DNA, 365 bp, Zea Mays
accaaaaaattgtggtatcaaactgtaaaccattgttgaagatacacccaccaggatgacattttttcactaaaacaggttatgcatcatttgcagaaagcattcattttatttgaaggctcccacatacaaatgaagagcattgtgagaagatgcagccacaaataattaagctggccagtaaataccaacgtgttccatcgactagttttctgatgacaaatgcagaaagcatttcctcaaagagcactaaaaggacagacacagcgctggcggctccaagatgagtggggtgtaaaaaaggaacagccgaggcaagccttacccctgcatttttgcagagagactgtatcgaacccaggacc

SEQ ID NO: 104237 - DNA, 339 bp, Zea Mays
cgcgacgacacgtttgatcgccagatatttttcccgtgtgagaaacgctgcgtaatccacctggaatcgacgagtcgacgtagacgtacacccgtttatcggaatatccatctcaaattctgaccagcgaccacctcagctaatctagatgttctggacacgttcctatacatgctcacacgtatcaaattaaccccagcaaaacagaaagtgcaaagcgcaatttggactagctatctagctgacaaggattccactgttgcgttgcatcaccaactagcttcaacaagaacagagaacagttttactccctccttttccccctccgtccaacttctt

SEQ ID NO: 104238 - DNA, 745 bp, Zea Mays
gttgatctccgccggttcatcgtcgccaatactggccgggaggttctaccatcgccattgtcatcatcgtcttcgccttgcacgctgtcggtctggccaatcgattgcgtgcgcgacctctctcccgtgacgtctgtcttctgtcgcgagtttcttaaccaagcacaagggttaccgctgcgtcgcctctttgggcagcagcgtcgctgttcgtcatcgaccccgccgttgcatctacatcgtcgttgactctgtcggtgcgtgtctcctgcgcacggtctacgagctgttcgacacctgcgagttcttcaccgacaagtaccactcgcgctccactggcgccgtcgagtctcttcttcctgtgtgtcgtggctctcgttgccgtgactccaggatcctcgatgcgtcgccacgtctacctcttcgccttcttctagcacaaccttgttgccagtgtcgtcgtctcatcctcgactacttcgtgtactccgctctgacaaccgtgagttgcgacggcaatcccgtcatatcgcaccacaaccgtcgtggatgtcttctctgttggcacctcgacaatggcttgacttccttgcactcggctatctcgacataatcggcacaaagggctatcctatgcatgggctactgcagttgcagcattcgcaccggcgttccgactatggggggatatctccattgttctccagtctgtccgttcgtgttgctaacgctatgactggggggg

SEQ ID NO: 104239 - DNA, 539 bp, Zea Mays
gtcgttatctttcaacaacttctattcccttggtcttagtatgctcatatccttggagtcttgcatactctcgtatttttatgtatgcttatcttcataccccaatgtttgtttaagacatttcagttaacatgcccttgaccacccttgcttcttaatggttcatgatcgaccattttactttgcatatccttggtgatctcgttgtctccttgtaacttcacttggtaatgaatctttacttcaactcttatgttggaaccttacctatcttagccttgattgttttctccactttgtcgtttcgcgagtcttgtctcaactatatcctttgttatgctttttaattattatcatatgcacccttgacacctctatatcctatattgatgtttgtctcatacctgccctttaaaatcgcccctcttccgtctcataccttctttctcttggctgtatcctcttctttggctcgcgagtttgtaacctcatcctttgttgtgcttttgcttcttattgcctttacccttctcatctct

SEQ ID NO: 104240 - DNA, 606 bp, Zea Mays
acaagagatataattcaagagcacatagcctacagagtgtggccacttgtggagagctgggatatgccgaaggagactactgttgaatccagtgaaggtggtctggttcgattgaaatataccttcagattcagagagaagtttgacgaaccaaacgatgaatggttgaaatgcattgaagctaccagcgacgagctgcttcggacatattccaaggccgaagatgatgccttgtccgtagccttcgggggtcggggcaagaaaagattaaacagggtttttgacgcaattggcttcgtatatcctgactatagctaccccttgatgaaaggaaagaagaggaaaactaccgcttcgaccaccaccgttgtatcgaagggcaagaaaatgaaggttttgacacatcgacatcggtatattgaaacgactatagtgcttgaatttggtgaggaaacctcctctactgccgaagcagaacaagccactccctccacccggagcgctgaagggtctactgtagtgccgaaggtacctacagtcgggccaagcaaagccaaagatgattcggccaaagagccacaagtggaaaagacagtgaaaatgcta

SEQ ID NO: 104241 - DNA, 370 bp, Zea Mays
atcaaaagcaaagtttccatggtggaaatcatcataccatacatcgtcatagcttggattttcttgccaaagctctctctgttgtggcctttgtcttgctcgtcttgcgtgatatgacacatttcttcggcaacatcgtcgatcttcttctgaagtttagctagccaaagcattttctccctctttctctacacttgttggtggatggtctctgatctcttagtctagctcctcctcctacggtgttgggctggcggccttccttttctggttttgggcttctctcagagagatcccctcttggttgatatccaacgatgcaagggcagcccctgacgccattgccttcctacggtgttgacaatcttca

SEQ ID NO: 104242 - DNA, 560 bp, Zea Mays
ccccagccaacgtatccttctctgttcgctggacgcacgcgccgtctgcgccgtgcgtttcgcagctgctgccggctcggctcccgacgccctctcgtctccatacccgttcgcctgcatgtggagaacgccgatgatgcgacttgtccccttcctatttcctctccattaatcacaccagttccttctccttgtgtttatggcggtcgtttctcgcgtcgcatcgtaactactcatcaatggcgctcatctgagcttcaatggcattttagcgtgacactaactcccgctctgtccacagtgcaccaccaccagtctgcctgcgctgctcgctctcgttggctgccgcaccaaatgccccctcgccttccggaattgatggaacgcccacccgtgtgcttgagcctgctcgtttcccttccctggtggaggaccatcgcgtcgtttttttctctctccttgcagcagccgttacttcgccgccattaatggtgccaccgttctttgctcctggcaccgtcccatattcccctgctcgcctataaatagtgccagcaaac

SEQ ID NO: 104243 - DNA, 733 bp, Zea Mays
cggccacctatcgaggaagaggacatccttttcttcttgtcaccctggcaggcctcccaatgctcccgagtgacatgtagcttcctgccgatggtgataggcccagagagagcctgtggttcgtcgtcgtcgacgaccttaagatgacccatcatctcttcgatcgtcattgtggagaggtctagcagagactcgatcgagcgagcgatttgcttgtacttatcaaggatgcaacagaaaagcttctcgatggctctctcatcgtaggtgtcgtcgccaaattgcaccatcttctgcaacatagtgtggaagcggagagcaaagtcatcaacatcctcacctggcttgaaggccaggttcccccctccttgcgaagtgcatgcagtgtggtcttgcgggcacggtcgccgctgatgcgggtcacagcgatggtgtcctaggcctccttagcagtccgtttctgggaaagcgaaaactgcatctcgggagggactgcagcaatgagggcatccaacgcccatcgatcctcatagtaatcggcgtcgccgtactgaattacttctcacatgtggcgaacttggaaccgtaccttcatcaccgcggcccactcgacgtagttggtcttggtgagggtaggccacccaccaccgggactgatgtccttgacaattgcatggaccttgcggtggccatggtattgatccggggaggaagagccgcaccgcctgtagag

SEQ ID NO: 104244 - DNA, 371 bp, Zea Mays
caggaatccctcaggtccagaccgagttgccttggaaggtgtccatacaaaacttcaaaaggagtgtatcccagagatgagtggtaactagtgttgtaccagtactccgcgagtgaaagccacttcctccattttgaggggcacgcatgaacaaaacagcgcaagtaggtctccaagcattggttcaccctttctgtttggccgtcagactgtgggtgatatgatgtggtcatgcgaaggtctactcccaccaacttgaataattccttccagaaggcgctggtaaagatcatgtcccaatcagaaataatggcttgaggcaacccgtgaagttttaacacttgatccatgaactgttgtgccacagacag

SEQ ID NO: 104245 - DNA, 627 bp, Zea Mays
tagattcagtcatgcttacttccatcaagaagagaagccatgcgagaacgactgccttcaaagcccctaattcctattgcatctcacactcttctagcttgggaacatgacttctcaacatcactcggcattttcttgatcacctttgtcgtgttctgccatacttgtcttattaggcaaacactttgcacatatttgtaatttttaggtgtttttcatgtcacaaggagaacctagcactttatagcgaggatgtactgacacggtacaatatcgcatgcattactgttgtccttttgagcgttgggcaattgacacaggagatacattcatttagtaagtctaagctgctaattgttaggtgatggtaagagaaagctatctaataacttgtttgaggctattagctagtcttatttggaataattttagctattagttactattggattctctagccattagtcgaactactgaggccatgcatgcaaacaccgtctgggcctgacctacacaaccatggatgtccattatcagcaagcgaagctgcatcagcacatgtcccttccatctgaattcctgttgcctcttactcttagccctaggagagcgtggcccttactcgat

SEQ ID NO: 104246 - DNA, 451 bp, Zea Mays
caattggcaggtaattgtaaccgtgtcgactcacagaaatctcgcgacatgcaaatcgcgcgggatatttggaacatgccatgaatatcggccaggacaattttggcgaatatagtaggataactccaaaaacaactgggctacacaccgccaacgcttttgttcgatgacctgggagaggtagggtatacacgatggcgacggccaggggattggtgcagtgtggagaggctacaacgacgatgttaccctgtgggtcagatgtcggtatgctgtaactccactggctgcgttactggcgccaggattccttgaagacagcaacgcagttcatccaagtttggtgggagcaactcaccggatacccatgaggacaattggtgatcatgagcaggacacaccacacattctccaaagccatgtaagttcagtaagataatgtcagattttg

SEQ ID NO: 104247 - DNA, 312 bp, Zea Mays
ccttcaacaaacatgttgtgttcgattcacaaaagcgtaagacaaaccaccttaataatatgtcaagaagttcaatcacttctttccaacttgaaggaagtgcctgcacagttgcaacagcatcaaaacaagaaaaatcacaggaacaaactgtgtggaatcattctaatgaagagatgaagtaatattgtgatcaacttccaaccttttgtagcaattcaataccatcgatttgcctcttaaagtctgagttccataatcgcaggcttacatcttctcggaaatgcttaaacaaatcaatctgcacataaa

SEQ ID NO: 104248 - DNA, 440 bp, Zea Mays
tctcagctctagagttggtcaactacaaattaagactaagtcttttctagccttagggttgttttttgttttgttagtgatattcaagcatgtgttgataaggtatttaataatatttcattctaggtacatcaatgttgtacatcacaatcaaggccttcacataagggaggtcccacagtccacgtttgtgagtccaattatgttcggttccaaaaccttcaaacctatttccacgttcatttagtttcaaatcattaatcctagtgagaatctgtggaccactaagatgcttgggtgatcccctcatcacaattgtgtcccttttgaaagtgtgtctctataacctgaatgggtgatcctaatgcaaaaaacatctatggcagtcgaagtaagagatctttataccaagcttaagtcagaaataaccagtgtcttta

SEQ ID NO: 104249 - DNA, 552 bp, Zea Mays
cattggtgtccacctccgatgaatccacgacatcaagagcaccttcatgatgcagaaaccactaggggcttcggaggaagattttaccccaagcatgtccaaagcatacacaacccaagccaaaacgaagataaatctcaagtgcatcagaaccaccagtaggattcatcccatgtaccaggatcacaatagccttcacatggtaactttcatccattagcaccaagaggaggcagagcaggtcgaagctttagcgaaaggttcaacaacaatactcaaccaaagaagttgtgcatgttttgtttaaaaagcaaaggccatactacgaagacttgccaaataactatacaaaagcaaaaaagagcttgtcgttgcatagacaagctaaccgaaggaagtcttccacatatcctcaaactaatctccttatattccacagcacatccaacaccaagagtcaaagcggtaaccttcgggatccatagcttcaacaagcccttcacctagtcattggctaacgctattaccatttatcctaggacctccaccata

SEQ ID NO: 104250 - DNA, 430 bp, Zea Mays
cttttctccttattttgattaagaacaggtcagtcaccattaacagaacttgttcactaatcaagggtctgcaaagttactataggtttcttggacccaaacctcatagattacaagttatggtacccaaaaatcagctgcaacacacgggtaccatttcaacttcctgaactctaatcttcagtcttcagctgattcctcccttttcgacagagacaatttgggtgcccttatcttctaaatctgtaagatgtcaagccagggtctcttaataaaattttctcatgaatactaactcaccaactttgctttaaccatcctagcaccaagtcagacagaatagcttctacaaggcctcaaggttgatcagacaggcagaaattcagaataggtctgcctaatcgtcagtcagaatccactagcctgacag

SEQ ID NO: 104251 - DNA, 842 bp, Zea Mays
gcgccaacgaactctaaggcgcaaaaatttcaaccagcttctgccccgtgtagaattgcaccagcgtcaggtgggccgagggccattgcggcacctatagctcgaccgactaaagttgcacctctatcgtggtggacccctttgtccacattacccactcgggtgtggactcggatcactcagcaaaaagatgcgggtaaccccggcaccaacgtggccacgggaacaagaccagtggctgttctggccgctccgctcacatgggagacggccagagcatgagacgctgctacaagctctttcttcctggatgacctctttatccagggaagagtagatgacgcacccatctctgaagatgagcccactgtactaggggaggagtccccgcaacacgagccacgccaacgtcagaacagacgccgtaacattcgccgtcaccataatgccggggaatgggatcctactcagcccgtatcctggggcgaggcatctaaagcaggagagacacctgacaacagggtactccacgagcgtcgcaattcctaacgccgtgatcgtcgccatgcccaggagtgcgagcgggtatgagcggtatatgatgccaggctccgatgcgagaacccactccttcctcagattctcatgcccgactttgctcgagccctgaacacgctgagggaagtcggcagagactaggattagatcgccagcggcctgccgtgtaccccggacgcggaaggctaccggcagatcctcacctaggtggcaaaccatcttcttcccctcgcccatccggtaccggacatgcactacgtcatcaacagtcagcgagacgtgcg

SEQ ID NO: 104252 - DNA, 489 bp, Zea Mays
gaatttgtagacaatatggaagagcatcgggatctttctattgaggaatggaatttcagagatattctgcagcaaaaagtggtcgatctgctgaacattcagaaaatttattggaagcagcgggcggctattaagtgggtaactgatggtgacattggatctcgtttcttgcatgctcatgccaccattaaacacaagaagaactcaattgccactttgactgacgagaatgggattattcattatgagcacgaacataaatctggcctcctctgggatgctttcaaatgcaggttgggatcgtccgatttctcaggaattgattttgaccttccagagcttttaatccgtaatgaggagcttcacgagttagacaccccgttcactaagttggagattgacaacattataaaatcattaccttcggataaatctcctggtcctgatggtttcaataccaacttcattaagaaatgttggcatatcatt

SEQ ID NO: 104253 - DNA, 343 bp, Zea Mays
cgaaagacccttgcatggggtcacaaactagttaccccgcaaggctgtctcgtcgtgggccggacaaagactacaagtgaaaatgggccgacccaagaaggcaagggggtcgtacctagatcatccgagggttacactcaatctcaaggaaccgtctgtttttccctcgcccggcgccctcaaacatcgggatagaccaggatgaagtcagtgggttttccttaagataagctaagtcggttcactattagttaggagatatactagaagaacgtgatcatcatgtacgtagggagtatcccacagtcatgtatataaggcctagggggaaccccatcatttt

SEQ ID NO: 104254 - DNA, 294 bp, Zea Mays
aagagagattttgttgtgcttccactataaggtgcacttgctatcctgagaatggttaaatataagccactcaaatgatctttttctcttagtaccactgtctgaatagtcctgccaccttccacccaattcccatgatggtttttagaggtttgctttgttgttgttacaggtaatgatacatctaatctgctgtttgaattggttaaggcttttattatgttatgtactcatatgctcttgtctgtttattcttttgtgctactttgtgtattttattttaatcagatattg

SEQ ID NO: 104255 - DNA, 384 bp, Zea Mays
acagggctccatgtgaactataacaaatctaatatttatcccatcaatgttttagagcagaaaatggctatgctagcaaatacattccactgcaaggtcggggctttgcccttcacgtatcttggtcttcctttggggcttaaaaacccaatttggaagctttccttcctctcattcagaagattgaaagaagactagcttcaacctctattttcctatctcaggctggcagactacagatggtcaatgcggtattttcttcacttccaacctattacatgtgcaccctgaagctcccaaaaattgtgatcaaacagattgacaaacttcgacgacattgtctctagagaggggcagacataaatgcaaaaaaatctcctcaag

SEQ ID NO: 104256 - DNA, 353 bp, Zea Mays
tgctgctgccaaagctgaaccaactactatcgaagctgacagtgataacgaagatggtgatggcattttaagtccggcaaacccaaccatattgagtttggaaaatccacggttaaagcggaagatctggttttaatggagaaattaggatattttggaaagcatgataacaaactagttcggtttgctggggaagaagtgattccggaaccaaggaacgacgaagtcgtagtttttaagagcttctttagagcaggtctttgattccctctatacgagatgattggtgaagttttaaagaagtttgagatctaccttcatcaactcatcccaaatgtcatagttagacttag

SEQ ID NO: 104257 - DNA, 301 bp, Zea Mays
gtgaaatgtaatgtagtagtgtagggtatcgaacagtggggagaaaaccaactcataatgagttggttttttaagtttggtaatacttcccctccctttataatgaaggagatttggccccattctgtgtgtgttcctttgctttcccgtcgatcggtcgatcgtatttatgctcactgcagctgttgttcttggatgtaatccttgagtaacaacttagaatcgtcgagtcgcgtttcagatttgccttttttgcaacgtcgacgctttaggggtaacagtcgagtcctttggagccacg

SEQ ID NO: 104258 - DNA, 506 bp, Zea Mays
tgcttgttagctaggtcgacatactcgtctcccatttactactatttcttctcgggccgagcagacttttgatctggtgcattgtgatatctagaccttccctgtacttagtctttctagatataaatactacctagtgattttagatgagtttttccattttctttggactttttctctctggttgaagtcagacacatttaccaccctcactcacttcttcacctaggaatccacccagttttgacgtccggttcatgtcttgcagtgtgataatagccgcgagttcgacaaccacgcctcttgctccttttcctcacccatggcattgagttacgtctctcgtgcccctacaccccctccctaaaacggtcggtctgaatgcatcattcgcaccaccaccaacataaaccaccgccttctcttccaaacatctctcccttccctgacagctactgggcatagaacttgcatactgccacacatctccctcacccacttcttcg

SEQ ID NO: 104259 - DNA, 522 bp, Zea Mays
aaaaaatggaataagacaggcccaaccaattgcttgacagcacaggcacatcaggttcaagaaagcagcaacatgataccagtcatcgaataaaaggagatcaatacaaagaaaggtacaaaaggtagccgaaggaacacggtaaaaaatctcgcctggactaaactccaaacaacgtttagaaccaaaagcaaagacggtagatgagcaattctccaatatcccaaccactcgatcttttggggaaaatattaaatatcccaaccactcatgctcgctaccctcttcgaccattccttgtttgctctctgagaaatcgacccttttctgcttctgagaaagcatcagacaaattttcaactcctctgaaaactaatcacttctctaataaaaagctcaattgatctacatgatacaccatgcatttggaataaagtcgtcccgtccgtggattgaaagggtgcgaaataaaccaaaccatatcaaaaacaaattcgaacaacagctacatatccgaatcta

SEQ ID NO: 104260 - DNA, 675 bp, Zea Mays
ttctttacttggcaacatattggcattaatttgatatgtttctctggttatgctaacatattcatatatcgggttgaggtgcacgatgtgggcaaggagatggagctagatcttattaaacaatatagtcaggttgactgttgatctacactgtttattatcactttgcatatcttctgacattaaatcttcaggttgaacggatatttgctgatagggtcatcaaagctgatggagatgatctggttcctgaatatttagtcaaatggcaaggacttccttatgcagaatctacctggtaattttcatggcatggtatccagttttatggttatgattattgttttgcacatggatgagctttgatcatatacacaatatctctacctctgttgattcagagtatgattatatgtgatgatctttcatacattttatattctatctggtggatgttaattttttattgtaggaaataggaatatgcctttactgtttaattagtatgcattagtctgactgaccttgctgttggtgcgttgtttcagggaaaaagatacatatatcgattttgctcaagatgcaattgatgaatataaggtaagtactcagtactctataatagcttctgtaaatttacctaagtgtgtaatgttgtatcatgaccggcttgtg

SEQ ID NO: 104261 - DNA, 416 bp, Zea Mays
ctaataatatctaataggcgtggttggggatacataacaccatattactaaaccttttatctagtgaatgcaaccatttataaagtagaggccgaatagagctttgttgccatcacccactccaaaaagtcatacaagggagatgacagggtgattttaaaacagtggaatcataaattcataataaatgtacatagtatatggaacatgaaaagaacccttcatatctttgtaaccttcgacattagacaataccaccaatacaaatacttgatagagaaaaatcacagataattaactatatggaatttaagaataacaaacttcaatgaatggcaagaatttatacaaaataggagaaccaaagctaaatcatttcccggacagatcaaaactgaaaacaaagattcatgaca

SEQ ID NO: 104262 - DNA, 274 bp, Zea Mays
ggcataatgtgcttgtcggcatgcagaagcgggcgcgcacggccatcgcggcgcgcgagggtaggcaccccgggaagccgtttccgtcgctcgtcatcgcgcgcgacggcgccgtcagcgcgcagggcagctatgccgaggcccaggtgagctccttcagctcctgatcctcatgcttgctccgttgatttagttggctacatgaatgttcgtggcactgttggtctcgaacggcttgctacaatgttcctggcactattctcgcctcaacaag

SEQ ID NO: 104263 - DNA, 826 bp, Zea Mays
gaaggctcaaaaagatggaggacaaaagctgccagatagcacttggaaacctccgatcggaggttataactttgaggaacgaagctcttgcaaaggataagattatctttggtcgaaaggctgaaatccagtgaatttaaactgtctgctcaagcagaagtgcaagaattagaaaagaaacttgccgaagaaactgaaaattttaatgtagagctaacaaaatgtgaaatatatgatattgaacgcgcaaggttacagaaaaatgttgaagagcttcgtcaagctaaggaagagtgcaataatgttgctacagaatgtgccaagaatttgaagaatagcttttctaaagttggcgcattttccacagagcagaatttcatctgcggtgatcctgatggggttatccgctagattaacggtgaaaccgaagcttttgaagaatttctcggcaacagaggagatttcggtgccttcgctggtgtctgagggaccgtgtcgatcctggaaaaggtcggctgcgaacatgctaaggctgtggttcagccaggattctcgtttttagcttatgacattaaaaactctccgatcgatgctactgcattaagcagaaagttctattctgaagtatggctgaagggtggccgagagatagctgacaaagctattagaagaaatgagaaagagtctcacaatgccttagaagaggttaagagagctgaagaaactgttgaacacgccaggcttataggtatatccattacagcttagcttcgtaaattattgtagcttcggtactaacagatacttgtattttgatgcagctgag

SEQ ID NO: 104264 - DNA, 366 bp, Zea Mays
ccctgacctggcgccctggcctaggagaaggaagaggaggaggaggtgggtgccggaggcatctaatcttctagggccaggatctcagggcggcagcagcatccaaggcagggaggagcaaatcgatttctgaaagaaaaataaaccagaacgagtgggtaaatctcacgattttttcgttgccgcaaagttcctggatctgaacaagcctggcacaacaaaaatataggaaaataacaaagcgcggttgggatgggacgatgaggacgtttctgacacgaacgattgaactgccgcacagctcacctcacctgacggatctgtccgtgcgtaaagtgccggtaaatctcctcacttccatttttt

SEQ ID NO: 104265 - DNA, 287 bp, Zea Mays
gccaagtacatatccgagtgtgacacttgccagaggatcaaagctaatcatttgaagacagcaggccccttgcaaccccttcccataccatcttcaaaatgggaggacatttgcatggactttatcgtgggattgcccaatacctcccggcaccatgattccatttgggtcgttgtggacagattgaccaagtcagctcatttctagccagtacacaccacccacaggacggagaagtatgcggaaatctacattgaccagatagttcatttgcatggaataccaag

SEQ ID NO: 104266 - DNA, 360 bp, Zea Mays
gtggaaagtacaatggcatcattggatgatcatgtgccactagttgtgtcacctttcggggttgttttaatcgattgtgttgcccttcaggtgaccggagttgctttattggccgactgcaagggacaaccttttcaaaagttgggacgtctttaaccagccaaccaaaagttttagatgaattttacttcgacgtatctacttctagttgttgacgcttgaaagcgcgtggacactgtggccttcggtcattgccagactactcgtttggattctggaccatccgtccgcaagcatcggaccatgcacgatgtgtgggatagggagctttaatcagttgtccgatcgtgcttgtccccg

SEQ ID NO: 104267 - DNA, 435 bp, Zea Mays
ttctgacaggagccatgggttgcataaacaaaatggtatgatgacaaaggaaattaatttactgtcagtaactcttgctctctccgccgagacgaactgtggtccattacgtacggactcgatgcttcgaccggtattgaactatagatgtaaatgagggatcaaaaaatctcggtgcataatgcatgtagtgtggctcagtgtcgcggtctcgatcgtgtagacaatgaccttattttcggcctcacctcactttgcaactttcgttttcagataagaacatacatactatagtctctccaacgaatacggcgtgaatctatgatccttaattaagggtccaccaaccatccttttaagtttaaccaccttttatggtttctttgttaggagtggattgaagtagattagagtgaattaaattctttgctaatc

SEQ ID NO: 104268 - DNA, 363 bp, Zea Mays
gtgttcgtcgccgcggcggtcctgggtgctgccgctggccgatgtcgggcggtggtgaagcaaccctgtgcgtagatctgttggcgaacagccacgattagaagttagggggttgccttggcgaccgtcagatcttcaacgagtggataggattagaacgtggtaacgtttcgagtgaatcgatctagcgtcgttgatctgttaacgaacgaatgtggttagattcagggctttcaaatcatggtcgtctactaaaaatcgaacggctagagctgcataccggttcgaggatgcagggatctaatccgagccattgaccgatgatccaagggctagaatcccgcaataccccttcgatcggtt

SEQ ID NO: 104269 - DNA, 418 bp, Zea Mays
ctcacctgcgctcgccgggtcggcgacatggtgctcccccttacccatctagcccgagaatcacaaatagaaggagaatatggatacaatgaggacacataccgctgacgaaggatatagttggaatttgaggagggtgattacgtatacctaaaagtttcaccaatcagggtatgagaagatttaaagtgaaaggacaattgtcgcctcgctttataggaaccttgaagatcctaaagcgagttgggcaagtggcataccagttggagttacccaaccgtctgtctgatgtacatgatgtgttccacatttcccagttgaagaagtgtctcagggtcccaaaagaacaactactcatggatgaactcagtgtgtaaggtgatctgacctacatggagtacccctaccaagatcatcg

SEQ ID NO: 104270 - DNA, 361 bp, Zea Mays
gtgaacaggggtgttgaatctaagccatgcctcaattgaaccaatccaaccctggattctcccacccacgacgacggcgaacactgtaaacaaatcgaggtgttccagacgattgagcacggtctagctcaatgggttgagccgacaagcatcaccagtgaacaggggtgttgaaacatgaacaaggagaacaagagcgggcctagaaatggcggtccacggcgccgcgacacacggaggcacggagaacctatttggggaaatcccaaattaaggcacggtggtgcacgataggagctagctgggggtgggttcgacgcgtaacaaagaggcggagcagagggtatcttcaatttataga

SEQ ID NO: 104271 - DNA, 387 bp, Zea Mays
aggtttgctgataaggattttaaaataacattacaatctattatacatcatccattaactcctcatgagtttgaatgtacctgggaaatgatgctagaagaattcaatctgcatgaagatatgactctacgcaaattatatgaaataaggaaagaatggataccagcattttttaaaaatgacttctgtggggtaatggtgtctacacaacgaagtgagagcatgaacagattagtgaagcaatcacatgtagatgcgaacacccctctgcatgagtttgctaaacaaatgatgaaaatgttgcatagcaagaaaatgaaagaatcaaaggaggcattgatgagcaaggtatatcgtgtttgttatcaataatgtatggcatacatg

SEQ ID NO: 104272 - DNA, 563 bp, Zea Mays
gcctgatggagccacaatggttggggttatctctgcagtttcacagataggcagcacggagttggctgggtgggttggagcttacgtcgacaggaagaagatcgaaaggaatgagaaggttcttacagcactagtagatatgcacgcaaagtgtggcaacattgagcaggcactgagtgctttcagggagatcccacgacctgatgcctatccatacacagcactgattagcggcctggcaacacatggacacgaaaatctggcactttcagtgttcgaaaggatgcgggctgaagacatcaagcctcaccctatcactttcgttggtgtgcttacagcatgcagccacgcagggaatgttgaaaagggactggagtattgggaggcaatggtgcaggattatggtattgagcgccatgcggaccactatgcctgtgtcattgacatgctcgggcgtgcagggaggattgaggaggctttcgagatggttcaaacgatgccgatggggccacatccgggggctcttggtgcactcctgagtgcctgcaagacatatgataacg

SEQ ID NO: 104273 - DNA, 417 bp, Zea Mays
gttctatcgtggcaataaatgagagtgcaagtatggccgaacaaggaagtggggtggatcatacccagacgaagccaagggtcatttccaatggtaattgttaagaatctttattcaggttacatattttccccaccctgtaatcctgaatgcccttgtcttttatgtggcttgtattttcacgttccagttgatggcgatgacggtgctgtatttgaatttgatgctgatgagaacgagggatacctattcgctggacaatgtactaatttcaatcttttaatgataccaatgcttatgcttatataaatacacatgtcttactcattgtttccataaaaatatcagatgaggataccgatgaggatatagagatagatggtattaaagatgaatcaactgccactaatgttcctg

SEQ ID NO: 104274 - DNA, 418 bp, Zea Mays
ctgcgtcctgtcctcgagtcctggtcggcatctgtggcaaagaacatttggaataaacataatatgccagagaaaccttccattttacattactataaaaagtaatgatacagactcgatattacataacaggatacattacccattatacaaaagttcaacctacaacagtacaacctacaatacactactctacttttattacaccattagtcctgctgcccattactcttggcggcctcattgtcaggtgtgggagtccagacgtcaaccaacctcaaggaaggagggggctcaaaaaggtctaactccccacccagcgtgcgtcccgcaacgtgagagggtccggcttccgcctcagcagggtgtgcaggcacactagggtgtaattgtgagtatagtacatggacttcctcat

SEQ ID NO: 104275 - DNA, 877 bp, Zea Mays
gaggtaataaaagttatccagatgagatttgagaaggcaaaggaagaggtaaattcagatttggcagtttttgcaggagacttggttagcgtaatggaaaagtatgcagactctcatcctgagtggaaagaaaccttggaggacatgctaatacttgcacgtacctgctgtgtgatgacacctggggaattctggcttcagtgtgaagttatagtgcaagatttggatgaccatcgtcaggagctctcaatgggtgttctgaagaaactatatactcggatgctttttatccttacaagatgcacaaggttgcttcagttccacaaagaaagtgggtttgctgaggatgaagttgttatccatcagcgtgataagattatacagtctgcagataggcaggttttaactcaaccaggtgcagatggtacaatatccagagccagtaaaagtgaggcaagaaaatcatacagtcaggagcagcataatttgaaatggaagcgcagccaggagataaagcctgttaagcttcttccaccacttgacacagatgttaagaaagatgctgtttctccaagcaaagaacggatatcttcttggaaaccttttccatcgcctaatacaaaggtcccaaaggaatctattcctactaaatcggaatcacctaataagaaaactgatgcacactctacagttagtagccatgttgaattaagcagtcaagttgaatctttaccacaacaacagcttcctgacaagcatcaacataaaacttcatggggacactggtctgaccagccaaatatttctgaagagggttcaataatgtgccgcatatgtgaagaatatgttccgacacactatgtagaagaccattcaa

SEQ ID NO: 104276 - DNA, 585 bp, Zea Mays
tggcttgatctcgagtaatccaacgagcgaactccggattcggtgtagtcgccggtcttggtgccaactgtgggcgagaggcttcttctcatcgccggtgaggaatccttcaagttgagcagcgggaatcgcaggcataatctgagcatgccatagcacataatttgtgtgggtaagcttctcggtaatgggaatcgaggaggaaggaatgatgaaggagacttcttgcgccattattctcgatgtgctcgagggtagtatgtgaatgtaattggattgaagcgttcggcccctgacgcctctctcgcctcccattttgagggaggataacattgtctcaatccttaatcttaaaccaaacatcttatttgagagatcgttccgtcctgtcattacaaccaaacacatcagagaaaaatttaatcttattctaaactaaccaccaaaagatagagatcaaaagagattataggttagttataagagcttaacatgtcctacgtactggtctcatcgcaggctcttataactaacctaaacctgaaccccaggattgaggagggattccaatcttcctcaattcac

SEQ ID NO: 104277 - DNA, 3882 bp, Zea Mays
ggagcaacgacctttttccagttcatgaattgaccagatgccgatggaatagaggaggacatcgctgcatgagacagtagggttttgtggtgctgtctcctggcaggagagcagcgccacgctggtgaagtcaagcccgcaactcagcgaggagcaagtaggtgacggcggcagcagtagctgcatgatggtgacaagtagagaaacagaggatgaggccatcgactgctctagtatgtactagtgggtagggtagtggcgattgtgacccggtcgttcctatcgattgaggtggtggtccattttatagcccatgcaaacagccgggcgctgctgcgtctgcgtgggccatccctctctcgtttgatcggggacgtagagcataacaacgcagagcagagcagctagccagcgtccctctcatcactagtagtactatcgtacaaccagcccagcagcagtagactctcatcattatcgtacctctaccagcccagcagcagcactgcttgccggcgagtctttaccccctcatgaggcataagacataggcaggtcaaaggtagtgttccttgaaacaatatacacacataggagcaaagacctttttccagatcatgaattggcaagatgtcgatggaatagaggagggcgtcgctgcttgaggcagtagggttttgtggtgccgtctcctggcaggagagcagcgccacgttggtgaagtcaagcccacagcaagcaggtgacggcggcaactacaacatcagcatgatggtgacgagcagtgaaaaggagggtgaggccatcgacagctctagaatgtactagtgggtaggctagtggcgattgtgatccggtcgttcctatcgattgaggtggtggttcattttatagcccatgcaaatagccgggtgctgctgcgtctgcgtgggccatccctctctcgtttgataggggacgcagcgcagggcagagcagagcaacacatagcagagcacctagctagcatccctctcatcactagtagtactatcgtacaaccagcccagcagcagcagactctcatcattatcgtaccactactagccctgcagcagcgctgcctgccggctacgctgctgctgcattcccgcatgcttgagcaagttgtagctgtagggagggggaatcgcatcacaggagagctgaggtggagcgccgagacgagaggatacacatcatctctatttcacgtgtgctgatttaattagtatgcgtgcggttgtaataattattaattaattcagaaattgaggcgtcgacctactggtttgtacctcgcgctttgggcgttggactgcaaaaccaggagtagtagacacaacatccgaggaagcctgcaatggccacacatgctacgactgcgatggcggctatggcaccagatctaagcccgtcgggagctggcggtggcggttggcacacacccttcttctccagctgccagaagcatggatatgtaggagtatgcacgtagtataataataatacgatggaatgaagtacgtagtgattaattaacgaatgtccgagacttaccattgcagtatgtagggcgagggatgatggcattccactgtagcacattacttgagtctttacccccgcatgagacgtaagacgtatgcaggtcaaaggtagtgttccttgaaaccatgtacacacataggagcaaagatgtttttccagttcatgaattgaccagatatcgatggaatagaggaggacgtcgctgcatgaggcagtagtgttttgtggtgcctcccctggcatgagagcagcgccacgctggtgaagtcaagcccgcaactcagcaaggagcaagcaggtgacggcggcaacaacagcagcaacatgatggtgacgagcagcgaaacagagggtgaggccatcagcagctctagtatgtactagtgggtagggtagtggcgattgtgacgtggttgttcctatcgattgaggtggtggtccattttatagcccatgcaaacagtcgggcgctgctgcgtctgagtgggccatccccctctcgtttgatcggggacacagagtagagcaaagcaacgtagagcagagcagctagctagcgtctctctcatcactagtagtactatcgtacaaccagcccagcagcagcagactctcatcattattgtaccactaccagcccagcagcagcactgcctaccggctacgctgctgctgcattcccgcatgcttgagcaagttgtagctgtagggagggggaatcacatcacaggagagctaaggtggagcgccgagacgagaggatacgcaacatctccatttcatctgcgctgatttaattagtatgtgcgcggttgtaataataattaattaattcagaaattgaggggtagacctgctggatgctacctcacgctttgggcgctggactacaaaaccaggagtagtagacacaccatccgaggaagcctgcaatggccacacatgctacgactgcgatggcggctatggcaccagatctgagcccgccgggagttggcggtggaggttgggacacacccttcttatccagctatcgggagcatggatctcttggagtatgcatgtagtataataataataatatgatggaatggagtaagtagtgattaattaaggaatgtccgagacttaccattgcagtctgtagggcgagggatgatggcattccactgcagcacattacttgagtctttacccccgcatgagacgtaagaagtaggcaggtcaaaggtagtgttccttgaaaccatgtacacacataggcagacaaagatcgttttccagttcatgaattggacagatgtcgatggaatagaggagggcgtcgtagcatgaggcagtagggttttgtggtgccgtctcatggcaggagagcagcgccaccctggtgaagtcaagctcgcaactcagcgaggagcaagcaggtgatggcggcaacagcagcagtaacatgatggtgacgagcagcgaaacagatggtgaggccatcggcagctctagtatgtactagtgggtagtgtagtggcgattgtgacgcggccattcctatcaattgtaataataattaattaattcaaaaattgaggggtggacctgctggatgctacctcgcgctttgggcactggactgcaaaaccaggagtagtagacaaaccatccgaggaagcctgcaatggccacacatgctacgactgcgatggcgactatggcacccgatccgagcccgctaggagctggcgttggtggttgggacacacccttcttatccagctgtcgggagaatggatctcttggagtatgcatgtagtataataataatacgatggaatggagtaagtagtgattaattaacgaatgttcgagacttaccattgcagtctgtagggcgagggatgatggcattccactgcaacacattacttgagtctttacccccgcatgaggcgtaagacataggtaggtcaaaggtagtgttccttgaaaccacatacacacataggagtaaagatctttttccagttcatgaattgacaagatgtcgatggaatagagtagggcgtcgtagcatgaggcagtatagttttgtggtgccgtctcctagcaggagagcagcgccacactggtgaagtcaagcctacaactcagcgaggagcaagcgggtgaaggcggcaacagcagcagcaacatcatgatggtgacgagcagcgaaacggaggaggaggccatcgactgctctagtatgtactagtgggtagggtagtggccattgtgacccggccgtccctatcgattgaggtggtggtccattttata

SEQ ID NO: 104278 - DNA, 1512 bp, Zea Mays
attgaaaatgagaggcaaaatgtccttcggtcttaacccttgcacccacgcatcattccaaaaggacacctttgtcccgtctcccaccgaaatcgaagtcgctgctgcgaagagctgtcgttcttttgtcgtgcaagggagttcaaaggccgtccagaacctagttgatgaagcccaatcttgccacaaccaacgcaaacgcaaggcccttgcaaatttggttaaatgaaggatacccaagcctccacactcttttagccttgcggaacggatccaatttaccttgcatttacctcccgtaatttgtgcacacccagcccaaaggaattttttccttctcgaatcaattaaattcaatatttccttaggagcccgtaaagcagagagaaggtagattgcttgggaggtaatgactgacttaactaaagtcagtctgccagccatagagaggtttttcccattccagccattgagcttgttcgaaattttgtcaattaagaactgaaattcgctcttcttcagtccggatgatgagagcgggaggcccaggtattttaaggggaaggtagcccttctggctggcatattccttagggccgcgttgaggtcaataccttgacaacagataggcacaactgtggacttatggaagtttgtcaacagccctgacgcctcaccaaatagcccgagcagctttagtattgtctcgacctcctctttttttggtgcaataaacaaggccgcatcatcaacgtacaatgagagacaaggcaaggcgagcggcccctaattttgctgagaagtcccgtctctattgccaagtctaaaattttctgcaatgggtcaatggcaagcacaaataacaatggtgagagtgggtctccatgtctaagtcctcgaccatgagacaaggggggattcgggatccgttaacaaagacccttgaggtggatgttgagaggatggctgcaatccaatctctccaccaagaagggaagcctagatgttgaagcagcgagagaaggtattcccatcggaccgaatcaaaggctttcgcaatgtccaatttgaggaagagcgagggtatgttcatgcgttggtagcgcctcactgcactacgcacggccataaaattatcctgaatagtccgtttcttgatgaacgcgctttggcatggtgagacgatttcatgcatatgtggcgctaatcggagagcaagagtcttgatgatgattttgacaaaggagtgaatgaggctaatcggaatgctcctcaccgagtcaaaacttaatgatggtgtatctgaagagagtgatgggtgtttttttgtaggagatgtggccattttcatgtttgtaccattctattagaaacactgtacagtggcaccgtgacatctattgagtgtattgcagctatcaagcaatctgtgtcgccttccatagcacctcgctctgcctccacacattcggtatgtaatttattgtttcagaccattactcaaaacatcag

SEQ ID NO: 104279 - DNA, 779 bp, Zea Mays
ctcgaccattgagccctgactggccgaccccaaatcgttgtggctcctatggcctcatcgagtccctccaccgcctccaccgcctcaaggctccagtgaccggtgattcggacaacggtgtgttgttcccctccctccgcaatggcatagcgatgattcccctcttggcctcccccatcccacagcggtacaattgctatccagacttcgacgtggtattctcctccctagctatcttccttcgctaccagtgtggttcctagcttcctacgctgcactttcgggtctctctcttgtggtctctcccatctcccgaaaacctaaccctaatccagatgtggtctctcttcctcattcctctcgacccaactgcccatggttctctcatctgtgtgtcgtggacgactctggtgctctggtgcgcaacacatgtaaacaatggtggcctaacactttatccctaatcacttttcttgtgcttaatccatttgttctttgtctttgtttcttagatccctgtcgcgcatcattgaggagctagaatcgatgacggtcggcgaggtggtcggaatgtcgccatggaacttgacctggtagccgaccatgaggagtacttgttggaaacccaaaatgaggaagaagatgttgttcaagccctgttcggtagtagcactactactctccgtttggatgctgcagcggcaccttccagcgatgttgggggaacgggaacgggctccaccagtgcaaccggtaccgagtcaagcacgactaaccag

SEQ ID NO: 104280 - DNA, 349 bp, Zea Mays
tgttccctctttttctctgttctctattattagcggcaatgcttgtaaattggggataagaggattagctattgcggcgtgatggttccccacttccctggtgtgtgtggcactgctttcaatgtgtacctatgatgtgggcatgtggttgtaattgagagaatgagagccccaactgtctgtggttgatgatgttaagaacaggaaggccgacaggttaggtggcacgaaatttaggggttttttaagagcaggacaaaaccgagaaaaatcatgactaaaggtaaaaatatgagagcatcagcttaaaaaaccttttttatttctagtgaataatttttatttcctc

SEQ ID NO: 104281 - DNA, 832 bp, Zea Mays
gacccggggtaaaagatcttggagttgtgatgagctcgaacccggtcactggattattcaccgtacccacttgttgtacgactaaccgaggtgtcctcaccggagtttgccgccttcgtagtcgtgccatgtgcttaggaacgttaccacatcgcaagtgaaccataagagggagtctatccattctcagaagctttgcctcagtgaaagccatgttagcgctcgccggtgattttcccccctctccgtccgcccacgtgtcttctccaaattggacgccatcgttgttgatctctataaattgagcgctcagtgtgctccgttaggttgttatgcacccagtgcactaggtctcgcctctgatcatccaccgtaaagtcctaattttgcttttcccacaattccgttttccgcgccgccgtgaacttctcaccgtggccagccatctacaggtcagttcaagcttctctgcttgatgttctagcatcccttaagtctcctattgctcgtagacccgtttgactaaactagaccacccggaaacaccaagaacacctcggtttgtctccggtattcactgctatcgtgaacagacgaactctgggtcgaattcgtgcaattgatggagggattagggtcgctaggggtaggatttggtgttagccaagttagggcaccgaccattgcgtattccggccagtacaagttctccagaaacagaaatactagagcctaagtgggaatgtcagagagacagtgaatagtgactagggattctttaccagttattcaaacaaccgaggtcctttgtgcaaagacgccagagcggggg

SEQ ID NO: 104282 - DNA, 441 bp, Zea Mays
ccgacatgtaggtgtttctagagagtttctgtcattacaaaacacacatgatttggttggaggcggtatgtgtgtattacacccgagtgcagtttcctgttagtgttgtttgtgtaggtattcatgaaggtgggtgacatagtggactccatggcgctgagaaaggtgaaatacaaatgagaattgtgagacataggatttttttgagcgaatggaaactaaactcatgactaatgaattagtccacgtcttgaagatatctcttatataaacatggatagagttctactcggttacgatatctattgtgatttatacttggattgtaacctaattagaactatagcacataatcaacttgtaactctagcccttgtatataataagagagttggggactctatgtaaaaaagtgatcatcggagagatctggaaaacaga

SEQ ID NO: 104283 - DNA, 359 bp, Zea Mays
ctagcggagctgatggcacgctcaatttataggattcgagagtggtggcccgtgaattggagatggcgcggtggcggccggagagggaagaggttactggcgcaagctattcgtggatgttaccgtggcaagttcttgggcgaccaatgggctatgtattgtgattaattgtgacgtggtgagatggccgacggcatgtcatgaccgcgaggaacggcggtacgatggtgagggtcgcgtggtcacgtcgccggtaaccggataagcgacagagcgttcactgtgcctcaagttcatccatggtgagatctttttacccggggattgttatctgcgcttaacagagcgtgaatcgcggc

SEQ ID NO: 104284 - DNA, 346 bp, Zea Mays
aggaaataaaatttttgggtcacaccatttctcaggatgggatatcagttgatcctgaaaaagtgcaagaagtgatggattggaagccccctaccactgtacgacagatccggagttttctgggattggtagggtattatcggtgatttattccggatttctccaggattgccaagccaatgattgaattgttgaagacaggagtaaagtaagaatggactaagaaatgtggggatgcctttcatgcattgaggcagcatctgacaacagcacccgtgttagcccagcctgacaataccaaaccctttgaggtttattgcgatgcttcaggtactggattgggatg

SEQ ID NO: 104285 - DNA, 488 bp, Zea Mays
ctttagcacagacgacagataagaggaaggtggaagcaatgtaaagtacaaaagaggcttcaactcgggccagcaaccccagtccaggtggaatggaagcagcatagcatgcagtggggacaaagcaaaggcacacagataatgtggtggcagagttcacaaggaagcagcagagaaccaggcgaccgtccatggccaagcatgtgacttctccaatacatttagtatctgtctgcacacggatcatggcatgcatgtgacagcacaagcgccgaatctacctagtttgacgacgacgagcatcccaatgtttggagggccggttacgcaaggctttggaaatttctgaacccaccaatgtaacgaacaaatttcttgtccatgcatagccaggccactgatcgagcaagcaaattaaaccacgcgttttgttgtgcgcatgcattgcatgctatgcttgagcagaaacgctgagcaaaatttcaaac

SEQ ID NO: 104286 - DNA, 362 bp, Zea Mays
gttgggctcagaatgctattttcctcttcactttcgttgtcactcctgacctcggcctcagtttgttcagcttcgacattgggggtcccttcggcagtagctccctcttgcacaaccagacctgagcgcctcatcgcttctaatatgggcgctgtctcagtcacttcagtttcgtctccctcaagggacaccctggcagtggatcttactctgcccatttcagtattcagtttcttttagataaagctgatcttaagtgacaaagcgcttgtttgaaagcacaatgcagagagcttcagtttcggttaaaatttttaacagcacaacaatgcaatggcaatgaatgttgtggtaacttctca

SEQ ID NO: 104287 - DNA, 475 bp, Zea Mays
gtcaccacagacaagcacttcagtcgtccccaacgtagacgaaccaacttcgaaggacctcatcgacggagaccgtgtcttcgccctgcaggccctcaacaaataccaagctcaaacaaaagcatggcgcgaccacacagtcatcccaagagaattcaacgaaggggacctcgtactcgtccggacaactcggacagagtcacggggcagctgaagccaaagtgggagggtcccttcatcgtcaagacgaaggcgtcccccagcgcgtacaggctaacaacatcatccggcgaagacttagagcattcttagaatattgacaatctccgtaaattttttgtttgaaccctcagggctaacacgcccttgtaattcaccaaacagttttattccggcccgcactcttttcctcccggggggtgaggtttttaatgaggcggagccatgtaatatacacgcaaaaatcccccgcaaa

SEQ ID NO: 104288 - DNA, 471 bp, Zea Mays
gcagatcatagtattgcaatgaaatgtgttacaacttgtgtgcctgtgtgcgagaggaagaggggccttcccttttatatctcaagggacaaaccttatattgttctctcttagaaagagagagaaagagagggagagagtagagggagaaagagtcctttggtttttgtggcaggccctcctctcctggtcgtgcaacgtagtgcttccaatatggcgccacccgttactcctgttcctgtggcaggttcatggatgacctccctatgatgatgcgtgacgggtaccatggttcagccctagggcttgatgaacatggcacgactttctcccgtcatcatgggccctatgttgtccttccgtgcgtatggatttgcctatttggtatggcgtctcatcctattgcttccgtcacatcggctactatggaggctctggtactgaggttgcctcttaccagagctgcctcgt

SEQ ID NO: 104289 - DNA, 597 bp, Zea Mays
gtttctatgatggtgttgacaatgcactcatcaacagaaagattgcgaacacaaggttggcatgtgcccttgtgtttaggttgtgatgagtggttgtcagcgggtagcgccttggggtgagtcagttggactaaccagggtgtgatttgtgtatgtgcaaacatgtctctcgacttgtggtgtgtaggttgtagtcaggagacgatggtcaacaaagaaggtgaatgtcatgtggtttgtgccgatggaccgaaagcagcaaaggacgagcatagagccttgatcgatggcctggagaagctaggtgacaagccatggtggctaacacctagggacactgatgggtgcaatacgtgaaggagcatatcatgttgccaacgcggttgcggaccgatgggacacatgtccagtacgtgggggacacatatggagtacgctgcccgcggaggtttcagtggttcagcctcaaaaccacctagcgctacagtatgctagttttgccgagtttgggcctcaaaatccagtggtatggttctgacaggaatcaggggtggcacatgacatcatcacgaagggtgcattgagacaaagcaactt

SEQ ID NO: 104290 - DNA, 475 bp, Zea Mays
cactcattcatcggtctgctatctaaaaacaccaaacccccttgctccttcaacctagtcaccatttcccgtttagccataagataacagtttttcttttctgctccttgcgagaagaagtttgctctgatagagttcattttctggtgtgcctctttcgaaagaagatagaagctcatgttatacatcgggaggctactcagactggagttagtcaatatcagcctctccccagaggacagatacttaccctttcatgggtcaagcctcttattcatttttgctagaatagggtccgaaatagcagggttcagatgatggtgagaaatggccacacacctaggttgcggcgtttgtgtgggagctgttggagagggacttgctgatcacgttcggtgagggcaattaaggtatcgtagacatgttctacacggcagccatgtgcgggagcgtggacgtgttcactctactgctc

SEQ ID NO: 104291 - DNA, 626 bp, Zea Mays
aagttctaagaatcttcagcccttcggaacaagcttcggctgaacgaccttcggtgccaccatcctgtagagagaagaaggtataaattaatcaggaaatataataaaggaaaaccaaggtaaagaagataggtaaaagtttcataccgagttaagtagtcttcgtgcttcgtccctggccagttcacgcccgccttttgcctagatttgggtgataaatttgttccctatgcttcaggcttcggctgggatgtcaactagatctgatgtcaaaagattgaaatttggcttattaacagttttggcgtgagtgcacccagccttcataaaagctgcaattgtgccacgtgaagccactagggcactgaaatccccgtgcccggtgacaacttcatcaagggcttcaacttcattttcaatatgatcaaaggccccagggatgtcttcggccgaagggttaatctcttcagaagcagccccaaccgagttgaatatgcccttcaatcaattagcgcaccgagtggtaaagtcagcacacttgttccgaaggttctcaaaagcttcatgtagcttcgtatttctttctgtttcggctttgacctttgcttcgagctccttggtctcgt

SEQ ID NO: 104292 - DNA, 380 bp, Zea Mays
gcttgcaatagtagaaggtgtattgttgcccaatacatggattatagagcactttcataagttttatccttagagggcttcataggtaaatacgtctgggtcctagtctccctagctctgttgctcgagggccaccatcatgtacattactcatgattaatataatgttacttttatgatatgcttccatgagcaccttatgcatacactagaaatccccctctttgctcttgtccaagaacatacacaacatatcacaatggtagcctaaaatgtatgtgtttgataggctaacgctcacacgagacaacatagtccaagacccatgcgtaatgccctaagaatggataataccatggtatggcccagctctgctatga

SEQ ID NO: 104293 - DNA, 275 bp, Zea Mays
ctaggatgaaccacacgaggacatgaaggatgacggcgactgcacaacactgctcgatgtgtacatctacatcaagacagcttccgctgccatacacgtctagtggtaatttcatgacctataacaacatgacttcttggttttatggggtcaaaatttttgttttgtgcttctgtagcctccccataatccttcattcttgcctcggcatatggatataattaagtgaaagtttgcattttcaaacaactgttacaaagagctcatgaacttga

SEQ ID NO: 104294 - DNA, 299 bp, Zea Mays
tctcaaagtaattccacaattatattgagcaactctagcaagatgtactactctccatgtcggtgttttgaacctagctccaacaagtaaatttgtgtgagcaagattttatactggttcgagcagaacgtccctacatccagtcttcggtggctcgctaccaggacctttgtcgatcaatgctcgtagtaggggttacaagtaggcgagagagggaggagaatctttcaagtcatttacgcggagaaggtggagctaagggctacagagctgaagtcctaactaagggcgtgtttcgc

SEQ ID NO: 104295 - DNA, 644 bp, Zea Mays
ctatgcattttacaagtttctagatttgtttttgtattaaaaacgaatttctataatcatttctctgtttttaaacatctctggactgggcatcaattttcagaaaagtcaggggcctcggtgctaagaaaacagagacacatggtacagaaatatggaccgcgggttgtttttaaataaacagaggggccctttagtgaaaccgccgtcgcgaaggggtattcctggtttctggccgccagatcgcgagtagacggccacgattaaatcggtgagtgttatgattccatgggcgcttcgatcgtccgatctcacatgggtggctcagatctatttgtaagtgcgacgaagcggtatgcctcgagagtcatcagatcgcggatcaacggttcccaacaatcgcgaccacagacacggtcagagccgtcaatcgctagatctacgcaccgattctattccgcagtaaaggtgtttgaaactaatcctagccgcatgatcggatcggacggctctggtgcattaactcaatcgttttcccacaaccgaatccctagcgtccaaacccagatggacggccagggagtcgtcttcttcctccctggtgaacgagcgcccgcgcaaaagcagccgcgatggcctctcgc

SEQ ID NO: 104296 - DNA, 280 bp, Zea Mays
gtggattcaggagttggtaaactcgtatgttacagatgaggaggctcaggtgttgttgggccagttgtctgtccatagtcccaatgaaggggggttttcattacaacaaggtgtcattaggaagggagatcagatatgggtggctaacaattctgccttgaggactaaaatcattgatgccttacataatagtattgtgggggtcattctaggggtctggccacctatcacagagtaagaaggttgttttggtggaaaggcatgaagtctgatgtggtgt

SEQ ID NO: 104297 - DNA, 647 bp, Zea Mays
tgcgacacaagcatagaggtcctagataaaacgagtaaagtggttcgacaggaacacactatggttttcacaccaacatagtgaaaaatttctcagaataacctctcggtatactcgcaacttcgtgttgctggcgattacatgtccttttatctcatagtttgcttcatgtcattcagcgacaaagagagcaatgtgtcaacaaccggttgagcaatatatggctgaaatttctagcctttattcatttggtaaggtcatattgcttactaatagaatcccaatatgtcttcgatgcctaaaaaggactttcatgcattatattatatatcttcgggttacttcgggtaaaactttatgcatgaggagagagcagataattaacttatttgtgtttcattgtatttcaatttaatttcccagatttccaagcactattgagcttgatatagtcgttatggccacttggcgatatataaatatataatgccacacaacacaatcaaataaaatatagagctaaacaaaattgtttacgaaggttgcgcataatgtgactttaggggcttgaacaacccaccacaattcacgcgagtacaagctctagcgtatctagcgtcaacacgtgtgcggccatcagggctacg

SEQ ID NO: 104298 - DNA, 676 bp, Zea Mays
aagctaaaaaagacgcggaagatgaaagtagccaaatagcaattggaaaccttcgttcgaaggtcataacattgagaaacgaatctcttaaaaatgataagatcctgctctctttggtggtgagattaaaatctagtgaagccagactttctagcctttctgaagcagagcagaggatgaagaaggttgaagagaggcaattaaaagatgtgaagcgcattgctgacttggagtattagctgtccacccaagtggaattgcacaaaactgaagtgcaagaattagaaaagatacttgacgaagtaactataaatttcaatgtggaacaaacaaagcgtgagatatctgacatggaacagttaagagcgcagaagaatattgaggagattcgtcaagctaaagaggaatgctaaaatattgctaaagaatgtgctaataatttgaaaaatagttttactaaggctgttgcattctcctcagagcagaactttatccgcggtgatcctgacggggttatccggtggattaacggcgaagccgaagcttttgaggagatcctcagtgatagtggggacttctgcgcttttgtcggtgcccgtggggccgtgtcggtccttgaaaaggtcggctacgaacatgccaatgctgtggttcagccaggattctccctttcagc

SEQ ID NO: 104299 - DNA, 490 bp, Zea Mays
ggggggaaggggtggtggccaagtaggggcaaaagggggaaaaggccaccactagggttttctcttcgggagaaaagaagcgacaccacagatgactccgacttagcaaccaacggcccacaacccttttcccacatccacgcaccgaagatcaacctttggcaacttttttttggatattacaagatgagatgaaccacaatgcatatgtttgaatccccttttgaaccgttctttatgttgctctatacctctcttttctagaccaagtgaagagagatgattacattattggttatattgtgggtcctagatagttgtggcctaacaacaccaatcttatcttggttgtagagtagtacacatcgccatgtctttagtcatgtcatagtgccgagggcgtcctgctatagtggtatacattcatgtcgcaaaggaggtatgtactatcatatcaacaagcactgtaatccacatcgtcaagtacaac

SEQ ID NO: 104300 - DNA, 413 bp, Zea Mays
ggaaagaaatatagagagtagggaacatgtacaacttgagtcgcggtggaaaaattcaaagaaaatatgagcaattagcacaaataacgaaattatatttgtaactggaagacacctacaacagatgtccacaagtcacaatgtacatatgagatgttgacacactaaaagaaagatgaacaacacgactgagttgacacgcgtgacatatagctttcatatctttattacaagactggatggcagaatcatgaacaagtttggttagctcctcatgacctggatatccaagacaagtccagagtgaggatgaggtgctgctgctcttgatggcctggtgaagagtaaggattgcatggacgatgctttagcagtgtggcgttgctgattgttactaagactatgctagtact

SEQ ID NO: 104301 - DNA, 275 bp, Zea Mays
tgttggtcaatagaaaccagatctaaaaaccttcccaaccagagttctagacgcagcatgtactccacactgcccggcatggatttcatctaacagttgcttcccaatagccgagcgagtgcacttcatgaggactcccgtcgcacctcttctgtacagtgtatcccctatgagggtgtagtgggctgactatcttgcaatgtgttccattgccgccttgtcatccggttcctcttcatttttatgtacctgatgataggctctctccagtcatt

SEQ ID NO: 104302 - DNA, 425 bp, Zea Mays
gaaattctctaatcctggtagaaaaagaaaaaggaaaaacatgaatagtactcggccgaaactggcccaagtcagcccgagaacaggtaaacgcgcccgcgtgtgcgcgcccgcgcgacggttttgcaccgaagccctcaggggtttgaataactcagaaagaatcctgcgcacaatttgactgggtcactgacgtttgcaaataagccctcgcacttctatttcttcaccgcctgtagtcctcgacggcgaaaggcgatgaactgagctccggcgaacctgtaccggccaagataagcaatggtcggtgccctaacttggctgtcacctaattccacacctaataattgtttcccctcgctcaattgcacaatccgaacccgaaatcgccctgtccacggagacagtgcgaactacggatgaac

SEQ ID NO: 104303 - DNA, 436 bp, Zea Mays
cgatgctgctgctccaccgcacatgccacccgctcaacacaatgctcaaccgcgatgtcgaccttgcacgttgatgcacctcgtccgttgttcatcgcggcccgtgccaagtgttcgttgaaatgactgggtgaagctctatgtcgtggacaacagcgtcattgatctgcacagcctcgaacgcgtcgtcacctttatgtttggacaacttcacgacatcgtcgacccttggtgagacatcactgttctcacactctgtctattcgataaaattccaatggtgtggaccacacactcgactagagtcggtttgtctaggttgattgcagtggtggtttacgctgtttacgaatttgattgatatcatgcgtatatgtgtgtgaatgtgtttgtgtggacaaaatttcatagggagaacttaattcgacgatgttgc

SEQ ID NO: 104304 - DNA, 308 bp, Zea Mays
atttatttccactttcctatttatctgagaagctgtcagcgaagatggtcatttgttcagtgctatgaagattttctatacatcttttcttatgctgaaagactgcagagtcagatttgatatatgtgtgtgatttctacagatgtctgagaataggcgcagaggtgcaaggcatgctcagccagaatagcaagcaccccaagaggaggcagccccgtagcagcatttgccactgccaccaccgatgaccattgagcagatgttcttgatgcagactcaaacagtccaagcaattggtcagaccctag

SEQ ID NO: 104305 - DNA, 344 bp, Zea Mays
gatagcgatgtctcaacggagctgtccttgtagctagctccagcatcaatcgatgggaatatctgacaaagtcgcgtagcagctattatctctttgagacattaatcagagacgatgtatgtatctgaatttcatgcagctgtaggcatgaatacgcgccggaaaaacgttgggattattatgagccttaatttgtcccgtggcgtttgttaggcctaatcgcccaataaatctccaccgggctgtccagtttcagtttggtacacctaatcgatacaaggcccacagcgatagagatttccgatctgatccacgcagcagccgtcgtctgaatggtattgcgc

SEQ ID NO: 104306 - DNA, 568 bp, Zea Mays
ggtctttaagaccgatcatctactacaacgtaaagacagtatcacggatgatccgacccccaagaccggagagtcctccatcacacaaagatcatctgattcctctgtgggggacatgatagaggaattcagagatctcaataaactaggacaggggtttacatcggtcgatcctttggaggagatcgacataggagatggtaaaactccaaggccaacttttgtaaacaagaccctggagaccgatcctagaaatgaaatggtcggtctattgaaggaatattcggattgctttgcttggaattacactgagataccgggattaagccgagagatcgtagagcatcggctgcccattaagtccggtttcagacctttcaagcagaaagctagaacatttcgtccagaccttctcccacgaatcaaggacaaaatccaccggctgctagaagctaattttattagaccttgcagatacgcagagtgggtctccaatattgtgccgttggagaaggagtcaggtaagcttagagtatgcattgatttttgcaatttaaatagagcaact

SEQ ID NO: 104307 - DNA, 276 bp, Zea Mays
tcaacgtacaacatgaataaatattcagctattcaaagtttacttcagtcattcaccgtttttaaaattttgtaagaaagacacattcatcaattcaagatttacatcagccattcaggaataaacattcaacaactcaaggtgatgagtcgaggacatgaggtggctactgcggtggatgagtggaggcatgaccgtgaggaattatagacattgggtggcgtggttggcatggacgcgcgatggtgggtttgaccgtattagagtagagttggc

SEQ ID NO: 104308 - DNA, 544 bp, Zea Mays
ggaggtccggaagctgctgcgcgctggcttcatcgaagaggtccatcacccagtatggctggccaatcaagtcatcgttcccaaggctaacgggaagtttcggatgtgcatcgactacaccaacctcaataaggcctgtcccaaggacccatatccacttccacgaatagatcaaatcatggattctacctctaggtgcgacatcttgtccttcctagatgcttactctggtttccatcagatccagatgtctaggcaagataggaagcatactgcttttgtaacagtggatgggctttactgttatgttgtaatgccttacggtctaaaaaacaccttgccaacatttgtacgggcgatgagtaacacttttggtgacctgattagggacagggtagaggtatacgttgatgacatcatggtcaagactaagagagggtcgaccctagtggaagacataaccctggtctttgacaagctgcgggcaacacgcacgaagctgaacccagaaaagtgcgtctttggtgtctccgcagggaagttg

SEQ ID NO: 104309 - DNA, 303 bp, Zea Mays
cagccgcccgggtcctgcttgggctcatatttgtcgatgttcaaaaccttgaaattaggcggccactagaccgctcggagtcgagggaaagggctgagactccgcatgtcccccgagccttaggatggttgtcctgggcgtgattgtggtggtggtcccgtggtggtgactgatgtcgtgggtcccgtagcctttccagggctagctagcccgatgatgggttgttcgtcgaggctgatgtggagtccgttctcatagcgtgactccacactggtgcgtcatggttctgatcgtgctcctccc

SEQ ID NO: 104310 - DNA, 677 bp, Zea Mays
atggattctattctgcaaagtcggcatatcagagctttttcattggatcagttgagtttaggcacccctaaatgtactatgattctactatataataatttataaaacgctcttcagctcgctcctttatggaaggcacaaatccttgccgtcgtgaggggcatgcgctcagaagattatatcaccggtgcagccaaatattcccaaacagaagatgaagcaaggtgataaggaggccataaatccgttgtatgaacaacggatggacacaaatcagcaggcccttcgaaaaagacatcacatgcggacatgcccatacgacgcaggtaatgagaggacaactaaagcccattcgaacatgcgaaaagacatcacatgcccatacagccatactgggctgggaacgaggggacgaagtaataaagcccattgtgccatgcgaaacgagtcatacgcagctgggccataatttgaggtgtagcgtacgttgtacaatacctaggaaaatacggtaaagagcggcccaaaaaggtttctcttctctgtctgtctgtctgtccgccgtccggtccggtgtacctgaggcttttatttagtaccctgagctccccatgtgctcgtaataatttagtaacaggggggtgaagcaaaagttttcgaaaatcattggcagccag

SEQ ID NO: 104311 - DNA, 429 bp, Zea Mays
aaaacttatgagagtcagtggtgtccacaagtgtttaggatagagtttgttcaggagttgtatcagttcagccatggtttgttcaattgagtcaagggtccatagtttgttctatgcttttagttggaggaaaaaatgtttgttatttggctccacctacttaacatgagtggtgttccagttgtaattaagaagaaataaagttgattccatctaaagatgttgttcagagccccccttacgaaggcaggtacaccatcttcatctttggtacagtttgcaaaactatgtttggggaaatctggtcttattattgtttttttctttttccgttatgccatcccaccaagatagaattgtttgcttgttaagaacaagaaatattttaattgtgcctgagttattgtaccctaaggttgacgattcaag

SEQ ID NO: 104312 - DNA, 1016 bp, Zea Mays
cttctctttctggcggcattcctgacaattcttctaggaatacatccatgaattcttctactacagatatgctttctgctgctagattaaacaccattggatccttggcgggtggctgagcctgacatgaaactgactttccttggtggtcagtgagaagaacggtcttatttgcgcaacttatgatgcccctgtgtttggttaaccaatccattcctaacatcacatcaatcccttgggatggcaagacggctaagtccgccaagaacactaccccacttaaaataattctgacttgggagcatttgagctggcatagaaggtctgaccctagggttcgggtgaccaagggaatttctaggtgtgtagagggaatgccatgtttttccacaaaactagtggctataaatgaatgagatgctccagaatcgaaaagtacaatagcgggagtaaattcaactaggaactcaccgagcactactcccggagcttgctgagcctcttgagcatcgacatggttttctcgtgccctgccatgatactgggtcttgctctactggctgttggaggagggtgccttggaggcgagcgttggcgcattcttggggccattcaccgagttggagtaagtaggtcctgatgccttcaattggggcaattattcttgtagtgactggggtctccgcagtgccaacaggcattagctggtggttggttgcttgcaacggagggagcctgaaaggagctttgaccctgctgactgaaatgtgacggagtgggtccagctggcttattgaagcttggtcccttgggtgtaaacccaaaggattgaattctctggtgcctgtcttgctgctgagctcggaggacttggaatttcctcttgaggtgacctttttcttcttcccttgccctttccacttgtatggccttgtttgagaggtgcgagaagctgaggaaatcttggctggcaaggatagtcttgagttctggtcttagccctttcaaaaagtggg

SEQ ID NO: 104313 - DNA, 360 bp, Zea Mays
gtttatagagggttatcacgtgtatctgaaggtgtcaccaatccggggtatgcaaaggtttaaagttaaaggaaagtagtcccctcgctttattggacccttcttgatcctaaagcgagtgggagaagttgcctatcaactagaactacccgatcattttgcggatgtacatgatgtcttccatgtgtctcaattgaagtagtgtctcagggaacctgaagagcagctacctatggaggatcttagtgttcaagatgatctgacttacactgagtatcctatcaaaattcttgacaccttgactcgtgtcacaaggagtaaagtgataaagatgtgcaaagtgcaatggattcaccatgg

SEQ ID NO: 104314 - DNA, 513 bp, Zea Mays
gtgaagtggatggtggtcggcttcgtgtgggcagggctggcaagcgggaattgttgtcctcaccggttggggtgagtgtaggtgagggggagttgcgaagtctttttgagggtgaggagctgaggataatgctatttaactatagggatatgggaatcattccgaaggttgaaccaatgtaaggtgtgatgccctcgctgtacgtgtgtaactatagtttgtatgatgaggctgtgcgccttcgcgcatccggctatgtccataggggcgttgcacacttggtctagcacgtttattatgtcggtccggcgcctgtagtcggtctttgcgcggacagtttctcgatgtagacttttgcatggatgtaatgtgccttcgattttgcgcactcgttgtgctggtccggctgcacccttaggcgacttttgcacggatagtcttttaaagaagacttcgattttgcacacttgttgtgctagtccggctgcacccttaggcgacttttgcacggat

SEQ ID NO: 104315 - DNA, 453 bp, Zea Mays
aaatatcctcccatttccaagatggtatgggaaggggttgcaaggggcctgctgccttcaaatgactagctttaactctctgacaggtatcgcattcggatatgtacttggcaatttcccttttcattctagtccaccaataaagagatctgagatcatggtacatcttgttgctaccagggtgcatggagaatttggaaaggtgagcttcattcagtatcttctttctgagctcagggtccttgggaacaaccaatcgatctccaaaccatagaattcccttgctgtcctgtcggaaacacttgtatttttctgccttttgcttgatcatctccttgataacctgaacacccttatcctcaacctgtgccctgactatctgttcttgcaatgtgggctccaccgagatatagcttaggtcacccgaagaaacaacttccaggttcagcttgc

SEQ ID NO: 104316 - DNA, 834 bp, Zea Mays
acccccagaacagtgggttggccaattcttcttcctggtttggtggcaaagggttgctggtggagttgcgggtttgtctgtgctagcggtgggggtggcagtgctattctttcttggtgttgcaggcattgttgcttgggaaaagcatggttgtagttctactgatgttggggtggtatggtgtttgtgttggtaatgagggtgggggtattgttgtgggaggtaggtctcagtgatggctctctggttgtttgctgggttagctctggccatgcagtctttggtttccttagtttctggccaatctctggttggatgccctatgtcttcgctgtggaacacacgataatacttcctttgatgttgggccctctacctcggcctctttctcttgctgcactaccagtgcggccttgttgtggagggtagtcctggcgtcgaggggccttcgcatttgctgttggttggcgatattatggacctggaggtgctggtcgcattcttggtgaggctagtcttgttgtggacccctagtccattttctattggactgcagagtctcttttggttttcgctatgactccactttcctgtgatggagctcatcagatcggacgtatttctcaaagagctgatatagctcttggaagttgtatggtgggtctctggtagttacggtaaagctagcttgctcgaaggccgctaattgcataatggatcacaatcttatcgttgactgagggtagctgtgatttgaggaggaggaatttcttgtagttgtcgcgaatactctcttttgccttcttcctacagagggacaattctactaattca

SEQ ID NO: 104317 - DNA, 633 bp, Zea Mays
tactttacacacggcacggatggtgggttgatttctctgaaactcagggcctcttatgctaaagcaccgggtgacggggtatgggatgatatcattcatccaattagaaaccgcgcgccatgatcagattccttttagaacgaatcagtacggaatgttatccactcgatccacgatctacggttgagatttaatgaaggcgtgcttccactcccaccctccaattagatcggacagcctgaaaccgccacccgtgattcattacggtccaatcaatctccaccacacagaatccatctaacggccgaggtgctgcccctggtaaactaatctcgatcgtcgatcattagattaatgacccagggcccttcccctacctcctatggagaagcacggtggcgcacactatcccgcgacgaacgctgtcaccagactcatggattcggtaatttagcgccctaaactcaagtctgctgggtgctacacaatcgcaggggacaagtgaacatggtgtagggtttactcaccggagacgggaaccgaatgaggccacccacggcgcactgcggatcggagtcgaagtaagaactccgacgatcaattatcgtaattgtggtgccccgatgctccaac

SEQ ID NO: 104318 - DNA, 306 bp, Zea Mays
accagcataacgtgctccaggaacactgaaactagtagctagagctgctctggaatcttacatgcatgcatttgtttattcattccctagctaattcccacagcagatttgtttaatatcgattcgcttgcatatttggcgcctaaacaccaacttatttaataccgaaaccgttggagtagtggctagttttgtttagcgaacttgattagtggatatatatatcatatgcctacccttactgaacaccaacgtttgcatttcctagggccacaagtttttataggaagtgcatctcgaccacag

SEQ ID NO: 104319 - DNA, 329 bp, Zea Mays
ccgccgttcggacaccggaggaaggagatgatggtcatccgttggatcggaagagaacggtcgaaaatagaagggaggtagcgtctggccctgccccttggattgatccgcaatgatcatgattgagtttaagggcgatgggcgcgtggccgttggatcgggatcgcacgcgttaaactgatcgcggcacattaaaatctgggccaacggattttgatccaacggttgatagagcagaccggttcataaccaggtataatctaatcctaaccgttgaaactagatctggcggctctagttgcatcttaccccttcgggcgtcatcttta

SEQ ID NO: 104320 - DNA, 338 bp, Zea Mays
attttatatttgtagaatgttctggactcggtgtcagctcagctgaaggcatgtggtgctcccattcctgatcagattttatcttggttgcaatggaaccctcttcttcttcagaaacaaatagatgacttgaaagcttcgaatgtcggttagtaggttgataactcttttggtgtttgttgcttctttgcttacaccatggatcattttcacttgctttcccagcactgatacgatggtattctgatgctgaagagaggtgcacacagagtaaagatgatctagatcaggtttccacattccttgatggtgcgtgagccatgaattcttcctttaat

SEQ ID NO: 104321 - DNA, 1003 bp, Zea Mays
gtttctctttttctttttattttccaaattctatttctatttttgcatcctttgtttttgaacaattaattaactaggtaatcttaggtgctaaaaaatatatattctaagtgaggtgcttctaatcaaacaaagtatatgcatatgatgagaagacctagggataaaataaataagaaagggggttagattagggttccaaacctcgggtttgaaaattgggatgttacaaacctaccccacttaaaggaatctcgccctcgagattcagacggggctcgagaaaaggtaagggtattccctcctcagagagtcctcactttcccaggtagcttcctcttctccttctctgctccactgaaccttacagagtcttacttctgagttgcgggtctttcggactgctgagtcaagaatctttattggcttttcccggtactggagatctttttgaatctgaattgtctctgccttgatgtggttctctggtacttgcaggcacttacggagctgggacacatgaaacacattgtgaatatctgacatggattctggtagtgcaaggcggtatgctgcgggtcctactctgctaatgacgggataggggtcgatgaaatgcggtgctagctttcctttcatttggaaccttttgaccccacacatcggggagaccttgaggtatacgaagtctccttcctcaaatctgagttccctccgtctgttgtctgcataacttttctggcgactctgagcttcaagtaacctcctgcggatcagggcaactttctcttcggcttctttaacaaagtcgggtccttccagtgtcctttcccctacattggaccacattaggggggtctggcacttccgtccatacaatgcttcgaacggtgacatcttgatactggcctgatggctgttgttataagagaattcggcattcgacaaactggattcccaatttctgtcgaacgtcaacacacaggctcttagcaaatcttcg

SEQ ID NO: 104322 - DNA, 639 bp, Zea Mays
tgcgggcgctggacgtagagagggtgaagacgtggtagcaccaggtctccatgttagattcagctctaagggccaaatttctaagacaactatatacatgaaaaagattgaacggtcgagtcacctgcacttacaggagcatttacttgtttctagcacaatttcagtcatagtaacaaacaatctacttaatcaggttctaaaatatgttaaaccaaaaatttagcaagctatgattttaataatattttgctttaatttgttactaaaatttgccaagttgtcgtatttaatttgccaaatccatagtaaatccaaacatggcaaaacaccggaaaatagaatgaaaacgggaaaggaataccttatacctgagttatccgtcatttgtacttgctaaaacttatactatgtatatctgcacttatatccatttctaatgtagatactaagtggatgtatctaacatgatttttcaatcttttctttatccgatttgccccacctgcaaaagaaggaacccagaaagagtttagcacccaccacaggcggagaacagtggccttaagccttcggtgggctactctagattcaaactgtaaaaacttggatgctctccagaatgcatgagctagatcc

SEQ ID NO: 104323 - DNA, 553 bp, Zea Mays
tgaagatctgcgatttgaagcttcagttctgctaactcggtcggagccatgcggtatggtctctttgcgatgggtgctgttccaggaattagatctatgtagaactccacttctctttctggtggcattcctggcaattcttctggaaacacgtccatgaattcgtctactactgatatactttcctttgttagattgaacaccattgggtcactggcgggtggctgtgccaggcaagagactgactttccctgctggtcggtgaggaggactgtcttgtctgcgcaactgataatgcctttgtgtttagttagccaatccatccctaggattacatcaattcctttggatggcaagacggttaagtctgccaggaatactaccccacttagaaggattctgacttgggagcattttagctggcataggaggtcggaccctggggttcgggtgaccaagggaatctctagaggagtagaggggatgccatatttttccacaaaactagtggatatgaaggagtgggatgctccagaatcgaaaagtacggtag

SEQ ID NO: 104324 - DNA, 489 bp, Zea Mays
ctggactagtcattctaggatgctcttacttcacttcatgctttccatctgaaccttgctacttaaaaattctatgcttcttacttcaagctattgcaaaaataattgcttctatcttgccttaatcttgatcaattttcatagatgccttgcaagcatcagattgctcgcatgagtccctgtggaaggcttgctaccaaggggctatctaatgagatcgtcatcagggtggagagcaaagaaaaaggggtgctcatagaagatgaaggggaggggaggggaggtttcaccataggattcccaggaagaggaggtaatccctggagatgaagagtcccaagagacaccccaagttgttcccggaggggaggtcatgccgcaacaacgtgtgtggtggacgatggagttttatttgaagaaggccaaggatatgacctactaacactccttgctcacgtacgactatccttggagggtactatctaggct

SEQ ID NO: 104325 - DNA, 400 bp, Zea Mays
attgtccatcaagatggtgctactgtcggtagcctgataagaagaaaataagtttagatcagaacaaacatgtacattggctccagtgtctaaccaccaatcggtggattgacatgctaaaagaatttaagggacatacccagaattcccagcatcagcaatagccacatttgtagttttctaactatcaccttttttgcccttcctattacgacattttctagctatgtgatcagattcaccgcacacaaagcaagtctggtctccaaggtttttcttcttaaaatcagtgttctgcttggcctttggtttctagttcgtcttgtttttgtttttcccaccagatttgccttcaaccacgttggcattagaggtaccaccatccattggaccagaacgg

SEQ ID NO: 104326 - DNA, 408 bp, Zea Mays
ctttaccgaaggcggggacggagctaaaggcgcggctccttcccgaggcgacgcctaactccgttggaacagtgcacgtgtgtctttctgcggccgctgaggcctgaacactttgtttccattgcatgaagtcatactcttccttttattttgcgtgtccggctttgcctgtcaataacagggtggcttcccgagtaggggtcatttttcgtggcgggtgatgagtgaaggtgtccctaacccggaggcataggaattcctcggcttagtcggccttgccacttacatgcacccacgttcgctccttggggccctgtctctgacatagccgggagaacgcaaaagcctttttgaccgaaaattttggacgatcttgacgcagaggggttcccccctttttagcccccg

SEQ ID NO: 104327 - DNA, 410 bp, Zea Mays
caacaattaaagtgaagtatatgtatgtatacaattggaaacaaaatattcgcacctgctttgcatggtccaaatatctttccagattttatatctagtaacaactcttgtaatttcatatggaatattcttaccgcaatatcaggtgcgtcagaatttttttgtccacaatggtaaagactctcaataatttcgggccactttgcattacatgtgaaggttacgaagaagtcaggtgggccatgaactctgcaaatagctatgctgtcgtgatagttttgtatcatgtatcgtcttccaccgatatgtgatgctggaagcacaattgttttccccatctcttcaccgtttatgcaacctctactaacagcatctgatataccttgtaaattttccatccttaatttgtc

SEQ ID NO: 104328 - DNA, 365 bp, Zea Mays
caacttctctagcctctcaagaatggttgtgagagatggatccctccatcgctacaagcttgttatttgtttcaatctacgtggactcaagttgtccaagtcattcattagtaacccgcacatcctcctcgagtgcctcagtgcacaagttcacttgtctatcaaagtgttgaatggtgcgctttgttcgaggtgagtggtttaaatcaccatctgatgttcctgtcatggttagtgtacaataaaaaaggagactcaaaactcatcctctctaactaaggtttgtgatcaagtggtgcactcaaaaaccctcaaacctgtatcaacaagctcttacaacttcttaccaacagctgcaagtggtg

SEQ ID NO: 104329 - DNA, 636 bp, Zea Mays
ttttatctggtgcctagggagcgatggattaggatgtcgatcatgtactttgaaggtcctgccgtgttctgggtgcagtccatggaagataaaatcagggggatggactgggaggagttttgtacccacctaatcacacgtttcgggagggatcaacataatctgttgataagacaattctatcacattaaacagatcacatccgtagtggactatgtagagcagtttgatatcttaatgcaccagcttttagcacacgaaaatcagctcacatcttccatgatcactgctagattcattgacgggcttaaggatgagattaaatctgtaattcttattcagcgtccgtcagacttggatactgcttgctcccttgccctattgcaggaggatgtgctgatctgcactggaagaaaggagattcggagaatggagggtggaggattttccaaaccaaccggaagattcagtccggtgtcgggatctaattcaaatgtaaatgggggtcggaatgctcagtccacaaatgaacgccgaggtgtgaccaccatgaacccgagaacagatgatggtaaattgtcggcgctgaaggcctacaggagggctaagggtctgtgcttcaagtgtggggaaagg

SEQ ID NO: 104330 - DNA, 478 bp, Zea Mays
tagcactagggacttagtgcaggaatatctagcaaacaaaactttcccaacctctagcggatgggggatgccaaagaaggaagaagtgaaaaatatgaacttgttcgacttccctgccgcttcaaattttagaagaaatttaaagagccatgtactgaatggttagaaatgatagaaaccttgtgcaatgagatcctcgaaaattatacgaagaaagaagaccagttgatgactgctgccttcggctctcggccgaaacaaaggttgaaccgtgttatggatgcccttaactttgaatatcctgattctgaaaggcttgacgaaggggccgaagggggcaaaagaaaaaggattgtcagtattctgggtaggcaagctacctggtctgtcaaggagcaccagaaaacttcgaagaaacataagactctttcggagccgaattcggctcccaagaagcgaaaactcgtcaggatatctt

SEQ ID NO: 104331 - DNA, 524 bp, Zea Mays
agtttctgcctacgcccaccccgttagcagaatcactagccttcgcagctagatcgtcatcttcagcaccgccagcaccagcaatccaagcccctgctgccggaggcgacgacccgggcgactctagtgacgatgatgaagacgatgaagaagaagagaacgtcaacgaggaagccaacggtgaacagccggaccacttcgtatggatatggcctatcaccgaacattatacatcaatgttcaagacggggaacttccctaacctgctgcaggatgttctgcatgcgttgggaacctacgttcgacccctgtatgagacaaggcgactgtaagagccccctcgggcttgctactacatcactcgcattcatgtcagggtgatggatgtaggggatagagggttcatgactctatcagctcatgagtctctgacgccgctatccacctacgctgcttcggttagcgatgctgctaggcgaactctatggtcccttagccacacttaccggcagcagctgcacaac

SEQ ID NO: 104332 - DNA, 344 bp, Zea Mays
agagcctccaggctacaaatttaacatgttcccaatttatgatgtctactctgacaagactattcttgatgagattcaaggtagcagtaatatttaagagaggtgaggaaaccatgctagcaaaatcacttgttatggtagttaaaggtacaacctgatatttgtaatcttttttgcatccaaagtcaatccaatcttgcaatcaacttaaagccagcctcctcatttatttccaagggggttcatccaacaaaaccaatgatagcataccttttccactataaacatcaacgcaagaaacccttaactttgtattttagatgttctattttagtcaaagcacg

SEQ ID NO: 104333 - DNA, 748 bp, Zea Mays
ttttggtttttctagtttgggtgttcggttttttgtttgtatgcctagggctactgtaggagatagatataccctgggtcctcggagcatggatatattctatgggctgcctggtgggcccctgataagtcggccagctgggcatactattaggccgcacccaggtagaacggtttccaccaaagaagatgacgctcggagctaggtgcaatcctgaaggatgtgcacgcggttgttatctatgcgcgcctatcgcagaaggattgcagatgttccggaggcatgctttgtgcacaaccgaatggagagattctcggaaggtaacttgtaagaaagcgaccggactgtagaagatcgggagcgttcacaatgatagaagatagactcagacgtgattagataagtatacaacttgtaaagggacatcccaccagtcggctatacaaggttgctgggtaccccctacaaaactccctctctctcgcccacgaaccattagatcgataggaactttttcatccaccctctcaaccgcatgtaatctatgaactcatagcaatcaaatactcaaacaccgcataggacatagggttttacactttcacgcgacccgaaccagtataaaccctgtgttccgacgtgcactcgcgcgtaccatcgagcagcgagcaacgtcgccatcctcccaaaaagcattacgtgggaaacccatagtgtgcagttggaatcaaacttcgatagctattcc

SEQ ID NO: 104334 - DNA, 409 bp, Zea Mays
cccgagggagctggagctccgagggggaggggtggaagaatgggggcaccgtggggaaggccctgcctgccgtgaggagcctagcggctaggggtggatgaataaacgccaagtgcaagtgaagggggtccgtatttatagagaagccctacggttagggtttttagtgggctaggctgggttggcccaaaacacataaccgggctgcttagggtagaaggaaaccaaaaatactgttggattttggtggcgatttatctgtgtgagactgaaactgaggcgacaaatgaggaaaaccggcgtcaagatgacagacgattgagtacttaatttggatcgaaaattttgagtttggcgtcactttgaaattttctcgcgcgctattttagaaaaaaaaatttatctcaag

SEQ ID NO: 104335 - DNA, 325 bp, Zea Mays
gaccaaaggctttcaccaaagggagcaactccttcaaattcaaacaatggcttcaacaagaccattgctaggtacaaccagctaaggtcaggcttagggatttctccccgaaatcgaaggacctataaaaccaccgatcaaaaaaaccaaatgccaccactgccatcaaactgaactagctaatgtagtcataccacttaatcttagcctgtaccagcgacgacaaactctacgaatgacaaacaatccttagaagggtcattctacaatgattggttcgtgaacaaaccaaaaggcactcactaatcaagtccgtaattttttt

SEQ ID NO: 104336 - DNA, 384 bp, Zea Mays
gtgtaattgtgagtatagtatgtggacttcctcatgcaacgtattgcagtagacctgcaggttgtcgatagttgagttaagttctttaattcgggcctgagcccttgcttccttagcacatgccagcagacgagactgtactgcccagtcaagtgctaagtctcgatcagcgagctgatcctgcaggtgacggatgtcccttcttagttcattgattctatctccgtcggcgacccaagcatcggtcctgtgttgtagcgctgcttgaagtcgactcactcgggcttcaagatctccgatggggtcattacttccactgctgctgctttcatgtcggggggccagttgatgccgaggcactccaattggtcccgttgatttgcg

SEQ ID NO: 104337 - DNA, 305 bp, Zea Mays
tctgtgtttcttaagagtattgggtatcgagtttgggagatttgcctcgatgctactttcgatgcttagagtgctcggatcactcctattcagttggagttccatgattcgaacaacaaagcttggaacactttgttctcgtgtctctcgctggctaagttttagcgagttggacatttggctatggctcatgatatctagtcctccctcgagagattccatgagggcagtgatcatgtgaagaccagactctttgagacataccaaagagagtacgagaattttgtgcagttggctggagagac

SEQ ID NO: 104338 - DNA, 502 bp, Zea Mays
gtgcgtgtgtttggttgggtgtagtttcaatatggttgcacttcagttttacttatgatctgcttgtgatagaacacaagaaaaactatgatctgcttccagttttgcagttcagtttagtttgtgctcataatgatctgcttccacctttcaattgctgatttttttatctcagaacttttattgctgcaatggcagtagtccttgctgttttgttaggggagctcttaagtttaatgagttgagtaaaacacaataaaaactatctcgatgtgacagagtacaacacataccaaactcttgatgacctgcacataccatactcttgctgttttgtcaggggtgatggttgactaactcttgatgacctgcacatatcatcaatgttcaaaactactgggtgatggttgactaactcttggctgcacataccaaactcttgatgacctgcacatatcatcaatgttcaagctggacatgatgcttaaagtggttaattcca

SEQ ID NO: 104339 - DNA, 706 bp, Zea Mays
caaaggtgtctgccctctcgaaagtcgaaatggttgcaagagcggacggcggcgccatggtggacatgcccgtcagcagcggcgaggaagcagaacgactaccacctcgaagaaagattcatggttgtgtactggggacgacggcgtcggcgatcagcaatggcaagagcgagaggagagggagggagaaaatcgagtgtcgggcgcaacgatgtgagcacagaaaaacaacgagagcacaaaaccctagtgaccccacgttaacttatttatagacgcccaaaaacacataaaaagcatgaacaataccacctgtctaataccgttcaaaaatcattcacaccgccgagacagctcgcccattgatcaagagcagcgttcgtaccattctccagtaactttgggatcggcccatcaggctgagcttcaccctcgaagggctaatgttggggcgaaggccgaatcgggcctcaaaccaaccattgattgacattgtctatggttaaattaaccatatatgtgaacgcatggcccaaatgtgttcagtgatcctgaaccccccactcgcccggtgcgagtcgcggcatcggggagccttcataccccccttgcgctgcaccgacgaagtgaagattgtccgccgtgggggctcacctcctcatggacgaaggccataaagggtaaccataccaacattggggatgcc

SEQ ID NO: 104340 - DNA, 1159 bp, Zea Mays
ttgggtttttggtggaaaccatttaatggtaaaaaatccataggtgtaagcattcgatacatagggtttagggtttgatgtttacgttggacacaaatcacaatcttggttctttagtggagaccataatggtcaaaaagccatatgagttatccttcgatacatagggtttagggtttggcatttagggtttcgagttcaaggtttggggttcagcttttagtgcttagggttaaggatttaggctttgggcaaattttgctatctttatacatttattaatgtttggataaatagcactatctctagaattttactatggtttgcccttaattctttatgatctttggattttagtattacttggtttacattttaatatgggttggacacaaatcacattcttgggtttttagtggagaccatttaatggtaaaaaatccataggtgtaagcattcggtatatagggtttagggtttgatgtttagggtttgggcgttacggtttagggatttgggtttggtgtccggtgtttactgtatacgattgagggttatggttaagtctttagggtttgggaaaaatttatctatctctagacatttattatggcctagataaaattgtactatctcttcaatcctactatggttcggcctaaaattttgtgatttctagattttgctactcttttggttaaattttactataggttggacacaaatcacaatcttggttctttagtggagacaataatggtcaaaaagccatatgagttatccttcgatacacagggtttagggtttgtggtttagagtttcgagttaagggttgtgtggcgtttagggtttcgagttcaaggtttggggttcagcatttagtgcttagggttaaagatttaggctttgggcaaatttttctatctttatacatttattaatgtttggataaatagtactatctctagaattttactatggtttgcccttaattctttatgatctttggattttagtattacttggtttacattttaatatgggttggacacaaatcacattcttgggtttttagtggagaccatttaatggtaaaaaatccataggtgtaagcattcggtatatagggtttagggtttgatgtttagggtttgggcgt

SEQ ID NO: 104341 - DNA, 585 bp, Zea Mays
cttcaatgctgggggatggatattgtcgggccactacgtacgactcaagggaacctcaagttcaccttcatcgccatcgaatacttcaccaagttgatcgaggccagggcagtatccacaataacgtcgaagactgcccagaagttcttctggcaaaacattgtttgtcggttcggagtcccatccgagctcacagtcgacaacggcaaacagtttgacagccaggacttcagggacttctgcttctccatcggcaccaagcttgcctttgccttggtataccacccgcaatccaacggcgtcgtcgagcgcgccaacggcaagatcttcactgctatcaagaaaaggcttctcgacgataagaagggtaaatgggccgaccagctacttgaagtagtctgggccctaaacacgaccgaatgccaggcaaccggattcacacctttttgtctactatatggatcggaggccatgacaccggaggagataaagcatgggtcaccccgaacaagcacatcagcagtccccgacgtagacgaaccaacgtctaaagacctcatcgacggagaccgtgtcttcgcccta

SEQ ID NO: 104342 - DNA, 429 bp, Zea Mays
caaattctaatcctcctctgctgcagagaaagctcgtggacgggcaacgaaccagcggcgtttccatacgcggaagtaaatcttctcatatcttctacttcaaaatgtcttgcattgtattgcgttgcttgatgacgtgcaacagaggaacaagaggattaacattgtgttttcaaatgtttattacaccagccatcctcttcgttttcggattgcagtacgtgctacaatatcacatatctcgggtttatccgaagaggtaattgggctcttgccttgtcttgtactcaatttctacgccattgtgtccttacatgagattgttcggtgccataccacttcctataaccacaattcattcgtgtggtgtgcctgctacatgctgccttcccctatgcaccaacgcttttatcgatttggttcataaac

SEQ ID NO: 104343 - DNA, 356 bp, Zea Mays
ggtacttttactctaggagtaagtggtctgcaacttgggccatacatgaggagacaatgggatcctggtattacaaatgggcaattggtgatgagccgcgaggagctagctttgcagatcgcagtgttgcttggggacaagcaacatttcgtcggggcggtaatgtaacacccggcactggctcaccacgtgatgggccttgatgtcgcatggcccaactcagagcagcctaaaggcaggaccacaacgacaggagaggtatcgaagacaaatcagaaatcgaaaacagggttcgtccccttcgctcgtcttcctccacggagcggcatatcggtgcgtcaccagctcctcacgtc

SEQ ID NO: 104344 - DNA, 508 bp, Zea Mays
tagaaattgagataaggaaagttataaggactttcctcatcagccagcttgatccaaagggtagaatagaactgagcaataacttcatcattccaatcgtattggaatgtcataatgttcttcatcctcttcctctcacaggccctaaaagcctgtgtcatctctggatcaccaattgcttcacatccttcctagttaatatatctctgatgcaggataggctgatgcttcttgggaagaatcacagaattgtaaaaatcgacatgttggagggtccagaaccgattaccatcgatcctagcatcacgaatgcgtaatgtaggattttggaagcggatgtcctggagaagggcagaccctccgctggcagtgaaatccgtgactggctcattggcagatcgacgggcctccgccctgtgaagaaccaacccctggataatgggtgcgttggcagaagggagatcaacttcatcatccttgcctccatcatcatcgctagttggctccc

SEQ ID NO: 104345 - DNA, 326 bp, Zea Mays
caaggtacactgtgcatgcacggaggaatattcgggcgagagaggcttcggtgtggctataattcttcaccaacgctcatctctaccaccaatctccatgttgccatggaagggggtgctacgctgcgtaatcgcatgtaagtcatcatctactgtgttcattggtctcccctgtcttctatgcctcccagaattaagtttgggtaatcggttcaggaaggagggatcaccagtcatggcaccggcgtccctggtgtgcgtctccgccggtgtccggcctgtgagggagaaacaagcgagtgtcgttggatacgataaggatggtg

SEQ ID NO: 104346 - DNA, 454 bp, Zea Mays
agtttgtggggctggctaggaaactccatggtggcactggggatcgatctacgtcaagcgcctgcggggagacgatcctgtgccagcgtaatttgttgttgccatcccttgacgccgtggattcactgtgcactgcggttcgccacttcgtcacctccatctgtggtgaggccctatccatcctcttcgggttattgccctctgcgtttaacttaagaaccgtaggttatcgcgggtcggggcgctgcaattcgtcgctgtggttggtgctcgactgcatacccgctgtgccccgtggccagctatgtcgcaactccttctcggtgagtcgtcacctcctggttgttccttatcctctgccctacgtgtagctcgcttccagtgggtggattagatgcctgggcgtcgaatcggctgctcgccggtgggattccgccgtcggaatatcctagcg

SEQ ID NO: 104347 - DNA, 368 bp, Zea Mays
caaaacgtatacaagctcaagactggcttcatgcagtggattaggactgcccagtgcacagacagaaagatggtgatgcatattacaaatcaactgcaaggatcagctcatgaatggtgggaggcacatctctacgctcacactttggaacgagttcaggcaaagcttcaggacccacatttctaaaggcactttggttatgaaggagaagtttgtagcactaaaactgtaccgagacaagttcatctagttgtcatgaggcgagccctaacaccaagcgacaacatcactttctcaaaggtttagttgagcccctaaagaactagctgatgaatcacacatattggcaaacttctaacaacttgttg

SEQ ID NO: 104348 - DNA, 751 bp, Zea Mays
agatgacgcgccacggaggtatcgtatgctggaaagtatgttgggaacagataatgtcccaaagcaagctgaaatgcttgctgttgaagaattgttgacagccatcggtgaggagccatattcagtgactgaggctctgaaggtcactgattggagaaaggcaatgttagaggagatggcatcaattgaagggaacaagacatggccactggttgatttacaaaaaggacatcgtgccagaggtctgaaatgggtgtataagctgaagcgtaacgaatcaggagctgtgatcaagcccaaagctagactggtagctaagggatatgtgcaacaacaaggtattgattttgaagaagtttttgctctagtggcaagaatggagactgtcagggtactattggcagtcgtagcacatcatgggtggccaatccatcacatggatgtgaaatcagtgttcttgaatggtgatttggctgaggaggtatatgtcacacaacctcctgggttcactgcaaaaggggaggaaggcaaggttctaaaattgcacaaagctctgtacggactgcgacaggctcctcgagcttggaatgtgaagctagacaaaagtttaggcaaacttggtttcacaagatgcaagactgatcatgcactatatactagaaagaaaggtggtcagagagttgttgttggagtatatgtagatgatttgttaattataggggaatcagacgcacagatcactaaattcaag

SEQ ID NO: 104349 - DNA, 691 bp, Zea Mays
cagtaaacacggcaactgaaaagggaaaggagcagatcgatgacattttagaagaagaaaattttaactttcaagatttgcttggacaagagctaacaggtgctgaaaaagaagagttgaaaaaatatgtcatgtcttgcggatataagccaggggctacgctatttggtggggtcaacaaagggaggctaaggtgccttcggaaccgcaccgaggccaaagttgttagaaccctctccaaaagcgttggcctaccgaagctagaagcggacctgtgcaggtaccagcgacaccatatcgccggaagcctgctctatgctaattttaaggtgacaaattttattattattatatattttttaggtcgttttctgacgaagattgttttggcagagtatactattgagtaaggttctaaaaatgcaacaagatctcgaagaggagaagaacgaaactatcatcaaagatttggaagaaaaagttgaaaattacgaagttgctctgaaacagaaggacttcaccattcaggaccttgaaattatggcaaaagaacacgaaggtgcattagaaaagaaggactttgttattcagtctatggaaggctccttggctgaggtccaagccgagaatgaaaatttaaagaatgaattgctcaaacaatcagaaaaatctgagcaggaaaagaaacacc

SEQ ID NO: 104350 - DNA, 944 bp, Zea Mays
aactcctcaaaagaaagcctttgcatgaccacaagtgatcgcacataggctcggggcctgctgtcgggtacttgggaatgaggtacccggaacaagcccataaatccattttccggtccagcacgaaaaagtccccgttgagcaagtctgtgaggtggggcggacgaccaagtctctcaccgagcaagtctgtgaggcgaggtagaagaccaagtccccatcgaacaagtctgtgaggcagaacaggcgaccaagtcccccgccgagcaagtctgcgaggcaaaacgagcgaccaagtcccctgccaagcaagtctgcgaggcgaaacggctgaccaagtctcccgccaagcaatccagttgggcagaaatatcgaccaggcacctgttgggtgagcctaagcactagccagggtcacaaggatacgtcaaccacaacatggcatatcgccaagagcccacgcaatagtcgcagacacgactgtacgtacctttcatataataagcataccacgttgtctgatgggacgaggcagccccggtccaaggcgacctcagcatcggagcctccatagtagtcggtatggtagaagcgacatgacgaggcgccataccgaatgggcgaatccatgcgcgcggaaggacaaagtagagcccacgatgacaggacaaagccacgttgtatccactgagccccgaggcaaaaccatgtgacccgccacacattatcgcagatacgtcaaccatgaacccgccacaggaacgggagtgacgggtgacgccataccgaaggcactactttgcacgaccagatgagggggtctgccacgacaatcgaaggactttgtcttcctctactttctctctctctctaagagagacaacaatgtaaggcctgccccttgagatataaaagggaaggcccctcttcctctcacacacaag

SEQ ID NO: 104351 - DNA, 461 bp, Zea Mays
gccatcctcctcttcttcggggtcgctgtcgcagtagttgataattttggtaactctaccactactagagggctcagtagctttggctgttcttctgttgttttctttgtttttggcttttctatcgtatcagcactagcttcggttggcacgacagggacaacctcggcactttcaataaactttggcactttagtcgtcccaataggcttcggcctgcgagtcatgatcttgactctttttggcttcggcgcgctggaagacgtcaaggtggcaattttccttttccctccttgctttcgaacagggaaataataatctgtatacacaaacccgatcacatcaaaaactctattcagtctcctttttccttgagcaccgaagacaacgatcatggcctcatcctctgccttcgtgtaggctcctagcaactcatcactggttgcctcaatagcatctaa

SEQ ID NO: 104352 - DNA, 375 bp, Zea Mays
cctaatgcaatatgtttttatatctctactaaatcaccatggatattagagatggatgaagaaaaggttgatgtcggcactattgttaatccatcatttgaggatatggcgggtagtggttgttcagctcaaattctaatcaaatgcagtgacacacacgaattgggtaagagctgttatcaataactacattggagtaatttcaacaatatttttttgtttgacacctaattattctcttgtgcaccatagataataatgatggggagaatattaaggacattgttggtaatgttgtagaacaatcgcttgatgttgtggcagtaggcagtgacccagttcatgtgtcagctaaagccgatgttggagaacaac

SEQ ID NO: 104353 - DNA, 297 bp, Zea Mays
gctttttctaatagccacctcctaactaaacaagcctgaaaagtttgattgatgaaccgtttgggcatcgcatcgtaccgatggttggacgcggcgtccctttctccgctgggccaacaccatttgcgacaagcactatacacagttatactgattgacgctagtgtgatagtattgtacaagctagcttgaaggatggatcgatatcgatgggtcggaccgttcgtagctaggatgtagctttcggtgcatgcatgcatgagagagaattaatgcctaatcatgtaaagtcagtag

SEQ ID NO: 104354 - DNA, 614 bp, Zea Mays
atttgatacaagtaatttttgtatacacttctcacagatcagccactatgcctcacaattaacatataaacttgtggaatctaactatttaacatatattctctgaaaattatagcaggaacaccctttttcttggacgaactatcttgtgtggttccaaaatataaattaggggcacatgggatgaggttctagcagcatcgctaattaaactaaattttgtagtatattttgatctcaaccacaaccacaatggtctgaattcccatttgatacaagtaacttttgtatacacttctcacatatcagccactatgcctcacaattaacatataaacttgtggaatctaactaattaacatatattctctgaagattatagcaggaacacccttttgcttggatgaactgccttgtggttccaaaatataaattaggggcacatgggatgaggttctagcagcatcactaattaaactaaatattgtagtatattttgatctcaaccacaactacaatggtcgtaattcccatttgatacaagtaatttttgtatacacttctcatagatcagccactatgcctcacaattaacatataaacttgtggaatct

SEQ ID NO: 104355 - DNA, 696 bp, Zea Mays
gtgccccgaaacccgggtgtgacactttcacagatgggtcgcgacgatctcctgtcgacttcactactgcaacgaagttcctatatgagctgatgagatgtacaatgctacccaagatgggatacagagaggccaccactcatattcagctatggctacttggtgccttggtctcacattcagagttcgacgtggttgacttccttatttgtgagatcgaggacacagtattggatggtctatgtgcccgccttcagttgccatatgctcattacctctgtcacatctttgcgcagctgatcaggactcctcagttctagggcaccctcgaggcctcttgccttcagttcggtttctatcgccaatcccctaaggacccagtaccagtgccagatccagtgtcagatatccgtgctgaggacgcgatcttcagacaattcgatacctagggtgccgttgctgactcttcttcagatgatgatgagggcctggggatcccgccactgcctcctgtgccacctcactcacatgatcacgaggcgagtagttctagtgttgctcctactaccccaccagctattgagcctgctttggccgctatccttcagtcacttacgcagcagtaggctcatctgtcatcagagtaggctcgacaggcaaccatctagcagcagatgtccgaacggatgctatcca

SEQ ID NO: 104356 - DNA, 813 bp, Zea Mays
gcacacccaagagctaatggtcaggtggaaagggctaatggtatgatactggaagcactcaggaagaaagtattcgacaagaatgaaaagttcgcaggaaagtggatcagagagttaccttatgtggtttggagcttaagaacttaacccagtcgagctctgcatggaaacacccccttcttcatggtctatggttcggaggcagtgctacctaccgacctcaggtttgggacaccaaggctggtcttcgaaagcatagctgaagcagaagctaccaggctagaggatattgatgtgctggaggaagagcgattgaacacagtaattcagtcaaccaaataccagcagaccttgatgtgctatcatgataaggctatacgacatcgatcctttgtagtgggagacttggtcctttgctgaattctaacaggggaaggacgacacaagttgtcaccactatgagaagggccattcattatatcggaggtcactcggccaggatcatatcggcttactcaaatggatggtacggaagtggggaattcatggaacatagagcatcttagaaagttttacccttaccaaggcctcgaaagctatcagagcgacattgtactctataatggaagaatatatcatcaataaagttttcattttcaagggcattcaaactgttaactatcacttgactttgattcgattggacctggaatcaacacgcttactcgacctagggtgaccactataccctactaacagagcaatcggcttaagtcagcgacgacttaagacggtgcaacatgctcgcgctta

SEQ ID NO: 104357 - DNA, 353 bp, Zea Mays
caacaacagttactgcgtgctcaacaacgccagaagcatcaagctgactgacatcgcactgaacactcgtttgatgttggtgatctagtatacctgaaactacaaccttacatccagtcatctttggttaaaggagccaaccacaagcttgcttttaaatattttggcccatatccagtgctggctaaaattggctcggttgcgtatcatctgcagctaccagagaactctgctcttcaccttgtgtttcacgtctctatgttgaagaaggcgattggtccttaagccaaggtcagtgcaactttatctttgttgtctaattctctacagtggtcggaaaaagttttgcaacg

SEQ ID NO: 104358 - DNA, 473 bp, Zea Mays
cttgatctgatacgatcttctttggtactccatgcagacaaacaattcttgacatgcataactctgctaactgggctccagagtaagttgtcttcacaggtataaagtgtgccactttagtcaacctatccactataacccatatggaatcatagccatctcgagtacggggtagtccaactatgaaatccatactgatttcttcatatttccattccggtaccttgagaggttgtagcaatcttgatggtctttgatgttcgctttaacttgttaacacacgtcacatagtgcaacatgagtagccacatctcttttcaaaccgtaccaccaatacttttcctttaggtcccggtacatcttagtacttccagggtgaatagaataagccgaatcatgggcttcccttaaaataagttggcgtaggtgctcgatttctggtacacagattctctttttaaaccatattgtgc

SEQ ID NO: 104359 - DNA, 744 bp, Zea Mays
cctctacgctactaatggcgtccgctcctattgatgcctgctgctgcccctccacctaggggtcgcaggtggccaccaacgggggagttagcacttccgcggtctccattgatagtgcaccgttgctagtggggctcgaaggcaccaccatctggaggcgctggctgctcctctacttgggggcaggcgtggctaggagcctgcttctcacatctcctactattgctaccattgctgtagtggtagggctagagaacttggttcgcgaagggggtatgtacttgagtagaacaccaaccaaaatcaaagaagcaataacattaagaaggtgacaaccttacatgcgggttgacatgatgaaccaccaccgccctagtagtggggggcagtcctcctcttgggctgttgtctgtgtttggtaccgatggcgcagtacgtatgggaaataccacacattgcttttggaaggacggttatgtagatcgtagctcgatggttcatgcagggcacgacagaacacaacgattttatttttttgggccgcctagatgcataataccctacgttctgtgagtttctggtggttgtattgctatgagctcgaggattacagatggttgccgaatgtcgaagatgaaagcaatctaagtctagcagggtctaatggagtctaacgtttttgtaggggtacctcttcagccttatatggccgactgaagagataaccttgtacaaatcagagca

SEQ ID NO: 104360 - DNA, 795 bp, Zea Mays
gctgttcttccgaatcagagggatttcatcctcttcttcatcatcttcatcaacaacacggacagtacacccattgggatccacagcagtcaggtcacacccattggggtcagcttcagcaaattcagacactagcacttcctcagcagcaggaacagaaggaccagcatcctgatccaagctagaaactcgacgaagacgtctcttcttctttttcttcccctcagcaggagaagagggctgattgtctcggcgagaacgcttcgagcgaacactgtcaaactctgagcgtccaaagctttgccggcctcagggatgggcgccaccaccagtgtttcagcaggagcggcatcagaagaatcctcagctaacatatccagcatagcacttatctctgcgtcacttggattcaaaggcacctcaaaatgaacctgcctctcgtcgtcaggaatttcttcgagtgaggcaaccaaagcactaatttcttcgggagagggttgcactctaaggcccaaaccgctatcaccagcaggaggatttgacacgaaattggtaaaggccttggaaggaggcagattctaggccgagtatgcaacaggagcaccgatgttcgacaccttgtctctgtgtatcatctcgagccggctcaccaagtccacagcaggaattcttctattggttacccgggttgaatcagccagacctcgatacagataggccggatatgctctgtctttcagcggctgaatgttcttgaaaacaaagtcagcgaccacagcttctgcagtcagaccc

SEQ ID NO: 104361 - DNA, 541 bp, Zea Mays
cgcaggtctcgcacgccatcaaggcgcttcagctcctcgcgctcgcctccgtctcttcattctcctggcccccgcctctgtactgccccatcctcctcgccgtcggccagtatctcaacttcaggtgagtgaccgattcgtccttgtctgtcccactttccagttagcgaggcactctacatcatccgtcctgcgttaagcaatattattagctgcaggattttataatctctacagcttgcaactgttgttgcaaatacacatttgattgagaatctcttgtattgttgtctgcctgactgaattacgaattgtaaggagtcccttgaatgaattgagctaccggctatctgaatgatagatggccaaatatatatctaagctcgcctatacctaaagaaaaaaaatgcataccaagcatgacgtctgttgttcatcttaggtgaatcaaactaagtgtattctgttcaatggttcttagcggtaggaatcggacaattatctttttctcccttctaacactcatgggtttagggcttta

SEQ ID NO: 104362 - DNA, 530 bp, Zea Mays
gctgccaagccaaaaaaaatgtatgcagagatgtatagtccaactcattttaccattgcccatggtttacccaattactcatactggtctgaaattgggtttcaagttatgcaacatttttaggtattataattttaagagagaacttataacaacagtcaaatatttgttgtgtaagctgccaacggggcaaacttttcttctcatattatacaccaaattgttctatatagcattatttcgatctcttctttattcagcaaaaagagaagctttggaatagaacagacaaggccaagaattcattttatctggtaaaaatcaccatataactagcttttgatgaagcaaatgatgataactacttggcaagaacgaaacaagactggtatccgcctaggatccgtcttcaacaacagaaagtgttgctctcgtatgaaggaatcatcctgtctccacaagatattcatagttctatcacaaattaccatcaccaatagcttagtggttacgaattatggatcttccgg

SEQ ID NO: 104363 - DNA, 466 bp, Zea Mays
ggccctttaggtgtgattactatcattggttttctcgtatgttgcagtggtatttcatttgtattggcatatcgagcagacataaatgaatgtgtagcaccagaatcaaataatattgttgcaggaattgcattaacgtaaaacataccaagtgtgatgtcagcaccatcaggagtaacatctacattgacttgattaaccctggcaatagagtatcccttgccatgagtctgttgcttattctgagctggtgtaccagaattccccaccggacaagcattagcaaagtgcccaacctaactgcacttgaagcatgtagggtcagtcttctgtcctgtaggcctcaccggggtgccagtggggacagcctgatgagtgggaggtgtctgtggagacccctgtggagtgtactgagctgggcgtggtcctcctcctggacaagtcggtgtaccctgtggcggaacgt

SEQ ID NO: 104364 - DNA, 382 bp, Zea Mays
gagagatgtggctgcacatgtggctatgtgtgatgtgtgtcaaagagtcaaagctgaacaccaaagaccagctggactattgcacccgttaaagatactcgaatggaagtgggaagagattggtatggacttcattgtcgggttgcctcactccccgaaagggtatgattccatatgggtgtttgtggatagactaactaaagtagctcacttcattccggtcaagactacttataaaggatctcagttggcagtgctatacatggctcggattgtgtgtttacacggtgtgccaaagaagatcgtttctgatagaggctcacagtttacctccagattttggaaaagctttcatgagaatatggatacaaagttgaggttc

SEQ ID NO: 104365 - DNA, 392 bp, Zea Mays
gtgaccacaagcccacagcctttgctgcgaccgagacccggctcgattcgggccgtcaagagtttctagattcagagacagcaacaagtgcaggaaactgtactgcccgcgaagtgccaacgaagcacgagcccgtacttaccgtggacgccaagaacacggagacggaccacgagattgacctgaccaaactagtagccacgcgtacggtacgtggtactaacagtccccaactgctgctcaagacgaagaaggcctgacgggcacgcaagcactccggtccgagctcagagactctgctttgttttgaatcgtgcctgaggactggcggtagcgcccgagacacatggctcaactcaactctggccaaaggtgaaacgctgtctccggcg

SEQ ID NO: 104366 - DNA, 387 bp, Zea Mays
attttttaagctcttctttttcagcatctgttaattcttgtccaagtaaatcctgaaatttaaaatctccttcttccaaaacgtcttcaacttgctttttctccttttcagtagctgcgcttgccgcgactgcagcagcttcttcttcagccattttcaggagtatattatcaataacttcaagtgtgtcttccaggttcggatcttctgtggccccggcttcggccccgacagtttcggctccgccggtttcagcttcgggagtttccactctggtggcttcggctgcggcacctttggcagtttcggcggtcttggcaacaacaatttttgataccgatgtcggtgatggtgtcccatggatcacatctgtcacttgaatgattc

SEQ ID NO: 104367 - DNA, 291 bp, Zea Mays
tctgcttctagaattgagacgtcaatacccagagatggcagaatgatgcaggaaactaatacactacatatgtagcaacaatcaacacaaaaaatagattctaaacagattcctctagtgtatttacctttttctcatgccccggatgagaatactggccaattgtgtggttgtcatgattcatcactcatgccgtcaaatgagctctcacattaccgaaagtcaaaagtcttgcacaagaaataatattactggtcataacctaatcagtaaagacaggagagtgctgac

SEQ ID NO: 104368 - DNA, 494 bp, Zea Mays
gcagcgcgaaggccatcccggcctgcagcacgaggcacccctccagcagcgcgcacaactcgaagacacgcgcgaaggccacttcggcctgcagcatgggtccccgcgaacagtcccgtcagccatccccgacgtggacgagccaacttcaaaggatctcattgacggagaccgagtcttcgccctacaggccctgaacaagtaccaagcccagaccaaagcatggcgcgaccactcagtcatcccgagggagttcagcgagggggacctcgtactcatccggacagctcggacggagtcaaagggcaagctggagcccagatgggagggcccctttatagtcaagacaaaagcttcccccagtgcttacagactcacaacgccaagcggcgaggacctggagcactcctggaacatcgacaacctccgtaaattttttgtttaactcttcagggctgatttcgcccttgtaattcgcaaaaacaatattgtat

SEQ ID NO: 104369 - DNA, 553 bp, Zea Mays
gcagaagcaggaggtggcgttttcacagataccaaaatagcatccaaaacactagccatcctcctcttcctcagagttgttgcagtagctgatagctttggcaacgctgtcaccagcacctttggttgctctgttgctttctctaattctggctcttcgaccgggtgtgcactagcttcaatcgacatcacaagagccctctctgtggctaggggatagtttctgccctttcaattaacttcggcacatcgaccatcccaatgggcttcggtctatgtgtcaagaccttgactttcttcgccttcggcgcaccagaagatgtcaaagcaatgactttcctttttctcccttgcttttggacgggaaagcagtaatctgggtaaacaaacccaataacatcgaacaccctattcaacctctttttcccacgagcgccgaaggcagctgtcatagctttgtcttctgccctcgagtacgctacaagtagttcatcactcattgcctctatagcttcaagccaatcatcattcagctcatcaaattagcttctata

SEQ ID NO: 104370 - DNA, 405 bp, Zea Mays
ctggaaggagagctagctgagaagatctaaaaaaagggtgccttgcagatttttgaagagctttgtataatctaattagcgaacacttgcagagtgtttggtttgataaataaagtagtcatcaacttcttactccccaatttaatgtttggtttgtggattagaatgggttgatctatcgttagtttattcctactaagctaataattagtagtaatatgatgattgagtttattccaccaaatttgtagaattgactcttaatataaacgcacttccatgtcctgatctcggatatgcatcccatatttaagataaatagctctgtggcatcacctatgagtatgacaaactgcgcatgaatacgatctgttagcaaccgaatccgcttttaaatcgcccgtt

SEQ ID NO: 104371 - DNA, 322 bp, Zea Mays
ctttgaagaagctcttaaaaactactacgtcatcttttcctggcttcggagtagtttcctctccaccaaagcgaaccggctctttcttttcttcattaaaatagcccaatttcaacatcttaggtaggtcaccttcggagatcgtggattttccaaaatccagatggctgggtttgctcggcaccgcgctgctataatcatcttcagaatcagtctcttcaacgtcagcttgctctgcttcagcggcagggacgtcctccggtgttaccagcccagagcgcttcattgcttccgaaatcggaacagtctcagtagcttcggt

SEQ ID NO: 104372 - DNA, 467 bp, Zea Mays
aatttttgcgcatagaactgagcttctcgtttttctttttcagtcagatttttacccgaagcatgacgtaagacatagtcgggagcttcggaagatgcttcgggaatagggatggtgttttcccagataaaatttcttctacaaactctttttccgtttcttttctcttggcaggctctgaaagcccagttttggtttccatttgacttttggcagcttcgacctcaatttgtgtctttggagcttcgacagctatcttcgtagtagagcttgaagattttattgtttctagcacatctaatacgttaaccattctctttctcttgggagttgttgtaaggtccttctgtgccttcagcattggctttggcacctcaactcttgctgaaggacttaaaacttctgatgactttgcctcttcagcccttggttcttccattttttccatctccggcatcgcagccggc

SEQ ID NO: 104373 - DNA, 448 bp, Zea Mays
tccgcctcaccccaaattagtggtgcacggtgaatcagtggccttttgcgaccgcatagccccaacctcacctcccaattccactagagcatgtcgcgtcaccgttttcccccttctcggtcactggcgagtgaaaatcctccgcgctctgtggccagccgctcctaggtctgctcttgctcttcttaatcgtgttttagcacccatacatgctcgtgatgctcatcggctcaactctctatgcttgcccgcacttaattaaccggaacgcatggtttggtattcggtattcatcgccaccgtggtcgggcgaagccaggaccttaatcacccaattaaagcttgttctagggttgtctcgggtccgtgatgcttgcccaataattaatttgggcagccgccgtcgatcttggtcggtccgagcaacaggatggtagatggtgagcgc

SEQ ID NO: 104374 - DNA, 381 bp, Zea Mays
gcacaagctacgtgtaagattagtaagtgaagatgcgaatgcatgtttgatgttgggttggagtatggtgtaaggagatagaaacgtcacaaaagatatttgtttcgacgtgtatctgcaaagaagcactagaagtgtggttataggacacacaacagggttattagcttcttcagattctctgatgttgaactagccatttattgatcttatatttgttgaacttgattttttatcatgagaaccatttatggtaggttgatcttgattttgcacactagatgagagaaccattctaactgtgtcatgttattgtattgtttctctctaagctttatatcactaattgccatgcatttcattgcttaatctaacttggca

SEQ ID NO: 104375 - DNA, 305 bp, Zea Mays
cacaaccttcggcaaagcatccaccttcgacatgccaccgaagaaggcaacagtgctaggggctgcccttcagccactggacacaaatcaggatgcactctccctttgagaggccaggagtcaaaagagaaaggcgaccgacccaactctttaggtggagcagcttgaccaggatattagggatttagaagcaatccatcaacaagtgcaaaggaaaaaggagaagatgcttcgtctggctgatcttcagaagaagtttgacgaagccgctgaggaaatgcgtcatcttactcaagatgaccagg

SEQ ID NO: 104376 - DNA, 405 bp, Zea Mays
ttgtggtcgaggtcgtggtcgcgggatgggagctcgactggcccatggtattgcagccttcttttccatgtgcaggaacatatcttccgatgtgcatgagctggtgaggcgtcagcgggagactgacgacaaccttcatcgtcaagcctcttccatgggtatgccatttgctccccgctcgcctgatgtgcctcttcattctcctccgccagaaatcaatgaatggcaccagtaggcctatggggtgcccttcatgacagctgaagatgatgaagaagaggaagaatattttgatgatcgtgagcagtttgccccgcctccccactagggggatctgggtcaatcttcttcatatcctccaccccaggatccatcgagtaactatcctccccagctcagcctggg

SEQ ID NO: 104377 - DNA, 411 bp, Zea Mays
ccggcccacagtgcaccgcgccagcatcacccgctaccccgaattgacacacgagccatggctaattgagtgcaatacaactgacaaaccgaggaattaacggtgtttctcatacctaattgcgcagcagaggttctccggccccggtggatagttggaggtcgagattccgcgacaacgacgaggaacttcagagagtcgcaacccaatttgtgtgtgtaggggtcttggtttgcttcctgtcgtactgaagactccaatccgcgacaaaccgaacccacacgatgtgagtgcggtgacggtgccgctcgcaagctctcaatctctctcttcctctcctcggatttctttctccatcgattttgcgttggcgctcggttccagctcagatgtgacgaaacggggaggccg

SEQ ID NO: 104378 - DNA, 498 bp, Zea Mays
cgccagcatacttcatgtatctgatgaattcagtcttcatgcctaaactggacaagtttgtggtggttttcatcgatgatatcttggtgtactcaaagaatgaagaggaacatgccagtcatttgcatgtagtactccaacgtctgcgagagcaccgtctttatgccaaactgtctaaatgtgatttttggctgaaagaaatcaaattcttgggtcacactatctctcaagctggcatagctgttgatccagataaggtgcaagaggtaatgaattggaagccgccgacaactgtccgtcaaattcggagttttctgggattggctggttattatcgaagattcattctagacttctctcgaattgcgaagcccatgactgaactgttgaagaagggagccaaatttgattggggtcagaagtgcgaagatgctttccacaccttgaggcagcatctgaccaccgcacccgtgttagcgcaacccgacaacagcaagc

SEQ ID NO: 104379 - DNA, 511 bp, Zea Mays
ggcaaggccaatgttgtggcagatgccttgagcagaaaggcccagtgcaattgtatgagcatggatacaaaagtcaccaccctatgcgatgagttgtgcaagctgaacctggaagttgtttcttcaggtgatttgagttatatctcggtagaacctacattgcaagagcaaatagtcagggcatgggttgaggataagggtgttcaggtggtcaaagacatgatcaagcaaaaggcagagaaatacaagtgcttccgttaggacagcaagggaattttatggtttggagaccgattggttgttcccaaggaccctgagctcagaaagaagatactggatgaagctcacctttccaaattctccatgcaccctagtagcaacaagatgtaccatgacctcagatctttatattggtggaccagaatgaagagagaaattgccaagtacatatctgagtgtgacacctgccagagaatcaaagccagtcatttgaaggcagcaggtcccttgc

SEQ ID NO: 104380 - DNA, 293 bp, Zea Mays
ttgactcggttcccctattatgacgacctgctccttccacacaacattgacgtgatgcacactgaaaagaatgttgccgaggcactgtgggcaacaattatggacattcctgataagtcaaaggataatgtgaaggcaggagtggatctggcagcgttatgtgatagaccaaaactagagatgaagctgccaagtggcggaaagacgtggagaaggcctaaggccgatttcgtcctaagcagagcctagaggaaggaagtactttagtggatcaagatgttgatgttccctga

SEQ ID NO: 104381 - DNA, 443 bp, Zea Mays
gctgagtgtttgagtatcattggtgtacacgggttacagatgagttgtgagtggtggagggtgagttctcctgtcgatctagtggttgcgtagttgctatgagaggattaatgagctatgaggtggtagtgggatgtgacgagataatcgtaggcgtaccccctcggccttatatagatgacaagagggttatccctttacaagtcgtgatgactatctaactctgtctgagtctatccttttaacgcgtcatgcattcctgcttatccagagtttggttgagcttcacccgagttatctctgagtatctaacacttcgggtatgcgcaacctccctgcgtgagacatcggtgctccttctacgcgtaactcaatcgtccgatctttgtctccctgggtcgagctcatccatcctggttgcggcccgagggcgcacctttcta

SEQ ID NO: 104382 - DNA, 487 bp, Zea Mays
agcgtgtggaagcctacgtagatgatgtggtaatcaaaacagaggactcggaaaacttcattgaggacttgcagctagttttcaacagtctacggcggtaccgatgaaagcttaatcccgaaaaatgtgttttcggggtaccagcaggaaagttactcggatttattgtcagccaccggggaattgaggctaatcctgataagatcgaagctatcatgaaaatggaagcaccacgatcacaaaagaaggttcagcgacttattggatgtatggcagctctgagcagattcataaccaggctgggagaaaaaggtttaccattttacaagctactcaagaaagtggataagtttcagtggactttggaagcacaggaagctctagatgcactgaagaaattcttgacgacaccaccagtactgaagccgcctcgacgagccacgtcaactcaaccagctgaagatctgctgctgtatatctcttgcac

SEQ ID NO: 104383 - DNA, 324 bp, Zea Mays
gtcggacggctacctgaaatctgccgcggtcgcgtcaccacggcggcgcggttccggcgatggacacgcttcagactccgaagtagcctgagaatgcaggaatctttttttggctcccggcggtgggtgcagtgcaggaattttcgctgttgtattctgataaacatttttgtgcattagaccattacaaacgaatgaaatgattatgtgaagactactactcaagatgtaagtaaacattaatggttatgtgtgtcgggcaacgaaaatggccggccggacggtccagtcctgaggataccacaggaaccaggatacccaaat

SEQ ID NO: 104384 - DNA, 415 bp, Zea Mays
ctccaaccactttccaggggataaattaccttgatgagcgaagacctcttgtgccacagctctaggcctcaccttggcctagcaatttcagagtgggtacttatcccaagtacaacgacaacaccgacccagtacagtacatcatgagctcccaagttgcagtcacatcatccggaggggacgacgccaccatgcccaaatctttcattatagcactcgaaaacccagccctcacatcatacaccaaattgccgccattatcaatcgactcatggaaaacccttcgcgacaaattcttgttaaattttcaagggtacaggccagacacagatgccctagcagaattatcactccacgggcaacaggagaaagaaacccttcaggagtactacaaaaaatttcttctcctaaagtc

SEQ ID NO: 104385 - DNA, 301 bp, Zea Mays
acacgcttgctagcgcagcaaccacgtttagtcacatagagcttatgctttagagttaaaacttgtaaaatctttttgcaactgtggaggctaacacacaatacaactatgtatactacaagcttgtagctgaagaatgattcaatccaatcctctgatgtatgctttatttttttatatagagatgggtcaatccgttcgaaggtgataaatggtcaaatggatggacgacctgctcatgtcatgctatcggactgaaatgatttatgtagagtagttatcgaattgaacatctggagca

SEQ ID NO: 104386 - DNA, 610 bp, Zea Mays
gaggcaagggcagtatccacaataacatcgaagactgcccagaaattcttctggcaaaacattgtttgccgattcggagtcccgtccgagctcacagttaacaacaacaaaacagtttgacagccagggcttcagggacttctgcttctccattggcaccaagcttgccttcgcctcagtatatcacccacaatctaacggcgtcgtggagcgcgccaatggcaaaattttcacggccatcaagaaaatgcttctcgacgacaagaagggtaaatgggccgacctgctatctgaagcagcttgggcgctgaacacgaccgagtgccgggcgactggattcactcctttccgcctgctatatggatcggaggccatgaccccgcaggaaataaaacatgggtcaccatggacaagcgcttcagccgtccccgacgtagatgatccaacctccaaggacctcatcgatggagaccgtgtcttcgtcctgcaggccctcaacaaataccaagctcaaacaaaggcatggcgcgaccacacagtcgtcccaagagaattcaacgaagaggacctcgtactcgtccggacaacttggacagagtcacggggcaag

SEQ ID NO: 104387 - DNA, 334 bp, Zea Mays
gaggtagtgaaaccacgattacaaggtcacagctgtattgatcagaagaaagtatgtggagcttgggaggccaaaaattaatatcaaggattagcaaaattcgagtgcagattaacgaagttcaataagtgtccaaagcacaagtcacaattgctggctaagacgtgtcctatcgaagcacaacaaggtaaaggtaacaaggaatggtggacaaaaacttaaataaccagcagaatggcagttctgaaaatagcgcagatttttcagcactagtagaaatcaaaggcgcgtttccaaaggagtaccagcaaaagagctcgaaatattctgaatt

SEQ ID NO: 104388 - DNA, 461 bp, Zea Mays
cttttgtggcccttttggaatctgatgctttaattaatgccatgtcaggccgcgtcagtcactttttggaacaccttttcagaaacctgtgcagtacttttttagcttttactgtttgaagaatctgctttttactgcgcagtcgcatcagaaatttaaattttttggtgttttccctctgaccgtttctggccctctgaccgcgctggtcagatgcggttgaaccggcccttggagggcggttgaaccggtcctgtggaccagctcaactgcctatttatatgtctctccccttctcttccctcactccaaccattctcgccttagtctctccgcagtgtttagagcctcctctctcactcaactcaaccggttcatagttcaaaaacctctccaatcatggtgcgtcatcgcaacccttccgtgattgagtttagcagcgactcggatgagattcaaga

SEQ ID NO: 104389 - DNA, 283 bp, Zea Mays
tccgatgagattttggcttttggctagtagtgtcgaaccctgcttttgcctcttattgagggctagccttttcttgcttggtcgtgttaagccgctgtccatttctttggggaccaagttttgcttactctaaatgacttgtctggcttttatctggcttatggttatttgagtaagtttctcttcttcttcctctttctgtttatacatgctcaaatggtggtgttgacaatgcactcatcaaggggaagattgcgaacacaaggttgacttgtcccttgtg

SEQ ID NO: 104390 - DNA, 460 bp, Zea Mays
cggcagaaagcttcggcattgggactcataccctggcttcggagagcccatatgtagacactaagtctaacgattgcattgggtgtcagctgatgaaagcatatctcaaaattttttaaaacttctccaatcatctcatgcaggggaagcgaagtctgccctgaagaagcttttaaagactacgatttcatcatcttttggctctggaatcacttcttccccgacaaaccggacaagcttgctctcggcctccccaaagtagcccaatttcttcatcataaccatgtcatttgccgtcacattagatttaccaaattcaatatgactgggtttcattggacttagaatagtgttgtcctcttcatcttcgttctcacttcctccttcggctacgatctgttcagcttcagcaacagaagtaccttcggcaacagccccctctggcacaacaagacccgat

SEQ ID NO: 104391 - DNA, 620 bp, Zea Mays
gcgagggtcaccaccctgtgcgatgagttgtgcaagctgaacctggaagttgttccttccggcgaattaagttatatctcggtggaacccacattgcaagagcagatagtcagggcacagattgaggataagggtgttcaaataattaaggaaatggtcaagcaaaaggcaaagaaatacaagtgtttccgtcaggacagcaagggaattctatggtttgaagatagattggttgttcccaaggaccctgagctcagaaagaagatactggatgaagctcacctttccaaattctccatgcaccctggtagtaacaaaatgtaccatgacctcagatctttatattggtggaccagaatgaagagagaaattgccaagtacatatccgagtgcgatacctgtcagagagttaaagctagtcatttgaaggcagcaggccccttgcaaccccttcccataccatcttggaaatgggaggatatttgcatggacttcatagtgggattacccaatacctccaagcaccatgattctatttgggttatcatggacagattgaccaagactgctcatttcttgccagtgcacaccacccacaagacagagaagtacgctgaaat

SEQ ID NO: 104392 - DNA, 340 bp, Zea Mays
aacttgtttaagttacttaacccaaaagccatatggaattaggagcaaaactggttcaaagaaggactgacaggtttggatttcagacttagtgttattatccaagtctgaatttcagtgtgtttggctcaaatttggagctctctactgtcctatccataaagttatagattgtggtcactatagcaaactcgtatatgactataggagaacaaactttattatgtgggatgcccctaaaaccatatgcaactggcacaaaaggtgatctaaaatgggtctcgcaggtttctaaattttcaggtttgtgaacagtagcttgtctgaatttcagtgtatt

SEQ ID NO: 104393 - DNA, 338 bp, Zea Mays
cttgcttccaaatctgatttacttgaattaaatgatgttgatgcaatctgctatgtgtttatatgcaaggatgctttgttctcacttcacaacataccatctactttgccttctactatcactaatcttttgcaggactatgttgatgtatttccaaaagaagtgccacctgggctgccaccgataagaagaattgaacatcagattgacctcatcccaggggcttccttgccaaaccgagcgccatacaggatcaacccagaagaaaccaaggagattcagcgacaagtacaagaattgctcgataaaggttatgtgcgtgagtcccttagtccttg

SEQ ID NO: 104394 - DNA, 481 bp, Zea Mays
gttaattaggtcaaagggcaggggctttttaacatattctctcggttgaaagggtacggagctagctgggtcgttggatcatcaatagacggccacaattagatgctagatattatgaaccaatatcccatgccgaccacacgatcacagatggacgactcatgtgacccccacgccaacacgatcatccaatgtccgatcggatcagatggataggattcaatcacgtgaagggatatctctggatctcattcgaaccgtccgctatacgatcgacgctcccaattttaaaatgtcgagatctaatgtttacccctcaatcgccatcggacggccccatacgactcggcaagggggtggtacaccagccgtaaatctcgtccgctcgatcaaatccaacggctgcccagctatcttctccatccgacgtcgagcccgctgacgcgaccacgacgtactacggcattctcgccgatgagcg

SEQ ID NO: 104395 - DNA, 569 bp, Zea Mays
ttcacagactccataacagtatctaacacactagccattctccttttccttggagtcgctgtggggatacttgatggctttggcagttcggttgcgcacggtggactcagtgccttcaactgatctgacgtcttttgtagttttggctcttcagtcggatttgccctagcttcgactggcatagagcgacctggttctgtgacaggagcaaccccttcatttagtttcagcatgtcggccgtctcaatgcgcttgggtcggcgcgtcaaaaaattaacctttttcgacctcaacacactagaagttgtcgaggtagcagctttcctcttttcccttgctttcgcataggatagcagtagtgtgggtacacaaacccgataacatcaaacaccctattcaaactctttttgcccctagcgccgaaggcagttgtcatggcttcatcttcggccttcgagtatgctccaagcagctcatcgctagtggcctctataacatctagccagtcatcattcggttcatcaaaggtatacttcagatataccaaaccattttggctggagccagcg

SEQ ID NO: 104396 - DNA, 581 bp, Zea Mays
gtcgggtgcttctcaccctttataagtctcaggcagtcattcgcttgctggtcaccctcgacctccctttctctttggtctcttccttgagcacaccttcggccgggtcggttgatggatcttgggtcgctgggatgtcgtgctccgtgagccatgagctgaggtaggttcctcctctgagttccattgacccccttcttaggcttgatattttcctcccttctcctttcattgcaggtggtcatcgccgatctgaaggttgtgtcgccacccgtcgggccaccacgaccgagctccttatctcctctccctctccctcaggcgtctctagggagtttcgatgcctcccacgtggcgcaagaggccacgaagtccgaaaccgagttacttcgcacacatctttccaaagccgattgttgtgtcattagtaatgcaaatgcccttcgaccttttcctggcttccttgcctcttttcttaccttctttatctctcttggcagccttggggctgagatagagaacttcaccatcctctgggccagcttctagactacatcggggctcaagacaccttcttaatc

SEQ ID NO: 104397 - DNA, 940 bp, Zea Mays
ctaggaaatgtcatcaatgccttaacgactggtgaggagaaaaggatccttttttggaaggagttaactcaataaaaagttagcctgccatgtgtttgtgattagcttagcctgtcatattcttcaacctgcaggtaaacagaatcatgtgcctttccgtgactcaaaacttacgcgcattcttcaagattcgttggttagtcaaaagtttctctagcacgcccccccccccccccccccccaagagaggcagagcttgtttttggagcgaagatactggagggggttagagtagctaaaattctcttatattcaattttgaataacagggagattttagcacccccaattccctccgatattcttgctttcctaaacaagccctaaggatgaacaatatcatgcggctttgtctaaacgctacttgttgcctgcagggtggcaactcaagagcggcattgctgtgttgctgttctccgagcccatcgaatgcagcagagagtctgtccacgcttcgctttggaaccaggcatgccagtcaaccagtttcacacctgtaccgcattgttgtaattcattgctctctatggtaaacaccctttcaggacaaagctcataaaggctcctccgaaattgattcctgagtcagtggataacaccaagaagcccgccgtcgagactcatgatcaagatgatctgcgggacaggatactgagcaaggtctgtagcaatgaacccgaggtgatcggttatattttagccttcatttctcgttgccagcatcttactctgaaccaaacttgtgttcagctaaggttgagcctgaaggaggaggatgtggatttgttagaagaactgttcgtgcaggaaggcatcatcttcgatgccagttccgtcgtggacatcgactcggtgttccgggacactgcaagcgaggaga

SEQ ID NO: 104398 - DNA, 562 bp, Zea Mays
atcagcacaacaagtacattttaataactaagagtgcaaagtcgtccgagagacgaccactttgagcaaaagtcgccaaaggtgcagccggactagcccaacaagtgcatcaacccacctaagggtgaaaggtcgtccgagagacacctatctctattcgaacacgaagtcacctacgggtacagtcggatcagaaaatataacacatccttaacaatctaagagcgcaaagcattcagcatgcggacaacgaagggcacaacttagttcaaaaatggaaaaacaatgagcacgaagctaccattcacatacaaggtattccgttctgcatgcaagttcacatagtcgtcctttggcgaagggggtgagggaaacgttgccacttgaattcaccaaagaatggtcatgtcaacacgggcactttacatgggctctgccttcgggattaggccagcctcccagaaatgaaacaacatcagtctaagctcctcgccatcaaatagagccagcaaatctccctcttcgaaacgctgcccaattgtcggtgcaaggattatccggc

SEQ ID NO: 104399 - DNA, 462 bp, Zea Mays
aaaagagtgtgggccggaatagtattgtttggtggattacaagggcacgtgggccctgagggtttaaacaaaaaatttgcggagattgtcaatattccaggaatgctctaggtcttcgtcggatggcgttgtcagcctgtatgcactggggacgccttagatttgacgatgaatgggtcctcccacttcggctccagtttgccctatgactctgtccgggtggtccggacgagtacgaggtctccttcgttgaactatctttggacgaccgtgtggtcgcgccaggccttggtttgagcttggtatttgttgagggcctacagggcgaagacgcggtctccatcaatgagatctttggacgttggtttgtctacgtcggggactgctgatgtgtttgttcggggcgacccatgctttatctcctgcagcgtcatggcctccaatccatatagtagatgaaaa

SEQ ID NO: 104400 - DNA, 654 bp, Zea Mays
cttggtaattctgaagttcttctggaacattttctgcaacaatccacacagtgtgcaacttggatttaggtttagcctgtgagctccaagaatacacagtaattttcgccccagacattttcattttcaactcaggaaaattaatcatctcatcaagtctttcttgagaggggaactgcatcaagaaaccacagtgacacttggtagctttccaagttctaccccaagggaaatggaaaccaaaatccttttcaagatcttcagcagaaatcaaaccctctaccaccttcaccagcccgatgaaacttcttttaggttttttagacaggggtttagcaaaatgagaggaataaaaccctaaaccatccaccgccataccaacaatgggcatgcatggtttgttttgtttgggaagaacacatctagcagtcatatgtgtttctttacgacaaatatcacaccacaaagacttgaagcaatctctggcatggtgcccctccacgccacattttttacagaaaaaacggcgaacaatttcattctcttttttcaaaacgggcggggggacttgagaatacctgattgaccgccatcacccgatgaagatgtcatgatatcttccttgttatctgatttacccagagccggtttcaa

SEQ ID NO: 104401 - DNA, 431 bp, Zea Mays
cccagattggtgacaagggtgttcaagtcatcaaggaaatgctcgagcagaaggtagataagtacaaatgcttccgtcaggacagcaagggactactatggtttgaagaccgattggttgttcctaagaatcccgaactcaaaaagaaaatattggatgaagctcacctttccaattctccatgcaccccgacagtaacaagatgtatcatgatctcagatctttgtactggtggaccaggatgaagagggaaattgccaagtatatatctgaatgcgacacttgccaaagggtcaaggccagtcatttgaaggtagcaggtaccttacagccccttcccataccatcatggaaatgggaggatctcaacatggattttattgtgggtttacccaacacctcccgacaccacgattctatttgggtcatca

SEQ ID NO: 104402 - DNA, 451 bp, Zea Mays
aacgatcacaaagttgatgaaccaaaatagccagataagaaaaacagatttcttcattggattcgtctgtcaactggcctccaaccatgagtcttgctgtagatctcacacgccatctttttgattttgagacttccgagctccactagttttcttgccttctttttttgacgaatagcccaagtatcaagctaataacaacaagagaaaatcacattagtcggatcatcaattcggtcagtcccaaagcaacaattattgcgacaacgccagatcgcccaaatgacagctccacagccgaacagtaccagattttttcagtcttgttaaaactgttaatccaagtaccaaacaaatcatccacattatcaggaatagaaattagtccaagagctgattagactattctccaagtaaatctagcaaccggacactgaaaaaacaaatggtc

SEQ ID NO: 104403 - DNA, 364 bp, Zea Mays
ccgacaatcttgttgggcccgtgctcgcgaaccagattgaggggctttcaatcggtcttgtactggaggtgtcaacctgtcaaaaatagatgatagaggtgccccccaggcggggtattgtggtatcccgaatggatatggtggcgcgccccacatctgattcggaatatatggttgcagtggtatgtatgtataatgacatgacatgggtgtatgtggaggtggaagtgtccacgtaggtgcgttaggccttaattgaacattatgacctcctgtcctttccgattggcgaggtggtccaatcggcctaacctgctgccactcctgggtgggtaagcgaggtcgctttggtggccgatcactg

SEQ ID NO: 104404 - DNA, 426 bp, Zea Mays
gagaactatgggcttgttactttccgcgaagtggctttgctttttgatgaggagtcttcaatggaatccagcaaacagagtgtacctttcgttactcagactctttgttcacaactttccaccatctagctttcacttgttataaatgacaagttgctaccatatttgggaatcagataatattatttctgtaataaaaatacaggattgcattgaattcatagttagattggtcatttcaggcgatcaaataccagatgtagagaagtccttgctttaaccacctcaaatttctttgttttagattgcaattactgtagcacatgagctggctcatcagtggtttggcaatcttgtaaccatggagtggtggacccacttgtggctaaatgaaggttttgctacatgggtaatcaattttagaac

SEQ ID NO: 104405 - DNA, 456 bp, Zea Mays
attggtgtcaactttaggttctttgtcaactttttcttcttgtccttttcaacagatctctacgctttccttttcaacacacttacaaccctttttcttttcaacccctcggcttcttcgtcaagtctttaatagtcagggtactccaagcccagggcatccgtcactcgatttagtctccatttctctcgcgtgtcgaagacaacggtcattagctagtcctctttcttagtataattcccaagaatctcattgaacattgtctctattaatttcaaccatttggcacatggcttgccgaagcttttctgaaatttgaagcgctagggaagtcgtacaagttcatatttattcccttcttattttttcttcgtcatcccccacccaccagacgtcgaaaaagttttgttggccaggtattcttgcaccaaatcccgagtactaatatgctccgcc

SEQ ID NO: 104406 - DNA, 390 bp, Zea Mays
caaacccatttggctatttcatccttgttaatcttaagaggaaaaaaagagatgcacgacttctcagatcacaacattacttcttactgaagagtcaatgtatcaaagagttttacaaactgcatttcactcctttagcagactacgcgaaacctgagggctatcacggtaaacaatagaaaagactaagataaacttaaccggcaaccatataacagcagacactgtacgaagcatttagacaaatgcccagactgcctagatagaggcaagcaaaatttagactgagctccacattaagggaactagtgccacttggctactgcagtgtcaacatcacatgggttttgggctccctctttcgaaaagttagaaatgctgtacttacat

SEQ ID NO: 104407 - DNA, 290 bp, Zea Mays
ctgacaacgggatggctataggaactactgggctggtgtcgagtctactttacgccatacgggacgaattaccatgtgcttttcacctgatcattgtttcaacaactatggctccgacaacacatccacaagataggctcgggtacacgtccgagaccccgatcctggcattaactctctacttggtcaagatgcgggatataggggtcgaacgtccttccctgatcagagacaagcacaaggacagaagccattctgatggccatgctgctataggggctcgggctcac

SEQ ID NO: 104408 - DNA, 593 bp, Zea Mays
gcccggacgatccaccgaccatagatcatacccactttctaaacacacttttgaaaaataactctcgaaatcataagcgttgttagtcctcatgcaaatgcaactattagatgctctatgaggtactaagttttacacagaccaaagttattgaccccctctttatagtacgactatctagcctactaatccgatcaatttattctctaaacacctggtgaccggcaaaacaaaacctatgttatacctttgccatcacttgatccacaaccaatgttttaagtctccaaaacatacttccctctgtggtccaacctgcatttctatttctctcagaattgttagtccataaatggttgtcattaattaccaaaacgtcactaaagggcctagatgattcacaatctccccctttttggtaattgatgacaacactataaatttcatacagaggttgtttcggtttttcaaatcttcctcacacactaggtataagaaggatttgaggagtgagtttcgagtgactcatcttgatttgaagttccatttgaaggatagataagttaggacaaaactcaggatgtagaaatagc

SEQ ID NO: 104409 - DNA, 383 bp, Zea Mays
aaaaacacataaacccatgcatcatgctggacttctttttgtttatgcatcaaacacaaatttgtaattaagaaaaatctagctttgaattcaaattagagcaccaaataaaatgggagaaaagagttaaagaatggaggatagataataattataacaataaataagtaataattatttcaaaaaggatgtagtatcattcatagtagaattttatttgatacttgaaagtatgaagttcaaaccagcaatttaaattcatttgaaccttttgaatttggaaaaaccagaattaaaaaagaaaaaggaaaagagtgtacgaagtcggatttgcatttgggcccatgaccctccctcgccagccacttgtccgcgggagttcg

SEQ ID NO: 104410 - DNA, 552 bp, Zea Mays
attaaattgaaaaagaagtcatccactgctgcagccttgtcccgatgactagtaagaatagcatccccatcaaacaacgtagcaataaaattctttctcttacggtgcttgacatgcaagtggaaaaattttgtgttggcatcaccatcctcaagccataaaatccttgatctcatcctagccatagtacgcttcaggtaggataaaagtaaagaatgtttcttaagcttgcttttcagccaaaattcatcaggagtcaacaccctttcatcttgtgcaatttctagcttatgtgatatttcctttgccaatgtcagttgagatctaatgtgaccaacttgcctatcactccaagcttgcaacctcctggttgccttcttaagtttatggtgaagagtaagaatagggcagttcgcggttccaacagattcccaagcatcgtgcacagtatcatgaaatccctccaatttaggccaaaaagcctcaaaatgaaaatgtcgactccctgatttattatctcgaagacccagaattaaggggcggtgatcagag

SEQ ID NO: 104411 - DNA, 371 bp, Zea Mays
gttgatggcatctatgacttgctttgagcttctttgcatgttgtttcatgtttgatgtcaggttgtgtagctttcttagacacttagtccaaggtagaagttcttgtgttaattaagaccaataatagacccatgttttgaatggtggtgctatatggggtaccgtgggtgttttgcttgaagtggtcgaattcgaggacgaattctttttaaggggggtagagtgtaatatcccaaaaaactgttgaccaaaagttgattttcggtgcgtggatgagggaaagggttgtgggccgttggatgcaatgtcagaagtcatctgaggcgtcgtttctttctcccacaaaaccctaggtggccaccccttttcc

SEQ ID NO: 104412 - DNA, 613 bp, Zea Mays
aaattagccgccaccgctcatgaatcctataaattgagcatgccatcagctccgctaggtagttgtgcatccaatgaaccagctctcacctccaatcatcccctacagctccccaatttgagacttcccccaaatcggtcgtgaacatcgtgctgtgtgagctcgccgtggccagcgcgctacaggtccgttcatgccctctgttccctcgttttagtactctggtgtgctcttgatactccctgacccatccaattgagttagaacccgtaggatcaccgggaacatctcgatttgttcgttgctcgcgctgtcaccgtgggcagtgtgattaagagctcgaaccttgcaattaagtgaggggaaatggtcggttagggttgaatttggtgtcaagcaaaggggaggattagtcgttgcctattctggccagtacgagctcgccgaagctcggcctgtcgccgttcatcgtcggggatcgcgggttgtaaagaatagaaaggggaggggtctattcgtaattgtcagtgacacaagaaacagtactgcagactcttcaaaggtttttcaaatcaccagggtcccggtgaaaaactggcagcgtggacgcgcg

SEQ ID NO: 104413 - DNA, 434 bp, Zea Mays
cccaaatagtactaagagttcattaccgaggacagtgcttgaggaagcgtatgttttaagatagcttcaatcgtggcatcctgtacatgttgcggtcctacatagtttataagaacgttttctggaatggtcttcccaggccgaaatccaggaacctgacaagaagaaacagcacggacatcagaacagactgtagaatatacagcctcgcatggtaagtgacaactgacagacagcacccttctttgaagaaacatcgtataggcatatctctgccccaactttggaactctgatttctttaaatgatgtctagtgtagctacttacggctacgataaattgatactgacttctgtgcgagtaggcaaaatcaggaattgcaagcacggctgactgtctccaatttcaaagcgctatattatacacgaaaagg

SEQ ID NO: 104414 - DNA, 689 bp, Zea Mays
actgcctgatgaagacatcccaagtcatgactcctgctgaggaggagtgcgctgcctgcacgcctctccaccaaatttgagcctctcccttcagcagctgtgtgccaaagcgaacacgatcaccatacacaatctcaaagacattcatcttatcctccatgtaagttagccaatctgccgccttgaccggagtaccactgccatcaaaagcatccagcttcatgcccatccactgcatcagagaaagaccactgactggaagaggcacctcagcttcgccacctggagcagcacccgcagggacagtgcccgcgggcactcctcctccaccagcaccctgagcagcacccgcaggggtaactggaatagcttgcctcagaatggccaactcctgctgcatggcctgcatcgcggctaacattgccgtcggactcatcgagtccccactaggaacttgcggactaccctgagccctacgaggcgacatagctgctgccacaggggtgagaataataaataaataagattggcatagcatcacttcagataatgtcaaactagcacagacaataacataacatatcaatagtaaagcagaaaacccatcctacatgtgtagtgtgtcaatttattgttattccacttgctaggacctacagcctattcctttcatacgaactgtaacaccc

SEQ ID NO: 104415 - DNA, 928 bp, Zea Mays
ctgtgttatagattactccaactctgaatgactccatcggagaatcctcctctcacatttgtcaattgtaaaatccttctcacacctcaactgccactatcctgtcattcctgtggctcacacccagcggatccaactcctctaacttgccaccattacgtcactgtcatctcaatttacagtctatcatgctcgctgatgcttgccagtatcatgcagcaccataccatttcccacaccaggtttgtcccattttccgagagaatctgatatttgccattataatgaaacaggttcgcaaaattgccagcagacccacgtttcagactcagatggacttacaattcatagacacagtggcaaatataacaatgaggcaacgttttgagtggtaaaataccaattatttcccccttttccccattctcaatctatagtcagagaatctgccctggtgaaaccaaacccaaatatataagatactcatgcaagttcacaaaacccaagtgcacacacaaacatgaatacaccaatcaccctacacctacatcatcatgctgatcacctctaaaagtccccaccaattccaagccactactgccaagtgcaactgcaaagtttccatgtttacattagttctcttgactgacgggtccacggaatttaaagaaaaatatgttaaattatcaggaatacacggctcagatacatgagttttctccgtctactgttgtctaaacatattattatacagctgcttgacaatttaaaccctagaaatgaggcaatcacgagcatttagaagcatgactgatccattgcagctctttgtttttctgtttgtttatcccatttgcaatatttagctaacaaagggcaaagtcacaacagctaaaatggccccaacaatcagtaaaaaattgctgat

SEQ ID NO: 104416 - DNA, 647 bp, Zea Mays
gctttggttgctttgcttggagaaattcctgatgatgaatggcaggttcactttgaggtgcctttggatcccagtgatgcagagataagtgctatgcttgatatgttagccgaggattcttctgataccacccctgctggaacattggcagtggcgcctctcctagaagctagtaaagccttggatattcagaggcctgccagtgttcgctcgaaacgcccttgccgggccagtcagcctgcttctcctgctgatgggcagaaaaagaagaaaagacgtcttcgccgagtgtctagcttggatcgggatgctggtccttcggttcctgctgctgaggaagtgcccgtgcctgcatttactgaggctgatcccaatgggtgtgaccaatctagcgctgaccccaatgggtgtattgtccgtgttgttgatgaaaatgaggaggaagaagaagatgaaatccctctgattcggaagaacagtcgacgctacatagccagtggggaaagtagtggagttccttctcctgctttgtctgccctcgttggtctgcaagaattatctctggtggactttgatcaaactcttgaagacatggttctagaagatctgttatcagagccggcagatggtggcacgatggatgtttg

SEQ ID NO: 104417 - DNA, 542 bp, Zea Mays
gctccggcgagcatacaccggccggatcactcaactaccggtgctcccgtgtggcagacaccaaattgaacccttaacaaacatttcccctcgcttaattgctggatttgagctctacatcaccctgtccatggtgacagcgggcacaatggacgacatgaagtgttcccgatgatctaaggggtcctagcttaatcggctgggtcggggagcatcagggacagataaggatactgaaacgaaagagcagggggcatgagcggacctggagcacgctgaccacgatgaggtcacaaggcgcggtgtttcggaccgaattgggggaaatccgaaattggggctcgctggtgagcaattgaaggcacggtttggtggcttgggtgcttgactaccttatggacccaacaacacgctcaatttataggctccgggggcggtggtgcgtgaattggagttggcgcggtggcagccggagaggaaagaggttactggcgctaaaaattcgtggcattcaccgtggcaagctcaccggcgatgaatgg

SEQ ID NO: 104418 - DNA, 367 bp, Zea Mays
cgccggttgcccgggcaaccaatcatgttgtgcatgtggacttggctagggacacagctctatggagtctgcgtacgagttcttgcttgtaggtttgtttaggttgggtccggtcttcccatgttgatggaccatgtgacctcacgacatcgacaagactgtcatgtactaagcaccgccacaacgtctctacacagtcagcagcgttactgtccccaaataattaagcgacgatccaattgttcatgcgagggatcagtggtggtcgtgactgtgttgtcttttgtatgtttgtgtctcgttcaggatttgttcggccaaaacagtctgcatggaatttgtttcagagtacggatatcattaaggc

SEQ ID NO: 104419 - DNA, 600 bp, Zea Mays
gcaacaacctagtgtcacgttaggtccaggagaggaatgcaatgcaatagagcaggcaataccaaacccgagtgacttgagggcaccactcatcaaacacattagaaatgaaaaagagccagacgatagagccacaatcgatcatatcacaaggtagtcgactcactaaacaatcataagcgatgtactaaacaaaagtggggcaacatgtgtttttacggaatgcattgacacaggcgctagaaaacatatattggaagaaatccacatcgagaaggcattcagagctggtttctactagccaactgccaaggaatatgcagcatacctagtcgagagatgtgaagcctgttagttcttggccaaataacaacatctaccatcacaacacctacaaactattccagtcacccggatgttcgcatgctacaggctggatatgattcggacattcaaaaagctcaaggaggaaatacacatgtgttggtggctatcgacaagtttacaaaatggatagattacaaactagtagccactttgacctcagccaaggtggtagagttcatttaggagataatctttaggtttgggataccaaac

SEQ ID NO: 104420 - DNA, 622 bp, Zea Mays
ggactgcagcaagttcggtcggtcaaggaccttcaccaacacccggataggtagactaatgaacggctcagcattccaccatcggtcatgaccggatcaacaatttcaagcttaaactccctgggaatggagctcgggctagaacaccaggcgataatcttgaacacctcacgctgtcgctcacaatctgggtgaagatcagcaatccagcaccactcattgaggagagcttgcacagattccaactcctaagcataggaagggatgccagacacttcaatctccacttgaaaaggcagagacaccgccgcagatgagttgaggattctgcttcatcgcataacatggattttagttgtgggagacaaattcacaattctgcccccatcataggcatggtccgccatttctaaacttggaaggataagaagaaaacttgcaggacccaatcgacacatagacagtgagacagtgagtcatgtacaagctccagcctccgcgcaaaaagtttcgtgacattgaactacaactccaaagtttgagctacatttcttactttttttgttttttcccttgataagtataccttttgttcatctaacctttacaaacttacttcatg

SEQ ID NO: 104421 - DNA, 429 bp, Zea Mays
gtcggggttagctggatcataactctcatcatcactatcaaccattccatagtcaacaccatctgaaggcgcaagttcatcattaatgtcattgccttcaaggattactaagtcattctcatttgcacctcatcatcctcctcatcaacaaccctttcaatatctacttccattctgatagcttcggttaagtctatctcaaatcgcccttctagcccatcttcttggaagaactctccattatatgtgtacggatctaagttataatcttcatcattaggaacaggtaatctaccgtgcgacgataccttatacacaacatcccaacccttaagatgttctttcgtttggcacgcatatgggagataatacacttgtgtggcctgttgggccacgatatagacatcgtctcctagtaaggtggaatct

SEQ ID NO: 104422 - DNA, 576 bp, Zea Mays
ttcccttcatgtttacgcttccatgactttctcagatctattgccatggtttgttggataatgatgatgataatatctagatgttcgcgtcatgttgcccttcctgtttctacgtagctgacatttgggagatgcaacaatgtttttctttgtttcattccatgcatattgacatctaaaagaggcactgggctctacttatgtgcagagatatgtccttgcttgctggttgcgtaattcttatgcctgcttttttttcagtgatctgggtgcctattgcctgggtgacttttaccgctacttggaggactcaccgctttggctttccggtcgtcggtaagtgtatgcctatgcgtctgttttgtttctaatgtgctctattgaataatttctacaatgtgatggttcaaaagaactttatgtactgccgccgatgctgggattagggagctcagttcgaccaaaagtatgtctgatatgcattaaggaggagagttcgagcaaaaacaccttagctttttttggcaaagaacattaaaccaatctactttgagcgcgactgacattacaagaaaa

SEQ ID NO: 104423 - DNA, 366 bp, Zea Mays
ggattgtctaatcgcgcgtgcccccgttggtatggctagtaggatggtgcagcttggggcagcgcattgaaatggtctagcttgaggacgatcaaatagctcgagcacactttctcgtttgactgtttcccccctcttttggagggttcttttcatctttttgcaccttcagcactaagacaatttgacatacagtagtttattagcagttcgaaatgcaaaactgagctgtcaattgctgaatatctctgtttagctacctttgagacccaaagtggactggatcctcaacattcaactgacattgtgatgatgatgagggctcgttttgacagactgtagtagcaagaaaaatctcatatagaa

SEQ ID NO: 104424 - DNA, 461 bp, Zea Mays
gtaaagttgatgtatgcgagtgaggatttaaaatttatgtgagctatggaggtgtatgatgtgattgtaaatgtgatgtgcatgtatggcatgttttttgaattgtggtccgtggataaaacaaaaataaacaacactttttagtgctagaaaaagtaacttccaatgtctgaccataaccgttgaaagttcatacatgtagctagtgtttgatcggaacaaattccgatcacgtcaagacatcagaagttaagtaactaccatcccacttctttccatagcatgtaaccttcgacagttaagtaacttccaacggctaagcataatcgttggaagttcatacatgtagctagtgtctgatcggaacaaattccgatcacgtcaagacatcagaagttaagtaactaccatcccacttctttccatatcatgtaaccgtcggaagttaagtaacttccaac

SEQ ID NO: 104425 - DNA, 310 bp, Zea Mays
tgcactgcaatggcttcgacacctaccccgacactgcatcgacgactggagtgacttcagtcgacgcttcaccgccaactttcaatctctctccgacaaaccggcgcagccatgggacctcaaatccatcaagcgctgaggagatgaaactctccggtcatacctcaagagatttcagaccatgagaaatcgtatccccgagtttgcgaaagcggcagtgatcgaggacttctaccggggatctaatgactcggccttcgtccgagccatactgcaaaaggcgccgactacctccgagcagctgttccgg

SEQ ID NO: 104426 - DNA, 481 bp, Zea Mays
atgcataacatatagtttccacagggtttttattgattttcttttcaaaacaagctttgttcctggttttccaaatagcccaacagatcacagcaatgccaaacttttcaccattcagcagccactttttgatcaaagaacccgaaattgctgtaaattggttgggatgtgagaggcaccaatagctttggcaacctgaccgttgtgctatagtttcatcattcacagaaacaacacttggggtcacctgaccgttgtcttttgatcaggttatattcagtaccgcattattttacagcacccataagaagattttgatttctacctttccgtagcatcctataattattgtcagcctcaagcattgtacacagacttaatggtgaaactgccatttttgttaaacttccaggggataacatcattgttctcctgaaacacaacctctcgcgctagagattggaagtgctgccagatagac

SEQ ID NO: 104427 - DNA, 489 bp, Zea Mays
agcatacatgtcatctccatttcacttgtgctaatttaattagtatgcgcgcggttgtaataatatttaattaattcagaagttgaggggtggacctgctagatgctacctcgcgctttgggcgctggactgcaaaaccaggagtagtagacacaccatccgaggaagcctgcaatggccacacatgctacgactgcgatggcggcaatggcaccagatccgagcccaccgggagctggcggtggcggtggcggttgggacacacccttcttctctaactgtcgggagcatggatctctaggagtatgcacgtagtataataataatacgatgaaatggattaagtagtgattaattaaggaatgtccgtgacttaccacaaccagcccagcagcagcagactctcatcattatcgtaccactaccagcccaacagcagcattgcctgccggctacgtcgctgctgcattcccgcatgcttgagtcttt

SEQ ID NO: 104428 - DNA, 329 bp, Zea Mays
ggactctagctagtgggatcttgcatggtttgtatgcatctctctgttctattcattatctctaagtgtagtagtacgtgtttggattcgtgtgcactgaccttaattaggagtagttaggaccagtagaaggaatgttgtgctaatctaaatgtgtgtgttctaggaagcaatataattgttagaatgttctcctctcctcccattattattaattagaagtttcatacagtagtacttacatttatagcagcagcaccagtctgcctggtagtggtaaaatagtacacacatcactaataaaggaaaactaaagtaggctgaaaaat

SEQ ID NO: 104429 - DNA, 1097 bp, Zea Mays
ttcctctatggttataagtcaagtcaaaatacggggtactagtggtacactaggcaggcggtgtccaaacaaattaacaggtcgatgtggtagttgtcgtgcgtgatttattgttagcgagtagtttgaattacgagttatatgaggattatgttagaaactagtatgcggcgtgtaactgtgctcgtgatgtgaataatatatcggtaggtattgttggtgtcattagcaagtgggatgattcctgttgtgcgataaaatttgaaaggcaaggaacatgggtagtgtgtcgatcaagttacccgataggttccataaacacgcttgtgatgctttgatgtgcatgataagatcgatgccttgccgtcatagtctcaggaaattttctgaaatgtgctagtgctctactgatggggttgaatgaacttgagatgtattacaatagctgtgtgtcgcgcaggttatccaaaaatggcgaaaggtggtgtatgttggtaattgggaaatagtcacgtcattagccaactcgtgttaagcaggagttgattgcgttaagtgattgttatatacatgttgtgtctcggactttgataataatagactagccgacgtgtatgatatatagcggcctatattgttgctctagttagccgaattgttagatgacttggttaagctcgtaatcacggtgaattgcttgttgtggtctaaatgtgtatggttatggtcgcgggtaaaaagtagtagtgctcatgtgatgtctaatttaaaacgcaaattgttgggtgattatcgtgaagaatgcgttgttaattggttgtagtaattttagtgcactaaatgacttgagtaaaaattagtaagtctacttgttagtcctcatttgattaatttaactctaacaaagggtaaagcgttagaataattcaagtctctagaacgcggcaattcttgaattgtataggagctgaaatttattaattgttgttttgggctgcacgcgctgtttttgtcgtgttgtatgtttgatgaactaaaacttgttttctgtagaaaaatcatatagaagagttgtagataaccttattatattgctt

SEQ ID NO: 104430 - DNA, 364 bp, Zea Mays
cttggtcgatgatgagttgggagtctcctcggatgttgaggcgtctgactcctagctcgatggcgatgcacaggtaattaaccaaggctttgtattcggccatgttgttggatgcagcgtagtgggagcacatgatatagcgcaactgtactccgaggggtgagatgaagagttggcctgcacccgctctcattttcattagccacctgtacaagtacataatccatagcttggcctgtattggagccatcggcagctgagtgttggtccattcagccatgaagtctgccaagatctaagacttgatagcctttctcaggtcgaatgagagtgttttttccatgagttcgaccgcccatttggc

SEQ ID NO: 104431 - DNA, 708 bp, Zea Mays
gaagttcggattaatccgttgcacgaaaacatagaagccattgttcgctgccaagcaactaagaggaccttccagtacctggtggggaaattttgtggcaattcaacaagccagacatcaggtcacttgggatgatttaaattggcattccatgagcactatattccaaaggagtgcttcacatgaaacaagaggaattcattcgactaaaacaaggaggggatactgtgatgcagtatcatcaagtttaatcatttaccccaatatgtgattgatcaagtaaatactgacctgaaaaagaagaattgcttcatgagaggactcaacgactgactccaaaggaaaatggtcacctgcctagatcttacatacaggagggctctcagcatggcgcttgtgacatcccagtgtcacttagggttttctcagtgctaacccaagaaccatcacttcatgtaagcaaatttgagcaagaagcaccaaattaacttgagaataaaaaatccactaagtttacatctaaaagaatcatgttcaaaacgattaaggttttcaaaaaggggaaatgttgaaaccctaataccaaccattagccatttaagtagagaagaagaaaagggatgaaagaccatgaaaaatataaaatcatggcttaggccaattataaacattgaaatacactaaataagctataacaaaggttatgaa

SEQ ID NO: 104432 - DNA, 893 bp, Zea Mays
ttcggctttagctatgctttcgaatactagccttggtgccccaaacctaaggtcggcaggtagcactgcctccgaaccatagaccatgaagaagggggtatttccatgcagagctcgactaggttgagttctcaagctccaaaccacatagggcaactctctgatccactttcctgcgaacttttcatttttgtcgaacactttcttcctgagtgcttccagtatcattctattagccctttccacctaaccattggctcttgggtgtgctactgatgtgtacttgatctggatacttcgttgttcgcagaaatcaaagaattcagagctagtgaagttggatcccaggtcggttatgatgctattcggtatcccaaacctgaatattatgtcttgtatgaactccactgccttggctgaggttaaagaagcaataggcttgtactctatccatttggtgaatttgtcaatggcaaccagcacgtgggtatagcctccctaagctttcttgaagggtccaatcatgtccaatccccagcatgcaaatggccatgtcacaggtatggtctgcagctgctgtgccgataaatgttgttgctttaacaagaattggcaagcttcacatctctagactaactcagcagcatcactctttgttgttggtcaatagaaaccagacctgaagactttcccaaccagagttctggatgctgcatgtattccgcattgtccagcgtggatttcatccaataattgtttcccagtagttgaggaaatgcacttcatgaggactcctgtcgcaccccttctatacagtgcgccccctatgagggtgtagtgggccgactgtctcacgatgtgttctgctgcagccttatcatccggttcttctt

SEQ ID NO: 104433 - DNA, 463 bp, Zea Mays
cggactaaccacctcgccttgccctcgacgataagcacgccattccgccacggagacgccatccaccattatcacgcaaaaagggtcagaagggcaacacaaccagaaaacgcacacactgacacacaaaaaaaagaagaaaagaaaaaacaacccgaacccctgcacgaatcgtgtctcgagcctcttcgacgaagttttaaataaccccgttctacttagggttgaggatttcttcccctggtctgctcgccctcgagagatcgccgggtgaggagaggataggagtcaaggttgccgaactgcccgaggcctccgcgtgggagtttgcgtcgcgggatctgcgctgtcgtgtgatttccggaggccgttttggctgacgcgccgctggatctgcgccgtcgtgtgaatttccggaggtcgttttggctggcgggcggaggcggatttcgcggctcggtcg

SEQ ID NO: 104434 - DNA, 471 bp, Zea Mays
acagactgcttgtatggatatgaaggtgggcgaggcgaataacgattttgattaaaaggtcggatcaccaaccttgttctcttttcaggcccttgatttgacctttcacctgcaaaccctgttgattttccatgtcccgcatttttggcttccacttccagtgccgtactgatagccttactgtaggtaaggtccaagcatgttgccattttccgctgaagcctgtcattgagtcccctcataaaataattcttctttttcagatctgtattcacctggtcaatggcatactgggagagatggttgaacttattgagatactgcatcacagtatctcctccttgcttgaaccggataaactcttcttgtttcatatggagcactccccctggaacataatgctcccggaacgctagcttgaattcctcccaggtaatctgatgcccaacaagttggattgctgaaaatttt

SEQ ID NO: 104435 - DNA, 280 bp, Zea Mays
tcgcaaatgtgctacgtgtaatataaactgctgtaaacgttgatgtgtacccttaactcggtaatccggtgattagagttttgacttctgaggtttgtatttcattctacttcttatcttaatgaaaaaacatgccacaatagtaagtcagagctaaacatatgcccagctgacatgtctcagaaaccaagtgaggaataaagagctcattcagtttttgtaatatgtgaccgattctcatgcagtatcaagtgatgtaggtgttagtagacgttcaaat

SEQ ID NO: 104436 - DNA, 559 bp, Zea Mays
cacccccggatcctataaattgagtgtgccatcagctccgctaggtagtcaagcatccagcgcacccactcgtgtctcagattgtccaccaaagctccccaatttgagatttcccccaaatcggtcaagaacaccgcgtgtgtgagctcgccgtggccaactctccataggtccgatcatgctctcctcgctcttgttttagcatccctgtgtgcttgtgatgcttctcgacctggccaattgagctagaacccataggaacatcgggaatgcttcgagttgtccgttgatcgcgctgtcaccgtgggcagagagattaggggctagaaccttgcaattgatcgaggggaaacgattgttaggagttaaattaagtgtcagccaagctagagcactagttgttgcgtatcttggccggtacaggctcgtcggagctcggtctatcaccgtccacggccagggatctcgggttgtaaagaatagaaaggggatgggtctttatgcagatgtcaacgagacagagaaacagtggagaggactctttacgggtttttcaaat

SEQ ID NO: 104437 - DNA, 517 bp, Zea Mays
ggcctatgaggatgagtttgatatcttaaatcggtggcatgagtataaactaacttatccaatactttcaattatggctagagacattatgtctattcctgtctcaactacttcttcggagtctacttctagtatttctggcaggattcttgaggaccgacgatggcgcttgaatgcagagacagtggagatgttggtttgcataaaggattgggagataggccatcaacgagcacaacatgttgcggtggacaatgagttaaaagagtccttcaaggagctctggctggatgaaggtgttggtgttgctgcatgagtttgttttcgagatgaatatcttatgctacttgtgggagatagatatcacatgggtcctaataaagcacatgtatgatccatgggctacctaatggccccctggtagttcgtctagcaaggcataccattaggtcgcatctaggcagaacgagtctgaccaagaagatgatgaccggaacaggaaatggtcttagaaaat

SEQ ID NO: 104438 - DNA, 567 bp, Zea Mays
cgttggcttcaatctgtagaaccacaattgccacatatttcctgggttgattttgggggtctgattagggagcgtttcggtcgagatcagcatgaaattctcattcgccaactctttcatatcaaacaaacaaccactgtcgctgtttatgtcgagcagttttcccaattagttgaccaactcaaagcttacagcaccatttccgacccactatactatacaatgagattcatcgatggtctccgtgatgacattaaaagtgttgtattagttcaacgtcctcgcacattggattctgcctttgttttggcccaattgcaggaagaggtgggcgccacgcgcagagatactcggaagttcgatgcaccagtcaatttgaggtccttcgcgcgtacagctttgccactacctccaccccctcctcggcaaacaagcaatttcaagtcagacgtggaaccagtgcccaacacgtccaagtctcaatcaactgacgacaagttctccaccttatatgcttatcgcagagctaaaggactgtgctacaagtgtgggcttcagtattctcgc

SEQ ID NO: 104439 - DNA, 376 bp, Zea Mays
agactggactgggaagatgggagaagagaggaatgagaaagaaacgcgacagggtatttatagcggcagcgtaggtggaagggcagagctgagcacgcggcttggaagctgcttcgcaatttctttttgtttactctctactctttcatgtattttgtattatatacggagtatatcatttatatgtcttggtttttggttttggaattttatgggggattgtgtatagtgcttgctgggattgtagggatttttggtgtatgaaaccctgtcacgtagtgctcctggtttactcatgtagaattacaaggtatcttttatggaaggaggaattaaataatttacggagtaaaatttacgtgtaatttagttcgtg

SEQ ID NO: 104440 - DNA, 644 bp, Zea Mays
gctcagacaacaacaagggtgtttgcagtgaccaagcgaactctggtgagcgattcactactacttaggacgtgatctagcgaaaggtgtgtgtgatgggtttggtacctacttgtgtaccatctggtatcgagtagaggaacatggaatggtctaaaacttctaaaactcctatcatctaatgtcttgattggaaaaacttttgaaactcctatcatcaagtatcttgagtggcaaaacatacccacaccccacatcacatcatgttgggttagtacaaccacagatcgatggtgaaggcacgctcccacgtgtggcacatcctcatcctctctcaacttctcatatagatgtatagttgttgacagacgttatttcatgaattcatacatcaactatccatgggatgagaaagactctatgaataaattcataactttgctaccaagtgacttccacaagttgtatttggagtatttggatgtagtttaggaaatcaagcaaaaggagtgaaaatggagaagttttgaggtgaaagtggccaagccatggaagtccatggtcgatcaagcaagtccatggtcacccagtcatctccattgctagccgaccatcctatggtcgctcgaccacccaacaaagcc

SEQ ID NO: 104441 - DNA, 381 bp, Zea Mays
cttgacgcgcataacgagcttgtaaaggcctttcgttgtgctcgtgaacgcatagaacaaacacacaatagcgagataatgttgcgtttattgggctgcaatactagacacgatgtccaatataatttgccttcgagcggtgagatagctgccataattgttggtgattactcatctgctcagtacacgtacgatgtccttgttcatgctaagaaccatggtctcaaacgtgtttcgcatttgcatctgtgctatatggctctgcagtacccactcctttttctctatggtgaacatggattccatcttggcattaggtatgcggatgatgacatcaatgaacgaacaaaacgtagatgcacaacgatgcttgagtttgtt

SEQ ID NO: 104442 - DNA, 488 bp, Zea Mays
gcgcttgctgatttagtacgggcagattcagatgactcgcccactagcatactaagaacaacgtttgtttcagcctcatcagcagtcatttgcatctggagatgggtcggtctctcctcttcagggagatttcggtacgtggcaatgaaggcctcgatatcttctaaagaggagcacactctatggtctagactgtcgtcttggacaggcaggttggatatgaactttgaaaagggcctttacggtaacaaaacaacacagtaaggacatttacacttgacaaatgcaggaactcataggcaacaacgcttaccacaggtggaagattccaggcagaatacgaaaggggagcacaagcattcgaaacttttcctctcagcatcgaatcaactcaactcaacacgtccttagatattcgcttgttgttaattcgagtggggtcattaacacagagactctccgagattttctgaaacagtgatacctgc

SEQ ID NO: 104443 - DNA, 277 bp, Zea Mays
aaactctcacgttccggcgtttcacccgtggcatccgtgtagtggctccttcctctggctcgccaccagctttgttgcctgctcccccgttgtcttgggtgtcggcgctgacattcccccgttcttgaaacgccgcttgtccccaagccggcgcgtgtggaaacctatcttttagtgccatcaagtcttcccaggttgccaaggactcatccatgccggaccacagtactttgacttgcgccaccgtcgcgctgcccttttggatcatcctgctttg

SEQ ID NO: 104444 - DNA, 313 bp, Zea Mays
gctggatgaaattcatgcggggcaatgtggcgtgcatgcagcatcaaggacattagtagggaaagctttcaggtccgggttctactgaccaacaacaaagaatgatgcaacagagttagttcagaagtgcgaagcatgccaattcttatcaaagcagcaacacttacccgcccaacatttgcaaactattcatgtaacctggcctttcgcgtgctgggggctggacatgattgagccattcaaaaaagctcaagggggtatactcacatactcgtcgccattgacaagttcacaaaatgaatagagtacaagc

SEQ ID NO: 104445 - DNA, 299 bp, Zea Mays
aaagtctagagcccccttgagctggatggtcttggcattttggatcttgaacgcatgagttgggctttgcagatcagatggctttggttgagtaagattgaagcttctaaggagtggtctggacttgaaattctgccacataaaaacgctatagctatcttttccatggctgttacaacttctgtgggaaatggtcaacacatcttatcctggaccgatagatggtttatggaaggtagtcttgctgacattgctccgacgatatctgagatagttccttccaggctaaagaagatgca

SEQ ID NO: 104446 - DNA, 476 bp, Zea Mays
tcgggggtggcggtggcaactgctgttgagctgcatcttcctggggtgcctgctgttccggctgagcacgccttgcacctcggcacctattctcagacatatgtagaaagaacacacaaatcagatctaactctgtagtctttcagcataagaaaagatgtatagaaaatcttcatagcactgaacaattgatcatcttcactgacagcttctcagataaagaggaaagtggaaataaagggattacccaactaaataactgactttattaataactacaccaagttgcaggggatgcccacatcttggtgacaatcattacaaagatccaacttcattacaagttcgtcatgacaggcatcaagacatatgacaagcaaactaactctaactaagactaactgagactaagactctgaataaagcattattaaagactccaactctatcaatctatggatccaaatctatctagg

SEQ ID NO: 104447 - DNA, 608 bp, Zea Mays
ggccgcgcgctctctaggtcggcctgctgacaggcagacacaaactgctgacattggactgtagtactgacacactagatcaaggctctctaatcaactgggatcagtatttagtttcgaacggacttgttgcatctgtgatcacagtctcgtgactgacagggcaggtgaggacgataaacaggacctggcacaaacgtagcacagtgtatctggaggacgcgagtacggtatctgcatatgaatgtgcgtgagaaacagcgagagtgggggactgattcgttattattagttattatcttctgcaataaagacacgatggctcgacctagctggatctgattaccgatacggattactctcgctctcaggctctctgcggcgaatctgcggtaccagagccttttcattcaaggcaatttacggaccgtcgatctaggctggctgattcgttagttatctcactgtcagtttgagtggagacggcaccatcgtcaatccactgtctccctttcaaattaagccaccatgaaccgatgaaccgaaaccatcatgctcaagctcaacagcacttccgcgccaggctgctgctgctacatacacgaatg

SEQ ID NO: 104448 - DNA, 848 bp, Zea Mays
aattcatcagtttgtagatttgcagtggtgaaatgacgcgcgatgattatgaaatttgtttgcgggatatagaagtcatccctgtatgagtaatcataattacgtcagatcgccttaagtcgctgctgacttaagtcgattatttttgttaatagggcgtagtggtcaccctgaattgcataggcatgagcatgttgcaccggcttaagtcgcctctgactttagccgattgctccattagtagggcatagtggtcaccccgagctgagtaagcgtgagcatgttgcaccaccttaagtcgttgccgacttaagacgattgctccgatagtagggcatagtggtcaccccgagtttaagtaagcgtgagcatgttgcaccgccttaagtcgctgctgacttaagtcgattgctccgttagtagggcatagtggtcaccccgagttaagtaagcgtgagcatgttgcaccgccttaagttgctgccaacttaagtcgattgctccgttagtagggcatagtggtcaccccgagttaagtaagcgtgagcatgttgcaccgccttaagtcgctgccgacttaagtcgattgctccgttagtagggcatagtggtcaccccgagttaagtaagcgtgagcatgttacaccgccttaagtcgttgccgacttaagccgattgctccgttagtagggcatagtggtcaccccgagttaagtaagaatgcaagtcaatcgtaaacgaactgagtatctttgaaacctcttttttattgacaacatatttccactttacagagtacatcgtcgtcccagcagtttttgaaatacagctagggataaaactttctg

SEQ ID NO: 104449 - DNA, 479 bp, Zea Mays
acctggaggtacactatcacccagagaaggccaatttggtagctgatgccttgtgtcagaaatcgcaatgcaactgtgttacgatggattctcgcatcaacaccctgtgtgatgagttgaacaaaatgaagattgaagtgattccttctggtgctttgtctcacatttccattgagccaactttgcaagaccagataatcatggcccaactcagtgacaagggagtgcaaatcattaaagagaacctccatcagaagacagagaagtataagtgtttccgccaagatgggaagggtatattgtggtttgaaagcaggttggtggttcctaaaaataaggatctcaagaagaatatcttggatgaagctcatctctccaatttttccatgcatccaggaagcatcaaaatgtaccatgatctaaagcccatgtattggtggaccaaaatgaagagggagatagcccaatatgtatcagaa

SEQ ID NO: 104450 - DNA, 412 bp, Zea Mays
acacagagtgttatggcacagaaaacgagagatatggcgatcgagaggtcaaacgacacgaaaacgacgtttgaacaagaaatagtgccataggaggtttggaattcgaattgatgtatgaaatgatgtggaattgagctgatacttcacgaataggtttatatgggtaaaaatgagtgaagtgtgcgcttggtttgatttgaggcaaagaaaatggaatttgggcactcggttcggaaacaatagctagaaatggggaattgtgtaaaattgaagcctgggatatcggattggcgtgaaattgggcgaatatgttactggacgtattgtgaagatgcctgaaaaatttgggttcaatcggagcaattttggctggtttgggcatttcaccgagcacgtggcgtgcggtgat

SEQ ID NO: 104451 - DNA, 338 bp, Zea Mays
cagatccctaggcatcaaatgaacagaggattgtgacatcgcggaatcattagttttcgtggttgaatcgactcgaataacttgaggattatgaggagggaggagagggtcgatttgtgtagtcaattccataggatcgaaccttggaggtgcatccatggtggcacttaaggtgtccacgtgaggaagaagagtttagggagataccttatttaacattcttaagtagatggcactaatgctttgctccaaaacttatattctacaagtgtatctatttcccaagtggtgtcatcttggttgatatgtgccatagctcggattatagataatttgcc

SEQ ID NO: 104452 - DNA, 409 bp, Zea Mays
gttccaaaaaatcatcccatttggaaaatcaaaattcctctcaagattaaaatctttatgtggtaccttataaataatttagttctaacaactgataatttagtgaagaaacaatggaaaggctgccttcgatgtgtagcatgtacgttaaatgaatccattcaacatctgtttttcgactgccatattgctaaatgtatttggcgttgtattcaagttgcgtttaacatttcacctcctaggagcattgatcatttatttacacagtggctttatggggttgatatgaaacttagcaacaaaatttggtttggagcgagtgctatatgttgggtgatatggctttatcgaaatgatgtgctttttcacaatgcacaagttcctactcctatgcaggtacttttcaggg

SEQ ID NO: 104453 - DNA, 388 bp, Zea Mays
tcagtatccttttagctttcctaatcaataaaccatttatagctatggatgttttttgatcaattgttatgtttcattctcagtcattctactatattcgaaaaggcttactgtatttgttatgcggttgtctataaggagacttggaactactccagttctattcttcaggcatttttagtactgatagttccaagtttggttcgtgtgtgagctttaaggagcgatgtagaacatcacatattcaactttcctgaacactaagttttgatttattatctctgaggagtgtgtgagctttaatggctttgacggagaaggctgttaattggcctattgttccgacaggttcactaatttttttattttttaattattttaagaaaag

SEQ ID NO: 104454 - DNA, 506 bp, Zea Mays
tctcgattggatagcaccaacgtccctgcatgggcccccattcgtgcctcataggggagatgaagaatcaaatgctgcattggattgaagaagccgggtggaaatatcttctcaagcttacacagtaacacgggtgccaatctttccaagtctgcaaccacggtctgagataactcttttgcacaaagctgacggaagaaatagctcaactctgaaagcgctagccagacatgctcagggacatagccttgaaccatcgcaggaagaatccgttcaatccatttgtggaagtcatgactcttcatccctaagacttgcagagtagataagttcaccccctactcaggttagctgcgtacccatcagggaacatcaacaacttgatccactaaagtacttccttcctctgggccctgcttaggacgaaatcggccttaggccttctccatgtctttccaccacttggcggcttcatctcttggtttggtctatcacataatgctgcc

SEQ ID NO: 104455 - DNA, 383 bp, Zea Mays
gagggatacaagggttttatggaggttcgagccaccgatgtgtaataaactacgtccttcttgaatgggttagattgcaggaaattagctaagtcctattacagaaggctagccaaaccttagagtaagaatgtgtggggatatctaagaagacagacatgatagtagtatatgtgtcccataagggaaggcctcccactcccttttctagaccaagagagaaggggttacaagtgacaggtggggctgatcgtaatgtatgtaccatcctgcattaatggacggcctatcgacatcagtccaaagttctatatgaatgccattggcgttgtaggtgcacgccctacccataccggatatcataggcgtcgtgcagggcgtgc

SEQ ID NO: 104456 - DNA, 437 bp, Zea Mays
gttgagttcttaggctccaaaccacataaggtaactctctgatccacttccctgtgaacttttcattcttgtcgaagactttcttccggagtgcttccagtatcattccattagccctttccacctgaccattagctcttgggtgtgctaccgatgcatatttgatctggatgctccgttgttcacagaaatcaaagaattcagagctagtgaagttggatcccaggtcggttatgatgttattcggtatcccaaacctgaatattatatcttgtatgaattccactgccttggctgaagttagagaagcaatgggtttgtactctatccatttgatgaatttatcaatggcaaccaacacgtgagtatagcctccctgagctttcttgaagggtctaatcatgtccagtccccagcacgcaaatggccatgttaca

SEQ ID NO: 104457 - DNA, 440 bp, Zea Mays
gcgggattcgacgaggttgggtccttttagggttgacacgtccgcctctcctaactgaccggcgggccctagcgaccatgggtccttcccccagtttgttcactgaccggtgggtcccgaggacaagggatcatttcctcggcagtagcccctgagaggagagtgtctcccttcgggatatgataacgggtcgaacattgtcctattcccttttgtcgcttgtccatgtcgagtgaaatccgcaaagtccgttgctggctttttggaaccagtcgggcgctataaggacggtccacttcgtgcttgccccaattgatttttatcgtcgccccatgttttccaaaagcagtatttagttgggagggttttgttacctccaacctctcaaggtcccgtcggtaggccatggatcacggtaagcatccgactcaggaatgctc

SEQ ID NO: 104458 - DNA, 545 bp, Zea Mays
taagacaaacctgaggggcataagcatttataatgttcaagactacatcccaaaactagtttgactaggataatcatatctccctgccttttgacgtccaccactccatccttgagggtattatcaatcaggatacctactcctttttgtttgccactgttcctgagtaccatagtttgaaaccagtgttctccacctccttcgctttttgcccttacattttgtctcctggacacataggatattaacacggctccttctcgctgcatcgactaactctcttagcttacctgtaagggatcctaccttccaactacctacacggatcctagtcggctcaactagcttccttacccctcgcacccgttgagacaggagcgaagacccttgtacatttgtcacaacacccggacgccgatgtagcgcgccactagcccactaaggaagcgacgacccgatccttgctcacttgacaccgcatccagatcacgatacggtgtgccaccaagtgggtggtgtctcgacccttacccatttaacatcat

SEQ ID NO: 104459 - DNA, 421 bp, Zea Mays
taagtcggcaacgacttaaggcggtgcagcatgctcacgcttacttaactcggggtgaccactatgccctaccaacggagcaatcgacttaagtcggcaacgacttaaggcggtgaaacatgctcacgcttacttaaactcggggtgaccactatgccctactaacggagcaatcgacttaagtcggcaacgacttaaggtggtgcaacatgctcacgcttacttaactcgaggtgaccactatgccctactaacggagcaattgacttaagtcggcaacgacttaaggcggtgcagcatgctcacgcttacttaactcggggtgaccactatgccctactaatgaagcaatcggctaaagtcagtggcgacttaagccggtgcaacatgctcatgcctatgcaattcagggtgaccacta

SEQ ID NO: 104460 - DNA, 870 bp, Zea Mays
tggaaatagacccgttgttcttggcttggaagtgttggaggaagtgggccatcgttatagcctcaatattgatgacatgtctatacatcaaaccatgctggaagacttccttctattcttgcctgatgaagaagtggcgacaagagtgctttacgaaggaaggtcgttcagaggtcctatgctctctctcgtgttcaagtagtggacaagattcacacatgcttcggctacgtcactgcctcatttgattgatattgagattcgagggatcccagcgcacgcgtggggtctgaccatagccaagaagcttctccacgactcctgtcaaattattgagttgaatcccacctctgcaagcaagtctgatctctcctctctgaagcttcgggcatggtgtttggatccactgatgcttcacaaggatatggatctccacatcattgagcggggggcatatgatcaggaggcgagatgcctaacctacaagattagcattgctattcttccatctccccttcagtttctctcatagagcagtcagtccccttcggctgaggatgagctgcatggtgaggaggacaactaggatccgaccaacccccagacccgacagttgggtccttctctacagcgtcagtctgtccatctttgcttcggttcccattagagattgggcagagaacggactgcatgtgtgcatggggataagagagaggcgcctcttttagctctagaggatggtgttgtattatgtgttggtgatgggccacagatctccccaagcccttctttgactcagtgcaggattatggctgtgccactggagaaggttgggttgagctcgccccgtcatgccactcaagctcctag

SEQ ID NO: 104461 - DNA, 463 bp, Zea Mays
aattttgccaaatacttcacgcattacaaaataacatcaaataatggttggaaagcacaagaacatctcatttatcctcgatctgacaagtggaacattaccatacaacctagagttctacaaaactgctttcctaataaccaaagatctaaagcccttacgcacactctccaccagcagttatcgggtttttatagaaatgagcttattgatgtcattccctttctaattattttgggtaacaacagttatttatttatgacacttaacctattaataactctagaaaatgtgatgactaatatgacagggcatcgactttatccgatgacacacttagcacaattaaacaataacataagttattggctaatttctagaaacactaatccatcctactcatcaacaatattccacaccttataaacatagaaccaatcccatcatactagacctacacgtc

SEQ ID NO: 104462 - DNA, 363 bp, Zea Mays
tacaactttgatacaggtagatagttgagttgctacatgaattttggagcaaatcacccccaaatatgctctatcaggcgctctgatgaggatcttgatggtacagtgtctgtagaaatatcccagattcagcccccctcgccgctagtgaccttgcactcggattcacgccggcgccacgattcatgcccagttaaacgcagataacgatccccgggtgaaaagatctcgtcgtggatgaacttggagcacagtagtcgctctgtcgctcatctacttgccggcgacgtggccgcgcgaccatcaccgtcgtgccaccgttcctcgcggttatgccacgacgtcagccatattaccacatcg

SEQ ID NO: 104463 - DNA, 324 bp, Zea Mays
gaatgtgtagcaccagaatcaaataatatagttgcaggaattgcattaacataaaacataccaagtacaatgttggcaccatcaggagtagcatcaacgctgacttgattaaccttggcaatagaatatcccttgccagaacctggagtttgctgcctattctgaactggagtagtagccatcctctatgggcagacatttgcatagtgtccagtcttcccacacttgaaacacatggtgcctgcactctgtcctgagaacttcgtcggggtgctagtgggggtagtttgacgaggaggtggagtcctctatggtgattgctga

SEQ ID NO: 104464 - DNA, 303 bp, Zea Mays
aggagattaaattcttgggtcacacaatttcccaggatgggatatccgttgatcctgagaaggtgcaggaggtgatggattggaaacccccaactacagtgaagcagattcggagttttctgggattggcagggtattatcgacgatttattctagatttttccagaattgccaaaccaatgactgaactgttgaagaagggagtcaaatttgagtggagccaaaagtgtgaaaatgcctttcacactttgagacagcatttgacaacagccccagtgctggctcaaccagataacaccaagc

SEQ ID NO: 104465 - DNA, 621 bp, Zea Mays
ctcttacaaaatgataatccacctcaatatgcttggttctagcatgaaagacaggattagctgataaatattttgctcccaggttatcacaccaaagtttagctattctcggactgttaatatttagctctttaagtaagatttgtacccacataatttcagctgttgcattggcaatagccttatattctgactcagtgctggatctagacactgtgggttgtttgcgagcactccaagaaatgagatttgaacctagaaacactgcaaagcctcccattgattttatgtcatcaatactaccagcccagtctgcatccgaaaaggcacttaccaaggttgagggtgacttatgtatatgcagccctaacttttgtgcattgtttgatatatctgagaattctttttactgcagcccagtgaacagttgtaggagcatgtagaaactgacataccttattaactgagaaggcaatgtcaggcctagtgagagttaaatattgtagggccccaactatgctcctatactgagttgcatcattgttgcctagtaaagatccatcatgcaaggatagcttctcactggtggatagtggcgagctgactggtttgcaatctgac

SEQ ID NO: 104466 - DNA, 710 bp, Zea Mays
tgacactgtccgcgctccaccgtggttggcatcggctgctaccccaaatgtgcggtatgaccctcgaatagcttctccttttcctaagattcaaatagcaccaaataggctcaggtctggggcatgggaacaccatttgccaggtctccagtggcatctcaacggtggttgtgggcggcgccgccgctttggtagcccaaggttggggggaagccatgatccgttggatctgttgtgaacgaacaggattagaccatggtatgatgttgtgtgtgtcgttgatctcagcgtaagcggctgcgattaaatcggtcgcaccagtttgggtgaggcctgtgtgaatcgtgcgatcttagatcaatggtcgcgtgtggttatggggataccgattcaagcgtttgatcggcaccgcagattggaaatccaagggtcagggctgggtggtgtgatggatggtgtttgtgccgtggattccggatctgatggccgccagcgcatagtagttccgttttatttagatctaatcatggcttctgaaagaagatcgaacggctctgattaacccgtaccctttcgccgtggcgattttacgtaagagaccctaatatttttcataaacaatccaccatcctctggctgtggaaaataaatacgggcgggtccctggaatttatagttttgcccccgaacatctggtaaatagtacccgc

SEQ ID NO: 104467 - DNA, 644 bp, Zea Mays
cactgctccggtattagctcaaccagacattgagaagcgctttgatgtgtattgtgacgcataaggcagtggtctgggctgcgttctaatgcaagagggccgagtgatagcctacgcttcaaggcagttgcgccggcatgaagaacattatccaactcatgacctagaattggttgttgtggttcatgccctaaaaatatggcatcattatctgctggggaatatatgtcatatttatacagatcataaaagcttgaagtacatctttacccagttagagttgaatatgaggcagaggagatggcttgagctgattaaagattaagaataggagattcattatcacccaggcaaagttaatatagtggcagatgcgttaagtcgcaaggttttctgtcattgtcttacaatgaagacttctgacattacgttatgccaagaaatggagaagttgaacctgggaatgattcaatatggaacatcaaatcacttgaagcttgagtcagtcctcctgcaaagaataattgacgcacaaagaaatgatgagggtatgaaacacattcatgagaaaatggaggtcggtaaagccaattgcttcagaagagatgatcaaggtgttgtatggtttaacaaccacatagttg

SEQ ID NO: 104468 - DNA, 427 bp, Zea Mays
atgggcaattaaactccatatgtctaatcaattggttctaggcccaatgattgtgatgtcttgtcaaaggggtgtagtcatacgacaagactgctaccggtgccttggcttttgagtagaggttggcaattagtggcaactggcctcggtggcatagcaataagtcatagagacgaaacccaaaggatgcctaaatcatgttttgcgttcgctctgccactatgggttgctcttgcctagtctacttcaaatctcccccttatgcttggccacctcaggggcctacttaccatgatgcctaccgatttcactgatgatgagatgagcattcttggaattcatatcatttggcatctagcaaataaaaatgggcctacatgtaggatcactctagcggcggacctaagggccttttatcagcattagg

SEQ ID NO: 104469 - DNA, 494 bp, Zea Mays
ctccgacctataaggtcgaattgcaaaagtttctcggcaaggtgaattatttacgaagatttatctctaacctagccgggaagattgatgcatcacccctatccttcggcttaagaatgaggctgaattcgcttggggggcagagcagcaggaagcatttgatctcattaaaaaaatacttgtcttcggctcccgtattaaaagcaccacaagctggagtaccattcagattatacattgcagctgaagataaggtcattgggggctgttctgacacaagagactgaaggaaaggagcatgtgatgacatatttaagtcggaggttggtggatgcgaaaataaggtacacttgtattgagaagttatgcttatgcttgttttatgcatgcaccaagtgtagatattatttactgtcttgtcattgcactatttctggtcaagccgatgtgatcaaatacatgttgcataacccaattatgagtggtagaattgg

SEQ ID NO: 104470 - DNA, 326 bp, Zea Mays
atttctccaacaactcatcaatttgcttcttgagttccaccaactcttgtccggacactcgataggctctcatggaaataggggttgtgcctgggataagctctatggcaaattcaacctttcttttaggtggcatacctggtaactctttagggaacacgtcgagaattctgacacaattctaattgcctcaatcggattggactccttgtcatctactgataaatggtgacaggctccttctagttcaggcaagtacaacttagttactacttcctttccggatggggacaccaacttgactgttctcttgtcacaactgacag

SEQ ID NO: 104471 - DNA, 421 bp, Zea Mays
ctcattgcccttctcttttttaatgtgcttatatatttgctttcaagcaaaatatatgaatacaaagtgttagtctacaacataatgtagacacatattcataagtccacatgtcttatgattttctttgctattcattttgcgcttgcatatcaagccacaaaagcacataagttcttttcataagaaccataagagaatgagagcatcacacttcctccaaagtgaagaagtgaatccccatattatgcaaaaatgatctttatatccaattaacatatccaatgaacattgaggataattaagcccattaggcgagttcatcaaactctattaaataattatccttgaaataacataaccatttttgtgtgatgttgcaacattgcagcaaaatatatcatatattcatatgttggag

SEQ ID NO: 104472 - DNA, 488 bp, Zea Mays
gatgattcgagctcgccttgaagattcgtgcactgcttgatgcggatattatctggaggatgaaaatatcgtgaccgcggacgcgtttatgctctagccgctgtacccacttgcttcacaactgaccaaaatgccatcgttggcgtgcgccgctcatcgcgaggatgccacgtgcttgagggtgttaccacgtcacaataggttgtagtggacgacccatttactgcccaagcctttacctcattaagcgccacggtagacgagctccggtgactcatctcctcaccaccacgagctcatcttcgtccaaattcgttgcactcgtgctctctctctctataaattgagtgttactctcactccgcctctctgttatgaacccagtccagcctcagccaacccttctcgttcactagagcacaagtccatcgggtttccccaaaactggtcaccatcgccgccatgagacaccccgccgtggccagccc

SEQ ID NO: 104473 - DNA, 634 bp, Zea Mays
gcgagtggctaaggcgtgctctatgcacaggacatgggcatgcttttgtcaggctgcagaagcccaaatgactgctctgcgcgttaacgaggcaggcggttgtgtcacagcaccacacacatggctctcacgtgttaccgaggcaggtagttatgtctcagtgtcacgcgcatgggtggcgccatcatgatcaattgttggctcgagtagtgcacccactgcagcgctgaccaagggtggcagctcacatctatcacattaactcctgcatgcataagcatggccagcccctgcataccttagcgtaccagactcccctctgtagccgactcaagccgacagatggggtggaagcacgcctggtcggaagatacacacgatggtcgagggaggagatctctatctgttgcaacatttaacactccatgttgtacatatttaatactagatcactaggtccacctgtcggggctcagtacccttttacatgcacccttagactataaaagggaggttacatgctatacaagacgacaagctctcacagacactctcagaatctcacaacctcacaagctcaacaacaatacaattctcaagtggatatagggtattatgcttagacgacctgaac

SEQ ID NO: 104474 - DNA, 636 bp, Zea Mays
gaagcaagcttcgttgcgccaacagcagtgcactggaggaagctacttataggcggcgccgagatctgaacatgcatggcattgcctgccgccgtgtagtcctcctgcaatggcatttctttggggggcgatggatggatagacgcttccagctcatacattttgttaggcggaactttgactcatggcggcgagtcgtatggcataacgaaccatctcttcctcgtgatcatttccgatcatcctcatcagcgtatgtatttggtccaaaatggacggaagtgacgacgacgtgttatccgatcagcacagttttgtggcttgacgcgcagctggtagaagcatcggttgattgatcctagccttattcaccatttcatgcgtgcgattcacaatgaggtaaaacaatggaatatagtgtgatgtacagtgtatagtaataatcttcccctctcgatctaatcaggcagtgccttgtatattgttggacatatttaaaacaaccgacttgtgaagagtggcgtgtccttaactcttagttattagctttccctgaaacaaccaccaataaacagttttttttttcattttctattgttagtacttagtagtagtacttgaattgccatgttgtcg

SEQ ID NO: 104475 - DNA, 718 bp, Zea Mays
tgatcatgtctatgccggacaagaccagttggcccgagttgattggctgggagattaatgatgcaattgaaaaaatagaagaacaacggtcagatgtaacattccttgagtcactagatgtgaatttgaacgagaccccgaggcctgcgaaccaactcgcacccggaactatacgtgttgtcatctacttcagcgtggacccaaacactagcgaggaaaccgttgaagaaactccatatattctctaggttgcctagcaaaggctacctttatacttttttatgccttgatatatgaaaggaaagcatcaattgaataatgcgagtgtgatgtctgatcttactttcatggttgatttcatacatttaagtgtctgtgttgaatctatatttagtagtgtcctactcaacatattgaattataaacaatgagatattgagatgtcttgtgccgaatagtgatatttgtccggtgaagtatttataagtgccttacttttaggcgcaattatatttgagaaattggtgagcaatacttgacacacttatggatggttcccggtattggtgtcgagcactctgatcatggattaatgccacaacagcttttgatccgatcctcctaggtatgaacctcatttctaggacatgattattaaaaaaatgaataagatgcatataatatatatgaagcactagttataaccattacttatggg

SEQ ID NO: 104476 - DNA, 1245 bp, Zea Mays
cgccactggcgccggaggcacggtcgtggcatcggcggggcccttcggcggcgccttcccggcaccgtccccgtccctgccggcgtccatggcggcgatcgacggcctggaaacctagatccgagcaccttctgcaaagcaaggcgcataaacttcacaacttttgtcgccccacctcgtagcgcctgcccgcaccaaatgcctcgcagtccagtcgatattgtaccccgcgtcgcggagcgaggaaaaagaaggcgaatcgatgtgtggccggatctccgtggcgaagaataccagcaccgatgaccgaaccgggaggaggaaaggaacactgacacaaacaataacttgaacaccacgaacaccgccgcgacggatgggtgggtaaaaggcgacgaagaagaagagggcaaggatagggatgtggaggagagattggggaagccgcaagccaggaacagcaacgggaagggcaactgctcgaactgggacgattattacccacgcgctgcggcgctggggattgggtttggatcgctgctgccattgtgtgcagctaataaaaaccaaaccccgccttcccttttcgctcaggctttgtatttcttttgttttcttccgtggcagagtggagtgtgttttgtgtttgtgcggcggcagctgctgctgagcagcgaggaaaagaaattaaatggaatatttggatagatggagagagatggatgggatggaataattagcagcgtagctggtgctcagatttcttgggtttgatctttgcggacttgcggagtggtggtgggctttttgtgcttttgattgactagctgcgttccggtgctggggcggatggatttggacttttcgtggtgcccgcggatgcgttcataggactgttcctcctgtacgagggagaagccattggacgaagcgcgcttgaacttgttcggatcctctgcggcgtgaacttcgcgagacatcctgttcgggaaggagggaaccgcacactccagcctctaaagcctcctaaagcctgtgggcacgcggctggtggcgtaggcgtgcgatcctcatcacttcctcagaacggagaccctgctgtcctggaaccccgctgttgaggtctgggctcagaccattccagcccacgcatcctcctcggcattccgtcgaacacctctcttaccaccgcccccatgccgccggccaactccacgccgcccaaatggccgaagaccctcaccg

SEQ ID NO: 104477 - DNA, 728 bp, Zea Mays
gggcaaaaagatgaaggtacttacccaccggccgcgttatattgaaccggctgtggtgccttagtttggcggggaggcctcttcagctgctgaatcaagagaaattgttgctcccatgcagaggactgaagagccgactataatgccgaaggcaccttcggttgagctagttgaaacaaaggttgacaaagataaggctgaaaggtcaaaaactaaagaagtaacaaagatgccagggattttaagtccttcaacagaagcaacagcgctgaaggcacaaaagagttatgccacaactcctaagagaaggaggatggtaaatgtattagatgttttggaaacaaccgactccataagtcccgctcccatagggaaggttgccgaagctgacaaaacgcaacccaaagctgatactaagcaaatagaagttgaagctacaataacccaggctaaaaccgaggcagggcccacagtgcctgctgagatgaagcttgccaccaccgagcagaaggctgaagaaataactccagatactaatatagcttttgagaagagtgtggccaaagaagccgaatcccttgcccccgaagcactctctgaagattttgattatatcattcaacatgctgcgagaaagagattatccgaagaagaaaattttgaagccaaacactatgcccgggaactgaagtatccgaagggggccttagtgtttaacggtacggatg

SEQ ID NO: 104478 - DNA, 858 bp, Zea Mays
gtaaactattaggcaaggttggctctagccatagtcaaaagggactagtagggcttaggtccatcagtttggggtccaaaaaaagctatatgtgatatataataatgttatcaatttacttaatctttctagcagccagcaagtctacctaaagtctctgataattatagaaaaaaaacactcaacctttattgtttatatcaattgtctaaccatttaaactaccaacttaagcttcctcagcttcatcatcaaagacatcatcatcatttttgaagtcgatagaagcaacggttgtacccatacgagcatgaaccttctgtgaaacatcttctctagttgcaacgcaaacttcgccaaacaatgagcccgaaggaaagagtagacttaggctccataacaccgcatctgtatgtccgcctttccacctacaaagtaatctctccaccccctataatctaaactaatttcttcctatgaagtcactctggacacttgaccttcgtcacgagaacattcatcctagcctcgaatattaacattctcatctacacccaaatgcctagctcccatcgaagatgccaagtactaaaccaaagcatcaggggcagtaaatattgacgaagctccaccaccaccaccaaatgcgctttcaataaaactcacctctataacacgagcaacctcactttcaacttcaacatcgccaccaagttcttcatcctcctctttcgatcggtttcttcttcaacacatgaatcaacatcaacaatttcaaccctcctctttttagctattgtttttgttgattgcctagtgttaccccttttcttcacagtcacccaaaacatatgtgtt

SEQ ID NO: 104479 - DNA, 606 bp, Zea Mays
cattatcctactcatgatctggagctagctgcagtggttcatgctctgaagatctggcgtcattatctactgggaaatgtctgtcatatttatacagaccacaaaagtttgaaatatatctttacccagtctgaactcaatatgagacaaagaagatggctcgagctaatcaaggattatgaattggagatccattaccacccgggtaaagccaatgtggtggcagatgcacttagtcgcaaggcttcctgccattgtctaactatgggaacttctgacattatgttatgccaggagatggagaatctaaacctgggtatgattcaacatgggacttcaaatcacttgaagctggagtcagtcatcttacaaaggataattgaggcacagaaaaatgatgaaggcatgaaacatattcgtgaaaagattgaagctggcaaagccaattgcttccgaaaagataatcaaggggttgtatggtttaaaaaccgcatagttgtgccgaagagtgaagatgttcgccagcaaattcttgatgaggcacatcttagtcactattctattcatcccggaaacactaagatgtatcaagatctgaaacaacat

SEQ ID NO: 104480 - DNA, 905 bp, Zea Mays
caaatattcgtccttcgataaacaacgacaatttctccctcctgcccatccattccgcctagacatcaagaactttatgaaaggtgtcgtagtgacagaccacccacctgcaacgatgactggtgtcgaaattcatcaacagatagatgggctcatggccaatacagaaggtggttttgtaggatatggtgagcagcatatgtggacacataagtcgggcttgactcggctcccctattatgacaacctgctccttccacacaacattaacgtgatggacactaaaaaaatgttgtcgaggcactttgggcaacaattatggtcattcctgataactcaaatgataacgtaaaggcaagagtggatctggcagcgttatgtgatataccaaaccaagagatgaagccgccaagtggtggaaagacatggagaaggcctaaggccgatttcgtcctaagcagggcccagaggaaggaagtactttagtggatcaagatgttgatgttccctgatgggtatgcaactaacctgagtaagggggtgaacttatctactctgcgagtattagggatgaagagtcatgacttccacatatggattgaatggattcttccagtgatggtttgaggctatgtccctgagcatgtatggctagcgcttttagagttgagctatttcttctgtcagctttgtgcaaaagagttatctcggaccgtggttgcagacttgtaaagattggcacccgtgttactatgtaagcttgagaagatatttccacctgacttcttcaatccaatgcatcatttgattcttcatctcccctatgaggcacgaatggggggccgtgcagggacgttggtgctatccaatcgagagatgtctaaagactattcgaaagaaatgta

SEQ ID NO: 104481 - DNA, 633 bp, Zea Mays
acgacaatcgatcttatcatgcacataaaagcatcacaagcatatttacggaacctatcggttaactcgatcgacacactacacatgttcttcgcccttcaaaatttatcgcacaactgaaatcatcccacttgccaatgacaccaacaatacctactgatatattattcacatcacgagcacagttacatgccgcatactagtttctaacataatcctcatacaactcataattcaaactaatcactaacaataaatcacgcacgacagatttcgcctcaaccggttaatttatttggaacaccgcctagcgtaccactagtaccccgcattttgactcgacttataaacatagaggaagcgatgactacttcggcatgtcactacctctctattcaagcaaagaaaatttccacctacaacgaccgaacctacccatcgagcacaccttatattttcccgtctcgcatacaaccatgtggcggcgtgcgctcgagacatttccgtttaatttaacgcaatcactactacaacgcatctcggcacacacaatcacccacaggctcgcccttcgtatacgatcggccaacatttttaatttttgtcaccacatcagacgagcacaactcgacg

SEQ ID NO: 104482 - DNA, 580 bp, Zea Mays
ggaaaactagattttctctaagtctctccaacccgaattccaaaaacctgtggtgttcaccaaactcctcaactcaaatccaaatggtcaaatggaaaaaatggcgcctaattacctcaagcacgccctggtaaagtttgacatcgaaccaagacagtttgacatgtcgtggcatgagttttgtcgcgacttgggtacagcgacaggcccgacttgacactggcatagctcctcaccctaatcacatcacaacttgggactcacatgaaaaagcaaggatttgaaggatggaagagatcctacatggggcccttgccaagataggcactctagggcagctaaacaggcgcttggacatgagtagaaacgatcctccacgtgttcgacctcagctgagcgcgctctgaccgtgtcgcgcacaccacgagctctggtcggctcgatcgcatgctcaaccctgcacccgtgctcaagcccttgcatataagaagccccagcccttggccttgccctcccgcacaccccatacccttttatcggtgattggacgccggtaattgccagaacaccgagtgcatcg

SEQ ID NO: 104483 - DNA, 711 bp, Zea Mays
gccgataagggaagggcgcaggggaaacacgacgcgtgatttgtatagcacgggggaaaggagtccgcgcgcgagtaggccgaggtttccggcgagattggtgcgctccaattcgatcggtcgtggtgaagaaccctggatttccggtgagttctgttaaatcggcgccaggaaattcgccatctgttagcgctagaaacgaaggagagatagggcgagagaatcgcgaggtttcggtaatctcggacatggaatccgcagcgtttgctgcatcggttgtgggagaagatgaagctgctcgcgtaggggtgtagctgccatgcgggtcccacctggaagtgccccaacaggaaaagaaaaggaagaggagcagagtgggctggcgcggtggaaacgtagtattgggccaaggcgcgcaagaattcggcccaaggtgagtatttctttttttttttctttattgtctctattttcctttcttatttcaatttcacatcaaaccaagttttaaattctaaatttcaaatttatgcacaagaaaaacttcacatgatgcacaatttctacatagtatttcttcatttattttattattatattaattaggtagtgttttcaacatgaagtacacacaccacattatagcaatatattattatttgagtgtgtagtcgaattaaaggtatattcaaaaattctccctttgttttg

SEQ ID NO: 104484 - DNA, 368 bp, Zea Mays
aaccaccactacctccaccagcaccaccagctccacccagggataagcaccggaagtttatgagtcacaaaccactgacattatctaactccgcggacctactacaagctgatgactggttaaagtctatggacaagatgctcaatatagctcagtgctctgacagagagaaggtgctatatgcatcgggttgccttaccggccctgctgcggattggtgggatgcatactgcgctgcccatgttgtcaacacaatcaccagggcagaattctccactcaattcagaaattaccatattttcatgctggactcttgaatattaaaaggaaggagtttctatctctcaaatagggaggtatgttcgtaa

SEQ ID NO: 104485 - DNA, 327 bp, Zea Mays
agaaagacttcttaacctcttaaagaaccttctctcctttccccgatattaacaacccttcttctcttgctaccagatggagggcacccttgtccttaagacatcctattgctcagaggtggaaggatttcctcaccttcttcggagttgtgcgctttgcatggggatccgcaagaagccggagtatgtctggaaggaataccgcaagaacaggattgagaagtgctctatggtagtctacctaggagaaagccgaagctacccaaatcaccctcccttttagatcaccgctactggccacctcttcctagacacctgccagaatgc

SEQ ID NO: 104486 - DNA, 1758 bp, Zea Mays
gttctgtgcagtggctaaatttctatagtaaaagctatgcaccatgccgtgtagtgagtttgccacgtcacttcttctcagtcgttggataccaaacggagtacacaaaattgtccacgtcgccttttaatagagtccattggatgccttttaaacggtgtgtactctgccttcttttttttcctctcacatcctcccgtaagttccagagaatgctggacattggacactccggccaataagaaaatgggcaaaagaaagaaaaaagaaggaaagcaacgggagaggcacgccctcgctcctggcagccgagaacgcgtctgccgctcctgacgactaggtttccatcctcctctcctcagtctctcgatcttgcacttctcaggtcctgtgacaacaaatctccctatctgcagctttcgcttctttgtgacagtaatcttcatatttttgtctgtcatccatgtcagcgaggtcctactttcatttacaaacaatgtggagtacaactgtttgattgtttcttcatgccagttctgttttatagccatcaattcatgaagaccaatgtcatgacatgctttctcaacatctggcattccaggaatttatctgatcttttcccaattgatccatttattgtcagcacattgcttctcgctatatatatatatattgttatatagattcatatgctcgttcgaccaaaaacggtcatcgattgcagttctatcttgtagatacaaatttacgcatttaaccgatgacttcttcctttttaattttttgtagctcacaggcatcacagctacagcctcagctagttggggcaaaccatcccgacgctttacaatgtacttaatgaggaccgcatgaagaagaaagctgataatggaaaaatgtcagaaatatttaagagcaaaattgtttcttcaaaacaatcaaaacaaaagatgcaagacttgtgttttgcactctctataagtctagttggttggaaaatcagaaattccacatcttagttattgatgaggcagcatacttaaaagaatgtgaatcattaatcccttttgcaactagtgggataaaacatgtggtgcttgttgggatgacaagcaactacaatcagtggtaaagagcacggtgtgtattcattataacttataagaccatttgaatgtatccttgattccttgtgttaccaataattatttatagactgctaatactttctctttactgataagattgctaaagagaacaggtttgggcgaagcctctttgagagattaagtggacttgatttcccaaagcacatgctaaatattcaatatagaatgcacccttccatcagcaagtttccaaatcaaaagttttatgaaggaaaaattatagatggtctcaacgttaaggactataacaatatttatctcgatggtcatatgtatggtccttattcattcatccatgttgaagttggtttcgaagaaaacaataaacagggcttaaaaatattgttgaagctgctgtggtagcaaatattgttggcagacttgctgaaggtaagtctaacatttgagctgataaagaacatgtaagtttcattaaagttgatatgtttaagtgacatccatgtttttttggtctataaccactacagcatgcgccgagcagaagaagaaaaccagcgttggtatagtatctccatatgcagcccaagtaatttctttgcaagaaagaattcagagttatgaaaag

SEQ ID NO: 104487 - DNA, 570 bp, Zea Mays
gcctaaactaattgaggggtccgctccaatctctgagccaagtcgctctgcgccagtcgaagttagaacaattgtgactaaggagccgaaaatggagaaaacaacagaagagttgaaggtactgagtccgccctggcgcaacggaattgccgcaggtgtcaaacatccccgcaacaactccaagaaaaaggagaatggctagtgtgctggatgttgtaatggagttgccgcaggtgtcaaacatccccgcatcaactcctgcttctgttgaagcacctaggacgaaagctaaagtttcaaagaaatttgacgaagccggaatgacacagactatttttgaggctggaccctctattcctgccgaagcaagaccttcggaaatcacaccgctaacccaggaaaaagagggtgcctctgagaaatccaaatctcctgctcctggagcacccgtcgaaggggtggaattcattgtgcaacatgcttcgaggaaacgattatcagaagagcaaattgtcaaaacgcaacattatgtcaaggatctaaagtacccccgagggtccttgatttatg

SEQ ID NO: 104488 - DNA, 300 bp, Zea Mays
gctcgagttgtctctgaaggtaattttttgttcttgccttattgcatcttattggttttcgcatatatcatttgcttattaagtataatataatatttttcattgtacagattataagtgcaccccagaagatgtttagcttattgaatacattaaaacattatcggggaaacaagttgtggtgaacatcgacagcgcatggttaaatagaaatgatatggaatgtctttttcatggtgacatcccattgtctgacgaagtaagtacatctgtatgtccatattatatacagtaataaag

SEQ ID NO: 104489 - DNA, 345 bp, Zea Mays
ctcaagtcggcgatgacttaagtcagcatgatacgatcacatctacttatcttagggcgaccactatgccttaccagccaggcgatcggcttaagttagaaaaaatttcaaaaccagcacgccacatttactttcacaattgttcagggtgactgttaaaccctaacagcaaaacaattagtactccaggaaaaaaagaacattgtacttgtcggcaccaaggacacgttctggtgcctgtccacaaaatattcgaacacaaccatcacacgcacatagaattcatagtacatcccgtgtttcgcaggatatcactgcatcgaaacatctctgctggtaattttt

SEQ ID NO: 104490 - DNA, 1064 bp, Zea Mays
tgagggcattagaactaaggtctgggtaggatgcaacacaacaggcctaaatctgtcagtttaacttcaaggatttgtccaaacattcttaagaagctccacaactgcatcaatctagcccggaaatgtactgccgtttggaatggaaggctttgaggtgaaagaatgggacaagaggtacaaggttgacacagataagagaacatgttcttataggtaccggcaactagcaggtaacccttgtgctcatgccaccactgccttatatctaagctccaagtctcctgaatatgtagaatgttattctatttagcattagaataagatctatgatcattgcataatgccaatgacggagctgcaccaatggcaaaaggatcaacgcaaaacaaagcctcctgcatatgtgaagatgacaggcaggctaaggaaagagagaagggaacaaggcgaacctgccaaggccaaaaagcaggtgggcatcaaaattacatgcagtaagtgctataaaataggtcacaactcaaggacatgcggcaagagtaatccaaaagcaggcaagtgccaatatactatggaaccgatgtaaactgaaccattgcttatggtgtaaagtgaaaataaattattgtgttacctactaaaacttgcaggtactagatggaagggcacaaaagaagacacaaataattgaagatggtgttgtaggtgtgcgttcccagagcagaactcatggtgatgttgcaactgttcttttccaaagcagcctgatgaccactccagagcaggactcagggtgatgttgctactgttcttctccacagcagcctgataatcactcctgttaggatagagaaagtatatcccactaggacaagaaattctccaaggctcgaaggttcttgcaagccagtgaattgatgagtactcaattctgtgttcagcttagcagctcagttttgctgttcttttgattaaaaaaatgataggaacttagcagctcttttggtcaaatatgatgtgctcaactactccgttctgtgatgaactatagcttaaatttg

SEQ ID NO: 104491 - DNA, 688 bp, Zea Mays
cctaggtcagcacatcaaatttgtagagctatgtaaggagaacaactttgctatagggattaagccttggtcacatgaaaaatttggagtaaaataagaccaaagtcaggctgtcagattgcccttagtctaaattcagactaacagtgagattggggcaatctttgaactgggattcgaccatgatccagtggaaattcgactagggatgctatagcaaaagtgaagatggtttatagatctataactttgatgcagatgggtgatgaggttgtcacatagaatttggagaaaatctgccttgattgcgctctgtcaggcgctttaaacagagattccaatggtacagtagtagaaatatctcagatacggcgcatcttgccgccggtgacccttcgctgtgattgacgtcgatcgtcgtgattcgtgcgccgtgacttgaggataaccgtgggcaaggaaagatctcaactcgggaaagggaaagagacttatcgccggattgttcaccgtgacacttgccgcgcagcggacagtggtgtcctcgtcggagtttgccgttgattgtagccacgccacgtgcttagaagatctaccacgtcgccgtagatatccgtaggaggtcagttcgtcgccggaggcattaccccgaggagcgccacaatagtttacgccagtgacacctctc

SEQ ID NO: 104492 - DNA, 301 bp, Zea Mays
tggcccctttggaaacctgctgagtgtagtagtacatttgattctgaagtgtgttactagatatctccgcgcgaactggtagctgttgcacgccatatcaggttgttgttaaatccaatgttgtcgaagctactacgtgccatgcatggaagtttaactctttttgggagatcgctagggagttgtcggagaatgatatttgtttagatcccaaatatggttagggagatactaatatgagatattgggatctaaatagatttgttggagatgctcttaattgctagaggtcgcaaacgtt

SEQ ID NO: 104493 - DNA, 299 bp, Zea Mays
attgcagcaacatctggaggcacgtccgggtgcagtcgagcatacaatacatgcacttcttcatgtaaagtattacaatacacttgcaggctttcgagggatgcactaagctctgccacacgagctagagctttcgcttcacagtcccaagcgaaagaacgcgagttaacgacccaaccaatggtcgtatcccgttccaagattttgtactgcaggcgactgacttcggctgacaattccgctatacggtgactgtcctgctcccgtgccctattcctgtggcgtaactctgaccgaag

SEQ ID NO: 104494 - DNA, 373 bp, Zea Mays
attttggcaagtatcggggaaacggtatccggtaacagtgacttggaaggaaggatggtttgggtaatttcggctttctcccaggtagactgccatagagcatttctctattccgccttcgatatgctccgtccagacgtatttcggctttttgcggattcccatgcgaagcgcacagcttcgcaggagatgcgggaacccttccacctctgagcagtaggatgtcctaatggccagagagtcttccatctagaataggaaaaggagggccttgttaaaatcggggaggagaagagaaaacttttcttggggtaagaggtattttctttttagggcaaatttttaaggtcagggctgcgtcctacggccagtc

SEQ ID NO: 104495 - DNA, 487 bp, Zea Mays
cttcaatcttcctctcaactggcttgactgtcagtaccttcggcactatagtcggctctttagagctctgtgtagtcgggacagtttctttcgcttcagcagacgaagaggtccctttgccaaattcaggtatcacggctggttcaatgtaacgcggtcggtgagtcagaactttcatcttcttgcccttcggctcagctgtgatggccgaagcagcaacttttcctgaagcagcaatttttctttttaccccttgccctcgcggcgggtagcaataatcagggtaaacgaagccaatagcatcaaataccatgttcaatcttttcttactccgacccccaaaagctgcgaacaatgcattgtccttagtcttggagtatgccccaagtagctcgtccctagtagcttcaatgcacttcagccagtcatcatttggctcatcaaacttatccccaaacctgaaggtatacttcagtcagactaaatt

SEQ ID NO: 104496 - DNA, 876 bp, Zea Mays
ttctcgcggcaccagcaatactccagaaccgcttcctcttccaagaccaccggctctagacactgccctgcgcccccgttctatggacgacaagttttcatccttgaaagcttaccgtcgtgcacgcggactgtgtgacaagtgtgctgagaagtggtctcatggtcaccgttgttcaccaactgtgcagttacacactcttgaagaaatgcgggaattgttctagggcaattgagaggagccccctcctgatactgacgccaaatctgcatctgatcagttgctgaccatttcaatgtctactctctcaggatcttgtgttccacacactctccaattatctggtgaatgtcaagggtaccccatctccatctttttttatttaggcagttctcactcttttgtcagctcaacattagcttccaagcttcatggggtctcactgctcccccctttagtggcagtcaaagtggctaatggcagtattattcattgcacttgtgtgattcctgctgctatctggataactcagggctacaattactactgatttctgtgtctttcccctctcagcttatgatgtagttcttggtatggattggatcgagcacttcggccccatgaagattaattggagaggccggtggttagcgttaccatacaatgggaaaattgcggtattacaaggaaaagttcacacttcagactagcctgatataatgcatgtggtgtatctgttgcagtctggtagtgaacctcaattgctcgacaacttggatccaaggctgtccctagttctgtagaaatatctatcagttttcaaccctaaaccctaaacccccaaaaggtttaccaccatcctgtccttgtgatcat

SEQ ID NO: 104497 - DNA, 354 bp, Zea Mays
ttgggatattctttatagagaagccttcgaaagaggcttccattcttcggactgtgtctagatacttctcgagcttcgaatctcttgctccgctgcttttgtcaatgttgcctgtaataacttgtgagtcatatttgaggattgcccttcttattcctattgccttaagcttttgaagccccaagagaagggctttgtactctgtaatgttatttgtgcagttgaactccagccttgttgcgtagcaagttctgatcttagatggtaaatttagaatggcagctgctccggcgtcgaaggttccccatgacccatcacaaaacactaaccaagcttcatcatcttttattcttt

SEQ ID NO: 104498 - DNA, 308 bp, Zea Mays
ttatacaagatatgcaaagaaagtatggaaaaaggaagatttaggtacaagttagaatgaaaggaagttgttttacccttttgtaccttcacatagagtcgctcttttcattgtgcattgtccttagtcttagatgcttaagacctatactcaagacaatatatggaaatattttgcacaagaaggagttctacaactagtgatccttttctaagccattgtcagcatatatcaaatggatcacaaattgcatagatgtatcatgaattctccttttaacttagtgcacatcaagagagatatcgatt

SEQ ID NO: 104499 - DNA, 801 bp, Zea Mays
gcggaaggcgaggaaaccaacacccgtgaagcctaccgaaccctgaagatggattacgacaagaagctaaagaagctcgcccccgcgaagaaaatccgaaagaaaaccagaagccaaggatgccagactgagcagaaggaagaagcccctccagccctacctcctaccaggatagagaactcgtgtgacaccgaggaaatgtccctagctagccttgatgacctcctcaaggaatttggggacactttagagaaggagttcgggagtaccttagatagcactcgcgtgtaatgaacttgtggtagttgtatgctgtaatgaacttgtgtaatgattaaaataacttggttgaaaaaaatagcatgtgcatggtagtaactcttttcccctggcagatggctttggataaaaccacgcctaccgcctccgggattggagcagggtttcccctaggagcggaaggagaagctggcggagaagggagtgagacccacctccccgcacctccggagctgccactagatttggcccaagttctagccaatcaaacccgactcattgaagtcctcactaggagtctggagaatcagcgcccaaatggtggaagaccataggacaggatgggagaatttctgaggctcaagcctcccacgttcgctggattcagcaatcccctcgatgccgacgactggctgcgcacaatcaagaggaaattagaagccatcggatgccccaaaaatcagcgtgttcaattggctgctcatcaactttctgggatggccctagcatggtgggatacct

SEQ ID NO: 104500 - DNA, 981 bp, Zea Mays
cgtagctcacaaaactaatcgcccacacgtggccccttcagcgctggggcctggacattgtcgggccaatacccacggcccaagggaacctcaagttcaccttcgttgccgtcgagtatttcaccaagtggatcgaggcaagagcagtatcaacgataacatcgaagactgcccagaaattcttctggcaaaacattgtttaccgattcggagtcctgtctgagctcatagttgacaatggaagcaatttgacagctaagactttagagacttctgcttctccattggcaccaaacttgccttcgcctcagtatatcacccacaatccaacggcgtcgtggagcgcgccaacggcaagattttcacggcgatcaagaaaatgctcctcgatgacaagaagggtaaatgggccaacctactacctgaaccaatctgggcgctgaacacgaccgagtgtcgagcgaccggtttaccccctttcgcctgctatacggttcggaggccatgaccccgcaggaaatcaaacaagggtccccaagagcaagcgctttcggcctcacccgacgtagacgagctaacctccaaagatctcatcgatgcagaccgcgtcttcgccctgcaggccctcaacaaatatcaagcccaaacgaagacctggcgcgaccacgcagtcgtcccaagggaattcaacgaaggagacctcgtactcgtctgaacgacccagaccgagtcacgaggtaagctggagccgaagtgggaagggccattcatcgtcaagacgaagtcgtcccctagcacgtacaagctaacaacgcaatctggtgaagacctggagcattcctggaacatagataatctccgcaaattttttgtttgattcctcagggccatcacgcccttgtaattaaccaaacattattgttctggcccgtactcttttcctcccggggggtgaggttcttaatgaggcggagccatgca

SEQ ID NO: 104501 - DNA, 300 bp, Zea Mays
ctaaactcgggcaccacggccggctcaatgtaacggggctggtgggtgagaacttttaactttttactcttcggtgcaggctcgcttggagcagccgaagcagcaacctttccagaggtcgcaccttttctcttctgcccccgtggcgggtagcggtagtcagggtacacaaatccaatagcatcaaaaaccctgtttaatcttttcttcttttggctcccgaaggccgcagatagtgcattatcttcggacttgaaatatgctccaagtaattcatcgctagtattttcaacacacttc

SEQ ID NO: 104502 - DNA, 1602 bp, Zea Mays
ttttattattatattcctaggcccacctgtcagggctcgatttccttgtatgtgtccccctttggactataaaagggagggcacgcacacagtagaggacagactgagacagactccctcgaagaccctcggacacagagactcccatgcaatacaactcatagtgggtgtagggtattacgctcggggggcccaaaccactctaccctagcgttcttgtgttctttcagctcatcacgcaaatccctaggctcccctagttcacaggattaggcgggtgcaccccgccactcggccggagttttctctgcgacaacacgggttactgacgcgtccaggccttgcagactacacacgtcatctgcattcaatgaggggcgtacgtcaccagtcactagtgtgaacaagcaggcatgttgtccgtatttaatgtaggtggtttcagtgttagaggcctgcgctaagcgacgcctagcaactttcgtgatacgccttgggacatgtggtcagcgtcgcacccgacatgtgcggagagcggcaactaggagcgtatgcgaacgtggcagccccggacatccctagttggggttatggaaaagacttaaggaagtctggatccttctattaatggcttggacatgtggcgggccggacatccctagttaggatctcactcagctagggagcaggcgttgaaccgatcttttcttggttatgaggcttcagacttgagtgacttagaaacccccttttctgaggatgaaataaacaaagttattcgggcaataccttcccaaaaagctccaggacctgatggctacattggattgttctataaaaaatgctggagtattgttaagacagatttggtcaatgctctcattggattctataatcaccgcacttctaagctccatcttgcaaatgaagcaaacattgttctccttccaaaaaaagagggggcactctgccttgctgatttcaggccgattagtttgataaacagcttagcgaaggttctaacaaagctactagcagaaagattagcacctaggcttgagcagctggtgtccagatcgcagaatgccttcatcaaagggaggagtatacatgacaactttctatatgtacagagagtcatccaaaaattgcacaagaataaatgtgaagcacttttcatcaagcttgatatttccaaggcgtttgattctgtcagctgggcttacttgttagaagtccttgcgattcttggcttcggtgccagatggataaattggattgctgctctcctcgcttcatcatcttctcgtgtgcttatgaatggaaagtcgggtaggagaattacccatttgaggggactccggcaaggtgaccccttgtcccctatgctctttatcctcgccattgatccttttcaaagaattattgagcgggcgatccagtcaggaatcctttcgcaaatcgttccacgaccggcaacccttaattgctctttgtacgctgacgatgcgggtatttttgtcaaaccagttgaggccgagctcggcgtcctccaaagtatcctgcaaactttcattcgttgctcggggcttaagtttaatc

SEQ ID NO: 104503 - DNA, 406 bp, Zea Mays
gatctttatcaatccagctggaatgtggtagttcttgaactgtgcactgaactctgcccaagtaatagtatcagcagcatcatgggcagcagtataagaatcccaccagtcagcagtaggacctgtcagacgacctgaggcataaagaactttctcccggtctgagcattgggcgatattgagcatcttctcaattgacttcaaccaatcatctgcatcaagtggatctggcgaactggcgaaggtcgacggcttgtgactcataaactcccggtgcttatcacgaggtggaactggtggtggtggtggaggcaatggtacttgttgctgctgctgctgttgctgaaattgctgctgcagctgctgttgcgcccttctctcctagcgtatctcctctcgctcctgg

SEQ ID NO: 104504 - DNA, 706 bp, Zea Mays
agagcttgaacactttactgattctagcacatctagtacactggccatcctccttcttttgggagtggccgtaagacctttttgtatcttcggcactgttacttccactgaagggcttaaaacttctaacatttttgttccttcagtttttgcctcttcggccttatctttaccagtccttgccttagcttgctcggctgagggtgtcttcggcatggtagccagttcttcagctttctgcgtaggaggaattggctcctttggatcaacagctgaagaagtttccccgccaaactcgggtaccatggccgactcaatataacgtggccggtgggtgaggactttcaactttttactcttcggcgcaggctcatctggagtggccgaagcagcaatcttggccaaagcagcaactttcctcttctttccccgtccccgcatcaggtagctgtagtcggggtaaacaaaaccaatagcatcaaaaactctgtttaatctcttttttccccgggtcccggaggatgtggataacgcattatcttccgcttttgaatacggcccaagcagttcatcacttgtagcttcgatacatttcagccagtcatcattcggttcatcaaatttatctccatatttgaaggtatatttcagtcgaaccagctcaccttcactagacttggtgacagactcctttggcatctcccag

SEQ ID NO: 104505 - DNA, 387 bp, Zea Mays
atgcgtggggagaaaggcctcgcaccctaaccggagtgagacagtccatgtgacagaaccgaccattttatacgagcacaagtataatagcaatcacttaagtgatcaaaccatcacacatgagccaatataaacccggtagtccgccgaacctcgatagatttggatggagcaacatattcaatcaagaccgtatatgattcaatgaaccaaccacatgttacacatagtctgaaaacactttcaaatattacataacatcggagtacatggttattacaaaccaaaataagcagcgaaagataaagtagtttccaaaagtcatcttagtttaaacacatagccagtctgatgattgcatcccacaaaagcatccttgagagagag

SEQ ID NO: 104506 - DNA, 356 bp, Zea Mays
gccaaggaagattacctcgtgtgccatcctctcggaatcaagctgtgcattaagagaaaaattcagggaacatgcactatccagaaaagcagaagtctaggctaagtcggcctgactctgagagtacttctcttcaaagtcagagcaccaccgagccaagtctgataaagtagttgaaggagaacacgcgattaaagataagctaacaaattaaagcaactagagaaaccgtgagttcactaaccagtattcgatgccttcaaatcgtctatctatttttggagcaacagagggttccactgcatctgggataaagcttgatcgggaacagtagcgccgcaagatctcaattgggc

SEQ ID NO: 104507 - DNA, 359 bp, Zea Mays
tttttatctgacttctctgtccctaaagtaaactcctcattgatggcaaattgtcgtactgccatcttgaactcctccattgttggatagattgtaccaatatccattatagggtggtccttatcatacgaaataaccatctcacttggtagaacatcactagtacaaatgcaatcaacatcattatcaaccccatgttcaacatattcagattcatttgtagtcccctcttctcttaaacctaaaagtgcatacatctgattttcgctcaaatgtgcaattcgaccttcgtcatcatgtgtttccactatatgtaagctattccaatcaactcttggcatattttccacaggttcaac

SEQ ID NO: 104508 - DNA, 733 bp, Zea Mays
aagaagccaacctccaaccaatgcttgttggcactgtagagacctcagtcacttcaagaataattgtccgcagttgaagacatatgtatctgcctactccaactcggtgaatggccccaagaatgtttcagcacccgcctccaaggcaccctccaccaacagccagctaagcaagacccaggttcacggcagggctcgagtgaaccacgttgacgcccaagaagctcagcaaacccctggagtagtgctcggtgagttcctagtcgaatttacccccgccgatgtactttttgattctggagcatcccattctttcatcgccactagttttgtggaaaagcatggcatccccactgcatctttagaaatccccttggtcacccgaaccctagggtcagaccttctatgccacctcaaatgctcccaagtcagaattcttttaagtggggtagtattcttggcagacttagccatactaccatcccacggaattgatgtgatccttggaatggattggttgaccaagcacaatggcatcataagttgcacagataagactattcttctcactgaccaccaaggaaaatcagtttcgtgtaaagctcagccaccaacctaagatccaatggtgttcagcctagcagcagaaagtatatctgtggtagaagaattcatggatgtgtttccggaagagttgccaggaatgcctccagaaagagaggtagaattctac

SEQ ID NO: 104509 - DNA, 484 bp, Zea Mays
tatcactgactcatcatccattttagacacaacaacctctgacggagtgaataaatattgaaggccaagatcacatagctgaccgactgatagcaaaataaaactcaatggtgcaaccaagagaacatttgaaattgaaagatcgtttgatattgccaccttgccaagccctttaacttttccttttgaattatctccaaatgtaattttatcttgttcatcaacatcttcatctaatcaggtgaacatctgtgggttatcagtcatatgttgagtgcatccactgtcaattacacaatggctcccaccggtcttgtagttcacctacatgcatagataaatcaagcttcaatcttagggatcctatcttgcatagggcctgtaactttctcaatcaaggactttccaacccaaatttgtctaggtctactcttgcttggtggacctaagaatgttactttgaccttcccatttgcaacttttc

SEQ ID NO: 104510 - DNA, 576 bp, Zea Mays
gcgagtgcactggcttttggaccttcctgcgtttctgctagccgccggtgctgactctgaggtacacctctcctatctgcctggacttctcactctgttgactaccagcggcagatatgttgaggaatgggttcgagttttctatgcttcagtatggatagaccctgataaccagtggacgagattccgctttgagcgagaggatgttacaattcatgccagccagattcgctagttgtttggattcaatgagtcatcaactcgtcttcacagcttgtgctacgacacctttgatcctcctcgtcgccctcatggcagagttgctcctggtacagctcacatcgcggctttgttccgaccgcccttctcagatgggtcgcgacgttctccatcagacttcaccacagcggccaagtttctatatcagctcatgagacggacgcttctgccacggatgggttacagggaggctaccactcatatccagctctggctccttggtgccctggtctctcactccgagtttgatgttgtggatttcctcatttgtgagatcgaggacactgtactggatgg

SEQ ID NO: 104511 - DNA, 549 bp, Zea Mays
tgatggttatcgtgaatgccacttggagtttgaaaataattacgatgttttccaagatgatgatttgtccaacatatttagtataaatattaatataacattagaatggttagtataaatactaatacgacattagggggacttcgcaggccaaggcactgatccttcgatccgcaggcgaggcggtaattaacgccgagagtacttagatttagttgatcccgttttgggtagagagctccgtattaacgctagcgaacatggtgaggtagaccatgggcctcgtcatgctatgttgatggggctttgactgacgatcgtgccttagaccatgggcctcatcatgttgtgttgacggggctttgagctacgtattaacgccagcgaactcaatgaggtagaccatgggccttgtcatgctatgttgatgggagctttgagtggctttgagatgtcccaaatgctaggatgaagagaaaataaatgactatgcattttgtgactccaccaaaaataatcctccccatcaaagcgaggaggcatgccaag

SEQ ID NO: 104512 - DNA, 339 bp, Zea Mays
ttcaatccctatagattggcacaaaacaaacatggccttaaagggaaaattaaagggctcaagtttagtctattctattgttgtgtctgaagaaatgcaccagaactgaaaattatgcgtgaaacttgatcaaaacatttcctccatgtcagttcacttctcgtttgatcatacagaccaggtcagatctcggcaggtttacttcacctgctacacctaatgctagactttcttggtgaaccctgaattagcttgattcgtgtgttaaagcttcatgatttaaatcaagtttctgcaaattaataattatacatgtggccttcacgacactgcctatta

SEQ ID NO: 104513 - DNA, 351 bp, Zea Mays
aaaaaatctacccccaaattcagggcgttacagaaattgatgaagccgtcgaagcgtgttagaaggcgtttggtactatctgcttcttcattggtacaagagatttaattcaagagcatatagcattcagagtatggccgcttgtagagaactgggaaatgccgaaagaggccatcaccaagtctagcgaaggtgaactggtctggctgaaatatacattcaggtatggggataagttcgatgagccaaacgatgactagctgaaatgcatcaaagttacaagagatgaactgcttggatcatattccaaggcagaagataatgcactatccacagccttcggaagtcagg

SEQ ID NO: 104514 - DNA, 407 bp, Zea Mays
gcattttaccggcggtggctgtggagtgcactcctgtcacagactcgcggtagaacgaacgggaccatgagcgtcgtcatacggcaacacgagcagcgtgacgacgtggtggagcgacgtcatgtggccttgcctcctccgtgcaggcttgtcgttgccggagccatacaacagaagcgatctccttaacagcgagtgcgacgggaagtttccaactggcgcgggagggaacgaacaagaagctttagcgagcggacaaaagtgtgtcaggtttaacagatgacaaggacgaccgctattttagcgaaacctttataggccattgctggatgccttgcgaacgacgagaaacactatatttaaggtacaagacactttagcgtctcttgctggagacaaccttagaa

SEQ ID NO: 104515 - DNA, 537 bp, Zea Mays
gtccttcctgctcgactcagaaacttgccgctcatctctcttcctcctaaagcaaaaagaagctagatgcccatccctctcacaatattcacaatggtacctcacctctctcttgggtggattttgtttgtggaagggggctttcttttcggatggctgaggggctctaggaaggggatcactagagatgtcgagaaaggtgtcaagtgtgttcctaagatggttaggttttgcaagccacacttgtttctgaggaggatctctcataggttcatcaatcacaccatctctcacaagggtgacatgcttatcagaggtggttttgataaacttgggagtggatgaaggtttctctgaaggtatcaaaccactgcactcaccaaccttcccaaagcgagcgacactcccatccttagtagcaaagcctaaccctggtccgccagttcccctcttgaactgactgaccatcatgcccaactagggctcactgcatgacacccaactcaagatagatcgaaggtatgtgttttcttccta

SEQ ID NO: 104516 - DNA, 501 bp, Zea Mays
atccagcctattaacaattggtgtctccaactgtatgggcactgttatcaggggatttgtaataaccacatgagcttttccatgagaagcctcaacaatgcccacaccagcccctttctcattcgacttaacatcaactggctgcacattagtatcaattttggtagctttctcatctgacttaatatccatatctttcgccagaaggttgttggaattcaaaaacttctgatgcttaatagtcattgcttcagccaaaatttttagagaatcgacgatagcttcagtacaccttgacttgcaaattgaacaacaacccctgaccttgtcatacagaacttggcaagtactatcaatgcattcgacatccactatttggccaaaatcagctaataacttttccttgaaaaaagtgaaatcatgcggaaattgtttctctgcttcaattaacaccttctccctataagcagctctctagagataaaaaaataaaaaacaaaa

SEQ ID NO: 104517 - DNA, 756 bp, Zea Mays
tgccagagaaaaccttccattttacattactataaaaagtaatgatacagactcgatattacataacaggatacattacccattatacaaaagttcaacctattatacaacagtactccctacaatacactactctacttttacttctattacaccattattcctgctttccattagtcttggcggcctcatcgtcaggtgtgggagtccagacgtcaaccaacctcaaagaaggagggggctcaaaaaggtctaactccccacccagcgcacgtcccgcaacgtgagatggtccggcttctgcctcagcaggatgtgcaggctcactagggtgtaattgtgagtatagtatatggacttcctcatgcaacgtattgcagtaaacctgcaggtcatcgacagtcgagctaagttctttaattcgggcctgagcccttgcttccttagcacatattagcaaacgagactgtacgacccagtcaagtgctaagtctcgatcagcgagttgatcctgcagatgtcggatgtcccttctcagttcattgattctatctccgtcggcgacccaagcatcggtcctgtgttgaagcgctgcttgaagtcgactcactcgggcttcaaggtctccgatggggtcattacttccactgctgctgctttcatgtcggggagccaattgatgtcgaggcaccccaattggtcccgtagacttgcgtgccgttagtctggtgcgtggcggcatctttttaaggggaa

SEQ ID NO: 104518 - DNA, 464 bp, Zea Mays
acgaaagaacatcataagggttgggatgttgtgtataaggtatcgccgcacagtagataacctgttcctaacgatgaagattataacttagacccggacacatatgatggagagttcttccaagaagatgggctagaagggcaatttgagatagacttaaccgaagctatcggaatggaagtagatattgaaatggttgttgatgaggaggatgatgaggtgcaaaatgagaattacttagtaatacttgaaggaaatgacattaatgacgaacttgcgccttcagatggtgttgactatgaaatgattgatagtgatgatgagagttataatccggctagccccgacacatacgaagattatttttaatcgatgtaatgctatagtttttttatttcacactgtttctaaatacatcttttttatatgtgcttatttgtttactcttaattacaggttgttgg

SEQ ID NO: 104519 - DNA, 1127 bp, Zea Mays
gttttatttggagaagaggggaattacttaactatagctactttacaataatcttctcttctttttcttgaacatgcagaagagccggataccattgcattaatagaagagaacagttacaatacatagccatgctagtttattattatcatttgcttatgtctataattccattttctatatttctcagcttttagtttgatagcaagttcagaaagaacttgatgtcacgcttcatatagtactagtagagagaccagagaagcaatcaagatccatgagtggttctgatttatgatttatgagtctcttttgaaaattgtgttctttttcttgtgacgtctgctgcatgtgaatgaatttcggaagttgtggctgttgaatccaatggttatggatggtttgcattagctatctgctgtggttgttgcttgaaggcttcaatagtgcccttttgattcttttcttcctagttgggaaatttccctctttaagaaagggaatagaaatttatctacatgtgtatttgaatcttgttttgctgctctcaatctcacatttgaactgcaaagcttaatttattatgtcctggtagttgaaccccacggctgtgaattgtgtgcttcaattttctgctcttgtagttggttcaagccttgaaggcttcattaattggccatttcatgtaaaaatgaatgttgctttcagacttctgagagatcttagttcagttagattgctacatgagaaatattatcgttgctacattgctttcaaaaggagctagaattttatttctttgtaattttctttgcttagtacaaaacactatgtacctttgacatgaaaatgtctactcgtctccagttagattcctagtattatcacggtaataatcgttttgtgctgttattatacttgttgttattctgtgctttcactgttgctttcggtatgttgtcccatagtatgaatatatgaccatacaatggatccacaagaattcccaatgaattgcgtaggaagttatggaccagatcaattggcacagaaattacacgaaattcatctcaaattcgcccagaattaagatagccaagaataatcggctgccttcttcagataat

SEQ ID NO: 104520 - DNA, 320 bp, Zea Mays
gaacttggaaaggtgagcttcatccagtatcttctttctgagctcagggtccttgggaacaaccaatcgatctccaaaccataaaattcccttgctgtcctgacggaaacacttgtattttctgccttctgcttgatcatgtttttgataacctgaacacccttatcctcaatctgtgccctgactatttgctcttgcaatgtgggctctaccgagatataacttaagtcacctgaagaaacaacttccaggtttagcttgcacaactcatcgcacagggtggtaactcttgcatccatgctcatacaattgcactgggc

SEQ ID NO: 104521 - DNA, 732 bp, Zea Mays
gttgaggatttcctgggggttttatttggttcctggtgaagccataggtctgttttttgccaacctctcctcacctcttggctgtgtttgatgtattcatgtttgatgtcgtggctcttgactcagcccttcgggttggtcgtggaacgacgatagtctctcaggacagaaccgtatggagttacccagaggtgatgcccgctggaacgtggtctgaatgcgcgtaagcgcattagtatgatgtagcccccgagcccccgagtagtccgttgaggattacttgggggttttctagttcttgggcgaagattaggactggcctcctgttgttctttccttattcgtccttccgagttggctattgacgcttatcgatcctttgctttgcatgcatctcccctgaaaaggcttttgggccctttttggggatagggccatcttccccaacctagtcggtgtcagggaaggggccatcgagctacaaatgagttatccaagtgagattcgatcaccccttttatagggtttatttttggtgagcggtcccactagggggctcgacctgttgggggcatctcatttagtccttccttattctatcatgtatcagccctctggtcagtctggtcgaccggaggggggcacgttgccaccccatcagccgggttgtcgcaggagaacgtgaggtacgaccttggacgtgggaccgagcaaatgacctatgggccgacc

SEQ ID NO: 104522 - DNA, 450 bp, Zea Mays
gcaatgctctggacaaaaaggccagagaagcaatcaaagtcagaaccaacagaggaagaactctcagaccaaccaaaggtctggtggtagttcgcagactcgtcaaggtggcaccgtgaacacgcaggccaaaagcaacaacgcaccagtccaacccaatggttgtttcaagtgcggtgagcttggccattatgctaacaactgcccaaggcgcaaccaacagacacctcagaagagcaacaaccagaggaatgaccagaacaaccctgctcgtggatctgcacagaacaagactccacagaaccagagtagaggaagggtcaatcacgtcatagctgaatcaatgcataaggatgccgacgtggtgtatggtatgtttcttatcaactccatacctgcttcagttttatttgactctggagcatcacattcatttataactgagtcatt

SEQ ID NO: 104523 - DNA, 439 bp, Zea Mays
gccaaagtctcctaagggtgcaatcggattagcactaaataagtgtgaagacgcctaagggctagaagtcgtctaaggacatagaatccacaccaaagttgcctaagggtgtagccagaatagcgctaaataagttcgaagacacctaaaggctcgaagtcgtctaagcacacaaaattcacaccaaagtcaccaaagggtgcaaccatattagcactaaaaacatgtgaagacacataaggacccaaagtcatatgagaatacagaatctacgccaaagacgcctaagggtgtagtcggattgtaatgaaaatgtgcgaaaacacccaaaaacgatagtcacctaattggcgcaaccagatcatcatagaaacccgaagacatgcataaaatatatacaaaactataaaaaatgaagaccaacccaccttcgcattag

SEQ ID NO: 104524 - DNA, 288 bp, Zea Mays
tactgctccttgctagtagccttcgtctcatacaacagctcgtgcatgttgcagaagcattttgcgcttggttctagcccctagcttctcacagcccaaatgaaaacccccatcttgataatggcttcaggggtaatttgatgaaggaaaattttgaaggtctttagcacttcaaccaggaatttgcataatgggaaccgaagccctgccttcatgaagctcctgtaaacaaccacctcttcttcgggagcaggtgcggcactatcccctccagctctcagaattgaa

SEQ ID NO: 104525 - DNA, 291 bp, Zea Mays
gtcgaatgtgctggaggagtcatcatggatcatcacagtgtcaaactgtcaatggctgatgagacgaataaacaaagcaaacaggcggcgatgacacgtgaaaccatgtccggcagctacctgtttcgagcttggagtccctttccaattttcaaatgaatgattaggagtaaaaataattgtggttagagtggtcattacgctgagctccccctccacctccatcgccgtctataaatacacgctccgtcaatgccaccttcacttcacccctctcaatctcgctcatca

SEQ ID NO: 104526 - DNA, 338 bp, Zea Mays
taggccagcatgaggagcaacctattgggagtggacattttgtacttccaatggatgggcacgccgagggatcaacaccaccaactgtagctaagaagcctaatcagcgaactaagctagcaaacttcactactgatgaggacatgagggtttgtcatgcttggcacactaggtcacatgacacactagcagacacttccatagtttcacacccatcgtcatacatgacaaactaggacacacctgacacactaggacagacactacgacattttggttgaatgccgtcattttatttaagtagcatatgaacactcgacacctatgctactccggag

SEQ ID NO: 104527 - DNA, 434 bp, Zea Mays
acgaaaaattgaagttgcaatggcgaagcatgagataagcgaaattgaaagcttaagggtacaaagaatgtcgaagagctccacgactccaaaaagagatgctatgaaatatccttggaatgcgccaaaactctaaagaacagttttgcaaaggtaggagcatattcttccgaacagaaattcatccgtggtgaccccgatggtgtcgtccagtggatcagcggagaagtcgaagcctttgacgaaatcttaagtgatcagggagacttctgcacattcgttggtgcacgaggggtcgcggcgatcttagagaaagccggttgtgaacatgttaaggctgcggctcagccgggatttgttttctcggcggatgacaccaaagacccttcgactgaagcttctacgttgggcgagagattttactccgatgtgtg

SEQ ID NO: 104528 - DNA, 491 bp, Zea Mays
tacgtgacgacggaggagcggcaccgacaggtaccccgctgtttccaaccctctctcctgcccgcagcagtccttgatggtgattgatttggacgtcaccatgtgcgagcggggacggctcgctgatttccgctatttttatttctcacccatgttttccttctccgcgctggattcaggaggtcgttctgccttcgttggatcacgtggagaagaggcgtcgcagtggcgctgacagtggagagcgacaggtctgttggctgttacttttattgaaagcgattgttttctttgtgattttgttttgtttggaatggatagacgttattgcggggggcaccgaaatgatgtctattagttatgtcctgtttaagaccgatcgcgaagtttgaagcgcttcgaaagcctacgtgttctgcaatcagaggcaatgctttgtgggttgcttcctcacctgttagtgctgtaggaacaattattttaactatttt

SEQ ID NO: 104529 - DNA, 530 bp, Zea Mays
tcgagttggataaaattaaataggtgccaacacgtggagtatcccgtttgagagcacgggctcggattaatttttggacacagatcgaacatcgagatattggatttggacacagctcgactagcaattgtcgagcacctgattaaatgagcttcagatgagatttataagtcaagaatgattttcgagtttgcgttcgcgtcgagaagaaaagtgtttaacaggctccaaattcggcctttctcgagatcatttaactcaaaaattcgagggcacttttcatgagtaacttgataaacagagagacacgattgagaagtagaaatttccactgacgatacgagttagggacaaatgtcacgacataacacgaaatagacacctggggtgtcacacatgccctaatcccagggttaagtaccctaccctaaggttaagaatacttcaaatcatcccatctcatttgttttgaaattttacctagtggatgcattttaggtataacaaacaacatgaaatgccaatgcata

SEQ ID NO: 104530 - DNA, 589 bp, Zea Mays
ccaaattcaggtgttaccctttcttttcttttctttacttctctttttcataaatattgaggagttattttgtattatataaaaatttgtcgtagtaagttaaaaccctagggagttattgttgttgcatcacatgctggagcatctaattttgtatgacgttttgtgttgtcgtgcctccatttgaactcatgaagcatgtttgattttgaatttaaaagctagagctatattcaaatagaaagaagaaaatagaaagagaaaaaggaaaagcccaccctagctccttcccctagctggcctgctcggcggcccagcctacttcccctccctctcctgggcctgcgcaagcgcagcctagctcgccaaccccgcgcatggccacatgcaaattttccatgtggtggtgcatcttgtgcggttgagaaaatagaggaaagaactaccatatgggtcccacttcctattttctctcctgcgcataatctgcatgctaccgggaaccgcgcccacgatctccctcacgaaccgctcccaacagccctctgttcatcttcccaaaaccacccaggcatagagtgcatctgct

SEQ ID NO: 104531 - DNA, 461 bp, Zea Mays
caacgccacatctgtcttctctcgggcattcgtctcaggtttttattatggcacatcgtaactgccgtattttaaattggagtgttaggggcctaaacaactgcgctagacgtgatgtcgttcgcgatctcgttcgtgacactagcgccaccattgtctgcctccaggagacgaaattacaagatgttgatgcgatgatggtcacccgcactattggacacaactttgcaaactttttcacgactctgcctgcctcccaaactagaggcgacatcctccttgccactgatgagagccttttcgacctatctaacatccatctctcttcgcatgcggtaaccgctaccatttttatgcgcgcggatgcgactcagtggcaaatcacggtggtgtacgaacctcaaagcgatggcgacaagatgcagttccttcaggaactcaaaaacatcaacccaccgtcg

SEQ ID NO: 104532 - DNA, 404 bp, Zea Mays
gaagtttggtgctccctaattgaagacctttatgtaatccgtattcggtgggaggtccggtgcaccattgaacatgtccggttagagttagacctccctaatagctttgcatgactctcatccaatgctatgccattagatgcatatcaaactcataggtgctgctttgaacaaaggtttgtgcacatcaaactcactatgcacatctagtacataggttcattgcgctaatagtacaacaatctcatcaaactcaaacaaccttggagttgagtttgatctcaaacttgtattgttcttctagaggtacctagtgccatttttcacaagtgtgcattatacccactcactaaactcaactaggtaaaggtatccatttgttccctatttatagtacagccaaa

SEQ ID NO: 104533 - DNA, 297 bp, Zea Mays
aggtctttgccatgaattattgtttgcactagcagaagagaaaagttggaaacaagattgcatagtttgggtcatgcacctttacgccgaggactgggaagacttcagaggaagttgtggagctagttccctgcacccgcaacaagtggggcaactggtatgattactagttctatgtggcgggaggcgaagtcgaagacctccctggactcctggcagccgtgatgtgctcccactgctatgtgacgtttccgtcgtttgaggtggcagaggatgatagtgacgaaggggcccttc

SEQ ID NO: 104534 - DNA, 790 bp, Zea Mays
tttttctccttcttaatatcattgatgtgcagttctcctgcgtattccaaaaaattatattattttcctaaaccatataaaaagtataatgatagaatatatgcacggaacaattttttgaattgccttgtttttaactctcaataatggtcgctctaaagtaagtgttgttcacctttctactaggaatgacaatggcatggcaagccttagcccaagtcctaccaagaatctctcttgagctcctacccttactcgtccatggaccagtgtctaccctttgttgacgtggtctagagcttacaccaagattgtagtctctaacctgctctcggcttgagaccgggcccttgcaaacatcttaggcagtggaccagatcgttgagttcccgctaactcgacccagatctaccacatgtatcataccatgcaccaactctttgtttgaattcatgctcctctctagacgcatgtagtgcagcctgaattttagcatcataatcatcaccttgttcttcatcataataagttcttgctacttcatctgctcgttgactctagacaatcctttgcctcttcttttcctttgtcttgtctagctcgccagcaaagaatttctttatttcaggaggaacggatggacagttcttgacatccttccctcgatgtgctaaatgctgcttggaacgagtagcacttccaccactcttcccttcatgacggtacttgcacctgaaaccttgaccaatattctctccatgctcccacactaggcccgacattttaccta

SEQ ID NO: 104535 - DNA, 534 bp, Zea Mays
ttgacttcgatgatactttcggtctcattgtcaagccagcaaccattcagacagttcttactctagctctctctcgcgactagccggttcatcaacttgatgtcaacaatgcatttcttcatgacaccctgtctgagaccgtgtactgtgttttgccttctatatttgtttatccaactcatttggaccatgtttggtacctaaacaaatttctttatggcttgaagtaggtgccccgtgcatggttccatcgattttctacacatctcctctcattgggttttgatgtagctcagtcttatacatcactattcatatttcactgtggcagtgagactgtctacctacaactgtatgatgatgatatcgtcctcacttcctcgccaacatatctgctacgtcgcaccattgttgccttgcagcaagaatttcctctaaaagatccccaacccctacatcattttcttggattgtctatgactaaacaacatggcaccatgtagctatctcgacatcactacatcttcgaaatcc

SEQ ID NO: 104536 - DNA, 523 bp, Zea Mays
ctctcatggcatttttgggaaactcattttgcaacctaagaatcaaatctcgagcatgagtaaaaagcatcatccttcgcattcatgaagaacacccaagaatagtgagaaaagtttttaacgaccataagcacataccacatccccttggtgactggggaatgggaagcagtaagcatcttgtcatgatgacaagggtgacatacaagatcttcctcaaatttcaacttgggcaatccttggatggggccaagtgagcttagtagacacaaaagatcaaagctcaagtgacctaacctcctatgtcacttccaaatcaaagatgaagaccatatgccaagagacatcgagaagggccagaagaatgtgtaaaatcagctcaaaaaactcaaccaaaagggaaaatccaacaaacaagatcccctgagcatccaaaacttgagaaaggccccttttaaagcgcacttcatagtgatcctcaagaagttgtgaaacagaaagcatattgaaatgcaaatttgaa

SEQ ID NO: 104537 - DNA, 656 bp, Zea Mays
ctcggtaaccaccatggtgtggtcctcccgcaccagccgggtgaagggtatcctcagcccttggaacaataaaaccgaaatcatgttcgccgtgagtgccatcaaccaaagaggagggaagtgaggctgcagacgaggactgacattgttgcactcgttccatcagtggagactactcagggcgcttcgtggaagcacgacgggtgtcgtgggggagggttcagaggccacgattgatcagagcacacagaatcgctaactagagtcaaaatccgttgtggagccgcaacacgtcgagagcagctacctcaacgccaccgttttgggtaagcacacctccgatcacttcgccttcgtctacacttcgcccggcaccaatccacgttgggaattaatcctagggagactgtatttcacctcgccggtgaactctcggtcatggggtgcggcggtgccggcctcacgcggttgtggggttggggatgacatggcagtcgttcgtctctggatgtgcgactaagattcgaatcctcttaccccttcactccataaaaccctgaccgttcatctatcggcgagcgatccagattagcttataaaatgccacttcgaccgggatgtcgtggaccatggatccacgatctaacgacccagac

SEQ ID NO: 104538 - DNA, 509 bp, Zea Mays
cggattggtaagtcttgttaggtcgtgttatgtgcttctcttgtctttctatctaggtggtattgtaattgtttagccctttttgccaaaaaaatgttgcttgttttgcccataaaaagaccccttctccaaataatctagtggttccctagtgaaaccttaaaaaaatcatgtgcttgttttggtgtttctagccctcgtgtgtctacccttgaatttacacctgcacaacttatagacccccatagcttgaccgctaaccaaaccaaagcttccttgtgcacttgtttatgtaaaaaagtggtttactgtctgttcacgcaaaccatgtctagcctcaaattctttttggaaaccttgtccaaaatcctcatcaaattctccttggctcaacctaaaagccatctgggttgatgacctctccattcacctggatcgagtaaaccgttacctttgtgaatcatgttggctttatcatctgaatctccggatcccttaatgattctttc

SEQ ID NO: 104539 - DNA, 709 bp, Zea Mays
gtcctacagatcaatgctctcgacagctggagaagaagggtgtgtccccaccgccaccgcctgcgccagctcccggcgggctcgcatcaggtgtcatagccgccatggtagtcgtagcatgtgtggctattgcaggcttcctcggatggtgtgtctactactcctggttttgcagtccatcggccaaagcgcgaggtaacatctagcaggtccacccctcaatttatgaattaactaattattattacaaccgtgcacatactaattaaatcagcacaggtgaaatggagatgtcgcgtatcctctcatctcggcgctccacgtcagctctcctgtgatgcgattctgtctccctacagctacagcttgctcaagcatgcgggaatgcagcagtagcgtagccggtaggctatgctgctgctgggctggtagtggtacgataatgattggagtctgctgctgctgggttggttgtacgatagtactactagtgatgagagtgacgccagctagctgctctgctctgcgtccctgatcaaacgagagatgaatggtgcacgcagacgcagcagcgcccggctgtttgcatgggctataaaatggaccaccaccacaatcgatagggacggtcgggtcacaatcgccactatcctacccactagtacatactagagaagtcgatggcctcctcctccgtttcgctgctcgt

SEQ ID NO: 104540 - DNA, 574 bp, Zea Mays
cggaatagtttgcgagactgttttctggtgtatgattgcttggtgtacagtgaatgattcgtaataagaggagaggaaaaaaaacacctggaatcaatggactgttttttacaacgatggcacacctaatgaccctaccaaaggatgtgcacttcctgtatataataactagaactctagaaggatacatgcatgtgcattgcatgcatagttggacctacatgttatatataggttagggtcaaaactaggcaacctaatggtatgatcagatagaaaattataactaatggagtaccggacagtgttataagacgatgggatggccaaacaaaagcataattagtcatgtagacttcttgtattttgatagacttaaaatagtaattacatctagcaattggtgagggatgaagtggattttttttttgcatgagggcatgtacaactctatttattatggagtctcttattatgaggtctttagagagttaactgaaaaaatacaacagacgatctcttcataaatacgctgtttctacacaactctctatacatattgtctcttaactat

SEQ ID NO: 104541 - DNA, 557 bp, Zea Mays
ttctcgacagtccattgctcagcccgctctccatacaagtagtttgattcattcctagcggctagctactcgacctactcgtagctcgatcgctccttcgatcatgactggatcgttagtggggtgaccagacccgtccgctactagtatcaccttgtcttctcgtcactcgttagtttatcgcgttgtcgggatcccacacgcagcgccactactttgtctcctattccacatccggtgggcaagctattggtgggatcctgccttggcaccatggtgtcaccaccatctgccctcactatgccaccagggtcccaccacgtcgtcgcaatgcaacaattgttgtcgcttgccactgcctacagccgcttgccctcgcatgttgctgcctcatcatcgacatcttaaggcagactcaccacaatgacgcgtcgatgtgactgcttcacccgtctttctgtagggtggccataatggttttctgatattcatattattttagaacgctcctagtattatcatctgaccttgttattatcattaaactatttttatct

SEQ ID NO: 104542 - DNA, 559 bp, Zea Mays
cgcgcacacatgaagtaactgtgctgtgagcctgtgactgcagaaaagcacaaaacaatctattcgtattattctcactgtcaatcatcattctaaaattatccaccgacacctagcatgatagaaaaaagtctcacatcttgaattcttgatgcatggtccattacaatactacagtgagacaagatggatcctcagcaccaccaaggtatttctaaatgattaaggagactaatgtacgactccctagcctttaaagtattgctttgttttgttttgtttgcttcttgtttagtgttaccaactgctcggcgataaagagcatgtaacataatagatatagaacctgcacattctaatgcaaagtcaaagcaccaatttggcactgtatgcatgccaaacccaaaaggtaaccataatatctgactaaagacattgtcatatgggtagtcaaacaagagcaaccagtagaccacagaaacattcgactgcaattatatgtgtgaatgtgtaattacttcaaacaaatttatgtcatcagtcaatgcctcaaatgtgt

SEQ ID NO: 104543 - DNA, 570 bp, Zea Mays
tgcttagaacttagaaattttctaagtaacccataatccctacaggtgtgtcggaccggatgctgatggttcggacatggggcttggaggagcttctcgaagtggttggtggtctcctcggctggacgccttctttttgtccgacttgtcgcaggctcgcagctcactgacagttttctctcctgaaagcttctacctgttgtgctaattgatggtgtttcgaacatcgctccgataagtaaatttattgtgcgtactctggactcgtgtgtggtaggagcaagatttatactggtttggcataacgtccctactttcagtaatcaacaccttgcgttaccggcaccatccatgatcaaaactcgtagtaggggtacaagcggacgagagagggatgagaaactctcaagtctctatggggtggaagtggaacttagaaactatagagtggagtcctagctaagtcttagcttggcggcgggactccggcctcctggtccttgtcagcgctcctcctgtgggtgcgtgtagaggtgaacttagctccacccaccatcgtctatgtgttcc

SEQ ID NO: 104544 - DNA, 348 bp, Zea Mays
ttggatgttggatacctcaatcagtcagtcgtgatcctctcatttatatacagggaggtggccttatcctagtaggaaataactccaatacatattttgcaagtccccacattaaaaactgatttggaaacgaatcgattcagaatctagcaaaagtctgcctagttgactttgaggctgggtttcatgggggctcgactactgtaggcggcttgacaacaggaagccgaccaccgactctgtcgccttgtcgggtttggaggaagtcctagctggatttggagacctgacttggacaggtttagtggctggcctagccgactttggcaaggcaggagcaccatcttc

SEQ ID NO: 104545 - DNA, 325 bp, Zea Mays
aatgcaattagatatcgcgtagttttgtcactatcaataggaatcgagacggtgacgttttctcacaccgttcaggcacatggtcaaaaatggaactacgaaagaagcatatctcatcatcgcatcgatccacctccgtttggatttttgcgggacgggatcccatccttttttatcatccacttaatctaatggtgataactggttaaatgattaattatggttagaatattgtaacaattagtatttatcatcataaaattgtgattggtaagtgttgtgctgattagtgtacagctggcgggtcaatcaaaggattgttagt

SEQ ID NO: 104546 - DNA, 600 bp, Zea Mays
gttcaaccggtagccagcgttatggtggcccatgacttagttgctttctctgacttcaaagtcagggagaatgattctgatgaatgggcgttgcgttgtgcgagggtgatgagcaacaactgagatttggtcgaagagtatactcgtatcaaatgtggccactcaatagaggctagacagttggtgggtcacgcggcggaggatgccgctaaagagtgcttttttcaagatggatgtcattgttatgagtcctgccttagctgttgaacttggcggggcgagacagggcgggcttcgttagtggtgctgaagcgaaggctgttaaaattgttgggaaatactctgcgaagactaagttaacaagaagcctgtaaatctgagatggtaacattcgtctcaatagggttttcaaaatgaatgagctagaatatgggtcatatcccgaagacgtggaagaaggggaggaagaagattcaagtactactgcaaggaggaaggaggttattgaaggcggcgaagatagggtttgtttgaaatggaagtctttgcctactgaggacaaaatgaggattagggcgaagggggcgaggtctccagacg

SEQ ID NO: 104547 - DNA, 393 bp, Zea Mays
ttttaagaatattcagccactgaaggacagagcatacccggcttatttgtatagtggtgtcaccgactcaacccgggttaccaacaagaggattcctgccgtggatttggtgagtcgactagaaatgatccttagaggcaaagtatcaaacattggtgctcctgttgtatattctgcttggaatctgccaccttccaagtcctttttcgattttgtgtcaaatcctcctgctagtgacagtggtttgggtcttagagtgcgaccctctcttgaagaagttgaggttctggttgcttcgcttggagatcttcccaatgatgagaggcaagttcactttgagatgcctatgagtctgggtgatgcagagataagtgaaagtcgcctagagggggt

SEQ ID NO: 104548 - DNA, 806 bp, Zea Mays
cttgggtctacatgtcaaaactttgattttctttgacctcgacacaccagtagatgtcaaggtagcaactttccttttcctcccttgttttcaagcgggataacagtagtctgggtaaacgaacccgataacatcaaacactctgttcaacctctttttgtcgcgagcgccgaaggcagttgtcatagcttcgtcttctgccttcgaatacgctccaagtatctcatcacttgttgcttctatggcctccaaccaatcatcatttggcttgtcaaactggttcctgaaccgaaaagtgtactttagataaactaggccaccctggtggagccagcggcgacctccttcgacatttctcactcgctctcaagaggccatactttgtaagcaatatgctcttgaactaggtctcttgtgccaatataggtgcacactgtgttgaaagcagcctggcacgcttgcacatcattcccaagtgcagtgggtggccttctaatgccgaagcgaaaaccatatagggcgttgaataacccctctcacatcttccctctgactcaagtcattcttcacgtaaaaccattcctgcatccaagagcctggccacctcttccgaaacgtgggcacagggtaactcgcctcagatcgaggcacgaagctgtaacaaccaaaattgttgtgatactattcctttctggtcgcctttgtgtgataagacaactcatgaatattgcaaaagcatcttgcacctggttccagtccttggctcctcatggcccagataaaaaccccactctaataagagcttc

SEQ ID NO: 104549 - DNA, 1016 bp, Zea Mays
gctgggttatctggggattccagcgatagtgatagttttgatgtggagagtgataacgaagatgccgaagatcggccatggaggccgagtcatgttgtttccagaaaatctagtgttaagcaaggacatattgaagcgatgaagggaaaatatttccatgatatatccattgtgagggctaagggagagagtaccgttcctcttcctgaagcagacgaagtagtgttttaagtgtttcatgaaggctgggctgtgttttcctttgcacaggatgctgattgaagtgctaaagacatttgagatataccttcatcagcttactcccgaagctttaattaaagcgtgagttattatttgggctatgaggagccaagggctggagccagatgccaaatgcttctgcaatattcatgaattatcttatcacataaaggcaattgggaaggagtagtatcacaacaactttgggtgctacaactttgtgccccgctctgatgtgaggtatcccgtgccaacattctgaaagaaatggccaggctcttggatgaaacaatggttttatgtcaaaaatgatttgagcaagagggaagatgtgaggggtataatccagcgccccatacggtcacacttcagcatcaagaggtcgtcaattgcaagtgggaacgaagtgcaagcgtgtttgatggctttcaacactgtgtgtacttacatcagtaccaggaatttggtccaggtgcatattgctttaaggtgtgaccgctcgttaatgacagggagatgccgaaggagactgttgttggttctagctagggtggtctggtttacctgagatacacctatcgctacagaaatcagtttgatgagccgaatgatgattggcttgaggttgtcgaagctactagtgacgaaatgttgggagattacacaaaggtggaggatgaaaccatgaccactgccttcggcgatcgcggaaagaggaggttgaatagagtttttgaagtaattggttttttcta

SEQ ID NO: 104550 - DNA, 485 bp, Zea Mays
accaaagaagggctactgtaatagagtacaccagaacgccacaccgaatatgacactcatagaagactgtagcttgtttggaggaatataaaggcatcagatgcatccggtaacaccgaataccccccatcagacaatataacccaagaggttgcaaagcgacttggatggccatgaggcatttaacgtatctagtaaggcacaaggatacccaatctccaatggcgatagttaacatgggcaacaccagcatatccaatgacagcatcgtcgtttaaagtgtatggaagttgaagaacattaagacccttttctaatagctctatatacctcaatacaaacgatcatattttacgtgattaacctatgctatcatgtagtatattgtgtaggctctatttgtttaagcaagcatctggaaagtttctcaaatgtaaaaagccagaagctaaaacaacaatctagctttttggtttagctttcga

SEQ ID NO: 104551 - DNA, 293 bp, Zea Mays
cttcaatgcttctgttgactagacttgcagttcagtagctatatttggatttcctttgatctctatcgatctcttccttctgtctcaatacattcatttcgtatactttatggatgtgacttgttcagaaaatcttttgaaaattcctggccgtcccctccccccaatgggtgtgaccaagcgacgtcttggtacgcagagcgtttatcacactgtcctggagtagtaacttgatgtgaccgtggggcgtaatcatatcgcccgagcagttgaccttagtccaaatggtgtcg

SEQ ID NO: 104552 - DNA, 350 bp, Zea Mays
gtatgactaccttgcaacttctcttgcaaacaagatctctggactgcctctaatttcacgagacatcttagcaagatccagagataactcagcaggttcaacctaattcagatgtatctatgagtcagcaaatatcagaacgcaaaagaccagatctgctcaagttgcctcaccttgtaaccaggatgtttgtctaacttgagcagtgcataataaccccgaaactccttttctgttgagaagagaacaccttctctcctatggtcatcatacatttgaaatagctcaactgatgttttattcatctgctcaatgttgaggtgtgcatcaaaaccctcggaaaaaccttc

SEQ ID NO: 104553 - DNA, 333 bp, Zea Mays
ctgctgcattgttggaggctaggaacaggagctgaaacgcatacttgagttggtctcctccaggggcaacgaaaaggattcatgcccctaccccctacagtttcagtgccccgtcgaaatacatcttctagacttcggctgactcgaggttctcaggaacctcatgctcaatccattttgatataaaatctactagggcctgggtcttgattgtggtgcgaggtcggaactctatgtcgtgagctccaagctcacatgcccacttgactgtccttccgactgcttctttgttgtggagtatatctcctattagtaaacctatgactactatga

SEQ ID NO: 104554 - DNA, 434 bp, Zea Mays
ctcgaatctgtttcttctccttctccttttcctttgtttgtttgattgattgattgagagctgctgcctgcagttcgtgcatggtcgtctactgggggcagggagagatatataggtagtataccactaaccactgggccagagatagtaaatggcatgagtacgacatctgtggcatggtccctttctttcccaatttggcaagtgggtcatatgaatatagtgtacgatgagaatccgaggagcaaatagtggcatgcactcgtctacacggaattctgcacgcaataaacatgcatcttctccaacttgctgataagcctgatatataacataccactaccaccaggtcaggtgatatttgttctgaaaatggcatcttctgttcggtccaaaatatgattgccaggacaccacagtaaacatggtctctc

SEQ ID NO: 104555 - DNA, 539 bp, Zea Mays
gtgggtcccatgagccagggccatactaccactcccttttgtgtttttttactagatggatatcaatatctatctcaatcctttcacaggcataggcgaatgctaaaataaaagcataggtagaagcagaaagaacaaatttgtcctatcctagaatcaaatctctaggtttaccaaatcttgatcaaccaaatgtcttgtgaaagagggatttaagtcaggtattgaacctttccaatagaaagaggtggttgatccctccacatcaaaataagcatacaagactgctttaaccaacaggggtgtgtagtaagatagagtgaacacaagacaagcttgctccactcaatggacctatgaacctatcgcatcctttagccttgagacagggttagactattagccagtccttgacttgtctagggagtttctaagcaaccacatgcaacatgtgttcaaggtctgattttgtatggcatgatccacactacctcgaggtacaaaggaccctagggctatcacatgtcctgagatgcgag

SEQ ID NO: 104556 - DNA, 503 bp, Zea Mays
tctttattgtctccagtacatctaatacattgaccatccttttcctttttggggtcgctataagatctttttgcaccttcggcactgttacttctgccgaagggctcagaactgatattttgtcttcgactctaggttcttcatatttgttaaccttcgagattgtagccggttcttcattcctctatgtgagggcagattcttcggatttagtagccgaagaggtctcgccgccaaattcgggcactacggccggttcaatatatcgcgaccggtgagtaaggaccttcaccttattccgctttggcgcgggcttgcttggagcagctggagcagcatccttcccgaaagttgcactctttctcttctgcccccacgacgggtagcggtaatcagggtacataaacccaatagcatcgaaaactctattcagcctcttcttcttccagcctccgaaggccgcagataacgcgttatcttctgcctttgaatatggcccaagc

SEQ ID NO: 104557 - DNA, 388 bp, Zea Mays
atttgagatctgggccctgaaacttgctctgtcagatgctctgatggtggtcaccatggtacagtgactgaataagattacagattcagctccactcgccaccggtgacccttgtgtcatgatccgcgtcgtcgccacgattcgtgctctctgtcgaggagattatcacggtagggtaaaaatcttggcaccggataggctcagacctagtcgacggtgagctcgtcgtacccacttgggctgttgtcgggcaaaatggtcctcgtcggagttggccgcctacctaccgtgcgccacgtgccttagggcgttaccacgtcgtagtaaaccactaaagcatgttcggtcatcgccggtgaccttgccacggtgtaagccacgaatcctt

SEQ ID NO: 104558 - DNA, 373 bp, Zea Mays
tgagaatccttctccccctttttggcaactagcaccaaaaaggagagagccaccagccataaatcaccactgaggaggatgatgcggaccaaagaattgatgcgccaggtgagttgcaaagtgtttttccccagactgagctgggggaggatagctgcccgaaggatcctagggcggaggatgagaagaggattgacccagatacccctggtggggaggcggggcaaactgctcacgatcatcaaagtattcttcatcttcttcttcatcttctggagacatgaaaggcaccccatatgcctgttggtgccactcattgatttctggtggaggaggatggagaggcacatcaggccaacggggagcaaatggc

SEQ ID NO: 104559 - DNA, 1093 bp, Zea Mays
ctgatgcacatgcacgtcagctgctaagctaagctccatcctcagctaattgtctgatttaagcagtccagcaccgcaccactccggaaacaaaagcaagcagcacagcatctaagatgaacataagaagcaacaggactgacattgtcaagtactatataccacatgctttggttccaaaaggcgacaaaacttcaaaggcgaaatcttaactttacgatggccctacaatatattacctgcaagcaaacagaagcacgcagccaagtttattttccttcttgaggttcagctctcgcttagtactcgacttcccagcgatgctggtggtagtcaacagactcctgggtgacattagggcagtctgacaaattgactctcttcagcttaggcaatgttgatgcatgtaagatagccagtaacctgtcagtgatcaaggggcaccagcaccacgttaaattaaactcctcaagttggtgaaatcctacaagcataaggatcctgatttggacatcactgattccaatacgattcaaggtcaacttggttaggttggggcaagactctctgaggcacaccacaaagttgcccagaacgttcgggcactcgtccaatataagttcctgcagagctccctggcatgaacgagctacagtgcaaacatgcgtgtctggaaaatggtaggattgcagttcaacctttctgatcccattgtagtgcaggatgtcacataaaatgtgttccatgtgataagcctgaacagatgctggaaagccaacaagcctaagctccttaagccctcgacacactatgttgacccattacaagatagttctctcacagtgctccgttctgatcaccttcagcttgggacactcacaggccacagctacagcttcatgaagatcacgtggcgtcattatgccaaaatcacatgaatccataatcattgattcaatagttctgctgatcaaggacatgacttctattacagctttatatgtaaaaaaaatggaacctgacaagttcaatggtcctaagcttactgggattcatggcatcacccaatagacacttcaagccaagttctgtc

SEQ ID NO: 104560 - DNA, 394 bp, Zea Mays
tggatggttacattaaccagaccgcaaggagaaagaattgaagtcaatgtcagtatgccagcaacagcagaagcaatggtaaatcaattggaggagaaatctttggaaaacatcagaatagtgtgtgaatacccagacgtatttccagaagaattaccaggtatgccagctgatcgtgatatagttttctattgaattatacccggaactacaccaatttcaaaaagagcttaccgaatggatgtcatagatttaattgaactgaagaagcagatagaataattactataaaaaggttatattcgccccaaatcgtctccatggggagccccagttctatttgtaaacaagaaatatggttcaaggagaatgtgtgtcgactatagaagcttga

SEQ ID NO: 104561 - DNA, 1073 bp, Zea Mays
cctaagtctgaaattcagtgatattggctcaactttggagctctatatcttccaaactattgagaatttaccctaggtcaccacatcaatattatagacctatcaaaggtgaacaactttgcttaaggggttcaacatggttgtcatgaaaaatatgaagaaaaatgcacccaaagtcgggctatcaggctgccttcagtctgaaaccagtctgacagtgtaaccgagccatctttggactaatattcaaccttgatctagtgagaatttggcttgggttgctatgacatgatggtagctggatcattgggctataactttgctaaagagagatgatcatgttactacttaaaacggggagcaaatctccctgcaaatcgctctgtcagctgtctgaaccaagctcagcatggtacagtataccccaaactgaatcagatcacgagattcatttcccctcgtcgccggtgatccttcgccgtgtttgttgattgatcgtcatgattcgtgcaccacggtcgggggataactacggtgaggtaaaaatcttggcataggatcgactcgagctcggttgcggctaagcccgccgtacccacttgctcattggtcgatcggataagagctcaccgccgttggttgagcactgctgtgcgccgcgtgtctaggctctataccacatcgcaattagttatgttaagggatccggtgatcaccggaggaagcgccacggtgaaagccacccatcccgagcaccagtatccctgtttccctccggccgccagcacaacctcgggaaattggacaccaccgatgatgggaagtataaattgccacctccgcccgctccgctaggtaactgcgcagccggtgaagcaatccgcaccttgaatcctcccctagaatttaccaatttcggatttccccaagctgctcaagaacaccgcgtgtcttgacttcgccacggttcgctcaattcaggtccgattttgccatttatgttcttgttttagcacccatgcttacccttgatgctcatcgacccgtccaattgaactagaacgcccttagtc

SEQ ID NO: 104562 - DNA, 1060 bp, Zea Mays
gtttaatggatgtttggcaaaaacccctgtgacaaagttcaagctggattgataagctacaactttgatgtagagtatcaatctagtcaccaaacaaaatctggagaaaattcgccccaaaccagctttgtcagaccaactgatgaagcctctaatggtacagtgcactgaaggagatcaagtgcagtgcacctcgctgccggttaaccgtgcgatcagattcgtgtcgatcgccgtgattcgtgtcgcctggaggtggattgcgtttggccgtataaagatcttgtcgtggatgtgttcgggacattgtggtcacgctgtccctcgaccatttgcgtcggcgacgtggcctaacggccgtcaccggagttggcgtccttcaccgcgattgtgccatgccctaggcctttaaccacgtcgctactaatcgcaacagctcgccaatgaccgtcgtagcccctcagtcggtgagtgccacggtaaaccacaccggtgactcatctcttctttccgaccgccgcgcgtctccatcgaattcactggccaccgctcaagcacgttataaattgagcacaccctcggctccgctaggtagtcaagcacctaatcctgcaactcgtgcctcaaatcatccacaagggctcaccaattcatgatttcccccaaatcggttctccgccgccgtagaaaggatctcaccgtggtcagtgcacttcaggtccgttcatgtcctctgccctcttgtttcagcacccctacctgcccctgatgcttctcgactcgaccgattaggctaggaccccttagatcacctggaacactccatgttgtccattgtgcctgctgtcaccgtggatagggtgatgtagagctcaaatccagcaattaagcgaggggaaatgtttgttaagggttcaaattggtgtctgccacatgggagcaccggtagttgagtaatctggccggtgtaggcacgcaggagctcggttctctgccactccccgtcgtggacctcggggtgtgaagaaatagaagtgtgagggcttatttgcatttgtca

SEQ ID NO: 104563 - DNA, 315 bp, Zea Mays
atttttttattttgacttgtttaggatgtcaaatactaatttaaaacctggataaaggtaaaacttggtggacaaatatggtaaatggacacgagagtcatatgtgtgcaatggttaggggaagatcacttgacgacggagctagaggatttgaaccccgtcaattgcgcatttttctcgtgaaaaatcacgtgtggctgccccatatggtctcactagtttttttcgaaaaatcacgtctgactggaattcttgattttcactggcctttaacccttgcagttagtaaagacgcccataagatcttgttccgtt

SEQ ID NO: 104564 - DNA, 668 bp, Zea Mays
aaattaaccgctatacctttatactattgtatgcgaggctgtcagcaagatcagccttcgataagaccaaaaggccttcttcaagcttaggaaatcccatactcttagccatctcccggcaaacggatatttctttgttatccgggagacagtacaggaaagcatctttgttactaccattggacactaaggcccccttcggatatttcagtctttggacatagtgtttggcctccaagatttcttcttcagataatttcttccccgaagcatgtcgaacaatgtaatcagtatctttagctaaggcttcggggacaagagattttgcttttctgccatatcttgctctgtcgttttgccagtatctgaaatttgctgatccaccttatcttcaggctcggtggccttcgtctcggtaggcgctgaaggcccagctttggcttcgtcttggattttgccagcttcatcagttttcttggtaggagcaggagttaaggcctttgtgatctctataacggcgtctagcacgctggccatcctcctcctcttaggagttgcagcaggagctttttgcatcttcggcaaatctgcctctgccggtgggctcaggatttctggcacctttatcactttttccacctgtggctctttggccttatcatctttag

SEQ ID NO: 104565 - DNA, 346 bp, Zea Mays
cggggcttgccttgtgttactggtgaatcaggctcggtcccgcagatatcaaaatagaaacagctgcctgcctgatgttcctcagatggtggtggtggtgtccttgcttcttcttctacttcctctttgttttctagatatagccaaatataataatgaatgctcatgtaatgctcatgaagatgcaaaaataataaaagtttgttatctaaagtcttgagtacaactttccttcacggatctccgtgaacttagggtttccagagtcaatagtgaagttcatagggcaggggctagggttttaggttctaagcttcaaacatggtccaaatcatatcaaactcta

SEQ ID NO: 104566 - DNA, 355 bp, Zea Mays
gtggattgaaggtgaagtcgaagctttcgacgaagtccttacgggtcgaggagacttttgtgcctgcgtatgggcccgagaggcaatatcattggctgactgcgatcactcaaaggttgtaattcaaccagactttgcattttcagctgatgatgtaaaggagccctctgccgaagccattgccctgggaggaaaattttactccgaaatttggcttaatggtggaagagagatagctgacaaagctatcaagcaaagtgaagaagaggtcatttcagatactatattattattatatgggtttttagtttactttttatgctcaatttattctttatggctacttcaaactcat

SEQ ID NO: 104567 - DNA, 491 bp, Zea Mays
atgcttcaattgatggcgatgattccagactccgtgtgtttcatgtcgttaggtgatggcgttagttaccagtgttcgtcggtgttagttacttagttatcagtgttcattggttgtgttcaagtatgcaattcagtataacatgactgatcgtaggggacatagtatgtagaccatgctacctaacttatgggtcaattaaccgatccagctgtctctacagacacctagcaaccttttctttatagagctcacatgcaatccgttgtcgcattcaaaaggattctaaggatgctttgcctcacctgtattggtgttagtggttttcagtgacagggtttatgaaaacacagttcgagctcgttttcttctccattatttccccttcgtttattgcgataaaactttttggtttgggtgtacgtaggatttcagtttcctttttgtgaatgtggtcatgcttagcatattatcataaagatgcattgatt

SEQ ID NO: 104568 - DNA, 285 bp, Zea Mays
cttttcaccaatagtttgcattttaacttagacatcacctgagcactactactttttatcacgaccataaacatacgcatttagaccacaacatcatacgaggacatatgcatactagtttctagttttacatctacaacttctttactagttattttcagccacttaattggcatcgattgaattaaacctctaactcgacaatttgggcaccacaaatttcagaattctacctagacatttagcgtcatatagagagtctactaattaacttgccaccacttg

SEQ ID NO: 104569 - DNA, 347 bp, Zea Mays
aggtacaccttcattgataaattatgcttatgcttgttttatgcatgcatcaagcttaagtgggaccaggcagcccaggacgattttacacgggcccaccgtccaaataacgcgcgtgtggtgacacgtagccttcgtgctcctgtgctaggtcttcggcagtcgtagaggcctttgtcgtttctagcttcgataggggccggcaaggccttcgccagctctttacgctccctccgtcttggggccttcgctattttagtctttgtctgccttcgctttccctctatcatgttttatccctgttgtgacaaggtcgagcgaggggggcgttacgccttcgccccaac

SEQ ID NO: 104570 - DNA, 816 bp, Zea Mays
ttaaaatcctgttggacaagtactcctcggtgtttcaattgcttactggccttcctcctatcagggattgtgatcaccagattcctctcattcccggggctaacccagtgcaaatgtgtctgtatagatacgctcctgctctcaaatctgagattgagaaacatgtgaacgagatgttggaatccggcctaatccagcacaacaaaagtcattttgcatcatcggtaattttggtaaaaaaaggagggaacttatcgattttgcgtggactatcgccatttgaacgcccttacagctaaggccaaattcctagtacctatcatcgatgagtttcttgatgaactccatggggcagcttggctttccactttatacctccacgctgggttccatcaaatcagaatggcacctgctgatcagtacaagacaacgttctagacgcaccatgggcattttgagttttgtgttatggcttttggtctcaccggggctccatctacatttcaaggggccatgtacaacatgttgaagccattgttgcgcaggtgtgttctagtgttctttgatgacatccttgtctacagtgacacttgggaacaacatatccaacatttggaacaagtgttgtagttattgtatcaagaccactagcaagtcaagctttctaagtgcacatttgcaaagcaagaaataggttacttgggccatatcattagtagagcgggcgtggctactgatccggccaaagtggaggttgttgcatcttggcctacacccactatttctaaagaattacgaggttttcttggattggcc

SEQ ID NO: 104571 - DNA, 761 bp, Zea Mays
tggagatgcgccgtgggaggaaaatagaataccttgatatcccacttaaggatagcatcaaaggatgacgtttagagtggttcattgtggaaaaccatggcaagtccctcccccctcggttagggagacaaccggatgttcgcactccaagttggattgagtctcctacagacttggagataacagaagccaaggttctgcttactgaaatttgtttgttgaaggagagaggtctgaccgctgaagttgtggttgcagactttgtttttaagaatattcagccactaaaggacagagcatactcgacttatttgtacagtggtgtcaccgactcaacccgggttaccaacaagaggattcctgctgtggatttggtgagccgactggagatgatcttgagaggcaaagtatcaaatattggtgctcctgttgcatattctgcttggaatctgccaccttctaagtcctttttcaattttgtgtccaatcctcctgttggtgatagtggtttgggtcttaaagtgcgaccctctttcgaagatgttgaggtcctagatgcttcacttggtgatcttcccgatgatgagaggcaagttcacttcgagatgcctccgagtttaggtgatgcagagataagtgctatgctggacatgttggcttgggattcttctgactcgatccctgctgaaacaatggctgttgcaactatcccagagcttgaaaaaaccgtggacacccaaaatcctgagggtactcgcccg

SEQ ID NO: 104572 - DNA, 578 bp, Zea Mays
ccgctcgagccagctcctgctgagtctagaggagttgaggctgttgttaagggggaggccacctcttcgaggacggctccatgacatgttcagagagatcaccctcctcaacagatgattggtgatattgatgagcgagtcactcgctctaggtatcatgggatgtctcactttgctcactcaacttttgttgctacttttgaaccccgggatgttggacatgcttttatctgatcctaactgggatattgctacgcatgaggagcttgaaaattttgagagaaatcgggtttgggttttggtgccacctccttctaactgccatcccatcagtaccaaatgggttttcaaaaaaacggagcggggataggtttgtagtgagaaacaatgcaaggttggttgcccaagtgtattgccaaaatgagggaatagattatgagaaaacctttgtccctgttgcttgtttagaagccattagagtccttctttcttttgctgcttcgaagggttttaaactttttcaaatggatgtcaaaagtgcttttctaaatgggtatatagaggaagaggtttatgtg

SEQ ID NO: 104573 - DNA, 354 bp, Zea Mays
agctttgctagcctctgggatgggtgctgcatccagtgtttcagcaggggctgcatcagaggaatcttcagccaacatatccagcatggcacttatctctgcatcacttggattcaagggtacctcgaaatgaacttgcttctcgtcgtcagggattttaccaagtgaggcaaccaaagcactaacctcttcgggagagggtcgcactctaaggcccaaaccgctatcaccagcaggaggattcgacacaaaattggtaaaagccttggaaggaggcagattccaggccgagtatgcaacaggagcaccgatgttcgacaccttgcctgcaggaattcttctgttggtaacccg

SEQ ID NO: 104574 - DNA, 526 bp, Zea Mays
gtgaaagccactaatctcgagcgccagtgactcctttcttctccgaccgccaccgcgcccaacccaaattcatgcgccaccacccccggagtctataaattgagcgtatccgcggctccgttaggtaattacgcatccattgcaccagtccttgccccggattatccaccagagcctcccaatttctctcttcccccaatttggttctccgcgccgtcgtgtgttggctcaccatggtaagcgtactgcaggtctgttcatgctccctgccctcttgtttctgcacccatacctgcccctgatactcctcgaccaactcgattgagttaagctgctttagatcaccgggaacgcattagaatgtctattgatcatacagtcaccatagacagagtgagttagtggtccgaaagtgaaattgagtgaggggaaatgattaggagatatccaatttggtgtctgtcgcatgggagcaccagctgttgcgagatccgaccggtacaagctcaccggagctcggttcccc

SEQ ID NO: 104575 - DNA, 638 bp, Zea Mays
tctaggtacattttggtggttcctgggtggatggagtaagctgagttgtgggcttcattgagcaaggtttcccgtgcctctcccactagtacacacaggcggttcttgaaccagaggactccttgttcatctgtcctaaggttcggaagttgctccttgcgagctccttccataagtctggctgtttctgcgtccaggtgttgagccttgcatatgagatcttctagattaggcttgacttccaggctaccgttgtctcccagacatgcatttagccgagctgattctttcttccaatcttctagaaagttggttcctttaatcccgaaaggttttcggctgagggcgtctgctaccacattggccttcctggggtggtagtggatttcgaggtcataatccttgatcaattcaagccatcttctttgacggaggttgaggtccggttgcgtgaagatgtattttagactcttgtgatcagtgaagatgtggcatttgttcccgatcagataatgcctccatatttttagggcgtgcactatggctgccaattccaggtcgtgggtagggtagttctgctcgtgtggcttgagtaagcgggatgcataagcaataactttctcattttgcatcaagac

SEQ ID NO: 104576 - DNA, 2201 bp, Zea Mays
gctcgcccccgtcaagatgatctagaagcgtttcaaaagccaaggatgctagactaacccgaaggaagaatccccgccagcactaccttccctagggatatagaacctttctgacgtcgcggaggtgtccctggctagccttgatcatcgtctcagggagtttggggacacattagtaggaaacgctcgtgtgtagtgtaatccgtggtggttgttatgcttgtaatgaactggattgctgaataaaaataacatgtttgcaaaaaaattacatctgcatagtagtaatcctttctcccctctggtagatggcctcggatagaaccatgcctaccgccttaggaattggagtaaggactcccctaggtatcgaaggagaggacggaggtaaagggagtgagacccacctcccggcacctccggagatgccactagacctagcccaagttctggccaaccagactcgactcattgaggtcctcactagaagcctcgagaactagcgcccgattggaggaagacctcaggacagaatgggagaattcctaaggctcaagcctcccacgttcggtggatctagcaacccacttgatgctgatgattggctgcgcacagtgaagaggaagttagaagccattggatgccctaagaaccagtgtgttcacttagctgcccaccagctctccgggatggctctatcctggtgggacactttcagtgctgcagtgagagatgctacctaggcagagtttgaggctgcttttcgagagcatcatgtgcccttgggaatcgtccagctctaggaagaggagttttgagagttgactcaaggagggcaatccgttagtgagtacatccataaattcacagaacttgctcgttatgtaccagatgatgttagcacagaagtcaagaagatggcccgtttgttgaaagggttaagaccagaactcaagaccatccttgccagccaagacttcctcagcttctcgcacctctcaaacaaggccatccaggtggaaagagctcgagaagaggaaaaaggtcacctcaagagaaagtttcaaattctccgagctcaacagcaggacaagcactagagggttcgatcttttgggttcccttccaaggggtcaaacctcagaaagccagtaggatccgcttcgtgatgtttcaaccaacctagtcaaagttgcttccacacctagtccattgcaagcagccaacctccacccaatgcttgttggcattatggagaccccggtcacttcaaaaataattgtccacacttgaagacatccgtacttgcctactccagctcggtgaatggccccaagaatgttacaacacccgcctccaaggaaccctccaccaacaatcagttaagcaagactcagttccacggcagggctcgagtgaaccgcgtcgacgcgcaggaagctcagcaagcccctagagtagtactcgatgagttcctagtcgaatttacccctgctgctgtgatttttgattctagagcatctcattctttcatcgccactagttttgtggaaaagcatggcatccccactacactattagaagtccctctggttacccggaccccagggtcaaaccttctgtgccacctcaaatgctcccaagtcagaattcttttaagtggggtagtattcctggcagacttagtcgtactaccatcccatagaattgatgtaatcctaggaatggattggttgacccggcacaatggcatcatatgctgtgcagataagactattattctcaccgaccaacagggaaagtcagtttcgtgtaaatctcaaccgccaacccaagatccaatggtgttcagtctagcagcagaaggcatatctgtggtggaagaattcatggatgtatttccagaaaaattaccaggaatgcctctggaaagagaagtagagttctacatcgacctcctcccaggcaccgcaccaattgtaaagagaccatatcgcatggtacccacataattggcagaactgaaacttcagatcgcagaacttcaacagaaagggttcattcgtcccagctcatcaccttggggagccccagtattgtttgtcacaaaaaaggatggaagcatgagaatgtgtattgattaccgatccttaaatgaagttacaatcaagaacaagtatccactacctcagattgatgat

SEQ ID NO: 104577 - DNA, 331 bp, Zea Mays
ggaggaatgtttgccacatattgagtttgcttataacagatcgattcattccacaaccaagcttaatccatttatggtagtatatggttttaatactcgtgccccaattgatttgctacctttaccaccttctaaaatagtgaacttggatgctacacaacgttctgaattcattcttaagttacatgaaacaactaagttgcaaattgaaaagatgaatgaaaagtattgtattgctgctaataaaggcaggaaggaaatgaaattggaacctggtgacttggtgtgggttcatttgagaaagataggtttcctgatttgagaaagtcta

SEQ ID NO: 104578 - DNA, 572 bp, Zea Mays
atttcgaacaacgaccacaattcacctagtatgcttgaactaaagtggggcttcagctttacaaaatcaatacaatttacataatcaacaataaaaagatttatagaccaattgcttaagacactcaacctattttgtgtgtcatcaattcagccacacatcgctcacgaagaactattttaattttacttcgtataacacatacttcagtccaaaccttactaagcgacacgtttacttcacaataataaactatcacattaacataattggtacacatcactgatagaacccgtcggctagtcgatgtaaatactaaatttatcctacacatcactcctacactatacttcacaacataaaccgatccaatcacacttgacttatacagttattaacacattcctagcataatattcatcttaaccctaagccttatgtaacacgataatttcttaaacatgtgctacaaacaagatattcattgtgacccctacattaattcaatccaatcactcctcatactaacggaaaataaatggatcagtttaccatgttcgaatcgattcaga

SEQ ID NO: 104579 - DNA, 493 bp, Zea Mays
caaagactcaatccaaggaattggaggtcttgactcataactatgaggtcctaaagaatgacagagaagtgctgcaagtttcctatgataaagccatggacaaactgaagcgtgcaactcagttgttagcaacgagatccagcactgtcacttctggggaaactgtgacagagactcctaggctgacacaggataaaacatggtcttcctctattgttaaggacggtaccgcttagtcttggcccatattaggttgaaaacgtcttgactatggcacgatacgagccgttctggcctttgtctcagactgttatgtgttcactgcttgctgtaatgaaaacatctgatttctcttattaacatcagcgttatacgtcaacctaagtcagttgtgattacatctgttgtccttttgtacgagcatgtgttacctgcgtaaaccaacttctgatctaggtcggttgctccactgatagggcttagaagtcaccct

SEQ ID NO: 104580 - DNA, 367 bp, Zea Mays
gtaccacgcaggcgagcggtaagtagagtgcaggtgctcgggatcacggctggcaacggagaggaatggagcagccggcgccaagaggacggcaagcagtagcgcggctccacacgagcagaactagagatgagcagggagaggcgggtaagcacacgacacacggacgacatttatatggccgaagaggaaggtagaggggcaccgggagggagatgaagagcatcagacaccattaatggggaaataacagtctgcagttagtgagaaaagaacggctgggttagttggggagatggatcgacgtggttgggtgggtgcgtagcgtgctccacactaaggatgcgacaggcgggcaagaatctga

SEQ ID NO: 104581 - DNA, 402 bp, Zea Mays
cttaatcataagcaagacaactttctaggaacaactatggataaccacgatgtacatagccttctagaactccctacactaatcatgataagtcatgaagcatagatatttttagacctctctagaactatggtgatgtgtcatggtgaggtgtccccccatgtaaggtggaggtgacacatgcatggtgaggtgtcacttatccatggctcctaggttcctatataaggatgtgccccctctttccatgacataccatcccactcccatccacacacattcaagggcaaggtagaaataaagtagtgttgaagtataggagcccttgcataatcatacgtgtccttgttgtaagtattctgttatgctataaaatttctatttgcttagtgcataagtttt

SEQ ID NO: 104582 - DNA, 313 bp, Zea Mays
accaaattcaggcactacgaccgtttcaatgtatcgtggtcggtgggtcaaaacctttattttcttgcccttcggcacaacagtggtggccgaagtggcagttttcctcttttttccttgccttcgcaaggggtagcagtaatcagggtatatgaagccaattgcatcaaaaaccctgttcaatgttttcttgccccaacccccgaaggctgaggacaaggcatcatcttcggccctggtatatgtcccaagcaactcgtcgctagtagcctcaatgcacttcaaccagtcatcatttggttcatcgaacttc

SEQ ID NO: 104583 - DNA, 575 bp, Zea Mays
gagccattggagaaggtgcacctgctgccgaaactgaacaagatgttgaagaagaaatcactgattaagaagaagaggattatagcattctgatctcgtcaaaacctagccacttggattttgaaaaatctactgtttctgaagctgaaatgcccatgatgatgaagctgggctacttcggagaagctgattcgttttgccggggaagaaaccactccgacaccgaaagatgatgaggtggtagttttcaaaagttttttcagagcaggattgcggtttccgctgaacgagataattggagaaattttggataattatgaaatatttcttcatcagctgacccctaacgccatcgttaggctcagcattttcatcagggcccttcgaagccaagggatggacccaaatgccgaagctttttccgagtgcatgagctacattaccaaacaaaggccagagaagatgacctacatgaaaattttggctgttataacttcgtgtatcgcaaggatacgaaggccccagtcctcagctatcggaccaaatggtcaattggctagaaaagtgagtggttt

SEQ ID NO: 104584 - DNA, 582 bp, Zea Mays
cgagtagcaagaaacttaatggaggctcaaacatcaagtaaggatgcttgaactaacctgtaggcgtctggccatgacgaggtgttcacgggtgcggaaaactgatttgggggaagaaagaaattggagctctctggtggctaattggaggcagtagtggatgctttggcttcgtgatgacttaacggtgctaggggtgtgctcaatttatagtatcccagagcgatggctcccaatttggtcatggcgtgttggcggcggaaaagagggaagagcattggcgcaatagctgcgtgtctttcactgtggcaggcttaccggcgacgagccagcaatatagagcggcttgctgcgacgtggtgaagcttcaaggcacgtggcacccgatcggtaggcggccaactccggtgagcttatctgagccggccataaagcaagggggtacgacggccagcccctggtgtcatccgcggcgaatatctttttaccctaaagcgttatccgggcaccagtgagcacgaatcacctcgccgacacgaatccaggcgcgggggtcgtcagcggcaaggtgcactacaccag

SEQ ID NO: 104585 - DNA, 514 bp, Zea Mays
aggtggattaggtcctcattcagtggtccgattgcgatgctgcgttggatacctgggacgacgaacttcctctgcgccgtcaattcccatctgctgctgcttgggggcaagcggcttctaaagaagggggatgtcagcaacaaagaaaactacatgggaggcgtaggcaaggatggaggacacaaggtgctgcaaggaaatgttctggccgtcgtgtgtccaagcccagtgcgcagtacccgtcggacatatagtccgtgtaaggagagggcgagggagatatttagactaaggtcatgtctgtgaacatcaccaaataagaatacagaaaccctcctcctatcttcacccttcccgagctatactttcctctcctccgtagccgtcataattggtcgttaacagtcgcgtccgtgtgctcgtgccgtcatgcggctctccccactcccctggcctcctctccagctgtccagaaggcagcaagcaggctaggatgattgccaccagggatggg

SEQ ID NO: 104586 - DNA, 859 bp, Zea Mays
gccaggtggcccctttgtgtcaactaagtcttctcggacgaaacaaactcgtgcatagcaacctcgccggagatcgcggtggttgtttgcaaccaccccgggtcctttggccctggctttatttatgtgcaacctcggctcgttggcccacgtcgtgcatacacgaggcttgggttgcgcgagggagcaatctttgagcacaggattggtcatcggaaggtgtcatcatcgcgacatggtcggaggtcgagatctgctcagtttacaacttcaccaagggtgagttttcctacctgctgttcgttgtcatgtaggatatgattagaggcgttcgggctgtagtttcgggctcggatggcaagcactgaccagcttgctgccgcggcaatgtcgatccgccacggtcggtcagccgagggagagaagaaggagccaggggatgaagatgcgtactcgtggtcggtctggtactgaatgactaagattagttggtgcatacccattcgatgcattaaatctatggcatcaaccaatgatcagacaattttggagtcgcgtggatctctgaccgaagatccctgtctgtttaagacatttcagtttacatgcccttgaccacccttgtttcgtaatgatcaatgagcggtcattttattttgcacacccttggtgatctcattaataccttgtaactttcttcggtattgaatttttacttcaccttttctgtcgaaacctcacttatcttatccctgattgttttctccatttcgtcactttgcgagtcttgtcttaactctgtccatggattatacttttcatcattatcacatttatacttatcacctctatatcccac

SEQ ID NO: 104587 - DNA, 294 bp, Zea Mays
agcaaataccggcgcattccatccaagcaggcggtataccatttcgagcactcactcagtctgggcgcgctcgggatgaagtcacaaggccatggaccatggtcaactatggcgacacaaagcagaaaccttgaaggcaaagggcacggagagctcgaagatgaaagggcaccgcgagtgggagagaagcaagacatggctgctacccgaggggtgaacccctttttaaaggcagatttccccgctcgcgccccgaagcgtcacgggcaaggtctcccccgatgcgcaccaggg

SEQ ID NO: 104588 - DNA, 477 bp, Zea Mays
tggttacatgcgccacgtcccggaagatttttaccaacggccagaagtccgagcagtgaatacagcaatggtggcgttcttatccccggtgaggtacactaaaccaaggttgatatcttgcctgctagctcgaattcggatagacattgcgccctaattcatgtagttgcaaatcggtccgcatcaaagtggtgcattaatcaacgttctttcactttggtataacgatcataccgaaaatccccatggattaagcacacgatgacgcccaagttggctcaataacactgaaccctagcttcagtatgattagatgcagtaatcgcatttcttttcccatcagaccgactgacattgctacctcaaggcattattacttatgttttcatatagtaacaacccaacctcactttagcaaagttatgctcctatatacaacctccaacttcatcacagtgaccttggacttaaacccac

SEQ ID NO: 104589 - DNA, 400 bp, Zea Mays
tatttaagttctggaattattttggcactagaaatccattttctaaattattttccatattttcatagagttctggactgggcgcataattatccaataccgcaggggctaactcgcaatatttcccagactcaggcttaccacgcactggacggcgagttttatttttaagaaagccaggggctcttatgcaaaacgcaccggccgaaggggtatcggccaacgagcaccgcgcgattaggattctacggtcaagattaggccgaagctcccgtaggtacctgagccataggattaaggatctgcggtgaggattcccatgatcggagtaattatttgaggatccaatcccgcacgctcgattcagattggacgaacagcatcagtcccagccgaaagg

SEQ ID NO: 104590 - DNA, 467 bp, Zea Mays
ttaaaggatgcatattgttgtgctcaaacgttaaggaatttacttcatgtatatgtgaaatatggatgatgaattgtgtttatttcctatctaaagaaatcatccttcattatatactcccttgtgttattaacatctttcttgagtattttcaataagtttggaaggaaaaagaagtcactgcaaagggaggactctcaaatgaaagaggacatcaagaacaacaccacctacttctacaaaataatcaatggtgtggttgtgagtattctaaatccttttcattgagagaatgtcatgaataaggtgtttattgcaaatcttataagccttgatcaagatgtataatgcttctccctacacatctctaaaataaatgcatctattcatctcattcaaattcttgatgcatatctctagggggagtctatttctatatcttgattatgtgagactatcgctttttc

SEQ ID NO: 104591 - DNA, 519 bp, Zea Mays
tgcttcagtaaatgtgtctcgactctagtacagtgttgttgactgtccgagcttcagactctttgtgtgcgtcgcgttgttttttgaacctggcggtgcccttctggctgttgattgtgagatgaagttggagccatgagtggtggtggtagcggggctcatgcagcttgcgagtggcttgccgaagcaactgatgttgtgggttgttggttgcccacatacttggggatgtatggggaatagcatgaagaagtatgcaggacctgcttcggctgattctggcgcgcttcggtctcagctatttccttttgcttctgaattgtgacttggcatgtccttgttgtatgccccttatcttctccacagaataggaaaaacaaccttcttggttgggagctgaatcttccaccgaagcttctacctcctctgcctcttggagctggaggcctgaaggagctttgttgtgtccctgatgattgggcgctgtgctgatgccctagagtatgatttcccctgtcg

SEQ ID NO: 104592 - DNA, 427 bp, Zea Mays
atttctattttcataaaacatcaaaaccaaaagcctcacttctcctcactggtgttatttcctaccaaagccaaatatcatgctacatgttgaaaaccttccacttgcgttacttgtttttgtattgagttttgtcaaactttgttgacctgtgttgagaagtttatcatgctcttaagatcaaggtcacgtacacactaccaaatatatgctacactactacactagaagtgagcaaaaacatgcttttccttttccacaaaataaatactccacatttgctagtatgatattcctccataattctcataaatgaggcatgggctagagttggtcacttgttttcaattgctgcatagcatcaaaaacaaggcaacacaagttaagaaatccagaccttcgtccttaagttattacttcttcaaag

SEQ ID NO: 104593 - DNA, 463 bp, Zea Mays
cttgtaagcttgcctctgaaactgaagtgctcggtcaggtttctgaaatgcattgctttgtcgtgctgaaatgttgtggtcatgctgtttatgcagagacttgtagcaaactgtggtcttgtagaaactgtgttgccgctgtttgaactgtgatgcaggaatgctgtttatgcagagatgtcactgctcggtagtttctgaggtgtgtcactagctgcttaaatgatgcttaaatagtatctctttgtttctcaatcagtaacatttacgtagcctagtggtctgtcgctgctaggtagtatctaaggtgctgggttcaaatcctttgccgtggcccttttttggcatcttttttttttggctgcaaacaaactagccgaaaccatggccctctttccaccttttttttgcttctataatcctctgatatttttatctcaggcatctaggaccaaattatgac

SEQ ID NO: 104594 - DNA, 475 bp, Zea Mays
ttgaccgtccatccgcacaaaccaatcctccatacgtgttccggatatgatccaatccgttcagttttgcttcgaatatacgccatctatatccttgatcacatttattctttgcattatagttggacaataaatactccgactgctagaaactgatgatgttttaatactgatttttgtattggggttagtatttaattactcttactacaatgcaaaaaattattattaaagtgacttagtttttgggttttgcatattattattctttattcctgtatatcatagatatagatttggcatagggcaagtgaagattttaatccccgtagatatagatttgtgggaaattctttctccattgggtatgtgggtatggtagagaaaaatagaatccgaacccgattacgaatgagtaatattctgtcagtaaaattaggtgtgcatcacaattcgcaataaaactaacaaccag

SEQ ID NO: 104595 - DNA, 581 bp, Zea Mays
gaaacgttactaaaaaatattaatgttttgaggcgaggctacatacgacatttctacgcttgcagttcaggatgtgttatagagagtgtatcgaagtagggaaggtttttgtcgtttgttgtcggggcggtctagggtgggttatagagagtgtacagaaggagggaaggtttttgtcgcttgttgtcggggcggtcttctaaggtgggttatagagagtgtacggaaggagggaaggtttttgtcgcttgttgtcgggggtgggttcatatatgtccttttgttgtaagttcgtaacataacaacataacggtaagcaatagatgtccacacgaggtatttttgtgtctatttcatgtttttcttaattatcttctgtgtcttgttacttgataaggcgagtgaagggtttaccctgagttaacaaagtatttgttgtgcaaaaactttggtcggatggagtgtcgttatttttatagaagtagagcagtcgttgaaagaacgctagttttttttggtctgtttggttcagttgtagatttttaaaatgtcgattttagttttggcctatcagaaagttg

SEQ ID NO: 104596 - DNA, 648 bp, Zea Mays
cccgagatatttagtatttggacgtctttcacgtgctccctttcccgccccttgccggtccatcggaacagctgacacagacgttgtcttctccgcttgctcccttgctacatggtcgtcattgctcgcattcccccttgcttgagcagccgcttgccccaaagttggcacctccggaaacctggcacatagttcttctgtgtcttcccatgtagccaaggctatgtctaggccggaccagcgcaccttaacttgaacgatcaattctccgcctctggtaatcatcctgcgttgtagaatctactgaggtacctgaagacgtatagtatcatgaggtaaatgaggcacatcaacatgattacgacccaccactatcttcagttgagacacatgaacgactggatgcatagcacttgactcaagtaactgaagataccaatacactccaagactttgaatggaccaaagaaccgaaaggaaagcttgttgttggatcgcttagccatagatgattgaatataaggctgcaacttcaagtacaccatgtcactgactgcaaattcatgttcggggcgctgcttgtgtgtctgccgcttcatacgcgtctgagcgcgcaggagatgcaatttgatgacctttgtcttgatc

SEQ ID NO: 104597 - DNA, 543 bp, Zea Mays
tttttttcgtgcatgatctccgtcgccgatttggaaagcgcattgtctgcgacaccgatttggaaagcgcactcgtggaaatcgccttgccaaacgattccaacacaaaactgttcgtgcacgccgattaaaaaggtcgcaattcagttcctgctctaaccatcctacggtttttcagttatccttcgcccaccctcgtagaggtgagtcttcattgtctttaccatttctcttatgctggggcagttcatgagcatgcgaccatatttctttggactaatataatgtttcagaaatcctctcaaaaccagccatggtcgatcaagtgaaatcatacaatgctaactgaaaaattctagctatgtttatctattagttatgctttgtattcatattgtggtcttttaaaattcaaaaaaaattgacctgttctctgcatattgtgatcttttaaaattcaaaaatacctgacctgttctctacatattgtgttcttttatttatttataatgctgcagaaatcctctcaaaatgattacaaat

SEQ ID NO: 104598 - DNA, 500 bp, Zea Mays
gccgaagccgaagccactgaaatgaaaactgctgaagctgaatccggcgaagccgaagctaccggggctgaagccggggccaccgaagagtcgaacctggaaaccactcttgaagttattgacaacatactgctgaaaatggctgaagaggaggctaccgtggctacagtgaatacgacaactgagaaggggaaagaacaaattgacgaaatttcagaagaagaggattttaactttcaagatttgctcggacaagaattatcggacactgaaaaggaggaattgaaaaaatatgccatatcttgcggatacaaatcaggggctatgctttttggtggggtcaacgaagggaaattaagatgccttcggaaccgcaccgaagccaaaattgttagaaccctttccaaaagcattggcttgctgaagctggaagcggacttaagccgttaccaacgacaacacatcgccggaagtttgctttatgctaacttcaaggtaac

SEQ ID NO: 104599 - DNA, 791 bp, Zea Mays
tgaagttcttcaacatttttctctagtttattcttccaatattcactaatctcttggttagcctgtgcgagcgcgcaattctccttagcttcggccagttgtctctgaaggacttcaacctcggctttttgggctttggcctgagcattgtacttagcttcatcttcttttattttactcaccaatgatatcaaaattttgtctttctctagacctttgttcctcagttcaatcaactctgagcgatggttgttaagagccattgtacagccttcgtcttcggcgctcttctgtgccctcaaggcattactaagaataagccctgcaaagaagaagaaagaattgagcatggcaataaaatacttcattttctaacttcaaaattaacttctatacctttatactattgtacgcgaggctatcagcaagatcatccttcgacataaccgaaaggccttcttcaagctttggaaatcccatacttttagctatctcccagcaaacggatatttctttgttgtccgggagacagtataggaaatcatcttcgttagtgccattaaacactaaggctcctttcgaatatttcagtctttgggcataatgtcttgcttccatgatttcttcttcggataattttttccccgaagcatgtcgaaaaatgtaatcaatatcttcaactaaggcttcggggacaaaagattttgctttttctgccatgtcttgccttgctgccttgccggtatctgaagtttgttgatcagctttatcttcaggcgcgacaacctttg

SEQ ID NO: 104600 - DNA, 448 bp, Zea Mays
ctacgacaccttccattcatatcgaggatccagcgtctgtacatgacagaggaatctgcgaaatagatgacatggcacaaaaatggaaaacaatacaatcctgacaagatggtgcatgcatccgatggtgaagcatggaaacactttgatgccattcaccgtgagaaagccgaagaggctcgtaatgtacgtgttgtgttggccacagatgggttcaatccctatggaatgagtgctgccccgtacacatgttggcccgtgtttgttatcccaatcaatctccccctggtgtgtgctttcaaaggcagaatatattcgtgtcgttgataattcccggacacccggggaataaaatgggcgtgtacatggagcctttgatcgatgaattggtacgtgcatgggaggaaggggtatggacgtatgaccgagctacaaagacaaacttcag

SEQ ID NO: 104601 - DNA, 406 bp, Zea Mays
tccagcgttcttgaggccaaatgacatggaggtatagcagaaagctccaaacggggtaatgaatgcagttttttcctcgtcttcttttgccaggctgatttgatggtatctagagtagcagtccaggaatgacaacatagaacatccggcgatcgaatctaccacctaatctattctaggtagtccgaagggatccttcggacagtgtttgttgagatctgtatagtcgacgcacatgcgcctatccactttattctttttgagtacaagaacaggatttgctaaccactcaggatgcatcacttctctaatgaatcctgctacgactaatcgagctagctcggcatgaatagcttctctcttgtcgggcgtgaaacgacacaacttttgccggatcggcctcgcc

SEQ ID NO: 104602 - DNA, 622 bp, Zea Mays
gcagaagctaccaggctagaagatatcgatgtgctggaggaagaacgattgaacatagtaattcagtcggctaggtaccagcagaccttgaggcgctatcatgataaagctgtgcgacaccggtcctttgtagtgggagacttggtccttcgtcgaattctagcgggggaaggacggcacaagctgtcaccactatgggaagggccattcatcatatcagagatcactcgaccaggatcataccggcttactcaaatggatggcatggaagtgggaaactcatggaatatagagcacctcagaaagttctatccctagcaaggcctcaaaaattcttgaagaaacattgtactctgtaatctagggacttcatcatcaataaagttttcgttttcgaaggcattcagactcttgacttacagctgacttcgattgggctgggcttgaaatcagcacgcttactcgacttagggtggccactatacccgactaacggagcaatcggcttaagtcggcaacgacttaagtcggtgcgacatgctcacgcttactcgacttagggtgaccactataccctactaacggagcaatcggcttaagtcggcgatgacttaagtcggtg

SEQ ID NO: 104603 - DNA, 597 bp, Zea Mays
attctcttttcttaactgtcacagttccactggattattttaaatgttactatccttaaaacgcgaaaaaataaaagatgggtaatacatcgttatagtggcccgggacgttatttttacggagctctgccactgggaaggaagacgcccacgcgagcgaatagtgcatagcgagagctcgttattccgccatatttatcggatgattatgacacgctatactttagcggacgattttagcggttcttgttggagccattccaaacatctacgtcccatatatttagcgtacatgtttgtttattggctcttgttgaggataatctaagtctaaaatttaacaacttataaagtgacccctccctaaaattatgcgtataagttttgaatacctatgaaatacgtgcacttatactttcaattaaatatattttagccttttgacaaccattgacttaaccaaatagatcctaaatatattgtttttagtatgtactagacatattatatctaggtgtctaggaaaagtcatgaatctagaaagccaaaaccaggtatataatttaagccggaagaagtatttattttttgtagtta

SEQ ID NO: 104604 - DNA, 327 bp, Zea Mays
ccttacagccccttcccataccatcttggaaatgggaggatatttgcatggattttatggtaggattgcccaaaacctcccggcaccatgattccatttgggtcattgtggataggttgactaagaccgctcatttcttgctagtgcataccacccacaagacagagaaatatgcagaaatctatgttgatcaaatagtgcatttgcatggaattccgaagactgtttgtggcacgcttttgggagcagctccaaaagtcacttggaaccactgtgattaggagctcagcctaccatcctcagacagatggtcagacagagagagtg

SEQ ID NO: 104605 - DNA, 666 bp, Zea Mays
gccagaagcagagttctgtagttcaaaaaaatattattataggatttcttacacattttgggtttcatatccaacctgatcatgtagcttatagtcaaactagtttaggcaacgatgtaaatcctccacctgaaattaaaactggttcgcagcctgtgttaacacctatttaaacctgatcctaacccgttttgaccaaagttatagacatagtttccctgttatattctggtaaccacctaattcccgatcaattcaagagcagtttaggaaaccaataaggcgatagctacctccaggttcactaattttaagtttttaatcctggtgacaggtaatcagctggtaccaaataaagcaatagtgtacagtttctcactcccactgctttttctggaaccggaaggagaactgccggtcattatataagaattaagaagtaataaagagcaaacaaaagaataacattgaacacccaacacaaatgccaactgtacaaataggaggaaaagaaacagagacaagaggcaaacaaaaaaggggttgtaaccagtgcaagtatcaagtttctcactcccactagtcttgtcttctgttgaactgttcatgattggaataaatcatccaacagcaaacacgaagggaaatattgctcagtgccatcac

SEQ ID NO: 104606 - DNA, 303 bp, Zea Mays
ttctcctgtaactcgctcgggaatcacggactgctcgctgtctacgaaaagcaatcattcatttaccacacttggggaataacaaaagaacaatacaccaagcatatgtaacagagtaaacataggttcaataggaatgtaaagacaataaggtgtgtcttaagtttggggtaggtcactataccaagtggtttcttattctctccacaagtctatcttgttatgacacttgttctaatctagttagttcagggatgggattactcattaggtagtgttaggtctataaactttactatttga

SEQ ID NO: 104607 - DNA, 357 bp, Zea Mays
cgccaggaagaatagctcctcgcccacgaagccaccctctgatagtaggaggagctcgatgcactcatcgagaggctcgaccgggtttacaacaacattgagcaaagacacctcgaacatgaaaagacccgggcgaggaagactcgcgaccaaatcacaaaaagcagcgatggcacgcagtacttcctcaaccccaagcaaaacatggttgcgacaaccaggatgctctgatcgatcctcgtgccagatgagcccgaggtgaaggtcatgaatcgaaacctccgcaacctagtggaaagagccccggtacaacaagatgaggttgatcggtggcagtgtaccagcatggagagccgt

SEQ ID NO: 104608 - DNA, 559 bp, Zea Mays
ccaggcatgccacctgaaaggaaagtataattggccatagagcttatacctggcaccgcccctatttccaagagagcctatcgagtgcttggaccagaattggtggaactcaagaagcagattgatgagttgttagggaaaggctacatcagaccaagtaccttgccttggacgaccctagtgttatttgtggagaagaaatacgagacaaagaggatgtgcatcaattatatatctttgaatgaagtcactatcaagaataagtaccccctgcccagaattgaggatttattcgatcagttgagaggagccaatgttttctcgaaggtagatctgaggtcaggttaccatcagctctagatccggccttcggacatactgaagacagtatttatcaccaagtatggacatactgaagaccgcatttatcaccaagttcgtagtagtgttcattgatgatatcctcgtatattcccagaatgagcaagaacatgaagagcacttgaggaaagtattgcagaggctacgagattgttagttgtatgccaaattgagcaag

SEQ ID NO: 104609 - DNA, 394 bp, Zea Mays
caccaacaacctcccccactcaccaaagggagaattctatcgacaactcctcaccttggcaacaaatcacctcctacccatggttcccactgaacactatgcacatcactacatcatccaccaccataatgcacgaaacaacatcgaggcttcacgtggacgatggcaccacaaagaggctgaggcaccgagaggaatatgatcaagatcatgtcatcccgcatccaagaggtgccactcaaacccattccattgcggcctcgatgcacaacatagcgcatcaccactcggcccacaaccatttgggtgaactttgtccaccatcaccacaacaacattgggagcgtattgaacacgctcagagggacgtgcatgccctcgaggagtgtttgag

SEQ ID NO: 104610 - DNA, 307 bp, Zea Mays
aatctgcacaccgaagtatgggcttccactttggtacagcactcatagcccagaattacatggatcatcccttaaggagtatcccaaatctgcttcagactgaaaaatcagcaggactgaatttttatctaagtctgattttccaaactgaacactgcatctttaggctcctttttctacaagttccatatagatttagagcttcaatacttaataaaagttgttctcctatagttaatctacaagtttactatagcaaccttttgccaaaagctcccagattaaaacatacaggggtccagaaata

SEQ ID NO: 104611 - DNA, 465 bp, Zea Mays
gaaacttctaggtggaaatcgaagcatcgctccataataaaagtagaaaaatcaggcatcgtcgtgtccgccgtggtggaaggggggaaaagagagcagtccatagcgaccacagcagcgggtactcagtgtcccctgatctataagcgcttcatctatggtctgtgtggtgcggacaagacatcgttgtctccatcaggtcggcacactgtcgatgtcggtgaccatatgattgtgtttgcagccatccttcaatgccatctgcttcgtcgcgtgtattattgttctctccgattaccatgataggtcgtcggatgtcgacgtgtacacgtgtctagcaaagcagcccgcccacatctaggctatcgtggtcatggtggtcggagccgtgcagggcgctgtagtcgatgggctcatggacacacttacgcccgccaatagggtcaattcttcgcacaatcattt

SEQ ID NO: 104612 - DNA, 330 bp, Zea Mays
aggaattagcggagacgtgcgctgagcctagggaggtcatgacttcgcacgacctccagaaatcatcttcacgaatgctgaaggtgaacgggggtgagtggcataaaaaagatcctatcccaatggccttcggcgaagattattttatgtcccgtttggttcgagattttaaaatttttccttatggtagaaacattggtgttgttgtaacagtagtgatggaaaaggactgccagaaatctgcgcggaagaagcagaaggcgccgctacggttggtggacccgcgatgcgatgcgaatgcgccgtgccctagcgggaaggtctctatcg

SEQ ID NO: 104613 - DNA, 1096 bp, Zea Mays
gttcaatagagggtttttagtcaagccttcgcttcttagaaattgttgcctttggctctggcactgtttttgttttcttcaaagccgtttcatcttcttttactaaccgggcagcttgcctgcttaggacgctaacaaccctttttcttttcacacccccggccccttcgtcaaacctctcataatctggatattcgaagttcaatgcatccattacccagttcagccttcatttcggtcgagtaccaaaagcagcagtcattagctggtcctccttcttcgtttaattgccaagaatctcattgcacatggtttcgatcatttccagccattcattgcatggtttcttaaactgtttctcaaatttgaagcgataggggagccgaacaagctcatactttttccccttcctttttcttcggcatcccccaacctctagaagttggaaatgttctatttgccaaatattcttgcactaggtccctagtgctaatttcggtagctaccactctaaattcaacttcggccagctagcacggggagccaagttgcatgtggcacatgggccttgtcattccgaagcttaatctcatcggactcatgaccatagtcatcaaattttccctcttctcatcagcttttatatagaaccactcactcgtccacccggtcggccacttggtgcggtagccgattaccgaggccttggtatcttttcgataaacaaagttatagcagccaaagttcttatgaaggccatccgctctggccttcgtctggtagtgcaactcatgcacccgacataaagcttcagcgttagcactcatgccctgtcttcggagagcccatatgtaaacagtgagtctaacaatggcatttggtgttaactgatgaagatatatctcaaagttcttaaaaacctctcctatcatgtcatgtaaagggaaccgaagccctgccctgaagaagctcttgaaaacaacaacttcgtcctctcttggctccggaaccacctcttccccaccaaagcggacaagtttgctctcggcctccccaaaataacccaactttttcatcataaccatgtcttctgctg

SEQ ID NO: 104614 - DNA, 337 bp, Zea Mays
gatccataggtgtggcagccatgcgattacagtaatgcatggacgagcaataagatcatgtatgtatttggactgagagagataatattccttaggtgagtgcaaaacctcaacccctaagaaaaaactgagggcccaaatcagacatctgaaaattgctcactaagttgcaacttcacatgagtaatgctctatatcatctccactaatcaacatatcatcaacataaagaagcgaagtacgtccacttggagagagatgaataaataaggcatggtcatgagcactaggtaaaaaacaagcaacctttatcatagagcaaagcactcaaaccaag

SEQ ID NO: 104615 - DNA, 532 bp, Zea Mays
cttgggctcaatttactcatgacgctatttcaattgatccagtatatctcctaatgagatttgtccttttgtttctctgcatacaagttgagttttcacattcaaattccatggggtgatagaggacaaaaatgttcatagttgcttttcatgaaatttggtatcccaaatattaatttagtattagatggtcttaacctatgaagaatgattattaaaaattctaatgtacttttcggtatatgatagatgtcgtttctcatttgtcactccagaaaatttgaactttaaacataagcagagaaacaagaaatatgaatctcattaggaggtagattgtaccaattgaaatagtttagatgagtaaaatgatccgggagtttcttaaagggtaaggtagacaaacttgattgttggggattgtaaaatggacttcttatttaaacaagttatgtgaatcaaaatgataattgaagtcttgaaccaagcacttgactagatcaatagtttgctagacagcatagaagctata

SEQ ID NO: 104616 - DNA, 482 bp, Zea Mays
gtcgatcacaaagcattgctagatctcttcgagctttcagattgtcctttattttttcaaaatgcatgcaggtgtgtatgagggcttcaacaacattactttcttggtgcatgacatcaatgttgtgcacaagaatcaatgacgacatataagggagctcccagagaccacatatatgtgtccagttgtggtccactatgaatccttcgtacttgtcccccttttcatttaggacaaggttgttcagctgagcatatatttctgctgcgttaagacgtttaggcggtcctttggtgaccacaatgttctttataaagtttttcttatcgctcctaaaggggtgtttcctgggcaaccagcgtcgatgacaatcgaagtaagtgatctttccaccatgagcaagacggaagcaatctgtatctgaatcgcaatatgaacatgtcaatctatcgtgtgtactccaaccggtaaaaatagcatac

SEQ ID NO: 104617 - DNA, 508 bp, Zea Mays
gaaagatcataggagaaacgcatcacagtcattgacactagagggccacagttaacaccaccaaacccatgcatcctagactgctatgatgtgatctatttctctttgtttaccctatcattcatcattctaatctagcttctttgttcattaattatcactagcctaaccaagcatctgtaggagcttactcacaccgtcattcctcatccaaatctatgtgactattgttgtactttttgcaggttgtagtgatagcggtggttggcatgcttcttagtcctccttccctaggtcacccatcccttcacattcttcatacgccatagtggaacgggggccaacatatgcagtcgatgctctttcctccaatagggacaaggattctaacatgtgatccctttgcaagtagtgtcatgtcctaggtgtgatcattaccaaaacaggcaaacaacatcaaactaagattccatgacagacaacatgctcatgtcatggggtttgagat

SEQ ID NO: 104618 - DNA, 854 bp, Zea Mays
gtaaagatgatggccatggagttatccaaagtcgatgtcgccgcccctacctggcgtgccaactgtcggtgtttgggaccagcaacacactacggggatatcacatagtgcttttgtggttggcaagatcgatggtagctcgatggttcgtgttaaacatgacggaacataagagtttatgcaggatcggttgccggaatgtgtaacaacctacgtcctgtgtgctgtggagatgaatttctttgagcttgaggttacataatgcctgaagaaaatgaatacgctctagcagactactgggggtcgaatcggatgaaggggtgcctaatctgcctaatgggatcaagattacacattgagttcatctctatcgctaatcatgtattctcgggacttttcgactcgcgtgtagtgtatagctctacatcagccttatctgaaccagccgccttgacgccttgatcctcaagttctccaccgtctcttggtctgagttagacgaccagctcatacagttggacgctcggcccatcagaaccatttaacggcacctggatctaatccgagtgatgcggacccaagggatatctatcccccacagcggcggctatgcggtccaataggagaagtgaggtgcggcacatgagtcattcagaccgattgtgtccatccattacgtgggggcgagtaaatgcacgatctacacgctttacgtgtgacgcacaacgacagtggaatgatgaaaaccaatgttttatagtagtagagaagagttgtagacaacgcacgatatccaagagaatgcactatgcactcgattctgagatattgtttctccgtacatgaaatccaag

SEQ ID NO: 104619 - DNA, 741 bp, Zea Mays
cctagcaccactatcaaaaatttggacattaagcgaaaaaattttctttggcaaggtggaggagataggaaaaaaataccaccttgttaagtgggatagagtctgtgctaacaggaaaaaaggtgggcttggaattaaagatttaagagtcatgaatatttgtctaatgtgcaaatggtggtggaaacttgaatatgaaaaaggaacctaacaagagattatgaacaagaaatatattcatggtgacactattctgaatgttagccacaaatcttttgattctcatgtttggcatgacttgttgaacatcagaaaatattatgtcattgggagaaaggttatcactcggtcgggtgataaaaccagattttgggaggacctctggatcaacgagattcccctggctatgtctgaaccagatgtatatgaaatgtgcaatgataaatttcttctcgttcagcatgttaaggagaggggtggccaacttgactttcgaagatggctgaatgatgatatcaggagtaattgggacaaaatcatggagaaattccaggcttttgagtttcaggggttaggagactgtgtctcctggaaatggggtaaaaataaagaattttatgtgaagactttatatgataatattaccagtattacctatggcccatatttgaaacatatttggaaagggaaaatccctccgaaaatcaaaatttcatgtggttacttgaaaataatatgctg

SEQ ID NO: 104620 - DNA, 472 bp, Zea Mays
gaatgcaagagatgcaccatatggaggagcatatggaagaggagcatcatacaatccataaggaggagcaccatatggatatccgtacgggtacaaataagtaaaaggtcgtggaggagcatcagtggaagaaactccagtgatagacatatgtgtgttggtcataggaggtttaatagtaggaggaggaggagcgtcgacacgtggtcaatatggatatgggaggaggaggatatggatatagaaacaaaggttgtggagtcagggaacaaggatgagcaggaatgtcctggcaccaataatgaataggagaaagatcatcgaagaagacctgcctcacatttcacatattctaggatgcctccacgtcctggcacgtggtggcacgttggaggggtgggagcctagaaagcgcacagttcgtacctcatgaaaccattctatgcataggtttaattttgatgggacccaa

SEQ ID NO: 104621 - DNA, 528 bp, Zea Mays
aacggagggagtaccacactaaaaattaatatattgatatattcagacttatcaccaatactactcgagtgtgaatcattacgttataaaatttgtgaaccaaacaacactttagttggcagctatagcaccgggcaataaggatagtgttcagccagcactacgggggtgggctgaccaaatccggccttgtaaagccaactgggcctgccgttgaacttgaacccttcttcaagagcgcgaggaaagaccaaggcgttgtaaaagggatggtgacgttcgaaggtgctgggccttgggctagggtttggtagttgtgcggccctagagcgcaaatgattacgcggtggatatatatcaaccgcggtccgatctctagaaaagaaaaaaaaatcatacgcggtccgcggacttgtactgggaaggattgggaaaactgacaacgaacgcacacacacctgaaaccctccccgattcagttaccgttcttcctctagatccgattctacctaccatgtcatgattctt

SEQ ID NO: 104622 - DNA, 858 bp, Zea Mays
gtgaataggtatcaaaataatcatcacctttcttttgggtaaattccttggccacaagtctagccttgtatttatcgacagtaccatctggtttcagtttttttcttaaatattcatttacatcccacaagtttacacccaactggcaggtcacatatttcccaagaaccatttgttagaatggactccatttcattatggactgcctccttctagcgctctacatctggtgatgcatatgcctctgtaagggtttttggtgtatcatcaacaagataaacaataaagtcatcactaaaggatttttagtcctttgtgcttgctcctacgaggagctaccatactgttatcctcaatgcgttgttcagaataagcaggaggtaaagaaactggattaggttcaggagtataactagtagatgcctcgctacgtgctgcaactctatccttcatagggaatatatctttgaaaaaggaggcatcacgagatttagtcacggtgttaacatgcacatctagaaaatcagatttaatcaccagaaatctataggttgcactattatgcgcatatcctagaaagacaatcaacggtttttggtcccagtttacgtttcttcgcacgcatgcacattaactttggctaaacaacccatgcacgcagaaatccaagagtaggctttctacctttccatccttcatagggtgttttatcacccttagcagatggaactcggtttagaacaaagcatgtggccaaaatagcttcgccccaccatgacttagataaaccagaactatccaacatggcattaaccaagtctctcaaagtttggtttttccgttgagccaccccctttg

SEQ ID NO: 104623 - DNA, 442 bp, Zea Mays
tacaacttttgtctgtctgccatactcgtgcggggcgagcacccaagcccctgctcgatacagaggtccgtctaggggcttgcctcatctttttagttttactctccgccgagcatccccttcgcgggtattaggggaggtgagccataccacactttccttgatgggctagcaatggcgcttggtgaactacaagcgggtaattcaagtgaggccctggctcctttaggttgatctaagcgcggggtccgctggacaccatcctcatactcccaagcgccgactcatatagttgtcaatcccgcttgaccaggaccgacgactcgctgcctctatccacgctaaaccatgagtcaaacccacctaggactcgaacacgagctggtgcgcccttaatgctccgcatgtcagggtcttggccgctagtgtacccgtcttcggc

SEQ ID NO: 104624 - DNA, 281 bp, Zea Mays
aaaacatatagaaaacatcttagccattattattacgagcatcatcataaagtttttgcttacaactagattcaaacacattgctcagggggtaagcatcactgtcctggctaccaagaacaagggccgacacattaccgaggctagacctagaacaaggaaggagcttagggaaggtgtcagtcaccaggacacaactactaactacaccccttccactactaggagcaaaacgagtggaacgggcgaccagacaaggagcggctgcggttctcgagcat

SEQ ID NO: 104625 - DNA, 310 bp, Zea Mays
tgggtagcgtcataggttgagtcgtggactaaccgaggcgtgagttattgtgttgtgcaaccatgtctcttggctagtggtatgcaggtgtggagcatatgtagggtggtttatggcaaaggtgaagatcatatgggtttgcatcgatggaccgagagcggtgaaggatgagcgctaggacttgaacaagggaccagagtcgctaggtgactagccgtattggttgacacctgagacacacactgacgcgaggacgtggcagagcgagccgtgttgctggcgcaatcgaggactagcaggtcacgtgtcc

SEQ ID NO: 104626 - DNA, 332 bp, Zea Mays
tggtgttccactgaattctttttaaagccttagtgagaatttgccaagatttctagttgaacttattggggcgaggtttatctttcatttctttccctctatttcttttatgttttaaagtgtgtttgaactataagttgtcttaattgctttctaaaaattctgtaaaaattacagtggcttcttactggtgtataattctctgtcctaaaatttgaggcataaagagtgaacagttctgtctagacaaaattatcaattattagggcagaaggggtgttttgaactacagctaccatttaacagtaggttattctctaagacttattttt

SEQ ID NO: 104627 - DNA, 550 bp, Zea Mays
attttgtcacaaaatgcacacaaaataaaacctcagcatgatgcatattccattttagtatcattaattctaactaatcactcttacttataggtaagctcttgttatgatgaatatatggcacacaacataaggagatcaactatattctcattgtatacatttttaggtattacaaatcctacccccttaacaagaatctcgtcctcgagatttaggaagtactagggaaaagatggagaatatctatgtgaagctcttcttctctctcccaagtagcttcatcttctccatggtgactccattgcactttgcacatctttataactttatttcttgtaactcgagtcaaagtgtcaagaatcttgataggatattccgtataggtcaaatcaccctgaacactaagctcttccataggtagttgttcctcagggacacgaagacacttcttaagttgtgacacatggtatacatcatgtacatcagatagattatcaggtagctcaagttgatatgccatctccccaaatcacctgaagattctaaa

SEQ ID NO: 104628 - DNA, 303 bp, Zea Mays
gcaattcatacagaaccgcaaggtaacaataataacacatgggtaatcgacctttctctacgaccttcagttaggtcaccaacagacgacctgatgactacgaaggcatgtcaccatttcatcacactcattcatcgcctatatgcgcactaattcatttcttgcgacccatgcactcaaaatcaatccacactacacaaaatacacttatctcttatttatgcgcagacttaacacctttcaggataaagagtcactagagaatctactaattaacttgcaaccacttgaagtactggaaac

SEQ ID NO: 104629 - DNA, 370 bp, Zea Mays
acctagggcattccgagacaaactcggagttaacatgacccatgggggcaatcttatcaaaaaccctatgacatccgatttaaccatgacccatacccataagggacaaggatatccaaatttacaaaaaaattgggtgaccagggcaagagcacacatgaatttacaaaaaaataaggctggctgggaggaatttcgtatatgtttattttcgttatccctaatcggtactgccttcgcatggtacaccaccttgccatctaactctatttactcttgggggatctagagcaaaaaaattcatgaccattttttctttgggagtatgagttagcctagttaatttatcagccctacgacatggaaagga

SEQ ID NO: 104630 - DNA, 358 bp, Zea Mays
caatttatagagtccatcagcggtggcgcccaattttgagaagatgcgctggcggccgaagagaggggaagttcactgacgcgagttaccgtggcattcattggcgcgtcaactcagaggacagacaggctacctattgtgaccaacgatgacgtggtaacaaggcagtagcgtggcaggctcagattaacggcgatcatcaccgcgacggccgcgtggccatgtcgcagcgcaagtggatgaggcgacagagcggccacagtgctccgacttcatctagagccaaagatctttcaccctacgtagttatcagtgtgccaccgggcacgaatcgaggcgcaggattaccggcggtgag

SEQ ID NO: 104631 - DNA, 577 bp, Zea Mays
gacaccgagacggcaggtcttgcagaaaaagctcgcaaggaacaaccttcggacctcaggacagatgaagaaggggccctctggtttagtaaccgtctgtgtgtgctgaaaggagaggcacgaggaatcctgcttgacgaagcccacaacttagcctactctatccacctagggaccaccaagatgtacctagacctcaagaccagatactggtggagaggaatgaagaaggcgatagctcagtatgtggcccggtgtgatacttgctagcaaactaagacggagcatcagaggcctgcaggcctactgcaacccctcccagtgccggaatggaagtgggaagaaataggcatggatttcgtgatcggactgccttggacccaaaaagggaacaattctatctgggttataatcgaccgtcttaccaatgtagctcacttcattctagtaaagactacctttggaggagccacccttgcccggatatatctcaaagaagtagtcagactccatggcattacacgaaagatagtgtcagataagggaacacagttcacctcaaaattctggatgagtc

SEQ ID NO: 104632 - DNA, 571 bp, Zea Mays
cttcggtttgccctgctcgcccctgtttgcggtcgcccttctggctggtggtgtcctttggcagatgcatcttcaagttgaattcggtctcggtctgtcatcttctccaggctgctcttggtgggctcgccaaggatttcgaagtgcttcagctggctgaccgcgtttttcgattttcggtttcctcgatggcggtgggttttcacatttataacttgggctccattgagcgtaaggagttcaaagcattcttcaacctctggaatcgtggtggacccaattggaagcatgaattcaggctttttttggatgaggaagctgcctcctggtcgatggtccgggtcaagaattctccgtcgtatgcggacgtggttaagctccctctcaccggtgccaatgctgttccgattcggaaccttgccaggccgcctggtggtgctcagcatgctgtccgggctggttcttcggtcttcaaccgtttgggccgtcctcccacttctcgtgccctggctccacaggctttgtctcggcctcgcccgagggtttccgtgttccaccgtcttcacccgca

SEQ ID NO: 104633 - DNA, 987 bp, Zea Mays
cacaagttcccatagtcgtccttttgcgaagggggggtgagggcagcgttgccacttgaattcaccaaagaacggccatgtcaacaccgacactttacataggcttcgcctttgggatcaagctagcctcccggaaattaaacaacatcagtttaagctcctcaccatcaaatagagctcgcaaatctccctcttcaaaatgctacccagttgtcggcgcaaggatgatccggcgagtcccttcctccgaccgcattctttcccgtggacgagggctctccattcccatacggtgacacctttgagggactttgatgccttgcgaagactcgcccaacagtcccacactccgtttcggcactccaatccttcttttgcccctcgccacagtcggggcaaccgtagacgaagactacgccacagtcggggcaaccttaggtgaagactccaccaaagacaaatctaatgccataaaataatctaagacatcttccgaggaatcatcgtccatcctagcgaatgggctcagcaaaccctcactttccgatgaccatgggtcaacatcagattccccactactaagcactaccaaactttggcacatcaacgatttgtcatttccattgtcaccaaaatatgcctgtgcaggcccaagcatcagaacctatgcagcagtcgactttaagtatcatacaaattaaaagcgctattgtaccacccctgctctattcattacacctacgcggaagtccgtgtcgtcgtagggtcttcagcgctgccttttatgagtgaagactgctcttcagctcctgcctcaactttggcatcttttcgagccaccgagctctctaggccggcgaggacctcaacttctttgtccctcatctcctacgaagacaacacaacaacgcattagacaatacaaacataaaagacacctttactaagggtgcaaacatacctgtgccagcgcccgatcggctctct

SEQ ID NO: 104634 - DNA, 481 bp, Zea Mays
cggtacccggatatcttaagtacattattgcaaatcagtattgctcttaagttggtttgttgtgctacctatccttggagtagttatgcttttgagattgcctgtgttatcaatggttcataatgatgcttgcttaatcatgattgtgtgttctatatgttatatcttttgaatcattcaatgggtagcttttcaatcgatatattcactatgattaactctttttgtgttaatggataaacctgtatccttttgtaagacatgctattgtctttaatgattaacctatgtgcaagcatgacatcttgtttagtccatgttcacataattacccaattttgatactgtgtgtataccaaatccatgttgtgccactaatgcaccttcttgagttatgaggtgcatgagcaaaaggagccctaaattggtgacaacaggtgctctcactctacactacctaaaagaatggatctcatggtat

SEQ ID NO: 104635 - DNA, 400 bp, Zea Mays
acatggctagggccacccccgcaaacaatcaatgagccatcactcatacctactaccccaccaatgtcaaccccagcagcaaaattacaatcagagagccccacaacacccacaactgcaataccaacaaatattaccacccccaccccttaagcaaatcaacaagcctgacaactcccccaccccaaaacaagaatacttcggcaatccaactttcagatgagttacctatatgattgctggaggatctagctctgacttcaaaaataaatggcaaaaaagggaccattaccaaagagttaaccatgttgccatcacaggaccagtaattcagacaaagtggtctcatgtcccactaaccttcaacacaagagacattgacctccacacagcgcctcac

SEQ ID NO: 104636 - DNA, 431 bp, Zea Mays
acgaaatgttctagctctctacttgaaaggtctaaaaccagatttaataggcagccgatgctctacgatctctcggcttaatccaggcatctcagtgtaattccaagcaaagcaatctgaattttccttcaatagaccgatcatctcatctctaggattggtctctagggtcttgtttacaaaagtcggccttggagttttaccatctcctatgtcaatctcctccaaaggatcgaccgatgtaaacccctgtcctagtttatcaagatctctgaattcctctatcatgttccccacagaggaattagatgatctttgtgtgacggcggactttccggtctcggggaccggatcatccgtaatactatccttttgctgtgatatatgttcggtcttagagtccgaacctttttgtgaaagaccagaccatc

SEQ ID NO: 104637 - DNA, 434 bp, Zea Mays
acgaagataagaaaaacgagattataattgatggcttagagaataagataaaagatcttgaagcttctctagaggagaaagattttctgctacgagcagccgaaggcgccctcgcggaagtacaatctcaaattactaaactatgcgaggaactcgacaatactcgaacaattctaaagaaagaatcagagcgcttcgagcaagaaataaaagaactgcaagcaaaagctgaagccgaagttgagcagagttcaaagctacaggagtcattgagagaccttcggaataagtgcacggatttcgccacccgctgtgtgagccgactaaaagaaatattcaactcggttggggctagctctgaagaaattgccccttcggctgaagacatccccaaagccttcgaacacattgaaaacaaagttgaagcactcgat

SEQ ID NO: 104638 - DNA, 339 bp, Zea Mays
cgaggattgacgtggcgccgacgtggtacctagttcggtgccacagatcttggcgccgacctaggtgttagcactcaagacaatacacttcagacatctacgccttcagctactgatggagacatgggagcagaggaagtgcaggtttcaaggcctaagaggacggctaggcccagtagccgtgttacgggcccagaatgggtgcgctagaattgtatctcgctaagcccatgagcttctatatgtatcgctgtatccgaacgagacgagaacaagaaaagagaacactcatttaccaccatcttcttctccaagcttctctcctacctgtgcttccct

SEQ ID NO: 104639 - DNA, 467 bp, Zea Mays
gctactgaagccaaagaaccttctcttactcagaagaatgaagagctggctatattgccgaaggccgataatattaaagaaatagagaccgcgaaaacaaagatagtggaagttacaagccctccggcaggaatgacagtgctgaaggcgcaaaaagacctcacggcgactccgaagaggaaaatgatggtcaatgtactagatgtgttagagacgataaagtcttcaagctctactccgaagaaaattgccgaagctccaaaagcgcaaattgtgatgacgacctctgaagccgaagctacaaagcaccaggctgagactgaagctgggccttcggagcccgccaaggggaaatccttagaaaccagagggaaacaaacagaagcggcggaacaaattttggctgaagaaactggcactgccacctctaaagcattctccgaagctctcaattatattttacgaca

SEQ ID NO: 104640 - DNA, 710 bp, Zea Mays
aactgaatacaacatcagtatctactattacacctgattggttgctgcaggttactcaaggttatgaccaagatccggtagcccagaaaatattaactcagctagctgttggtgggcaattggcacactacacgatcactcaaggtgttattcggttcaaaggaaggatttggctgggcagtaaccaagagatgcatcagaaggtgatgtcggcattacacgatagtgtagttggaggtcattctggatttccggttacctacagaaggattaaatctaattttgcctggccaggcatgaagcgccacgtccgtgaatttgttcaagggtgtcagatctgtcaacaagctaaaccggaaagggttaagtacccaggattactattaccgcttccggttccgaaacaagcatggcaaacggttagtcttgattttatttccggacttcctccaacaagcaaaggaaattgtattctggtggttgtggacaagctatccaagtatgctcactttatggttttgaaacacactttcaccgctctaacagtggctaagatatttttggaccacgtatacagactgcatgggttgccgacagctatgatttcaaatcgcgatcctatttttaccagtcgcttgtggcaagaacttttcaggctcactggtactcattgtgccttagcagttcatatcatccgcagtcgaatggac

SEQ ID NO: 104641 - DNA, 516 bp, Zea Mays
atttcatggccccctgatccatgttttagcattccttattgctagtgaagctctcggtcttggttaattgaacgctaccgcgccgtagctttgagaatgccacgttgtcgcctgggaacgccggcatggacactactcgtgtcatcctagtaggtcactgatttgttccgagtcattagatttaatgcaaccgacttgtgtaaaccagaatgagttcgccagagatcttgctccgctgttgtcgcggagagacaaagattagtggcaagttgatcaaattggtccctagaatgtgttcgggtagcattggagatgaagcccatgtgctcaactccacaggaacaggtcaccatcggcgagtacacgcgactccggccatgtattcgaccggtgcacggtcagggacctggtgtcgtaaagaaatagaaaccagaggacttttaggtcactgtcagtgaaacatgtgaatagtgccacagactctttactagatatttaaaacaccaggggcctttg

SEQ ID NO: 104642 - DNA, 414 bp, Zea Mays
gtcttcggaatgtctgaaggtcggatcctgagctgatgataacctgacctcagatctatcttggagaacacactggctcctctcaactggtcgaatagatcttctattctgggcaaggggtacttgttcatgatggtgacctcattcagagctcgataatcgatacacatccttttggtgccatctttcttttccacaaataggacaggggtggcccaaggtgaggtgcttggccggatgcaacctttctctgacaactcatcgatctgcttcttaagctcgaccaactctggcccagatattctgtaagctctcttaaagatgggggcggttccaggaagaagctctatggcaaattcaactttccgctctggtggcatacctggcaagtcctttggaaacacatctagaaac

SEQ ID NO: 104643 - DNA, 657 bp, Zea Mays
cttgctaagggtaaaactttctaagatgctctatgttccatgaattccccactttcgtgtcatccatttgagtaagccagtatgatcccgactgagtgacctctgacacaatgaatggcccttcccatagtggtgacagcttgtgtcgtccttcccccgttagaattcggcgaaggaccaagtctcccactacaaaggatcggtgtcgtatggctttatcatgatagcgcctcaaggtctgctggtatctggctgactgaattactgtgttcaatcgctcttcctccagcacatcaatatcctctagcctggtagcttctgcttcaactatgctttcgaagaccagcctcggtgccccgaacctgaggtcggcgggtagcactgcctccgaaccatagatcatgaagaatggggtatttccatgtagagctcgactaggttgagttctcaagctccaaaccacatacgacatctttctgatccactttcctgtaaacttttcatttttatcgaacactttcttactgagtgcttccagtatcattccattggccctttccacctgaccattggctcttgggtgtgctactgatgcatacttgatctagatacttcgttgtttgcagaaattgaagaattcagagctggtgaagttgg

SEQ ID NO: 104644 - DNA, 504 bp, Zea Mays
cttcaagaatctggggatcttcagctctcatgggttgaactgggttgggtgaagcgggctcttggatccgcatggctctacgttggttgtgggttaccaagtaggcctccatcagcttctggacgtgctcatccttggcttgcttcagggcttcaaccgcaatgacttcacgactttccaatgcagttgcacgggcttgagctatggtgagatccacatggagccgacggttgcgcttctctgcatcttctgctcgggcaatcatctgacggtggtgccgagccaagaaatcatattgtgcatctagggtgagaaggtatgcagtgaggtacacgactgtggggtcatcctcaagcagctacttcccttccaatgcacgcatccaggccatccaaactggacggtctctctgaaagggcggaaagaatctgagcggtgtgtcggccactttttcttcatagatctgacacagggccctcaatgccttgcgggcgatgacttggc

SEQ ID NO: 104645 - DNA, 970 bp, Zea Mays
taacaacttgtgccgtccttcccccgttagaattcggcggaggacgagatctcccactgaaaaggatcgttgtcgtacggccttgtcgtgatagcgtctcagagtctgctggtatcgtgctgattgaattaccgcattcagccgttcttcttcgagtacatcaatgtcctccagcctagtagcttcggcttctgctatgctttcgaagatcaaccttggcgccccaaacttgagatcagcgggtaataccgcctctgacccatagaccatgaagaaaggagtgtttccatgcagagctcggctaggttgggttcttaggctccaaacgatgtagggcaattcccttatccactttcctgtgaacttttcattcttatcaaagaccttttttcctgagtgcctccaatatcatcacgttggctcgttcaacctacctgttggctcttgggtgtgctactgaagcatacttgatctgaatgcttttttgctcgcagaaatcaaagaactctgaacttgtgaagttggatcctaggtcagttatgatattgttcggtatcccgaacctgaatattatgtcttgtatgaattccacggccttagctgaggttaaagaagcaatgggtttgaactctatccatttagtgaatttgtcgattgctacaagtacatgagtgtatcctccttgcgttttcttgaaaggtccaatcatatccagtccccagcatgcgaagggccaagttactggtatggtctgcagttgctgtgctggtagatgttgttgctttgacaagtactggcaagcttcgcacctctgaactaactcggttgcgtcacttttcgctgttggccaatagaatcctgacctgaagaccttcccgactagcgtcttggatgctgcatgtattccacattgcccagcatggacctcatctagaagtcgcttcccagtagatgagaggatgcacttcat

SEQ ID NO: 104646 - DNA, 616 bp, Zea Mays
aaaccaagataggtgaatggcatttctccaatctggcaattgagggtacgggagaggatctccatcttgtcagaaggcacgtttatagagtacatatttgatttattatagttaaccttcaggccagtagaagaagcaaaagagttgaggattgccttgaggaagaaaagttgcttagggtaggcctccaaaatcaaaagagtgtcatctgcataccgaacaatcgggaaatcctggtcaccaatattcggtaaagggagctttattaataatgctctgaagaaggtcagctgccaagacaaacaacagaggcgaaagaggatcaccctgtctaacacctctcttgcaatgaaagggcttaccaggaacaccattgagtaacaccgaggacgtgctagaaagaaggatgctccgaatccagttgatccatctaggaccgaaacctttgtgagtcagaacctgaataatcagttcatgttcaacagtgtcaaatgccttttcgaagtccagcttgagcacaatgatctctttttttgaggagtggcataggtgaatttattcataggcccaagccaagcagtcctgaatagatcttcccttgatgaatccatactgg

SEQ ID NO: 104647 - DNA, 429 bp, Zea Mays
gtgggccctccctcaccagcagactacctaaacctccccacatcctctttatcacgaccttctccattgtccactctctagtggagtccatatccagacgtgcataatggaagcccccactaccactttgtatgcaggtgaggtctatcttctcctcgcactaccaatgtcgccttcatctattccccttattctgcagcgaagcaagagtctgtcgcacgccctctattgatcccgcctcttctccagtggttgtcgcccatcctcttatagaagaatctaatccgactacttgtttttcctatgcatgtgagtttcgactccgaggccacaaagctggccacacacaatgtctatcagaacatttgttcgtcttcggttcaaggttcctccattcgtcaataagcaactggtcgtcgcgccacctgc

SEQ ID NO: 104648 - DNA, 1001 bp, Zea Mays
ctcattttgtgtcaaatcctcctactagtgatggtggtttgggccttagagtgcgaccctctgccgaagaagttagtgctttggttgcttcgcttgaagaaattcctgatgatgaacggcaggttcactttgaggtgcctttggatcccagtgatgcagaaataagtgccatgcttgatatgttagccgaggattcttctgatgccgctcctgccggaacattggtggtgacgcctctcccagaagctagtaaaaccttggatattcagaggtctgacagtgttcgcccgaagcgcccttgccgagccaatcagcctgctcctcctgctgatgggcagaaaaagaagaagagacgtcttcgccgagtgtctagcttggatcgggatgctggtccttctgctcctgctgctgaggaagtgcccgtgcctgaatttactgaagctaatcccaatgggtgtgacccgtcttacgctgaccccaatgggtgtgactcatctgacgctgatgccaatgggtgtgctgtccgttttgttgatgaggatgatgaagaagaggatgaaatctctctgattcagaagaacagccggcgttacgtagctagtggggaaagtagtggtgttccttctcctgccttgtctgccctcattggtctgcaagaattatctctggcgaactttgatcaaactcttgaagacatggttccagaggatctgttatcagaaccgacagatggtggcgcgatggatgtttgtgttgatgtactcgacgccgggttggggtcatctcgggcagcatcccgtgcctcatcgaccttggagcacggtcttgagggtcaggaagctgatttggattgccctgctcccatggaagtgactgagggaccttcagccttagaggtggctactgcagagaactcggccctcgaggatgatgttggcgctcacccagcccccgagggtgttgccggggatggtttggctcggatgggtagcgcaagctgt

SEQ ID NO: 104649 - DNA, 369 bp, Zea Mays
ccggcggtgagatttttctggcgctggcaatctgatcctcaacagtcactgtaccatgggctgcaccattcagtcaacctgacagccatagtttaggctcgattttctcacaattctatatggtaacatactccatgctctgcagcaaaattgtagagctataaaccagcaataattcgactatagggattgaactcatttgagcactagatcaaggttgaattcacactcaaagctggctctgttacactgaatatctgaatttcagaatggaaccagcctgacagccaagctttaggcttaattatttccaaattcttcttaacaactatgcttatgctcttaagcaaagttgttcttctatgttag

SEQ ID NO: 104650 - DNA, 383 bp, Zea Mays
ttgttgacatccaacttttcacctgcagctttcactgctcaaagataccattgcaaagaaggatgatgaaattgatcagctccaactagccaacagtagcaattccctactgaagtccacgaaacatggtgactccttgttgaagcattcggcctcttctccaggaatgacatccttaggaaaagtggcaagctttggtagcggggcagcttctgatcttgacaactgctctgacaccagtgataggcattccgaagctgggtccatgctctctactgacgaggcccgacagctgagccagaactcggctgatcctggtggtgattcagatggaaggctaagtgatatatcagatggcggtatacccgcgggtgcagaaactg

SEQ ID NO: 104651 - DNA, 413 bp, Zea Mays
gtagagatagatattcggagtaccctaccatgcatgcgtgtattcgatcggagccagcacaacatgtctttctcttggatgcatcttccgttaaagctccagacaatagcaccacacaagtagtactagaagagatcgtggtcagaatacacaagtgccaaattaagcttgttcagacatctatccagcgatgagctagcagcttaattagctactacagtacatgctagcagctaggaagtaggaaccactcctcctgagtcctgaaaactaactgttcaatggcttggcttgtgtcatcagattctgaacgcatcatctgcttttttttctattatcctttgagtggtgtggctgaagagcaatgctttttgtgtgccttgctttgcatcttctttggctttcctcttgtg

SEQ ID NO: 104652 - DNA, 336 bp, Zea Mays
ccgcagcatcgtcaggagcctgaggtacttggttcacacgcgtcctgacattgcgtttgcagttggctatgtgagccagttcatggaggcgcccatgactgaacattggagcactgtcaagcacttgctgaggtacatcgcaggaacaaaaacccacgggtgtgtatatcaccatgggaaaggaacgctggagttgatcggatacagtgacgccgatcatgccggagacggagatgacaggaagagcacctctagcgctatctttttccttggccggagcccggtcagctggcagttccagaagcagcgtgtggtggcgctgtcgtcgtgcgaggt

SEQ ID NO: 104653 - DNA, 484 bp, Zea Mays
aaacccatgacatttgaatatccctagagtaagaggtttggaaccatgaaatttgagttcatatatttcttcaatttgtccaaaataatcgacatcgccaaggctaggcgtaaagactccagaacacgttgtttttcgattgggccgactttggtcatagtttgttgtgcgaaaacggtatccattgacgtcatacccagaatatttcttgaccctataagcaaagtcgttggctatttgtctcaactcggcactcatagacggatctctttggccctgcaagtattcgcaagttaaaagatgctaaattgagttcatagatagatctctttgacaaactaagcacgtaccttacgtttgaaccaggaaatgaaatcaggcaatccagttctcgcaccctttctaagaagagtatcatattcctgtggagttgggtcccttgatcgatgccagaattcatgaagaaattgttccatgtatggcg

SEQ ID NO: 104654 - DNA, 544 bp, Zea Mays
aacccataactcatatggtgtttaggcactaacttactggggaactctattaagaaaaggaataatggttttaagtaactccattcgtaagctaattggtaaagtggagtagcttatcatgcttattatcatactcattaaggtgtggttgcgcattttagctacttcattctacctgcggttacgaatctccgcttcggtactccaactcttctcttgcttctcgccgcaatcggcgagaccctagacgaaggctccccatcctagactccaccacagacacatctaacgctacaaaaaatctaagtcctcttctgaggactcattgtccatccttgcgaacgggctcagtaatccttcgctacccgatgaccatgaatcaaaatcagatcccccatcgttgaaccctgttagactctgacaaagcaacgacgtaacactttccacaacaccaaaattttctttccccttgcccaacaggcctaaatctgcttgtgcaggcctagtcaccggaacctgcacaacggccgattttaagtattaa

SEQ ID NO: 104655 - DNA, 545 bp, Zea Mays
ggaagcttggctaaggcgggtgtaaggattgatagtaataactggcatcttgttctatgtaccccatgccagacggtccggtaagatacgaggatggtctggttgtgtacttagacggtccgacgtgatacgtggatggtccggcgtgatacatggatggtccgttcgtgtcagttatatcttgcacggaacatggtggtcctggtgcagatctcgatggctcgaggccagccgctgctggaccaaatggtttgagctcaagctcagacggtccggctgagcgtaggcttgtgaatttatcctagattggtgaggaggatgtggttgcctggtataggagttcattggtataccatatgatggttggggctgcgaacatccatttgcagccaatgatttttgtgcatcgtacctagcataaacatcatatgatgggtaattgggaacgatagattttgcaaacgcgcgctagtctcgtataatcctcttgataccaactaatacttgttgcattttcttcgttgtttatctacgtaagatctaag

SEQ ID NO: 104656 - DNA, 538 bp, Zea Mays
caaatctactcgacatgatacccaatactccaaaggtatactgacacgtggatcttccaatacgggtaatttgtcccatcgaagaatagaggtttgccaacacctcattccaagtagctttcgtggatttcagaccgaatagggtgagaaaatccttaacctctctctaattccaattgaaggatcagtgaggcaacaagggggtgaatgggagccactaaaaattctcttttgagaatagcatcgtgctttgatcccaacttcaatgaaaccccaagggacgactgcaatagcgtagcattgtaatactcagtctagtgtctactaaatataccaaactgctactcagagaactacccaactatctacaaaaacttagagccgaaaacacaaggcaagttgagttgaagtgttgcgcatagagtcgacagtgctggacatcggtggtgccgcgcttaaggccaacagtgctgggcaggcaaaagtgtgcagaattgtctcaaactttgcaggaagtttgcgcaaggggaaataagat

SEQ ID NO: 104657 - DNA, 382 bp, Zea Mays
catgtgtaaatctgctaactcccagtctttgatacatgatagaacctccaccatgtccggtgtgagccgtcgacgatgttcctcgatcaccctgccaaccaaactcatcagcaaccatgttaacacgttctggtatattatttccagaatgtttcacatctatgagcctaagaccaatcaaccttttttctagatcccaattcgaattcacaaagtgagcaacaacagaaatgtagtcctctttagctttaccattctagatatcagaagttagagcaactgatgaaacagatttaaatgactcaataagcttaagcacacattcattataaagcttaattagatccctagctgttgtttgcctacaagacttcacaaattt

SEQ ID NO: 104658 - DNA, 322 bp, Zea Mays
agtcatttgtcaaagattatgtacagacctgtcaaatttgtttgcaggccatacccgatcggttagattattcggctaaattgcaacccttgcccattccttcatcagcatgggtcgtagtcacaatggacttcatcaatgtgttgccacgatcaagatctgctaactgcattttagtggtggtcgataagtttaccaacttcggtcattttgtgttattgtctcatccatatactggtagctcagttgctcactactttaacatttataaattacatggcttaccatcaacaatagtctctaatcaagatctagtattcac

SEQ ID NO: 104659 - DNA, 315 bp, Zea Mays
cagaacttatctgtacgctatttgcctttgctgtgtgtgtcgttaccaacttctccctggtacttggccccctcggatgtaggctcgacgtgtcgaggctggatgccagtatacttaagaaagaattggtgacctggcccccaggaggtagtctcaacttggacctggacctgcacacagccttggctaggaagctttagtagtgcacccatagggcccactaactggtatcttttatcctttgattcacgcaacagggcctgcagggtttagaccgagaagccaatccatgtttccggaccccctggatcatag

SEQ ID NO: 104660 - DNA, 574 bp, Zea Mays
tgggcggggcgctgtacaatttcgtaccggcactcctgctccgccgcagaaccctgcgtcaccgtggccaggcaccatcttggtacaattgccggtgagtaccctcaaaccatgttcgcaatagcatgatcatcgcgtagtcctatccgatttggttttgtcgctcggggttggccgttcgccgtcgcactcacgtgctccgccgtgtgagcctggcggcggtgactctgctcggagttggtaggaagaagggcttctagccgttcattctttgatggtcggctagaattaggggtcttgggtgtattaaaccagagccgtcgaattggatgtgtgcggcccagatcagaaagcttatataccgtttagtcggaggagtgtaatccgtagatcttggatcctacgaacgagagcgagcacaggttcataagggctcggatctaatctgagcactcgaactaggatccaacggccagatttgatgcataccgcttcggtctgagagtctttctaaagagccccttcgtttttagcttatcaacccgcagtccagggtgactgtgctctgagtcta

SEQ ID NO: 104661 - DNA, 617 bp, Zea Mays
gatgccgtgaagacgttgggcactatgtctttcgggcgtcgaccgtgggcccatgcgatctaccgtaacgaagtttttgctccatcaccattttttattattttttattctgcaaagagtagtcgatcagtctcggtgcaaggtgtttgtagcccagcccatgaagtgtctggctttgcccattctagccaaaaccaacgtaaccacaatgctctagcaaagcttttagaatcttgcactcctgggacaccaaggttaattggatgtgtcactgttggctagttgactctgcatttccctcccgttaagttttctcgtctgacccaaaggagcattcttcttatcttgtctatgtcctttagcacactgtttggtaagtgtgttagttagctacaaggacaaaaccaccttagttagtataatccttctggcatgagtgatgttgcaccctttccatgttgccatcctgctttgcaccttgtccagtaagtattgaaatccacttttggcaatctagatatgatcaaggggatgccgaggtatttgattgggaagtgcgatctacccgtaggaaagctgcaagagtttcattgaggttttcgtgattgcatctaatt

SEQ ID NO: 104662 - DNA, 281 bp, Zea Mays
ttcatgttgattgagtatctagactgaagcaccccatatgctactttctatcttgaaggaccgtggaagccagaagcatataagtggctattatatccttgccatgaaccgcatagatgcttggatgggtccttcgtaggtcataactgataagctaagattacatgtcacttacagagtatccgcttgggtacgatttgggtccgaaggacatggacatcaccatgtaattgtcagtcttgctgtggataaaaaccaatgggtcaattgtgggcaagtgg

SEQ ID NO: 104663 - DNA, 640 bp, Zea Mays
cagaattttcggatgtgttccctaaagatttaccaggtatgccacctgagcggaaagttgagtttgccatagtgcttattcctagcatcgcccttatttctataagagcctatagggtttctggactagaattggttgagctcaagaagcagatagatgagctattagagaaaggttacatcagaccaaatacctcaccttgggtagctcctgtcttgttcgtggaaaagaaaaaacaacaccaggaggatgtgcattgattaccgagctctgaatgaagtcacaatcaagaacaagcaccctctgcctagaatagaagatctatttgaccagttgagaggagccagcgtgttcttgaagatagatctgaggtcaggttaccatcagctcaggatccgaccttcggacatcccgaagatgacatttattaccaagtatgggttgtacgagtacacaattatgtctttggcctgacgaatgtgccaaccttattcatgaatcttatgaacagtgtgttcatggattatctagacaagtttgtggtggtgttcattgatgacattctcatatattctcaaagtgaggaagagcatgtggatcatcttaagatggtattgcagaggatgcgagagcaccagct

SEQ ID NO: 104664 - DNA, 667 bp, Zea Mays
cttcagaagggcgcgaggatcatgctcggggccccgtcgggtgaagcgggttgcttgggtgagcaaattcctcgctagagttaggacccaagcaccacgccgccatgtaccgtggtcagcgtcaccgcctcatctaaagcacaggtgagtgggtactgtcgattcgccatgatctcctctgtctatagcatcatcggaatcggtgttttaccgaccgagagcgaggagagggtgagaagtgaccatggcatcgccgtcgacatgtggggccactgttggtgttgttggaataagaaggagaaatcgggttcgttcgattcacaacaggcgggtaggattagatctggggtggtaaacatcgtgcggcattgatgctctgatggtcggtcacgattatatcctggcataccggtttggtatgtggagtactagccatccgatggggatcaaaaggacgtagttcgatcttgcgtgaattaaatctcgactgcagatcgctaatccattggctgaaatcacacaccgattgggttaaagtgtagatctaatttgtgccattgatgttggattgggtggctagggtaagttgatacccccttcaccgagtacattttgcattggaaaccctctggtttccattattcaacccgtcgtttacctaatttaa

SEQ ID NO: 104665 - DNA, 490 bp, Zea Mays
gctcgcagagttgttgcaggatcttggattgtgtggcgatgttcttcgattgggagtcgatctgtttggactgtgccgccaaagccgctgtgatgccaggatctgctgcgcccgccattttcgcccgccgtgtgaagtacccggactccgcaacccaagattggtagtctgataccaattgtcagcaccacagatactgatcggaagaattgctggagaagggtgaagatacggagaagctgcgtattcttagttatttcttacagcaatgttttccccctttgcctcacaggcattcaccaggcatataacccatacaagtgtcacacagcccactcagagcccgcgtatacggaattgggcctcctgaccctatggcccactcagagcccgcgtacaggaattgggcctcctgaccctgctgtcttcggttccgcgccttgcgtagttggttcgagccgtcagcacatgtggcattggacgagctgac

SEQ ID NO: 104666 - DNA, 483 bp, Zea Mays
gtggatagattgaaatctagcgaggccaggcattccgctcaagccgaagctcatgaagccgaaatacaagaactaaagaggaaggttgttgaagcaactgaaaagtttgaagttgaagtggtgaagcatgagatatgcgaaatcgaaagatcaagagcacaaaagaatgcccatgagcttcgtgccgccaaagaaaaatgttgtgaaatatccttggaatgcgctaacaacttaaagaacaactttgcaagggttggagcctattcctatgagcagaaatttattcgtgaaaatcctaatgagatcattcaatggataaatggcgaagttgaagcttttgaagaagttcttattgatcgaggagatttttgtgcctttgctggtgctcgtggggccacgtccatcttggagaaggttggttgcgatcatactaaggttgtagctcagttagacttcgccttctcagttgatgatatcagaaac

SEQ ID NO: 104667 - DNA, 317 bp, Zea Mays
ctaatttactatagaaatactatataaaacctcatgccataacttaggaatatgttgtgtttcatttttctttatttgttaggttgtatttgatgtgatgtcgggctgcatttgttgggaaactttaatgttctatacttccattgttagtgcttgtatgcatatgctattgtataaatagtaggatttaatgtccccttctgagagttaactaacttcattattgctcttggggcaactaaaatgactgaacatttattatataccaatgactcattatttgttgtactgttttttaacaacaccctactctatcc

SEQ ID NO: 104668 - DNA, 443 bp, Zea Mays
gtcgtcaacaccgccgaagagcaatgctcctggttgatagccgcataatattgcataatccctcagctcttccttcttagccttagacaacttttgaccaattatgttttgaaaattaaaatccttttcctccgaagtatcttcggcaaactccttctctttcccgggcactgtggccagggtctcttcggcagctatagcagcttcttccacggccatgttcaaaagcatcttatcaatattagaaaaagtgccctccagatttgtatcttcggccctttcagctttggtagttgcagcttcagcgggggcagttttggtagctgcagtgtcttcggcagccggtgtttttgacgccaaagccggcggtggtgtttcttcaatggcttcaataacagtaataattctccgcctttctggcctaacagacttcttcgctgccg

SEQ ID NO: 104669 - DNA, 610 bp, Zea Mays
agacactgaatgcgttcgggttgtgatatacgaaaatcctattccatttcttcttcttcttcgtgcttggaaagttgtgctgtggcgattgagttgttgtatctcaccaaccctttttcttggcgtgcagtaaggaggagagcgagtgatatctttgaacccttgtcgttatgaagcttgcacgaggggcggcaataaagtttttgggcagcgcaactgtgcgaccgctcgaaaccatttgacgatgatcttcgctgcctaacggacgaatcgacgcgtctatattatcgacctgcttcgtctacttttgtgcttgatcaacctaagcaccgacaaactcgacgtgagtaaatatgttaattcagttgtttaatgtgctgatctatatattgctatgcgtagtgcgcatataagtttgaatatctataaaatttgcctcgatttaaaatctggacttagaatattacgcagtataccaacaatccaaaaacccttatttctgcattattctattattctagcaatggctggtgctttagatgcaatgaaacctgagaggtttggaggtggtgaaaattttcgtagatgatagactaaagtcaaattctgg

SEQ ID NO: 104670 - DNA, 531 bp, Zea Mays
aaacggctgttaatgaccaaaccacggctctatctatgacgatattgtaccgtcacagaaaccaaacgacgttaacaacgccgtcaggttgctcgggcagacgacgaattatgacggaaaagtgccttcctctatgaccacaactgatcgtcatagaatgaattcacttccatgacaacgcgtatttcgtcacagaatgtatacacatcgatgacgaaaatgggtagtccatcacaacacaacaaatgtgacgcgacccctatgaccaaatcgaactcatcacaaattcaccacaaatctttatctgtgacgatatatacacatgccgtgacgcaatacgaacgtcatcgatgataagatctctactagtgaggggcccgggtcaacaagtcatacggttcgtgagccgcacttcgggtgcagaaggaacgaaccaccgcacgcgcctgtagagcgaacccccgcatgcgcatgtagtgcgcctccttggggccgctgcagaagacaaacccagactatgacatgggggcc

SEQ ID NO: 104671 - DNA, 448 bp, Zea Mays
attggaacttatacttatctgtatgttatttgtccttgttgtgtgtaccttcatcaacttccccttggtacatggcccccctgggaggtaggctcgacgtgtcgaggctgggtaccagtataccaaagataaaattggtggtccagcccctaggaggtagtctctacagtttgagactacctattactggactgggacttgtacctgcacacagcttcggcttcgaagttttaggagcacacccataggacacatcatctggtatctgccatcctttgattcatgcaacaggacctgcaggttttagcctgggaagccaagccgtatgtccgaacccataggatcacagttccaaatactaggttgcccattgcagagtggtggagcgtgcaggcttagggtacagaaccatgctacgcggctacacaactccggacccctccaggag

SEQ ID NO: 104672 - DNA, 668 bp, Zea Mays
gtttggatcactgtattgccctatcgccgtacccacttgcccgacgacgtggcctcacggtcatcgccgaggctactgttgttttccccagttgagccacgccttagctagtttaccatgtcgctgtgcgccgtggaggttaaccagcgatagccatacgcctatgtccaatgaatgccacggtagaacgtcacggtgactcagtccctcttctcggccgccagcgcatcttctcaaaattggacgccaccgctgatggactctataaattgatgccccagtgagctccattacgttgttatgcgtccagtgcaccagccctcgcctccgattagccaccgtagctcgcgaatttcaaacttcccccaatttggttctccgcgacgccatgaaccaccgcgtcgtgaaccgtcgtttctaggttcgttcacatcctccttaccctcgtttcagcacccttatgtgctaaggatgcttatcggcccagccaattaaactagaccacgctagatcaccgggaacacctcgggttgtcctcggttttcgccgtcatcgtggacagagagattttgagctagaattttgcaattggtagagggattagggtcgctaggggtagaatttggtgtataccaagtaagaagcttagccttcacgtgttccggccg

SEQ ID NO: 104673 - DNA, 447 bp, Zea Mays
ctgggccagatactctataagctctcttaaagatgggggtagttcccaggaagaagctctatggcaaactcaacttttcgctctggcggcatacctggtaagtcctttgggaacacatctgggaactcggacacaaccttgataatctcaagtggatctgcttcactgctatcaacagctatctaataacaacttcctttctttggctcaggcaggactactcggtcaccacttcctctcctagtggagacatcaacttgattgtcctcttatcacaactgataactgtctcatacttgtctagccagttcatccctaggatgacatctattccctgagtacccattgctataagattagcgggaaacactatcccccttatttccacacttacattcaagcaaatgttatcagctcgaattctaccatcggctgagtcaatttgaa

SEQ ID NO: 104674 - DNA, 528 bp, Zea Mays
tcgtcaccgtcgacgaccttaagaagaccaatcgcttcttcgatcgtcatcgtggagaggtctagcagagactcgattaaacgagcaatctgcttatacttctcggggatgcaacggaagagcttctcgacggttctctcctcatcgtaggcgtcgtcgccgaactgcaccatcttctgcaacagagtgttgaggcgaagagcaaaatcatcaacatcctcacctggcttgaaggtcaggttctcccactccttgcgaagtgtctgcagtgtggtcttgcgggcacggtcgctgccaatgcgggtcgcagtgatgacatcccagtcatccttggcagtccgcttctgggaaagcgaaaactgcatctcgagtgagactgcagcaatgagggcatccagcgcccgtcgatcctcgtagtagtcgacgtcaccgtaccgaactgcttcccacttgtggcaaacttggagccgtaccctcatcaccgcagcccaatcgacgtagttggtcttggtgagggtaggccaccca

SEQ ID NO: 104675 - DNA, 558 bp, Zea Mays
tacgcgaaccatatatctgtgttctacccgcccgattgtcatccctagtcttgacgtccacgactacgagggacgtgcttatattctcctctcagggttaattcaacagttagaaaattggaggggaacacgattccattttcaccaaaccaaccctaagtgcttcttgatacacccagcctaggtaatgttggccgaggcccaacaaattagggttgcctagagcccaacagtttattatgcacacccaactcagggaaaggcccaatcgcccaaaagactagtccaatgggggaagggtggctctcccttttaaagtggcttcctcctcctaagttaagcgaggtgggataattctgaggctcacacggtcgtcgtccgactacaattgggccaactgggccaatcacatctttgccaacgggtaatagtggaggatgtcctcatcattcccaccttcttaaaatgggccctagctctgataccagatgatacacccagcccaggtggggttggccgaggcccaacaaattagggttgcccggagcccaacagttc

SEQ ID NO: 104676 - DNA, 293 bp, Zea Mays
tttttattgtgttagaaccttcacaataatcataaaagtgcttttcataccttatatgtcgacttgagataaaccacccgctcaaaatcactccttccaacaccttagatgatcaaatcccttgtcttgctatagttatccaaatttgtttgattagctttatttaacttgatcatgatgaacctgaaaaggactagccactttcttccaatacactcaaccttgtacttgaatatacacctccatctttgcttttcaaaactgaaaatcaacaccatcgaaaacatacaatt

SEQ ID NO: 104677 - DNA, 606 bp, Zea Mays
ccactgcacgcaccccacacacaacaccgcttggtctgttctcttgtcatggaccaatgggccatgcgtgatccctgctacgtgccgtgccctagcccctagccccgcccacatggccacatccatccatgattaggatagggatgatcgggtgcgacgagaggatgagtgattaggcctttctacgtacgataccacacgctgcatgcagaacaattaatgtgggcgatgcatgtggtcctagctagagagagagatcagaagatgagaagaagctaatcatgcaattatagatccacggatgcgagaggcccaaatgaaatgaaacagcccacgcatcgatcctaactaaccctccccaccagaaataactaccaacggccagtacctaccggccgccgcccccggtccatgcttcagttattgtatacactgtatgtgtgttcttattattgatggtggtggctgctggatcgattggatacccatgcaagcagcagcgtcctgtgtgcgccatactgccatgcttgcttaaatggcaaccctcgtgtccgcccgacggcgtacgtctgcatgcatatacatactgccactagctagtctctg

SEQ ID NO: 104678 - DNA, 639 bp, Zea Mays
gctgccaattgcggtgaatgttttgtgcgtcgaatgtcgaaggccgttgccgcagtcgttttcgacacctgtggtcttggtgccagtttgactttgcttttgtttggggctttgtggtattatattacatggcttcgcctcgttaaaaacctcacccctgggaggaaaagagtgcgggcctaattgacattgtttcgagagttacaaaggcactcgggccttgtgacttagacgaagaatttgggtaggttatctatgttccacgaatgctctaggtcttcgccggatggtgaggtgagcctgtaagcatttggtgatgttttggtcctgaccatgttgggcccctctaatttgggttcaagattgccacgagactctgttctaatggttcttgtgagtactaagtctccttctttgaactctcttgggatgacggtgttgtcacgccatgccttagtctgtgcttgatatttgttcagtgcttccagagtgaggacacggtctcatcgataaggtctttggaggttagctcatcgacgttaggggtggctgttgggcttgttcgtggggatccatgctttagctcttgcggtgtcattgcttcggatccatacatcaagtggaagggtgtgaactcgg

SEQ ID NO: 104679 - DNA, 1036 bp, Zea Mays
aaagaagccattggaagaatagccaagtgggcttgcgagctaggagctcatgccatagagtttcgaccgcacacagcagtgaagactcaagcattagttgacttcgtatcggagtggacccagcaacacattcctgacaatccagaggctactgaagtatggtggatgtatttcgatggcgcgctgaaactgcagtgagcaggcacaggaatcctcttcattgcccctggaggtgaacaactcaagtatgcgtttcagctattattctcggcatcgaataatgcagcagaatatgaggcaatgatccatgggttgaacattgccatatcactgggcattaagaggttgatggtatacagagattcactagtggtcataagccagataaataaagattgggattgctcgactgatttcatgggcaaatactgtacggccgtccgaaaattggaagacaagtttaaaggtttggaattccatcacgtggaaagagaccgcaacgcagcagcatgcgagttatcgaaactaggatctagacgggcccaagtcccacctagagtcttcgtctaggaagtgccacgcccaagtattccctaagatcatgcggaagagtgcaacaccctgagccaacaagaatcggaccctaatgactgaagagagcctatcatcaggtacataaggaatgaagaagaaccagatgataaggctacagcagaacgcatcgcgagacagtcggcccactacaccctcatagggggcgcactgtatagaaggggtgcgacaggagtcctcatgaagtgcatttcctcggttactaggaaacagcaattagatgagatccacatcggacagtgtggaatacacatagcatccagaactctggttgggaaagttttcaggtctggtttctattagccaacagcaaagagtgatgtagccgagttagtccagagatgtgaagcttgccaattcttgtcaaagcaacaacatttaccagcacagctgctgcaaaccatacctataacatggccatttg

SEQ ID NO: 104680 - DNA, 757 bp, Zea Mays
ctgcttgtgtggtcagttgcttcgcgcggttccacaacaaccgctagaaccgacggcgttgcgggtcgaaggatcgatgcttcaactatggtgacttcaaccactttgtcgctaattgccccaaaaagggcaagcaggaggctggcccgcgtgaccactactctggttggcgcaagagcaagcgggagtactccttcggcaagtacaagtctaagggaggattcgacaaggaggctctcaagaagaagtacctctagaaggccaagatcaaggagcgtgccttcctcacctccctcaacaacctcgaccacgactccgatgacacaatgtcttcctcaagcgacaaggagactcataggtaggtcgaggacaagctgaacggattgtgcttcatcgccgacaccgcaagtggccattgcaccatggcccttagtgatgatgaagtgggcggcgaccgccaggacatcagcgacggctcttcttctgaggtatcacattccatcgatgatctcgccgctaagatagatgagctaaacgctgctttggtaagtcaggataagttgcttaggcaggctgctcatgataggagagaattttgatccaagtatgagagcacgcttagggagcttgagtctactagagcttcagttgtggtgtctaacgagacataatgtgatgagtgcgctctacacatgtcgaatatcacaactttctagaccaagtaaccgccaccttgctagatgagtgcaacaagttg

SEQ ID NO: 104681 - DNA, 661 bp, Zea Mays
ccgagatctacggttcacatgtcaccaccctttggttaaatctcgacggcacatccactgatcaaaggtgcagatctcatggatcaaaccatttactagagatctgatcctagcctttgaccaggggatcaacggtccagagagaccctccagctcccgacgccggcggcgagagcccaccaattccccccacggcggcgccattacagcacatggtccaatgccgccctagcgctccacctccaccgaaaaccttaaatacttaatgtggaaggtaaagcggattgggtcttgtggttatacctgagtgaggcggcgactgatccggttcacggtgctacccttcgccaccagcgagcacgcgaggtccctctacagtgatggtcacgaggagaagcaaggagtagggagggaaggatctggggtcgtggtttcctaaataggcgtggattaggcctgggcgcaataacagtccgtgcggcattggcgcgaccccaccatgcacggtgcgttcgttgagggggaaggaactgacctaccagacccacccgtcagcgactgtgagactagagcgcggcgcggtcagtgagacaggcaggccggacccacctgtcattgagtgaagaaacggtcaggcgcagatttgcgtggagaatgggcc

SEQ ID NO: 104682 - DNA, 319 bp, Zea Mays
tctcccttctttttgcagggcttaatccttagcaatgctttgagggcacagaagaatgttgaagatgaaagttgccagatagcccttggtaaccttcggtcggaggttatcaaactgagaaatgatgccttagagaaagataaaattctgctttcattagtggatagagtgaagaaaaacgaagcaaaatttaatgttcaatctgaagcccataaagctgaagttgagaaccttcagaaaaaacttgccgaagctagtgaaaaatttgcacttgcaaaagcaaagcaagaaataagtgaatggtcgaatgctaggctgg

SEQ ID NO: 104683 - DNA, 562 bp, Zea Mays
cggaagatgaacagcaaggggaagcattcgcgctgcgcccacctcacctgctctaaagctcatcagttgcaaacagcatgagctagagaggtttatccttcaagagtctagacttcactcgagtgattcaaggcctcctcttacctaacttttctgtacaatccaaagatctacatagccttcttccctgcggcaaggttaggtttaagttttcatggtccatgggttacctgaacccgaaaagtttacaaggattacgagagaaaagcctagcccaaaagtttacaaaggattacgacgtttttttagacgtcgtgcgccctcacatcacatgctgccggagatgacttcgtactttatagggaagactgaagaggggaacccttggcttgtctacagccgaaatgagttcgtaattttgtaccagtacagaggcattgcactgtgagttagaaccatggatctgtacttgcctggagacaaatggtattatgttaatgttcagagatatgtagacagttcatagctatgcacttgcattacgaggccacgttaaagtgca

SEQ ID NO: 104684 - DNA, 787 bp, Zea Mays
cttgctgccgctgataattatcttggtatagttagaaaattatatcgtatgcccgtccactccaatttgttgaatgacgataatgatgaccacggcgacacgtggatgattattccatgaactaatctcagcacacaaaataatactactcacacgtacggactgccaattgtttgtcaaattcatgcgcgcacaaatgtgagaaagaggaaaatattctccatgttctgctagctacttgtttgtgtacgttgctccccattattggccaacatattgattggcaaatgtgtattatggctaagatcgaagaggataagggctggaagaggattaagcactatgtttacagaagtagcaagaaccaaacaaccgaagcaaagctagctcgaaaggaagatggatcatcaggaccactactgcagccctcgtctgcacagttagaatgatgtaaacgattcgccccccaaaaaaaaagaggttagagcgatgtaacacctgatgattgtatgccgctgctgctggctaatctaaatggtctacatcatctgtgtgtctgctactatgttgcgttcctaatgtgcaacaacaagctttcaaagtccatgtccttgtcagcactgtgtatgaggtacggacccctgcacagtgtgctgcttttttggcgttatttaccaaaaagatgagggtgtgagtgagaccatataataagccatcgcatgccttgtccttgatggatcagtagacttgtttggccgttgttgttggcacattaacgtaagcaaag

SEQ ID NO: 104685 - DNA, 292 bp, Zea Mays
caggagatctagcaaatgttggtggcttatggctcatgaactcccggtgcttatctcggggtggaactggtggtggtggtggaggcagtggtgcttgctgatgttgctgttgctgcgcccttctctcttggcgtatctcatctcgctcctggcgcatctcctggcgtatatcttctcgctcttggcgcatttcccggcattcctgccgcatctgcgcgtgcatatctgccatagtgtcagccatctgttgcattatcctcatctatgttgcaacagttgggtcaactcctgc

SEQ ID NO: 104686 - DNA, 405 bp, Zea Mays
gtggggtgaacgaagggaaactaagatgccttcggaaccgtatcaaggccaaaattgttagaaccctctccaaaagcattggcttgccgaagctggaaactgacttgtgccgttatcaacgacaccacatcgccggaagcttgctttatgctaacttcaaggtaacggatatttttgttattttattactattattactatcttttaggtcgcgttctaacgaagatcgtttcgacagagcatattattaagcaaggttctaaaaatgcaacaagatctggaagaagagaaaaacaaagccgtcattcaagatttggctaaaaaagttgaaaatcacgaagccaatctgaaaaagaaagacttcataatccaagaccttggaatcatggtcaaagagcatgaagg

SEQ ID NO: 104687 - DNA, 510 bp, Zea Mays
ctatcatcgtagagagcgttagtgccggcctataagagtgacattgtcgacctacgtagggaaatttaaatcaaattcaaaatgtaaccttcagaacttagatcagataaatttctagcctttagcgggtatatggattacagatcgagagctaaatcaagtatatcactagtgtgcaagtagatcgatcacaaaccctaaaacaacaatatgaacttgcaagaatgtaaatgaagcacactaggcatggatttatctcgtggttcgactcactaccaaggcttacctaagaccacgtcgttgaggatgtcacaaaaatcttaggcttgccaccggggcttgcccttccctcattctcaaattaagagaccaaactctttaaagtgagggtgatttcttagctgtgattcgagtgttacaaacatatctaggttgccacaacacttggcaagtgcaaggatgatgcatagtcgtctaggagcaaggtccaagagtaaaaccccctagaac

SEQ ID NO: 104688 - DNA, 459 bp, Zea Mays
ggatgaactcgaggcctttcgcttgggcgtcatctcaactctaacgatgaacagagcgggagccgaattgcaaaaggacagagaagatctggaggcaggaaagcaagaactagggcacgaaaagcagaggcggctgaaagcgcaatacatatgggatattcccgagttagatactgtttccaaaaagcacccagtcatcacccggcaattacttctaaaacgctggcgtgccatgtcatcacccggcgactacttctaaggcaccggtatgccacatcatcactcggctattatcctcaaagtggccgacgcagcccgttctaactcggctgttatttctaaaacgccgacgttaccatcattcactcggcagttatctctaaaacgccgacgtcgtcttcagtcgctcggcagttatctctaaaactccgacgtcgtcttcaagtcactcggcagtta

SEQ ID NO: 104689 - DNA, 450 bp, Zea Mays
gtcaccttaagttaagtgagcgtgagcatgttgcaccatcttaagtcactaccgacttaagccgattgctctgttagtagggtatagtggtcaccctaagttaagtaagcgtgagcatgttgcaccgtcttaagtcattgccgacttaagccgattgctccgttagtagggtatagtggtcaccctaagttaagtaagcgtgagcatgttgcaccgtcttaagtccctgccgacttaagccgattgctccgttggtagggtatagtggtcaccctaagttaagtgagcgtgagcatgtcgcaccgtcttaagtcactaccgacttaagccgattgctccgttagtagtgtatagtggtcaccctaagttaagtgggcatgcagattgatagtaagtagttcgagtgcccttgagaatgaagactttttattgatgatgcattttctggtt

SEQ ID NO: 104690 - DNA, 388 bp, Zea Mays
ccccaatgccatgcaatgccaaaaatgtgcctgaccgcagcaaacctgtcccttcgaatagctcggccgtcaaaccctgcaacacccccactaactcgcctatagcctcctctgccccccgtttggtgcgcattggtcgtccaccccgtgccagtgttatcaccaccatccgccgcaagagctccaggcttgctgcgaaagaagacggcaattttgcccatgcttcaatgaaggctactagactcaaagaattgaaggaatcactccacggttgctctgctgctgttaaacaggaagttcagaaaaaagggctgctcagtcgatccattgcgccgatcccgatccctgcgctgcgcaaactagtccgtgcagcaggcctgggatgttc

SEQ ID NO: 104691 - DNA, 586 bp, Zea Mays
aacaatgactggctagatgctatagaggcaactagcgatgagctgcttggagcatatttgaaggccgaagacgaagctatgacaactgccttcggtgctcgcggcaagaagagattgaacagggtgtttgatgttatcgggtttgtgtacccagactactgctatcccatgcgaaagcaagggaacaaaaggaaagccgctaccgcgacatcttctagtgtgtcgaggtcgaagaaggttaaagttttgacacgccggcccaggcacattgagatgaccgatgtgccaaagataagtgaaagggtggaaacaatccccccgtctatggaggccattcctgttgtgcctactggagttactacagacctggacagagagctagagctagtaatggaacaagaaccagagcagccaaagacgaaagcgacaatattgccaaaactgccaatcaccataggcactccaaggaaacgaaggatggcgagcgttttggaagctattctagaatctgtgaagacgccaccctcttcttctgctgaagcctctaggagtaaaactgaagaagttccaaagatgactactgtca

SEQ ID NO: 104692 - DNA, 431 bp, Zea Mays
cttgctaaatgtattttattctagtattgtctatgctttacttattcattctattagacccgatctcactcttgtgcttgcgacatctttgtagaagacccctgaccatagctcttagtcttttgggattctttcctcttccattattaacttgctaccatttgaccatctctattcccttggcattgacatgctcgtacccctaaattcttcaatactcttgtttcaaatacttacatctaaatttctcatccctacgtaaacactccagtttatatgtccatgaacttcttgtcttctgagatcccttcctattccactattaagtcgttatcctttgcctttttctattcccttgtcttggtatgcccgtatccttggaaacttgcataccccaatgactgctcaagacattttagttaacatgtcct

SEQ ID NO: 104693 - DNA, 442 bp, Zea Mays
ctgaattgactaggtatagtcctttgattggtatggtatacttttaagccaaatcgtaaaggtcagtcctgaatggacatacacctggagtttatgtagcagaactacattggattccacctttgaaatgcttaccgtaatctatctctgatctactaggagtaagaagagtagaaactagccatggaatcccacatcaccataaagcttgaagcgaaattgggcattaatctgtcattggtccttggcgttggaagagccataaatcttgaacgccagagaggtagtgatggtaatttgtgatagaactatgaagatcttgtgaagaacggatgactccttcatatgagagcaacactatctattgttgaagactggtcccaaacggttattagtctttttcgctcctgccaagcagttatcaccatttgcttagtcttag

SEQ ID NO: 104694 - DNA, 541 bp, Zea Mays
gtggcatactcagcctggaacttgcctcctcccaaggccttcactctttttgtgtcgaatccacctgtcactgatggcagtttgggccttagaatgcgaccctctgctgaagaagttagcgtcttggttgcttcgctcggggaaattcctgatgatgaacggcgggtccatttcgaggtgcctttggatcctagtgacgcagaaataagtgctatgcttgatttgctggctgaggactcttctgatgctgctcctgctagaacattggtggtggcgcttcccccagaaactgatataaccttggatattcagaagcctgtcagtactcgcccaagacgcccttcccgggcccatcaatttgatcctcctgctgacgagcagaaaaagaaaaagagacgtctccggcgggtatctagtttggatcgggatgctggtcctttggctcctgctgctgaagaagttcccgcgcctgagcttactgacgctgaccttaatgagggtgctccacccgctgctgaccccaatgggtgtgctccacctg

SEQ ID NO: 104695 - DNA, 289 bp, Zea Mays
ctctatataagaaaggatcacggccgattaaggtattcaacatccaatcgataaaaaatacatctactccttttatcttttttcctctatatcttgttgttcgccaggtctcccggtgagatctagagacattctaggtggcgttaccgatcctacaacaacctgcatgtgcttctccctgacgggtcttcccgggaggtgtttgggggtctaccggtgaagaataggatcaatgtcggtttaactggtttctagatcaatttcatggtttcatcggtccgctacgttc

SEQ ID NO: 104696 - DNA, 470 bp, Zea Mays
aaaagattgaacagggtattcgatgcaatcggcttcgtataccctgattatcactacccgctgcgaaggcaagggaaaaatagaaaagttgttgcttcggccatcaccgatgtgccgaagggcaaaaaagtgaaggttctgacccaccggccgcggtatattgaaccagccatagtgcctaaatttggcgaaggagcctcttcaactgccgaagcaagacaagctgctacaattgtgcaaagcgttgaagagtcgactatagtcctgaaggtacctacagtcgggccagccgaagctaagaatgataaggccgaagagccacatgtggaaaaaatagagaaaatgccagaaattctgagcccaccagctgaggcaaaattgccgaagatgcaaaaggttcctgccgcaactcccaagaggagaatggccagcgtgctggacgttgtcttggagactacgaagaccttgag

SEQ ID NO: 104697 - DNA, 831 bp, Zea Mays
ggatggctcgccgcctcgtcaccggcctggcaaggagaaggtcgacgaaggcgacctggccgcgggagaacgggacctcgggtatgagtcccccgagcaagtcctcaaggacatcctcactggagactccgactccggtgatgacaacgaccgccgcaagaagttgtacgtgatgtatggcggaagctcgaagcttacctcccgtaggaacgtgaaatccctgcgccgtgaggtccttttggcgaccccaggggtcccgaaggcagccccacatcagcgatggcggagcaccactatctccttcggggcatccgactgccccaaaaacatggcaggggccggcatactaccactcatcaccacccctgtcatcgccaacatgaggctacatcatgtcctgattgatggtggagctgggctcaacgtcatcagccatgctgcgttcaagcagctgcagatcccaggatcccgactgggaccctctcgcccattctccagagtgggccctcaaccgatgtatccccttgggagcattgcactcccggttacattcgggactgaggagaacttccgcactgagaacgtccagttcgacgttgcggaggttaacctccctttcaatgccatcatcgacaggccagccttgtaccggttcatggtcgttgcccattacgggtacttggtcctcaagatgtcgtcccctactggggtcctcaccgtgcggggcgaccgcctcgctgcgcttgcagctgtcgagaagttgcacgccctggcgacagaattcgctcgcccggatgacggggggagggacccctcgacttcctatatcaa

SEQ ID NO: 104698 - DNA, 346 bp, Zea Mays
actcgaaaaaagatgcaattataaataacacttctgcttagttgattgatgtgatggcagaaaattacctgatgaagcacctgattagctttcttcaatctctcttagccctagtggatgatgaagaaggttaaattccatgcaatgaacttgctttacagacatggagagtattggtttgttgtctggtcactggcgcttaagaaagagactgggatttcttgttgtgctgattatgagcttttcttgttgatgcaattaagaaaattatttagtgctactcttggactttgcttcttgtcatctttctctctgaacatgtttctgtatggatgggttacatttc

SEQ ID NO: 104699 - DNA, 343 bp, Zea Mays
ggatctcaaaagacaggaaggtcatggtcatataaactcaaccgtttaaataagcagcagaggtacaagggtaagtactttgaattaagggataaggatattaaaatacaaggatacgagcatgtcaataccaatggaatagatattgtgaaatgatagcaacttaacaatggaagaggaaagaatcccaaaaaacaagaaggttatggtcaggaggcatctacaaagatgtcgcaagcacaagagtgagatcagatctaatggattgagagaagtatagaccatagtggaataaaatacttttggcaaggggcatataggagcacaacatagaattagtcga

SEQ ID NO: 104700 - DNA, 1017 bp, Zea Mays
tgtatatggttgggaatcagctatctaacacgctcccgcagtagaatcttcgggacatcgaacattcagactggaccaaaattctgtgaaaaccgaggaaggaagcccttggtgaagatgttagcgtactgagatgtagttggcatgtgaaggacacagatattcccaattgcaactcgttcacaaacaaagtgaagatcgatctccacattttttcgctgatgttggattggattagctaacatgtagacgacgttgttgttgttgttgcaatataccaaggggtgtggagctcagacaggagttggcggagccatgtggctttagcgactgcattggcgacagctcgttacttggcttcgacactagatccagagacagtgtcttgacgcttggacgaccaggacaccaaactatcgcctaggaatatcacataaccgtaagtggacttgcgtgtatcaggacgtcctgtgcagtcagcatcagaacaaagcaccaagtcagactgtgtagaggggtgaatgaacaaaccaaagtgcaatgtgccactgacatagcataggatgcacttgagggcgagaaggtgaggtttctgtgggtcatgcatatgaaggcaaacctgctgaatgacgtaggcaatgtcagaccatgtaaaactgagccactgaagagcaccagccaaattgcgaaaatccgtagaagagactagaggatcatcatcagacaactttgagttgagatcaacatgtgttgagcaagacttgcagtttgtcatgccagtgcactcaagaatctcaatcatatactatcgtggagagagaaaaagactagagcctaagcgttgaaccttcttgccaagaaaatgatgaagaggaccgaggtctttcatgaagaatttccactggagagctgtgatgatgcacctcaataaattaggagaggcggctgtgagaacaatgtcatcaacatagaggagatacaccatatccgtaccatgataatagacaaatagaggag

SEQ ID NO: 104701 - DNA, 400 bp, Zea Mays
agtggccacttgagtataataaattcgcccagtcttcttgacatttttgcccgctgaattattagccatgttccctttgccttgattggaactcccagagttctgttgattgttgaacttattctgcttcggatatggacagtcttttataaaatgaccaaactttccacggttgaagcagccagttgaagaactagggagggcggggtaacgagcaccaggggcactcggctgatttgtagaagtgggggcagtggtaggacgaacgaaaacaggttgttcgaatggataggagggtggacgaggcgaagaacgattctgattaaaaggtcggattaccagcctggttcgcttctcaggtccctgattggacatgtcacctccaaattcctttgatttt

SEQ ID NO: 104702 - DNA, 312 bp, Zea Mays
aagctcaaggttgcaaaagaatgtggaggagcttcgtgaatccaaggaaagatgctatgaaaaatccttggattgcgcaaagaaactaaaagacagttttgcaaaggtgggtgcatactcatcggagcaaaaatttattcaaggtgatcctgaaggaatcattcaatggattagcgaagaagttgaagcttttgaagaaatacttagttaccgtggagatttatgtgccttcgccggtgcccgagggattgaagcagttttggaaaaaactggctgtgaacatgttaaagttgcagcccaagaagaagtcat

SEQ ID NO: 104703 - DNA, 339 bp, Zea Mays
tatcttttactgtttatatatttaatatttgccatgaaggggcgaagcaaatcatagccggtttttaagcatcatttcctttctttatgaacaaccttccatgaaaatatagcaataataactactcaaaacctctagcctacattataaagataaaagcacttggtgcaaacctggcactgctagcaaatttggactaaatcaaaagagacacttgtgaaagcaattagacaatagatattacaagcatataataagtcacagccaagtaaacccctttaccccactagtttgtatcaactacaccctgcccccacccaccaaaaacaaaatgattct

SEQ ID NO: 104704 - DNA, 365 bp, Zea Mays
gaaggcgttttgggcgagcactatcagatttatgaacattcaaggtttttccaggctctgggatagttgcaacagctattgtttcagcagggaccgagtcagaagaatcatcagccaacatgtccagcatagaacttatctctgcatcgctcgggtttataggcatctcaaagtgaacttgcctctcatcattgggaagatcaccaagtgaagcaaccaaagcctcaacttcttcgggagagggtcgcactctaagacccaaaccactatcaccagcaggaggattggacacaaaatcgaaaaagacttggaaggtggctgattccaagcagaatatgcaacaggagcaccaatatttgatactt

SEQ ID NO: 104705 - DNA, 769 bp, Zea Mays
gggactggcaactcacttaacacaactagattgcagtgtaagtgtccttagaagcaaatcctggactgctgccccagccaaacgctgaacgtcgagagtcggggcagccagcccaatccgcatcggaatacgcggtgagggactggacagggccgactccaaggtggaggccggaggagagagtgcccttcaaatagcgcaggatccgcttgagcagcgccaggtggggctcgcgcgagtcgtgcatgaagagacacccctgctgaacggcgtaggccaagtctgggcgggtcagggtgatgtactggagagcgtcggcgatgctcctgtacatggatggatcagcaatgggggcaccatcagtggcggagagcttggcgtgagtgtcgacaagggtcgatgtagagtgacactcagccatgccagcgcgctggagaagctcgacggtgtactgtcgctgagacaggaagatctcgtcggaggagcacgtgacggagatgttgaggaagtgatggaggtccccaaggtctgtcatggcgaattccgagtgaagaaggatgatgaagcgctgaagaagatccgtcgaagaggcggtgaggatgatgtcgtcgacgtagaggagtaggtaggcgagactctcaccctctttgtagacaaagagggagacgtcggaggaggcggtgaacccgagctggcggatgtacgtggcgaaccgctggtaccatgccctgggagcctgctttaagccataaagagagcgctgcagaag

SEQ ID NO: 104706 - DNA, 603 bp, Zea Mays
gaataggtgatgtctccgtattactcaaacgaactacctctgataggaagctttgttttgaggcaattctgagcaggtccatatacaaaaacaagagcccacttgaaaccatcctccttattaagtaacttaaactttataaagaaatcaccttcctcaatggtacctatatcgaacacatcaagatcaactcctagaagcatccccccagatctaccatgaggttctttgcagtgccaaaagaaattcttcctagcacacaaattccttagtaaattatctgaaaaggttttgcgtcctgtttcagaaatcgcaatgaaacaaagattatgctccttggtaagatccataacaaatctgtgtttcttaacatctttaaacccattactattccaaaagattcctttcattgggaaacaattaataaatgttcaaacccgacctcctctttgaaagttgggggccgtgactaggtggttttgtacgtgctgaaataattagctcatcattaccatccatcacatcttgcatactatccccgcacaagttatttaaaatgaagctatctaactcttcctcctcttctacttccttttccaacag

SEQ ID NO: 104707 - DNA, 719 bp, Zea Mays
attaggcaaattaagctattatcttgtgtttatccctctaaacccgtgaaagttgttagagggcgcctaggaataggtccatacctccccttatatatttggaagggtatgtctgattgagcatccaacaatcaaatcaaatcaatatatcttatgtttcctttctttttgccctaagagtagacagtaacgtatcctttttcacctcaatcttcatctctcttcgaccctacatcgtctgaaggcgccttggttggcctgccgatctcaagacaaactctatgatctctcctccctaacagggtccctccgggggatcaggtctaggtgctgttggcaaacaccatcgtctctacgcacacgcggaccgtctgactcggcgcatagaagaaccctctcctgctgccaagttgcggaccgtctggccctaggcaatggactgtcctcatctccgcagagagggcaccactgccggttcacctcacattaattggcacctagattgacgccaacaccacccatttggccgtactgtttagacatctataactcaaaggttgcaaataatgaccgtatgcagttttgttcgtgctggatcttaggatcaatcatgtcatttggttttcgagtttcgcgtgcgtttaggtttttcttgactattccatcatgtaaaacctttaggttgaactgacgaagaaccagtgcaacatatagattgg

SEQ ID NO: 104708 - DNA, 342 bp, Zea Mays
ccgactcatgcaccacgaattactgttcgcaagaggaaggtttcctcaaaccccctggcaatgatcaacggcctgtggtaagatcatctgatacccaagtgaaagcagaccctagttgcaatcggcccccacccactgtagtaatcatagactataccaacttgcaattaatcatatattctgaacagggagcacctgagacagaagaggagcctctgagcagggacactgggatgcagcatcctactgcccaggtatgttcatgcaattcgtgtctttttttataatataaatgattcactttcataatacaaatatgttaatttggctattctactcaac

SEQ ID NO: 104709 - DNA, 562 bp, Zea Mays
tgctttttggtatcccaaacctgaatattatatcttgtataaattccactgccttggctgaggtcaaagagacaatgggcttatactctatccattttgtgaatttgtcaatggcaaccagcacgtgagtatagcctccttgagcttttttgaagggtccgatcatgtccagtccccagcatgcaaatggccatgttataggaatggtctgcagctgctatgcaggtaaatgttgttgctttgataagaattggcaagcttcacatctctggactaactcggcggcatcactcttcgctattggccaatagaaaccagatctgaaaaccttcccaactagagttctggatgttgcatgtactccgcactgcccgacatggatttcatctaatagttgtttcccaatagcggagtgaatgcacttcatgaggactcccgtcgcacctcttctgtacagtgtgccccctatgagggtgtagtgggctgactgccttgcgatgcgttctgctgccgccttgtcatccggttcatgttcattttttatgtacctgatgataggctc

SEQ ID NO: 104710 - DNA, 435 bp, Zea Mays
caacaactatgtgcaaactattttgaggctggacattaatgaggattggataaaaaacactcactgaaaatgcatcgataaccacttcatcctccatttcttgtgcgtggtctgtgtctgccaaggatggtgctgtgacattggagcttgcacctacaccaagattcccatgcctgctactaattttagggtgcagtctggacgccttggcaccgcgaagagatgccactgaactgtgatgcccgccacgtgcgcccatggttatgggatttctagcaacagctgtggtgtccactctgcaagatttttgcggtgccgcaacatggcttgaagacacagagtgctgaccagctaccttgccatgtcgacctgctccaaactcgagatctggattggggatggatggagaaagaactaattgagtgaagctttcat

SEQ ID NO: 104711 - DNA, 444 bp, Zea Mays
ggagcatcaggggtacacaagaatactaaaacgagagggcagagggcatgagaagacctgaatcgagctggccgcggtgaggatactttcatggtggcagaaacttagtttgggggaagtgagcaattcgtggtctctagtggataattggaggcaagcgtgggtgcgttggcttcgtgataacatggcgcaatagacccggccatcaatttataggatcgctaagcggtggccaaggatttggatgaagacgcgcgacggtcgggggaataggaggttactggtgctcgggttagtggctttcaccgtggcagtacaccagcgatcaccatgcatgcgagacgcgacttacagcgacgtggtctaacgctttagcatgtggcaggcgatcgacggacagccaacgccggtgaactgatctgcgctggcggcaaggcatggggg

SEQ ID NO: 104712 - DNA, 1212 bp, Zea Mays
tctaaggactcatcctgcatttagtggatgggggtttatccattctgcaatatgcggatgacaccatccttttttgcagcatgacttagcaaaagaggcaaatttaaagctcttattgataaccttcgaacaagttttggggttaaagataaattatcataaaagtgagctttttggttttggtctgactgaggaggaagaaacactctatctctctctatttagatgccaaaaaggcggctttccttttagatacttggggatcccaatgcattatataaagttaagtaatagtgattggaaaaccatagagataaagtttgaaaagaaattgagcagctggaagggaaaacttatgtcggtaggtggccagttagtcttgattaattctgttctcacaagcttagttatgtttatgttgtatttttttgaagtgcccaagggtgtattggaaaaaatagactactatcgctctaggttcttctgtcaaggagaacatcataaaaaaagtatagacttgcacgatgggatattctttgtcaacctaaagaccaagggggtctaggtattcagaacatagaggttcaaaataaatgtttgcttggcaaatggttatttaaattgattaatgaggatgatctatggcagaatttacttaggaagaaatacctcaaatcttgtaccttgtcaaaggtaggtagaaaacctggtgactcatttttggtctgggctactgaaagttaaagaccaattctttcgtcttggttcctttattcttaaagatgggaagcaaattttgggaggacacatggacgagtaaccagcctctaatgctgaaatttccgtccttatataatatagctcgtaaaaaagcgatacggtggcgaatgtttttaataggattcctctaaacatctttttcagtagagcactggtgggtggtaatcttttatgttggaatagattggtcttgagtattgctcatactcatctatccactgggagagatgagttcaaatggaatttgtcaacctcgaggctttttacggtccgttcaatgtacaatgctcttattaataatgccaagattttctatttcaaaccgctatggaagatgaaaatacctctgaaaattaagatctttatgtggtatctaattagaggtgtggcactcacgaaagacaatctagctaagcgtagatggcagggaag

SEQ ID NO: 104713 - DNA, 589 bp, Zea Mays
gcagaaaccttcaccgaacggttccactccctggctacgaagggcccaaatataaacacttaatctaacaatagcgttaggggtcagctgatgaaggtaaaccccaaacttcttcaacacatcagcaatcatcccattcaaaggaaatcttaatcctgctttaaataagcttttgaacacaaccacctcattcttttctggcttcggagtaatctcctccccgccaaaacgaaccaactccttttttgtttcactaagtagcccagcttcaccatttttggaagatcggcttcagagatggtggactttccaaagtccaaatgactaggtttgcttggcatcccgcagttgtactcatcttcgaaaccaacttcttcaacatcagcttgcgttgcttcggcagcaggagtgtcctctgatggaaccagcccagagcgcctcatcgctttagaaatcggaacagtttcgactgcttcggtctcgtctccatcacgctcaaccctagcagtggagcgtattctggccatttgattttaaattttcttgaaaaaattctttggaagtcaataaccttttttccgaagctatc

SEQ ID NO: 104714 - DNA, 393 bp, Zea Mays
gtgaaaatcgcgtgcagccaatcgtgcgtgggttctggctcaaatagagttcagcgtaaatcgtgaactaaaacaacgtaaatgagtatgaaatttagcgtaaatcatttatctgtttcgtaacagcaaatgggccccgagattacggcgtgaaaattatgtgcggtcgatcgtgcgcgggttctggctcgaatggattttagcgtaaacgtgaacagaaacattgtaaattagtacgaatgttagcgtaaatcatatatttgtttcgtaatggcgaatggagtcgaaatttacggcgcgaaaatcgcgcgtcaccggtcgtacgcgggttctggctcgaacggatttatacgtaaaacgtgaaccaaaacaacgtaaatgagtacgaatttt

SEQ ID NO: 104715 - DNA, 853 bp, Zea Mays
aattctcatgaaggccatctgctctggccttcgtttgataatgaagctcgtgcacccgacagaaggcttcggcattaggactcataccctggcttcagagggcccaaatgtagacactaagactaacaattgcattaggtgtcagttgatgtaggtatatttcaaagttcttcaaaacctctcctattatatatacaaaggaaccgaagtcctgctttgaagaagcttttaaagacaacaacttcgtcatcctttggctccggaatcacctcttcgttagcaaaacgaataagtttactctcggcctccccaaaataacccaatttcttcatcataaccatatcgtctgctgtcacagtagatttaccaaactcaatatgactgggtttcgctgggctcagaatagtgtaatcctcttcatcttcgttctcactcccttcaactgcaatttgctcagcttcagcagtcaaagtaccttcgacaacaggcccctctggcacaacaagacccgactgtctcatcacttctgatattggtgctgtcttagttgcttcagcttcgtctccctcataagacactctagcagtagatcgtactctggacatttaaaagttcacacttttttgaaatgaagctaatctcaaatgccgaagcgtttgctcgaaaatgcagtccagaaagcttcggctatggtcaaatttttttaacagcgcaacagtgcgatgacaatgaatgttgtggtaactcctcaccaacccgtatgtatatatagtgctgcaggggggaggcaaaccgccatgctactcgcactggcagagcggtggatcgcccggcgcctggaatattataatcg

SEQ ID NO: 104716 - DNA, 381 bp, Zea Mays
gggaaattggcagtgaaagagggggcatcttaaggtgtatgtgaagcttggttacattgaccgtattcaacttgcacgccttgatggcaatgatgagacaccacaaccacaggatgatgatattttggtgtataaaagcatcttccaagcggggcttcggttcccaatacgacctatagtttttgaagtgttaaagaaatatgagatatacttccattagctacccccaacgttataatgtggcttggaatattcatttgggttgtccaatgctagttaacaaaagccacttagagtgcttctatagagtgcacaagcttcactatcagaccaaggcactagaaggagggcctccacaacaattttggtgttacaatcttt

SEQ ID NO: 104717 - DNA, 689 bp, Zea Mays
ctaagatcttatccgtatccgagtcctagtatccagtatctgattcatatccaatttatatatgtatttgtatatccaatgttcgatatttaaaatgttgatatccattcaaatcttatccgacacaactcaataatattcgtttttgatccaaatatgaaaatttaaaatgaaaacaaatatggtacgagtaatatctgtctatattcgatatgattacagccatattgctatgtatggtgtgtattgagggtggagctggtgaaggttcgatcaattcgagtgcgatgcttagtttccttgaccaaaacttagtatgtgtcatatggaacacttgaatgtcaaccaagattattaaacatagtctaattataaatctaattacagagacaataagtaaacgacagacaatattctgccaaattcttttgctttttttgtttacttgtctgttggcatatacaactatcctatcggctatgagacaaaattgcatgtgtaatgcttctattgtgatagaaaaggtacatttcacgtaaataggtgataatctgtaaagatccttaactaaacagaaatggttattctattgttacttttgctgaaaataacatcagtggcccaggtgaaaaatacgatgtcacgactcacgattttttgccctgcctcattatccatatcacttttgc

SEQ ID NO: 104718 - DNA, 399 bp, Zea Mays
gtaaaacactggttttacccctgccttacggctccttcctagagaaccaccgctcgtcgacccctattctagcatataaaagggagacgaccgcctcagggcagggagattgacggaacgacgaacagaaggacagaccgagggacaatcggacgtctttcagacagagacgaacccacaaaaatgaatagaggaccagaaggtcagagtctcgccaagccaagacttagctaggactccaccttacagcttctaagctccacttccacccccaataagagatctaggagttttctcctccctctgtcgacggtttgtaacccttactatgagtttgatcatcaatggcaccggtagtgcaagccaccgatgactggatgtagggacgttctaaccgaa

SEQ ID NO: 104719 - DNA, 544 bp, Zea Mays
aaaacctagccatctagattttgagaaatctactgtgtctgaagctgacatgcccatgatgatgaagctaggctactttggggaagctgaaaggaaacttgtccgatttgccagagaagagaccaccccagcaccgaagaatgatgaagtagtggtttttaagagctttttcagaacatgactgtgacttcctctgaacgagatgataggggaagtcttgaaaaatttcgaaatatatcttcatcagctgacccctaacgccattgttaggcttagcgtcttcatctgggccctccaaaaccaagggatgagcccagatgccgaagcattctgccgagtacacgagttgcactaccagacgaaggctagggcagacagtcctcatgaaaattttggttgctacaattttgcttatcgcaaggatacgaagactctagttctcagttaccgcaccaaatggccaaccggctggaaaggtgaatggttttatatcaaggctgatgagaagaagagggggaaactgatgatgatggtcatgtgccca

SEQ ID NO: 104720 - DNA, 1158 bp, Zea Mays
cattgacctcaatatcttagattttttgctgcattgctgacgagaaaggtaaaggtggcaccacagttggggtgcgacggcggtggctggcgaggccagcaggatgtcctactcgatgtcgtcgatgcggtagaatctgggtgagagaggcgtgacggggaaaaagatgggaagttggaggatgattatatgatgttattttatggcaacaacgagaaagaggagaaaacacttgcgttatgtatacaagagataagacttatcttatctgattggtagttgttaggtgagacatgtggggaaacaagtctacacgcttccacgaggcatatacgatgcaaggcgacccaaatgctgtggttgctccaggaggtgagcccatgtgatcctccagccttatacagcccggtagttgcccggtagttgagggcttgaggcccatgtcaagcaattgtttttggacatcttagcttgaagacaaaggtttcttcaaaattcatttacgatcgttttttttctataaaagccctctagactcatgcctttttgtgagtgggctccaagaaaaaaaaaacagaccgtgcaagtcaatgctttatgtgccctctagactcatgccttttttgtgctttggttgggtatagccgcctctgcctaccgtgctgtgtgctttattttgcaggctcgcaagcacgttgttcctccagtggacgaataaagctgtggcagggcacaacgcaaatggattcgttcgctggaccaccgactatgtaaagaatcggatgactttgaatcgtctaagtgggcccacccacgcgcttgggcgccgcatccacggcgaggaccgaagtgcccccttggacccgctcgctggtaaatgtttggtccacaagtgcgacgtacacgagttacgggtacaaggccacgagtatagatgtcgtgacccgttatcacgacacaaagcacatttttttttggctcgaaactagcccagcctgaacagttacaggcccgcccgttgagccagcccgagcacaaccggtattagtcgaaccttgttaccaacccgctccacaaagaaaacggcacaacccccactcccccggcgccagcggcctagcccacttaccgcttgcccgctgcgactgtataagcaga

SEQ ID NO: 104721 - DNA, 828 bp, Zea Mays
gtcataatcagtcggtagcccacaaagagataggagagaatctcatcatctctaagaggagccccagctgccgcaattcggaggcgagacccgtgatcttgtagtacaaatcagcagcggagaggtcgtgcttgcgtgtcgtggcgagttcttggcggatctgaatgacccgcgccttggaggaggaggcatacttcttttggagggaatcccacaccgccttagcagatgtggcatccgagacatcctggagaacctcaggagtcatggacgaaagcaaaccgccgagcagctattgctcttggtcataccagcgctcgtagttgggattgggggcattcgtcgtgccgaccgacgtgataatcggcttggtcttgagaggagcggcattggatccatcgaggaacccgagaagcttcgaactgcgaaaatatggcaggagttgtgcacgccaaaggagatagtttgtttttgtgggcttgatggtgatgacttggtggatgggaattggtggagaggagaacgatggcgtggtggtcatggcagaggcagcgagagatagatggagaaggagaggaggcggtggagaaaattgtggagaatgattaggatttcgttggctctgttaccatattaagataatggaaggccctaccttctaggggcgcccaagtctctttatataggaaaggattacatgcatgagattacaaccgaaggcaacaatcgtgccgtgattccagggcgagattaacaatcctgccatccttatcttctattcctaacaataataattagactatcctatataagtggctagatatttcc

SEQ ID NO: 104722 - DNA, 535 bp, Zea Mays
ccggtagatgctgctgttttgacaagtactggcaggcttcgtacctctgaactaacttggctgcatcactttttgctgttggctagtagaaacctgacctgaagactttcccaaccagggtcttggatgctgcatgcactccatattgcccagcatggacctcatccagaagttgctttccagtagctgagagaatacatttcatgaggactcctgacgcgccccttctgtatagcgtttccccaatgagtgtatagtgagctgactgccttgcaatgcgctcggcggtatttttgtcatctggtttctcttcattccttatatatctgatgatcggctccctccagtcatcaagatttgactctggttggctcagagtattgcattcttctacccgatccactgaaatgctcgggcgcgacacttcttggacaaaaactccaggcgggacctgagtccgactggaccccagcttagataatgcatcagccgccgcgttgtggtctctctccacatgatgaaattccaaaccttc

SEQ ID NO: 104723 - DNA, 479 bp, Zea Mays
ttgggtggcaccttggtgggtcgggggtaggggtggtgctgaccctagaggtgtgccgacgaattttttgagtaacaccacatgaaacacatcatgaatgtgtgttgtggccggaagtttgaggatataggccacctcattgatcacgaccatcaccttgtatggactaagatgttataggtttgacggtagggaggaagaggcaagggctcgagcgccggtccctggcttcgcaggtggcgaggacgatcggctagacgctgatctatgttgacagcaaaggaggaagagcggattaggagaggggaagatcttggaacaactttcttcttcatccattaatctgactttgattgcatttatataggccagctgatggccgacatctaacctgctaaaaactctcaactactaatttgctatttcttcctagattctctgaactactattatgctattctttccttgattctctcaat

SEQ ID NO: 104724 - DNA, 516 bp, Zea Mays
ataatctccctccttaaactcaagcagtcttctccgggtgtcagcatagcttttctgcctggattgtgcagttctcaaattctcccttatttgctgaacttgttcttctgcttcctgtataacctcaggtccaaaaaactgcctttcaccagtttgatcccaatacagtggagtcctgcactttctgccgtataaagcctcaaacggtgacatcttcaaactggcctgatagctattattatatgagaactccgcatatggtagactcttatcccaactaccaccatgcttaagggcacaagctcttaacatatcttctaacacttggttagtcctctctgtctgcccatcagtctaggggtggtaagccgaactaaaattcaatctcgtatccaatgactcgtgtaacttcttccaataccgagaagtaaactgtgatccccggtctgatacaatcttctttggcacaccatgcaggcatacaatccgtgccatgtacaactctgccaacttggc

SEQ ID NO: 104725 - DNA, 347 bp, Zea Mays
gaaatggcccaagcgcacatttccctttcaatatggtttcttgtatgaccttcggaccaccttgagccgaagctctgattcttgttgaagctctaatgtactcctaactttccttgctttactgcatttggtcctttcaatatggtttcgacatttggtccttcgacatatctattaagatgaatcaaaacggtttctttcattctgaggacctttagcagataagaagacccccaacacctgcatcctcttgatgtatgcttcatcatcaactggatgatttccttgaaggaaggttaaaatctccattctccagtcgtcactttgtgtaggacacacagttagga

SEQ ID NO: 104726 - DNA, 543 bp, Zea Mays
attctatgctctctagaccgagcacaccataatcaaaaaacacaggggcgaatacgcaaatgtttcccagactcagaatactatgcgctagactgcgggttgattctctaatattctaggggctcttacgcaaggtacgcaggccgaagaggtatcggtgatcgtaagccgccagatcgaatatggacgacccagattagattggcgcgggataagaatcagtgcgcggtctgagtcgttcgatcagccatcaagggtgcagattcaacctcccctaaagtgactgttacacggtgatagcctttggatctaggatcgacggatggggttccacccagccaaaggggtaagctaacctaatctgaggcgctcattatcaatcagacggtcctagtccttcttctaccttacgcccattactctctctcctcgcaagccaggaagggtgctcaccagttgttgtgatggagcgcgctccacagtgatgctgatccgcgacggggccgactggtgatcctcgccacgcgccccaatgaaggtccg

SEQ ID NO: 104727 - DNA, 1216 bp, Zea Mays
tataagctaacccagagggaaaaatcctaaaactgtaggtgtccaagtccaaatgtagtgatctagcactcccagcatgagttggatgtctagcagaaatcccatagcatgagaaacacaatcagggcttgcacatgaagttctcccctaatgtcttgatccactgcctattcaacaatgcgacttttactgtcttggttttaatagccctctttggaattagcgaggagagctctggagccatctaggctaaggaggtcccatctagccatttgttagtccagaacaaagtggtttcttcatttctgactgaagtcacaactggaattccaaacaaagagagtattgaatgatagtcaataaaaattcttctcacaacttgttgaagcatatttccgttgatagttactcatcgtcacccctcctttggtctcctatgtagtcatcatataatgaaagcacaagcatggtgcatgagttgaatgttgtgaaggagtgctacgaggtggagcaagagacataaggttgtgtgctgttgattaggcgatatgactacataaaaagagttgggatcagagggacgtgacataagtgtctccatgttgttggtatctcttatgctcaaccgcattattctacaagcatgtagaatatcggtattatgcttcacttgggagtattcaagtatcatatttatatcctcaaggaaagtatatggctaacatgattgattaacacaatattcagtgactaagttataagcaatcttctgaattgagacaagggtatgtaacgatcatattaagggtagtaataaatggtagataaaaagagaagtctaggtacacatagtcagcaggagatgtttgagtagcgcaggaatcctaatttacttctattagataagcacgtctagcaagaactagaacaataaagataaaccaataaatagcaaggtatgactcaatagcattttgggcatggcccaatcaaacaaattcactacaattacaaaagttgatcaaaataaattgaaagagtcatatgctctaagaactagccctaacatggtagaagctataggatggacaaggctatcatcacctgctaattaccacaaacaatctagggaaataactacaattcaaggtatttgtcagtataaacatcatgcttacactatatgacactaatctaggttcacgctaaactagag

SEQ ID NO: 104728 - DNA, 332 bp, Zea Mays
tagcatttgaactatggttgtttgatttaaactcatattcacatccacctagccaccaaaacacacatatttttgttttatattttatactcaagtataatatagagacttttatgaaaaaatagaggaaaaattaaaacttggattgtactttgtctcttttgtcacctaagctttggtgaattcctccggcatcgacgttagaacgatggttcggtcaactgagcatgtctccagtctataaaactatgtagttgagaacctcacaagtagattcataatagttaacaactcaccatctcctttcgataggcttaggatctccttatttg

SEQ ID NO: 104729 - DNA, 484 bp, Zea Mays
taaaaatccacatgtgttaaccacattagttggtaggtagagcattgtacattcatcatatcatacatctcacagatcatgcgggtcatgcattgtttttatttccataccctacagttgatagagttggggatttaagtatgagtgtttggtttttaccttcctacttcctcacatgactcttcgtacttgtcaattgctttattcctccttcattagtggttgccattcccttgtttctataagtacaatcaccatggctacaacctttgctcttgacctgctatcgtgtggtagagtcctcaaccaataaggcctggacaaggcgtgcaagctccttaggtggctcatgctgccaatatccagcaatgtccgcttgacaacgaatatgacatggactccctaagagaaaatggggtagtgcattgtcttctacccacacatgatggtaggaatgaatttctcattatcgaggttctttctc

SEQ ID NO: 104730 - DNA, 416 bp, Zea Mays
tagcagctatgtcgttgctctagatagccaaattgttagatggtttggttaagctcgtaatcacgatgaattgcttgttgtggtctaaatgcgtatggttatggtcgcggatgaaaaatagtaatgtttatgtgatgtccaagttaaaatgcaaattattgggtgaaatgtgcttcgatatacatgtataccggatttgagtatcgtagagaatgcgttgttaattgtgtacggtaattctaacgtgcgaaataacttgtataaaattagtaagtctacttattagtcctcatttgattaattaatgctaacaaatggtaaagtgttagaatggttcgagtctctagaacgcggcaattcttgaagtaaataggagctgaaattattagttgctgttttggactgcacgcagtgat

SEQ ID NO: 104731 - DNA, 411 bp, Zea Mays
taggcatgtgtcaacaccaccctgggggtccaggttctccgcggtagccacttctaaggctgatgggccctcagttacttccatgggaccagaacgatccaattcagtctcccgaccctcgagatcgcgctccaaggtcgacgaggcacaggatgacctcaacccagcatcaagcacatcagcacaatcctccatcacaccatcatccactggctccgataacaaatcctctggaaccatatcctcaagagtttgatcaaaattggccagggacagttcttgcaggccaatgagagcagacaaagtaggagagggaactccactactttcaccgctggcgatgaactgccgactgtttttccgagtcaaaggaacttcatcttcctcctcctcgtcgtccacatttgcaac

SEQ ID NO: 104732 - DNA, 432 bp, Zea Mays
ccgcgcgccaaggttcttcttcccctccggccgccagcacaacctgctcaaattaatcgccgccgctgtcgctccctataaattgagccccccaccagttccgtaaggtcctaagctaaccagccaccgctaatcggccacaatcattcactcgtgtgctcgaattcggagtttcccccaaatccgatttccgccaccgtgaaaccaagctcaccgtcgccagccatactctggttagtccctcccctctgctcccttgtttaagcattctcgtgcatctacgatgcttgccgagccattgaattgaactaagggctctccggtcgccgggaacgcgaccatatagccgctatgcttacggccaccgtggccagagctccatagttaaccaatagcgcaattaagttaggggaaatggtcaggctgacccca

SEQ ID NO: 104733 - DNA, 673 bp, Zea Mays
gtcccccataagctcttagggtgatcaccaaactcacaatcaccaacataccatctaggtgatgccgatcaccaagagtaacaagcaataactctcatttggcctatccaaagctaattagaatggtggatgcacacaagcatccctcaatatgtcgatgagactgataatcatgttattatcgactctcaagtcccttagtaggcaaaggtgcttcttcaccctccaagggtttcttcagttgttaaaatgggcaagagaaatcaagtgggcgaagtggacagaaataaatagccccaaggaaaggaaatagttgttggccctccacttaacttttgtgggggtactagacatgtttagtgcacaccagctctctacgcagacacatcaagtgtatctccaacaagtagtttcagaactagtcattgttgtacttgtattaggtggttgttttgtgactcctaaaatatgtttagtgagtataccactcaaaagtattgtttgtggacctcttagagtataccactcaaaaggatgagaagagcaactaagaacatgaagatccagtacattctcattgaaatcccgaatcctatgcacccacatatcgacgtccaacggggaaaccacaccttcaacaataatagcgatgacaaaatcatcacgctttgca

SEQ ID NO: 104734 - DNA, 601 bp, Zea Mays
gcgcttctaacatctcttcttgggatagtacctttcccgaagcatgacgaataatgtagtcaatacttttgttcgacgcttctggaccaggagattcgatttttttagttgcaatccgctctgttgatttttccttagggtcaccacgctccatctcggtgggcactgaaggcccagcttcggttttagcctgaattgttgcagcttcgatttctgcctgtttagaatctgcttcaggttgcgccttggaagcttcggcaactttccttgtaggagcaggactcaaggtttttgttgtttctaacacaacatccagcacatttgccatccttctcctcttaggagttacgacagaacccatttgtaccttcggtactgttgcctctattagagggctcaaaatatctggcatcttcgttatttcttcaatttttggctcttcagcattatcaacctttgtttcaaccagcttgactgaagcaccttcggcattacagccggctcttcagtgctccgcgcagtcgggacaatttcttttgtctcggtagcagaagaggttcatgcgccaaacttaggcaccacggccggttcaatgtaacgc

SEQ ID NO: 104735 - DNA, 507 bp, Zea Mays
aggtgacttaatttggaagttgcacctttaccccgaagactggcaaaattgggggccaggaacaggtggggcagctaggttaagtcgtggttctatgtgaatcttggtgaaggtgttccaggcatggcgcaaccgacgaccagtgctatggtgccgcacgccttcgttgccttcccagatttcgatgtcgaggagaaggatttggatgaggtggcgttgcgccacgcaagagtgatgagcagtggctgggacttagttgaggaatatattgcataaatttgtggccactgagcagtggactaagtgttggtgaagtcgcgtgacaaaaggtgccggttaacaatgacattttcaagaaggatgttatggttgtgagtcctaccttcgctattgagcttggtggacaggatggggcagcctttgtcagtgaggttgatggggaggctattaaatttattgggaaatattcagtgaagattgagctgacaaagagcatgtacatccgag

SEQ ID NO: 104736 - DNA, 1108 bp, Zea Mays
aggagtttcctcctctatctcagccgcttctggctccggagctgcagtctttcttttcttcgaagcagccaccttcggctcaggacaagattttctctttttcagagcttcttcatcatctttcaccatcctagcagcctgtctgcttagaacgctaacaatcctttttctcttttgcccttcggcacccttgtttaatcgttcatagtcagggtattcaaagttcaaagcatccatcacccgattcaaccttcatttcggtctggtaccgaaggctgcagtcatcatttgatcctcttttttggtgtaatttcccagcacttcattacacactgtttcaatcatttccagccactcttggcaaggttctttaaattgtttctcaaatttaaaccgataaggaagtcgcacaagcacaagtcccttcttcattccttttagcttcggcatgctaaattcgctcaaagtcagagatgttttgttagccaaatattcttgaactagatctctggtgctgatctgttcggctaccaccttgaattctgccacggcctattggattggtgaccccgacgtcatgcgacacaggggcctagtcaacccgaagcttaaactcagcgggctcatcactagcattttcaacttctccctcttcttctcatcggcctagacatagaaccactcacttttccaaccggttggccacttggtgtggtagctaagcaccgaggccttcatatccttgcgatatgcgaagttataacagccaaagttttcatgcagcccgtcttctctggccttcgtctggtaatgcagctcatgcactcggcagaaagcttcagcattcgggtccactccttggcttcgaagggcccagatgaagacgctgagcctaacgatagcgctaagggtcagctgatgaagatatatttcataattatctaaaacttccccaatcatctcattcaaggggaaccgcaatcccgctctaaaaaagctcttgaaaaccaccccttcatcttttttgagttctggagtgatttcttctctggcaaagcgaataagcttcttctcagtctccccaaaatagcccagcttcatcatcatg

SEQ ID NO: 104737 - DNA, 1241 bp, Zea Mays
ctaatatgactgttccaccaccttgagcgggattttcttgagtgcacctttcttttcatcttcaccaaaatataagaaaatctcctctgatatgcagagctaattgaaattcaaaaggaacagtgagtagttaaaatgatgtgcatgatgcaagcaacatgactagccttgttaagaaggctgcaagtgcaggagcaatagaaccccatgcaacctataagaaacttaagatagtcgactaaatcgtttcagtagttataataatgtaatccatgaaagaaagcgaaaaattactaaaaatctttaaaatacaaaaatgtgtaactgctgccacagacccataacaagtaatggtcttaatttcagttttgattaagtaactacaacttacatgtacaaacaaaataaatatatgcaatactctagccaacagagttaatcttgcctgctctatacaacatgacaattactaataaattatctgagataagagaagccttatcctagaaataaggatggcatgcagcaggactagaattctgatgcatgccagggacacaaaaagtgtcacataatggctaccaagaagaggcaaggcatcatttcactatgatcttaacagcaacgctgtcatgaagcccaaggcaagtaataatctgctatccaaaaaaagtagcatacaaggattgaatgacaatgaccctttctcttcctgaaaggaacatactattttaagaagacatttgaaaatagataaaatatgcaatctgattttggagaaaatatgcattatatatcaggattaacataagagagggcccgccacaaatattttcatgctttctgagcagttttgtcaggaaaaaaggttatacatgtatattgggacatttagaatttgatgagaatgaagttgatcagaccttgtataacgatcatttgtttacattatgaaaggaatcatacttgtttaccaccattgacaagtccaagtgcaaaagacgctgcaactagagctctagaggggttaggtgggtcagggaactagattcaataatctgggaatgaactgaaacatagacaagaagaatggacaacacaaggtaccccacattgatcaaaacttgaggattgaagcaagatgccgcgaactcacaaccaaaaatgtacttgtcaatgtccagcaatgagaccactcaatttaatactattattaagtatctaggatccgccaaacaaac

SEQ ID NO: 104738 - DNA, 617 bp, Zea Mays
gtgatgtccagatttttggaagaaccaacaagttgtctttcttgtacaaaggagagtgaatctctttgcttcctttaacaccggaggaaattatgaaggatgatctaaagaagaaacaacgggagagtgaaaagcacttaagagtgacccacaaaaatagtaaggaagtgtttctaaagctaaataaaactccacagcctccaataaccaagacactgggaaaagagggattagtcatgatgactaaaaagggggatctaaaagaattgagtgtacctaatgccatgttctttgtgctcctgtacaaggacaaccttctttctaataacaacttaccctctactttgccaagtattgtctttgatgcattataggaatatgaggatgtgtttcctgatgaagtgccaccagggctaccacctaagagaaggattgaacatcaaatagaccttgtgtctggcgcttccctcccaaatcgtgctgcttaccgcaccaacccagaagaaacaaaggagattcagcaacaagtggaagaattgattaaaaaagggtacatacaagaaagtctttccccttgtgctatccctgtcctagttcctaagaaagatagatcttgg

SEQ ID NO: 104739 - DNA, 796 bp, Zea Mays
gctcactagaggcgtaggagtaggagctacacacaaggggtagagagctagtcactgacacggacgcagtgaagacacggtcgagcaatgtggggtcgacgttggctagagtaggggcggaggggctgcccacaactagtggggacgcttcggggcctcatggggtcgatggcggaaagagagacctgccggcattgggggtcaaggcggtcgtgccatggatgcagggaggtgaatggggctctgccatggcgcgaatgatatgggtgggaaacgcggggagaaaggagacgaatgtcgcaccgctggaggtggtggcaggggcagcgtaatagagctggagtgcccgatctttcggtgaggtggataatttcgattggtggaggaggtgattctcgcgatccaactacaaacgaataggtcattgtgccttagcaatcttagaaccaactccaaatggttattgaccttgctggtgacaagatcaacctaaacatgagttatattcctgcgagcaatcaaagaaacaagcaagaacaagatgtaggcaaaactgaatatcaatcactcacgaattggggttcacgatggctgtccacaggtggccgttgagcacaactgcagtacagatgtttgcacgatggctaaacttatcaaggaaaacccactctaggagggggcgcagcccctagttaaatagggaggaggtgggcgtccaccttcccacaaggcaggaaattagacgtccaatcagccacacaatctcctgcccacaaggcagggaataggaacccaa

SEQ ID NO: 104740 - DNA, 672 bp, Zea Mays
aacacccccattgggatcaacaacagatggagcacacccattgggatcagcagcagatggagcacacccagtggggtcgacgtcagtaaattcaggcacaagcacttcttcagcagcaggaaccgaagtaccaatgtcccgatccaaactagatactcgccggaggcgtctctttttctttttctgctcatcagcaggaggatcaagttgattgactcggcaaggatgtctcgggcgaacactgacaggtttctgaacatttgagattgtaccagcctctgggagaggcgccaccaccagtgccccagcaggagcagcatcagaagagtcctcagccagcaaatcaagcatagcacttatctctacatcactaggatccaagggcacctcaaagtggaccggccgttcactatcaggaacttcctcgagcgaggcaaccaagacgctaacttcttcagcagagggtcgcactctaaggcccaaactgccatcagtgacagatggattcgacacaaaaagagtgaaggccttaggaggaggcaagttccaggctgagtatgccactggggcaccaacatttgataccttacctctaagaatcatctcaagtcggttcaccaagtctacagagggaattcttctgttggtaacccgagtcgagtcagctaggcc

SEQ ID NO: 104741 - DNA, 525 bp, Zea Mays
gtagtgatccggctccgatgggtagtgcgagctgcaacccggcccccgagggtgtccgagcgagctctccttcccacacctccatggacgtccatgttgggtcgtctccaccatgatctgatggagtgatagcgatgcatacttctttagcttcgagtgagggagtcaccatagaggtcggcgagccagatgccagaattctgatatctgctagtggagctgaatcaaccctcgacgatgctcttcagattgttctagtttatcttccttcgtcgagctacaacacagcttctcatgacttgggattgccctcattcttttctaatcttcaggtaacttagctcttttcgttccgtcattcctcctggtaaatcactttctttgtactcatttgtttttaataataggctttgttagtagggtatagtgatcaccctaagtcgagtaagcgcgagcatgttgcaccgtcttaagtcattgccaacttaagccgattgctccgttagtagggtatagtggtcaccc

SEQ ID NO: 104742 - DNA, 425 bp, Zea Mays
tgggatgaagcttgtcagaattgttttgaagaactcaagaaaaggttaaccactgcaccaatattggtaatgccagacatccacaagggatttgatgtgtattgcgatgcatcacaccttggacttggatgtgtgctaatgcaagaaggaaaagtgatagcttatgcctcaaggcagttgagaaagcatgagaagaattatcctatgcatgatttggaactagctgtcgtagtgcatgctttgaaaatttggaggcactatatgattggaaacaagagcaaaatcttcacggatcacaaaagcttgaaatacatattcactcagaaaaaactcaacctaagatagagaagatggcttgagttgattaaggactatgatttggaaatacaatatcaccccggaaaagcaaatgtagtggctgatgc

SEQ ID NO: 104743 - DNA, 312 bp, Zea Mays
gcagctgaaggtgttgttaactaccgcactggttttggcccaaccggatattgaaaagccttttgatgtgttttgtgacgcgtcaggtagagaactcgtatgtgtcttgatgcaagaagggtgagttataacatatgcttcaagggagctgcgccggcatcaagaacactacccaactcatgatctgtaacaagctacagtcgtacatgcccttaagatttggtggcactatctgctggggaatacatgccatttgtatatagatcacaaaagtttgaagtatatctttatccagtcaaaactaaatatgag

SEQ ID NO: 104744 - DNA, 558 bp, Zea Mays
gaaacctgtgtcgtgagtatttttcgtgctatctagctgtttgtactgtgtgcacttttttaactatctttgctttctcgagctcgattgacttttgatcttcggcatctgcccaaccgtcgtctgaatggctgaggagaagaagatcactgaccctgcactggttaggttatacgaagctatagagaagaccaacacagagaaaatcaccaacgagatgctggccgggttgtctgagaactccagcgatagtgagagttttgacgtagagagtggaaataaagatgttgaagaccgaccatggaggtcgagccatgttgtttttgggaatccaccatcaaacaaggtcagattgaatcgatgaaggggaaacactttcatgatgtatctgtagtgagggctgggggagaggacaccgtttccctgtcagaaagtgatgaggtcgtagtcttcaggagcttcatgattgctgggattcgtttcccgcttcataagatgttagtcaatattttgaaaacatttgagatatatcttcatcagattacccccgaagctctt

SEQ ID NO: 104745 - DNA, 555 bp, Zea Mays
ttgttgatggacctataattggctgaaccatgctttagctaaagtctatttaacaaagggagcatacataatacaaaccaccaatttcctgcaaccatatccagaaaaaaacactttaaagttcaaggttaactgtcttaagcaaggatttcatctgatacatgtgttgcattattcacccttttagtgctctttaacatgtgtgcacatgacttaggagttttagctaatttatgttcagctgcatttattgtcacacattttttgtggaaaacttgaacctagacaaaatctgcatcgctgcttaattagttgatttattccctcaggtttctgttcatttcctctgaaatatgttttgggatggacctcggccagaagtgctagcaacaaaagagacaaacaagcaacccttttttgactttggaatttcatgaattaggttcatgaatgaacacgccatgaaatgcatattttccattatccacactgtcatgttcattcgcttgtttagatagaaaggtctacatgttcattcaactggtaatcaacagt

SEQ ID NO: 104746 - DNA, 299 bp, Zea Mays
tggcttaggaataaaccaagtaggcaagtatcttgcccgttcttcccctcaactcttctactgttcatccaaggcactgtcatctgtggcactattcattggcggtattccgccgcgccaacaatgcccttacccatccaccagataccgttcccgcactccccttcctcgctccctagtttccgaccaccacatcccaccacccacctacaatgctgctcctgtcaacaccacccctcccccaaactttcgttccctatcttcgacggcaaagaagaccccgtgggctggctgaatcg

SEQ ID NO: 104747 - DNA, 446 bp, Zea Mays
tagcactcatcagcccctacataatgcgtaagatcaagacaagaagaattaaagaaagatttttcaagcaaaaccatggtttattattgcaacaattgatatcacgaaatgcaaacatcagtgagaggatgattattaccttaagggaggttgagaaagctacaaacaattttgatagagagcgtgtgattggtggtggagggcatggtactgtgtttaaagggaatctagatttaaatgttgtggcaattaagaaatcaaagattgtggtacaaagagaaatcaatgaattcataaatgaagttgtcgttctttctcaagtgaaccatagaaatgtggttaagctcttaggatgttgccttgagacagaagttccactcctggtttatgagttcatttcaaatggaaccctttatcatcatcttcatgttcatggaccaatatca

SEQ ID NO: 104748 - DNA, 891 bp, Zea Mays
gtccgctaataatgtacaaacgggatatattgtatgtgaatacgttataatcccataataatatgggataaacaaaaacgaccgagacatgtcctaaattgttttcaattttctcatcccatttgtcgtaccattttcacatttttccaaaaatatgaatccgagcaggacaaatataaaaattcgtgcgtagcgaggcaagatttttccaacagcttacatccctactcttggctattatcgttgtttatgacccgactgcacaccacgtggttccccaggtgatgcttttggacaggacgacatcgttgattgcaactcaatggtacgtatgggtgcacgccggatcacacaagagtttataaaagttcgggccgctggaatgcgtaacaccctacatcctgtcgaggatgagtatttgagtattactggtgtacacgggttacaaatgagctgtgggcagaggagggtgaattatcctattgatctagtggtggcgtagttgctatgagaaggctaatgagctatgaggtagtgaatttatgtgacgagatgattcgcgttcataggggtaccccctcggccttatatagatgcccagagggttatccctttataggtcatgatgatgactatctaactctatctgaatctatcctttaacgtggcatgcattcctatttattcggagttcggtcgaccttaatccgagttatctctgagtatctaactcttcaagtatgtgccacttcattgtgtgaggcatcaacgctccttctgcgcataacttggtcgttcggtcttcgtctccctgggtcgagctcatccaaactagttgcggcccgagagtgtgccttgctatgcaagccatcagaggcccatctagcggcc

SEQ ID NO: 104749 - DNA, 750 bp, Zea Mays
gacaaactacctaaggcggtttactgcgacgtggtaatgcttctcaacacgtggcttccgagcggcaagcggccaacgccggcgaggatcatctcggctggccgtagagcaagtgggtatggtggccaatccagtgaccgggtccgagcttatcctggcaccaagatcttttactgcccgtggttatccactttgcaccgagcacgaatcgtggcggccggcgcgaatccaagtgcggggatcaccggtggcaaggttcagtgaactcaagaccttcttcagactactgtaccattgagaccttccttcagggcgcctgacagagcaaattggagggcttagttcttcaatttttatgtgacaacttgaccagccctctgtagcaaagttgttaatctataatccagctacaattcgactataggacccttgatcatttatttactcgatcaagctcaaatcaactccaaagttcatcagaacccactgtcagaccaatttcagacttcagtggtgactgacagccaggctttaagtccatctatctccaatttttatacagcattagtacttagtctcttaaccaaaattgtgcccctaacatacctctacaaatttgatgtattgacctagggcaaaatcttcatgaatcaaaaactacaaggctcccaagttgactccatttcactgaatttcagacttagccacatgggtgtccatgggatatttttgcaaataagtccaaatttc

SEQ ID NO: 104750 - DNA, 310 bp, Zea Mays
ctcttgcgacgtcatggcttcggctctggacatcaggctgaacggggtgaagccttctaccctagattcggttgtgttgtccccaaagcacttctggtagttggtctgcccacttgcccttcttgtcctctaggagtcttttcgtgcgttccatgactccattggactgagggtgatacgctgatgcgaagacaacattggttgtcgaactgtttgccattgtctattattagctcggagggtaccccaaaacggcaggcaatgttctcccaaaagaatttttgagcagtttttgctcttatgatggaga

SEQ ID NO: 104751 - DNA, 765 bp, Zea Mays
caaataagagttgtatagaatacgattagcaaatgttacttatctatgtcttagtgaacttagtgaacatgaatcttgtctactatatattgttagagggaagataattgtaaaacatattgtcgaggaaatttcggtggtgaatttatagggtgggtcatgaaacgaagaactgaaatgaatgcacaaggacacgaggatttagacagatttaagctctcaatgtacgataatactctatgtcctgtgcgttgcagtgtgacagtgtctattgcctatgcaatatgatcagatgatctaccctagatgggtgttgccactcccctttttgttacagaaagactatctagccgctagctatataaggatagagatcaccctaaccgacccctccaaaaaacaatgagatttatctctatctttacacgcgagctcccttgtgctacatttataaagataccacccttatcatgaatcatcatcttcccttatttgtttcatatagacatgtgggctgagtcccctagcgtctgagttcgagtccctcaccgagtccaagttccccaggacgagtccgagtccgttggtcccactgatcaacattttctttattggaaagttttgagtaccctcggtatatatccttaacagttgcctcccaagtctaacttggtagagttatcaacttaggtatgttggactctcatcatcgaatcttgctcatgaacactcagtgcaaattttgagcagtcctcttcgacaacc

SEQ ID NO: 104752 - DNA, 423 bp, Zea Mays
cttaggcacaactatgcgatcattaaaccatactatcccttgatcatcctttctaaaacaattagctttgacggcttctattttctcatgaatatgtttcatacccttgtcacttctttgggcatcaataatcttttgcagaagaactgactcaagctttaattgggtcaaagttccatgttgtatcattcccaggtttaacttctccatttcttgacataatgtgatgtcaggggtcctcactgtaagacaatggcaggaagccttccgactcagtgcatctgccaccacattggcctttcctggggtgataatggatttctaaatcgtaatccttaatcagctcaagccatcttctctacctcatgttcagttctaactgggtaaaaatatatttcagacttttatgatttgtatataaat

SEQ ID NO: 104753 - DNA, 585 bp, Zea Mays
ttcagcgctcgccctcacaccctagctatgcactgcccaaatgtacacactcagtctaactatagcatttagagttaattgatgcataaagatttcatatttcctcaggacttcagcgatcattttgaacttctgaaaaccactatctcgtcatccttaggctctaggtggtgtcactactagcaaactgaaccccatccgtctcatcaacatagtcgagcttcttcataacatcaaaattgttgggcttcacagtggattccccaaagtcaatatggctcggttttgttggttgaaggtcaatttcatcttcgtcagttatcgaggcatctccctccccaatttattcctcttctgctactttagtctcagttgttgccttcatagcttttaaaattgtcatagtagcccccatttccaccgtgtaacgagcatcttcttctttttggactgctttggataaagttggggttatcatcttagggatcgagtggattctggccatgggtgattgagccgaagttcacaaaaacaatcggggaagcggaaaaaccttcggatgcatgaaatttggtggtagaaggt

SEQ ID NO: 104754 - DNA, 387 bp, Zea Mays
ggaggttttagaattcaaatccaagatctcataggccaaaaagaggaagataagggcaggaataaaggtgaactcgagatcattaggctagaactatcactagatccaagtgaaaaagaggatccagaggtcatggcgatcaatttattcttgagcttgtaatcccttcatctttgtgttcatcaatacattactagtaaggagatataggctattacacactctatgatctgaacctaactaaatatctcacatgctagttctcaattgtgataggttcaatacaccactcgtctacgacattgctctctctagatctcatcttttgtgtacctttcgtactccagcgtggcccacgaatcacgatgacaataaccttaacatcaa

SEQ ID NO: 104755 - DNA, 398 bp, Zea Mays
tccaaatatagaattagttcctccaggggtctaaatgagaaatttctttgtaaaaatggctaaaatgtaaaaattttggtcaaggtccatttccatagaaggcagtcaatatggtgccgatttcgaaaaagagcataagatctatagctcgtcctgaacacgaaagaaacaatttacagcgtcaggaaccattttcttgtgctctctgtcactgatctagtcgcgtttacgcagagacagacaggtccacaagatccagaaacacatctgcacgctgccattcaagatcttcacacaaaatatccacgggaatacacaagctccatacacacaacaagccagcatgctatctctcaagatcttcacactccacgcaaacacacagactaatgtacaag

SEQ ID NO: 104756 - DNA, 440 bp, Zea Mays
cctcgaaacgttgcaggactttgacaacaaatcgatgtgcaagcactcgaatactagcaatgaaaaatgcttcaaaaaccaccaactccccctccggctctgggacctcctcggcccctagagcgcgccccacaccgcctccaaaataccataaataatgcatttcctgcatgcggccagagtagatcctggatgtaccaaactccactatgtgccccagcaacaaatccacaaccgtcgccgaatcactaaccgtcttctccgaggacgacgagctcgatgactcagtcgcggcggacgacgaagaagaagattgcattatgtaccgtctgcggcaacgagtagtatgcttcacatcggccagctcatcggcagcgaacagtttctcggtgtgaccggagctagaagatgtgcagcagcgtttgcaaacattgtgcaag

SEQ ID NO: 104757 - DNA, 495 bp, Zea Mays
tccaagtatttcattgcacatggtctcaatcatgtcaagccattctttgcaaggttttttgaattgtttctcaaatttgaagcagtaagcaaatctaacgagttcatgcttcttcctcgctttcttcttcttcggcattccccagccacttgatataggatatgttctattagacaaatattcttgcaccaagttctaggtactaatctactcagctaacactctaaattccacttcggctagctaacagggtgaccccagttgcatgttgcataagggtcgggtcattccgaagctcaagcttagaggactcatgaccagggtaattagcttctccctatttttctcatcagccttaatataaaaccattcatttttccatttggttggccactttgtgcggtagctgaggactggtgcctttgtatcctttcgatacgcaaaattataacaaccaaaattttcgtgaagaccatatgccctggccttcgtctg

SEQ ID NO: 104758 - DNA, 526 bp, Zea Mays
aaatactcctaatggaggggacactctgaaagttaccatcactacctccaacgtcgggggcagacgtaggcaggtaaccaggcgagggtccctattctgcgcatcgcagacggtctggcgcatagacgtggatggtccgggacatcatcacatagtccagatcattcaagcggacggtccaacaacgcccaggagccgcgacgaccatgtacctttaaaccacgacaaccagaaataggtacgtggaaaactaacatagtcaagacagctggtcgattggtcaaatctggcctgacctttgatcaattattttctaaatatgtgaaaaaaaaggtcggcccaagtgatcggccaccaaagcggcctcgctcacccactcagaagcgacaacaggtaagaccgattggaccatcgcaccaatcggaaaggtcagtaggtcataatgtccaagtaagacctaacgtgcctgcatggacacgtccacccccatacacacctgtgccatatcattatgcgtacataccgc

SEQ ID NO: 104759 - DNA, 418 bp, Zea Mays
ggtaccaagctttcgcttagtgtcacgtttcaccctcagactgatggtcagtcggagcgaacgatccaaaccttggaagatatgttgcgtgcttgtgttctgtcatggaagggcagctgggaggatcatcttgcattggcggagtttgcttataacaacagctaccaggctagcatcaagatggcaccatttgaggctttatatggcaggcggtgtatctccccctgtgctgggagaccttgggagagagatccctggttggtcctgattgggttcagtagacttctgagaaggttcgggaaattcgacataatattttggtcactcagagccgccagaagagttatgctgatgtgagaaggcgggacttggaatttgtagtgggtgaccaagtcctcctgagggtatcaccaaataa

SEQ ID NO: 104760 - DNA, 304 bp, Zea Mays
gtcgccttcccggaacagttgctcggaggtagtcggtgccttctgtaatatggttcggacgaaggccgagtcattggatcctctgtagaagtcctcgatcactgccgcctcggcgacctcggggatacgatttctcatggtctggaaccttttgaggtatgaccggagagtttcgtccccttggcatttgatggatttgaggtcccatggttgcgccggcttatcggagagagactgaaagttggcggtgaagcgccgactgaagtcgctccagtcgtcgatgcagtgtcggggtaggtgtcgc

SEQ ID NO: 104761 - DNA, 442 bp, Zea Mays
ctgtaggttagctagatatcggggtacttgttcaagaaataatttcagaattcactataagatatctgcactaaaatctttggatttgcttcaaaaatttcttaggcaacactatttgtttcctctgcactatgtttaccattacccttttcggttactggtgtttttcgctctgcaattttgtgacatccttatactttctgttctttttaaggcgtgaagaatcattacctatttttaaaaggagattgttgggtgacttgcttgatttttctgccagggagcttcaagttcaggtactccttttctcgacatgatctacctgctaaacatggatctttttatacattgtattggcagttgtttcttatagctctactgttgctacttcctacagttaattttcatgttttttgtctcttcctataaaataaatgttttt

SEQ ID NO: 104762 - DNA, 403 bp, Zea Mays
ggagcaatctagagtagaagccagggtagggaaaggtttcatcctaagagttgaggtcaatattatgcatgaccctttcagttgtggatgaaccgtgggcatccgaggaaccaaagaggggttgttcgtcgcctatttcattgtttgcagtaaacaaaccatgagagaagaaatcacagaggttgtcccatggccttccatcagtgcgtaggttagggaatacgaaggggaaggtgcagtggtgggggaagggtaaggagatcttgggcgacggtgttcgacggagtagaactagggaaggggaggcgaaggagaccggggaaggggcagcggtgttcgacggagaagactgagagaatgggcggcgctgttggacggaggagaccgacggaagaggcggcga

SEQ ID NO: 104763 - DNA, 490 bp, Zea Mays
tcgggttcacataaagtattacgtggtaaattgacataatctatgggatctaagtgtggccatcttctacctttgttcctccttttccagcaacgacagcggcggtgtgtccataactggtccacgatgcttccaaggactccaagatgtcgagcgttgattgctactccggcaataatctatctgtttctctctctcccctgctacctcaacgctattggcgattgtggacacaactggttctagcctgttgggcacgagcgttcgctatttatgctcagggatgagcatcgaatctcaacgtcctttcctagattctagcggatcgcacagccccggttgttatggtcgagcgagcgtctatcgcttggttggttgaagacgtatgcaacttggacccacctagcgatgacacggttcttggtgatttactggccgagcggcccatgagccagcgtcccagcgagagcaaacaatcatagaaaaaaac

SEQ ID NO: 104764 - DNA, 1026 bp, Zea Mays
cgtcaggtccacgacgcagcacggcggcagaccgagctccggcgaacctgtaccggccaagacacgcaatggttggtgctctaacttggctgatcaacatctaacaaacgtttcccctcgatcaattgcacggttcgagctcccaacctctagaggacatgatcagacctgtagcacgctggccacggcgaggtgctcacgcggcggtgtttagaccgatttgggggaaaagggcaattgggtggctctggtggacaattggaggcaagtgctggtgcgttggacgcgtaattacctagtggagtcgacgacacactcaatttctaggatctgggggcattggcccgtgaattagagatggcgcggtggcggctggagagaagggggtgcactggcgcaaaggattggtggctttcactgtggcgaggtccccagcggcaacgaatacacctaagaccagttactgcgacgtggtagagcacccaagtacgtggcgcactgtggataggtggctaactccggtgagtcatctgaatcggccgcgagtcaagagaacacgacgaccggggcggaatagtggcctaagttcatccacgatgtgatatttcttacccttaagagttatctgcaccccacagagcacgaatcgcaacgacgacgaggatcacggtgtaggatcaccgacggcgaggggatctgaacccaggatcttttttagctactgtaccatgggaaacttgttcagagtgcctgacagacagaattgcagtgcccagatctcggatttttgtgtgagaatttgctaattcatctgtaacaaacttgtagccctatatactagctacaattgtgctatagggatcttgcccatttgcttatctccttgcacaagaatcgagcccaaagttcctcagaaatcactgttagtgagtgttcagtctcagggtgatctgacagccagactttagggctaattatctccactttttgtatgtaaaaaatgcttaattacttaagcgaagttgt

SEQ ID NO: 104765 - DNA, 443 bp, Zea Mays
ctggtgatggcgccgtcgtaggaacggcccgcgccgtcggcgtgggctcgggtagtagtgtggagaaaggagataaacgtgtgccggtgatttgtttatgaacggtccagattagaaacaaataatgttatgtgggcgctgatcatggtcgttggatcggctatgagcagctaggattagatcctaggataacggttcgtcaacgtgatctgatccttcggatctagatctggcggtccagggctttctgtgttgcgtcagccgcgcgcattatcaaatgagaccctgaagtatttcaaaaataacccgccatccaaccaaaggtaaagactactgcaattgggtccttgaacttaaggtttggaccctgagctctcgtgattttgttccctcggtccaaattctattaaatttcatgaataaatcccagaaattgattttta

SEQ ID NO: 104766 - DNA, 956 bp, Zea Mays
ggcttaaccgctgaagctgtggtgataactttgtcttcaagaatattcagcccctccaagacagaatttaccttgcatatatgtatactggtgttagaggtccttcccgagtgatcaacaagccaagctaagaggagacatcttaagctggatcgagatgatgctgaggggtgccactacaaatgccgatgctcctcgatcttactctgcctggaaccttccttcattggtaagttctgaccacttgatttctggctcgacgtttgccgagttattgtatgcttcgtgctgatcgtgctatttcattgttgcaaaatccttttgctgagtttgtgtctaacccactcatccgtgaagagggtagaagttctagccatagagtgcagctttctccagatgagatagagaccattgttgctgcgtaccgatatcttcttgagaaggataagcagattcacatgttgatacggtggcctgccagtgactttgagattgaggctgttttcgacatgctggctggggagtcttcttagtcggtgcgacttgagtcagggcgtggagcccttgagcagtcaagtgctagcgggaagagagtgaataatctcgcgagcccacgacgtaagaggtcctgtcagctagatgccctggctgaggccacagaggttaagaagaagaggaaactccggcattcgtcggacatgcatccagtgactacttaggctgagccgaacgctagcaatgatgtgttggatgttggtttagtggatgacgtggaaggtggaggcgtggtgtagacgactaggtatgtcaaggagaagatggaggaagatgaagaggaggaggaggtgctcccccttgttcagcgcgagcgacgttctaaggcctggagtgatacttcgagtcttgttgccataacgaggatggtggacatctggctatgtcggttgtcgattgta

SEQ ID NO: 104767 - DNA, 722 bp, Zea Mays
ttccttatttagattacataatgaaacaacatactactatactactctagttatctacgtccttggctgctcccgctccactgctagcttcgggagaacgatcatctgcaaggttcatggaaggaggggctcgaaagagatccaactccccataaggtcctctgccagctgctcctgatgttctagctcccattgccgcaacctccggtggcacgtttggattcaactggtcatataacacgtgcacttcctcatgcagagtgttattgtacgcttgcagactttccagggctacgcttagctcctacacccaagctcgggcatgcgcctcgcaatcccaggctatagaccgtgaatttacatcctagtctatagccctgtcttgctccacaatctcccgctgcaagcggtcaacccctgccgacagctcagtaatacgatagctatcacgtgcacgctccctgcttccatggcatagttccgtcgttagttattcaactctgacctccagatcccctatgggatcattacttccgctactgctccccacatgtcgaggagccaactggtgccgaggcacgcctcgaggtctggtcgccttccgttgggtagtcttggtacgtgctatacctctataagaggggaagattacttagtattatttaaatatgatgcatgcatgacctacgattatggaatcaatctctcgttgatcccatacc

SEQ ID NO: 104768 - DNA, 663 bp, Zea Mays
ccggccgcgccgggatcgcatggtggagcactcacctatccttgcatccatcgagcgtcaacttggacccaccgatccctgtgccccaagtatatatcccgagccggacgcctcctcctcctcttgttcgccagactcgtccacgtgcgccaaaagatagagaaagggtgagtgagggttggggggtcacgctcgtgctcgaagaccgggctgggggagctaggggacctctcgtactctacgcacggatcggagtcatgactgcggacagggcccaatcggaatcgctcaccggtgttcgtcatcgccgcgtttcagccccgcgctatggaccgactccatcaccacaaattcatgggtacgaccgcttccgttgatgtcactagttaatccttgtggtgtagcgtcacgcgggggaggaagttactcctcgatgggacaggaattgctcatcggtgccactccgatttcggtctgccgcggttcgctatggtcggggagctggacatgacaattggctatagtagattttcgagttcaggagggtcagggcgttgtgcgctggcaattaaacttggaatccaagtctgggggcgtcaggcggagtgcatcggtgacctgctccgccataggggggtctcagtggcgccacccggttgagtc

SEQ ID NO: 104769 - DNA, 556 bp, Zea Mays
ctcacgtgcgtgcgaccctggaacgcaccacgcgtgaaggcgcggctgctgcgccgcttcccctagtgacgacgcttcatcccacggagatcccgacggtgacatccaagacggcggtgcctcccctctggacacagcactccatcatgaggctgcaaccctgctgaacctacacgcccaagcagtggcaatgctgaacatttgcactctcatcccgctcctcctcgacgtcaactccacattctacgcccgatggtgcgataccttcctcatcaccctaaccaagttctctgtatggtcatgttctctccgatatcactgcatatgcctcacccaattgggttcacatggatgccgtcatccgtacttggatcctcaacaccatctccgacgacctcgccaacactgtatcccagcacggcgtcactactcgcgtcttatggctctccatcgagtcacagttcctagggaaccacaccacccatgccctctacgccgaccaagagttctgctccttctcccagggcgaccttcccgttgccgaatactaccgtcg

SEQ ID NO: 104770 - DNA, 987 bp, Zea Mays
ggggcgcgaagtggcaagccatagtgcacctaggcaagagcgcgaggtggcaggccatagtgcacctgggcaagagcacgaggtggcaggccataatgcacttgagcaagagcgtgaggcgataggctcaagtggtcctatgctagagctggaccacaatgcatttgagcaagagcgcgaggcggcagaccacaatgcacctaggcaggaggacgagctagcaggccaaggttcatcgatgcgtgatgatgatgactatggggaggactacgatggagaggccgatgacgaggttgttacaacgacacaggcaacgaacttcaggtatttttattttgacgacgagttctattttctgttggattgatattattacccgtgcacaatttacaattttgtaggtttcggcggtcccttagagttccaccgacacgacccttggaccaacgtagggtcataaaccctgcaggagagaggagctgggtggaggtggcatggagtggcaaaggtcaccggacaccagttaacacagtgctgggatctatagcttgttttcactatccaggggtggtacaattcaacggggcagagatagggacgtatcactgggctcactggggcctcaaaccatatggacccgaccgtactcaccaagacgcagtgcagtcatcgttttgggtttgtttattatgtcttttaaattttcttactgtgggcatctataaatgaatttaattgcttcttcattatgcaggaacaatttagattggacgaaacagcgaacgaagaacatgcaaaacatgtattccacaatgctgctaggaaagttacactactaaaaaatcaccttcttgcaatgggcaaaaatcgttgcgatagaccataaatcgttgcgaaaggcaccaattgcgatagaacaactgccgttgcctgctgttgcagaaaacagagtggcaataggctatagcaacaattttacgttctgtt

SEQ ID NO: 104771 - DNA, 644 bp, Zea Mays
tgaaccatggacaatccaatataaatacatgaattattcatgtaaaccattaaccctaggacccaatcaccatatcacctatatggatcgatgctagtacacccctaatccacacattgatctctttaaagagttccccatctcaaatcacaactatatgatctttatctctcaattccatcaagggagctcaactccaactctcttgatgtcctctagatctaatcatgggccacccaacccgactcgtccgaagaaaatctagcgcgacccgatccgatcaatacagtgggctggtacgggttataattttttatctataataattcacgggccgggtatagaccgtgatatttgacccaaaacttgacccaacccgaaaaaaacccgacctaaagccaaaaaaccgacccaacctggaaaaaaaacctgacctgacacgtcaaacagggagacacgagccaacccgacccgacactaggcacaatcagatatgggccgtaataaatgacccacagaacaggtttaatgtcgtcttacatgttaatctagcatgtgaggaaagtattgagtcattatgatcctccttgatcaccgagacttcatgacaaggctagcactatcaaccctactttggatactca

SEQ ID NO: 104772 - DNA, 716 bp, Zea Mays
ggactgggagctcctgaatcagggggaattcctcaccggagttggatcggtggcggaacacatcttcccccatggactactcgctggagcaaaaatttcccggtaaggatccctcgcccgtactcgtcgttattgccgtagcgtgtgggtgagccgaattagtctattgtacacataggtcgtggtttagcgtcaccggagttggtgctcgtcgtgtcggtgttggggaaccgagggctgggggaagatgaggacacgattgccgtccaatccttctcggatggctgagattagaagatggcgtcgggtcgacagggtcgacatgtgaccatggaatgagagatcaacgacttaggtttagtcgcgcgtaccgattgagggcgagagcggttgatcatccgattgggatccggcgacgtggattagatcgcgcggcattgggtacttgtcgtggatcttcgatccaacgaacagcgtagcgcaccggttcgcaaggaatgtagatttaatcagaggcgctgaaaatagatctagcggtccagatccgtggataccccttcgccatggcagaatagcataagagaccctggaaaatgtatgaatcaacccgtagtcctggcgccagtcgatctgtgtcttaggaaattttaccccagcgaccctgcacttttctgtaattgatgagcaatccagtaaacttttaaattgaataaata

SEQ ID NO: 104773 - DNA, 409 bp, Zea Mays
gctatgcaagctgaacctggaagttgtttcttcaggtgatttgagttatatctcggtggaacccacattgcaggagcaaatagtaagagcacagattgagaataagggtgttcaaatgattaaggaaatgatcaagcaaaaggcagagaaatacaagtgcttccgtcaggatagcaagggaattttatggtttggagatcgattggttgttcccaaggaccctgagctcagaaagaagatactagatgaagctcacctttccaaattttccatgcaccctggtagcaacaagatgtgccatgatcttagatctttatattggtggaccagaatgaagagggaaattgccaagtacatatcccgagtgtgacacctgccagagaatcaaggccagtcacttgaagacagc

SEQ ID NO: 104774 - DNA, 1235 bp, Zea Mays
cagccagaaaccaccaagttcgtgaacacagaaggcagataaaaacgccagggccgagacagccaaaaagcctggcgaggttgagacctacaaaagacacccacccaaggcagaattaacatatcagttgtcatcatctgaagagtcttgcgtcttgtccccctcatcttttttgcctgacttgctagagccaacacagccaggtggattcttctttttcttcagagcttggtcagccaattcctcctctgacagattacaaaagcgctctcctaagcgcctgatagctttagctgaaagtgagggggggccctcacacttgtgctgacataacaaacaattcttcttttggcaagagccttgcctgaatccagcccgggcgtcacgtagcctcttgcttctcctcagttctgattccacaatagcaatattaggcttggaggaggttttgtccgaagggacagaggtgccatcagcagattcctcagaaacaaccgaatcagtgagcgtgtccacaggacacttcctggggatgacaaaagggattgtcacagactcaggctccaacaaatctgaagaaatatctgaagacaagaactttttggaccagccaaaggaatcttcgtgcatcaagttggataagaaaaagggcgcccatttcttggggacctgcaccgaggtcactgagcaatccaccggagcaaaaaatctctcccagatcctattaaactgggcattcctttccctttctaagagactcagcaaaacaggatccgcacgccagtcatgcgaaaacataaagttcaaccccacgttattgtgcccattaacaaaaggcaccactggctgggcatccggaataactatatccccaggcacgggaggaacatcctgcataggtgggccatcaacctcttggggcccaatcatgagatggtcagcaggggcattaaagattggcaccggcccccacagccaccaggtcctcaggaatctgcccattcagaatctgaccattctgcagcaaggcgccatgaatatggccagaagaactatcagaggacaggtccgaatgggggttgctgacttgctgctcatcaggtggctggtccagaaggggctgctgaggtggttgaacaggaggatcattgacaatccattggtcccagtcaccttgaatgttgcctgcaggttgatcttgaacgttgtcaccaggtggaaaattaagatcccag

SEQ ID NO: 104775 - DNA, 617 bp, Zea Mays
catttttttaacatgtgactttagagagattgtgtttgacgacgaaggaaatttattggaggaaaagcccgaagatcctaatgaggtggaaaggaggaaaaatatatcagcggtgcggaacaaggttgaagatttgattcaaagagcgaagagttcaaaagaaggcatggatttcttgctttcaagtgtgaagagcatagagacttcgtttggtcaaattgtgcctaccacagtacaaactcgtcaacaagaatatgagtcctttattggttgcacaattccacaagagattgaaatccatccaccaaccaatgttctttcgaagggaaggagtaaaagaatcaagagagccaaagaattaccaaagccacggaagagcaaaattgccaagaatggcacctaaatatagttcatgttatgtatggttagcttatttggtggtgcagatttcagattgccatgttttgattgtgccatggatactgttaaatttgacatgttttaattgaaccctgcactcagacactctctctatttccccccacttagcagctctgtctgcttcccccactcaacagctctctctgctctcccagcgacatgttgtgacacttgca

SEQ ID NO: 104776 - DNA, 432 bp, Zea Mays
gtcagcagcaggatgttccacatatttctattctgtaggtgaataaatggttgaaaggcaatgaggtgtgggctttggttatgttagaacaagtggtcgaaaagaaagaatcagtggttcctgagcagttataaaacttactagcagaatttgaggatctttttgttgttcctactggtttgcctccctctagaatttatgatcatcatatctctttggtaccaggacatgtacctatgaattcaaggccctacaggtactcacccttacacaaaatagagatagagaagcgggtctctgacttattgacctctggtttaattgtgcctagtatgagtccatttgcatctccaattttgttggtccaaaagaaggatgggagttggagattttttgtggactatagaaaactcaatgacatgaccattatta

SEQ ID NO: 104777 - DNA, 395 bp, Zea Mays
cctactctaagcttaattgataatttattgtgtatgttgttctcttgatcacatctgttatttgtttgatcatagaatgacttctattaacaatcatacttcttagtgccgcgtatactatcaatcaatatctcttgatatgcactaagttaaaaggagaattcatgatacatttatgcaatttgtgatccatttgccgtctgctaacaataacttagaaaaggatcacttgttgtagaactctcttttgtgcaaaatatttccatatattgtcttaagaataggtcttaagcaactaagacaaaggacaaagcacaatgaagagagcgtctctatgtgaaggtacaaaacgataaaaactacttccattcatttacatatgtacctaaatcttc

SEQ ID NO: 104778 - DNA, 463 bp, Zea Mays
agcagtatgtccagtctttagacaaactttgcactgtggaggatcagatgaactgttatttgctcgtgagttattccctggacgcggagcactgttgacatgacgcccaccatgtcctccatgttgagcaaggcgttgagcaggtgcagtgcgtccaccacgacgctgcccagctagtccagtggagaagcttcggcctccacgttcacgccgacttgcagcgttggcagatgatccggaaaagttgcctccgttgttgcgaaggtctagccgaatttcaaacgcaagcagttgagagtacaactcgcttacggagatggcctcggttcgagcaaggactgatgagaccacggggtcaaactcatcgtccagcccggtgagaatatattcaaccagctcgtcatcttcaatgggtcgtcaagctgtagccatctcgtcacctagaaaacgcatcttcccaatg

SEQ ID NO: 104779 - DNA, 704 bp, Zea Mays
gacacattaatatgttttaagactacaactgagattagaaaagaaatgaaggcatatttggacaagaacaagaggtctaggcctattttccttgatgatgatgatcatgatggtcaggggcagcaagacgaagaggattccaccacatctaagcaacaacttagctcggggatagctgccaaaaggaagagagctgcatttcagtttagaatagctgcacagccacaaacatcaaacaaggaaaaagaaaaaggggaaattgcaactatgtttcgaagaactcctgaacaagttatggatgagaggctcccctcagggtcacaccaccaaaccaccatggaagcatgcactaagtctaaggctgacagagattatgtcaacaagcaatgggctatgtggttctatgagtgtggtgtaccttttaacgccattaattctagacagtttcacattacttgtgaggccactgctcaatatggtactagatatgttcctcctagtattcatgaggttaaagagcctttacttgctgaatgtgtcaaaaatgtgactaacttgagagctcatcatgagttagcttggaagacttatggttgcacacttatgtcatatggatggactgacaggaggggacatcagttgatcaactttcttgtgaacagtcctgaggggacttactacttagaatctgttgatgcttcaag

SEQ ID NO: 104780 - DNA, 440 bp, Zea Mays
ggcataccaggcacatggtgcttgtcgaagctcgtacagtgccttgatcaagtgttgcaatttgctttcgtgccccttaagaataaacccgggggttacttgacgaagacccgttcttgcagctcgtcgttgaggaaggccaatttaacatccatgtgatgaacaaaccagccttcgtttgcaacatatgcgagtagaagccacactgattctaggcatgccgccatcgcgaagacttcgtcgaaatcgatgccttgatgttgaacgtagcctttcgtgactagacgggccttgtgcttgacgatgaaaccgactgcatccttcttcatattgaagacccatttgagcccaatggctcgagtcctcggtggggggtcgatcagctcccatgccgcgtttgcctcgattgctgtcattttgtcgagcatggcgtggtgcca

SEQ ID NO: 104781 - DNA, 342 bp, Zea Mays
ccattctagaaaagggataatgtctgacttttcgtatgacttgtataatcaattaatcagccaataattctgccaatatggcaatgtggtcatgatataattgcatagagtatgttcacaagatacaacctcccttgaacagttatgggaggtatacgtagaaccccatagattttctgtttattaaagcatcgtaaacaaggacaagtcagctaggtgcattcagagtagtgactagtgacatgtccaggaaagagaatgaggagagagaaccaaacttgctcttcttgttgaacgaagagatgctcatgctcaggaaatggacaattagctattgcttcg

SEQ ID NO: 104782 - DNA, 648 bp, Zea Mays
ggcatttgagctggcataaaaggtctgaccctagggttcgggtgaccaaggaaatttctaggtgtgtagagggaatgccatgtttttccacaaaactagtggctatgaacgaatgagatgctcctgaatcaaaaagtacagtagcaggagtaaattcaaccaggaactcaccgagtactactcccggggcttgttgagcctcttgagcatcgacgtggtttactcgtgccctgccatgatattgggtcttgttctgctggctgatggaggagggtgccttggaggcgggtgctggggcattcttggggccattcaccgagttggagtaagtaggtcccgatgccttcaactgggggcagttattcttgaagtgactggggtctccgcagtgccaataggcattagctggtggttggttgcttgcaactgagggggcctgaaaggagctttgaccctgctgactgaaatgtgacggagtgggtccagctggcttattgaagcttggtcccttgggtggaaacccaaaggatcaaattctctggtgcatgtcttgctgttgagcttggaggacttggaatttcctcttgaggtgacctttttcttcttccctcgccctttccacttgtatggctttgtttgagaggtgcg

SEQ ID NO: 104783 - DNA, 828 bp, Zea Mays
cttttggtgggagatttggaaagaaagaaatcgaagaatctttcatgttcttgagaagagcgagcgagaagtggccaacttcgtcaaagaagatttcaacccgcaaagagcttctagttagttttagcgttttagcgttttgtttgtgtggcatgctgggttttttagtgggctgttttgctagtgcttcttttctttgcccccctctaccctagtgttgtctttccttttcctttccggtgtttgtaagtgtccctttctaatacagtttttgtcatggcaaagctcttgtcgtgtccaatattattctcattttaatgacatgatacataagaaagcagattcttaacccaaaaaaatgtcaaaatcgtgacatggtattacagttatacagagagaaaggagggaggtattttgtctacctgaaactaggcacacatggtttccaatactttgaaatgtaatggaatcgacattgagggtcataggttgcgtttcgtccaactatgtttgatcatatgcatcaatgatacggtgcatctggaagtgcaggaatgtgtggatttttgaaaaatattcctccaatggtatcgaactgcaaagaaggattcaaacaagagatgcggctggtttgtcatagaaagatatagccacatgcactaggctctggctcagacaactgtaaatctcatcctgtagactactccttgtacagtttacattttgctaatggaaaatatactgtaggcaacagtggtggacccaactgctatacttagagtgtgccaggaaaaatattaaaaaaagaaacaaaaaataaagatcatc

SEQ ID NO: 104784 - DNA, 517 bp, Zea Mays
gaaaataaacgcacgcgaaatgcttctgtgtcggccaattcccctaactgtgctaaaaactggcctatgtgttcgcgcgtgttttttccttggtcacccgaaaactttgcgaattcaggtatcctggttccctgtgggtatgggtggtgatcaaatcggctgtcataaggtttccgatatgattgccccccagggaccatgcttactccgagcttatctcggaacacctcagctatttcctcccttacaatatcaatggcagccattgcaagaccaccggctctctggtcaaacataggtggggttggctgaaaattagcgtgttgtcttccccccgactggttatgtggtgcattgccacttgccctatatggttcataggtttgatcgttcctttccagccttctaggtggggccggaaagctttcttgggctcttgatcttgaattaatgggctgatgcattgcatagtgtgatgggaagtgttgctgggacgggtgaggattcaggtaacaat

SEQ ID NO: 104785 - DNA, 692 bp, Zea Mays
ctggaatctggggggcgatcaagatcgcgctgcccatctgagcggccgccgatgttcgaactcgaagccggttgctccttcagagcggccatgtcggccttcatggtggacatctccgtggtgatggacttgagcatctccatcatgtccttcatagtgggatcggccatggctgcggctgcggggcggaggcagtagaggactgtggtgatggtggatggctgagtttgggcgcggcgactgtggaggactgatctgaatgagtggaagaggattgacgtgacgacgataccaggttgtcaagggagttggttcctaaggtagctggccctcgactctgcaactcgtagtctcggtttgtcttcgccggcagggttataccccttagtcgtcggcttgacagggaaaagaggaagaagactagatgactaaattcttgctcaattccctcaagtgccggttacagatatatatagccttcgcttgcaacaactcccccctaaactttaggatctaattccttatctttctattctagccactaatctatgtctgaaacaaactcctaaactttaggatctaacaaactcctaaatttaggatctaattccttctctttttattctatccaataatctgttcctaatttccttcctgggcgctagacctggacgcggcgcgctcagcggccc

SEQ ID NO: 104786 - DNA, 316 bp, Zea Mays
gagagactgaggccactgagacagctccaatttcagaagttatgaagcgctctagattggttgttcaagaggaagaaaaaccttttctcgagaaggacagtgttaatgccgaagctgaaaatgttgttgctgaagctggtagtgacgatgaagaagacgatggcatcttgagtccaagcaagcccagtcatgttgaatttgggaaatccactgtgaaagcagaagacttagttataatgaagaagcttcggtattttgggaaaatgacgatgaactgataagatttgttggcatacgaagtgattctagagccgta

SEQ ID NO: 104787 - DNA, 1769 bp, Zea Mays
tgcattgttattgctactatgccaatctaatgctatgcattcttgttactatgccgatctaatgctatgcattcttagtgtaggatgaagtctcatgccaagatgcaatctctactctaagcttggcttcacgctcaagccaagtggtcaatgaacaacggtacaacttatccttaatcacaaaaggttgttcaaagtcaaatgtaaagctttcagtgaacaataagaatttgtcaagatcgttattgtcttctatccaacaacaaagtcccgtgctggagaagccatacaaaacccaagttaataacattgcagtaaaagcaacaagatctctcaatgccaataagaggtcgaattctgattttggaattactacatttggtactagcattctatcaacatttaaaataataatcattttggtgttattcagatctgaaacaagcacacattcagcaaaaaagactgtaaacttagtctctgcttcgattaatttgaaacactctggtgctaagtctattctaagggaaaggtaacacactattaattaagtaatggttattttaatgcttttcacagtaccactaaaattgacattttattgaccaggaacttctttattccaactactaattcatcaaaggtacataatagactagttttatctagtattttcacatagtatattacaatatgtgaaattgacactaaagttgtcatccttatattactaactaatctaagttgcaatttatgaattatgtaggaagataagaaaacttttgtgacaactgcggtaaggaaacatgaggtttgtatacttagcatcttatatctacacttgccattgaccattagtgaacatatttatattagagttttctatatcatttcataggcggtagatacatcaatttgcatggaaatttgagccctcccaccaattgagacactaactttttttattgccactgcaagcatatgctagtattacaactaactattgcaatatattagagcgatatgcaggagaatcacaatggcacaaaaaatattgtagtatcatctgaaatgcaagtagtaccttgcagcatgaaagagatagtatcaagtgacatgaaagaagaggtatgcaacctttgaaaacaggcaaatagatgtcattttggtgtttgcaattctaatcagaatatcataaatgtatatacttttgtttctattttcaggatcattcctctccaggttttcttgcagagaacttatttgctgacttgggctttacatgttcatctaatgcagctggtaaaatatgtttcaattcactttatttctaaacgttagtaatgtatttggtagtattctaaattgccttcactttcagataaaacaactgaggaaaatccagccaccgttctccaatcttctccgaagataagcgaccaattgagaaagatatcaaattcactgaagcttcttaattctatggcacctagtatagtaaaacagaaaacagatatagttcgtccacaatcctttgacttagttgaagcagaaccaaaaactcctgaggtcaacttaaaactttggcatgctcaagatgcacaagaatcacttaaggctcgtagcacagggattaaggtaactattttgaactcattacatacactttttattgtatcattagctttggtaataaattgtttactctttttctctacaaatgcagaaatctctagctaaggagtgtttgttgtttctaaacagcgcta

SEQ ID NO: 104788 - DNA, 508 bp, Zea Mays
ggaaatgggggagcaccttgtggaggagcaccatatggatactcgtacgagtatgaaacgagggtacagataagtgaaaggttgaggaagaggagcgccggtggcaggagcttcggtgatagaaggaggagcatcaattatatgaggttcattggttggaggaggagcattggaggatggtcgatatgggtatggaagtggtgtatacaaatatgaaaacagaggattgtagagttaaggaacaagaacgagcatgaagttcctcctaccgatgatggacatgataaagatcattgaagaagatctgactcgcacctgaatgggtatcgagacattgtgaagagtgcttgttgagcaagtcagtgaatgtatcaaagtttgtcctagatccatagcacaagagagagagagagagagagagagactacaaataaagaaggcttgtgaatcggagggtgaaggatgtgaataaacccaagcacccctctatttatagggtggtgcattc

SEQ ID NO: 104789 - DNA, 287 bp, Zea Mays
gacgaatttcccgaaccttttcagaagtctgttgtacccaatcaggaccaaccagggatctctctcccaaggtctcccagcacagaggggagacacaccgcctgccatacaaagcctcaaatggtgccatcttgatgctagcctagtagctattgttataagcaaactctgccaatgcaagatgaacttcccagctacccttccaagacagaacacaagcacgcaacatatcttccaaggtttggatcattcgctccgactgaccatcagtctgaggatgaaaagcg

SEQ ID NO: 104790 - DNA, 779 bp, Zea Mays
gtctgatatgatctttacgtgcgcataggatttgacatgtccttctagaggccgttgtcaattattcggccaattaagagtacttgggccatgtctatatgtacatgaacttatagggtcacacacttatgggggaggaagcccaactcagattagatccgaaattagacagggctttagggttacttatgggtgtcggagttagaagtccacaaaaacgcctatataatgaggggaggggcgcggttaaggtaaccctaattcaccaccagtaaacgagcagtcgctcgcccctcgccctcgcctaggcgccgtcgcgaacctagcagttcgaaacacggtgcttcctccctgtatgtgtggatacctcggaggtgctacatctggagcactaggacggaccgcatgaggacgtgaaggtcgtcagcgactgcatcgcactgcacgacgtgtttgtctacatcgagacgtcttccgctgccctacgcgtctactggtaattctatgatctataaccgcagtagttttggttttatgcgatcgaaaattttgttttgtgctagtgtaacctccccataatccatcaggaaggacacccacctcctccccctatttagctaggggttgtgccccctccttgagttgggttttctttgatagttttagccaccgtgcaaatatcttgtacttcaattgtgctcaacggccacctgtggacagcatagtgaaccccaattcatgagtgaatgatattcggttttgcctacatcttgtttttt

SEQ ID NO: 104791 - DNA, 312 bp, Zea Mays
cgctggtccttcggttcctgctgctgaggaagtgcatgtgcctgagtttactgacgctgaccccaatgggtgtgctccatctgctgctgatcacaatgggtgtgctccatctgctgctgatcctaatgggtgtgctccatctgctgctgatcccaatgagggtgttgtttgtgttgctgatgaaaatgacggggaggaagaagatgaggtccctttgactcggaagaacagtcggcagtatgtcaccactggggaaagtagtggagttccttctcctgctctgtctgccctcattggtctacaagagttgtc

SEQ ID NO: 104792 - DNA, 365 bp, Zea Mays
ccgccatgctcaacacagagttggaccacgcccttaacgagttaggcaaggttcgggcggaggttgcggaactgcgtgctgaatgcgcggcacccttaacattcaccgccccatggtcgcttcgactatggtaccccagactgcaggacccgcatagatttagattcatagatcgatggagtcggagtccgtaataatgcttaattcagtgtcttagtctagtcagtcttagttagagttagtttggttatcttttgttggatgcttgtcatgatgaacatgtaatgaagttggatctttgtaatgattgtcaccaaggtgtaagtatcccctacaacttggtgtagttattaataaagtcagtt

SEQ ID NO: 104793 - DNA, 527 bp, Zea Mays
ttcatctgcgaggttcatggaaggaggggctccaaaaaggtccaactccccatcaggtcctccactagctgctccagatggtccggctcccattgctgcaacttctggtggtacattcggatgcagccggtcgtataacacgttcacctcttcatatatggtgttacaatacgcttgcagattttccagggatgtgcttagttccgctacccgggctagagcctttgcctcaaagtcccaagcgaaagagcacgaatttacggcccagtcgatagccgtatctcgttccacgatttcctgctgcaaaacctccgctgatagttcaacaatgcagcggctatctcgcgcacgctccctactcccgtggcgtagttctgacatgagtcattccaccttggcctctagatcccctattggatcgttgcttccgctgctgctcccctcatgtctaggagccagctggtgccgggacacacctcgaggtccgattgctttttgttgggtggtcttcgtatgcgccatatctc

SEQ ID NO: 104794 - DNA, 582 bp, Zea Mays
ggggaagtgaaaagatcgtgactgtggataaacttgtgagctggccaccgtaaccacttgctttgcgaccggccaggatgtcatcgtcggcgtccactgctcgccgcgaggatgccacggtcttggatacattagcacgtcacaataggtcgctgtggacaacccatttaccgcctggggccttacctcaccgagcaccacgacagttgccctccggtgactcacccccttccggccgtgagatcatctcatcccaaattcacgacacactcatgtagctacgataaattaaaggccctccctgctccgccttctggttatgcgcctagcgcacccttcctcgcctccaattacccaccagagctcacaaattccagtttcccccatcttggtcatttacgccaccgtgaggcacctggccacgaccaactgttcccaggttcgttcattcccctctgtgccatgttttagcatccttgaatgttaacatagctcgtcggcccaaccgattaaatattaccatgatagagcatcgagaacatgacctcaccgccgcatgacacgtctgagagcgtgctcccg

SEQ ID NO: 104795 - DNA, 724 bp, Zea Mays
ccttggcttgcttcaaagcttcaacatcaatgacttcacgactttccagggcagctacacgggcttgagctatggtgagatccacatggagctgacgattgcgcttctctgcatcttttgctcgggcaatcatctaacggtggttttgagccaagaaatcatattgtgcatctagggtgagcaggtatgcagtgaggtacacaaccgtggggtcgtcctcaagcagctgatgcccttccaatgcacgcatcttggccatccaaactggacggtctctctgaaagggcggaaagaatctgagcggggtgtcaaccactttttcttcatagatttgacatagggccctcaatgccttacgagcgacgacttggcaggtgtctttgaatctgtgccccgcaacagtgacactccattccacatggtgcggactggatccagtgtacacagtcatgacacacttctctgtgtcatgctcgacgaattcacgaccatcatactctggctggctcctgattccgagacgaactgtgcatgctctcagcaacttggggaaaccatcttcattatggcaaaagctagtttggcagtggacctccatctgacttctaagagaaggaaaggggaaaacatttttgaaatggagggatgagagcaagatttttttaagaaaatagttttgactcaaaaacttttggatcaaggctaagggttacgtcctgcggcc

SEQ ID NO: 104796 - DNA, 503 bp, Zea Mays
gtagcagcccttttgcctctcctatcattctggcaaggaagaagacaggtgactggcgtttgtgtgtggactatcggcgcctcaacgccctcacggtgaaaaataagtaccccttacctgtaatagatgagctattggatgaactacagggagcagtgtggttctctagtttggatctcagtgctggctatcatcagattcagatggatccgaaggatattcctaaaacggcgttccaaactcatcatgggcactttgagtaccgggtcatgccctatggactcaccagtggtccagccacttttcagttaacaatgaattcagttctggcaccgtttcttcgtaaatgtgtggtagtgtttatagatgatatcctcatctatagtgcaacttggcccgaccatttgtgtcatctaagagcagttttcgataccttaaggaaccagcaactgaaagtcaaattgtccaaatgctcattcgcgcaaatcaaactacaatatttg

SEQ ID NO: 104797 - DNA, 353 bp, Zea Mays
agtgcttcccggatgaatagaatagtgactaagatgtgcttcatctaaaatttgctggcggagttcttcattcttcggcactactatgcggttattgaaccatatcacaccttgatcgtcttctttgaaacatttggatattctagcccttatcttctcacgtatgtgcttcataccctcatcatctttttgtgcgtcaattattctttgtaagatgactgactccagcttcaaatgatttgaagtcccatgttgaatcattcccaggttcaatttctccatctcctggcataatgtaatgtcaaaagtcctcactgttagacaatggcaggaagccttgcgactgagcgcat

SEQ ID NO: 104798 - DNA, 342 bp, Zea Mays
gatttctgcaaacagaggaggttcttgatcaagtatgcgtcagtggcacacccgtgagctaatgagtaggtagaaagagccaatgagatgatacttgatgcgctcaggaagaaagtattcgacaagagtgaaaattttgcagggaaatggatcagagaactaccgtatgtagtctggagcctgcgaacacaaacaagccgggccctgaatggaaacaatccattcttcatggtgtacagatcagaagctgtgttgtcagcagatttgatttttggagcacccaggttaacattcgaaagcatcaccgaagtagaagcaactacacaggaggacgtcgatgta

SEQ ID NO: 104799 - DNA, 422 bp, Zea Mays
tcgcgctatccatccgagccggatcatctccggcaacaccatcgggggctgggcaagcgttagcgccatccttgaggactgagccctctgtaacagccacctctaaggctgaaggaccttcaaccacttccatgggagcagagcaatccagactagcctcctgacgcttaagaccgcgctccaaggtcgatgaggcatgagacgccgctcgggataactccaacccggcatcaggcacatcagcacaaatttccatcatcccaccatctgccggctccgacaatagatcttctgggaccatatctttgagagtctgatcaaattttgccagagacaattattgcagaccaacgagggcagacaaagctggagaaggaacaccactactgtctccgctggctatgtagcatcggctgttcttc

SEQ ID NO: 104800 - DNA, 765 bp, Zea Mays
ctaaagtatccccaaattccttgagaaggtcgtcaaggctagctagggacatatcctcaatgtcggacaaattttctatcctggcaggaggtggtgctggaggagctttcttcttccgcccagcctagcctcctgggttcttgatcttcttttggattttcttctaggggcgagcttctttagcttcttatcgtaatccatcttcagggttcggtaggcttcacgggtgttggcctcctcgccttctgctatatcgagacactcttggagggatgccttttccttcttaagttccttgacctgctgctctaagctttccacccgggagtttaggtgggtgcaatgggagaaaaggtcatcgtagtggttatcgagagtgtggaggtatccggccatgtagacgatggtggggtcatcctcggtagggtctctccctgacagggcctgaagtcttttcctccaggtgggggtatttttgttgctaggtgggaagtaacgaaggggggtttcaaagatctctctgctatagttttggcatagctgtttaagggcttttcgggcaacactttggcaagtgtctgggaagcggtgcccaatgaaggtgacttggaagggagggtggtttgggtaacttcggctttctcccaggtagaccaccatagagcacttctccattccattttcacggtattccttccagacatattcgggcttcttgcggatccccatgcgtagtgcgcaactccgtaggaggtgaggaaatcc

SEQ ID NO: 104801 - DNA, 374 bp, Zea Mays
atcatttgcctgagcagttgacttgagtccaaccggtgccgtgtcacgcgaaaaggtgtcagatgcctaactcattttcaggcggcttgaattgcttattgaattcttgcgactgttcagtgagcgaggtaggaagtggacggtcacccctcagcctccttaaatagccctcttgccctggctgctttcttcactcgcccttgatcacttgctctcttcttctttcttgcttctcccctatctgcacgaccatgggcagaggcaagaggggaaagggatggcctcgccgcgctgacgacaagcgcaagcgtcctccgagtccagcctcggaggactttggtgactcggagtacttggagtaagtttcctccaag

SEQ ID NO: 104802 - DNA, 676 bp, Zea Mays
gtcgtcagctaccgtggatagactccttagtcaacttcgtaatgattttgcagtcaaagattttggccctttggcatattttttgggcattgaatgtcagcacaccacgcatgggctcatcctgtcttagcacaaatatattcatgatcttctcactcggaccaacatgctgacatccaagccggttgctacgccaatgctaccagctgataaattgcaaatccagggtggcgcaccactctctgctgaagacgcaaccagatatcggagtgccattggggccctgcagtatcttcttctcactcggccagatattgctttctcggtcaaccaggtgtgccaattcatggttgcacctactgctgatcattggatggcagtcaagcggattttgagatatctacatggaactatcaacatgggtctctgtttcaccaagagtaattcctttcttctaagtgctttttctgatgcggattgggccggaaatattgatgatcggcgtagtactgggggttatgctatttatattggacctaaccttatttcttgggggtctcgcaaacagcctactgtctcgcgatctagcactgaggcggaatataaggccattgctgatggtacagcagaattaatatggcttcaagtattgctgcgagaacttggcatatcttca

SEQ ID NO: 104803 - DNA, 878 bp, Zea Mays
gctcctggtggagcgtgtgggtcgtgtgcccatggtgataggcatgttggggtcggcgaggcatagctcgtcggtggcagtggcaaggaaatcgagggagccgaagatgatgtggctccctggcgtgaaagtcttgccgcacggtgaacattgatgcgtaggccatcagagtgacgagtgtctattgacacgctaatgtcctcctacctaacacgccaactgttgtggttttgggaatcggggacaatgagatttgtgtttggtgttgatgctagcacagaatctcttcgaatggtgaatcgctgagactcaaacgtggggttgagatgaagggtttatactggttcaggatcatgccctagtacattgtagtgctggttgtagtattgctttaggacatgttacatctggtgtgcttgtttgtagatggaagggatcctgcccttttatagctcaagggcagaaccttacagtggagacttgtattctgctagcgagagcatggttcgttgcccttggatggcgtagtccttctgacgtcgttcgtagggtcgtgtgtagccatactcctagcatgacgtactatcccattcattcgtcatacgggtccttgtagcgagtcttccactgacatcttcgtagtggtgcatagtggctccgcgggtcagtcatatggtccagtcgtgcatcatgcagcctcgcccgtcgtcatgagctcgcgtcacttaccgtcgtgcgtaggcatacacccggtatggtgcatctactatgtactgtctgatatactggtcactatagaagctctggtgctgatatcccccatgtgacgggtcaactggcccctctggacagtgggggcgcacctagggccgtacgtg

SEQ ID NO: 104804 - DNA, 420 bp, Zea Mays
tccgtttgagccccgtgaagatggagacgagggagatagagctgacagcgtgaggcccacacgtcatatactcagatccgcgcccacaatggtggcacactggcccgcgggtcccactaggcggaagacacgatctagaggggcgctaaaatgggccggggcgagcgtgagaggagtgggaagactaggccggctaagtttaatttggcccatgaacagattagtgtttttttccctagttcctattctcaaattccaattagattttaaattcaaacacagttctaatttgcacaccgaaacaatatatttcaacatgaatgcaaggttcatgtattaagtttatttatttattaccttatttatttaggcaatgttttcaatatgtaacacagaatattcattttccgaaagtattac

SEQ ID NO: 104805 - DNA, 374 bp, Zea Mays
tgcagagataagtgccatgcttgatatgttagccaaggattcttctgatgccgctcctgctggaacattggtggtgacgcctctcccagaagctagtaaagccttggatattcagaggcctgacaatgttcgcccgaagcgcccttgtcgagccaatcagcctgcttctcctgctaatgggcagaaaaagaagaagagacgtcttcggcgagtgtctagcttggatcgggatgctggtccttctgctcctgctgctgaggaagtgcccgtgcctgaatttaccgacgctgatcccaatgggtgtgacccgtctgacgctgaccccaatgggtgtgctgtccgtgttgttgatgaggatgatgaagaagaggacg

SEQ ID NO: 104806 - DNA, 1147 bp, Zea Mays
tgaagattggacgtctgtatgtgccagcaacaacgtgtggctacggcatgagtactacgaccaccttcactttgacgccatgcacaagctcaataagcggggcatagtgcatggactggcccacatcgagcacatccactagccctacgccaattgtgtaaccacaaagcggaagaggagttcattcccatcataagcaaagcgatagatgaaggggctactagacttgttttttggcgacatgtgcggttccttcatgtcggcgacacacgatggtaagcagtacttccttctattagttgatgatcggaacaggtacatgtaggtggtattgctcactgccaagagtgacacactcattgctgccaaaaaattccaagcaaaagtgaaggtatagactgtttgtgtgttcgtatgctacacactaacaacgtggttgaatttagctctgttgagttcaagacaaggagtactataccgaatacggcgtcaaacaacaacacgtcgtcatacagaccatagcagaacgacatcgtcgagcagcggaacctgactaatgtcatagtggtgcgtagcctactgaagagttgaaacatgcctacgatgttctagggtggggcggtcaccaccatcgtcttcctgttgaactagacgtataccaaggccatcaacttgtatgagacctgccacagacataagctagatatccatttcatgtgcacattcggatgcatcgtgtatgtcaaggcgacggagccgcacctaaaaaagcttgacaaccatgacactccagttatcttcctttcccataagccgtgaaccaaggcatcacgaatctacaacctagcgacacatcacgctgttgtgtctagggacatggttttcgacgagctgatgttctagagttggaaggatgggaacagggacatataggacaacacatatattatcatggagtaccattcgatggagctaaatatcgggcgtgtcgacaccgacaccactatgggatcatcacagctcttgatgacatcaacctctataacaagctccaacacttgcaaggaaggcacactcgtgatgtctatcacaaaactaaaccttgttcctatgactccaacacgtacatcaactgctcctctgtttt

SEQ ID NO: 104807 - DNA, 448 bp, Zea Mays
aaaatttgcaaattccagggctcggatgtaactgttttccaacaggtatggatggcgagttgatttgatacaaatatggggtctcttttgtaaaacggcttcagcgaaggggtgtcgatagctttcgttcattagattcaaaatcaagggctttgattagatcgtcccacacatgagttggtattcggtcaggatcctctgatcgatgatccatggctgacattaacccacgcggggagtatgctcacagacccattggatcaacatcacatgatctcaatccaccgagcgaaggggtacgctgaaaccctaaccctgcgcgttcatcagtagatctacgaccactgaccaagcggcatcctaatctaatccagaccgatcagcccgagatcaacggcccacgtcaaccatcgccagatccgatcggagccacaattccaagatccaa

SEQ ID NO: 104808 - DNA, 445 bp, Zea Mays
acgaaagggtaacttctgttgtgagccaaccgatcaaattttagtggctcagattagatcggcgtgattgcgaaccggtacgccataggggccctcggatctagatccaatagcccgggttttacacaactgagttgtaatctcgtccactcattcggatcgaatggcacagatccacccacagaactggtgcccatacattcaaatctgagccatccctccgagatccaatggcactgggcacgtctcctttcctagctacccagctgacccaaactacggcggcgctcattgttcggccactatgccccaccggagcacggtactgagccaacctggtggcctagaactaagcgaatctgctacatgatttgacgacgacatgatgagcaggttagtagccaacttaccggccgttgaagttgtggttggagcttgcccaaac

SEQ ID NO: 104809 - DNA, 527 bp, Zea Mays
cgtggatacactccgaccactaatttactccgaccaccgtacccgcgcagaccacggttgatttggatgggttcgccggagatagccacttcgcgaccctgcgccacgtgccttggcacgttaacctcaccgttgtgactcacgttagcccgtacggtggtcaccggggggcttgccatggtaatagccaccaatcgcgcacgccagtaaccttctttctctccggcccgccagcacatcttcacgaaattggacgccaccgctgtgggagcctataaattgccgaccccacctgctccgctaagtagttgtgcaaccagtgaagcaacccgtgccttgaatcatccactaaagctccccaatttgggatttcccccaaacctgctttgtgccaccgtgaaagagacctcgtcgtggctagctcaccttaggtctgctcataccctctgctcttttgtttcaacgtccttgtgtgcccctgatgctccccgaccccgccaattaagctaggaccccttagatcgccg

SEQ ID NO: 104810 - DNA, 535 bp, Zea Mays
gcgaagtcttcttgtttgggtactggtgggggtggtggtggattttggtgatgtggtggtggaggaagggcttggatctcttggtgttgctggtacatatggttttgttggtgggtgtgaaattgttcattgtgcaattgtcgctggtggtattgttgggggtggtaggtgtgtgcaacgactcgttggttgtcagctggttgatttctggccatcctgtctttggtggctttggtttcagggcagtccctggtgggctgcacggaatcttcaccgtgaaaaggcagtagaaccttcgcggttgtgggactcgacctttacctctgcctttggggttgctgccacaaccctgttgtgtggggtactcttggcgacgagcagtgtctccagcctgctactgattggcaatggtgttcacttggggctggttacggtttggctggccggagtcggactgcgccggtctaacccatgtcctactggactgcggggtgtccttgggttttgtaacacctcaaaaccatcaactaaaaat

SEQ ID NO: 104811 - DNA, 348 bp, Zea Mays
tacttgtcatccccaaactgatggacaaatggaagttgtgaatagaacattgtctgcaatgctgcgagcaatattgaagaaaaacttgaaaatgtgggaagagtgtttgccgcatgtggagtttgcatataatcgggcggaacactccaccaccaaggttagtcctttttaggtagtgtatggttttaaccctcgtgctcctattgatcttttgcctctacctactaccgagcaagtacatagtgatgctaaagagcgtgctgactttattttgaaacttcatgcttcaactaaagcaaacattgaaaagatgactgaaaaatatagaattgctggtagtcaaggtag

SEQ ID NO: 104812 - DNA, 285 bp, Zea Mays
tgggcacttaaggatttgaggtagggattaaggtgaacgcgctcaagttctaggtgaaggctgaaatttagaaatctgaatttcagatttttcctagagagcttccacttggatggcctttttggggtttttaataaactattttggccaagcttttataacaattattgtagcttagttagtgtatttcaacttttataattggcctaagccatgataccatgtttttcatggtcttattaccaatttctttctttctacttaattggcctaaatagggttgtt

SEQ ID NO: 104813 - DNA, 320 bp, Zea Mays
ctttgatatatttatataccgaatctgattattgtgatgaatgcgttgttaattgtgtatagtaattctaggcacgaaatgacttgaataaaaattagtaagtctacttgttagtccttatttgattaatttaactctaacaaatggtaaagtgttagaataattcaagtctctagaacatggcaattcttgaattgtataggagctgaaatttattaattgctgttttgggctgcacgcactgttttagttgtgctgtttgtttgatgaactaaatcatgttttctgtagaaaagtcatatagaagagttgtagataac

SEQ ID NO: 104814 - DNA, 550 bp, Zea Mays
aacaaacatttgctgcatgtggtatacttgttacattcagccggcgagaccagtattgtacctcagttggatccccgcataaccatagttttgcaacagttcaaatcagtctttaatgaacctacggggttgcctccttccagatcttgtgaccacatcattccactggttccgggcacccaacctgtttttattcagccatatagatatgcaccagctgttaaagatgagatgagcgtcaggtttcggaaatgctggcttccggcatcattcaacatagttcaagccccttttccagcccagtgctattggttcgcaaaaaggatcagtcttggcgcttttgtgtcgattttagacacctaaacgctctcacagtgaagaggaaatacccagtgcccattattgaggaattcttggacgaactgcaaggtgccagttggttttctagtttggatctgcgcgccgggtttcatcaaatactgctccaaaatggcgaagaattcaaaacaacatttcagacacatagcggccactatgagttcaaggtgat

SEQ ID NO: 104815 - DNA, 584 bp, Zea Mays
aaaaatcctatttgccttctattcctagaagactgttgccaaacaaacataagcaattaatgctacatgcctgtatctagatatgttgcaacatacaactcatctataaactctcaaaaaacgcaggttcaggactcagactgcatatggcactatcaaaacctgtttacacgatgttatgatgtcaagttccaaatggagcatgttagcccaaataagaaaagaaaacttaagtgatctagtaccaacttaattcagaacacgtaaaaaaagttgaatatcttactacatttctaccttgtgattcgttcattaaatttgtcatgaagatcatactaatgtgtgctaagcccctttgaactacctcgtgtcgaagcacgccatgtgcatagagaatttctgaaccagcaaagatcatcaacaggtattttagtaaatatatggctataatggtgtgcgccagaaaagaaaattgtattaggtgcgggcacaccctctcaacggcatgtcattttgcattgcagccacttcgatctggatttacttaaaacgctaaaaggtacatatcattctatcactttttt

SEQ ID NO: 104816 - DNA, 273 bp, Zea Mays
ggattttctctttttagaatttcttcatcttctttcaccattctagaagtgtgcctgcttagaacactaacaaccctctttctcttttggccttcggcacctttgttcaatcgctcatagtcaggatattcaaaattcaatgcatccatcacccgattcaaccttcgcttcggtcgggtgccgaaggccgcagtcatcagctgatcttctttttagtgtaattacccaaaatttcattgcacatggtttctatcatttctaaccattcttggc

SEQ ID NO: 104817 - DNA, 439 bp, Zea Mays
gtgggatagcagtagtctgggtacgcaaacccgataacatcaaacaccctgttcaatctcttcttgccgcgagcaccgaaggcagtcgtcatagcttcgtcttaggccttcgaatatgctccaagcagctcatcgctagttgcctctatagcatctagccagtcatcgttaagttcatcaaattggcttctatatcgaaaggtatacttcaaatagaccaagtcattttgactagagccagcggtagcctccttcggcatttcccaaccatttgcaagggaccacaatctataagtgatatgctcttggaccaagtctcttatgccgatataagtgcacactgtgttgaaagctgcctggcatgcttgcacgtcatttccaagtgcaatgagtggcctcctaatgccgaagacagaccatatagggcgttgaataatcc

SEQ ID NO: 104818 - DNA, 387 bp, Zea Mays
agctaaaagtcaccagttaccttatttaaagagtaatagtgtttccagccatccatgtctattggaggaaaaaaatattatgttagcttcatcgatgactatagtaagttcacatggatttatcccttgaagtttaaatccgaggtttttcaaaaaattcatgaatttcaacaattggttgaacgaatgttcaatagaaatataattactatacaaacagattggggaggcaaatatcaaaaattgcacacattatttacaaaagttggcatcacgcatcaagtttcctgcccacacactcatcagcagaatggctccgctgaaaggaaacataggcatatagtggaggttggtcttgctctattagctcatgcatccttaccacta

SEQ ID NO: 104819 - DNA, 787 bp, Zea Mays
cagtcacaagggactgtggttggttactggattctacaggggctctttagcgagtatggctcggcgaagtggtatgcggccatctgagccgtccagaatagatcccacgacccagattaaaacatcccaacaacgaaacggtatgcatttctgaccgtgcgatcagagatccacgaccaggagttcaccatgacgcgaggtcgtcctagccctcggatcatcgaccgacgaccaagatttaaaatagtagatcgattcctacgcacccgatcaagatcggatggccccgatcgcatcaatccactcgacactaggacttgatctcgatcgtcaaacacatcctacggcggacgccatcactcaccgcgctatccaatcctgtacgcccatttcctgatctacgccccaaattctatctttccccctccttctttcttcgtcgttcacacagcgtcgctaggcttcctcgcggtggagcgcaggtcgccggcgtacatcgattggctgacacacggtcccatcccgcaatccactgacgctacaccacccgcagaaaacgacgaacacgcataggtaacacttaccgacgatcgaggcgcgcagacgctggaccgcggcaaggtgcggatgcgcgagtattcctagctccggcgagcaattgggaagcctcgaaccaataccgagctacccgaggtacttttatcgaagcacgcgccaatacaagctctcccccggccacgggacgtgcgcagatgaaggtgtaggcgagaggtccgcacgacggatc

SEQ ID NO: 104820 - DNA, 437 bp, Zea Mays
cggcgcgaccttgctggtgtcgagtagttcatacctgtagaaatggtgctaggacttcgttggaaggtagatgtaataatttttgtttttgtaaggtacttttgagtactacttatcgagcagtattagcacttatctgcatactatttgtccctgttgtgtgtggcgttgccgactcctccctggtacctggcccccctgggatgtaggctcgacgtgtcgaggctggatactagcatacctaaaagagttggtaacggcccctaggaggcagcctcgactgggacctagacctgaacacagcttcggctagggagcgttagtagcacacccataggacccatcgcctgatactagccatcctttgatacaggcacgggacctgcagggtttagtctgggaagccaagttgtgtgtccggaccccctagatcgcgg

SEQ ID NO: 104821 - DNA, 450 bp, Zea Mays
taggatttgtgtaccctgactaccggtacccactacggggtcagaaaaggaaaggtgcagctcctgtgaaggatgttgcttcggctgtctctagtgagcctacgccgaagaggaagaaagtgaaggtcctcactcaccgaccacactacattgaaacgaccacagtgcctgaatttggcggtgacacctcttcggctaacgaagccaaagaaactacgcttatgcagaagactgaagagccggctgcgacgccgaaggcgccattggccaaattgggtgagccgaaggtcgagagtgttaaagagacagaggttgagagaacaaagatatcagaagttacaagtccttcggcgaaggtgacagtgtcgaaggcacaaaaagatcttatagttacccccaagaggaaaaggatggtccacgtactagatgtactggaggaaataaagacta

SEQ ID NO: 104822 - DNA, 771 bp, Zea Mays
tgaaattttccttcatcaaattacccctgaagccattattaggatgggggtttttatttgggccgtgagaagccaggggctagagccaagcgcaaaatgcttcttcaacatgcacgagttgttgtacgagatgaaggctactgataaagagcagtatcacaacaactttggttgttatggcttcgtgccctgccccgatgtaagttacccggtcccaacattccgaaaaaggtggtccagggcctggatggaggaatggttctatgttaagaataatttagttgagagggaagatataaaaggaattattcaacgtcacatttggtctcgcttcagcatcaggaggccagccaccgctcttgggaacgatatagaggcatgccagagaagcttcaacactgtgtgtacttttattggcacaagagatctggttcaagaacacatcgcctacagagtatggccgcttgtgaatgaattggagatgccgaagaaggctattgccgggtctagtcagggcggcctggtctatttaaaatatagtttcaggtatagaggcgagtttgatgagccaaatgatgaatggttgagcagtattgaggcaaccattgacgaattgcttggggcctacacaagggccgaagatgatgtaatgacattggccttcgaagaccgaggcaagaaaagattgaatagcgtttttgacgtcattggtttcatataccctgattattgctatccctcgcgaaagcagggaaagaaaaggaaaactgc

SEQ ID NO: 104823 - DNA, 1433 bp, Zea Mays
agatgttaccctaccatgcagcagtaatcattatgagatgggaacaaggaaggaaaggcggagcaggagccacggccaccaccagacccggccaaggcggagcaggagggtggccaaatttcctccagaactcggttctgaggctgctgcccaggtctgcaggcatctgggtttctgtgatgacaatgaagttatttctgtccaggatgccgggaaatatgcgaagctatttgtttctgggctctctagcgttcatattgctgctttggcagcgctgtttggctggtcggtgccgctgaacggacctgtttaggtgcggttgggctggtttgctggtggtgtttgatcgttgtttagatggattcaagctgctttttaatctggaatgtgagagggctgaatgatcgtgtgaagagagattctgttaaatctttggtggttgatattagaccttcgattatttgcctgcaggaaaccaaactttgttctatttcagattttgatattctctcaattttggggtctggtttcagtaattttgtttacagccagcgattggtaccagaggagggtgttggtatcctggcgtgatggagctttttcatctttggcttcagttatcaagcaattttcggtttcagttaaattgcaagagaaaaatggttcgtgctggtggttcactggagtgtatggtcctcaccagaacaatcttaaatcctcctttcttcatgaattaagagaaatcagagatacctgtgtgggaccatgggaccatggatcattggggggagattttaatctgattttcagggaggaagacaagaacaattccaatattaacagggctatccctggatctgaaagagattcatttgaagggaaggaggtatacttggtccaaccagagggatgctccaactcttgttaagctggaccatgtcatttgcactagctgttgggaagatctatttccggacgcttctcttcatagtaatgctaccacatcttcagatcattgtcctttgaccctcaaggtcagagatggctgcatggggaaaagacggtttcactttgagagtttttggcccaaaattcctggttttctggaggtggtgggtgcgtcctggagcatgccagttgggagctcctgcccgttggagcaagtgtcattgaagcttaaaaggttagctcgcgcattgcagtcctgggggcataaagaagtgggtaatgtgaggatgcagctggggcttgtcagagaagtgttgcataggctggaaatggcgcaggatatcagaattttgtctagtggggaagtttggttgctaaacttgttgaagcaacggtgccttagccttgcgtctcttgaaaggactgttgctcggttgagatcacggatccactatctaaaggagggtgatgccaacactaagttc

SEQ ID NO: 104824 - DNA, 422 bp, Zea Mays
ggcatgagtcgttgattctgtttttagtgatcgagattatgttataggggcggctcgttggccattggatcggctgttaatggatgcgatcaagtttggtctgaaccggttcggaaatagttctgaccattgatctcgatacggagggctaagatcaggttaggtcttcattgaatttaggccgttgagatcaaaacggatggtcggatcggttgtttgcgtattctctcccacacattaaatcagagccgttgatcctgtcgtgtgtggctgtgatggcataggagtattctagtttggcgatctaattgtggcagtccattattgatcggacggccgaaaagcaacgataccccttcggcctgggcgttttgcgtaagagaccccgagaaataactgaatcaacccgcagtccactagga

SEQ ID NO: 104825 - DNA, 601 bp, Zea Mays
tatattgcgattaaatcctgagcgcaagatggccgatccacggtcgagagaagccttggacgaatcaatactccgatctaatcgcagccctcgcctaaagatccaacggccaggaggccttctcccaccactgtccaagccgagcgacagcaccaggagctccccacgatggagctgtcgccggagatagccatctctcgccccgagaccttcccacactgcctgactagcgctacacgaaccagagggcatggcaaatcccgagaagcaaatctcaccgagtttggaggtgtggaattccctgcccatggagaggcgcggctgtggcagacgcccctgctccggcgagcaattgatcgcacagcgtccgacccccggctcaaatctaacgcggaattacgaagaggagaaccatacgagtattaacatggatttttcacctttgttcacgacaacagcaggtctggccacgggtaatggcggcacggtgacggatcctgggccatggcgagtacttcggtgctcctgggatgagcacgagcctgcgtgagctttgcgtcgacatcaagggaccccaggaacgaactcgaacccacacagg

SEQ ID NO: 104826 - DNA, 403 bp, Zea Mays
gcaaatttggttgctgaatttgtggaagatgaacgtggtttgtcgccggaggaaggcggtggtgctggtcgactcggcgagggagttggtgctggtgtacggctggtcatggacgtagtcgtgcgctgctgccatggtgtagattttcctgcagaaacattagagcttgcactagcacgttgtccctacacttccctttcagctttgcaagcaagatgaaacaatcgggttacattagcataatctagccatagcagattccctatttaacccgcccaaaaatctagccatagcagattcctcaccctcctctatgttacaacgcaacatacccatttgtaattgttgataatattcttctacacttttagtaccctatctcaactattgcgacttgtttaac

SEQ ID NO: 104827 - DNA, 662 bp, Zea Mays
gaaagacatggtgtatgctggaggaaggtgacagctctaaatgataagcaacaacaccaatcttggccaccacaggaaatggtccaaagtacttgaatgtcagtttgtggttcgcccttttggtaactaacgattgaacgtttggttggagctttgagtaaaccaaatctccagcttcaaaagttttgtcagattgatgtttgtcagcttggtccttctagcattgctttgctctccctaaatgttgtttcactaactgtaccatcactttgtgctcctccagccatgtctaaagaggggggacatcataggaggttctgaatcaaaacccaactggcacgcaggatagccatagagtacttaaaggggtgtgagcttcaaggatatatggtaactggtattataccagtactgagccaaaggaagccatcttttccatttggttggacaagcatgagtgaaacaatggatgtaagtttcgagacactagttgacacgctccgtttgactgtctgattgagggtgataagctatagtcaaacgtaattccactctagccaacttgaacaattccttccacgcactagtgaatattcgatcatgatccgagataatagacttggggaatccatggagtttaaaatgttgtccatgaatttgtg

SEQ ID NO: 104828 - DNA, 296 bp, Zea Mays
atgcgatcaagagagtaacatattggaatatgaattaagcttaaaataggagaatccaataagcaagctactttagcaatgaaagcaacaatccttgataaaagcgacattatttttaacaagttggattgatgtgaagtagcatactttatgagaaacattattctcatgtaagagactatatgaaataactaagataaagcaatagtctcaacataatcaaaatataggaatggactccccctaaagatatgcatcaagtaattgaaagaattgatttcgatgcattcactttt

SEQ ID NO: 104829 - DNA, 289 bp, Zea Mays
gtttgatgttgtcgtttctgcttttgttgtgctagtctggttgcgcccttaggtgtcttctgcacggacagtcttcgcggtagactttggttttttcgcacttgttgtgctagtccggctgcacccttaggcgacttctacgtggatagtccttgcggtggactttggttttttcgcacttgttgtgctagtccggctgcacccttaggcgacttctgcgtggatagtcttcgcggtagacttcggttttttcgcacttgttgtgctagtccggctgcacccttaggcg

SEQ ID NO: 104830 - DNA, 681 bp, Zea Mays
acctagtgtggagcagggatgcttgggggtcgaatgagacagaagagggtcgagcgaaccacacccggtctaaagaggtcagccgaatcagacacgagcgaccgaaccgcatgccattcgagggtcaaacgtgggaggctaaccgctctgtactcaacccccatcgatacaacaagtgtcgcgacatggagaagaatggggggatgtcctgttctgcctaacctccatacatattatgtcttaaccaactatgagctctcaccccgctcgtacaagggtgaaaaataattgtttagatgtactacgtgggtatggcgatctgacagatatgggggtacgaacgaacccatcgatacactagcccataccggaggtgagaatcaccgccacaggtggcactatgctaccagctctacgataaggcagatgacagacgttcgtacatatcactatgctcaccacgaactgcacctagccccttcggtcaagagaagtcagcaatgtcatggctacagaggaacgaatgacgaggaagaaggacatcattagagtaaaacacaaccatccttcccatagatgtcgtatgtccttcttcacaattgtaacagacccctcacttagcatatagggagggcttgggccatgactccatcatttgagccggatcacactcaatccaat

SEQ ID NO: 104831 - DNA, 437 bp, Zea Mays
ctgaagcggccaaacattgaaggctaaatgctcttgcacaaactctctggtacctatgtagttgcacaccacgttaaaagccacaagggcagcttgagcttcgtcattcatgacacatgtcgacctctttatgccaaagtgtggttttacaggtctttggatgatatccttgatatcctccctcttctcaagaccattctttaaatagaaccattcccttgtccaagcattcaaccatttgctttggtagtccatagtggggtatctagcatcattccagtatgcgaaagtgttgtagtcaaagttgtgttgttgctccttcctagttgcttttgtttgataacaaagctcgtggatttgacaaaagtagttagcgtttggctctatgccttagctcttcactgcccagatgaagatacccaacctcactaaggcat

SEQ ID NO: 104832 - DNA, 478 bp, Zea Mays
cacctattcaccccccctctaggtgctctcactttccacccaggaatttaggtgggtgcagtgggagaaaaggtcgtcatagtggttgtcaagggtgtggagatatccggccatgtagactatggtggggtcatcctcattaggatctcttcctgacaaggcctgaagtcttttcctccaggtaggagtatttttgttgctgggtggaaagtagcggaggggtgtctcagagacttccctgctgtagttttggcatagctggcgtagtgctctttgggcagcattttggcaagtgtctggaaagcggtgtccagtggcagtgacttggaagggagggtgatttgggtagtttcggatttctcccaggtagactgccatagagcatttctcaattccgttctcgtggtattccttctagacatactccggcttcttgcggatccccatgcgaagcgcgcaactctgaagaagatgaggg

SEQ ID NO: 104833 - DNA, 582 bp, Zea Mays
caataatattataaaattataggaactggaatgagtcaaaaaggagttagaatgaatttaatatgaattatacaagtttctagaattattggcgtattaaaaatcaaattttgaatttatttatttgatttcacgaactctggacagcgcaacaaatactaaaaagtctgaggttagtatcgcaaaagtcctacagactcagcttactgctactgtggacggcgggttgatttatccaaaccccagggactctttaagaaaatgtgctgcgaaggggtatcggtggagatgagccgttggattagatctgtacggtccacaacagatcaagggaaggttgggctggtattagatctgagccgcaggatcaagatcaatggcacagattcactactgaaccgatgcacagctagggccgtgagatcaccatgcacagattcatccaatcggtacgaggccgtctaatcctaaccccttatcgcgcgatagacggcctagggcctttcttctccacttaggtcacatatacgacggcgccgcccgcagaccatggtggacttcgtcggtgaactacgccccggc

SEQ ID NO: 104834 - DNA, 628 bp, Zea Mays
gataaattatgtatcttgtattacttcattgcacaacattaggtcaggtgaacgagggcatcacattcttccaaacgcagatacgattgctttcccttggctgccgctgccacagttggtggtcgcctagtcacagtggatagcaaggtgctacatttatatattgggaggctgttagctactgattggaggcagacgagggaggaagaaggagcacggtatggagagggtgaaaggaaacagatgcaggaaccggagttatgttattttattacttgttcatcacaatccaagacatccaggtatatattgctccctcctctcacagcgctgctaattataaagttaagcaccacattattggacccaattgccaccacaaacgtgagttcaacatcattattattcttgttaaaccggaaatccactcaaatacctaataataaattagtcagcattattatgaaaatttaacttgtaaaatttggagtcaatactccataaaaacagccgccacctaaaaaacatatcacccgcccccttccctgaccttctacatttttctctcccaccttcataatttttgcactttctatcggtaaccaacctcacctcctcacggtttccc

SEQ ID NO: 104835 - DNA, 512 bp, Zea Mays
agtaccagcgtcagaacaaccaggcagctcatcttcctaccccagcaaccaaccagaatggccaagcagccccagcataagtaggaggtcgtgcatgcttctactgtggagaacaaaatcagtaggcgaagaactgtcccaagaaagcagctcagcagccgccagcagtcaatgccccagcaagacaaggagcaccacaacaagcactaggagtctgtggtcaggcctacaaccgtggaaaggtgaaccacctggaggctgaagcaatccaggatgctcaggacgtggcagtaggtatgtttccagtcgaatcctacccaacaaaagtaatatttgatattggtgccacacattttttgtttctacatcttgggtagaatctcataacatacccatagaaccaatgatcccacctttaagagttaattcagttgggggaaaagtttagtccgataggatttgtccgaatctaaggattgaaataagggggatagacttccccgctagcctag

SEQ ID NO: 104836 - DNA, 639 bp, Zea Mays
gctcaagaggtgaggcagtctcagctgtgtgagcctgcaagagtaattaacttgtctactactgagttctcaccccctcctctcccatctcattccaaacttgagattatggccatttcgtcgaagaccgttgctgtgtccatgctgcttctcagtgctgtcttcttcgtgctgctctccgcgccagctcatgctaggaagctggggacgatgagggcgcctaccagcagcgtgcgtcgtcctccggcggctccatgcactccaaggagtattctgcaggaggtcgctactcagaccgaatctaccactactccaggtcacagccccagcattggccacaacagccctccgaattgaaatgctctctgcatctggaatcatctgtaccccgagcgagtatatatatcccatgcttatatatgtggtgtttgttcccttgaaatcgtatggtttgtttgaacttgaaaggcaacctgaatttttttgtttcttttctcttttagaatccaccaccagtaaatccagagcatgcatgcatgtggttcatatgctttattttttcccccacttttgtgtgaaagacttgctaaacatgaggaggccaggggcggtgtagccgtgtgtgtctcttctgtaagg

SEQ ID NO: 104837 - DNA, 619 bp, Zea Mays
tgaatttttccaagacttctacaatcattccatgcagcggaaatctcaaccctgctttgaagaagctcttaaaaactacaacttcatcatttttcggcttcgggatagtctcttccccaccaaagcgaaccaaccccttatcggcttccttgaagtagcctagcttcgtcatcatagtcatatcagcttcagacacagttgattttccaaaatccagatggctgggcttcgatggcataataacatcataatcaatctctccttcattagcatcaccctcttcaatatctgcctgctcggtttcagcagcgggtgattctttgtcagcagtgccttcagtcacaatcaatcccgaccgcctcataactttggagatcggagcagttttagcagcttcggcttcgtctccgtcacgagtaactctagctgtcgagcgtaccctggccatttgatgttgaattttttgcgttttgacgaagttgaaaatttttatctttggcgaagctctttcttgtcatgaagctagagcaagatgatctttcggttcagaatacagtgagcaagcttcggctgtggtcaaattttttgacaacacaacagtgcaatggcagtgaatgtt

SEQ ID NO: 104838 - DNA, 467 bp, Zea Mays
gtgccgtctctccttaccccacgatttgttttgaagaagctctgcctagggtccctaggctggtgatggcggcgcccaacgtcgtatcctgcctgagggcatcaccttgatcccgtactaccatggttgttggtccgcatgggacatttgctgcttgtttgtaagcctcaggttttgatgagttcgctacttgcttaaagcatgtcttttgctctcctagggtagatcaataggtgaagtcagagctgcttttgtggggtgcaacaaagcttggcaatgatgacacattatgttcacttccttcgaaagccgggtcttgttgtgagtaggtggtggtgtgttagggctttggctgatgttcgttgtgggaaatcagatctacgtatcacttttgtgggataagctcgacaacgatgacgtgtggtgtgctctgttggttgtttttgtgtatgtgggttgcttaggat

SEQ ID NO: 104839 - DNA, 307 bp, Zea Mays
cttggtcgtattctcttccttgtcgcttgcgagttttcaactccatcctttgttgcttgttactaccttcaccttcattgtccctccatcttaccttgatgactatcttatgtatgttatttaaaatcaatctcccatctcgattcgatagaagtgtgttacttatcccgcccttggttcgaacctcatctttgctaggtgtgagtcttatcttaactccattctttgttgtactcataccactggctcttcaatgccttcatcttttctctcataccctttactgttatcgcctttgacccttgcg

SEQ ID NO: 104840 - DNA, 556 bp, Zea Mays
ggctgggcaagtgtcaacaccatccttgagaaccaagttctccgcaatagccgcctctaaggctgatggaccctcatttacttccatgggaccaggacgatccaagtcagtctcccgaccctcgagaccgcgctctaaggtcgatgaggcacgggatgacctcaatccagcgtcgagcacatcagcacaaacctccatcacaccatcatctgccggctcggataacagatcctctggaaccatatcctcaagagtctgatcaaaattcgccagggtcaattcttgcagaccaatgagagcagacaaagcaggagaaggaactccactactttcaccactagcgacgtactgccgactgttctttcgagtcagagggacctcatcctcttcctccccatcgtcttcaccagcagcacaggcaacacccccattgggatcaacaacagatggagcgcccccattgggatcagcaacagatggagcacacccattgcgatcagcagcagatggagcacactcagtggggtcggcgttagtaaattcaggcacaggcact

SEQ ID NO: 104841 - DNA, 583 bp, Zea Mays
tgttaaacttaagaaatcactgtatggattgaaacaatcaggaagaatgtggtataatcgactgagtgaatttctaagcaagaaaggctacacaaacagcgaggattgcccatgtgtctttatacagcgatccccgaattgattctgcattatatcagcatatgttgatgacttgaacatcataggaacacatgaagaaattgaagaagcaagctcatacttgaagtctgaatttgagatgaaagatttgggtaaaaccaaattctgtttaggcttgcagcttgaacattttgaaggtggcatattaatccaccaatcaacttacactcagaaagtattagaaagatttggttttgagaaggcataccctgccaaaacacctatgatcggaaggtcattacatatagaccaagacccatactgacctaaggaagaaggggaggaagttcttggagttgaatacccatacctaagtgcaattggagcgctaatgtatatagcaaatagcacgagaccagatattgcatttgccgttgttagtaccctggaaatggggtacccattactacagtatgaaggtgcg

SEQ ID NO: 104842 - DNA, 359 bp, Zea Mays
tatttggtgctgatgtcactcaccctgctgctctagatgatacttccccgtccattgcttctgtaagctctttttccgtttacaatacggatagtaccatcttattacaataacactttatgcctggtggttccttgtaggttgttgcctcccaagactggccctaggtggctaactataatgccattatacgtgcacaaggtcaccgtcaagagctcatcgatgggctggaaaacattgtcaagtacgatcatcatcaccatctctgaaattcaaatggcaccccatactcgattgagagagttccttaatttgcaaaatatttttaggggaactcctacttgcatccgtggaacggt

SEQ ID NO: 104843 - DNA, 552 bp, Zea Mays
gctgtgtcgcggtgccgctttgctcggatgtagtggagtctgggcgggttgattcatgcggattggctcgtggtttcttgcggtcggtcctcggcgcgccgtgccgaccagtaggcgagcgtcgggtgacctgtaacggtgaaaggtgtagcgtgtaggcatggcgcggtcggctgggcctggggtcgtgaggttgaagatgagcggggaccgtccattttgtgatgaacgctctagattgaaaggaagaagatggccctgtagccgttagatgggggttgacggctgggattaaagccggatacctcttcgtcatattaaatccatgccgcagaactttaatcgggcggataggattaagacaaacacgtggacgtactacgtccgtggatctctgatcctgcggccatcattgaataccgattcacttaattgttacgtctaatcctggccatgtgcatctgatcggacggctctggatgtccgatacccctttcgtccagacaattatacaaaagagaccccgcagatgttagatatcaacccgcagtc

SEQ ID NO: 104844 - DNA, 1465 bp, Zea Mays
cacatatggttcgtttcttttgtttgattcctcgttgaagcctagatacttaacagatttttcaattctccatttatcatagctgtgtcagtgatgtttaggtacacagataattattttagtaaataataagctgagaattattaaattacatgtgaaggctatactgtatatatttaaatcgctttaaatatttatgatgcattaagtttttggacttatgtcaagcgattaaattgtatagtgggtactcggacacactgatcaggctatgttattatcggctgagttatggcattagctgaatattgactgcgcccttgcaacacgacgcagtatttgtgccgttcgaacttggttgtgtcatataattgctatgtcgcactcttgcttaatcggaccactcctgttgagttgaacctccatcgccgagtcacacatgttttgcatgccctgtaggcactgtccgtatgccgtgatcatcaagtcacaattgcgcctgttgcgcacgttgcgtggacttatcgtgtaccccgattattgagccataattgtgtctgttgcgcttattacgaaggctggatgtgttgtcgtagccttgatggccgcacacgcgttgacaccaaatacactagagcttgtactcgcgtggattgtggtgggttgttcaagcccctgaagtcacatcataacgcaaccttcgtaaataattttgtttagctctatattttatttgattgtgttgtgtggcatcatatatttatttatattgccaagtggccataacaactataacaagctctatagtgcttgaataatctgggaaagtaaatgaaataatatagaacacatataggttaatttcgtgctctctttcctcatgcataaagttttacctgaagtaacctaaagatatataatgcatgaaagcctttttggcacagaagacatcacaaattgggattctattagtaagcaatatgaccttgccaaatgaataaaggctagaaatttcagtcatatattgctcaaccagttgttgacacattgctctctttgttgctgaacgacatgaagcaaattctaagataaaagggcatgtaacccctagcaacacagagattgcgagcatatgttattctgagaaaattttcactatgttggtatgaaaaaacattgtgtgttctcgtcgaaccactttattcggcctatctaggacctctatgcttgtgttgcatacatctctcagaatttaaatacttatagtagctgaattgacttgggatagtcctttgactggtatggtatatactataaaccaaatggtaaaggtcgattctgaatagacatatatctagggtttatgtagcagaactacattgtattccaccccttggcatgcttaccataatctatatctgatctaccaaaagtaaggagtacaaaaatagccatggaatctcac

SEQ ID NO: 104845 - DNA, 474 bp, Zea Mays
aacgctattattatttttctgttgtttgaattcaacagtcgttatgattgcagaagtaagtgcagtgtgatggttttgaaacttcctcctatttcgcggggcatggagatcgccctaagacgagcaatcgagaacgtgcttatgctgaatcgagtagtcgcgagcatgtcgtgctgatttaagtcactaccgacttaaaccgactgctccgttggtagggtctagtggtcaccctgagttaagtaaacgtgagcatgtcacatcgccttaattcattatcgacttaagtcgattgctccgttagtagggcatagtggtcaccctgagttaagtaagtgtgagcatgtcacaccgccttatgtcattgccgactttatccgattgctccgttaatagggcatagtggtcaccttgggttaagtaagcatgagcatgtcacacctccttaagtcattgccgacttaagccgattgc

SEQ ID NO: 104846 - DNA, 813 bp, Zea Mays
gccgcctcgaggcgcggcgaggggaggccggtcatggctacgccgaaggatgggcgcgcactgatgcggaagcggtgaggaaaaaaaaagaaggatcggtaatcctaggcctttgataccatgtaagtgaacggaattgaggaggaataattaattgtagtcattgaggggcagactgtgtacatatatagaagaggaggaagagaggcaaaaggaaacccctatgtctatggaagcacaggatcaataggatccggactcctctccctaattccctctatccatgaatactatagtcggccgacacaagattgccaggctcaggccctcccatatataacagattctctaacaggaaccaccttgcaaggcaacagttcttgcgcaatgaccaaattttgttcctcaaattggataggagtcatagagcatttactaatattagtgacgaggctggtggctgatccaaacaccctcataatttccttgatcagaacaagctcatcatgacaaggttgcaggaagagaactacatcgcggcatagagggaaacacgctgaccatgaccatgtcgtagaagaggatgcaacaaacccaaatcatttgctctattgatcaaagagtttagcgcatccatcaccaaaataaaaaaatgggagagagcgggtccccctgcctaagacctcgctgatgcacaatgaggtcccatggttctccattcacaagaaccctggtagaggaagaacgcaacaactttgatagaatactacaccaaaaaggattgaaacccaagtgctgcagcatctccaaaag

SEQ ID NO: 104847 - DNA, 387 bp, Zea Mays
gtaattccatacttagggtttatcccattgttgctgcaggagaaactatcaacacgtatgagttttgttaaactcataatggtgacttttacttgtgtgcattatgtgtgtactgcgagaagatggtttattcccagttgatgtaataagttagcactttaactctacctcgggcatgtaataataaatacttcgtgatttgtaaacttattagcttgttaatgtatattatcttattgtaaagacttccgctccactcctatttttaaagtttatgttcttgactggtcattgtaatatttgcaactttgcgtgaatggtccttggaaatgaacgagttcatcgaaactcggcacctcgagtaagttatctgatccacttacatat

SEQ ID NO: 104848 - DNA, 425 bp, Zea Mays
tacgaccataaataaagcacaggggcaaaccatcccaaatgttggcatctacctgccagagcctgtgttctcgcatggacaactttatgtggcattgtcgaggggtgtgtcaagacaaacaactagaattttggctaggccaaagaaggaattagatcccacatggaagagcaccaagattattgtgtataaagatgtcctcaactgctaacaattggtaagtccatgcaaatagcacatatgtttcctatgtttgaataatccacacgttatatttttcgatgaatatttgtgtgttcccgccaatactgataatagtactttcttggtgccagcacgtgttagctgcatcatttttacatgttatttggccttttcttgtggagctccagttgcaaagtctaattggtgctccttttctctct

SEQ ID NO: 104849 - DNA, 498 bp, Zea Mays
gcgcgttgtcttgttgaatataaattggtttgttgacatcttcacgtggccacttagctttaatagatggaagtaccttctgtatcatgaactctctaacgacatctctctttatcgaagtgatggatttcacttccattgttccagctggacgattaatactactcctttttgcacgttcaaaagtaactaaagggaagcatccaatcttcccatcgaacgtgcaaattccattctcaaatcttggacgagcggtggcacataagaacatgagcttcgggatgttgttcttactccaacaagtacgataaggctcatcctcatcgggcaacaaataatacctctcagatttttgagtaatgaagaaccacttctcatcaatgaaaacatgatcaaaaagactcttaaaccttggattgtcatgcaaagtctcatgctcaagcatgtcaacacaccactgtagcctagacttcttgttttcatcggtaagatgcggtt

SEQ ID NO: 104850 - DNA, 378 bp, Zea Mays
gtaaacccggccgccatgtgggagaacaagaacatacataagcacaagtacggttccataacacctgccatagattgccgcgcgtatggcctgccaaaatcacggaggccagaggtgctgtagtcgactaaaccatgtagagggagagagtgagtagctgtaggctgcaaagcgagaggtcgagagccttttgggcgctatgctttctttctgctttctttttattttatttagttgggaagttgaagagaaggcatgttagcggctgattcgttgtatcgccaaggtgaagtgatatgggacacgtgtgcggaggagattttttaagcgacgtggatgctgcttttggtcgcggggctgcatccgtttaatagaaat

SEQ ID NO: 104851 - DNA, 549 bp, Zea Mays
aagaaggaaccctttggttcagggaccgtttgtgtataccaaagggggaggcacgagaaatcctgctcgatgaagctcacaactcagcctactctatccacccagggaccaccaagatgtacgtagacctcaaggctagatactggtggagtgggatgaaaaaggagatagctcagtatgtggcccggtgtgacacttgccagcgaactaaggcagagcatcagaagcctgcaggtctactgcaacccctcccagtgcccaaatggaagtgggaagaaataggcatggatttcgtaatcggactgcctcagacccaaaaagggaacgattctatctgggttataatcgatcgtcttaccaaggtagcccacttcattccagtaaaaactaccttcggaggagccacccttgcccggatatatcttaaagaaatagttagactccatggcattccacggaagatagtgtcggacaggggaacgcagttcaactcaaaattctggataagtcttcagcaagctatgggcaccaagctagacttcagcaccg

SEQ ID NO: 104852 - DNA, 297 bp, Zea Mays
tgtgtggcctttatttgttcatgcatggagggaggctagcaaggacaaggagggtcatgggctcaatggctcagctaattagctctactgacgtaggaagccatctctattgtctagttcaatttggagccatatcatatattttttcattaatattagctgacatattaacttttggagataatttcatggtataatgcattgagagtagccttgtacccttgcacagaggcatatgaagttttagtgatttggttccattcaccacatgcgcattttctatcatatcaaaagctg

SEQ ID NO: 104853 - DNA, 604 bp, Zea Mays
ttagaaatggaggtagtattatatttatagcatggataagtatagtacgtttggatttttctatttatagcatggataagtatagaaagtttggatctctttgtttttgttgtaaccagcttgcagatgacttgtgtactaagtttagcttaatgtataaactaccggtgaccagggctagccctagggccatgcagcggaggcgaccgtcggggggtcaggaaagaaaggggcctaatatgtaatagaatagtagtgttaatgttaaattattgtcttgtgaaatcgcatagaagcgaaagagaggacacacacattaggctaaagcgtcggttaaaggcctcctacaccgctgcacagaaccagtctcgtcctcactgtcatcgccgatcacatgtcacaggctcgcaactccctggtaattcactattcactaattcttattctttcatattcatacatattccttaacagttcatttctttatttatctagcgtcttatatatttagttgtaaactttcaattatgataaaataattacttgcttttctgattagatcttagatgttaccaaagaagtatcttttcatgagaagcaatgg

SEQ ID NO: 104854 - DNA, 426 bp, Zea Mays
tcgcgaggccgattcgaacattcctcagatcagctgcaaagtctggatcaaacgtgtcgagagccttccaagcatccccatctgaagggtgcatgattaggtcatcgttatcacggacaccttctttgtgccatcgcatgtgcatagcagtttttttagatagaaacaactgtttcacttgaggagttagtggcaagtaatagagctgcttatgtgcaacatctgtcatcaccttgtcaccctcatcattaacaacttccacaaatcttgattgtccacatttcaaacattttttcactcccgcatgctccttcatgaaagcatacaattatttttgcacacatcaatcttttcataatccataccgagacctttgataattgtctttgaatggtacatgtctttaggcaacttattgggctttgg

SEQ ID NO: 104855 - DNA, 570 bp, Zea Mays
ggagtggcagctttttcaggcagaatctgttctatagcttcttcttccgctgccttttctccagtttccaaggatttctccttggcgggctctgaaggcccagcttcggcgtcgacctggctcattgtaccttcggcttcggtcagctttgtctcggtttcaatctgcgctttcgaagccttggcaattttccctggagtagagcttgaagcttttattgtctccagcacatctagtacactagccatcctttttctcttgggggtcgctgctagacctttctgtgtcttcgacacctccactcctgccgaagggcttagaacttctaatatgtttgccccttcgattctcgattcttcaattttgtcaatcttcggcattgcagccggctcttcaatcctctgcgtaagagcacgtcctttggcttcaatagctgaagaagtctcaccgccaaattcaagcactatggctggttcaatgtagcgtggccggtgagtaaggaccttcaactttttcctcttcggtgcgggtttgcttgaagcagccgaagcagcagccttcccagaagtt

SEQ ID NO: 104856 - DNA, 526 bp, Zea Mays
aggctaggtgtgccgggcgcgggtcgacgtggcaggtggtcggagtaccgcgcgcatgcaccgagtcaaggtgggtcgtacgtgcgcacccactattaccatttatgcatccgtttcattcgaattccgtatgcatacacgcgtaactgccacggtgagtccgctcgttccgcgcgggttatccggagtcgtggtgtcgtcccgcgtgggaattgaccgcgtttatacttgcatattatgactccaacggttacataaattgacacagcgatgcgacctggtcggtgtggtgtagtatttgggatttatgtttgtataattcgatgttaacaactgcgtatcaattgagatttattatattacgtactttggcgtgggtcttgattaattcttttttgtaaactgtttacgatactatgcacagatatttatgcttattatgaacacacagtaaccaaaccttccaactgactgtgcgctgactagtggacccacagtccctcgccgctcccccgcgggccgaccg

SEQ ID NO: 104857 - DNA, 481 bp, Zea Mays
gcgacaacggaagatgagcgctgtcatccttatcgccattggtaaatttcgtttgagaaacaacatgcaggttgccggcgaattcagagttacagacgcaaaaaactcaagacgaacgctaacagaggctggaattttggtgctgccgaagtggctgcttttctggtgtattcatttgcttaaatagagacaacagtatggaaactaaagatagaccatagtataggtagatcatacaatgattagctacctaaacttggctaaacatgttggaactcactaacgctcaagaacagaagcgtcacctcctctttcttcagcttagggtagtgccatgcgaagaggccccagttgccgcagttgatgcacttccccttccccatcgacgactttttcttctgtcaagccttccactcgaggtgagaaggagctggttgtcgcgccgttcgcagccgacacgagcgcgtcaccgggacacggg

SEQ ID NO: 104858 - DNA, 307 bp, Zea Mays
cactgtgctcaccatcccttatacaagaagcttccccagcacgccgaggatacgcagatctcggatgtcagggcgcgagaagattgcactagtggcgaatatctgtagctccaagagctatatccgttatgtccctgggcccatatgtcggggctcagtaccattgcgcatgccccccttcaactataaaaggggaggcatgcaacgttacaaggacagggctcacttaggcccaagtgactctagacaacgcaagctctcaggcaatacatcacacagtggagtacggtattacgctctggcggcc

SEQ ID NO: 104859 - DNA, 313 bp, Zea Mays
ctttgtcttcggaagccttagtaggagtaggagtagccatcttcgaaggtctcagaacagtgtctagaacattggccatcctcctccctttgcttggagtcgccgctggaacggttattgtccgtgtcaacccagacattattgggcgactccgcagcttcggctgctattcagactttgaactctatggttctgatttctcagctgaatggtgggaacttcgctgctgcagtgggtattacctccgaagttgggaggatatctttggtagattcaacagcctcatctttgagaccctagcatcatgcagtat

SEQ ID NO: 104860 - DNA, 519 bp, Zea Mays
gtactaagaagatcgaaatccaatagagctagacgggtagagcggctgcagatgcgatcagagcctgtcgggatgtatgagaagtcatcactttatgacatcaggggattgacagactttcatacatgcatcatcacctcgcatcgaagatcaactaacaagaacaaatatccgacaagagaacggctacgaaaaccaactcacaaaagagactatgccaacgataaaaccgggtcagttggaagaacacgaggaatgaatctaagagaagaaaagaaataacaagtggctcagaacttcttagagggtttgtgcaaccaacaccggcgtccgagggatgcctccggcacacggatttctttcctcatcgccatcaaactgctcaaaacgatatagtaatcgacaaacagaaacaaagaaaaaatggagaaaacatgaaggcgaaagaaccatcggacacagagagctagcaacggcggcgatgggaaatctttcgctgtgctctgttttatagacgca

SEQ ID NO: 104861 - DNA, 731 bp, Zea Mays
gtgaacaccaaagtgaccggccggagcggagagataccaacagggggtccagacaaaatcgatggcaccactggagcgtgaagcggaggaggcggagcagactgaaccagaggtgctgagataccagaatgctgaagcatgagagccatgaatgccctattctctgcccgatcctgaagtaactgctgctgaagagcatcctgcctgtcctgcatgctctgaaacatcgagagcatcgtctcggataaccgagtctgctcggctgccaggttggccagaatagtcgcaagagcagggtccatagccggaggaggagcaggggcagcacgagaactcccagcctcatgatcatgtgagcgtggaggcataggaggcggaggcggaagaggaaccccaaaatcatcatcatcatcatcatcatcatcagctgttgtaccctgagtgtcaaactgacgaagagctgtatcctcggcctgagagtcaaacacagaagcagaagctggcactggaatctcaggagcaggacggtaagatccaaaaacaaggcgtgaggcctcaagggtgctctgaaatcgaggtggctgaatcagctgcgcaaagatgtggcacaagtagtgagcataaggtaactgccgacgagcacgaatcccatccagaacagtgtcctcgatctcacagatcaggaagtccacaacatcaaactcagagtgggataccagggcaccaaggag

SEQ ID NO: 104862 - DNA, 655 bp, Zea Mays
ccgtctgtgtgtaccaaagggagaggcatgagaaatcctactagatgaagcccacaactcaacgtattctatccatccagggtctaccaagatgtacctagacctcaagactagatactagtggagaggaatgaaaaaggagatagctcagtatgtggcccggtgtgatacttgtcgacgaactaaggcagaacatcagaggcccacaggcctactgcaacccctctcagtgccgaaatggaagtgggaagaaataggcatggacttcataatcggactgccccagacccaaaaaggaaacaattctatctgggttataatttaccgtcttaccaaggtagcccacttcataccagtaaagactaccttcggaggagccaccctcgcccagatgtatctcaaagaaatagtctgacttcatggaattccacggagaatagtgtctaatagaggaacacaattcacctcaaagtttcagcaccgcctaccacccccagtcagatggacaaacataaagagtaaataaagtcctcaaagacttgttgagagcctgtgtgctgaccttcgatagagattgggagtctagtttgtcgtatgcggaattctcgtataacaacagttaccaggccagcagcaagatgtcaccttttgaagc

SEQ ID NO: 104863 - DNA, 1343 bp, Zea Mays
ggttgcaaaatggttatgaagttaggctataataatctgtctacacgtaacttcatttcttctccattgaacatctcgtgtgcttcggtttgtagaaaatttcatttcatttcacttgaacttggctttctttcgttaacctctgaaactatccacaagacggtagctctaaaggtttatggtagtctgcttcagcaataagcttactcttgtcttaggatgacaaatgtttatagtaagatcagatccttcgctgtatccaaacattctaataattttgggttctttgaaagggagctggagtctttgctgaaaatgtttggttgcagattacgactttgcacacttaaatgttgtgttccctctcccacaactttcccgtttgggtgctttccagaaaaaaaaactgttgccattttgtttggaagtatcagtttgcacgcattgtttggatgtgaagtatcttaatggttttgactggggtttttcagcaagtcacaccttggaatatctttcacagccgtgcttttttagaaagggagaaaaagaaaaaaaaaatcagttacgggtgagctcgtggtcatgccgtgcgctcgtatttctaagccgagccatttgcatgaatgaggtgctaggctttcctgtgataccaaaatgaagcgtcggtctgcaataaatcggtaagctgtgggtcatatttttaccaggcgagcaactgcccccgttgctacagaagttaagctgtgtaaaataaaaaggtgaaataaattgattgagtctgttgcccttgtcgagttaattaatgagaaacaggtacctgcagtacatctacggtggggatgtcatgtgtcagtcgatcacctctgactggagcataagaaggttctgtgagatcttgtcctctgacactgtctggtacgtacacccttttctcacgcattgtgcacaggtgtatctttaaaaattgccggtggagtcaaaagaaaataggagcatgcagtgcactgtattttatttggatttgaagcccctgcatgtttggcagcagttatctgttcctcagctcctgtaacctgaggcgcatctcggagtccgaattattatttttaatcatcacctacgttagaaatgaatctgtttgatgttgcctaggcgcagtggacagagaggtaaggttctttttgggaccatatatatgactaagctggtctccccaaatcattcccggcaaaatcatggaccttagcgaggaaccggaagctgcttggttttctttctttctttcttttatgtatatgtttgtattctgtatagattattaatccgctcaaagcggcaaaccg

SEQ ID NO: 104864 - DNA, 639 bp, Zea Mays
ctgagacgagctagccacggcgaggcctctttcacggtggcggaaagcaggtttgggggcaatctagaatttgcgagctctggtgaacaattgggggcacgacttggtgcttgactaccctacggacccgtcggtgtgctcaatttatagtgtgcttgagtggtggtgcttaatttggacgaattgcgctggagaccgagaggggaatgagtcatggcggcgatctactgtggtaatcgcagggcgactgaactacagtggtcattggatggtcactacggctcataccgacgcaataaacttcctaaggcgtggcgtcctcacggtgaatggcaaacacgccggtgattgccgcacggccacgtcgccggtgtgtactgatgaaccatcaagcacacagtacattctagcccatccgcaactagatctttcaccccgtgatcgttatcctcgtttaattcagcgtgaatcacgacaatagcacaaatccgcgcgcgtggtcgctggcggcgaggtctctgagctggcgatccaatccggttactgtaccatcgcgaagcatcatcagttggcctgatagagcatgcttgggatcgattttgctctataatttatgtgatgactcaaccaatactctgc

SEQ ID NO: 104865 - DNA, 1114 bp, Zea Mays
atagtgtgctttgcttgccctgtccctttttgacgacatgcatgacactctccatgcatggcaggctggcttttttgcaaatgatgcagccccttgtgatgtgggtcaaatgtaaagcacacacacccacggttagttacctccttttgttatatctatctcttctggctcgacaccaatatcacatgtgggagcatcttacaccaggagacactatgtaaaaaacaaagtctaactcttggtgtcgatctgcgtgccaatcactgtgatttgtatcggtaggccacccaaagacgtctccagacgacgtagagttgaagagaggtgaagattgacgtgaacaaaaatatgttactgtctactactagggcaaaatgtaaataacggaaaatatattgatttggttgggtcgttgggtgtttcaattggtcgtaacccttcaaatatataatgagagatatgaatccgttctccgatgtcctccaacaacactctcacaattctagagggataaactcgcaagaaaatacgaattaatccacccgatctgatataattgtggactgtccacgacacggaccattcggccgtgaccagttccataaaagcttctcaaccctaacaattagctattctctaaaattaataggtaacccaaaacaaaaactagagcactgtagtcgagccgcctggtccgcgagtacgtagtaggtctcatcgatcacgcccagtgataaacacattatgcgatcgctttctatgccgaacgaaattacaaaacaatttacctagtccctgggaaatgcagtgcggcgggggatcggcccgtcccagtttgcgcaaggccgtggaaagggaagctagggaggaccggaggagtattctgtgagacgctggtcgccaaaaggggtgtgcagacaccttgatttgttcgttaactttagtcgaccttcttttttgttttccgcgtggaaagatgcagagtagcgcctcacgctgccaacatatgacaaacatatcctggactggacggcggtgtagtcgtctatctcctcgagtcttgtctactactcaccccgtcgttggcccgttcctttctattcttcggtcttcg

SEQ ID NO: 104866 - DNA, 295 bp, Zea Mays
ctggattaaattaaaactaaaaatgcctatttgtccaacacgaccggtgtcctaaaacttggtaaggttgttcccgtttagttcgatatgttcgccccatggtgtagcattttgtcgcattctgtttagttgaccagagagtctggacgtcttgcttcggcgatggtgccaccgtggcagccccatgtcatcgcctagatactatcaggaagatagaatatggccacacctagatcccatatattatgtctatttaccccataattctttatgtgaccccgatctaactaatcag

SEQ ID NO: 104867 - DNA, 586 bp, Zea Mays
aagttagttatgggttcctaagtttcctttccatattgttttagtggttttttcttcttttctgcttctttcttcgtgttttttgttttagggtgtggtcgtcccctaggagcatgctaattgtattttactttctcttctaatatattttttggcagctctctttccattcatttcaaaaaagatggatacataataagacacaaatttatttccaaactatgctaggcgaaagagttctggttacaatgaaggttcggagcaaacgccttcagtgcatggtagagaatatgccgccctaattaatatttgaacctgacaaatggtcgtcctagcaaatgttgactttcctttatggttctacaagtttaaatgtcaaaaaggtcacacaaacgtatccaaagctgcaccttcttccaatcttactacatcaccttcacataatcagatttcgatttggataccttttaatcaccgtgacaaccatacggatttaaactactgaacttccaggcttctagcatgaaaatgctaggctctagaaacgacatgaaatttcaacacaacaaaggagcagatctgattc

SEQ ID NO: 104868 - DNA, 383 bp, Zea Mays
gtcagttgttctgatgaacaatcccgatggtacagtgcacccaaatatctcagatacagagcatctcgccgtcggtgacccttcgccgcgattgacgttgatcgtcgcgattcatgcgccgtgacttgcggataaccgtggacaaggaaagatctcaactcgggaaagggatagaggcttatcgccggactgttcactgtaacacttaccgtgcagtggacagaggtgtcctcgtcggagttcgccgtcgatcgtagccacgccacgtgcttagaagatctaccacatcgcagtagatatccgtaggaggtcagttcgtcaccggagacattaccccgcggagcgccacgatagttcacgccggtgactcacttcacctctcg

SEQ ID NO: 104869 - DNA, 299 bp, Zea Mays
agtggccataccctgtaggctatgtgctcctgaactaggtctcttgtgccaatgaaggcacaaacattattgaaagcattttggcatgcttcggtatcattcccaagcgcagtagccggtcttcagaggccaaaacgagaccagatggggcgttggataatcccttttatgtcttccctttcaatcaggttattctttacataaaaccattcctccatccaggccccaggctaccttttccgaaatgttggaactgggtaacttacatcagaacgaggaacgaagccataacaaccgaa

SEQ ID NO: 104870 - DNA, 696 bp, Zea Mays
aaaaaaaggaaacactagaattttaaatcatctatgcatttaatttctaccgttacagtgtatactatattgcaatatatttggatcatgtattttacgttattcatgcatcttatatcaaatttagatggttttgagttccttcgggcaatggactcagattcggcaggtgaccatattaattaaagttaaacatcacttgctttatattttttttaccgtcaacaacgcagaggaagagtatccccacataaaatccaaaatccattgaattcggcatgactgatattgagtatcgtacttaggggtacctatattacgcctctaatacatgtttaacctctagaccatcatcaaggcacattctccgaggatgaaggatcataagccgcgcttcacccgaggcccctcttaggggtcaccataactccggctcgcacgagcctaccctcggacagggcgtgttctcgggaaaatcatcgtcctagctaggccccttctcccgagaacgacagtcttcgcctcgctcgatcccgtctcaggtaaggaagacaaacccaggacaagactcagccgaagtccgcaggggagagaagcattcaatgcacatacctaccccacacaggattgcaggtgaactggagtaacaagactgcggtcctgtcaagcttcaacaacaatgatgacgcgtgcgac

SEQ ID NO: 104871 - DNA, 582 bp, Zea Mays
atgttttatttcttgtggggtcatggcctccgatccatatagcagacaaaaaggagtgaatccagttgcccgacattcagtcgtgtttagtgcctagattacttcaggtagctggtcggcccatttacccttcctgtcgtcgagaagccttttcttgatggcagtgaaaatcttgccgttggcgcgctcgatgacgccgttagattgtgggtggtataccgaggcgaaggcaagcttagtgccgatggagaagcagaagtccctaaagtcctggttgtcaaactgtttgccattgtcgactatgagctcggacgggactccgaatcggcaaacaatgttttgccagaagaacttctgggcagtcttcgacgttatcgtggatattgcccttgcctcgatccacttggtaaaatattcgatggcgacaaaggtgaacttgaggttcccttgagccgtgggtagtggcccgacaatatctagcctccaccgttgaagtggccatgtgtgggcaatcagcttggtgaactgcgaagggttgcccgagcggggagaaaacttatggcaggctttgcacgaccttgt

SEQ ID NO: 104872 - DNA, 1038 bp, Zea Mays
caagctctcaacaaatcctcgaggactttgttgactctttctgtttgtccgtctgactgggggtggtaggcggtgctgaagtctagcttggtgcccatagcttgctgaagactcatccaaaattttgaggtgaactgtgttcccctgtctaacactatctttcatggaatgccatggagtctgactatttctttgagatatatccagtcaagggtggctcctccgaaggtagtttttactggaatgaagtagctaccttggtaagacgatcgattatgacccagatagaatcgttcccttactgggtctgaggcagtccgattacgaaatccatgcctatttcttcccacttccatttgggcactgggaggggttgcagtaggcctgcaggcctctgatgctctgccttagttcgctagaaagtataacatcgggccacatactgagctatctcttttttcattcctctccaccagtatctggtcttgaggtctaggtacatcttggtggtccctgggtggatagagtaggctgagttgtgggcttcgtcaagcaggattcctcatgcctctcccttcggcacacacagccggtccctgaaccaaaggccccttcttcatctatcctgaggtccggaaattgttccttgcgagttttttctgcaagtcctgctgtttcggtgtccaagcgctgagctttgtgtatgagatcttctagcatcggtttaacttctatgttgccactatctcctaaacaagcattcagctgagctgattctctcttccagtcttccaaaaagttggttgctttctccctgaaaggtttctggctgagggcgtctgctactacattggcctttctggggtggtagtggatctcaatgtcataatccttaatcaattccagccatcttcgctgatggagattgagatctagttgggtgaaaatgtactttaggctcttgtgatctgtgaaaatatgacatttgtttccaatcaggtagtgtctccatatcttcagggtatgcactatggctgc

SEQ ID NO: 104873 - DNA, 386 bp, Zea Mays
ggaaagtgaaagaaggcaaccagaaattagcgcgccccatttccttaatcagtattgttgtgttgggcaagccaaaccagcaattagatttgggcgcctaccatcattgtttttggcaagcaggccactatccattacacacctcctcctactttccttgttcatggatttgggtgcgcccatttccttgtaaagcatttcttgtttttggcaagcaacacctccatatttggtgcgcccaagctttccaattcaggctattcgattttggaaagcaaaccttgtcaactcgttcacggatttggtgtgcccaggcattttgggaagctatcttgggcgccactttttccagccggggttctagtacgccttctccaccttttccg

SEQ ID NO: 104874 - DNA, 544 bp, Zea Mays
agaattctttgacttctgcgagcaaaagagcattcagatcaagtacgcatccgtagcacatccaagagccaacgggcaggttgagcgagccaacggaatgatattggaggcactcaggaaaagggtcttcgataagaatgaaaaattcgcaggaaagtggataagggaattgccttatgttgtttgtagcctgagaacccaacctagccgagccctgcatggaaacactcctttcttcatggtctatggatcggaggcagtgctacctgctgatctcaagtttggggcgccaagattgatcttcgaaagcatagcagaagccgaggccaccaggctggaggatgttgatgtacttgaggaagaacgactgaatgcagtaatccaatcagcacggtaccagcagactctaaggcgctatcacgacaaggctgtgcggcaacggttcttttcgataggagacctcgtcctccgccgaattctaacgggagagggacggcacaagttatcacccttatgggaagggcctttcatagtagcagaagtc

SEQ ID NO: 104875 - DNA, 292 bp, Zea Mays
atgggaggacatttgcatggactttatcgtaggattgcctactacctccaggcaccatgattcaatttgggttattgtggaccgattgactaagaccgctcatttcttgccagtacataccacccacaggacggagaagtatgcggaaatctacattgaccagatagttcgtttgcatgggataccaaggactatagtgtcagacagaggagcaccatttgtggcacgattttgggaacagttgcaagaatcacttgggatccatgtcatacgaagctcagcataccatccc

SEQ ID NO: 104876 - DNA, 469 bp, Zea Mays
gtccaacacacttgttttggcaaatcgagagatctttcaagagtaaatttgatcaaatgcaaaaactcccccttttcccataatcaaaattctcccccataagaaaacaatttttgcaataagagggttttgatcaaacacaaagattctaactctacaatttttgaaattcacaagtggttggctgatccatttgctttggcattaatttctccccctttgtcattaagcaccaaaacaagagaactattggcccggtaacctcattgcctcaccaaaatgtcaaataagcacaaaaaggcaatgagagcacaaagaacttaggacaagatacattgataccggaatgcagtggaagccctttctttgtccaagttcacttttccctttcaatgcaactttgagactatataatgagtactcaacaaacaagttagtctcacgggagtcaagttgtagcacatcctcc

SEQ ID NO: 104877 - DNA, 453 bp, Zea Mays
ggaagaactatttcgctcagcgctgccgctctcttcgctgctcgctaagacgctgtccgtaaccaccactgcgccactctccgccggtctgagctccatcgcttggccgctgcaggtagcttcatctcttggccgctgtaggttgctgcaggttaatggtacacagttatacaatttatacaatttgtagcattcttttattgctgcaggttattgaattcatctaactacatttatacaatttgtagcattcttttgttgcgctgttaatggtacacagttgaactgaatagtattcttttgttgcattcttttaagggcgattgagtaaacgttaatgtcgactccgggcactagtggaactgctggtgaatctcaagatgtagctgctgctgcatctagaacagttgaagcatctcaagtggaagcaacagcagtcgcagtggcttctcg

SEQ ID NO: 104878 - DNA, 328 bp, Zea Mays
cgcaaaccctatcaaggccatgtttctttccataaatccttgcccctaaaacttcatagcatttctgttgatcatcctaggtgatcctgtttgcctacctctccttttgtctagatttggtaatccttttttcttgtgaatcatgttggctctatcatccgaatctcgggattccctattgatcctgccctattatctagatatctgctataacccattctcaagtatcagatgttgatcttgcctaaatctctcatttctggtcattctcatacccccttctctaaggatcatgacgatgttttatcgattttatctctaagcagtg

SEQ ID NO: 104879 - DNA, 588 bp, Zea Mays
tgaaaccaagaaaaagaatctcacaggtcattttattctactatttagcccccatagtgtgggaagtgtatatgctgggttcgtgttgcagtttttcgatacattttttgttggtataaccctataatttggccatactgcacaaaaccatgccattttttacctaatgacatgtaacatcttttgagccttaattgtattgccagatttttaaacaaaacaggagacacccccccaattgattatatatagcaattgacatgtaatatctttctagccatagataccttgtcattttttaaaaatgtaacaggagggacacacttgcactgaaaagattaagtgtattttactcctgataggtctggtgtaatcaactttatagcatcaacttatctgttgcatgccaaccttgatggctatttggtattctaaatagtcaacgattttacaaaatctgcataccgttagggaccttcttcgatgaaaaaacccatggcggtaaagaacttgctatccaactttgcaacagtttaacagaaaagatatcggtcaaagaaatacaaaacatacttgtcctcttgcaat

SEQ ID NO: 104880 - DNA, 428 bp, Zea Mays
ccgagaaggatgatgcttcagttgctcgaattgagcccatgccgaagaggaaaaaggtgaaggtccttactcaccgaccgtgctacattgaaccggccacagtgcctgaatatggcggtgagacctcttcggctgctgaagtcaaagaaactacgcctatgcagaagactgaagagccgactgcaacgccaaagacaccattggccaaattgggcgagccgaaggttgataatgttaaagaaacagaggtcgagagaacaaagatattagaagttataagtccttcggtagaagtgacagtgtcgaaggcacaaaaagatcttacagttacccccaagaggaaaaggatggtccacgtactagatgtactggaggaaataaagacctcaagctctactccagggaaaacagccgaagcttcaaaaaca

SEQ ID NO: 104881 - DNA, 414 bp, Zea Mays
gtcaacttgaagctcgagagctacacccaatgggtgcacctacagtgcatgccattgaagtcacttctatatatggtcttttttggaccttcaagttgattgtttctcaagtcaacttgaagctcgggggcttgtcagggatggataacccctggctcctcatggagcatattctcgacctagggtgcacttgacgcacaagataaggaatctaatgaaatctaaaccgactaggagatatatagggaaacctacttgtaagttgtaacacaagccacgccgaattatataaggcgagctagggatccctcccaaggcagatcttgagaggatctaatcttatgcatgccccccgctcactcatcaaacatccaaaccctagccctcattgtaacctccagatatcaaagcaat

SEQ ID NO: 104882 - DNA, 455 bp, Zea Mays
attacagttacatacactcggcaagggcatcatatattacatcggctcaaccttcgggatgatacccatctccctgtaattgaacaacattatcctcaattcctcacccacaaaaagatttcgcagatccccttcacctatgctcgccctaatcggcgaggacaacaattcttgtttaccaatccggtccactcgaagacggccacgctccatccccatacgacggcgcctaccacttcgcgaaaattcacccacactgtgtttcgccaccacccttcgtcgcctatacccagtactcgcactaggaagatccccagaaccctccacacgcggcgaagtctccgctgtagctacatctaacgcagcaaaataatccaagccttcatccgaggactcctccgtccaagaaaacgaactcccagattcaccatcagactcaaaacactcagacacag

SEQ ID NO: 104883 - DNA, 809 bp, Zea Mays
cagcctcagaacaaccagacacctcgccttcctgccctagcaaccaaccaaaacaattaggcagcgccagcgcaaggaggatatcgtggatgtttccgcatggggggaacaaggtcactgggcggatcatttcccaaagaaggcaactcaacagccaccagctttcaacacctcagcaagacaaggagcaccacagcaagcaccaggaggtcgtggccaggcctacaattatggaaaggtgaaccacttggaggccgaagcaatccatggtgcaccagatgtggcagtaagtatgcttccagtcgaatcctatctagcaaaagtactatttgatactagtgccacacattcttttgtttctacatcatgggtagaagcacataacatccttgtagaaccaatgattccacctttaagagttaattcagttgggggaaaggttcagtctgataagatgtgtccgaatctaaggattgaaataagggggatagacttccctgctaacctagtagtaatgggtactcaaggtttagatgtcatcctagggatgaattggctgcacagaaaccaagccactaccagttgtgacaagaggacagtaaagttagtgtccccatccgggaaggaagtagtaactgaactgttcatgcctgaattagaagcaggagtctgtcaccatttgtctgtagatggcaaggaggccaacctgattgaggagattagaattgtgtcagatttccccgacgtgttcactgaggaattaccaggcatgccacccgagcgtaaagttgagtttgccatagagctta

SEQ ID NO: 104884 - DNA, 668 bp, Zea Mays
ggaaaagacttcgattttgcgcacttattgtgctagtccggctgcacccttaggcgacttctacacggaaagtcttttggaaaagacttcgattttgcgcacttattgtgcttgtccggctgcacccttaggccacttttgcgtggagtgtcgcacgcgagggtagtcagcgctacccctcgcggtgacttgggtgtggtcgaatgccgaagaccgtcgatgcggtcttttttgacatattgtcttagtttttctgggggatttttgcaggtatattacatggctccacctcattaaaaacctcaccccccgggaggaaaagagtgcgggctggaatgatactgtttggtgaattacaagggcgtgttggccctgaggattcaaacaaaaaatttgcggagattatcgatattccaggaatgctctaggtcctcgccggatggcgttgttagcctgtatgcgctaggggacgccttcgtcttgacgatgaaaggaccctcccactttggcttcagcttgccttgtgactctgtccgagctgtccggacgagtacgaggtccccttcgtcgaattctcttgggacgactgcgtggtcgcgccaggcctccgtttgagcttggtatttgttgagagcctacagggcgaagacacggtctctgtcgatgag

SEQ ID NO: 104885 - DNA, 487 bp, Zea Mays
ctcgggggctgggtaagtgtcaacaccatccttgagggccaagttctctgcagcagccacctctaaggctgaaggtccctcagtcacttccgtgagagcaggacaatccaagtcagtttcctgaccctcaagaccgcgctccaaggtcgatgaggcgcgggacgctgcccgggatgaccccaacccggcgtcgaacacatcagcacaaacatccatcgtgtcaccatccgctggttctgataacagatcctctggaaccatatcttcaagagtttgatcaaagttcgccagagacaattcttgtagaccaatgagggcagacagagcaggagaagaaactccactactttccccactggctacgtagcgccgactgttcttccgagtcagagggatctcatcttcttcctcctcattttcatcagcaacacagacagcacacccattggggtcagcgtcagatggatcacacccattggggtcagca

SEQ ID NO: 104886 - DNA, 643 bp, Zea Mays
aggcactgggtgtggagatgcaacaccagtataccatggagtcgcagaagtcttcgggtgttgatcagcctcgtggccaggacgcgaggaggggcaacactggaggtccagcccataagaggggcaagtctcagcatcagggccaccatacctatcgtggcaaatcctctaacttgggtacttcgggaggaagtactcaaaggtttcgggctgttcctaagcccgggctggggctggtgtgtttccgttgtggtgatgcgcatcgccatgcagagtgccagtggaacggcaggcgttcaatatgcagttaagaccacaaggatgtggtgtgtaggaggaatcccaatgggaagctcagatgggagccagtgacttcctcctcttcccagggcactgtcaacatgatgtcaagcgctgagcagcaattttcagttccacctcctccgcaatagttttatgtgcctgggacttctcagttcgtgccggtgcagggttttcctcagtatctagctacgcctactcctgcacagactacccctatgtcatctcagttgggagctccgcgtctgcctcacccggcggctcagtggggttcttctgttaatttcactccaagagcttcctcttctgcgggtatttccgg

SEQ ID NO: 104887 - DNA, 374 bp, Zea Mays
caatgtcgtcatagtttacatacacacagcgaagggccaccggccacattgcacaaataatacaaatcgcattttgttgccctccctctctattgcgagccgggggagggcagcgttttcgctcaccaccgcaacacataagcgagggcagcaaacatgctacatcagctcagccttcgggataaggtctgcctcacaaaaattaaacaacatcatcctcaactcctcaccttcaaaaagattccacagatccccctccccaatacacgtcccagaagtcgaggtcagcaaatctcgttggccacccctttctacccgaagacgggttcgttccatccccatccgtcgacgcctaccacttcgcgacatctcgc

SEQ ID NO: 104888 - DNA, 518 bp, Zea Mays
ctgaattatgaccaccagttaaagtggaagaactttgagatcaaattgtggggaattgagtgattgtctaagtaagatctttgtaacaaaattgtagttggtaccttggaagacaaaattgatgcaggcaggtgagtgagttgttacatgaaaaatagagatcaaagcgctccaaatcattctgtcagagcgtctgatgaagatcaccatggtacaatgaacagaaaaatatctggtgccgtgaacttgacgccggtgatctacaaccgcaattcgtgcccgcctgggagattcgtgccacaagagaggtagataacgttggggcggggtgacaatatctggggagaggttaatccagtcactggcaggaccggccgtcgtgtctcgccgcggtcagtcgcactggcatcaccggagctcactgttgtctgaccgtgacacgtaatgatcactcctccgtgtcgtaagggtcgtggcaagcagccggttatagtccgtagagcagttccccctagcgc

SEQ ID NO: 104889 - DNA, 490 bp, Zea Mays
atttcatccaatagctgcttcccagtagtcgaggaaatgcacttcatgaggactccagtcgcaccccttctgtatagtgtgccccttatgagggtgtagtgtgccgattgtcttgtgatgcattctgtcgcagccttatcatctggttcttcttcattctttatgtacctgatgataggctctctccagtcattggggtccaactctggctgattcaaggtgttgcattcttctgcctcatttgagagaatactcgggcgtgacacttcttggacgaagatctcgggtgggacctgggcccgactggattccagcttcgacaacgcgtctgctgctgcattgcggtctctttccatgtggtggaattctaacccttcaaatttgtcttctaattttcagacagctgcatagtacttgcccatagaattagtcgagcaatcccaatctttatttatctggcttatgaccactagtgaatctccgtatacca

SEQ ID NO: 104890 - DNA, 639 bp, Zea Mays
ggaatctagaggccagggtggaacgacttatgtcgaaactacaccacgggagtagggagcgtgcaagagatagccgccgcattgctgaactgtcatcggagattaatcgcttgcagcaggaaattgcagaacgtgatatggccattgactgggctgtaaattcatgctctttcgcctgggattgtgaggccaaggctctagcgcgggtagcggaactaagcgcatccctagaaaaatctgcaagtgtattgtaacaccctgcatgaagaggtgcacgtgttatatgaccagctgcatccaaatgtgccaccagaagctgcagcaatgggagccagaccatctcgagcagctaatggaggacctgatggggagttggacctttttggagcccctccttccatgaacctcacagatgaatgttctcccgaggctggcagtggagcggccaaggacgaagataactagagtagtatagtttaagtagtgtccttatgtaaagtaaataaggaagttgagttgtactaatgagtatgtataattattaccagtttagcacaatgtaataaagatggtgtatgtttggcatgtaataattcaggatgtttttcttcctcagatgccatcaagaactcgtgctca

SEQ ID NO: 104891 - DNA, 488 bp, Zea Mays
ggaggatcctcgtaaagaccataaagcagcagcgaagcatttgctcaggtatattgcaggcaattgtgaccttggactctcatattctcatagaaagatgacagaagagttgaagctgattggatttaatgacagtgacatagggggcgatgtcgatcgtaggaagagcacctttggcatggtcttcttgctaggttcttgccccatctcttggcagtcgcagaagtagcagattgtagctccacttgtgaggccgagtacattgctggagcagttgcagcctgtcaaagagtctgactgggacggttgctgagtgagatcactggacaggtagtgccgccactggttctcaggatcgacaacaagtcggccattgaattggccaaaaatcccgtccttcacagccgcaacaagcacataaatatcaagtttcacctcatcagggactgcgtggaaaagggtcaggtcatcctggagcaaattggaac

SEQ ID NO: 104892 - DNA, 664 bp, Zea Mays
ctaacaggtgggccatatgggtccacacccacaaacgtgtatccacttggtggagtccaacactcttcgtcttgtggcctttgagtgggcttcctgagaagggttgccttgcgaagacttgttaagggagggaggagacctctcgcgcttggtaatgactggtggcgcctcgtccttcgtttgatgctcctaggccctcgatgcgtcctaccccccttgccttcatcgatcgtgtggtccctcgtcgatgtgttgctccgatccctatgcaatcaaatagcctttgcagtttttaggagggatcgaggtcaagatcattctctgtcccaatagtagcccccaaggtagtggttcaacttggtgagctggtcccaaagtccttttgaaatgatgatcgaacgctgccctcgatcacaagttgagatgatccccaagaggtttgaaaaatgattgttgtgttgcgattgatgtgaccggtgtcgtggtttgttgtgcgatgttttcaaatttcgaagcttcgggtggctataaatcatcgtccacgtgtggctagggttacttttctgctcaccaccttttgactccacacgtgggcattgcttttgcacctgctctcgatcgtcgatagtcgctcacgccgtcgctagtgctggctcgtatgaag

SEQ ID NO: 104893 - DNA, 390 bp, Zea Mays
caaagctcattcagaccgccagcaccaagagatagaggaggacgtagcttcggagggagattcaactctcaaccaagaagactatttgcttattctgcggagaggataaggggcacacaacaagaacctgccaagttacaatagaaaaatataaggagatagctgaggccgaagcacggcagaaccaaccgaagcaagttctacatactgcttcatgctactccccatacatcctagattatgtaggtaaccagcagccattctcgcaacctacagtctcagtagcttcggcaagtcactctccagctgtgtgggtctttccacaaccacctatagtggccctaacttcatcccacaatcagcagccgcatgggcagtgccaagttcaag

SEQ ID NO: 104894 - DNA, 376 bp, Zea Mays
gcacctgcacctccagtgaagaagggtggtcaacgcacaaagctagcaaacttcacgtctgaggaggacatgagggtttgtcatgcttggcttgttgtgagtcgtgacccccatagttaacataggtcagaagcgtcaaggtttttggaattgaattacagaggcgtacaactctagaagaggatcaatgctagaaaggtctacaaaatctctgatgagtatgtgggatagtatcaaaactcagtgctctatctttgctggttacatgatggttgtgcttcgacaaaactccaatggccttactgatgcagacaaggtatgtgtctatacttacctctgtgttctttaatctacttagctaataatgtatttttgt

SEQ ID NO: 104895 - DNA, 294 bp, Zea Mays
aatttttcgtcaggacaacaagggcattttatggtttgaagaccgattggttgttctcaagaatctagaactcagaaagaaaattttggacgaggctcatctctccaaattttccatgcatcccggaagcaacaaaatgtatcatgacctcagatccttgtactggtggaccaggatgaaaagagaaattgctaagtacatatctaagtgcgacacttgccaaagaatcaaagccagtcatttgaaggtagcaggtaccttgcagcctctccccataccatcttggaagtggga

SEQ ID NO: 104896 - DNA, 755 bp, Zea Mays
gtccacctcctcaggaaatttcgcaaatacatgcccaggacttggcacacccatcacacggacgtgtaatactaagcagttttgacgaagtcaggcaaccttcgcaaaatgacgctttccaagctttcaatttcatcgatagtaggtgtccgctctacgctaggctataggcaacaccctggccaagcaattacaaggtcgaaaactagcccaagtacaatgggaaggccaacctgtcgcagttcatcatgagataccaagttgtagtggccttatccagcggagacaacaatgagctatcattgtgcagacatcggcctttgcgattactataacatgttcatgtcgctcatgtcccagttgccatcagtagaggatggaatcgccattcattatgccatcagtggcctatgtgttagccacttatatagtcacttcatctaggacccaccaacaacaccccaagagttataccaataccgcaaggttgaggcacaacgcaagccaaagaatccttctcatccgaggagcctcaaaacatgggtgcaaatgcaacaaccttctccgtataccacaaatccacaatgttcaacaacaaaaacaacctaaatacacccatcatagttacgaccaaagttaccagctcgcaagaggcggtagaactccaaggggaaggggcgtggacaaggtccacctcgcgaatacaagtcttactgtatattccacaaaagctctagtcactcaaccaaaggctg

SEQ ID NO: 104897 - DNA, 312 bp, Zea Mays
gttggatcgatcgccaacggctaggattagtggatcgcctaccccttcgtagcttacgatctgggccatccaatctcgatccaacgaccgtgagtgtgtacccctttagatttatgatgatataatcatggccgtcggttcagatctagcggctgagactccaagataccccttcggcctcaacaattcgctaaagagaccctgtgttttactaaaatcaacccgccgtcccatactgttgtgcgctgtgtcttaaggtttcttgcgctgagccccctggatttccatttattagtgtgcgcggaccagaga

SEQ ID NO: 104898 - DNA, 337 bp, Zea Mays
cactggtgctgttgtcaaatgttgccttagtgtatgaaaggcatcctcacacttctggctccaatcatacttgactcccttcttcaacagttcggtcattggcttggcaattctggagaaatccggaatgaatcgtcgataataccctgccaatcctagaaaactccgaatttgtctcactgtggtaggaggtttccaatccattacttcttgtaccttctcagggtcaactgatatcccatcctgagaaattgtgtgacccaagaatttaatttccctcagccagaattcacatttagacaacttaccatacaaacgatgatcacgcagtcgctga

SEQ ID NO: 104899 - DNA, 697 bp, Zea Mays
tgtcctattgttgtgtgggcgaaggctctggtgttggctacgatgtagactggctcgtcgacttgtgtaggggagtagatggatggtgtcatcttgtcccctccattgtatccatcgcctttctttgtagaggaaataatagaagtcatgatgagagtcgctcatgcacgacacggatagtcaatggtcttcacctcgataacgtgcgggttactagcacgacccaggccttgcagactgcacatgtcggtcattgttgtggataggcatgcatcctacccacatttaatgtgggcggcccccacaccagacgcacgcgtcgggcgatgcctggtgctttcgccatgctccacaggccacgtgttgtcactagatctttgcatgagcggagagcaggggccgggaatgcatgcagacgtggcacccccaaacctctccagaccggggtccgaaaggcacttatagaggcctgagtctcatttgtaatggtctggacatgctgcaccaccagaacacccctggttggaggttcgggtggaatacatagaggtccaaaactgtcccataggggttcggacccaggggtgtagtcaagagagtgcttttactctacgtcggggatctggtgggcccttgcggggttcatgactctgttgtgggggtccagacccttagtcagactagactgcctatcgcc

SEQ ID NO: 104900 - DNA, 511 bp, Zea Mays
tgtagctactcctagacttctagattcttgaccttcttgtgcctctcttttggcgaccaacaccatgcttattgcttctgcagctgccgcaatgtacaggtatagcggctcccctggctccggagcagccaggatcggcagggaagctaagtgctgcttcaattctttgaaggcttgttccgcctcttcggaccaggcaaatgggcctgatttccgcaggagcttgaagaaaggcagcgccctctcagccaacctcgaaatgaagcggctaagggctgctagcgacccggtaagcttctagatgtccttaatacgagcgggaggcctcattacctcaatagccttgattttctccgggtaagcttcaatgccccggtatgaaaccaggaaccccagcaacttccctgcggagacaccgaagatgcatttctccaggttcagcttggtgtgggttgcccgcagcttgccgaaaaccagggtcaggtcttccactatagccgacccttccctt

SEQ ID NO: 104901 - DNA, 559 bp, Zea Mays
ttcagtattgatatcttgttgcagtgccctcggtaacacgcgagtcatgatgggtgcggcgcacgtcttgacaaaggtgtgctgttggccaacgggaatggtcagacacaccacctgcaggatagctcgggcgccgcctgccagttgagtggatagggcgcattaaatgctgaagggcacatcgcctgttagtggggtagtcaggcggcgcgtcttctccacaataaatgcaggggtagcgtggcccagtggccttacgtcaggcccatcccgcaagcctacgtcacacactgtgggccgcttggctgtactaggtcttcgccttgctagggaataggaacgttgtgcggacaggttcgcaccaagttgggtctggacacatgtcgcctccggacccctgctcgagcagggtttgggtattctctacccctgatacccggggtctggcggtgagtagtccgaaccccactgagaagggcacgagacccatctcagaggtccgttcgtcatgcataggggtctggtgctttccccgtggtaggtccgaacctactgcccg

SEQ ID NO: 104902 - DNA, 412 bp, Zea Mays
cagcctttgatctcattcacacacatgttaacacgacacagatttcaccccactgtccacagaaggaaaccgcctgcaccaaacgatgcagtcaaactggacgatcggctgacgacgtgagtagttttcagtttgaccatcgagagaggcaatgcagtgcgtgacatgtcactctgatcgagcgacccattcagacttgagagatggtgacccccttcactttgattcattgaaaggcaaaaacacttgtcaatacggattaaagccaagcaaacacgctggctatatataagcacttgctgttcttttttttttgtttttggtaataaaggcaatgcaatctgaatgactcagtcggcaattgtggatgcaactttcacaacgcatgagacgagaaactcgagatggacac

SEQ ID NO: 104903 - DNA, 445 bp, Zea Mays
gtaagtcatgatatgtgtctggctgtagggatatgatttgcattggaagtgtaaacgatgggtggattgacttcatggacgagcgctcctttggtcctttgttacatgttatatatcaccttcattgcagtcttatcaccttcattgtagtcttactgcatgtttttggtgtaacaaaatttttgctattctcaccgtgttttgtgaggaggtaactaactggccgatgcttttgcctcaggagctgaatattgttgtggctcgctgctgggatcactgtgccatccaaagattatgcatcacaattattattcctttttaggtaccctgaagatttcgtttctgtttttaatgaacgatgagtagttcattgtgccatctgcacacactgttttgctataattgtcgcatactagatccatgtattgggatatttttaaaaagt

SEQ ID NO: 104904 - DNA, 445 bp, Zea Mays
cattagcttagcggctccagcctccagtgtcataaacagagtagcagaccattgcagaagacttccttttctgagctataacaccacgcacactttatagttgttttctcccatcctaatcctacttagttgtctgggtttcataaatagacctgtcatgtttatctggttttcactcacatacggtgttgatgaactagtctttttcagtcttatggaagcgccgcacttcctggacttctgcaccctgtaaaaagaattatgatgtggaatgatatacctttttaatcgttactccgttgcaagatgatccgaaatggtaagagtattttgattaaggaaaagtcaaagaaattatattttgatcttgatttatcttataatatgttatcattggtacaagcttttttatgtcctaaactcgtgtaatttgattaaccgctct

SEQ ID NO: 104905 - DNA, 790 bp, Zea Mays
gcctcttggagttgctctaacttagccacttgtgcattttaaccacaaatttattaagctgcaactatcattctgaatatgctgtgctgactgtacccctgtttatggaacgtccttctactaattctcagagtaaagggcacggctagtccttaatgttagatagatagcctattgggccgcagccacagggatatgtgccacacctggctcataactggtgcgcctcttatagattgatcaattgtattgaatggaaaggattatccagtggtggctgtacttctataaaccgaccttaggtcatccttgcctatgtgtttgtaccctacaactcatacataatcaatctattaatttccatacaatacttgcttgaacttaaacttgaccggccatgttatcctagctttatcatcctggtatctgaactcccaaatgcagttttgatatataggtttcattgttggtccaattggcacatgacgtgctgacatggtttgccatgatggatccatcatggagcaccttctcgtcccatgtgttcttcccctttcctctgtcccaattgcagctgctacctctgttcagatggccactagcaacagcccatcccctccatgtacttcgtctccatggcagcagcgacactctgacccccttcccctccattgatgttggctggattcgaacacaagcgaccaccatgcactcatttgatctcccctctcgtttttaaatctgagcagaggaacaactagctgcttccattgatgctccacccagctcc

SEQ ID NO: 104906 - DNA, 548 bp, Zea Mays
gccagcttggagccgcgctgcttgcgttgcgcctcagccggtcaaggcgtacgtttctacagcgctttctctactcattcaatgtgcccggatgtcagttgcactgctttttagcagcgctaaacttttgaattcagagcgtggtttcgtcgaagcacaggtgatgagagaaagggggaccggtggggaaaataataaaaaaacttgtgttaaatatagaatggtatgtacgttaaagatagaaagttagatataaagttgtatacgttaaaaatagaaagttacatatatttatataatagaaaagagttatgctcttaccactatataatccatcagtttaaactttgcaaaaatcacacaaccaaatcaccccatactcattatccccactaaattcacctaacatattgtactcaaacttaacacactatcaaaatcaacggtccagatagttgaataactcatctcccttccccatgaactactttatatgaatcatccctcatcccttcccttcccttcccttcccttccccctctcctcac

SEQ ID NO: 104907 - DNA, 505 bp, Zea Mays
ggcacgctgaatagaaggggtgcgacgggagtcctcatgaagtgcattcactcggctattgggaagcagctattggatgaaatccacgccgggcagtgcggagtacatgcagcatctaggactctggttgggaaggctttcagatctggtttctattggccaacagcgaagagtgatgctgccgagttagtccagagatgtgaagcttgccaattcttaacaaagcaacaacatttacctgcacagcagctgcagactattcctgtaacatggccatttgcatgctgggggctggatatgattggacctttcaaaaaagctcagggaggctatactcacgtgctggttgccattgacaagttcacaaaatggatagagtataagcccattgcctctttaacctcagccaaggcagtagaattcatacaagatataatatttgggtttgggataccaaatagcatcataaccgacctaggatccaacttcactagctctgaattct

SEQ ID NO: 104908 - DNA, 457 bp, Zea Mays
cactcgtttcgtgtcaaacccaccttcaactgatggcaatttgggccttagaacgcggccctctgatgaggaggttagtgctttggttgcttcacttgggaaaatccctgatgatgaaagacaaacccatttcgaggtacctttggatcctactgatgctgaaataaatgccgtgcttgacatgttggctgaggattcttctgacgctattcctgctgagacattggcagtggcacctctcccagaggtcggtataatcttggatgctcagagacctgtccgtgctcgctcgaagcgtccccgccgaaccaaccagactgatctttctgttgatgagcagaagaagaagaagagacgtattcggcgagtatctagtttggatcagggtgctggtccctcggttcctgctgatgaggaggttcccgcgcctgaatttgctgatgctgatcccaatggg

SEQ ID NO: 104909 - DNA, 558 bp, Zea Mays
atacatgactacgcgggggagtgagcgtggaaaggcgctgatggagagcgtctcatgcgtcaagatcgtgtcttcgtttggactcttttggtttcaagcctcaaaattaagggggtgtatgcctaaagttagtccatgtcacatcagatatttcaataccaattactagtattaaatatagattaattataaaactatacacagataaagcgataaagggcgtgacgagtccccacgcactggatacccaaagtaggcctattacttgtggtgacccatctgggtaagaagccacgggagtaggaacgaccaactcctgtcgagtaactctacgaggcggacaagaccgatcaactcccaccgagtaactctacgaggtggacaagaccgaccaactcccaccgagtaactctccgacgcaaacaagaccgaccaacccccgccgagtaactatgcaaggcggacaagaccgaccaactcccgccgagtaactctgtgaggcagacaagaccgactaattcctgtcgagcaactaggcgaggcggagatgtgaagacc

SEQ ID NO: 104910 - DNA, 393 bp, Zea Mays
ttgcgggctttttccacaagttttgctgtctctgggtctaggcattgagctttgtatatgaggtcttctagcattggtttgacttcgagactgccgctgtttcccagacatgtattcagttgagctgattctttcttccaatcttccaaaaagttggttccctttattccgaatggttttcgactgagggcgtctgctaccacgttggccttcccggggtgataatgaatctccaggtcataatccttgatcagctccaaccatcttcgccgacggaggttgagatctagttgagtgaagatatacctcagactcttgtgatcggtgaaaatgtgacacttgttcccgattaggtaatgcctccatatctttaaagcgtgcactatggctgcc

SEQ ID NO: 104911 - DNA, 736 bp, Zea Mays
gtgagcatgtcacaccgccttaagtcatcgccgacttaagtcgattgctctgttagtagggtatagtggtcaccctgggttaagtaagcgtgagcatgtcacaccgccttaagtcatcgccgacttaagtcgattgctccgttagtagggtatagtggtcaccctgagtcgagtaagcatgcagattgacaataaacagtttgagtgcctttgagaatgaagtctttttattgatggtgtattttccaattacagaatacaatgctgtcccgatagcttttgagatctagctaggggtaaaacttcctgagatgctctatattccatgagttccctatttctgtgccatccatttgagtaagacgatatgatccaggccgagtgacctctgttactatgaatggtccttcccatagtggtgacaatttgtgtcgtccttcccccgttagaattcagtggaggacaagatctcccaccgcaaaggatcgatgtcgtatggccttatcatgatagcgcctcagagtttgctggtacctggctgactgaatcactgtattcaatcgttcttcttctagtatatcaacatcctccagtctagtggcctcagcttcagctatgttttcgaagatcaatcttggtgccccaaacttgagatcagcaggtagcactgcctctgaaccatagaccataaagaagggagtgcttccatgcaaagctcggctaggttgagttctta

SEQ ID NO: 104912 - DNA, 717 bp, Zea Mays
gctggcggatctcatcattcttgggcacaactatgcggttgttaaaccatacagaaccttgatcatctcttctaaagcagttggctttaccggcctccattttctcatgaatgtgtttcataccctcatcatttctttgtgcgtcaattattctttgtaggaggactgactcaagcttcaagtgatttgaagttccatgttgaatcattcccaggttcaacttctccatttcttggcataacgtaatgtcagaagtcttcattgtaagacaatgacaaaaagccttgcgacttaacgcatttgccactacattagccttgcctaggtgataatgaatttctaattcataatctttaatcagctcaagccatctcctctgcctcattcaactctgactgggtaaagatgttcttcaagcttttatgatctatataaatatgacagatattccccagtagataatgacgccatatttttaggacatgaaccacaacatctaattttaggtcatgagtaggataatgttcttcatgccggcgcaactgccttgaagcgtaggctatcactcgaccttcttgcatcaagacacaacccaaactactgcctgatgcgttacaatttacatcaaatggcttttcaatgtccggttgagctaataccagagcagtggtaaataagaccttcagctgctcgaaggcttcattgcatcttgaagac

SEQ ID NO: 104913 - DNA, 346 bp, Zea Mays
cccggtttcactgtggatctaatgctcctctaagcatcaacagtgggatcatatagtctgacgccttctccactattggttaaatgttcggttcgatattcgatccaatgcttttgtcgatatcagctcgagtttgctcggtctatggtctggcaccaccttagggatagttccatgcatatagaaccctttttattctagtttcttcataatcttcacgttcaacttgattccatctagtgccttagacttttgcttgtacttttagatctttaacaagtcttctaatgtctttcactcttgcttgaggtattgatcatttggatgaccacaccacataagtcta

SEQ ID NO: 104914 - DNA, 395 bp, Zea Mays
ggtatgcttatagtctgaactcgcttatggtctgaaatctgaactcgcttaaggtctgaactctgtaccatacacaagatggaccgattatgaatgaaaattcaaatatgtatacaaacattttggttgggcatttgaaatacttattatgctgtgatgtatgtatctggttttcatttttaactggttttcatagagtgaatatagttgcaatttcaagcattcgcatctgtgaaccagattatttcctgctatctccagttcttgatttcaactttaaaggattgaacttagagatgatatttttcatcttatatgttaaatcgtatgctataccccattagacaattcaggttaataagatgttattttgaaagtttggaattgatatgaag

SEQ ID NO: 104915 - DNA, 549 bp, Zea Mays
tccattgtctgaaccttaacttaggtgtacttcaaattacatgtactgaacgctctaatattgcagtatctctagggtggttttgcttgttcaactggaaaatagtctgatatggagccaggtccggttctatttacctaaaggatcacttaggaaaactcaggggaaaatgtgtttttaatatgtctcaatgctttactgtctaggggattgaacttgcaaccgaaaactgtctgtgccctaccgcacgtattgggtgacaactatctgagctatgaattgttacccctgttcttctttaacttggtgctttgagctatatttaggttagtataattgcatataaataaaacatttacaggtttcgaatttagaagtaattgactataatattttgactcctagtttaaccattgctccacatgtccattcatcagatgaaccaatcatctctgtactgtcagtaactaaaatttggccccatctgacccgacctgattcctatatcatttatttttgcgtgtaggtcaacaaattagtttagtacaa

SEQ ID NO: 104916 - DNA, 582 bp, Zea Mays
gcagaaaaaggcttggggacaatgatgagcttgcaggccattttctgagcctaggggtgcataggaaaagaaagaacagaaaggcgtgtccgtgggggctcctgcctaaggctatgcatgctactacgcatctccaaaagcttttgtgtgcgcgcgcgcggaagtgcacaagggagtagcaagctgccaaggtccatcactagccagtgataactaaccatctatctaacaccctcactttctctctctaggatggatggggggagagagaggagagctactctcttgtcaagtggtggtggtagtagtggtggtgatggtgtgagagaggggtgatgtgccaccccaggacatacacccctcacctacaacaggaacaagacctcgctcgcttacatgtatgctgtcacacacacttaacgcacatgtatattttatacagagacaacacactagctagaaatactacgagagcatattatatataatatatattatatatattataaacatgtaagtgtgtgtagtcccacatctgtatggtacaactagtcccttttctagctcttgagttcctttcat

SEQ ID NO: 104917 - DNA, 489 bp, Zea Mays
gggatggatgcaaaggggggctgctggcctcgcgcgttgggttaaaagtagtaggagtaggtcttgaaaccagcctaaatgtgctactccacaatctaacacgtatcagcaacgacgacatctaacaggacaatataatcttttgccatctttattgtgtggttgtcacaaaaaatgtcatggtaatgactcagctaaaagtgccatctgcaaagacagaaacaaattaaatgccccatctgacacgcgtgcgccacgacatcggtctcgtctcagtctacgtcctaaccctagtcgtccgatacatggcaactgcgctacccgtgagtcgttggctcgttgttgtatgtctggtagttaccctccatctgctccatggcacatgtctaggctctatatcgacaagtggaagtggctaattgaccaagttgcccactagagatggcaatgggcttcgatctccgattccccgcggggaattcctccgtt

SEQ ID NO: 104918 - DNA, 571 bp, Zea Mays
gccaagtattcctgcaccaagtccctagtgctaatgtgctcagccaccaccttaaattctacctcggccacttggcagggagaccctagctgcatattgcacagaggtcgagtcatgccgaagcttagctttaagggactcattgtaacgccccaggtgttacttagggttttcactcaagactatacaagtaagcccatcatcacatgtgacttaagttgggaaaagtacaccaaatttggagctcaagatcctaagtaagtgcaacctatcttagatgtcatgccttggcttaccatgtacattgaaggggtagaaattgcccaaaaccctaatgcaccccctgtggacaattggagtactataggtaagtatgaccaaaaagttatgaaaaccacttgatcatgtcttgggccaattataaaagatgtagtgcacttaataccctacaaataatagtaagaaagtaaccccaaaaaatttcagaaaaaccccaaaagattcacaaaagggttgagcataagagaaaaatcagaattcttctaagtccaaaaccaccccctttccaaag

SEQ ID NO: 104919 - DNA, 349 bp, Zea Mays
gatgaggtttcgctttgagcgagaggatgtcactattcatgccagccagattcgccagctgtttggatttctcgagtcatcgactcatcttcacagcttgtgctacggtacctctgatcctcctcgatgccctaacaacggagttgatccaggtacagctcacatcgcggctttgttccgaccgcccttctcagatgggtcgcgatgttctccggtagatttcaccacagcggccaagtttctatatcagctcatgagacggacgcttctgccacggatgggttatagggaggctgccactcatattcagctttggctcctaggtgccctggtctctcactctgagttt

SEQ ID NO: 104920 - DNA, 504 bp, Zea Mays
ctcaagcaatcgtgcaccagaccttggtgcctgcgttctgccgtgggcaggtctttgtgcggggtgattcacggtgagtacctcctctggtgaatggttgttgcctccgctttgcgtcgtactattcaggcctgggagtggggcacggtgggttggaatccggtgctccggcatgcatcgccgtgacctccgcgtgcggtcatgggttgccgtgacctggtaaatagcggaaggtaggagaagcactgatagccgtcgatagtgagtggatggcgcagattagatcctaggtacccccttcgtgtcactaaagctgtgacgttgatctctgcgtgggcggtcaggattagaatcagcataccccttcatcaaacggatccgagccgtaggatggtaattcgatgaccgggattagatcgcatcttcataacaccctagccgtaggatcttaatcggatgccccacgttgggtaccggttcggagtgaatcgggtctaatctgca

SEQ ID NO: 104921 - DNA, 367 bp, Zea Mays
tggatgcgaagttgaattttagtccggcctaccatcctcagactgatggacagaatgaagggactaattaggtgttggaagacatgttgagagcttgtgccctttagcatggtagtagtgggacaagagtctaccttatgctgagttctcatataataatagttaccaggccagtctgaagatgtcactgttcgagactctatatggcaggaaatgtaggattcctctacattggatcagactggaggaagacatttttttggatctgaacttattcaagaggtagaataacaagtctgtataattagggagaacttgagggtagctcagaccaggcaaaagagctacgctgataatagaagaagac

SEQ ID NO: 104922 - DNA, 541 bp, Zea Mays
ttgataccgtataaggaccgattcagccgacagacaaaattcagatgagcaacatcagcaaaacccgacggttgtgagcagtatactgtctcaatagagtcccatgaggaaaagcgttcttgatgtcaagctgatgaatgggccagttgcgggacagagccaaggagaggactgtgcgcactgtagcaggcttcacaacaggactaaatgagacaattagggcgggttatagggagtagccatgcggacggaaacgtttccgctcccgccccgtcggaacccaccccttggcgctacctctcccgccgacgcctcgatccttgctccccaccacagccacacggcggcgcttgctccaagcccggcggccaccacttctctctccccggcgtcggtgggttctccttctccttcgtttcctctctctggtgggcgatcgtctcttctgggcgggtcttcttcccctgttgccgcgctggtgaagggtggggagccgccatcctacaaagacgttctggtctctgctcgcccttcctctggc

SEQ ID NO: 104923 - DNA, 412 bp, Zea Mays
aaacgagaagcaagctttcagggctcatacacaatgcaagtgacaatacagatcattgaaacctcatgaaagcagcaccttcacttcactgaggcatgaagcaagttgtgcaaacttttgttatgttgacagggaacacgcttcaggcatgcagccaacggcccaagacactgctccaaatgtatttccaaaatggtaatttgccagcttgggcaaaaccagcgtacgcaatattatcagaacaaatatatgttggcacgatggcatcagaagggtaagcaggtagttgggctgcatgcagcaaacaaacgtccgcgttccacacctgagattctgagaccagcatcttgtccacttgccatgtttcaggggttacctgaactaccgatctgtgatgtcagtgctcacattt

SEQ ID NO: 104924 - DNA, 379 bp, Zea Mays
ttggccattgtaaccaccgactcttttcaaatgacaagtgatctaaagtcttaaacaacatcggatgtagctaaatgtacacatttagcaaccaaacaacaatagaatgttgcctctctatatctatttggtttatgttattgttctgccaatcaatcactagtcaaacatcaataacatttctatttgtattaaattatgagtttccgttagtatttctgtttctgttcgttttcgcaattccgtttatcccgctcccgtttccgttcccgactatttcggacccgatcctgttttcgatgataaaatgcggatacggaaacgagagaggagttttcccgtccatttccgtccgttttcatccctacctcgccatcgt

SEQ ID NO: 104925 - DNA, 429 bp, Zea Mays
cacgaaaataacttagatgtgatagattgatctaacctaacgaaggctaacctcaagttgagctaatctcatgtaagttgcttaagcaagttggataatgttggtggcataaattagaccctacccttataaacatgattaacctaaatcggttccctatattagctcagccatatacaagtacttgactgatgcgttgggttgcaaaatctgtatagatcaacatataaaattataagcacccaagattttcaactatcataacttatcctactcacatctacctacttgtccctaatttggataacaactccaaggatgaagaccaaagatgatcgacctcatcaaatcaaggaaagataggattcaagccggatcttaaaggaaccaagatccacaatcttggatggagtcttttcttaccctaca

SEQ ID NO: 104926 - DNA, 428 bp, Zea Mays
taaatacacaggcagacaaatagatggacagacagataaaatggtaaatagatagacagatagatcgagattggtagatatataaaaagataatggattgacaggcaaacagagacgcagccaaacaaatatatacatgggtagataggtagatacatagatagatataattgttaaggtatgcatggatagattttttataataattgttgtgtaagattttgtggcgtatatataaacacttgcacgttgacatagaaaaacaaatacatatacatagtgcacctcttctcattcccgaagaaagtaaaacaagaaaaacagagacagaaaagagagtaatattgtgctctcatctcatggtagttacaaaatgcaagacaacgaggaatgtacacctgacaagtacatttttcctaatacttgtg

SEQ ID NO: 104927 - DNA, 389 bp, Zea Mays
gtctttccaaatgtacagaaccaaatttagactcatatttggcatatacaattgacaattgagttttaacatcaattgtattactagagtaatcaagttgaagtgaatcataaagaacatgcaatgcatttttaaaattagtgagtttagacttaggatccaaaatgaatgcataagaatacaacagtggtatcttctcccaatattttagaaacttagatttcataggcataataattgatctaagtttattgtcattttcaaaacgattcaggtgagaagcaattcaataatagcagcatcattaatggagatgtaggataatgtacacctgaaagtgacacatttgacaaatagaatgactctaagaattccaacacatgttgaat

SEQ ID NO: 104928 - DNA, 444 bp, Zea Mays
gcttaacgagcttcccatggccgccccttttttgcatgcttttggatcccctctctctctcctgcctgtgcctgaccgaacaaattccttattagcctgttgccgatgacaggacgccgctacgttatctttcttagccgttagccctagccctcccttttggtctttggctagcaacaacagatacaatggagaatctatctttctatccatccatccatccttgagcgcatgcagccccagctcgcccatccatcgcctcaataatgctatgctatgctatctatccatcactaccctgtctcgttgcttgcacaacagtgtcactcatcacgtcacaaaccagcgatcttgggatggtacacacagcatatcctgcctcgacgtgttaccgcctgtctgattgtatattgcattgcttggattcagtggtctctggtctca

SEQ ID NO: 104929 - DNA, 367 bp, Zea Mays
tgtttactttttaaatcattttaagcctgatctcacatcatgcaagcaagaatcaatataagcagactatgcctgcccatatatccatccaagcacattctatacattatatcatcccatcaaagaactctctttttttaattatactatgcatatatatatccatccaataactcacacaatctgcatctccacctagacttcacacgacgtaactatttcatacttacgcaaacacgccaagaccagaaaacatggcttcacaacaatacgtattggcctattcaaatatccctcgctatctctctgtttcagcccacgctccgcatatacaataacaagataactatcacaaccactacatcta

SEQ ID NO: 104930 - DNA, 331 bp, Zea Mays
gtgagatcgtcgatggcgacccctagggcctgaagcgttcggggaaaggtgatgttgatgctgctaccaccatccacaagtaccttcttaacctagcattctcggattatagggtcgacgagtagtgggtatttgccggggtgatcgaagttaagccactgatcagctcggctgaaggatattgtgtgctctgaccatcggtaaggagctggagcgctgtttgtggccactagaacttgtcgatcattaagtttttgttgcattttgctttcttgcaccacgtggcctccgaatatgacattgacctccctgtcgatgcatgggaaagctc

SEQ ID NO: 104931 - DNA, 290 bp, Zea Mays
gttgcatttaagtgggaggcccttgttagtagtgatcaggatttggttgaggagtttattgtctatagtgcttggcctctcagccatggatggtctgttgggcagattatgcgaaggtctatgccgtcgaaagagggcatggaggtgactagtcatgtcttcgccatcgagttgggtggtagagatggtccaacattcgttggtgaagttgaaactgaagcatgtaaagttattaggaaatatgtgagaaaaacaaagctatcgaagagcatggacattcagggatgcaa

SEQ ID NO: 104932 - DNA, 335 bp, Zea Mays
atggctgtcaaattttagtacaagcaagataatcatgttatctacaactcttctatatgacttttctacagaaaacatgatttggtttatcaaacaaacagcacaacaaaaacaatgcgtgcagcccaaaacagcaactaattaatttcagctcctatacaattcaagaattgtcgcgttctaagtacttgaattattctaacactttaccctttgttagagttggattaattaaatgaggactaacaaatagacttacaaattttatccaaatcatttagtgcactaaaattatcacatacatttaacaaatgcattcaccacgtacatagcat

SEQ ID NO: 104933 - DNA, 594 bp, Zea Mays
tgtcaggttactttaacagatattcgggtatggatactaatttttcgtacccgttctaaaaatatccaagaatatcaaatgctacccgtatccgtatccacgggtacatgctcgtacccaaatccgtgcccaacaggtttttttcccgcgagtatggagataaatcacatccattgccatccctacccatacctggatttttgaaggatccattaaatatattaaaaacaacaagccaccaaaatattagaccttaacagaacactagatcaggtggagtgctctagccaaataaggctgaaagggcttcaatatgacattgagataaaggatgagtgaagagttttttgtactcttctattgcttcttggctaattcctttagattctgtgatgatttataaagtcctcatagctctctttgttgatctgtcgcccaggtcctgcatctgaaattcaaccccaataccagccgcccgacatcttcttctcggagcagaaacaaatggggagggaggtggctattgtcgttgtgtgatgttgtttggaactgaaaagataccagaaggccttctgcaaatgttgttgataaaat

SEQ ID NO: 104934 - DNA, 739 bp, Zea Mays
cgacactgcattttccaatcactatctatgtagtgtgcaaccaaacacatatatgataaagtttgatttgatgtccataaatcagtggttagagaaatgtactccacacctttaaggacctttgccagagaacctttttcagactcatacacctttaaacattcagctcttatggtcttcctaccaatgaactcatatgaaggattcaaatatctcaagacaatgttaaaccaagtatgctcgaccatcctaaatggatactcatgaactattatcatcttagcaattaatttttaacttgctcatgattataatctttaggagaagtgataggagggaggccagatctagattcacttgtcgttgatggagcagagtttagaagagattgatccaacttctgtgccacatgcttcaaatacccatcacaaattttcatgtgtcttgacaaatgagatgttgttgatccttgtatgtaagaatatagcttcttacaatagttgcattttgcctttgatatcatcttccccttctcagatggatctgacacattcaccttagtaaagacatcccaaactttagatttccccttttgcccagttcaacagtcttcaccttcttgcgccttcttttgacccccctttttacttttgctatcatcaaattcatcaattgtgacattgtccgcatcaccaatttttccacctagcactgtcagttcatcttcagacatgtcatc

SEQ ID NO: 104935 - DNA, 486 bp, Zea Mays
aaaacaatatgtggatacaagtaaattttgttttaaaaacataacaaggcatgccatctaggttttgtagcaatcagtgacaccattaacggagcaggagcacacagttcacaggatgggaagaaattaaaggaggaaaagtgatagaacatgatgaactcacctgctcccaacgaattgctgccttctcggtcagtggtcccactgtcgtcagagctgcaaatcagaaggacaaatccaccactgcgcaccgaggggcctgtgaagagaggaacgcaagcgcgccaccagcccaccacaccagtcaagggaagtcgcagaacctggtgtcgaatcagggcagatatgaggatcctttgaactgaaagaaaactacaatttaatttccttgagttgtccttcagagttcagagtgaactatctgtcactaaacttggctaatttttgaacttgtaacttactgcttacacttatataaaaatggat

SEQ ID NO: 104936 - DNA, 315 bp, Zea Mays
tagtcctcattggatttcctcgcaaaaaaaactcttgtaggggccaagttgccggtcaggtacccctatggatagcctcctagccttcctcatacacaagtgggtccttgaaatgtcctctcctaaaatgttgcccattgccttcagtaccaaacttccagtcgaaatgttgtagtccttgttcacaccattatatgtgatggtcacaccacaacacacaatttgtatggtcccgtaagactacaagcccctccgatgtatatcaatagtgtatgtaagtacctaatagcgagaagtgtgcaaaccttgctaaac

SEQ ID NO: 104937 - DNA, 315 bp, Zea Mays
ccaggagataatgttcaggttcagaataccaaatagtatcatcactgacctgggatccaacttcaccagctcgaagttcttcgatttctgcgagcaatgttgcatccagataaagtaagcattcgtggtacatccaagagctaatggtcaggtggagagagccaatggaatgatactggatgcactcagaaaaaaggtattcgacaagagcgagaagcttgcagggaagtggatcagagagctgccatacgtagtctgcagcctgcgaactcagcccaaccgagctctgcatggaaacaccctgttcttcatggt

SEQ ID NO: 104938 - DNA, 330 bp, Zea Mays
aggccacaatacaactctgtttcaagtgaaattttgtgtgcttccatcctttgtgtttttggatcagtggtaaaaaattcagaatatttcaagctcttttgatggtactccttttgaaacgcgcttttgatttctactagtgctgaaaatctgccctatttacagaactgccattcccactagatacttgtacctcctttcttgtgctttggtccaactgttctattacattttctaggccagcaactaggtcgagtacttggaacacttattcagcattgctatctgttactgacttgtgtgccacatatatatatatatttagtcagc

SEQ ID NO: 104939 - DNA, 402 bp, Zea Mays
gggtagtccaaatatgaaatccatactgatttcttcccatttccattccggtactttgagaggttgtagcaatcctactggtctttgatgtttggctttaactcgttgacacacgtcacatagtgcaacatgagtagccacatcttttttcaaaccataccaccaatacttttccttaagatcctggtacatcttagtacttctagggtgaatagaataagctaaatcatgggcttctcttaagataagttggcgtaggtgctcgatttctggtacacaaattctctttttaaaccatattgtgccttgatcatcttctgtgaaatctggggctttcccaaactaatttgtgtcttaatttccttgattttctcatcagactcttgtcctttacgaatctct

SEQ ID NO: 104940 - DNA, 564 bp, Zea Mays
ccggcaggctggatggtggaaaagtttgcccaccaagtgttggcgggcctcttaactgttgagcggcaaataggggcttctgtgtctcggtgcatcggattagcccaaacttttgttccatcacccgcacccattcatcagcttctaggggttcctccgccttgataaagagcggtggacgggtctcggagaactccagatatgcggtgtctcatggtccttgaggtggaccccttcctccgtgttgctgaaattgatttcccgctattttgcgcaggaagcgcgtgttgtcggcggtagcgttgaccaaggcagcaatagcctcagccagagtaggaggtataggtggttgattgggagtgtcctccccgccgcgggatgtacccgccccatcatgagcatgagttcgcgatggcatctgaggaagaaaaacatcctaaattattacatgccaacacaccatctttattacattgctgaacaacaataattatacatactcagtatacaactcaatcttccttatttattttacatgagtacaatacttaaactatactactc

SEQ ID NO: 104941 - DNA, 833 bp, Zea Mays
ttagcacgcatgacttctgccttgcaggcaaaagagctcaggtgctgaaggggagcgattgaaggaagctaccaacatcaacaaatcactatcaactttggggttagttgattattttctaataataccacaaactgtggaaaatcttttgaaatttgttataaacttagtatgtgagtcagattaaagtcatagcatgacatattttgtaactattttggtcaatggcatcattgcagacttgtcattacgaacctaattgctgtgtcaaacaaaaagtcacagcatgttccatacagagattcaaaattaacattcctcctccaggtaatatcagcaactgatgcagtaaagttgctcatgttgtaacttggcatctaaggagctattatatgattgcaaaatttttagatgtgagtttacattctctttgctgataaaagatttggtatgcctttcactgctttccaggattcccttggaggaaattcaaaaacgaccataattgcaaacataagcccatccagctggtagactcctaatcatgattgttctattcaactaccctttttattttgaagcttccattccattttgaaagttacacatttgatatttctcgctttctatccagttgtgctgctgagacattaagcacattgaaattcgcgcaacgagctaaatatataaggaataatgtaagtaacctgcacacatttagaataccaccttttttgtgcaagcgtcggccgtcagctgactattactttttgtaggctataattaatgaggatgcttctggtgatgttcttagcatgcgtttacagatccag

SEQ ID NO: 104942 - DNA, 787 bp, Zea Mays
ataccttcaggtttggagaccagtttgtcgaaccagatgatgactggctgaagtgtgttgaaaatactagtgatgagctacttggagcatactccaagtctgaagataatgcactatctctggccttcgggagccgaaaaaagaaaaggttaaatagggtttttgatgctattagattcgtgtaccctgactatcgctacccgccacgggggcagaaaagaaagggtgcaacttctggaaaggttgctgcttcggctgctccaagtgagcctgcaccgaagaggaaaagttgaaggtccttacccatcgaccgcgctacattgaaccggccatagtgcctgagtttggcggggaaacttcttcagctgctactctaaaggaaccaattccttctacacagaaagctgaggaaccggccaccttgccaaaggcaccctcagccaagttagctgagccgaagactgataaagctgaagagccaagaatcgagggaacaaaaacattagaaattttaagcccttcgacagaaatgacaatgccgaaggcacaaaaaggccttgcggcgacccccaagagaaaaaggatggccagtgttctagatgtgctggagacggtgaaggcttcaagctctactcctgggaaaattgcaaaggcttcgaaagtgccaattgaaaccgaaacaaaactgaccgaagccaaagctacaatgagccaggctagcgccgaagctgggccttcagagcctgccaaggagaaacccttagaaactggagaaaaggcagcggag

SEQ ID NO: 104943 - DNA, 393 bp, Zea Mays
agcttgcaagtgacatcaaattggattggcagtcagtgggtgtcacggagtcagtttcgatggaatggttatgcagtgcatgtgcttctgtaatttccgcaagaagcagtcaaactaatccctgatatggcgctaggacattgtagtgatccccgcatgtttgtggagctcgacaacctgccagagcggcgagcgccagatgtttcgttgagaagagaactccttcaattcagctttcctctggttcagtcactgctttaaaccaaatttgataccactcgttgaagtcaacagctgggatgtggacatgtgaaaccacacctgtggaactttcagcgtgtgatgactgggtcactgatggaataccgtgttttctgagctgctcgctttcag

SEQ ID NO: 104944 - DNA, 545 bp, Zea Mays
taggtctgagaagacgactagaatgagcatgcatcatgattgtcgcataattgtctcttgtgcactaacatgcttctctcacctttattcgaataataaaaactggtgaataatgtgatgtactgctatgttagaaatgccttacctcgtgtcagatgggtatgtgttgttaggattgtgttatgtgtttgtcttgtcttgctatctaggtagtattgttaaagttcaaccctttttgcaaaacattttgttgcttgttctgttcataaaaagacccccacccaaacaaccttgagtttagcgagtgaaacctcaaaaaaaaatcctgcttgtgttggtattttctaacccttgtgtgttttacccataaaatttcacctgcacagcttagagacccccacagcttgaccgctagaccgacctaagtctccttgtgcacttgtgtaaaaaaaattgttgtttggtgtctagttgcgcaaaccctatcaaggccatgtttctttccatagatcctgtcccgaaactttataacatttctattgatc

SEQ ID NO: 104945 - DNA, 802 bp, Zea Mays
atttttccttatctttgccccaaattcaaattcaaaatctaaaaggactttgggtatggttcaaaaacaaagttgtaggtcttggaaaagtgaacaacttttatttttggagattttcaagttatcatataaatttggaagtaattttgaaaattcacaaaaggtcgaggatttagctatagtaactgaatcaacttcagttctcggagttttagtgttgttgctcgatctttggagacccttatctctcgatctgttaagttttgatcaatgatccttatatcaaaatagtagagctatgattgatgaataacttctattctcggaggttgatgtgttactacatgaaatcgagaaaaaactagagctcaagttgcggttttaggcgatgaacgatgctctttttcagcttcatctctgtttgcttcgccagccaccgacgatgtcaccaccgtccaccagtcgtgctcgtgcgcgaagcacacaactgcttgccttggacatgtccatgatgtaggtgataagctctagagccactcgcgccacatgaagatcgccagcgatgccacaattttcttctcggcgtttccagcaccgtcactatctccaccctgatacggccaaattggacgagctagatgcatttctcttcaaattgaacaatctacatgctttgcttttcctttgcgtcccttttccacccactctcatcgcatgccatcacccatagccaccacatgccatcatcttctccacggacggccaccaatgccaccgtaggtaggctcaccgtggataggta

SEQ ID NO: 104946 - DNA, 328 bp, Zea Mays
tcggcaactagtctagtgaggcccacacgttagttggagaaacgaggagagcaaacgcatgaatcgaccatcccagcgtgcatggcacaggatcagttcccccctgcggcccacatgtcattgagggcagcagatgtcatcgctgacgtcaggatgacacagggtgattttttattactttttcttcgacaaccggattgaacaataaataaaaaagagcatgagagaaggatcgtgggttggcttcctaggacttaggccgagcgacatggttggagtaggctaaacgtgaggcacatgcaggtgagttatctcttttgtttttttt

SEQ ID NO: 104947 - DNA, 570 bp, Zea Mays
atacaccttcagatacggagataaatttgatgaaccgaatgatgactggatgaaatgtatcgaagctacaagtgatgaactgcttgggctgtattccaaagcggaagataatgccttatccacatccttcggggcccggggaaaaaagagattaaacatagtttttgatgccattggctttgtctaccccgattactgctacccgttgaggggacggggaaagaagaggaaaactactgcttcgaccaagactgctgcttcggccactccgaatgagcctgcgccgaagagtaagaagttgaaagtccttacccactggccacgttatattgagccggccgtggtgcctgaatttggcggggagacttctttagctgctgaaccaaaggaacccattcctcctacgcagaaagctgaagacccggctataatgccgaaggtactctcagccgagctagctgagtcaaagactagtagagataaggccgaagagccaaaaactgaaggaacaaaaatgttagaaattttaagcccttcagcggaagtaacagtgccgaaggcacagaaaag

SEQ ID NO: 104948 - DNA, 597 bp, Zea Mays
cggaggtccatgacgcggtgactcatggcggcacggagaaccgatttgggggaaatcgcgattcctcgggatatggtgagtaatcggaggcgaggagtgatgcattgggtgcgtaacaagagaacggagcacgcggagcgctcaatttatagacagcgaccgtgagtacgacgaatttggacggtgaagagcttgcggtgagaaaggggaggagtcaccagaggccgctcaacgtggcattcactgggctaagtcctcgacaacagagggggctatctacagcgatctactgcgatgtggtaacaaggccagtagtgtggcgtgccagggggtaagggcgatcatcacagcgatggccgcgcggccacgtcgtcgagcaagtgggtacaacgaagctggttctatccattcccctgctgatcttttcactcccatggtgatatccgctacacactgagcacaaatcacagcgccaacgtgaatccaggcgcggggatcaccgggggcgaagtgcgatgtatctgctgatctttgtcaggctactgtaccatcagaaccttcattagtctgtctgacatagcatcttcagagatgttt

SEQ ID NO: 104949 - DNA, 331 bp, Zea Mays
ctgatctccccgtggattcggcatcctaagtggtggatggctccggcattgttcgaagcaagattgctccttcgacgaggttctttctggcattgtgaaaggccgaggggcttccacctcgacatcttccatgatgcgacgatggacgtcgcgtgccttggtgtgtgctccctcgtcaggggccctacctatcgcttctctgtcgagaacttgctaaagctattgtacccattgttgttcctctccgagcttggcatgcagcatgcggagctacttgaggtgggccatgtgacttcccggggggtctgagcctcaccctgctccctcggtt

SEQ ID NO: 104950 - DNA, 620 bp, Zea Mays
cacgagtccgttgtttacatcccttttcttatctgtggccttgctcttcccatttctcccttctttcgcggtctccttgacttttacagtctgaatctgactcacctgaatcccaactccattctacaaatctctgtctttgttcatctgtgcgaggcctaccttggaattcttcctcacttcggtttgtggaagtatttgtatcattgtcgtcctaggatggctgggggcagcaccagctcgtgggcggtgcgagtctggagatgcgccgtgggaggaaaacagaataccttgatatcccacttaaggatagcattaaaggatggcgtttagagtggttcattgtggaaaaccatggcaagtccctcccccttggtcagggagacagccggatgttcgcactccaagttggattgagtctcctacagacttggagataatagaagccaaggttctgcttgctgaaatttgcttgttgaaggagagaggtctgaccgctgaagctgtggttgcagactttgtttttaagaatattcagccattgaaggacagagcatatccggcttatttgtacagtggtgtcaccgactcaacccgggttaccaacaagaggattcttg

SEQ ID NO: 104951 - DNA, 401 bp, Zea Mays
cagaaaaataacttatctgtgtttattgtattttaatttaatttcccagatttccaagcactatagagcttgatatagttgttatggccacttggcgatgtataaatatgatgccacacaacacaatcaaataaaatatagagctaaacaaaattatttacaaaggttgcgttatgatgtgacttcaggggcttgaacaacccaacacaatccacgcgagtacaagctctagtgtatctggcgtcaacgcgtgtgcgaccatcagggctacgacaacacaacaagccgtcgtaataagcgcaacaggcacaattatggctcggtaatcggggtacatgataagtccacgcaacgtgcgcaacaggcgcaattgtggctcaatgatcatgacagacagacag

SEQ ID NO: 104952 - DNA, 344 bp, Zea Mays
tatgggtcggaggcagtgctaccagccaatctgatctttggggcgcccagattaacctttgaaagcatagccgaagcagaagcaactaggctagaggacattgacgtactggaggaagaacgactaaatgtggtaatccagttggccagatactagtagaccctgaggcgcgctaccatgacaaagcggtgcggcatcgatccttctcagtgggagacttgtcctccaccgagtactaacgggggagggatgtcacaaactatcgccaccgtgggaaggtgatgtgcacccgttgggtgaatgcccgatctttcgatgagagggtgtgtaataactcgattggt

SEQ ID NO: 104953 - DNA, 691 bp, Zea Mays
aacaatttggagtagagaaccgttatctcatatctatgcatagtagtgaacctttatctatgtgtgtgctgaacctttatctatgtggtgtaatgaacctttatatatgtgtgttcgatcttgaagtaatatctgtgtgtgtaatgaacctttatctatgtgtgtgaggtcttgaaatattatatacgtgtcttgaaatatttgaacttatctatgagctgtgatgtctagtcttatgcaacgtccttatagtttgttaaatgtgttgaagcaggaagatgatgatggcatcatgtatgaggaagaagaagccgatggaggcagctcaagtgaggatgaagttatatccaggtgtcgcaacaatttggtgcaacaacaaaaaatgattgtgcagttggttcctatcttgggtatgtactctgataactacttcctgaaactacctaagagggtcgctggggattctggtttggaatgggtgcaagagacactagcaagagatacccaatgttacaacatgtttagggttgagaggcctttattttatagactgcataatactttggtccgtagatatgggttgaaatccactaaaaaattgacatctgtagaggctcttgctatgtttttatggattgttggaggctcacaggcagttagacaggctgacaaccgttttaggaggtctctg

SEQ ID NO: 104954 - DNA, 283 bp, Zea Mays
acggctgctaactccaagtcatgagtgggataattttgctcatgaggcctgagtgctcttgatgcgtaagcaatgactcggttgtcctgcatcaaaacacaacctagtccagtgtcagaggcatcatagtacacatcaaatggcttgccgctgtcgggttgcgctaacaccattgttgtggtcagatgttgcctcaatgtgtggaaggcatcttcgcacttctgaccccaatcaaacttggctcctttcttcaacaattcagtcatgggcttcgcaattcgag

SEQ ID NO: 104955 - DNA, 370 bp, Zea Mays
gctgaaattactacatgctctagattggagggtttgggaggtgaaggtctcgatgatcatcgagtcgcccaactacgagaatcttgccatggacgagctcttcagcaagctcaagtccacagagattgaccaccagactcgagccaagattgagaaccctagtgcacccaccatggccctagtctctagaggtggttctgcttctaactcctcacctgctatgtttgctctatcttctttgttgtctattacagaggagcaggtggagacccttggggatgaagagctggcacttgtggccagccggttcacgcggttccacaacaaccgtatgagccggcggtgtggcggatccaaggacggatgctac

SEQ ID NO: 104956 - DNA, 475 bp, Zea Mays
catgactagggagaatgcaacgtgtctccataagatctttatatttttttatcacaaattatcaccacttacaatcacgtggtcaagacttatggctcttctggtgccaaggaccaagtacatattaatgcctaatgtagctttaagctctgtggtgatgtgagattccatggctatttttgtactcttcttacttctggtagatcagatatagattatggtaagcatgtcaaggggtggaatacaatgtagttctgctacataaaccctagatatatgtctattcagaatcgacctttaccatttggtttatagtatataccataccagtcaaaggactatcccaagtcaattcagcggcgataagtatttaaattctgagagatgtatgcaacacaagcatagaggtcctagataggccgagtaaagtggttcgacgagaacacacaatgttttttcacaccaacgttgtgaa

SEQ ID NO: 104957 - DNA, 356 bp, Zea Mays
agcaaggaaaaccatttccttctgtctgaatctggatgtttcctggatgttctccacttactattcaagattcgtatgaagcgttggatttccatcagacggctgccgttatttaagatgacgtggcctaatcttgtgtcggagttgctcccgctgttaatatagtaaatgtggagtggccaccgggaactggtgaactagatatttgttgtacatgctgcaacatttcaccatcagtataaacttcatggaccatggtttgaaacaatgaacaagtgttcagagaggcactcttagagcgagaaagagggagcaaaataagtaatgactaataagaaaaaaggtagctaaaacta

SEQ ID NO: 104958 - DNA, 380 bp, Zea Mays
tgtcgaaggaaactgctgctggttccagtgaaggtggcctggtttacctgaagtacagctatcgctacaaatgtcaatttggcgagtcgaatgatgaatggcttgaagccgttgaggcgactagtgatgagctgttgggggcttatacaaaggtagaggatgaagtcatgaacactgccttcaatgctcgaggcaaaaggagactaaatagagttttgatgtgattgaatttatttatcttggttactgctttcccgctcggaaacaaggaacgaagaagaaaatcgcaactatgacctctttcgcctcgtcgaagccaataagggctaaagttttgacccatctttcaaagctgcactctttagagaagactgctgcac

SEQ ID NO: 104959 - DNA, 626 bp, Zea Mays
ttcgagagccactgatttgcccatggccgctgctcaaccaaattgtcattacattgaaggtaccgcacgagaggggcgcgttggttttgggtttcggaacgaaaaacgtgatcaagcacatgcagtaagatatgttgctgcttagcaaattacacgccctacacacacatgcattttattcagccaacggctaggttactcgtgactgtaactacatgcattttgttcgagtctagtgctcaaggacagcactaaatatgcaaggaataccatctcgcacacggaaaagttagggggtgtttggtttctagggactaaacacccccttagtaaaatggacagcatgattgggaatagattcagcattcaccggagaatgggtggagtaccggagctgccagcttttctcgaatgtgctatgagcagggagaaagttttccacaagtgcagtaaacaaccaaaaggaaggcacttcggccattggatgtaggtggagttccctgtgccatggctgtggtcttgtggaaagcaaagggaaaaaaaatgttgcctgcaacgggacttcgggctccaccgtcgatgttctgtctccaatcctcgcgagtaacctgacaaagtggtgccat

SEQ ID NO: 104960 - DNA, 331 bp, Zea Mays
tatgaatgcgaagtcgaatcatgcgacttggccgaaggagccaccactagccaagagctttcagagatgcttcaagatgtcgacaaacaagcacctgatgcaaagcgggtgagcaataccttcaaatcggtggacaccacgaaggaagtaaccttggatcccgagcgtgccgatgggcgaatgatatgcattggggccaagctctctctcaaataggaaagcacgtcattgacttcctccatgcggagaaggacatcttcgcgtagaaacccttcaacatgaggggcatcctaagggaagttgacgagaactctctgtgggtcaagcccgg

SEQ ID NO: 104961 - DNA, 424 bp, Zea Mays
agtcaccagctgaaattaaacttatgttctaaaatattcttagcatgatatctaaaatttaaaaaggaggatcaataaccaatcaaatctgttgcattaaatcctgtcttatagtcttttttactcaggcaaaataagttgagaaaccaaaaatacagactatactttcaatcgagaaaaatgtcttgaccgctttatactagttcgttagttctacaacctgatctaaggcctgatttaaagctgacgctctatctgcagacatgatgaacaggtcaaacatatgtacatacaggtaggtgagtaggtcactagtgcgtagcaaaaaaaacatcgctagtgccaaaccttctttacatagaccggatgtagcaatcaaagcttttagctttcgtggtgcagacccaaatcatcttctccagac

SEQ ID NO: 104962 - DNA, 971 bp, Zea Mays
tgccggtatatgccgtaatatggttatactcgcaacgaaggaagacatatgtattgtgtaacacaacgtttaggtggctgtcgtataactgtgtgaaggatgctcccgatggtcatgtgactaaagggtgttgtagtggcaaagcgagaattaagtttagtatttttaaacggttagttgatagcatctatcggtgtcgtcatgatttttgttgtatgacggatcgatgcttcactttataaattattgcattccatgcccatcggataaataaatgtcttgttgatcgattagagatcttatatgagcgttatcgcagcccaagaattattggaagcaagtagcattcgtaagtcggtcctggttaaaattgaagaacaatccgataacatatgcacctaagtgctttaggtccttcagtagcaaatgtaagtcttatggagttttatgccatgtgttaatgcctccatgttaggcccccaagaatgtgccattttaagtgacctgtgtattaacaactttaagttgagcaatgattaggaaaagctgattaatctgctccaacccatggtttcgagttacaatgtctaaaatggtttgctaagtcttatactgcgttagccaactcatgtaagtaggagtcgattgcgtaagtgattgtgatatatatgttgtgtctcggattgcgataataataggcaagccgatgtgtatggtgtatagcggcctaggttgttgctctcataaatcaacttgttagatggctttggttaagctcgtagtcacgatgatttgcttgttgtagtctagatgcgcatggttatggtcgcaggtaaaaattagtagtgctcatgtggtgtctaagctaaaatgagaactagtgggtgaaaagcgctttgatatacatatatgccggatttgatgattgtggtgaatgcgtggattaattgtgtatggtagttctagcgcac

SEQ ID NO: 104963 - DNA, 410 bp, Zea Mays
ggcgagttggaacaacgccccccgtccgaggttggcctcaggcgagacaaaactatgtcttccgttcgaggttggcctcgggcgagatgggactacatctctcgtccgaggttggcctcggatgagagaaactgcatcttcttcccagatctagccttgggcgagacataacagtatctcccatctgaggttgtcctctggcgagacgaaacaacatctcccgtccgaggttggcctcaagcaagatgaaacaacatctcccgtccgaggttggccttgagtgagacggaacaacgtctctatgctcgtaaggacccgggggatatctatctcccacaataacccatcagaatttttggacaccaccttgaatttttttagtgaagtttcttttcccctttagaattttt

SEQ ID NO: 104964 - DNA, 534 bp, Zea Mays
ctgatttggaggaaatcccaaattggggagttgtgagggacgattggaggtgagggctagttcactgggtgcacaattacttagcggagcaggatggggcatcaatttatagtttccaagggcggtggctccaaattttggcatggcatgctggcggccggagaggaagaaggtcactggtggctaagtcatggcgttcaccggtgcaagggttcttagatggtaagcccaggcgtgccacggttactattgcgtagtaaagagccatggcgtggcataattgaggtcgccggagtttccacgacgacaccggcggtccggccacgtcgcacggctacaggcgcggttgataagcttcaccccgcgaccaaatccgctccccctccgatcttttcacccgcccggtattatcctgcccgagtcctgcacgaatcgccacgatcagcgcgaatccttgcgcagaggtcaccggcagcgagggggggctgaacctaagatctttctgtgtactgtaccatcagaaaccttatcagg

SEQ ID NO: 104965 - DNA, 727 bp, Zea Mays
gtaaaataggggtagagatgggaagggagataagtcttttcttaagttcatggttacatgattacatctaggtttatgtaagcaatgagtctcaacaacctcctagttctgagaattatcaatccaaccactattaactcaaagcaatctaagaatctgaactaagagaccaatcaaactccaaagtcctaacagactggaactgtagcttccgagcatgctgtcacgccattttgttactgttgttatcgtgctgttcttcttggcctggtgggaatagtggttgccccacataacaatttgtctctgatgtttagagtatctggaagcttggcagatcttttacgctatctgatttcttaagagtttgttacagtatttccgaatgtactggtatttgaggaagaaaattaacttgtgcctgctatgtacgtgtaaaaacttgaccaacctatgaggaactaggtgcctttttatttatgaagaataggcaggaacaaggacttgaactaggtggtttgggtatacatccatgccttcaacgagtaaactcagttcctgttcctcctgctacatattcataataatagcttgatgttgaatgttgacttgacaagtttgattatgccatgcagcttgacattagtctacaatcatttactagaactagattcagtttatatagctatcaaagggaaaagataatcatgtgattgatttttttttt

SEQ ID NO: 104966 - DNA, 338 bp, Zea Mays
atcggtccacaatgacccagattgaatcatgatgtcgagaggtgttgagaagacccacaatgaaatccatgctgatgtcatcccatttccatgaaggtatcgataggggttgcaagccaccagctgattttaagtggcttgcctttatcctctgacaggtgtcacattccgatacgtactgggctatctccctcttcattctggtccaccaatataggggcttcaaatcatggtacatcttggtgcttcctgggtgcatggaaaatttggagagatgagcctcatccaagattctcttcttgaggtccctatttttaggaaccatcaatctgtcttca

SEQ ID NO: 104967 - DNA, 600 bp, Zea Mays
tccgggatgaatggaatatcgactaagatgagcttcatccaaaatttgctggcggacttcatcatttttaggcacaactatgcgattattaaaccatactatgccttgatcatcctttctgaaacaattcgctttgctggcttctattttctcatgaatatgtttcatacccttatcacttctttgggcatcaataatcttttgcagaagaatcgactcaagcttcaattggttcaaggttccatgttgtatcatccccaggtttaatttctccatttcttgacataatgtggtgtccggagtccttacggtaagacaatggcaggaagccttgcgacttagtgcatctgccaccgcattggcctttcctggttgataatggatttctaattcataatccataatcagctcaagccatcttctctgcctcatgtttagttctgactgggtaaaaatatactttagacttttatgatctgtatatatattgtagatttttcccagcagataatgacaccatattttaagggcatgaaccacaacagctaattccatgtcatgagttggataatgctcctcatgccggcgcaactgtctgga

SEQ ID NO: 104968 - DNA, 379 bp, Zea Mays
ttcagttttctgggcttcggtctgagttttataattagcttcgtcttcctttactttgtttaccaatgaaatcaaaattttgtctttctctagaccttcgattcttaattcaatcacctcggaccgaaggttgttgagagccattatacagctctcgtcgtcagtattcttttgtgccctcaaggcattactaagaatcaagccctgtaaaaaagaagaaagaattgagtatgacaatgaaatacttcgtttccaacttaaaagttaacttttatacctttatactgttgtatgctaggctgtcagcaagatcatccttcgacaaaatcgaaaggccatcttccagcttcgggaatcccatactcttagctatctcccg

SEQ ID NO: 104969 - DNA, 371 bp, Zea Mays
cgattcatgtttgcttgtgattttgcatttggtagatcgaatcctgccgttattggggatcattgggggcgattttaggatacttgagtctagggctaagaaattgtatggcatcctggagtaggagtttcttatagggagatgctgaggccaatttaagattcttggttgcttagagttgcaacgatcttgcagagacttgtaggtgcatgttcttgcgctattataatcaatatttctgtttagtttgatgtcatggtttcatttcattgtcaaatatgttagggcccatctctatatttatttgagatagcataaaccaatgtagtttctttatatcctaggctcatacatgcattgttggttttaac

SEQ ID NO: 104970 - DNA, 449 bp, Zea Mays
aagattgtgcctatatcgattgttctagttttgaggcaaataacatcccacggtctatccgttacctatccatttccatgcaagatcattgtgctcagaatttcgaggaacaaatgggaaaactgaaagaaaagatatacattaacaatttgcggagtttgatgatatttggaaaatacattatgttacatctgctcaatattttaagggacacatttaaggaaataagacgtcttcgtgttctatctatattcatatactcccatagttccttgccaaacaacttttcagagcttcttcatctccgctacttaaaacttttgtcaccttattactcagaaatgtcattgccaaacacggtctcaaggttttatcacctgaaatttctagatcttgaacaatggggaagtgatcgttctttgcctaaggacattagccgccttgaaaat

SEQ ID NO: 104971 - DNA, 363 bp, Zea Mays
ggacctgtcctcttcctaatatggtttgcagttgtgaatttgttaataaccctacacactgcagaagtttgttatgcatgattgtgatctacatttttccattagctttgaaaatgggtggtgatcgaagaagggccatgtacgatggtttcaatagcgacatcctaaggcactctgatgcatggattaaggttgctaacgaattcgtggtgcgcccattttttggcgagcctcgtgtggcaaaatgcccatgtactatgtatcaaaacctgatcctactagacatgtttgacctctgcattcatatttgcaaatatggctttaagccagactatctggtgcggcacaagcatggagaggtgg

SEQ ID NO: 104972 - DNA, 314 bp, Zea Mays
cctgtcgtctctgtccgccggtgctgcgtctactgggaggaggtcaacgggagttcgtcgattcgccgagagatctacactcacccgatctgcgtcatttgagcttcaaggtccaaggtacgtgtcccctgctccatgttctacatctccgattcaatccgtgtcccaaatcaacctgatttcgattaaccctagggtttacttgtacttaagttgtttacatagatccatttaattgttcatggccaacttggacaaatagggtttactgtgcactccgaatcgcctaaaatggtcaactgatccgtcgttaa

SEQ ID NO: 104973 - DNA, 651 bp, Zea Mays
ggctgatgggtctagtccatacttaagccaatcaacgtataatgcctttttctagggatctataagatttgccccataaaaagatctggaaagctaggctctaccccaatgcaagttctttatgtggttggtgatcaagaatagatgttggacaattgatagacctgcaaaaaaggggacttccctatcctacatcatgcccttttcgtgatcaagaagaggaaaccatccaacatctgcttctttcttgtgtcttcgctaaacaagtctgggctcatatttttcaacatctgggtttattatctttagcaccgcagcccacaaccggttgtttctcttcctggtggagcatgacgatcaaggagattcctaaggctaaaagaaaagaaatgaattctaccattatttttgttgcttagagctatggaaacatagaaattattgtgtattcaatgggctaaaccctacagtagatgtgctactgcaactcatttccataaagtgctctatgtggagtgttgcaagagcaagtgggctcgtgtaacaccccaaaagtctattaaggagtctaggtagttttattttctttaaaagagagaagagtttgaattttattttcttgtgtgaattatgcatttgaaattaatttct

SEQ ID NO: 104974 - DNA, 451 bp, Zea Mays
ccctttgccaaattcagatatcacaaccagttcaatataacacggccggtgagtcaaaacatttatcttcttgcccttcagctcagctgtaatgaacaagcagcaatctttctctttttcccttgccctcgcagcgggtagcgataatcagggtatacgaagccaatagcatcaaataccctattcaatcttttcttgttctgacccccgaaaactatggacaaagcattatcctcggccttggagtatgccccaagtagctcatcgctagtagcttcaatacacttcagccagtcatcatttggctcatcaaagttctccccaaatctgaaggtatacttcaatcgaactagaccacccttactagaatcagcggtggtttccttcggcatatccttgctctccacaagaggccataccctgaaggctatgtgcttttgaattaaatctc

SEQ ID NO: 104975 - DNA, 503 bp, Zea Mays
ggacatgccagggttcaacgaagacgacaatgtggcatgtgctgcccaagcaccgtcgttggagtcaatcgccacgattcttgctgaagtacaacgccaacttgggggcttcactgagtatatgatgtccatcttttcccatgtcgccgcggtggagaacgcacaaggaacctctaccgccacaactcctcctggatttccgtatgacatgccaggttacggtggccttcccccgagcactagagggaccgacggaccgtagcctctttcaactgccaccgactgaatcaccgcatccgcggatgcagccaccgcacataccctcgccgccatgacaattccactccacctgctaccctttccgcactcggcgtcacccctaccaccattgccgccattgccacatccaacacccagtacccactactcgaccccttacggtcggcgttacccgcttccaccggcttgagtttgccacattcgatggcaaagaagaccgctcg

SEQ ID NO: 104976 - DNA, 422 bp, Zea Mays
aaaattgttgtgatattgctctttcccagttgccttcgtttgatataatagctcatgcatattgcagaagcacctggcatccggctctaatccttggctcctcatggcccatatgaaaaccactactttgataatagcttcgggggtaagttggtgaagataaatttcaaaggttttcagaacttcgaccaacattttgtccagagggaaccgaagtccggctttcatgaagcttctgaaaaccaccactttgtcagcttcaggagaggaacattgttttcccctctggctctcatgattgaaatatcacgaaagtatctccctctcattactttgatctgcccttgtttaatagttgattttccgaagacaacatggctcggtctccatggccgatcttcggcatcttcctctccactttc

SEQ ID NO: 104977 - DNA, 702 bp, Zea Mays
tcttctttcttggtataattcccaagtatttcattgcacatggtctcaatcatatctagccattctttgcaaggctttttgaattgtttctcaaacttaaagtgataagggagtcgtacaagctcgtgctgctttcccacttcttttctcttcggcattccccaaccactagaagttggatatgttctgtttgataaatactcttgcactaagtctctagtactgatgtgctcggctaccactctaaattctacttctaccagttggcagggtaaccccaattgcatattgcataagggtcgagtcatgccaaagttcaactttaacggactcataactatgctcattagcttctccctctttttctcattcgctttcatgtaaaaccattcattagtccatctagtcagccacttggtacgatagccaataaccggggccttcgtatccttccgatacgcaaaattgtagcagccaaaattcctgtgaaggccatctgctctagccttcgtctggtagtgaagttcgtgcacccgacagaaagcttcggcattcgcatccattccctggctttggagagcccatatgtagacactaagtctaacaatagcattgggggttagctgatgaaggtatatttcaaagttcttttgaacctcccctatcatgtcatttagcgggaaccgaagccctgctctgaag

SEQ ID NO: 104978 - DNA, 410 bp, Zea Mays
ctcatatcgatgcggatgtggggcatctccgcgtcaaagtgggaaatctcgccgacagtggaggaactggtagtgttccgggaaactttacgaccagccttgaaggtgttcgaccgcgggcctcaagagtttccggtacccaactcaactcctttactgcactcagggtattcaattccatctggttcttcagactcgagtgcagtacatttcaaccgaagtgatggttttgggtcggttatgaccctaaatccacctctggtcacaggtgcacattccttgttgcactctgatattcctcagaataccgtagctcctccgattgatcctatactgtcgagttattctccacatttggtggttgctttacgacaacttaatttcccacaatttgatggtcatcaccctaa

SEQ ID NO: 104979 - DNA, 563 bp, Zea Mays
gcgtaaccgtgacgaccaatatactttgcttgctccgtggccgggacagacgcgggaaagtggcttccatcaatggttcctatgcaatccttgaaatgcggccagaatctagtctctcgtaatctagggtgaatctctatgaaattggtgtccttaggcttgattacgtcagaagacatcctatagattgcattaaggacttcactaaatttgtggcttatagtttccaatgagtgaccaaacttattccttatctgtctaaatgattgtggacccccacatgcccacaagaaaatggcagttgctttcgttgtactaacaccacgacttggtaccagaccataattttgcaccaacgtatcatgcaaacgtcgaaacacagtttgacgcatgcgaaacatgtcaaagaaatcatcactactctccaatgttcgctcaaccaattggatacctgtttcaaccatggttcttctcgaaaccccacttggcgagctcccccatatgtccacagcaaatagtgcaactaggaattcaccatccctctcatcatcagatgagtgtgt

SEQ ID NO: 104980 - DNA, 285 bp, Zea Mays
gatccatctcaaggtactctataagcaactcaacatgaaggtgtaagcacgtggaggtttgatcaaggcacactaagggttgcttttgccgagatggtaatagaggatgagttgccattttgctttggtgagaaacctggatttagaaagtttatgtccaaagcatgccctcactttctagtgccatctagaagaacatgtactagagatgtagtacattgtttcttccaggagaaagctaagctaaagaaattcttcaaagactcctgtcaacgggtttgtttg

SEQ ID NO: 104981 - DNA, 547 bp, Zea Mays
tcgccattcgttggtatggtgcttactatccagtttttcatagtcttctctctctatttcgcgggaccatgcacgatttagatcactacggcggtgtttggggatgaaccgcggcgagcttgtcgccgtgtggtgtgcagcgccaccgcgatgctgtgccagggaagaagaagatggcgcattcgttgatcttcgcgcgaacgggcgagattagaagtagggtagcgattcaccgagttaaatcctagccgttcgactgtggatggacgtatgtgatgggatcgcgtagtattgaactcgtggccgttagatctggatcctaaggtttagatcgtgtaccggttcacttaaatgggcgctataatctggggcgttcgctcgtgatccaacagctgatgcgtatccgtaccccttcgaccactctagtttgctaaagagcccccgcagtttatacaaaataacccgccgtcctgtagaatagttctgtgtcttgggaaaacttgcaccgaggcccccaagtttctttgttttcatgcgcccagttcag

SEQ ID NO: 104982 - DNA, 353 bp, Zea Mays
gaagacagaggcaatcacaccgaagggcatcaacacagctcccaatcatctgagacacaacaaagctccttcagaccacccaccctaagaggcagagggggatgaagctttagaggaagatttagctcacaaccaagaaggttgttctgcttgttctatggagaagataaggggcacacaactaggacatgccaagttacaatatagaagcaaaagtaaataactaagggcgaagcatggtagaatcagtcaaagcaagtcctacatactgcttcgtgctatttctcatacattcttgagtatgtgggcaatcaacaaccattttcacaacccacagtgtcagtagcttcggg

SEQ ID NO: 104983 - DNA, 344 bp, Zea Mays
cgacctacaaacatgttgccacgcaagagcgcagaaatttaaggacacggtaaatgttgtggtcgttggaggcaaggctgtgaggaagcgattggtgagagacccatcaaccaaagtacagcctcgtactatgagaccactgcatttgctctagggccccaacatccgagcaccccgcagagaacctgcgggtatttcgaagctaaaaagagagcttcccccaagtggcatgggacccttaattagatatattaattaacaacagaaagatcaaaaacagagcaaccaaagaccacagcttcgcattttggttagacttgcattaacactgatagaggcgcgtc

SEQ ID NO: 104984 - DNA, 362 bp, Zea Mays
cggaggagaacttcattgcctagctgggataatcatattctagattctccctactatgacaaggaagtggctcatagaggaaaacatctccaattcccccatccctctaacgtaaaatgtcaaagcgggtgatggattgcactagccagaggcgctagagggagggcataagaacttactagggcttagcattcccctacctggtgcgtcaaatgtcggatagaaatctccagccaggtatggaagttcagcctagagtttggcgatagaaggagggtgacacttatgaacacttcaagatatttttaaagatggatggagatgcccttggtgtttccctatggagctatcctagcctgaac

SEQ ID NO: 104985 - DNA, 581 bp, Zea Mays
tttgaatgttgcatatgaatttgtgaccaaaccagatttgaaatttggatatttgaactaaaataaaatagaaaatacaaaatagaaatgaaaatagaaataagaaaaagaaaaaaaggtgaagggagcttaccggatggcccaaaatgtagaactagcccatgtccctcacgcctcccttcctaattcctttttatttattctcttgccgcaaatgaggtcatcatgacatatgctatgacataagcatgcaagttagccgcacaaactccacatcgtgcgttcatgcgcatatcgctggcacatgggacccccttgccagcttcttcgttctctcatccacaggcaggttgcgggcgatagaacgatttccacgcaattgtagccggactctgcgcacgccgtcaccagtacttgggccccacggccgaaatctcctcccagctctcaaacgtgatggaccccaacagaacccgccgccgccgccgtaggttgttagggtcgagttcggactccgccgttcagatcttgggatttctcagggctataaaaacccaagctgctctcgtacgatttcgccg

SEQ ID NO: 104986 - DNA, 544 bp, Zea Mays
gggcaacagactgtctggtgctcccagtcgaccattggacgttgagccagccacaaagtagtcgttggttggacacactggactgtccggtgatgagcccagactatccggtgatttttagtgcaattttttgaggccgaagattttgagtcgtacagccacccggttgtcgagtgagtggcaccaaactgtccggtgctacctagatcggtccaatttcttctcttttgtgccaaaactctttagcttcttttgactcaacttgagaggacccctagcacttagacaaacatagtttgactaagtgttgggatcataccttttcacttatcttttccaggatttgcaatatgcctaaaccaagcccaaaaggcactttccttgcaaaactgagttagtacccaaaataaagtgctagaaatatagagtagggtgtgtgcaacttatccaaacacttaaacctcatgtttatgttggttttcttgcaatcctaatgactgatattttgcagattcttatgccatggaaattcaacagatgtcac

SEQ ID NO: 104987 - DNA, 347 bp, Zea Mays
tactccaattgtccacagagggtgcattagggttttgggcaatttctcccccttctatgtacatggtaagccaaggcatgacatctaagataggttgcacttacttaggaacttgagctccaaatttggtgtacttttcccaacttaagtcacatgtgatgatgggcttacttgtatagtcttgagtgaaaaccgtaagtaacacctggggtgttacaattagggaccttgaaatcattcaccagcaggtgcaaagttaaaaggagaagatggctcggctggccgacctttagaagaagatcgacaaagctaatgaggaagtgtgtcatcttactcaagatgatcat

SEQ ID NO: 104988 - DNA, 542 bp, Zea Mays
aagaagtgtgtgagggtggtgaatgtgtcggacttcaatctaagaggaaaagtccaaagaaaatgggaaaagtcatccaaatcaccaaatagtatttataaccagaaagactgagtacaggagaggtccagagatcacaatgaaccaggtcaaaagcctgctcagcccgagaagaggaagtggtgaatggcagacgagtatgccggcctaactgacaagcatgacagaggccctcaaaatgtcccctactacatgaaggatctaggctactggtaatcttggtcatgacgtcaggtccgggatgtccgagacgacgatgccaagtggtggaggaggtggtggagaccagggcaagaggcggagatgcgccggaggtggatggccggagcgtgtagaggggcctcgagctgtcacaacgggcgaggggagtcctggtggccagatccttcatagagaaaccagaggggtcaaactcgatggaacaggagttgtcagtggtgaaacgacgaacagaaaggagattattagtgatgtggggggct

SEQ ID NO: 104989 - DNA, 509 bp, Zea Mays
ctttcctagcttcttccttatccgaatgagcctgagaaaaacataagagtaagataaacacatacagtaactcgcagatggtaaaagtaagagttcagaatttgagatgacctcttcttcatcccgtctgatagcttcatccgctatctccctcccaccatagagccaaattccagaataaaattttcctcctagagtaatagcttcggcagagggttcttttacatcttcagctgacactgtgaaatccggttgaattacaaccttcgcatgtttgcaactagccttctcaagcagcgacactgctccacgagcccctacataagcgcaataatcacctcaaccagcaaggacttcgtcaaaagcctcgactttgccttttatccatttaattgccccttcggcatcaccacgaataaaattttggtcatttgagaatgcaccaaatttagcaaacatatccttcagcgtatcacaacattaaatagcaacaaaaaaccttcttcttt

SEQ ID NO: 104990 - DNA, 999 bp, Zea Mays
attgggttttgcctgtaaacaaggtattgggtagcctttgaatcatttcttggagatgctcttaagcagactctgcatcccactctgcaaccccttccaccgataggtcccgagcgtgccaccgtatgttgaaggaaggatcttctcgtcggcgtgaagtcggtggaggctccgcctcctcggcgaccgaagtccacagagctgcggccggtaacaaagcaccattttggtacgaaccccccgtattcatctcggtgctcatcgattgaaagatttgctatgagcgagtagcccgtggcttcaataatctaggttgatctcaactggttaaccccatcttcgttgtgattatctcagtgcgacgtcatgcgattcactagtgcccttgtcgatgttgtgcggagacatcctaaccgatgaggatgtacaagaggtgatttaggccctcttcccccacccatgtcctttccttggtttaagctacatttgtcatcaattttcttaaactatatgtatggagcatgtatttctttgtggatgccataactcttcggctttagaagaagtatggttgggattaggcattccgtgcctttctgtttgttgggtttacaatttgtcttgtcttctatgtctctactaatcaagctagtgccttggaatttggacaatttaaaaggcatcaaatcaacaatggcacagagatttcggcgacatcaaagaatggtctagatgtataacgatgaagagttcctccatatgttgcacaccactcaattagctaaggaagaggatgagcaacaaccccatcgtgtctccattattggacatcgatttatcaaccgagacagaagctcaggttactttaggttgatgcaagactattttgttgagaaccatgtgtacaatagaattattttgttgatggtaagttacaaagatccatcttatgtacttcactacttggacaagtataacaataaactagcattgttttac

SEQ ID NO: 104991 - DNA, 564 bp, Zea Mays
gtttatccgaagattatgatgacagtgatagttatgacgtggaaagtggggatgaagactctgaggatcggccgtggagcccaagccatactatcttcggaaaatcgactaccaagcaaagtcatattgatgccatgagggggagatattttcgcgacatgtctattgtcagagttggaggagacagtactgcccctgctccagaggaaaacgaagttgttatataccaaagcttcttaaaggcaggtcttcggttcccactgagcaagtttgtggttgaagtgctgaagctataattaggatggggatttttgtctgggctgtaaggagtcaggggctagagccgagcgcgaagtgcttctgcagtatgcacgagcttttatatgagacgaaggctactggcgaagaacaataccgtaacaacttcggttgttatggatttattgctcgccccaatgcaagccaccctgtgccaacattccggaaaagatggcccgaggcctggatggaggagtggttttacgttaaaaatgatttaatgacaagggaagacatcaaagaaat

SEQ ID NO: 104992 - DNA, 430 bp, Zea Mays
gtcatcctctttgcaacttcagaaggaagtccttttcgatttagttttacaactaactcattttattttaaggtcatcttcttacatttagactcaaagggcagggggaggggttgggatggttacataccgattcccttaggtagacaatcagtgaagttcgaacgtaagaattcctcaatctcccaagtagcttcttcctctgagtgattgctccattggatcttatacattttgatcgacttagcctgagttgatctttctttgaaatccagaaccttggaagggtactcttgatatgatagatctggctctatctccacttctggttctgctatgacctcggttggcaatcgaacacatttctttaattaggacacatggaacacattgtggacgacagacttttttagcagtagcttcaatttgt

SEQ ID NO: 104993 - DNA, 533 bp, Zea Mays
cttgatgaaatgtccagactttccacagttgaagcaaccattgcaggaactggaagagcagggaaacgagtaccatgggcactcggctgattggtaggagcgggggcagtagtgggacgaataaagatgtgctacttgaatggatatgaaggtgggtgaggcgaagaacgattttgattgaaaggtcggattaccaaccttgttctcttctcaggtccttgattggatctctcacccgcataaccctttgattttccatgtcccatatttttagcttcaactgccagtgttgtactgacagccctgctataagtaaggtccagacatgttgccattattcgttggagcccatcgttcaatcccctcataaaacaattattcttcttcaagtcggtatccacctgattaatggcatactgagagaggtggttgaatttgttgagatactgcatcaccgtatctcctccttgcttcaaccggataaactcttctagtttcatctgaagcacttcctctggaacataatgctcccg

SEQ ID NO: 104994 - DNA, 290 bp, Zea Mays
cttctgggtcgaccgtttgctcgaagggctccgagggaggagatagctcaactgcgatacaaaacataaataagttcgaagtcacagaaataaaacacaaagtcaaaagcaattaagcaatacctatccgcctttcaagtttcgcagctttctcagctgccttcgtcgcttcttttgcatcatgagaatctttttcactcttttttattatctcgtgcgccatctctcggccgccattttcccagatgtcagtgaagaatttcccgccaactaagcttgcttcggccgag

SEQ ID NO: 104995 - DNA, 721 bp, Zea Mays
caagaacttgaatgccttggaagatgaaagctttattgatgaagaaatcttctgattacagagtacaactcgccctcaagagctttgaggtattgctaggggtagaattttctgagatgctcgatattccatgagttccctacttcggtgccatccatctgagtaagccagtaggatccctgccatgtgacctcttctacaacgaatggtccttcccatggtggtgacagcttgtgccgtccctcccctgttaatactcggcggaggaccaagtctcccactgcaaaggatcgatgtcgcacagctttgtcgtggtagcgcctcaaggtctactggtacctggccgactgaattaccatgtttagttattcctcctccagcacatcaatgtcctctagcctggttgcttctgcttcggctatgctttcaaaggtcaacctaggtgccccaaagatcagatcgacaggtagcactgcctctgacccatacaccatgaagaatgggtgtttccatgtagagctcgacttggctaggttcgcaggctccaaaccacatatggtagttccctgatccacttccctaccagcttctcgcttttgtcgaacaccttcttcctaagtgcatctagtatcattctgttggctctttccacccgcccattagctcttgggtgtgccactgatgcgtacttgatttgaatgctcctttgctcacagaaaac

SEQ ID NO: 104996 - DNA, 477 bp, Zea Mays
aactgcgtccctctatctgacactatctttcgaggaataccatggagcctgactatctctttaagatatatccgggcaagggtggctcctccaaaagtggtttttactggaatgaagtgggccaccttggtgagacggtctattattacccagatagagtcattccctttttgcgtccggggcaatccggttacaaaatccatgcctatttcctcccatttccattcaggcactgggaggggttgcagtaggcctgcaggtttctggtgttcggccttcgttcgctggcaggtgtcacaccgggccacatactgtgctatctccttttcatccctctccaccagtatctggctttgaggtctaggtacatcttggtggttcctgggtggatggagtaggctgagttgtgggcttcattgagcaggacttcccgtgcctctcctattggtacacacagacggttcttgaaccaaagaa

SEQ ID NO: 104997 - DNA, 547 bp, Zea Mays
aagcactcagaaagaaagtctttgacaagaatgaaaagtttgtgggaaaatggatcagagagttgccgtatgtggtttggagcttaagaactcaacctagtcgagctctgcatggaaatactcttttcttcatggtctgtggttcggaggcagtgctacctgccgatttcaggtttggggcaccaaggctggtcttcgaaaacatagctgaggcagaggctactagactagaggacattgatgtattggaggaagaccgattgaatacagtaattcagtcagctagataccagcaaaccctaaggcgctatcatgataaggttgtatgacatcaatcctttgtaatgggagacttggttcttcgccgaattctaacaggggaaggacgacacaaattgtcaccactatgggaagggccatttgtagtagcggaggtcactcggccaggatcatataggcttactcaaatagatggcacggaaatagggaattcatggaatatagagcatcttaggaagttttacccttagcaagatttcaaaagcta

SEQ ID NO: 104998 - DNA, 367 bp, Zea Mays
cggatggatccgccaaattcaaaaaagggggctcaaaggttatcaggaagactgacatcattgaacagattcatttcaagatcagcagagaggactgcatttctttgaaatattgaaatcagcaaagtcttccaatgaggtccagcccagcagaaagccttcgaggagctgaagcagtacttgatagatctaacaactctaaccccaccttcatcagggaccccattacttctatacgtggttgtttcccaggctacggttagtgcggtacttgtacaagagaaacaagatgtccaaataaaaaagcaggcaccagtatacttcgtctccgaagtactcagcccatcaaagaagaattacacagaat

SEQ ID NO: 104999 - DNA, 386 bp, Zea Mays
tccgtgtcaccaagacgccgcagcctggatccagtgtgagcccccgccacctccggcctccccttccttgtctcgctttgattttttacggccacctctgtgtgtcatttcttcgtaggttaagttcagcgtggaggtgcctacttccatcattcacgagtgctaccaatccacgctacaggagtacgccaaacgtgttaaggtatcagtttctgcgcaaactggctgcaaacacgtggacgagcacacccatatgaaatttcgaaacgcattattggttcctttatatgataacgaggttgggtatgttgcaaacaatttcctggcacagcaatgcattttaagctgtcacttcaaatctaatgagtgcatgcttctgtgatcat

SEQ ID NO: 105000 - DNA, 339 bp, Zea Mays
gtgcgatctcttatccttcttggacgcttactctggtttccaccaaatccggatggctaaggaggataggaagcataccgcttttgtaacagtagatggactatactgttatgttgtaatgccctacggtctgaggaatgccttgccaacctttgttcgggcaatgagcaagacattcggggacctgatccgggataaggtggaaatttacgtcgatgacatcgtagtcaagactagggaaaggtcggctataatggaagacctagccctggttttcggcaagctgcgggcaacccgcaccaagctgaacccggagaaatgcatcttcggtgtctccgc

SEQ ID NO: 105001 - DNA, 1025 bp, Zea Mays
atttaacaaggactactacacttaaacgagagcaccaatgagacaagaattgaagtttaatataattaatcatgtctgctaatatgattgattattgtatggtgtcgcttgtggacgccctctcttgcctcttaataggtagtagagatgcatgattgaagcacaagacacaactatctcaagacatgagaaagaaaactaatgcaaccacacagtgatcagtcatgttacagaacaacatcagatctaaaagatcgatgagtttaatagaatttcgcattactgaaagggagaaggcaattcaaatttcacttacttacctgactgacaaaactgaattttctagtattggatctgaaagaaatcccgctaggaaccaccatctcaaatgcccaatactccaagctgagttatcttgaaaatcaaattaccagttccatgcagaaagtaggaaaaggtagacattactactttgccaaaccataaagttcgaattcaagacttattgaaatacatgtttttcacatggtgccccacatcaagcttaccaggtcataactgtagatgatattgctagctttagataaactttagcaccatttaactttagtgtctcccctaaccatccatgccaacttcttcttccatctttaaagactttcacatacatagctagcagtgccacattgaaccagtaagataccaaggccaaaactttgaaccagcacattctagtcccattagtcactatttttcctaaagatcacataaaacatcaagatggcagacaataataatcctagaatttttcagtctaaaagaggaggatgaaatggctaaaatagggaggtttttttccaaatacatggtactgttttcgtgcacgcaaaacagtttcattaagataataaaaatgatcttttccactggtccttcaagctgttcgcaagcatggcttcacgccaccgacccgcaacaataagataggcatccccaccagcacccatcatttatgtaaaacaaag

SEQ ID NO: 105002 - DNA, 1005 bp, Zea Mays
gtgaggtgcttctaacaatcaaagtgtatgcatatgatgagatgacctagagggtggagtttagggagagataaaataaggggggagattagggttccaaaccttgggttgaaattttaggatgttacaaacctaccccacttaaaggaatctcgccctcgagatttagactggatttgagaaaaggtaagggtattccctcctcaaggagtcctcactctcccaagtagcttcctcttctccttctctgctccactgaactttacagagtttcacttctgagttgcgggtcttccggactgctgagtcaagaatctttattagcttctcacggtactgaagatctttctgaatctgtattgcctcttcttcgatgtgactttctggtgcttgcaggcatttgcggagctgggacacgtgaaacacattgtggatatcagacatggattctggtaattcaagacggtatgctgcgggtcccactctgccaatgatgggatagggaccggcgaatcgtggtgctagcttccctttaacttggaatcttctgacaccacgcatcggggagaccttgaggtagacgaagtctccttcctcaaatctgagttctctctgcctgttgtccacataactcttctgccgactctgagcttcaagtaatcttctgctgattagggcaactttctcctcagcctctttaacaaaggcagatccttccagtgccttttcccctatgttagaccacatgagaggggtctggcattttcgtccatacaatgcttcgaacggtgacatcttgatgctggcctgatggctgttgttatacgagaactccgcataaggcaaactggattcccagcttctatcgaatgttaacacacatgctcttaataaatcttcgaggaccttgttgaccctttctgtctgaccatctgtctaagggtgataggcggtgctaaagtctagcttggtgtccatagctttctgaaggcttgtccaaaattt

SEQ ID NO: 105003 - DNA, 419 bp, Zea Mays
gatgctcatcaccaccagagaacttaatattgctacgaatcgggacaacattagcaccagtgagagggagcttaacaatatccgcaaaagataatctcttcctgccccgaacatccagccaagatgccgtttcttcatccgtaaaaatcttgaattcttgtctccagttagggccaccttggttccaaaggttgaagaatgttctaaattccttacgatcaatacatctggaattgtagatatggaaacccacgaccatcgaagaaaccgaaaaccgaaaaacccgatcagcgagctgaagcacctcaaacccagacgcgaacccaccaagggcggcctggaggagatgaccaatagaatccgagttcaacttgaaaatgcatctgccaaaagaaaccaccaaccagaaggacgaccga

SEQ ID NO: 105004 - DNA, 406 bp, Zea Mays
attttataggaattctctaagtccagaagaaaaagaaaaagagaaactatgaacagtgttgggctgaatctggtccaagtcggcctagaaacggggagaacgcgcgcccgtgcgtgttgcgatgtccattttgcgcaggggacccaggcggtttgaaatacctataaagagccccccactgttcttctgtctcgctgacatttgcacagaggtccctcgacttctgtttcttctctaactcgaccccttagccacgacgcgctcaccgccgaccatcctgttgctcggaccggccaagaacaacggtggctgcccaaattaactactgggcaagcatcactgactcgaaataagtctagaacaagctctaattggagtaatccggccctggatttgcctgcccatg

SEQ ID NO: 105005 - DNA, 1159 bp, Zea Mays
tggaaacacacatgacgaggaaaagtacaaaaaaatcatacaatcatgtgcattgacaaaagatcttgagttgtttgcaaatggtgatttgactgagatcggtgaaaggggaatcaacatgagtggtggacagaaacagcgaattcagattgcaaggtcggtgtatgaggatgcagatatttacctctttgatgatcctttcagtgcagtagatgcccatactggaagccagcttttcaaggtctgttcaaatgcacaaattacttcaactttttactagtaatgtgataatttgactgtctgaggctcattgctgattcagaagagaaagtaattggttcatatcctaatcaaacaaaataatttcattctacaggattgtgtaatgggaattcttaaagataaaacagtgttgtatgtgacccaccaagtcgaattccttcctgccgcagaccttatactggtaagtatcaaaaaatacttttggtttaacccatcgtatctatattccaaagatcaaaattgccaagtaactaaccgtttgaattcaaattaacaggtgatgcaagatggtaaaatcgtgcagaaagggaaattcaatgaacttcttcaacaaaacatagggtttgaagctatagcaggtgcgcatagccaggctcttgaatctgttataaatgttgagtgttccagcagaataccgccagacaacaaaaaatcagcagacagtgaggatgagttcgatacggaaaatgaaatagatgaccaacttcagggcataacaaaacaagagtctacacatgatgtctcacaagacatcagtgacaaggggaggttaacacaagaagaagaacgggaaaagggaggcattggcaagaaggtttattggacctacctgagggcagttcatggtggagccttagtgccagtaacaatagctgcacaatcgttctttcaaatatttcaggtagccagcaactattggatggcatgggcatcacctcctacaactgcaaccactccaaccgttggattaggcctcctcttctctgtatacatagcactatctatgggaagtgccctgtgtgttttgtctcggtccttgcttgtgtcactaattggtctactaacatcagaaaagttcttcaaggacatgctccac

SEQ ID NO: 105006 - DNA, 367 bp, Zea Mays
gctagccccagtgtcgtatccaagcaatccagcacggtaagagccatccccccagttgaacagatcaccagaagcagatatagcacaggtatggaactctccgcatgaaataaaatcaactatggtcacggatagtgactcaacaagcttgggacgactaatatctgtatcagttccatgaccaaggcgcccaccaagttcctcgccccatgtaaacacctccccttgcctggtagtaagagcaacatgccttgaaccacatactatctgattaacatctaagacgacatctgattctaaaggcttcgggatcaaaacgtctacttttgagcaagacgagcttgtgtgtccatctgatggggccgca

SEQ ID NO: 105007 - DNA, 803 bp, Zea Mays
ggcagatcagtttttcttccaatttaaagatatatcttataaccgatgtgaattattaaatctactcaggtgaggaagaatcgattggcatactttattaggttgttgattatgtattcgtttggtggatctgacgcagcttccctggcaaaattgaaattttccaacttaactttttgatcgtggtttcgaatttttttcgttcgataactaaaaaatcggaggttcttatggttgttgggaggcacgcatgggtccgatggatggaagggccatggaccatgaagtcccatattcatttgtctgtggaaggaaggaaaagaaaagtagattacaagcacttggtagctgtttacagttcacacttgttatacccaacatctcacgcaaggggaccgaccacttggaagcttctccgatttgaccccatgtggatttatggactcttgtgcttcatttttttagtactggggaccttcgttcactaaaataattactctcacaagtctgccactgttgcacaataagggaaaaatagcttatactgattgctacaaaacctgactatagaaaagcatatgccgtcaagtgttatgttgtctgtgttaagtgcttaataccatgcatgtgcgatccgcattgttgtcatgctcatgaacacgagcaggcaaatgtatggtaatattggctagtggataagctgtcttgttcactatatcccaatactgtaatttgcatttatttattatgtctcggtatatactaatgcatggttttgctttagtgtgtctcattgtggctgc

SEQ ID NO: 105008 - DNA, 408 bp, Zea Mays
ctggaaccggagacgtgggtactagagtaccagctgagcgtgttgtttgagggcacacggctgattttgaatgtcaggttgtactttttatgaagatccaaatttgttggaccaaagcttcagcttctgatagctagtaatctctaccagtatatcatggtcaacacaattaattcattaactcattaggtgctaaagaactgactgaatttagagaaattgcagacctgtgcattgtacatcttcatgagcgtacatagtacgcaagatttaactactcgagataagttacgagtacacatgatcagtggtttcatgtgttggtagagctacattttggtgcatgagaggtttggtactcaatctcattccccccccccttgcaggcaagggacatgccctgcgaac

SEQ ID NO: 105009 - DNA, 455 bp, Zea Mays
gcttatacttttgacagttgctaatttatgcaacaaatcttgtgtgaaaattcttgagagatgccttgaagtggacaacctcccacatacaattttttttgcaattggcagagcaatcattccataatcttagcaacatattatcatattagtttcttggtgttggcaccatttgaccaatatttttttgttcctaaatcctctaatgaaggagaaggcgagaaaacacttggacttgaaccgattaaattctaaaggtccgagggaggaggaggccattgattacagggaggatgaacatatattttcaatgacaaaaatgatgcataattatttagtagattaatcctgcgagctggaatactgcaagcctgcaagtgaaccacatattgtgcttgctgcatcttggttttatatcaacatgggtcacccgcataatatatcttgtgagctgg

SEQ ID NO: 105010 - DNA, 552 bp, Zea Mays
aacaagacaaagattgtgactctaacgttccaaagatggtgggtaatgaggagaacgtccagaaacttttcttttgtgtttgtcatcttcttgggacatgattcgacttaggctaggattccaggactgaatggtaagcatatgaagatgtcacaacgcccaacagaactagtagtagattatcgtgataatttgaagacctttgtgatgtgatattaaggtaggttctggtttatttgaaaacctatcaaataagtttttcatgaaatgctcatggacaccgatgacaaactaaaacttaaattttgatagacttgtactttaaaatttatattatcgctgtggcttgttgcgtctttaatctggctgcggttgcggcttctacgctattttgtctctatagattgcagctccggcagtctgaacagctgtagcaggtgtggctgcaggtgcaggacaaccgaacaactaattttaaaaatattactaatcatatttatatcatccttatatatgtcaatgttactaatcatatttgaaatgtcaatatta

SEQ ID NO: 105011 - DNA, 317 bp, Zea Mays
tagattttatcttctcctaactccatattctacttcctccctttctcatcgttgtgtaatgtatttttctcaaaacaacagccacattcagtctgcaccggatatcccacactaaacacaactgatgcttctagtgcttagggtatcttgtatcgtctatactatacacgtatctagtgtggtgttcgtgagccttcaatcacatctgatgcctggttaagttgtgttttatcattatatcatccgagaaccatttcattttctccattttccaatctcgcaattccttcatacatcggccaccatcccacttgttg

SEQ ID NO: 105012 - DNA, 748 bp, Zea Mays
tgcacttgttctagcgcgtttattatgtcgatccggctgcacctgtagtcggtctttgcacgggtagtctttttgagagagacttcgattttgcgcgcttgttgtgctagtccggctgcacccttaggcgaattttgcacggatagtctttggaggaagactttggtttcgcacacttgttgtgctagtccggctgcacccttgggcgacttttgcacggatagtctttggaggaagacctcggttttgcacacttgtgctagtccggctgcacccttgggcgacttttgcacggatattcttttgaggaagactgtttttgcgcacttgttttgctggtccggctgcacccttaggcgacttttacgcggattgtcgcacgcgagggtagccaacgctgcccctcgcagtgactttgtattgatcgaatgccgaagaccgtcgatgcggtcttttttcgacgtaatttttgcgggggattttttgcgtgtatattacatggctccacctcgttaaaaacctcacccctcgggaggaaaagagtgcgggccggaataaaaaactgtcttgcgaatttacaaggccgagctggccctgaggagtcaaacaaaaaacttgcgaagattgtcaatgttccaagaatgctctaagtcttcgtcggatggcgttgtgagcctgtacgcgctgggggacgccttcgtcttgacgatgaaggggccctcccactttggctctagcttgccctggg

SEQ ID NO: 105013 - DNA, 418 bp, Zea Mays
aaccaattggttgtaccacaatcaacctagcaatttcaagtcatggagtgacttgacttgtatacaacgtttgttgcaatttgacttagaatataaagtttattgtgacttatatatttgaatctatcaaattcttaagatccaccaatgataaaatgtaggaacaaaaaatttcacacatacggaaggtatgctggctgtgtctctacatgaagacatgtgctacaagctcttgctatctcaccaccttgctttcataaagaaagcactatgagagtaagatctcacttcaatcatagtttagcgaaagaaattctccttgattgccgcttttgatttgacccaaaatgagtgtagaaacaatcttgcctaggacttttggtctagatccagtaggtgtacgacaatgtgagatgga

SEQ ID NO: 105014 - DNA, 369 bp, Zea Mays
atttgagtctttggagaattggagaagaggatgtgatggatggtgggagagggcatcattgtcgcatcattaccgctagacgatgactatgattaccatacatagtgggggtagcggcggcgcctgcttttgcaggaccctatagataggtggatatggaccaaacagtgtgacatgtgatgtgatccctcgtctctcgctttggccgtctattagatagtcttcagcggttctcttcttcccctatatcccattagcgtgtcaagtcttacctctatatcttcactttctgcaatggttctccatatactatccccctaaaccccaccataccaataaaatatgcatttccctacaactgactcaact

SEQ ID NO: 105015 - DNA, 530 bp, Zea Mays
gaagaggtcattgggagagaagcccaaagataaggtgtccttaggggagaagctcaagggaaagaaacaagaataccaaggctcctccaagtcacacaaggacatcaagaaaaagatgatgcaaaaggtggtctactacaataccgacacatcttcctcgccttccacatccggtgccgagtcaacatcttcaaagtgccttgagaataaactagttaatcaaatccccttattttatccttgcattcctaaacataccccttgattttggttccattaggaaaaccaccacaatttgatggtgaggattatttgtggcagagtgttaaaatgataagtcacttgtcctcactccacccaagcatttgggatgttattaaattaggaatgaagatactagagataggagatgaggactattacttagacgaggtggcccaaaccattcatcacaactctcaagcaacaatggtattactcacttctttgtgtatggaggaatacaacaaagtgagtgggttgcaaaccgc

SEQ ID NO: 105016 - DNA, 493 bp, Zea Mays
ttcatccataaggaggtccgaaagctgttggacgctggcttcatcgaagaggcccatcacctagtatggctggccaatccagtcatcgtccccaaggctaacgggaagcttcgaatgtgcatcgactacaccaacctcaataaggcctgtcctaaggacccatatccacttccacgaatagaccaaatcgtggattctacctccgggtgcgacctcctgtccttcctagatgcttactctggtttccatcagatccagatgtctagacaagataggaagcataccgcttttgtaacagtggatgggctttactgttatgttgtaatgccttacggtctgaaaaaaagccttaccaacatttgtatgggcgatgagtaagacttttggggacctgattagggacagggtagtggtgtacgttgatgacatcgtggccaagactaagagagggtcgaccctagtggaagacttaaccctggtcttcgacaagatg

SEQ ID NO: 105017 - DNA, 381 bp, Zea Mays
caatgcccatgtcatttgggtcagcccaagtccatgcgtcctaccagatgcgatgttggagatactgtgtttccgattcactgctataagcaatcagcatatgcaacaatcttaagaacacttaagagctttctatgttgtgacaaaccacctctcattggacgacaaacatataccaaagttacaaggctagagtttttttatgtttgtcatttcatatcttttaactcccgtggcaacccacatgcacatacctagtaaacatataagagtcattgtaatgttgttcagtttatgacctatgcaataaacataaaagagcaaccacaccgttgttcaaaagccaaacaccgtgaaacccgtccatcgaacaatccaacc

SEQ ID NO: 105018 - DNA, 456 bp, Zea Mays
gtcgatgacatcatggtcaagactaagagagggtcgaccctagtggaagacttaaccctggtctttgacaagatgcgggcaacacacacgaagctaaacccagataagtgcgtctttggtgtctccgcagggaagttgctgggattcctggtttcgcaccggggcattgaagcaaacccagagaagatcaaggcaattgagacaatgaggcctccggcccgcatcaaggacgtccagaagcttatggggtcactggccgcccttagccgcttcatctcaagactggccgagggggcgctacccttcttcaggctattgcggaagtcctgtccattctcttggaccgaagaggcagaacgagcctttcaagagttcaagcagcaccttgtgtccctaccaatactggtagctccagagccaggggagccgttgtacttatacattgcagcggctaca

SEQ ID NO: 105019 - DNA, 277 bp, Zea Mays
cactttaaatcgaattaggaaatcaaagactcgtcgcgtgatagagcgcacaacgagacacttgcattaattataaagagacgtcaagcatcacacgacgaaacgcacaacgacatacgtcaacagagccaagtttaaagtggaacgtctcacgactggacgcgcgacgtcacatattaaacaacctgaaattaagatggatcatcgcgcgatgaagcgcgcaacgcagcacattaatagaatctgaaattaaacaaatttatcgcgcgatgaagcg

SEQ ID NO: 105020 - DNA, 555 bp, Zea Mays
agaagcttgaatcatgggaaggtggagttactgatccctggttatgtgtggagccaagagctgaaatgggagtggagtttggtgtttctggctgacccatctcacttccttgttcaactgagttcactcctcctgagttttgatcagaagaaatttcagtttcaacaatttcttctattgttgtctctctgtcagttttatcatagtgaaccacaaacatgtctggatcttgactgtcagctccacacatagaggtatcccagtcccattgtttattctcctcaaaaatagcatctctactgaccacaagtcttctggtgcttggatcaaatagtctatacccttttgtacctgacttgtacccaatgaacaccattcgcttggatctgtctgataatttgtttatgcctggaccgagttgtttcacatgtgctagatagccaaacacccttagatgattcaccttgggttttttccatgccaagcctcaaaaggagttctactttcgagagcttttgttggtgatctattcaatagatacactgcagttctgac

SEQ ID NO: 105021 - DNA, 463 bp, Zea Mays
gtccttggcaagttcgtgagtcaacaaatgctggccaaggaggcaaggtacattgacgttgttgccaacgggagccctcactataacgaactcatcgccctcaaagtgacgaatgacaaggaggtgctcccaagaaaggtggcgtaagttgaggcgaccgacctcaatgaagaggagatggcgcttgtgatcaagcgctttaagaccgcactcaagggacgcaaggacttatccaacaaaggaaaatcaaggggaagtgcacctgcttcatatacggtaagactattcatttcatagcaaattgtccagataatgatgaccagtatcaaagcaagaatgccaaggggaaggagaagaaaaagttctacaagaagaataagggtgaggcacacatcgacaagaaatgagactcggactgctcttcatctgactccgacgataagggactctcgcctctaccttc

SEQ ID NO: 105022 - DNA, 1316 bp, Zea Mays
aagtagtgagcgtacgacagctgatgccaagcacggagaccatgcaaaattgtgtcctcaatctcacaaaatcaggaaatcaaccacgtcaaactcagagtgtgaaatcaaggcaccgagtagccagagctagatatgtgtggtggcctctatgtatcacatcctaagttgcaaagtgcgcctcatgagctcatatagaaacttggctgctgaagtgaagtcggctggagaacaccgctacccgtctatgaacggaggtcgaaacagcacagcgacgtggacagtagcaggggcaactccgacgtgagtgcgacgaggaggatctgacgtgccatagcacaaactgtggagcctcattgacgactcaggaagtccaaacagctctctgatctgagttgcatgcaaagtcacatcctctcgctcaaacccgaaccttagccattgatgatctaggtcaatccaaactgtggcataaaagactctgacccactcctcaatatatttgccaccgaaggtcagaagagagagtaaacctggcagatatgagagatgaccctctgactctgcaccagctgctgaaaggaaggcagagagatgcaaaagccggtgcgctcgcaaggaaatctgagtagacaactgcaccctgaagaaggactcctgggttctggtgctgaagagtggcgcagctgctgggtctcgctgcgctggcaaccaagaatccacgggtatgtgtctgaattgacgtacccgggtagttgtggctcgctgaagatcaagcggacgaggatcaacagcaagcggtctcacctcggtctcgtcacgctctcggaagcgaggtagaggaaaaggtggagcgaaaacgagagcgggagcagtggaagcaggagtagtggaggtggtggaaacagcaggagtggtggacgactcgagagcgacaggagctggcgaagtgggaggtggagtggagattgggtcaagaggagtggagcgagtcgtggggtagtgaggccgagaagcgaggcgatgaactcggtaggcgatctgattagaggaaatcctcaactgccctccctgctcagcctaatctattgctgctgctacaagtgctgcacgagcggctctgtccagacacctcttctttttgccctcttgctgctcaagatagacagtcttgcccttgacctgtctgaaggggcgaggagggtcctcatcatctcctccccctgacggtgtgacattcttcgtccttgccatcctgaactgactgttgcaagataagaagaaaagataagcgagagtatagagcagtagataag

SEQ ID NO: 105023 - DNA, 725 bp, Zea Mays
ccgagttcaaagagtttgtcattgaatttgtacatcgcttgtctatccaatctcaagcattgacagatttcattattgtttagacaccaagcccacaagaggatgtaggcatttctgacgaagctgtttggactgtcttctgtaatggatcttgtggctcttttggagcaggtgttgccactattattatttcaatttagaaactaaaaacttcatatgcagccaagctagagtttcaatgcaccaacaatatcgcataatacgaagaatggggcttcagagggatggttgtgtggatgctgaccatggtgccaccgtggaggcaagtgtgccaccaagattcttggtcggagatgggggagtgggtggtaccaatgatattgtgacgaatggcttagattaaaagagggtaccggttcggttgaatgaatctagaccgtcgatcgggtcacagacatttgaggatagatctaggatttgaaaacctaagcactgattctagatctaacggatctggatgggtaccagttcgattgggtgccaatctaatcgtgaccactagtgtgtgatccgatgattcagaccagaagataccctttcggccgtagacacttttctaaagagtccctgacattttatttaattaacccgccgctcgatctagttagagaataattaaattttggtcctaaaattaaagcaaagtaccctaagtttcttcaaaa

SEQ ID NO: 105024 - DNA, 385 bp, Zea Mays
caagaatcttcactggtttttcatggtactgaaggtctttctgaatctgtactgtctcttcttcgaggtgactttctggtgcttgcaggcatttgcggagctgggatacgtgaaacacattgtggatgtcggacatggattccggtaattccagacggtatgctgcgggtcctaccctgccaatgatgggatagggacctacaaaacgcggggctagcttcccttttacttggaacctcctgacaccacgcattggagaaaccttgaggtagacgaagtctccttcctcaaatcggagttccctccgtctgttgtctgcataactcttctgccgactctgagcttcaagtaaccttctgcggatcagtgcaactttctcttccgc

SEQ ID NO: 105025 - DNA, 328 bp, Zea Mays
cttcttgctcctcgcttcctggtcttccagatgcccaaagccgcaagcagcagctccgcagcagaaatgccctggctctcgctggagactctgtagttcgcacttcccatgcacaaaggcatgaacgccctaagccgaaagctgcgtaaacgtagagcgacaccagtcactggtgtcgtgttcattttagccgcagtttcctttcaaacttgttcgccgcactagttcgcgctcgtatagcgataaaccatatcagtacatcaacaagacagtatagcacagtacatgacattaacactactttgcgcttccgttggtaggagggact

SEQ ID NO: 105026 - DNA, 583 bp, Zea Mays
aaaaggaggaagtcgcttgggccgaaaccgtgcatgtgtcaaaaccatgcaggccggccaatttacccccaccgctcgaccacctggccgacaggccccgcttcttagccacagctgtgcccaccgctgtcgctgactatggactcccctcgctagagccatcttccctataacaaacccgagcatagccatatctcatagcgtagccatccgaaatccccgagcccgaccgtttttcctcggctaaggactcttcctgcccaagggatatgtaacccaatcctctgcacctatttccttgccatcgaacatgcgagctacaccatcattgaaaggaaccgagagccccactgctagccgctactgtagccagaagaggaggagagagtttagtcgtcgtagttggggtagggctggatagcgccttaccgtggattacggtcgggaggagtcccctgagcatgcggatggagtaaatgacctcgatgggtgaagctagtcactcgagaggacgaattcgtcgttagaatcatggcaccgccggctacgtttcccaatggtcggggaacgtcaccacctcaac

SEQ ID NO: 105027 - DNA, 304 bp, Zea Mays
ctccccttccctttcctctgtctctcaaatttagtggagctcctgccctttcaagcccaccccttgttgctcaatccaaattctttatattcctatgaatccaagtggtgggatgtgttcttttgtgtctcttgaacatctctgcaggttcctagctccttcgggagggtttccccacctccaatagccatttcattcaaaacctaaatccccgcacatcacatgttcgatgaaatgcaccaaccactcaaaattgctccgattgaacccaaacttttcaggcaccatcacaacacctccagta

SEQ ID NO: 105028 - DNA, 308 bp, Zea Mays
ggaggaagaagagtatgaagcttcggaggaagattcaactcccatccgaggaaatcgttttgcctcttctgtggagaagacaagggacacaccacaaggacatgccatgtaacaattccaaagcaaaaggaaatcactcaagcacaacaaaaccaaccaaagcaaattctccacacttcctcatactactccccatacatcctagagcatgtccttcgtcaactgccaagcccacaaccttcagggtctattccttcagcaagccgatcttcaactcactagatcataccctagccctttgtaccaac

SEQ ID NO: 105029 - DNA, 526 bp, Zea Mays
gcgacgaactgcttggaccatattcaaaggcagaagataacgcgttatccgcgaccttcggaggccggaagaagaagaggctgaatagagttttcaatgctattgggtttatgtaccctgaatactgctacccgctgaaagggcaaaagagaaaaagtgcaacttctggaaaaggtgatgcttcagttgctctaagtgagcccgcgtcgaagaggaaaaaggtgaaggtccttactcaccgaccgcgcttcatcgaaccgaccacagtgcccgaacttggtggtgagacctctacggctactgaagccaaaggacctgctcttacatagaagaatgaagagccggctatgatgccgaaggctgataatattaaagaaatagaggccgagaaaacaaagatactagaagttacaagcccttcggcaggaatgatagtgccgaaggcacaaaaagacctcacggcgactccaaagagaaaaaggatggtcaatgtactagatgtgctggagacaataaagtcttcaag

SEQ ID NO: 105030 - DNA, 804 bp, Zea Mays
ccggggccgatgtcctaggttcatttgacgtttttgagcggtccttttgtggatccggcgagggcaactaatgctctcccttttttctcttctttttctttttgaagcaagctcagtgtctgccttcattggcacggtggaggttgcggctccagggggacaacaccccttctttttcatggggagcctcgtaccgtgctgccgagctatggtggccaaccgggcatccagctcgctccaggctgctctatagacgacgatgaccccctagccctgtgcaaggagttgaatgaaaagaacaatgtgactaagaaggtgttgcggggtggcctcatttgtcttttgactgtgcaccaaaagctaatggtaagccacatagggatggcttggcgagggaaatgctcctcttgctaatcgactcgctgttggattttcgtgtttttagtcgcttgcagggacgatggcgggcaggtcccgccttcttctcaaccaaagggaggtgtgggagtgttccactagcaatctactagttgcaagaaacgaggacgccgtagcccgtgcccgcaccgtgtcgattcaaaatgcttatgatgccttggttagggtggcaaggagggatgtagaatcgacgtcccttgcatgtctcgagattgtaaagaaggtctatcgcctctacaccctagagtgagggaaggaggtcaccaatgcccgagtcatagccctggaagaggagctgggtggttgggccaagaaagagaagaaactcctggcctctctgcaaggtaatacctctcaatgattccc

SEQ ID NO: 105031 - DNA, 379 bp, Zea Mays
agctcgctcgacaactaatgcggtgctcaccaagtgagtcatgcaagagatgtataatagcagatcttcagccggttgagtcggcgtggctcggcgcggtggttttagcactggcggtgttgtcaagaattttttcagcgcatctaaagcttcttgtgcttctgaagtcactggaatttgtctaccttcttgagcaacttatagaatggtaagcctttttctcccagccttgatatgaatctgctcagagctgccatacatccggtaagtctttgtactttcttctgtgatcgtggtgcttccatcctcatgatagcctcgatcttttctggattggcttcaattccccggtggctgacaataaacccgagcaactttc

SEQ ID NO: 105032 - DNA, 459 bp, Zea Mays
ccgcaactccgtcggcaaggttggactcctcccgtatcgcaactcgtcgtcaaggttgcactcctcccgtatcccaactcctcgtctttgcaggtacattcgtaacgtccatttctaccctgtctcctcccccatgtgctattacagatccattcctcccccatatactgattagggtttaggttgcatccatgtccatggttaatacttccctctctaatcacgactatttcacaactggttactaacgattatcgtgtgacatttgatgttcagatttcggcgagtcagcggtttttccctgttgcatcagaagctccactcctacgaaggtgatgttcacatcattttctttgttccttttattgctttacttggtgtgtatgtattcgaagatcgagttgcaaatatgttcacgtttttggggaatccattcacagtgtgtttgtacttttatta

SEQ ID NO: 105033 - DNA, 652 bp, Zea Mays
ttgatgtactcgaagaagaacggttgaacgcagtaattcaatcagcatgataccagcagactctaagacgctatcacgacaaggccgtacgacgacgatccttttcagtgggagatctggtcctccgccgaattctaacgggggagggacggcacaagttgtcacccttatgggaaggaccattcatagtagcagaagtcactcggccgggatcatatcgtctcactcaaatggacggcatagaaattgggaactcctggaatatagaacacctcaggaagttttacccctagctgtatttcaaaagctatcgggacgataatgtactctgtaaggtgggaaatatgtcatcaataaaaaaggcttcaagaatatttagtttgctcatgattgaccggcattcttatttagctcggggagaccactatgccctgctaacggagcaatcggcttaagtcggcaacgacttaagacggtacaacatgctcgcgcttacttaactcagggtgaccactatgccctgctaacggagcaatcggcttaagtcgacaacgacttaagacggtgcaacatgctcgcgcttacttaactcggggtgaccactatgccctgccaacggagcaatcggcttaagtcggcaacgacttaagac

SEQ ID NO: 105034 - DNA, 389 bp, Zea Mays
ggtccttgtgccttttctcttatttttttttgctgtttaatgtattttttagaactgctgtggtaagtttataatttcttgcaaatatttgtatattttaaaaccatactcattttgaatgaaaaacgtgtccctcttgatagctatgaaaaaattgcccaaaaagatcagaattcagaagcgagcgtgtagaacatccctgaatcagaaaatgtttacgcccacacaatctgagccggtcacggcaacccgtacgccacgaaaggtaggcgctgccttccccgctttgcatccccgagccgaggacgaccaatggcaacaccgtgaataaccacgatctccagccccatttaccctaccccaccctgacctttatcactacatcccgc

SEQ ID NO: 105035 - DNA, 400 bp, Zea Mays
atttttcaggtgatttttctgatttttgtgtggaacatggtattattcatgagaggacactgccatactcaccacaatccaatggggttcctaagagaaagaaccgtactctatctgatttggttaacgccatgttagagacttcgggactatctaaggaattgtggggtgaggcaatcttgacatcgtgtcatgtcctgaataaagttcccacaaagaataaagaaatcacaccattcgaggaatgggaaaagagaaaattaaatatctcctatttgcacacctggagtgtttggctaaagtgaatgtgccaattaacaagaagcgcaaattaggaccgaaaactgttgactgtgttttccttgggtatgcttttcacagcattggatataggttctta

SEQ ID NO: 105036 - DNA, 289 bp, Zea Mays
ctcgcccattcatttagctagcctctagagcacacaatttcttcgattattccctaatatttgcctctgctccgaccactgatcccgcctgcaccggtctagatcaggttacccgtgctgagatccctacgtttcttctctcctctttatcgtaatcactcgctatggagctgggatcctttccatccacgtagatcgttgctcccgcctcatgcgatcggttctctaacgtgatccatagcagatttattgggccctctgctgaggagaacgacaacacggtcggtgg

SEQ ID NO: 105037 - DNA, 487 bp, Zea Mays
cgacgtcttgcccaaactctaacctttgaaatcggatctggttctgtagaatccatttttaattccctcgcgcctgcgtcgtgcgcgtccctctgcggcctggcattgtgacgtgtggcgagcgttaaccggtgtctggacaccgcacaacctctcgcccacgtaaacgatgcgtgccatcgcttccgaaaggatcacactttttatgtcacatcgatctctcgtatttatttcgctaaatatcgagtcttgtgtctgtttaaaaatttataaattacgagaacatgaatttggaatcccgacccactcttgtgattgttgtcctaagtaaatattattagaacttgacgacaacaatcttgacgcaaaattaaatcggatcgagataaatagaaccgaactgagtattcgtaattaatctgtttcactgtctacaaccgtggaaatttgtctggtccggaaaatacctcccattgtaagcgcagtc

SEQ ID NO: 105038 - DNA, 894 bp, Zea Mays
cggttgtgtagacggccaaccaaccctctgggtcctgcttgggctcatatttgttgacgttggagactttgaaattgggaggccattggatggcccggaggcgaggggtgagcgtggagaccccgcacgtatcctcttgtcgatgatcatgtcgtcgatcctggggaggggagcgagtattaggtcacctcgaccgtccccgggctagactgttggttgaggctgctgctgactcgatctgggttgctcagctgtgtgctgggacaccatgatctcgatcgtattcctcccggcgccatatttcattctcgtgtcgacgatcgtgtgaagcactgatgttgctccgtgcgtctcgtcggctgttgatggcgtgacgcgggtcattcggtgggtgggcaagagatagaagatgattggctgcctgagtaagcatctgtcgatagccctccgtgtttggggttcgcgagaggccatcggctatctgcgctaggacttctccaacttcgctcgacgtgttcaatgctcggtcgaagtcggggtacaagtttcgagcgaggatcagattgtcccgttggagcctagcatcttgttcggctagttcccgctcgcattcctgagcttgatggtggtcgcggtgccaggagttgcgccgtccttgatgtgctctttcatcgggggtctcccccatctctgaagctttgtcctgagagatgggttgtgtgggtcccgttcttcggcttcgtgatgtcgccgcacgttacggcgcctgtttctctgtcgctgagcatcgcgctagggaggttcttcccccagcacagtgggttcatcataagagatgggcgatgactctagtctccactcatgttttggccactaagacagataaggtatttt

SEQ ID NO: 105039 - DNA, 376 bp, Zea Mays
cccaggagttgcttggtccaagcttttctgtgcctttataagatcttcttgtagcctatcaagttcagctgtcacctcagattcctccttccaatatgacctgcaaaactttccttctactaagtatataaaatttaatgcaacacatcatccattcaatggcaatgccatgaccattcaaaagaaatttacatacttcctttcttcttgaagcacatctctctgcttcctcaaatcgttatagtcattatgtcttttcgcaagtgtttcctctaacttacttgattcgcttttccgagactcgatgtagttagttaaatcattgatttcatctttaagcttctggatttcttcttgaagtaaaccttcctgccat

SEQ ID NO: 105040 - DNA, 316 bp, Zea Mays
aaaaagaagaagagacgtcttcgtcgagtgtctagcttggatcaggatgctggtccttctgttcctgctgctgaggaagtgccggtgcctgcatttgctgaagctgaccccaatgggtgtgacccaactgctgtggaacccaatgggtgtgacctagatgatattgaacccaatgggtgtgatctggccaaagctgaccccaatgggtgtactgtccgcgttgttgataaagatgaggaaaaggaggatgaaatccctctaactcggaagaacagccgacgctacattgccagcggtgaaagtagtggtgttcctt

SEQ ID NO: 105041 - DNA, 627 bp, Zea Mays
ttcatcgtgaaataatcaacccagagaacaaatcactggtacgaccagcacgatctcgcggcagattagtcccgagtaccccgatgtatatattctattggcatgcggccggtgacaattctccgccccattattctacacgggttagtcaactttgccaatgattcgctgtgatcacgagacgcgtctaaagcagtttattttttattattctcttatgtacacaataaataaataaatataaaagagaagtggagagggttgatcacccagtgtgattttttcagagaggagattcgaaacgaagaacaccaaagttgcacaatgacaggattgaatgtgcagtggactgctgaggctggaggattgaacgtacagtagttatctcgcatttaaagtggctataggtgtcggaccgattctctttcccgcttcttcatgccagttgtggtcatgcagcctgtacttgtcatttgtgtgtgtgtgtgatgcacgttagcctgacttccagttgtgcgtgaccactaactttcagatgtgcttaaatgcaaacaatattgagctcccatgcttcatgatgttaccccaaaaacaataccgtcctacaatgcttggcacacaggcatt

SEQ ID NO: 105042 - DNA, 289 bp, Zea Mays
cctttagaacaggattttctattttagtatcatgatattgcttgatcgtgggatatttcactatgccctattgttgttataagtatgatcttgacatggcataactacatcctcaagtcatctattggatctctcgctatgcatttgagttagttgagtatgatcttggcaaagcataacaacatggcataactacataccatatatcttcttttagccaggaatggtgtcttactgtatctttgcttgcttcatgtgtttgtcagcaacatgctttattccatggtag

SEQ ID NO: 105043 - DNA, 385 bp, Zea Mays
cgcggtgacttcggagtggtcgaatgccgaagactgtcggtgcagtctttttcgacatgttgcgtcttagtttttgcgggggatttttgcaggtatattacatggctccgcctcgttaaaaacctcaccccccgagaggaaaagagtgtgggccggaataatactgtttggtggattacaagggcgcgtgggccctgagggtttaaataaaaaatttgcggagattgtcaatattccaggaatgctctaggtcttcgccggatggcgttgttagcctatacgcgctggggggacgccttcgacttgacgatgaatggaccctcccactttggctccagcttgccccgtgactctgtccgggtggttcggacgagtacgaggtccc

SEQ ID NO: 105044 - DNA, 449 bp, Zea Mays
caatatatatagcatgatatgccgccactcttcatgtgtcagggtcttggtggtcgagccacttgcgcttccgagttggcctcgaaatatgctaaggttcgattcattgtcgccatcattgtaacaagggggtggattatgcatgctcggcagtttgtcaccataataagttgttgtgaagtttgagacctcctctagaatgtatgcctctacaatggaagcctcgattttgcatttatttctacatttctttcgaatagtctttagacatctctcgattggatagcaccaacatccctgcacgggccccccattcgtgcctcataggggagatgaagaatcaaatgctgcattggattgaagaagtcgggtggaaatatcttctcaagcttacacagtaacatgggtgccaatctttccaagtctacaaccacggtccgagataactc

SEQ ID NO: 105045 - DNA, 333 bp, Zea Mays
ctatagtatgcattggttgcccatacatttccatcatttcagagtctgctggataaggctcttgctattgaacacaagcgtgttcaattaggagatttgaagaggaaggccattacccagggatagggtagaagcagtgttcatcctcgctatgttccgccataggatacaccaactcgattaggaggaggaccacacctagctcagtacactccacaatggtctccacggacacctcccactcgtcaggctgctcccactggcaccccgacgaggcctacaggacagaagaccggccctacatgcttcaagtgcagtcagattgggcactat

SEQ ID NO: 105046 - DNA, 401 bp, Zea Mays
gaaaaattcaaaagagtaatttgattataaaaaagagagagaagcaaactaaaacctaaatagtaggaacccactattcgtaatgacctcttcttcactttgtttgatagcttcgcccgctatctctcttccaccattaagccagatttcataatagaattttcctcccaaggcaatgacttcggcagagggttcttttgcatcatcggttgaaactacgaagtcttgttgaattacaaccttagcatgattgcagccagccttttccagcaaagaaactgctcctcgagctcccacgcaggcgcaaaaatatcctcggccagttagaacttcgtcaaaggcctcaatttcaccctctatccatcttatagccccttcgacatcaccccagacaaaatttt

SEQ ID NO: 105047 - DNA, 607 bp, Zea Mays
cccattcagaccgtcagcgtatggcgccagacagtccaaatataacaccggacagtccgcgcatgtagctggacggtccgcgtatttaaccggatggtccggcatagagttttttgaggaggatggatatccaactccgcatccgtcccagctaaaccccccatcacaccatacgacacaccagcaccataacttaccatttcaaacacgtgggggagagtactttccggcccatagaaggccgggaagggatgaccagtcctatgaaccacatagggaaaatattagtacaccacaaaactcaagccaatgggagggaagacgacataccaacatccaaactacctcacccatattggaccaaagagtcggtggtctcccaccgactgccatcgatatagtaagagaggaaatagctggggcgttccgagataagctcggagttagcatagtccccggggggcagtcatatcgaagaccttataatagccagtttgaccgtctcccatacccacaggggaccagaatacccgaattcgcaaagttttcgggtgaccaaggaaagagcacgtgtgagcacatagaccatttcttagcacaattagga

SEQ ID NO: 105048 - DNA, 964 bp, Zea Mays
tggattgatgatcgagacaaaggtagcccttgtggtgaggggaatacccgagaaaaacgtagagggtggagcgaggggaaagtttgtggggggctgtggctgacaggttgggataacaagtgcaaccaaaaacacggagatgctcatatgaaggatgtttaccaaatagatagaagtgaggcgtggaatagttgagggttttggtaggtaggatgtttatgagataggtgacagtgcctagagctgcggccaaaaagacgggcgaacactagcatggaaaagaagggaacgaacgacattgtttatggatcgtataatgcgttcagctttgccattctgggcggaggtgtaggggcatgacatatgaaggtgaatgtcgtgcgaggagaaaaatgtgtaggcatgtaggttgtcgaactcacgaccgttgtcgcactgaataccctggatggtgatctcgaactgggtgcgtacataggcaaagaaagtagtgagggcagaaaaggtgtcggatttgaggcgcaaagggaatgtccacagaaaatgggagtaatcgtctaaaatggcaagatagtatttatgactagagacactagtcaaaggggaggtctacaaatcacaatgtattaactgaaaaattttagtagccctggaggtggatgtatgaacaggaagacgaacatgatgtcctaattgacaagcatgacataaaggagcagtggcactcttattacaagaaatgattgacgactcgactaggtgggataagacagcgtgaccagggtgcccaagacgctggtgccacagagacatagtagattttgccgaagcatgaagggtggtagccgggagcggaagggggtatagggccaagtgctatcacatctgaggatctcgcgccgagtaggaagatccttcacagagcaaccaagtgggtcaaattcaacagaacaattgttatcgg

SEQ ID NO: 105049 - DNA, 347 bp, Zea Mays
atataaatggcaaatatttcccagcagataatgacgccatatcttgagggcatgaacaactgcagctagttccaaatcatgagttggatagtgctcctcatgccgacataattgtcttgaagcataagctatgactcggccctcttgcattaggacacatccgagtccactgcttgatgcatcacaatatacatcaaaaggcttctctatatccagttgagccaatattggagcagtggtcaataacatcttcagctgctcgaaagcttcattgcatttggaggaccaatcaaacttggtatcattctttaataaacccgtaataggtttaacaatcttggagaaat

SEQ ID NO: 105050 - DNA, 472 bp, Zea Mays
ggctgttataacttcgcatatcgcaaggatatgaaagctccggttctcagctaccattcgaagtggccgaccggctggaagaatgaatggttttatttcaaagctgatgagaagaaaagagagaagctgatgcaaatagtgttgagtccactgagattaagcttcggactgactaggcccctgtgccgcatgatgtcggggtcaccatgccgacaagctgtagcagagttcacggtggtggctgaatagatcagtactagagatctagtgcaagaataccttgccaacaaggtatctccaacatcgagtgaatggagtatgtcgaagctgaagggaacaaggaagaagaatgaacttattcgattgccctatcgcttcaagtttgaaaaacaattcaaagagccctgccaagagtggctagaaatgattgaaaccatgtgcaacgtaattttgggcaactatactaaaaaag

SEQ ID NO: 105051 - DNA, 282 bp, Zea Mays
tggtgattgtgaacgaacgtgcttccctcatctttattccgataataaataattggaaaatgtgtgaagcattactatcctataagcaaatttctagtcttatttgttgggtcctttagacatgtatttatgtggcctatggttcttcttagtttgaccactagtccaacttgtgtttgttctggtgtgtttgtgccggtagaatgttggtggtatgtttgtgtaaactaaaaatttggccatgtcctcatctaggagccatgacccaaatcgatgttaatt

SEQ ID NO: 105052 - DNA, 526 bp, Zea Mays
ggtgggtgtccatacaatacctcaaagggagaggattgcagtgctgaatgccaactggtgttgtaccagaactcggccaaaaagatccaatcaaaccacttggtcaggcaagcattcacgaaacacctaagaaatgtctccatgcattgattcacccgttccgtttgaccgtccgtttggggtgatatgatgaactcattgtcagttggacatcaaccaaacgaaacagttccttccaaagatggctcgagaaaatacgatctcgatcagagatgagagtagtgggcagcccatgcaagtgatacacctgctgaagatacaacttagccacctcaaaggcagtgaagggatgcttaaggggaatgaagtgtccgaactttgagaatttgtcgactaccactaaaatacagtttttacccccggacagaggcaatctaagtctaaggatactgtagaccatgcagattcaggcacaggtaatggctgtaataatccagggtacttgacacgttccacctttgcttgt

SEQ ID NO: 105053 - DNA, 284 bp, Zea Mays
tcttcaacttgagctatgtgtaattgggaaccaccatgaactggatgtagtatggcctcccaaatatggcgttgtaggccccagggatgtccaccacctcgaagcgtagaggcttggtgtggaaattggaggggtcatcgaacgtgaccaataacgtgattttctcgagcgggtgaacccctcggccgggcgtgacaccgtggattggccccatgcttgggtgcagcacgtaacgcgagatccccatgtgatcgagagtatcaacgtacaggacattgttgtcg

SEQ ID NO: 105054 - DNA, 563 bp, Zea Mays
atagcacaccctctcctctgatccaatattgcagatgttggacttcaacatgtagttcgatatcgattgcaatgcataaggcacatgttttggcactgttatacactagggggttggtcccctagccttctttggtcgaccctttgctgcccgccactacaagctagcggcatttgaatgcaaactcattggcctgatacaggttgtacaacactggcgatcgtatctttgaggtcgtcgcttcctcgttcacacttatcattacaatataaagttttttcttgaccaacaattgtccactatgacctaccaccagtggatcagcaacttgtttggcttcaattttgtgctggagtactgctcggggcacctcaactctatatatagttgatgtgttgtcctgctgtggctctaactctatggccacagtcatcaaccctgactcaaaatttgcaaccactgagctactcgccctgtcagtgccctcgtttcgtcttcttgaggacatacacgtcgccacagaagatgacgcagaaggcgatcacattcaacgacagctgctg

SEQ ID NO: 105055 - DNA, 392 bp, Zea Mays
tgcgacatccttgtagatgcccactaaccataacattcttgtctttttgtgattctttcctttttcgtcattaagttgctaccatctggcgaattctagtcctttggtattgacatgctcgtatcccttccatactcttgtttcaaatacttgcctctaaatttctactacctacttaaacatttcatttacatgtccatgaccttcctatcttttgagaccctttcctcttttgttgttaagtcgctatctttcagcaatttattgtctcttggtattggtatgctcatctctttgaaatctttcatactctcatcctttttatacttacctttacatcccaaggtctgtttaagatatttcattttacatgcccttgaccacccctcttt

SEQ ID NO: 105056 - DNA, 743 bp, Zea Mays
gccaaattaagtatgaaacttacaagaacaacgatggaacagccatatatcgtcgtcgacacattattagtgctcctattgtgccatttctgggcagcttcacataggtcactaaaaatgagatggcaccaatcaatttgagggaaccgctccaattcttctgtaagtagaacctcattgtaagatatcgaccagctagctgttgggaatagcagccggttgaagagaataaaaaacatctgatagaaagatcatcatcctggcctagcctcaatctgtcgtgtagctttgaaataacaaattcatccttgctaatattcgaggagaaccgaagttttgtcgcagcgttcgcttcatcaatattaagtggctttccaccacccgaatttggaagacccaatatcagatggataatctgcttggtgattttgagttctttgtctggaccaatacgaagagtcatgtctctggggtctagcttctacatgagccaacaaagaagtgttcgacatccaattgcatcgattgtcatgtcaagaatactagagaagcattttctgactatagcttgacgttgcctttcattcaatatctgaatggacgcaagaacatctcctgggttgcatctgatgttgagtctctgtaatgaaaacgtagatagatggataaatatgttaatacttaaatatcacaatttatgtgttcttatttatacaaagttccttggcctatgactgttttgg

SEQ ID NO: 105057 - DNA, 503 bp, Zea Mays
cttggccggatgtatcctttctctgacagctcatcgatctgcttcttaagctcaaccaactctggtccagatactctgtaagctctcttaaaaatgggggcagtgccaggaagaagctctatagcaaactcaactttttgctctggtggcatacttggtaggtcctttggaaacacatctgggaactcggacacaatcttgataatctcaattgggtctgcttcactgctatcaacagccatctgataacaacctcctttctttggctcaggcgggaataactcggtcaccacttcctctcctagtggggacatcaacttgattgacctcttatcacaacagataactgcctgatacttgtctagccagttcatccctaggatgacatctattccctgagtacccattactatgaggttagcgggaaacactatcccccttatttccacacttacattcaagcaaatgctatcggctcgaattctaccaccggctgagtcaat

SEQ ID NO: 105058 - DNA, 533 bp, Zea Mays
taatgcaaggcttgattttgaagacatgtgcataagaaaagatttacacttgaagcatgatggaggttcctatgtggttcctcatgccccctatacaatggataaaaatcaaaagctggcattttatgattttttgagaagtgtaaagtttccagatggttatgcttctaacctagcatcatgcatcactgctgatggatgcaacctccaaggcttgaaaactcatgattgccatatcatacttcaacggattttaccagctgctctccgaggaataatgaacaatgaaatatatgtagcaattgctaaactaggtaacttcttccagcaactatgcgctaggacacttaaattagatgttctgcaccaaatgaaagagaatatcccaattgtcctatgcaagcttgagaaaatattcccccccttattgtttgatgttatgctccacttgtcgatacatttacctgatgagtcaatacttagaggaccagtccaatatggttggatgtaccccgtagaaaggaggttataca

SEQ ID NO: 105059 - DNA, 615 bp, Zea Mays
agctcagagtaaccgaggttgggtttggcctagtctaggagaccaggctgggatcactttggttgactaaggttggttccatctttgttagggtgactatgtcaaaatttcttgaggtaactaaggtcgggtccgacctggtcagggttgccatgtcgggatcgctatgttttgatgcctgttattcaacgagttcatccatcaactatccacaaggatgagagagatttaatgaacaaagtaactaatcttcctacaaattgagttccataagttgtgttttgtatatttgagtgcgggttatgaaaataagtaagaaggagtgtaaatggccaagtgatagaggagtagtggccggacaacatcggctgacttcccccttagactgtccagtcataccattgccactcaagcatccccgggccacccaacctcttgaccaagccaaacacactctactttggtcttgcatgcatgacacgatgaatccaacccaacttgatggtgtaaaccatattaatgacatgtcaaggaccggaagaccaccacatcatcgatctagctcacgaaaatggtgaagacaatgacccaagggacttctatccaatggataaa

SEQ ID NO: 105060 - DNA, 1072 bp, Zea Mays
gaacggttgaagatagcctaacagagcgtttatctctcagtttcataagtgtgagaagtatttactccaacaatgtgcatcagtgtatctacgcatagagaattgaaagggtacacatgagagggtttatattgatttagatacattgtacaccctatatctaatttgaagtagatctctctattcatatactacctccgttctaaaatagtagtagttttagtgatttagtaggttcacaaatccttgatgcatgtgtattgtatatgtgtctagatttattattacccatttgaatatagacataaaaaccaaaaactaaaatggagagagtactaaaatatccttgaacatatgtctagatatcgatctggatcccctacaccgctccttgtatatactagggatagagttacaagagatccgatcaactagtaaatgtgtttcctagttataagaaaactacactagatctcattgaatcatatcccgcaaagatcgaaatgcacactagatcatgtgtgctcctatacacccgtcgtatgtgcctcatagtaatcctctttggtccagttgatggatgtgggctagaattatggacggtgatgatctaaccatatggcttccctagcagtgtcagtcttcaacgatccttaggtgcagatgcttctcgtatagtgaaggtcttcctatgccaaagactcatcggtgttgagggctttcgagcatttggcttctttgcgtgatagatcttcctcaggcgatgataagatgtccaagagaaggatgatttgggctaatataaaattttactcaataattaaatcctacccgatagcgcagcccacttcaccgcttgtgcctaagagtattacctattctatcacaaaagttatacacgatgggttctaacactattttatcatgacaattctagtaatgtaaaacaagaattaaattgcacaaatgtaactgctgaaaatagagagatggctaggaatatgatgatgtttccccagacattaaagagtcggcactcctcactagtcctttttagagcactcatgcaaag

SEQ ID NO: 105061 - DNA, 414 bp, Zea Mays
ctcctgtgcgttcggctatgttgcgctgaaggaaaaaagtttggccaagagacaatggtgcagtgctgctgctgctgcagctggtgtatcgtatgcatggatgggcgtgtcgccggtactactctatctagtacaggggtacgtagggcatgcactacaggcgggtagtcgccgttagagccgagtcattcatggaatcccaagctctagctacgtactagttctcatttggcaaattttaagagcccgtgacagtgatttagttgggtgtattttgcaaagtttaaaccggtggattatatagtggtatagattggtaatttgtcggataatgagaagaagaaaaaaggttacaccactactaaaggtggtcacttatatatataggtttataggagatgtgaaagaagtaac

SEQ ID NO: 105062 - DNA, 717 bp, Zea Mays
caagtacgggcgcatcacctgcctctcatggaacaccggttggtactagtcaatcacaatcagcaccgaagccaccactacctgttgtgatgaaggaaacaactacagatcccacaaaagttgttggtggtggaggctcagcacttgttattcatgttgataaaaatgtcgatgaaccattagagcctgctgcaaagaaaataagagagaaaaaggctacatctgaggtttgggagcacttcaccaagtccatagtggaaaaaagggagataatggcaacgttgagaaggaagtatgggcaaaatgcaagaagtgctcgttcaaaactcgtggtgagtcctcaaggggcacaactgtcttctggaatcatatgaaagcaaagcaccaattgactagagggcaacaagaattgcatcttcagagtggtgcaggtaatagcacagttattcaaaatttcaagtttgatccagaggaaagcctaactaaattctataaggcaatcattatgcatgactacccctttaagatggttgaacatgggttctttgttgatttcatcaagtcgttgcgtccacactttgcattcaaatgtcgtacagcaacaaggaatgatataatgaaaatatacttggatgaaaagaaaatgttgtttgaccatcttaagtcgctttcttgtcgattttctgcaactatggacatgtggacatccaaccaaaa

SEQ ID NO: 105063 - DNA, 793 bp, Zea Mays
ataaatattagatgccacaagatccattagtttcattttttaaatttaatttcactgccaatgagatcaagtatctaaaggtaattcctcccatgactgcagagtaagtttcttcataatcaactccagggcgctgagtgaaaccttgagcgactagccttgctttgtaccttgatatttcattattttcatttctctttcggacaaatacccacttataacctacagggtgtatgtggcatggtgtgcggcttacgggcccaaacacctctcttttgtctagagaaattaattccgcggtaattgcctttttccatttatcccaatccggtcttttcttgcactctgcgatagatgtcggttctgggtcatgatcaatgattgaggcaactttctttgcgaaatatatgtctatgttggttgttgctctgttcatgcattctccagttaatacatagtttatggctatttcatcatgggatgctgattgcatttcttcttgtgtttcactactacttcttgttgcgggagcaagttcctttagtttttcatcgcctttgtgtgtgcacatgtttgggttggcgatttcttctacggaaaggttcaagtccgaaatgcttatcttcatatgttccttcccggtgctaggtctcatctggctccccttcttgctttggggcatttttgtgatcggctgtggcaagtcgtcttgccctcttttcttcggacgtctccgagtacttggggtttgagaagccagagttcatgtccttttgttatgaggcctcttaac

SEQ ID NO: 105064 - DNA, 512 bp, Zea Mays
gctttgggtcatccgatctgcatcccgtggtgcagattagatcacgcaagggttttcaccatcgaccattagaacatgatccaagggcccagtactgaacgtgaagtacgagccgttagatgggcgatctagggacatgatgtaatggagacatgcacaatccagaccgcccgaaccggatcccatggactagccttattctaacccaaccggtatcactcctttcatcccagccattcgtactagatcggacggtgccgaccccatctcccccatcgcctcactctcctcccaacaacacggcatgccgccgaggaacaaacgccgacgacgaggtcaatcaagccccctactatggtattcctcaattaccaggttctacgcactcgcaaggagaaaacgagtcggatggacgttacctcactagcgattagccgtcgcttgcagcagcccacgcaccgggtgattttgcgcccgaacgaggacaacggcgagcaatcaccgacggtccg

SEQ ID NO: 105065 - DNA, 413 bp, Zea Mays
ttgcatcaggggaccacattctaaaaaggtaggcactttaatatccgaccattccaagaatagaaagaaaaaaataatataagccactggaatgccagagcctatgtaattaatctaccagtgtacccttggagaaacaaaatagatcctcaaaaatggcttgaatttactgaacactcagcatacctctgttatcatagttgcaataccaatcccaatggttcatgtgaaatgtgtagaggaaaacggtaaccaattcacataatttgcttataacgtaagattctgcaacaactgacattaccattatgggcgggtaaatgggaacacaaaaatgccaaatactttaccagtgtcacatgggacacgtgctagtgcgggtattggtgtccggtatgggtgcaggtgtccag

SEQ ID NO: 105066 - DNA, 885 bp, Zea Mays
atttagtatttgtctcgcgttgtactgaatatcatcagccagtaacgtccagactttttcaaagaaagtaaattcatcacctacttcacaaaaaagaagcattgtgacaaatagatcacgaagttgactggacgttgcccacgaagcggcctcatcaaaggcattataccactcttggtcatcctcaaggagcccatgagctctacacgtctctttgaagctggggtataaaacattattgtatgttcgcaatgattcaaaattctgggctccttttgcaaccattagaagcattctaagatagtatctttcccctgcagatgggtgcacaaagtgtatgcggcctatgttaccttgtctatgtctttgttcccatgatctttttttttcgtcccacctccactcggatggaaaatcagggtaagttagggacctagcactttcatgtaattggttagctacaaaccactctgttagcattgttcggcgtaggaattcttgtgacaagatttgtgacatgttggcgctggcatgatatgtaatgtaattctcattaggcaaatgaactggcaatctagtaacaggaggaaagtgtcgatggatttcgtaaccaagaattctccaacatgaatcatatgggcatatgaatctagcatctaagtattctttgacctcattccttgtgtttgtttcctcgtcaataggagtgtcttgaccatctaaaactcgttgtaggtatagtttgctccggtccggaccttttgtcacgtacttgaacagatatatgatgaatatgcttttgttacaccattctacattgatgtgtgcttgatatttcttgagcaatgtcaagttatatggaacaatccatctgttatctagttt

SEQ ID NO: 105067 - DNA, 601 bp, Zea Mays
gtttttacccccttcgtcttgtgcagccaggtcatctcgatgggccagaggaaggatttcgagatgcctttttgtcaaggtggcattcccatcctccagacacagacctcctcggatctccgggagagtctggctgctacaaatactattctcgagactgccgatggtgaggtggcaagtcttcacgcacgtctggaggaggccgatcgctgcgtcacaggttagtggtgtcttttgcctctatggagacttcttttgtctatattgacctccctcgttttccgcgtctttctcctagagctttaggtagttttgagggcgatccgtgagttttatcgcacgagcttgtggatttttgacttttagcgatgcttaagatgaccattttcaccttcatttgtctacgcgcccctggagggaatgggagtgtcatatcgggagtagtggagaacggttatatcgttgcctgggcatatttctaccaggggttcactgttttgcttgtttgcgcaggagcgccctctcggaccgttcagtctcccatacgcgaatctaatccctgagctcttcgttcgtttataatggacctatctgagagatg

SEQ ID NO: 105068 - DNA, 619 bp, Zea Mays
tgctgttgtgtacatatgatatggtataaactcaggtctattaagtaacaaggcttctttcggctatggctctccaaaggagtcttagtacatgacttcattggctcctaatttattttttaagaaaaatgtcaacaagcacctgacagacgctcatctacttccatttcctatttttttatcaatatccttcccttcccttatagttatagttatagatagtattctttccttctcttttcttcctctgggcatcaaaggagggtgtagaccaatatttcattaaataaaaaagctcttcatcgctggaaacggacttgcttcgctagctctaggtgaatttgcaaaacggggaagaagggtattttatttcgaaagtcttctattttatagcttagggaaaaagatcacttactctcttcggtcctcctctgagattatttttagacttttgatgtcgtctatttgcccaattcagacttggtagttccacgtatacacacgaagtgtctcccttatctggaattccttcttttcgtaagctttgtagatgaggggcggagcgaggaagggatattggatttgaaagcccttggcccagacgtattgaagctagcct

SEQ ID NO: 105069 - DNA, 614 bp, Zea Mays
ctggatttttgaggaatccggatttttggagctcctatcttcgggggagagactttgagactctagtgctcctatcaagggggagtctcttttagagtttagggatgaaattgaaaggggggattttgagcttttaggagcttttgctagttgtgttgagttgtttgcctctttctagaggaactgctttaattttagtactcctgatgattttgtgctccgatttggttttgacgtctagctagtggtgttgagcccttattttgactcttcttgaggactagcttttcttgctttattgtgctgagccgttgcccacttctttgggggccatgttttttatggctctaaataatttgttttttggcttgtctggcctttggtcattcgagtgagttcttcttcttcttctttctctttatgttgatctttgagttcttatgatggtggtgttgacaatacactcatcaagggaagattgcaaatacaaggttgacttgtcccttgtggtttgggttggagatgagcgattgtcaacatgggtagtgctttggtgcgagtcttggactaaccagagtacgagatcttgtgttgtccaaccatgtctgacggct

SEQ ID NO: 105070 - DNA, 539 bp, Zea Mays
gttccgttgggaggcggctgtaataacttttggtcttgtaacatattttaagaaccgttaatcaagtaaaactggaacttatcttgtatgttatttgtccttgctgtgtgtagcgtcatcaacttccccctagtacttggccccctagaaggtaggctcgatgtgtcgaggctggataccagtatactaaagagaaaattggttgcctagtccctaggaggtagtctctacaatttgagactacctacctctggactgggacctatacctgcacacagctttggttttgaagttttaggagcacacccgtaggacccaccatatggtatctttcatcctttgattcatgcaacaggacctgtaggatttagcctgggaagccaagccatatgcccggacccacaggatcacagttccaaatactaggacacccattgcagagtggtggagcgtgcaggcttagggtacggaaccatgctaagcagctacacagctccggaccactccaggagacgagcacccattctctagaactggac

SEQ ID NO: 105071 - DNA, 347 bp, Zea Mays
cgcaagctacgtcactactttgatgaccacaaagtcatagtggttactggttttccaataggggatattcttcacaacaaggaagccattggccgaatagccaagtgggcctgcgaactgggatctcatgacatcgaatttcgaccttgcactgccattaaaactcaagcattggttgacttcgtatcagagtggactgaacaacaagtaccagataacccagagactgcagaagtatggtgaatgtattttgatggctcgctgaagctgcagggagccggagcaggaattctcttcaccgcgcctggatgcgagcacctcaaatatgccctctagttactgtttcc

SEQ ID NO: 105072 - DNA, 782 bp, Zea Mays
gttctgaatagactgttgtaatgttctttggcaataaaggcatggtatttttgtcgaactattctccttaatacagaccaaacatttttttggaacaactactgtccttaatccaaacatcagcaagactacaccacagaaaacctcttgtgaacaatagcagaaccgatatgtgtcattcgattgaccaggaaaaaaacaatagcaaactacagaagctatctatgcgcacacggcacccaagcctggaaccaaaatgcaccaaccaaatatccaacatgcatagataacacgtccctaacaaatgcacagatctgtaagttaaccaaggccaagcacacatagacaacatgccctcatgaatgcacggatctggaaccgattccaacagcgacacatggacatgaaccaaaaagatatagcagagcaaacctaggcctacggaggcggcgacaatggctagggcacgacaggcagcaggaacacaccaaacgctcccatgaggacggcggtttgcaaaacaaaagagcgaaacaatgaggacgacggattcgagaatcaatagatataaggactaaataatgcgagcgggctccaaggagaggggaaggaaatatttaaggggaagaaagtacacacccagaggacgacactatgtcggccatgcctgtcactgctgtagcacagtcgcaacggagactgccggcgactcgacgatggctccgcagcatcgcgtagtcccgcgcctctccgtgtagcagctgcgcgtggacccgcttgga

SEQ ID NO: 105073 - DNA, 623 bp, Zea Mays
ttcgtccaggtccagtagcccaaatctttgctagaaaacctctccattctctagagaagttgttacataaaatgaatgagtatatagggtggacaacaatttttgttaaagaagggaagaatgatagaggtatgcagagaccgctaggtgctttagagggagattttaccctaggcatgtctgaagcatccaaaacataggccaaagtgaagataaatctggacatccttagggacaacaaagccatcaacaggattcatctcaaggactaggagcacaacaacaatcttcgcatgacaactttcgcccaccagccccaagaggagggatagggggcgaagcttcggtggaaggtttaacaataattgggttccattgcttcaactagcccctcacccattcattgggagattcaactaacattcatcctagggcccccaccatacgagaaagtgcctgtaggccacccttagtttcgagtataggacatgcttcattaggacaaatgggagccttctgaaactcgcatggtaaacaatgtggtccccgagttcaagcacatatattagggcctgaggggttggcctaaggaaccgaagctatgcaaggaatccaggaaatct

SEQ ID NO: 105074 - DNA, 400 bp, Zea Mays
ctattttctctgttaaatagattacacatggtcctatactaacttacgtgctgaacctcccttattgtgccttgttgaagtattcagacttgctgaatttaagcaactatactaactgaactaaggggaaatgacagtcttattttgagatctataatcagacatcgctgcctgataacaattgactaacattaacgtactaatatcaaaaagatgtgtagctcaattttgggctttgttaggtagaagagtataatgtgaaatcgatggacttatgtacagtgaaatgctaaagtacatttctttctttcgacgtgactcatagaacacatcatatttgtcatctgtaagtccggggacaatgtgtagggaaacccaaaacaaaacggggtccatggga

SEQ ID NO: 105075 - DNA, 385 bp, Zea Mays
ttaatacccaaaattatcatccaaacgttcaatgtgacagagactaaattttagttgggtgaaaccaaacaaccctatatatatcagaactattataccaaatatactagatgttctagagtacaaatcaagaatgaagataactctagggtggtggtttcatgtaggttgcaaattgggctgaaaaacatgagcctgagtgaagccatcctagatgcagcccgtgtcctcagctgcccagaaattccattcccctgtttgtctgactaatcgttattagttgatgactaatcggatgaccagaaaactaattccattctccttccgtttgtctgaataatcgtgattagttgatgactaattggatgaccagacaactaatcgg

SEQ ID NO: 105076 - DNA, 363 bp, Zea Mays
tacagatctaaagaaaaagaattgttttatgagcggacttaatgacaggcttcaacggaaaatggcaacatgtctggatcttacctacaatagggctgtcagtacaacactggcagtggaagccaaaaataccgggcatggaaaatcaaaggggattggaggtgaaaggtcaaatcaagggcctgagaagagaaccaggttggtgattcgaccttttaatcaaaatcgttcttcgtctcacccaccttcctatcccttcaagcagcctatttttattcgtcccactactgcccccgctcctaccaatcagccgagtgcccctggtactcgttttcctgctctccctagttcttccactggttg

SEQ ID NO: 105077 - DNA, 350 bp, Zea Mays
gagctcctagctcacaggcccacttggctattcttccaatggcttctttgttgtgaaggatatcccctattggaaacccagtgactactatggctttgtggtcgtcaaagtagtgacggagtttgcgagcagttagaagtactgcgtacaatagtttttgaacttggggatatttctttttagagggccctagaacttcactgatgaagtagaccggatgctgtactggatatgtgtgtccttcctctacccgctcgactactaacgcgatgctcaccacgtgagtcgtgcaggagatgtataacaacagatcttttgccggctgattcggtgtggctcggcgtggcgac

SEQ ID NO: 105078 - DNA, 531 bp, Zea Mays
caaagttgaagaccaatcataggagaacaactttgtttaagggttcaagccatgatcctatgagaaatttggagaaaaacccaatcaaagatggactgtcaggctgcctgaagtctgaaatacagattaacagtgttgtgagataaattttgagctcgattttgaaggggatccagtgactttttgtgggagcacattgtagcaaaatgatagacggattatagctctataactttgctgcagaaagttggcttaggtttcacatgaaaatttgagaaaactgggctccaacttggtcagtcagtcgagctttttactgaacccagtgcactgttcaccgtcttcagaaaatatcgcgcggtggataaagatcagcccctcgccggcgataaggacgccaccgcggcgtgggatgggtcgccggcgtgtgcggtaaaggattcctggtgacgtggccaaaagttactgaggtggcgcaacccggttaaacggcggccaccggacttgtgtcgtggctctgccgtgcgggtg

SEQ ID NO: 105079 - DNA, 611 bp, Zea Mays
ccacttccattcaggcactgggaggggttgcaataggtctgcaggcttttggtgctcggccttcgttcgttggcaggtgtcgcaacgggtcacatactgtgctatctctttcttcatccctctccaccagtatctggttttgaggtctaggtacatcttggtagtccttgggtggatggagtaggctgagttgtgagcttcctcgagcaggacttctcgtgtctccccttttggtacacacagatgattcttgaaccaaagggctccttgttcatctgtcctgaggtccggaagttgttctttgcgagctttttccataagtcttgctgtctctgagtctaggcgttgagctttgcatatgaggccttctagcattggtttgacttcgagactgccgttgtttcccaaacatgcattcaattgagctgattccttcttccaatcttctaaaaagttggttccctttatcccaaaaggttttcggctgagggcgtctgctaccacgttggcctttccggggtgataatgaatctcaaggtcataatccttgatcagttccaaccatcttcgttgatggaggttgagatatggctgagtgaagatatacctca

SEQ ID NO: 105080 - DNA, 886 bp, Zea Mays
gttcaaaatgatgacaaccctttttctcttcgctccctcggcccctttgtcaagtctcttagtatctagatattcaaagttcaatgcttccattactcggtttagccttcgtttcggttgggtgccaaaggcgacagtcatcagttggttctctttcttcgtattattgccaagaatctcgttgcacatagtttcgatcatctctagccattcagtgcacggtttcttgaattgcttctcaaatttaaagcgataggggagccggactagttcatatttctttccccttctttcttcttcaacatcccccaaccgctagaggtcggaaaagttttgtttgccaagttctcttgtactaaatccctggtgctgatttcggcagccaccactctgaattcaacctcggccagctggcatgtggagccaagttgcatatggaacaacaaccttgtcattccgaatcttaatcacatagggctcataaccatggtcatcaatttctccctcttcttctcatcagccttcacgtagaaccactcatttgtccaccctgttggccacttgagccgatcaccggggctctggtgtccttttggtacacgaagttatagcacccaaagtttttgtgaaggccatccgccctagccttcatctgatagtgcaattcgtgcactcggcagaaaccttcggcattagcactgatgccttggcttcggagagcccatatgtaaacacttaacctagcaatgacatttggcgttagctgatgaaggtatatttcaaacttcttcaaaacctctcctatgatgtcatatagagggaaccgaagccttctctgaagaagcttttaaagacaacaacttcatcctccttcggctccggaatc

SEQ ID NO: 105081 - DNA, 602 bp, Zea Mays
cctaaacacataggtggaagaacaatcaagaagcgtagcaacccaatgcttccctttcaaccaagaacaatcaataagagtatccttcagagttcaaaaacttataacaacatcgtatagttcaacttatcatctagttcagagacgaaagtgggttaatgaaaaacatatagcatcctatgtttacattgcgctgatgtaggaggagctgcacatcaccttacacaccagaatgagacatcctggaagaaacaatgaccatcgcaacatgcaagcaattgattaagcagaaaacctgaagtcatctactccatccattcgcagtccaagaagaggcttcaagaatttgttttgggatcacaatgcaagccttcaataatttgaatcatcaatgggaccagtccctgttaagacatcgcttataagaaacaacagaactaatagaatcaaccagcttaagggaagaagcactaaaaaatatagtccaagtattgccttagaatattcagatggtttttaccacacccaaatatgagaaaaagtgacactcacattgctccttcaagtcgaaactgcattcatgaattttgatactatgatct

SEQ ID NO: 105082 - DNA, 491 bp, Zea Mays
catagctctgcattctcctaagaacgacttcagatctttttcaccattacttaggtgaaataaaccatagctctgtattcccctaggaatgacttcggagctttttcaccattacttaggtgaaataaatcatagctctgcaacattctcactattggactcaaagatactagatcattattgtattaatttgcatgataacgaaaagacttacgaaagtaaatgtaaagatacaatagtggcatgttgatagctttgggctcacttactcagccccttaggatgctccatatatgtgcttcgtctctcggaccatgctattgacagtacatgttttagatccctcccttctgtccctttgctgtaggtcttgccttgggaatttgggttggttagcggggacttgatcatagggaggcggtcctgggatgaaggagagatgtggtgaccatgtgctcatcactgggttgcttgaggcatttgcgaccgaa

SEQ ID NO: 105083 - DNA, 513 bp, Zea Mays
ctggagcgttgatcgattgaggaactgcttagattagaagtcggataccgattcatctgggttaagagggaccgtagattgctgatcgtggggctgtgggtggtttggatttcattaaatttggtccgtcgaatcttaaccggagggtggtcagtgcacgacgcagttgtgtgggcgcgatctattctcggccttcggatctgatccaacggtcgggatccaacaatacccctttgcgatggatatttgcttaagtgcccctagggaattactgaattaacccgccgtccactgctattgtaaattaattacatccatgccctgattttcatatattggaccctgtagtttctagcatttgcgtccgcagtccaaataaaataccagggttaataataagccgagaaaatgaatatttagtataaaaacaattccaaaacctagattaattcatagaaaatccattttaactcctttttggtccattccagttgcattaattttgtattaata

SEQ ID NO: 105084 - DNA, 595 bp, Zea Mays
cttagagtgtggccctctcccgaggaggttgaggctttggttgcttcgcttggtggaatccccaatgacgagaggcaggttcactttgagatgcctactagcccgagcgatgcagaaataagtgccatgctggatatgttggctgaggattcctctgactcggctcctgctgaaacactagctgtagcagtcatcccagagtctggaaaaacattgaacattcagagacctgatactattcgcccgaaacgtctccaccaagctagtcatccaacttctcctgctgaagggaagaagaagaaaaagagacagcttcagcgagtgtcatccttgaatcaggatgctggcccttctgctcctgctgcttaggaagtgccattgccgatttttgctgaagctgaacccaatgggtgtgacccgactgacgctgaacccaatgagtgtgatcttgatgatgttgaccccaatgggtgtaatcctgccaaagttgaaccaatgggtgtgctgtccatattattgatgaggatgaggaagaggaggaggaaatccccttaattcggaagaatagccggcgttacatagctagcgaggagag

SEQ ID NO: 105085 - DNA, 609 bp, Zea Mays
gtttaggccacgtaaatgcgtaacaccctacgtcctgtgcgatgttgagtatttgattgctctgagtttgtggattattgcgaattacaggtagctgtggaggtgaatgaaagagttcatatcgatctaatggtgagccagtctttttggtaggcgacttgagagatatcatatcttacatatcgtttgagtctatcatcttctattgcgagtatgcctactcttcgagggttcggttgcttttcctccgagtaggtcactacctggtcacgtctaagatgtgtcttagagtctcgccattcttctgcgacaaacacacatggataatgttcttgtgtcgtattcttcgagcttgtttccctcttggcatgttgtcttgtttcgcctgcatgcgtcccgataatacgcactgttgggtgacttaccgcgggcctattaggctacccatgcatggaacatatctgtgttgcaatgacccatggtatatccttctcccatagccgtcgctagatccacgacggaagtcgaaaactatttctcaccggcgtcgacgtcctttgacataggatctatcgaatggccttggtacggccgtcgcgatgcagaatg

SEQ ID NO: 105086 - DNA, 517 bp, Zea Mays
cgcgcgaggtgaacaaaaccaatcatggtgaccgtcacggggaaccaagcgtcgtcgtgttcgaccacctggaggagagtgatgaccatgggactgttgatcagaggataaacagttgagattcgatcacagtcaccatttcagccttttgatctgggccatcaaaaccggaccgggcgggtgtgtgacaagcttagtttcttttttatatggatcgttgatctccctgtgggaggccgtgattaaaccaagacataacccctcgcttcattaaaccttggtcgtgggatgcaaatcgtccggtggagatttgatcctagcagggggtggtatcggccatcgatctcggatccgttggtcaggaatcgatcccgcctccttttaatcctaagcataggatcaagatccaaccgtctatatatcatatcgggtgtgatctaatcctagccgttgtgatagatcgaacggtccacatccctgcataccccttcaaccggagatcttgcataagagaccc

SEQ ID NO: 105087 - DNA, 1070 bp, Zea Mays
cccttcgtcaataaaccatatttcctgtacgaggctggccgttgtcatgtttatgttcctcatgtgaaatctgatcatacaactgatcttatctacttagatgatactgcacacagctgtcatgtttatgttcctcatgtgaaatccgaccttatagctgatcacctatgctatgtatctaccatatttagatgatactgtatacttaagttagtctttgcctagctactctgtccgctcgaattaattttatgcacattatgtgtgctgcttatgctaataatgctcttaagatgcatgtgtcttactgtcttcaacatgtccttttctcaggttttatgtcattatgaagactggttagctccttgcttttgttaggtctgttcaaattagcctgatttcttctcatttattcaagtttgtgagtaacaagttattgtacaacagatgcttcgtaaattctatgtcgcacttgaaccacatcgtgcttcaatctgaatcttgcagtaataacatgttttgatcagttgcgtttctggggtgttcatatatggtgcctttcacaccaaaaggtgatagggctgttactggtgttggggggatgaacacctcggcactttggatgaatttgatattattaacatcaaatctgcctgaattgttgtgcaatatacactaataactctgaaactgaaatcttgtatcttatatttctctgttgcttgcatgttgaaactggggctggttaggcattgacttctggatagggaccttggaaacagaagctacatctacatttaatattatataaatttctgtttgttattcttctagaagagcaaaatatcttgatcgttcctttgtgaattgtgccaagtgagctgtgaggatatatagagaaggtgggaatggactggctaccttgcctacctattgctggactatggtctatggagtttggagtatggacatttgcagcctccgcatagcctggtgattgggaatggacatgttttttaaagatgtgtcttgtatcgattatttttcttctaaaatgaaggtgatatcat

SEQ ID NO: 105088 - DNA, 525 bp, Zea Mays
attatccagttgatgacataacaaggctagtgacatgcgcactagttataagatatggtattaacaataatcgcacgaagaaagtaggaacaggtgttgcgatcccatgacgcaagtttcatggaagcgacataccagatgattgttggagggtagaagtgacgacggtcgcctaaggatatgaggacgacatgctagacatccctgggcccgaagaaatcgagacacttggacatgccataaaaaatttcatcctttggcctcgaagggatgtcgaattggttgatccaccaatgtcgtcgtcgtctcatccccaaccatatctgcctcctcaaactttagtacatgtacatccatcatcacctccacaatcttcacatgctgctccccatcctctttctaacccaccgtctccgccacaagcatcaacatttaggacaccaccaccttctccatagccatcaagggattcacgaaaatcaaagaaatctaaattccctgtaccaaaattggtgtccacattcg

SEQ ID NO: 105089 - DNA, 590 bp, Zea Mays
actggacgcaagctccgtcactacttcgacgaccacaaagtcatagtagtcaccggatttccaataggagatattcttcacaacaaagaagccatcggaagaatagccaagtgggcctgtgagctgggatctcatgacattgaatttcgacctcgcactgccataaaaactcaagcactggttgattttgtatcggagtggaccgaacaacaagtaccagataacccagaaactgcagacgtatggcgaatgtattttgatggctcgttaaagctgtagggagcaggcgcatggatcctttttactgcacctagaggcgaacatctcagatacgcccttcagttgctatttccagcctctaacaacgcagccgagtatgaagctctgattcacgggctgaacattgccatatcgctgggcatcaagagactaatggtgtatggagactgtctggtggtcataagtcagataaacaaagaatgggattgctcgaatgattccatgggaaaatattgcaccgctgtccggaaactagaagataaatttgaaggattggagtttcatcatgtggagagagaccacaacacagc

SEQ ID NO: 105090 - DNA, 678 bp, Zea Mays
aagggggctcgaaggtggatctgagataggggttatactggttcaggcttgcgccctattctaatgtagtgttgatcttagtattgcttggagcgtgttatagtagagtgcttgtgtgtagaagatgggggttgtcttgcccttttatagctcaagggtagattttacagtgagaactcgtattcttcccgggagaggtttagcctgttgccttgggttgccttagccctcttggcggcgttcgtaggggcgctgccatattactgatgtggcattccatctttgtctagccaacatttgtgtctctgtagtttgtctgatgccaacatagcggtacccggcgggccccgtagaatgacctcatgatgaggtccagggttgtattcagtacaacatcatcttccgtcatgacccttatgtcacctttcggtacgcgttgcatacacccgatatggcgtactatcccgttcttttaggtattccggtcactatagagactccgatgctgaggtccctgcggccgaggttgactggtcccaccggtcagcgggggcacatatgagaacatattgggggccatgtttgacagaggcccttcaacactgttcccttggcacggacgtggtttagtgatggtttgttttatcgtgctgacgtggcttgatagtattgggtcgg

SEQ ID NO: 105091 - DNA, 418 bp, Zea Mays
agggctagtccccagatgagaaatggcacgaagataatagcttcatggatatcctctgtcggaatggtaaccccgcgctagattcgctaggaacacaattcttttggtggaagaacaccaatttcgacgaggtggagaaggtcagctttggaaataatagacatgtgattaccagcgaatggtagttgacttttgggatcaattagcgggatgatcggaatagcagcactctgtttcttcctcttgggcgccatcgtggtctctcaaacgatgcaggcggattcaggaactcaggaaattggaaagcggcagaggaaaaagcgagaactagggttcagaacgcaagggggacgtcagtagaagtatgggttgatgtgttaagtcgggcgcaaagtggtaggccaataacttgggaaaa

SEQ ID NO: 105092 - DNA, 661 bp, Zea Mays
tcagcttcgttaagttgtctgtcggttgcactggctcttttgtttgtttttcttttccacatatcaaaagttcagtgctactacttattggttcatgaatgttatttaatttgctggtttcatgcttacatatcttttatttctactgatgtttaatttgcaaatcagtaggtttgcatgctttttttttcttgcaagggatccaaataactcttcatatatatataatggggacatcactttattgtttttttactttgttggcgtgtagaatttcactgtttcttatatgctaccagctttctgcaattctacaaatatggtgtttctcacaaacattgctcagagcacaagctatgtatcctcattgttctctttctcgacttttagcatattaactatattaacctggatatatacatcatttgaggaagggatcagctgattgttttttagagggtcgggatgaatccccataaattctaatgagtaaataatgaaatacatgcaagcagggcgagaaatgcgttgtgttttgttgactcaatcttctatttttttccttagattgggtgagatgtgattgcttaattttctctcccaaattaaaagagagacatatgcaaatgcacagaagtatatcccatcccatctataaatt

SEQ ID NO: 105093 - DNA, 273 bp, Zea Mays
aaggctttctgtcattgccttaccatgaagacttctgacattacgttatgccaagaaatggagaagttgaacctagggatgattcagcatggaacttcaaatcatttgaagcttgagtcagtcatcctgcaaagaataattgacgcacaaagaaatgatgagggaatgaaacacattcatgagaaaatagaagctggtaaagccaactgcttcagaagagatgatcaaggtattgtatggtttaacaaccacatagttgtgcctaaaaatgat

SEQ ID NO: 105094 - DNA, 735 bp, Zea Mays
atttgattctacttggggctcgacaacttgaaacccctgctgcgactgctgatgcacgtccacatttgagatcttaggattcagagaattatggaggtttgagataggactgggaacaggcttactaggaagtggggctattgcagtatctgaagagagcttcgatattaccttgggagatgtagcagtttccatggcgaggtcgttctgtatgtcgaatgaattggctgcatcttaggcggggctttcgtcagcgaccatctcaacaacggctccaggggacgacccatcagtgcgaagagcacctgcagagaaacctgcaccagcaattaccttgggtgcaatcagctttgttggtgatccccctctggcatggaagccaagtgcctcttgcatgccagcttcagtgccaccattcagcaagagcctgtcagcaccagccgccccctcttcgccctcgaaaggccacacagcagaaatcagcggaacaacgaaagaaacagctttagcttttaatttaggaacccaacgctttgagtgtggcatccccatctcatggcgcctgaagggggtggaagctctaaattttccattcgagctgatgcagtcagcagtcccaccccgacagcgctacgaacgaacccagccagaaaggctgcgatgtcgacgagggccgtgccttctaccatgctgatactcatcatcatcatcttggtcccagtcccggcgaaccac

SEQ ID NO: 105095 - DNA, 378 bp, Zea Mays
agggggtatggtcacatcaaatccggaccgcccatctaaatccaacggcccagaggccaccatctttcctctacccttttcctctaatccacaccatccatcgcgagatccacggccacgcacacatcttcttccccccggtctcccacggcagccagggtagtggcgtcgcatcccgccacgacggcggctaccaaccagagaagccccgcgcggcacccagagcacccaaaccctcatggtgaattacgcagcgaaggtcgcggcaattgatacagggcattcttaccaatagtatgccgactgtgagtgagggcaacgacgaggttgactggcgacgagtcccagctgctccggtgagcatttctcacatagctt

SEQ ID NO: 105096 - DNA, 630 bp, Zea Mays
cgactacataagagctgacaatgatttccatcaaagaagggaggagttacatagatacaccgaaactgctagaggcttcaagggaaggttccaccccaagcatgttcgaagcattcacaacccgatgcagggtgaagaaaagatggcctagtctcagggtcaatcgggccagcaacaagcaagctcctagcaacaagtaagctcttggcatcagccttcgcataacatgttttgtccatctgcttcgataggtggaaggggaggccaaagcttaggtggcagattcaatgcacctccaagtaagccattctgcttgttttgaggtgagtacagatgccacaccacaagaacatggcaccatacaatcaacaagtagaaagaacttgctttctcagctgctcaaccttcccagccgaaggaggtgttcagtacatcttcgtactacttgccttatgttccacagtacgtctagccttaatcacaggagccaaggctaaatctaccttcgacctcaaatgcttcgagtaatcccatgatgagcgcatggtcgccatctgcttcgttcatccctggaccaccccctacgattaggtctctactggccatcccaagtttccagtgcaagatttt

SEQ ID NO: 105097 - DNA, 439 bp, Zea Mays
tttggatgctacttaagtccatccatgatgacattttatgattatttcaattaagttttgaagttttctcttggataaactttggttattttttaagcccagcctagggttaagtactgtatcctagggttttacctatgaaatgtcacatcaatacaacttgtttgaactttttgtatagtaaatgcattctaggtgtgacaaacacatgatatgccaatgcttatgatgtcatgctcatgttttagtggcagtaacaccagggttgttacatccttcccctcatataagaatattgtcccgagattaaaagtctagggcaagtaatggaaaaggaaacgtgtcatacttttatttccttatttttggtacaaggcaggggtggtatggggttcattcctctattacaacaagtgtacacatcttataatttacacga

SEQ ID NO: 105098 - DNA, 361 bp, Zea Mays
gagcgattgaacacagtaattccgtcagctaggtaccagcagaccttgaggcactatcatgataaagctatacgacatctatcctttgtagtgggagacttggtccttcgccgaattctaatgagagaaggatggcacaaattgtcaccactatgggaagggccattcatggtatcggaggtcactcggccaggatcataccggcttactcaaatggatggcacgaaagtggggaattcatggaatatagagcatctcaagaagttttacccttagcaagacttcaaaagttatcggagcaacgttgtactctgtaattgtaaaatacgtcatcaataaaagatttcattggttatcaatt

SEQ ID NO: 105099 - DNA, 598 bp, Zea Mays
aacaactagggatgaaaacggtttcggaatttttcggaattccgaaaactgatttcgaaatttttcgatcggattcaccggtaacggtatttttcgaaaacggaatcgatttttggaattttctatcggaatcagtatcggaatcggcgttgtgttttaccgaccgtttccttcggttatcggtatttgtcggaaattaccggatttgtgtctcggaaatttccggaattgtgtctcggaatttttttcggaattttccagcatgtgattttttcgcatcgtctgtacgtctctagataaggattacttatttttgtattttttggacgttttaagatttttttgggataaatggtgttggaaggcagttgagattaatcatttggtctctcaaacaaatccacccttttctatgcacatgttatgtattagtaatatataatgatagagagccgacagtctgtcttttccatacactagattttagggctttcctgtgaggctgtgaaaaaactctttatgtgaggaaaaaatatttcatgagtaagtatgccatgtcagctaaatcgagtggatattgtgaattgtgaactttgag

SEQ ID NO: 105100 - DNA, 812 bp, Zea Mays
gtaataaatctgcacaagtacagcaagctgtgggctgtggcccgaggtgggggactgtatctgcgtctcttatctttatatcgtccttgtgtgggaaggctcttatatgatctcttctatcaggtgaagatggggaaagccgagtgaacagttgatgggaaggagttggacagtgcgcaggtatatttgattttttgctactctgtgagaacgcatgtagtacagtatatttatttctggaccattcacgatttcgttgcatcatttatggaaaccattgagacgacgctgaatttcttaagacacaatatatacgctcacagggtacagcaaggtatggtgcggcaaacttgctctgaagctctgcaggtttgacgcggagactatctccgaggccagatcttgagggcggaccgaccgaccactggtagccacggcatgggatgacgggaataaagtggattttcaatctcacgatggttccctggatcgtcttcatatatttatgagatctctatattgaatgggttctttcctaggatagtgccgagatggaagcatcgaccgtgcaagacgtcaaaaactcatcttcagttttggtactatatttgagtgattcgtgatcttgcgttttcatacatgattcatttctcattgtatattatcatatatagttttatatcttgcaggagtgcacgggtaagaggtaagggtgataataagaacaaaaaggggaggaatggaccagaaagcggagaagaaaaaaggtacaagctccacaaaccggttcatgtcacattctgttcagggat

SEQ ID NO: 105101 - DNA, 597 bp, Zea Mays
tccaaaaccgggtgtgacagtgctgatgggtgatcgagtagtgtcaccagcatgcgtggattgtagtcggggtcggttcaaagctcgggagaccttgggctcgcagcgtcagagaacttcgtctgccgcgggcgatgttcacttggggactcatctgctgtggccgtaagcctctgctcgatttgtgcccaagtttgggattatcatgttcgggatcgtcggggctatgtttaggtggcattaggattaggatccgagcattgaatcggcaatttgtgtgcaccggcgtgttctctgggcgaagctccgtgcggtcgtcgggtctcagcggcagaagcttgaagatgtgcctgggccgttgatctccccgtgttcggctcagattggatggctgatgttccttcgtcccgatccgatctgaaccgtggctcttaggttgtgtggctgagattggtggtcgcgtaccctttcacggcttatgatctgtgccatttagatttagatccgacgtccgatagttgcgggccgttcgatcgggatcgggctctcggaaatctctctgggcgttataaaatcggtggcgttgatttctaatcg

SEQ ID NO: 105102 - DNA, 305 bp, Zea Mays
tcttgactgcgtagttctcaagttctcccttatcaaccatacttgttcttctgcctcttgtatgatttccgtcccaaagaactgcctctcaccagtttgatcccaatataaaggagtcctgcattttctgccatataaagcttcaaacggtgacatcttcaaactagcctggtaactattattgtaagagaacttcggatatggtaaactcttatcccaactgccaccatgtttaagagcacatgctattaacatatcttcttgtacttggttggtcctcttggtctgcccatcagtttgaggat

SEQ ID NO: 105103 - DNA, 296 bp, Zea Mays
aacatagtgatgatctatattttgtgcacaaactgttaacacataaaacaaagggaatttaataccttcttgcccttgattaagggcaaggctatatgtcgcgccttgtagaggtggtagtgcatcttggcgcgatggaggaggcagggattcccgtcgcaccgcattcactagcctacagaggaggaggctcggttcctagcgccgttgggttgcccttgatctccgacaccataaatcacagcaatttcggtcactctagcactagtgaaatgggaacccttagggaatgtggg

SEQ ID NO: 105104 - DNA, 631 bp, Zea Mays
gtcaattattggtccaagtaagagtacttgggccatgtctatatgtacatgaacctatagggtcacacacttaatgggaaggaagcctaactcggactagatccaaaattagaaagggctttggggttactgatgggcttcggagttagaagtccaccagaacgcctatataatgaggggcaggggcgtggttaagtgaattcaccaccagtaaacaagcagccactcgcctctcgccctcgcctagacaccgtcatgaacctagcagttcggcacgcggcgcttcctccttgtatgtgtcgatacctcagaggtgctgcatatggagcattaggacgaaccacgcaaggatgtgaaggacgccaatgactgcacaacactactcgacgcgttcgtctacatcgagatgtcttccgctgccctgcgcgtctagtggtaattccatgacctataaccacagtagttcttggttttatggggtcaaaaattttgttttgcgctagtgtagcctctccataatacatcaatgtcaaccattcccataggtcctccaaacgtgaactggtccacgctaccgggagcacactaccctaccatccagctactatgccaggaggatacatgccactcc

SEQ ID NO: 105105 - DNA, 582 bp, Zea Mays
atcctaaagaagagtggagagatggtggaggagcccgaggggatcgaatctccaacaatctccacgaagttttgatagtttttggagggatttgagtgtaggatgtgagagagggagagagaaatgagggcgtcggtggctggaagaaatgagagagtgaagatagaaagtagagaggaggagaaaaaaggggcagcgtcggctggtcacactgaccaaaaccggttcaaccggttttgctgcagcgcgcacactaaaatgcgcagaaaatgaggtttgactgcgcagaaaaactgacgcactgacagtgcagactgcgagactgacggcgcagactgcgaaacagactgactgcgcagaatccgaaaaccggttcaaccgattctcaccagagagaatccggttgagtggcttactcagccggtttactcaaccagttttcagagacagcccgataaggcctagtatacaagcaatatttatgatatgactaatttaggcaataaaactaagatttcaaacttcatattgttcacaaaacatctttataccaatcaatcatgattcaaattttatttctta

SEQ ID NO: 105106 - DNA, 545 bp, Zea Mays
acgaaggatcgatgtcgtatggccttatcatgatagcgcctcagagtttgctgatatcgtgctgattgaatcactgtgtttagtcgctcttcctcgagtacgtcaacatcctccagcctagtggcttcagcttctgctatgttttcaaagatcaaccttggtgccccaaacttgagatcagcagtagcactacctctgaccgtagaccatgagaaaggagcatttccatgcagagctcgactaggttgagttctcaggctccaaacaacatacggcagctctctgatccattttcctgcgaacttctcattcttgtcgaagaccttctttctgagcgcctccaatatcatcccgttaactctttcgacctgcccgttggctcttgggtgcgccactgaggcatatttgatttgaatgctctttttcttgcagaaatcgaagaactctgaacttgtgaagtaagatcctaggtcagttatgatgctactcggtattccaaacctgaatattatgtcttatatgaattccactgccttagctgaagt

SEQ ID NO: 105107 - DNA, 348 bp, Zea Mays
gtggaggcgaggtctaccttcaccgtgttttcagtcagatggggctgctttaggatgtgcataaagcgcgtccaaagaggtcaatggcaaagatgatcggtttgtctccaaagggggctacacgttcccagacatctatagagacccctattagttgaaagcggacggcacagagtggtggattacagtggtctacgggccccaatccgatgcagacaagctcctgtttcttcaggaattgagggcccttgtctcccaggggcacgagaggtggctagtccttggggattttaatctcatttaccaggcttcagacaagaacaatctaaacctaaataggcgcctcat

SEQ ID NO: 105108 - DNA, 300 bp, Zea Mays
gagtttggacacatggtagcgaatgtctttcaaggaagaagatgagattgttcggatttaggatgccagaacagagattctttggtattgacatgccggagaacaaaatgcatgatgctggattgtctggtgtaattcatatagataaaatattatagaaaccgcagccgcaaccggattaaagtcgcagcgaacaagctaggatagacatgaatgacttcattgttacctttcccgataaaagctctctggaaacatttgtcaaattaaatagtttgtaaatgcgccgtggtttcggga

SEQ ID NO: 105109 - DNA, 298 bp, Zea Mays
aaagaatgacatatacgaaaaacttgactaggaggctaataccacctcatgatattacattaatagaaggttgcgacaacgatccgtgaaacccccgaaccgtatcctcccatcactaatagactgattcaagttgtccactctgcaagggcccatctaggcccaatggtggcacacagtcgagtcgtaactcaagagtgagaaaaagaatgacatatacaccttctacagtataatagacagggtcaaaccactaggctgaccccacatatcttgtaatctcatctcccctggtcta

SEQ ID NO: 105110 - DNA, 314 bp, Zea Mays
agcgggaaagctactcgaattcattgtcagccaccggggaattgaggctaatccggataagatcgaagctattatgaggatggaggcaccacggtcgcagaggaaagtgcaaagactcacaggatgcatggcagctttgagcagattcatatcaaggctgggagaaaaaggcttaccattttataagctactcaagaaggtggataagtttcagtggacttcggaagcaaagaagctctagaggcactgaaaaaattcttgacaacaccaccagtgctgagaccgccgcgtcgagccacgccgactcaacccgc

SEQ ID NO: 105111 - DNA, 762 bp, Zea Mays
ctttttctcatttatgctaattgatcggttagtaaggcatagagatcgccataagatgagtaaacgcgagcacgttacactaagtcgagtaagcgtgatcatgttgcaccgtcttaagtcattgtcgacttaagccgattgctccgttagtagggtatagtggtcaccctaagtcgagtaagcgtgagcatgttgcaccgtcttaagtcactgtcgacttaagctgattgctccgttagtagggtatagtggtcaccctaagtcgagtaagcatgagcatgttgcaccgtcttatgtcagtgccgacttaaactgattgctctgttagtagggtatagtggtcaccctaagtcgagtaagcatgagcatgttgcaccgtcttaagtcattgccggcttaagccgattgctccgttagtagggtatagtggtcaccctaggtcgagtaagcgtgagcatgttgcatcgtcttaagtcactgccaacttaagtcgattgctccgttagtagggtatagtggtcaccctaagtcgagtaagggtgagcatgttgcaccgtcttaagtcactgctaacttaagtcgattgctccgttagtagggtatagtggtcaccctaagtcgagtaagcgttagcatgttgcaccgtcttaagtcactgctgacttaatccgattgctccattagtatggtatagtggtcaccctaagtcgagtaagcgtgagcatgttgcactgtcttaagtcattgccgacttaagccgat

SEQ ID NO: 105112 - DNA, 325 bp, Zea Mays
aattgtatgaatatggatgcaaaaatcaccaccctatgtgatgagttgtgcaagttgaaaatagaagtcatttcctccggtgccttgagttatatctcagtagagcccactttacaagaacagatagtcatggcacaaatgggtgacaagggtgttcaggttatcaaggaaatggtcgaacagatagcaaaaaaatacaaatgcttccgtcaggacagcaaaggaattctatggtttggagaccgactggttgtccccaagaaccgtgagctcagaaagaaaatattggatgaagctcacctttcaaaattctccatgcaccccg

SEQ ID NO: 105113 - DNA, 676 bp, Zea Mays
ggcctaagagcggcactgcagcttaaggttttaacaatttcttgaattgaaaatttacaggtagcctatttgcccccccatctagacatatcatatccttgttcctcagcagcacttaactacgtgaggtatggctacgtctaggcaaggaaatgaagggacaaatgatgggattgatctctttggtgaagaatcagagaatgagagaatataagcaacaagctatgcaacactctatactgaaatatctgaaggagaaagagcaagaaggaaagaagagcgtcgtttgagaagagaagcaagaaaacaagcacaagagttggaagaacaaaaaacttcttaggagagcagcaaggagactcaaaacataagagaaaccttgattggaataagaagagaagcaaaagagagctgaaaggaaaacaggaaagaaagtcttgaagtaagatgagtctagtcgcagtgatgatggagatgatgacaaatcttatcaaactaataagagtggcaacatgaaatatagcaagggcatcaataatgactatgaaaaggttcctctaaactatagtaattctattcctaaacttgaccatagatatcttgtgaatgtgcttgcagggaagttacctcagtttaatggaactaactttgtaaagtggaaacatgtgatgaagac

SEQ ID NO: 105114 - DNA, 937 bp, Zea Mays
gttgctcctatattctcaggtgctatgtcccatttgtaggatcttcaaagtttaggaattcaaatatgagaagaacaacatgttattgtactgtacccacaagtatcactttcgtgtgcatactatttaatttagttttgttaatttgtgagtccaaggatctgtaccattgacccactgttatagtttctgaagtctctgattattgctatcgtaactgtctgcatgacttcaacatgacgctttgtctggtctggttcatcagatcacacagatcgttatcttagtttgtaccactgctattgttgatcctctggtaatttgtttgtttatttatggattccattctataactgcaagatactccttcggatcatctgatctatatggttgtatgtgaggagaatattgtacctcaagggagtgctgtcgtggtatcgcttcttccgtcatgagctgtagcttggctaccaaaaagcgccttaatcaacatgcacacatgcccaaagaaataagtgccccccggggcctaccagggatagacaatcaagggccttaatacagtcagatgagatgcagtgcgctggccacagtttaatggaggacaactatgctatgaatttggttaaagaacaatggtaattagagcacatattttgcatttgaacatttcatatatgtgctctgaattttcagtttgattatctttgtaggagggtattgttcaacaatctgctcaaggtgaaggaatcaatgatatttttttgttatcatatatcatatgttcaagttacatgagtacactatcttagcaagttgtaatagctaaaatatatgggatactatagcctttgttgctactaggacattagcatttccctttcatttaccaaagtttggtcttttgttaagcttttaattggcaaacaaaaagttg

SEQ ID NO: 105115 - DNA, 399 bp, Zea Mays
gcagttccaggaagaagctctatgacaaactcaacttttcgctctggtggcatacctggtaagtcctttgggaacacgtctcggaattcggacacaactttgatgatctctagtgggtcttcttcactactatcaacagtcatctaataacaacttcctttctttggctcaggcgggactaactcggtcaccacttcctctcctagtgggggcatcaacttgattgtcctcttatcacaactgataattgcctgatacttatctagccaattcatccctaggatgacatctattccctgagtacccattactatgaggttagaaggaaacgctatcccccttatttccacacttacattcaagcaaatgctatcggctcgaattctaccatccacggag

SEQ ID NO: 105116 - DNA, 422 bp, Zea Mays
gcattatgttattatcatcgtggtgatcttgtttgctccctttgccttttcggattgaaatcttggtgtgccattgtagaacaagcaatatgaagcaccctttgaagaacactttataatagaagtcgaatgttctgagtcaaggtatgccattggctgctaaaccaatcttaatgttacaacttcagtgaagatccattttagggagcgttccagtaatgtcatccatcatttttcgacgaaggttgtcccatcccaatagacaaaactctaggaactattgactaagcatcacccaagatgaaatttctaagtgattagactactaggtctaagtgatcagactacgaccaacacatagaaccatgaacaggatagatcatctacctacactacagaactctcatactgtattggttgcc

SEQ ID NO: 105117 - DNA, 385 bp, Zea Mays
cagcgttttcactcactatcgcaacacgagagcgaggccggcaaacatgctacatcggctcagccttcggaataagacccgcctcccggaaattaaacaacatcatcttcaactcttcgccttcaaacagattccgaaaaccccctccccaatacatatcccagacgtcgaggatagtaaatcacgttggctgccccgatctaatcgaagacaggattgttccatacccattcgacgacgcctcccacttcgtgacatcccaccaacactctgcttcgacaccacctttcgccgacggtggtcttcggctatcgccctaaccaggggagtagactcttcgcgcaggtcaagctacagcgaggactctgttgcggccaaatccaac

SEQ ID NO: 105118 - DNA, 312 bp, Zea Mays
gtctcatccacgtgacttggagagcagctccagcgtcctggcctagaaggaagggcctgttgtgaatcctgttttgctcgacatgcctacatagcaccgtgaggagaggatggagactatggtgtcatccttcactcttatcgtgttagtagggtgctgcgatagagacatggggctagcagtgttgcctcgtccgtcactagttgtacctatggtgcgtcgcgaggaggtgaagccagcggcagtgccccctccagctccttctacgccgatggtggcagcccctcagccacagaggagggaagttacctg

SEQ ID NO: 105119 - DNA, 640 bp, Zea Mays
ggcggatccaaggagatattattgttgagagatttcggcgaacacgtgagctgcaatccccgcaacagactccgagcatggaggagctcaggtactctggtcccacacgcatagaggtcatagcggagaccgcgagattcacttgagtttgttacggagtctgtttgctgcagaggagctcgccgcgatactgttgcgtccatccgcaaggttggtgctaaacccacaaggtggggcccgcaaggaagtgaccaggttagagtgatgggctacgcggaagaaaattgcgaagcgggccgcccgagcgagacatgggttgataggggagatgggagtttgggctgcgcgggatagaattcggaaatgggctgagacaagcgaagtttggcccaagcgcaggagattctcccttcttttctttttattttccttttctatttccatttctatttcctattttctatttattcaaatttaaattgggttttgaattccacacccaagttcaaatgcataaacaaaatagattccagcatgaaatgcgaaattgtatttcatttataatatttggttatctatttgcctcaaaccacacatatatatataggatactcatttggagtgtatattttaattttca

SEQ ID NO: 105120 - DNA, 607 bp, Zea Mays
aaaaaagctcgcccccactaagaagatccggaagcggaccaagagccaaggatgccagactgaatggaaaaaggaagccccactagcactgcctccctccaggatagaaagcttgtcagacgttgaggatatgtccctagctagccttgacgaccttctcaaggaatttggggacaccttagaaaaggagttcggaagcaccttagaaagcactcgtatgtagtatgacttgtggtaactatatgcttgtaatgaacttgtgtgatgaataaaataacatgtttgaagaaaaaaaattgacatgtgcatagtagtaattctctccccctggcagatggcttcggataaaaccacgcctaccacctccgggattggagcaaggtttcccctaggagctgaaggagaagccggtggagaagggagtgagacccacctcctcgcacctccggatctgccattagatttagcccaagttctggccaaccaaacccgactcattgaagtcctcaccagaagccttgagaaccagcgcccgaatggtggaaggcctcaggacatgatgagagattttctaagactcaagcctcccacattcgctggatccagc

SEQ ID NO: 105121 - DNA, 326 bp, Zea Mays
attggtttagcaatcctggagaaatccggaatgaatcatcgataatatcctgccaatcccagaaaactctgaatctgctgaacggtggtaggaggtttccaatccatcacttcttgtaccttctcaggatcaactgctattccgtcctgcgaaatggtgtgacccaaaaacttgatctcccttagctagaaatcacatttggagaatttggcgtacaagcgatgattgcgcagtcgctgaagtactgtgtgcaagtgctttgtatgctcgtcttcactttttgaatataccaaaatgtcatcattgaagaccaccacgaatttttc

SEQ ID NO: 105122 - DNA, 711 bp, Zea Mays
ggaagggatagattagatcattagatggagaggggtacctttctatttccttggtggcgtggtgcgacattgaccactagaagtatggtgtaggcatcatcacaaacagcaggagggcggcatgggggacattgcagtcaggaggcttgacgcgggcacaacaccgggaggcccaacgaccatcgacgtagcacaaggcagccgacacaggcacaactcaaggcatcgggcgtgggtacaactctacttcctctcctagatgttggtatggttgttcttgaatctgttctcaatctccttgtttcaatctcatcaatcccctactctcctctcaatctctcttggttcctcttcttgtaatctcccttggttctctactattatgatatttatattctataatgtgctggttttacttccttagtatgcagaatttatggtcgctctgtatatattagttggttgtatggcgtcacctaggcgcttgtctaagtcgcctagacgtccaggtggtggataagtacctaggtccgtcgtagtgccttttaaaccatgggcgggcgagtggtgcgatcggatgatactgggcggcggcaatgatggtggattgagcacacacagagacagagagagagagagagaggaagacgagcgggtgagagagtggtcgcgcggtgactcggacccttattttccataactcctgtcaat

SEQ ID NO: 105123 - DNA, 798 bp, Zea Mays
ggagccgctctttggttgttgtgagtcaagactcagcgcgtgcgagacatgtgtttggttacatgtgtgaagctatgcagccaaactcgtgcaatccttaaagtagcttgggtcaggctctacaaatacgagctagatgagtgtatgtccgaagccaagctctaatggccctggctcttagagccaggctcgagggagatgtgaaccaaacgctgttggtcacttgttgacctatatgtatggaaaggtaaggagataattttttcaacccaactagacccacttcaaaacttttttgaaccaatggaatcgttgaaataagagagtctccagattctgtcctagtattgtgttatcatattttggtatgttgggatgtgtttcgtgttggagtgcattaaggatgcgtctagaggtcttgcacgcttctaacccttatatatttagtagtcgttgtcatactagatctcagattttgctttatatttaacttgtcaagaatagtaccgctaataatcaatttgctgaacctcgccattataatcaattcaaatgattgcaacttcttcgttcttgcttgtgttctcgattgcacttgtaggaatatgtcttcttgacgagattatccatgtggcacatgtgctaaccaacagagccgtaatgtagtgattgcaaggagtcgtttattcagaatcttgggtcatcagtgttgagatcttcacctcaattgagttaccttctagaagatcgagacggacctttccactttcactatatcgacacgttcttccgctctac

SEQ ID NO: 105124 - DNA, 586 bp, Zea Mays
aagttcagcctacaagtttaaccaaaaatgacaaaagcactacaatgatatcaaaaaggtggaacatgtagtccactcccccatcactgaagctgagaaacaaaaactaaaactctaattttgtgtaatcttgccactatattgtataacacttgagttcacctgaccctaaaatactatttcctccaagccacagcaagagatcaccgaattatgcgactatttcaggacactgcaatgtaaggatctaattacttctcttgtccagaaaagacttgccaacatttcatttttatcaaagacagcaggaaaacctttctatcaggtcaatccctgcaatgtgactgaatactccaaatgtgcccaaataggacctttaactaacaaaattgatgatatttaaacaggaaagagttcgatgacaatgaccaatggggttagcaagatgtgtaccttgcatatcctgatcactgagggccttaccacgtgcggcggacggaggtcgccgaggcctgccaatgggcatgacgacggggtgacaaggaccgacggtgagggttagggtttgagagcagtcatgtgcgga

SEQ ID NO: 105125 - DNA, 364 bp, Zea Mays
ggttcgtgcaccaccggacctaccacgtcgacaccacatcatctgactattgggtgtatgggtggtcaagtgcatatcagacgaagtctggtgcgcaactgctccaagtctgaaaacatcatctccacataatgggtccgatgcaccaacccacacaaagcccataatattgcatctctgcgtaacaagtttggtggcccactggactgatccggtgcactagactcggtctggtgtgttgcaaaggagcataattaagtcattttgggacttttattcttcgtcttcatttagctgtcttcttgagcattcttataacttagacaaacatatctagagtctttccaactagtttaagtcatag

SEQ ID NO: 105126 - DNA, 864 bp, Zea Mays
aaagaaccctgggcactatttccttgtctcactaacgtttgcacttagacccttcctctttcttatcttcggaaactccagtccccgacggtgatcggcgacgagcacatctccggcgaactcgtactggccggaaaacacaacggctaggcctctcctttgttcgacacctaattccaccctcggcgacactaatccctcaaccaattgcactaaatcggcccggagttcgtctgtccatggtggcaacgactaccggagacaattcgtgttgttctaggcgattcaaggcggtctagttcaatcgaatgggtctgtgagcaacagaagacatgagggaggctagaacatcacacagaagggcatgaactaacccgtagatgtctggccacgacgagctgtctcacggcggcgttctgaccgatttaagggaaatggaaaattgggaggctctggtggatgatcggaggcaagagctggtgctttggatgtgtaataacctagaggagctcactggggcagcaatttatagcctccatcggtggtggcgtccaatttgaaggaagtgtgctggcggccggagagaggagaggttcactggcatgagttaccgtggcaatcactggctgaggagctacggcgatcactggtgagctattttggcgagtaacgacgtggtgaaagggtcacggcgtggcgcaatcgcggtgaatgatatacacctcggcgatggccgctcggccacgtcgccgacaagtgggtacggtgcctgggcagaacagtggtccgaactcatccacggtgaagatttttccactgccaatcgcaatccacaccgcagagggcacgaatcgcggcgccggc

SEQ ID NO: 105127 - DNA, 803 bp, Zea Mays
gccccgtaagccacacaccatcccacatacaccctgtaggttataagtgggtattcgtccgcaagagaaatgaaaataatgaaatatcaaggtacaaagcaaggctagtcgctcaaggtttcactcagcgccctggagttgattatgaagaaacatactctccagtcatgggaggaattacctttagatacttgttctcattggcagtgaacttaaatttaaaaatgaaactaatggatgttgtgacggcttatctttatggtaacttggatacagacatctatatgaaaataccagaaggaatcccagtcccaaatcgagacgagaaaaatatagcattataaagtgttaaacttaagaaatcactatatggattgaaacaatcaggaagaatgtggtataatcgactgagtgaatttctaagcaagaaaggctacacaaacaacgaggattgcccatgtgtctttatacagcgatccccgaatggattctgcattatatcagcatatgttgatgacttgaacatcataggaacacatgaagaaattgaagaagcaagctcatatttgaagtctgaatttgagatgaaagatttgggtaaaaccaaattctgtttaggcttgcagcttgaacattttgaaggtggcatattaatccaccaatcaacttacactcagaaagtattagaaagatttggttttgagaaggcataccctgccaaaacacctatgatcggaatgtcattacatatagaccaagacccataccgacctaaggaagaaggggaggaagttcttggagtt

SEQ ID NO: 105128 - DNA, 343 bp, Zea Mays
tttgaattacacacgaacacgggtgaaaactttatcatatccgttgcaacgatggttgcccctaagcgagattttctggcccactagtggggcttaattctaaaacctactcgtgtgtccttgaatataattatacctgagatgccaaagcccctaggcttagctagaataaatgaaatgattgatgtattaccttggcgaagtactaaacattaatgtaactaatacccgcttagtttctttccaccctttcagagagactgtcctgtttggatggccaggatgcatgcattggaaggacaacaactgcttgaggacgaccccacagtcgtgtacctcactg

SEQ ID NO: 105129 - DNA, 482 bp, Zea Mays
ctcaagttgagtggactcctccttatgagcttagggcgaagccagtggagtggcatgtcatgcatggtcatgatctttacgtgctagtagagacacatgatgcaatgctccttgagggtggtgtttcattggagggacacgagaagagtcaaactctgtcgatgtagtgttgtgtgcgccaaatgtcgtgtccccctacacaaggcaataatggttgacaagactaggccaggcaccaatggtgtaggtgttaggggtcatagttaatgttactagagctagagtcttagagctctgatccaagcagtaggaaggtagaagatgacatgcacgcagaaccctactataggtgccaggtcttccacgaatgatgccaaatgtcataacaaagataatagggtaccaagtgtattgtagaaatgatagctatatgagcaaagagactagaaataatagctataggatcaaagagcgagtcttgc

SEQ ID NO: 105130 - DNA, 373 bp, Zea Mays
gtgagtatagcctccttgagctttcttgaagggtccaatcatgtccagtccccagcatgcaaatggccatgtcacaggtatggtctgcagttgctgtgctggtaaatgttgttgctttgacaagaattggcaagcttcacatctctgtactaactcggctgcatcactctttgctgttggccaatagaaaccagacctgaagactttcccaaccagagttctgtatgctgcgtgtattccacactgtccggcgtgaatctcatctagtatctgtctcccagtgattgaggaaatgcatttcatgaggactcctgttgcaccccttctgtacagtgcgtcccctatgagggtgtagtgggccgactgtcttgcg

SEQ ID NO: 105131 - DNA, 1451 bp, Zea Mays
ttttttttcccttctacccgctcaccttttcccctactctataactacctccattcccgcactagcacaagcttcctccttcccacatgggcaccgtctcctccttccccaattgcaagctccattcgcgctcctcgtcctccgctgcctccagcctagtcccatctctgctcgattggagaggtttgggccatgcttcctcctcgcgcgccacgttctcgacggaatttctcgtctacacaggagccaaggaacgctagaattagacgcttcccggggtcccttttagttcccctctaacgaatcataggtttgcagtttggtgtggacgtatcctgtgatttgtggatggttttggtgtagagtttagagagatcaagaacttccaacttggggtttcctgtagccttttttagctgttctggggcttttatgggagtgcccgtcgcgcagaagtccgattcttgggtgactgtgcttgcgatgacggacagcggcggcctcggcgttcggcctattaacggaggccgagggagtgccgtggagcagcgtgggctcggactcggagacaacgggcctccagtgtccccaccagagcgtgtttctacgccgcctgcgccgagactagctgcttggtggcgcatgtcgtcgcctggtcctctccggtgctcaaccccgaggtgagcaattgactttcttggttgcctaagccttggaggggataactcgttgatagacttttcactgattgaaattactgggcgcaggagcgttggatgtgaagatggtgatgattcggataggtacttttccccacagagtgagttttctcaagacacttctgatacagattcgatgagcacaagtattagtaggatgtataccttcaggttagggacttcgagcccattagatagtcctatcaaacaattgggagtaggagacacaagtcctccctcaaggaagggttgccattctcctagatatccttggaattcttgccggggatcagatgatgttgattctagctttatgagttcacctcggcatgatgatgaagagaggaaatatgatgtgcaaccaattgattttgagagtagacacatctggtatcctccaccacctcaggatgaaaatggtacttttcaatatgatgaggatgatgacaatgatgtttgtgatgggaaggtctttggacatattaaccatgattattgtgacggcgaagatgatgatgatgtgttagggatcaaaggaaaacatagtatatctcacaaagagttcttgaggagtgctttacatgggcatttcagggctctcgtctcacaattgctcgaaggacatggcattgatcctgtggatggctggccagacatagtatcctcattagcttggcaagcagctacctttgtcaggccagacacgagcaaaggtggtagcatggatcccac

SEQ ID NO: 105132 - DNA, 531 bp, Zea Mays
gcacgttgtcccaccaacactttaatctgaacatgataggcaagagctagcctaccaacacctggtccaattcccagagggtcggtaatccaaaggtctctagtctgagggattaaagccaagtcataacaccaaccgtaacaacgaaagacatccaaattcttgagttgtaaagtatcatcatgcacctcctggacccaagcaaaaggatttaaaagctgttggacagtggtcagctcccaggcatgcattggaatgccacgtagctcgaattccacagggataggcaaacttgcactcgaagacccaaagaacttggaccactttttacaatgcagggaaaaagcgcctgcacgaatagtgttccatctcactgtcaactggtcagcaaactgcagggagggaagcatgagcaggaaatgtccatgggccagtttcctcagaattagcgaatcagaactgacttcaagcttttgagcaaccgcatctgcaatatcagcatctgacacaggcacatcactgaccacaaag

SEQ ID NO: 105133 - DNA, 274 bp, Zea Mays
gccatcttccagcttcgggaatcccatgctcttacctatctcccggcaaacagatatttctttgttgtccgggagacagtataagaagtcatcatcgttagttccgttaaacactaaagctcccttcagatatttcaactttcgcgcatagtgtttggcttccagaatttcttcttcggacaatttcttcccagaagcgtgtcgaatgatgtagtcaatattttcggttggagcttctggagcaggagtatcgatcttttcaggtgaaatctgc

SEQ ID NO: 105134 - DNA, 280 bp, Zea Mays
gcaagaagaggttgaatagagtatttgatgttattgggttcgtttacccggactactgctaccccgcccagaagcaagggaggaaaaggaaagccgctacctcggcatctactgatgtgtcgaagtcaaagaaaatcaaagttttgacacgtagacccaggcgcatcgagacggccgatgtgtagaagttaagtgaaaaggtggaaacaatcccctagccatagagactgctcctactgtgcctattgaagctatcgcagacccaacccgagagccagag

SEQ ID NO: 105135 - DNA, 1717 bp, Zea Mays
ttcatccggtataggcatcgggtattcatcttttggggtggctctgttcaaatctctaaagtccacacagatcctgatcttccctgtgttcttcttctcaactagtactatattggagacccactccgcatacctgcatggccttatgaaatttgctttcaacagccgatcaacttcttccttaactctgtcatggatgtcgtggttaaatcgtctaggtggctgcttttgtggcctaaacccatgcttaattggtagcctacggtcaaccaactccctactcagccctggcatctcagtataatcccatgcaaaacagtctctaaattctctaagtaaatcacataccttttgcctctgaccagctattaatttagcacttacaaatgttggccttggcaccttaccgtctccaatgtcgacttcctctagttcatcaacagatgagaacccctgtcctaactttccaaggtcatcaaaatcatccaccacctcacccataccgtttttgtttaaacgatattcatttgtcctctcctgtaaccattctaaactattgtgttcattcatttataacactgagtcattgagtcgtgctatgtcagccgactttacatgaataggcacaaaactatctcgctctacactgatgaaatcatatcctgacaaatctcttcctgtcaaacaccgcatattaccgtgctgccattccattggcgtttccatgagtgtgatacacatagcggtgtttgcttcaatcacctccacctgatcacctacccattgaaccaaaaactgatgcaaagtagatggcacacaaccattagcatgtatccagtctcgccctagcaaaacattatacctccctttcacatccaccacgaaaaggccgttgggacagttttgctgcccactgtgagttcaacagacataattccttttgcttgtgatggcctcccctgaaaacccacttagattcatatttgtcttaattagctcactctctttgtatcctaacttagaaaacacggatagcgacattacatttacacctgctcccccatcgaccaacatgccccccattggcttcccatcaatgtgaccacgaacatataatggtttcagatgagatcccttctcatttgttttttcaaacacagcatgctcagccccgaatgttagctcagccacatctccctctcttgctctgaactcagtaggtaaaacaaacgccatgtttatatccatgtccccatgtgcttcaacactttcttctttatcggaaccactgctgttgtcattatctttttcctccttggccaatcgtttctccctccacgttttcttagggataaccatcgggctatcctcattaaaccatctatcacgctcctcctctttcatcttttctgtcatttccatagtcctcaaccgctagacatgacgcttctgcgtacggcttaacccaggtggacaccatctcagtgctggttttgtaccgggcgcaactgaaccatgattttttcgccccccacgtccagtacactaccagctgaagctcgaccagcaggacctacattctgggcgacaccaatcaacacatttctctcgcctgcatcaatccatcctctaatcggcactcttgttgtttgcttattactgcaacctggttgtttggcccacgtgtgatcctctcccctatagtggccatccatca

SEQ ID NO: 105136 - DNA, 551 bp, Zea Mays
ataagcatcaaggcaaggtctacagattacaaaggtaaagctgatatcaaacaaaagctcaacaaagaatggagttaaggtaagacaagacttgcaacgcgacaaagggaaaggaaacaaccaagagcgagataggtaaaacaacactctcgaactgaaatggaagaggtgaggctttaaaatgtgggtaaacgtcatggtaaataccgagagatatcaagggttaaaggtgataataggcaaggatgtaaggaagaggtaaatgtgcataaggaccaagtatataagtacaaccaagaatggagttaagacaagacttgcaagtggtaaagaataggatataactaagggtgggataagtaagacaccactcttgaactgagatgggagattggagattttagatagcagacatagtgtaataaccatggtcagatcgagagatgagaaaggtaaaggcaacaacaaacaaaagcacaacaaaggatggagttaaaaacttgcaagtggtaaagaaggggatacgacaaagggaaaaataggtaaaatac

SEQ ID NO: 105137 - DNA, 546 bp, Zea Mays
gacctaggaacacgcatcaatttgacaagaacgcactgagaacggcctgtccacgtgcacggcggaaaccgcggtgtcaatcccgtgttctcaattatccacgctcggattggttaaacggccactacgaggagcttcatgaacacatagatctgctaaaacaaggcttgaatcggacagggacttaccagagagggctggccacggagcgcagggctttacgttcgccggagacagagaaagggggaaatcggtgtcacggcggctctggttgaaattggggttggggattgaggctacagggtcgtaagaagctgtgttttcattgcgtgcaatcaatttgggcgaagatggagagggcagtgcgaatttgactttgactgagcttcactggtggagatgaaagcacctcgccgtggcaccctactcaatttataggcacggcggcccaatagatgacccccggccacagatagtagcgcaagcgcatgcctaccacgtcggaaagagatacagtgagggagatggaggcatgggcgacaccgc

SEQ ID NO: 105138 - DNA, 641 bp, Zea Mays
gagagattcactaggtatatgttaggtggcgcgaagtcattgttagggttgttagcgtagcaacgggagagtgcatcggtcaccgtgttgaggaggccgagacgacattcaacgattaagttgaaaccaaacaacttactaacctagtggtgcagcaagatggttgacagacattggtcgagggtgaactttaagttgtagtggttggtgcaaacgaggaagtggtggccccataggtacaccctctagtgtcggactgcctacaccgggctgattagctctcgctctttggctgccaacttcatatgtggtggcgcgaagggctagttgaagcaagacatgggtctcgtgtcttggtggaggacggcactagaccttgtatcggaagcgtcacagtcgttaatgaaggggcaacaaaggccgacaactggaggataggagtcatcgagagagcatgtttgagtgcctagaatgccgcctccgcctcataaccccactgaaaggccgccttcttgaggaggctggtgagtggtgcatcgattgcaccaaaatccttgatgtacttgtcgtagtagcctgcaagccctaggaagccacgtagtccctagaccaaacaaggccgggtcttctcaccttagctg

SEQ ID NO: 105139 - DNA, 537 bp, Zea Mays
tgcaaatgatgcaaggcagaccttgcttgtgctggtgttcatttcaataacacatttgcccgctgcctttttgattgctaacataatgagcactgtgactgtgaggttgtaattgttgaatttgtacacttggaggtaattagtgtgcagaggcggcatctgatctgcagtggcaggggaatcccaagtcctcggttccttctgacttctaatgtgctgtatggccctggctagcctaggttaccttctggttggcatttctgttatttaattttcttattaagttcaaatactaatggcaccctctgtttcggggccttcactatcacatcctctctcttctacacagaacaaggctagaaatgcatgccgcattgcaataaggtggacgctctccaaagggtttaaatggtccatcagctttccagcaactaaagactgcttcagttggtacgcagaatggtggtttaactaaaggaaagaagagatatagaagggtttaaatggtccatcagcttcctagcaacatcagattac

SEQ ID NO: 105140 - DNA, 311 bp, Zea Mays
tgtagagtatataacaaggaacatatattctgcagtgatctgggtccgattccaaacagaaaacgacgaaaacggccgcccactgtgtgtgttcgttgctttgcccttaagggcgtgattggttgccggatgaagccaacctggctcggcccccagatccaggctcatgggagcctggttccagtggtgcaagggggtgtgattggttgccggataagcacaaccaggcccaacccagcagttgattggttgcacagttgcattagcaaattcaaacacacagatgcaagtagagtgattggttgcagcta

SEQ ID NO: 105141 - DNA, 843 bp, Zea Mays
gatcaagctaggattgcggaacttgaagcgaagtttgccagaagaaaccctttcgaagctatcgacgatgccctattatctgtcttatccccactccgcaagatgttttgctatggatcctttggatctattaccagacttcttggttaggttgataggattgttctttagtattaggatttttgactagatcggtaagggcgaaattgtattatagtggttttctaatccataatattgctatataacccttgttttcgtgccattatattgccacccttgcgcaatatctaccttgatatattaaacttttgcctctcaacttttctccttgataatgctttcttcctattgaattcttatacttttgctttcgtgccattgtattgccacccttgcgcaatatctaccttgatatattaaacctttgcctctctacttttctccttgataatgctttctccctaactcactttatatccttggttatatcatttatcctcactttaatagttcatggttattttatttcactttttgccaccaacaaatatgtcttgtctaactccttgataattcttacccaactccttgatgttataatatctttcttatttcaacccttgtctcaccttttgttttggttgaatgagtagaattggattgtgttgtgctagtatgtttgaattcattgtcctttgtgttcatgtttgatttgcttctttgaaatgattgttggtgtattgtgttacttttgtccacaatagcatcggttagctaggaaaaccttagatatatgggttttctctgctctctacagcctgtctttgctcaaccctttcg

SEQ ID NO: 105142 - DNA, 394 bp, Zea Mays
gtgaatattcgtcctgaccgtctctctcctgctatgaaggatgaagtagatctgcaagtttcagacatgttgcaacatggcatgctacaagatggcattatacaacatagctcaagtgcattttcgtccccaatactcttagtgaagaagaaagataactcgtagggattttgcactgattataggcatttgaacacccttgctgtcaagtccaagtatccagtgtttgtcattgatgagcacttaaatgaactgtgtggggcatcttgcttctccattctgtacttatgggctagtttccaccaaattttattgaaggaaggggaggaatataagattgtcttctagacccacttaggccattacgagtttcgagttatggcgttcgatctcg

SEQ ID NO: 105143 - DNA, 347 bp, Zea Mays
gaggagccctgtcgagcggagtcagcctacatataatatttccttaaattgtttatgttctaggagtgctcgagctctactcctgtttggccaattagtctgtaggaatttggtgaaatcttcttgatgattatgtaagggtcttcccattttggctcaagcttgcttttttccttcttgtaacacccaaaaatcttactttgaatttgttaaaaagattcttccaagatctaaataaatgtggattcctaaatgaagaagatccttatatgagtttagcatacttataattgtcctccaaaaagttaaattaaaattataacaaagactataacctagaaattatt

SEQ ID NO: 105144 - DNA, 442 bp, Zea Mays
cagaatgtgagctataaaatcttcaccaaggtggccaccaacagattagggtcagtggcagataaggttgttagctcaacctagtctgcctttattaaaggacgtaatattttggaaggggtggtaatcctgcacgaaacagtacatgaactccatcggaaaacacataatggagtaattttaaagctagactttgagaaggcttatgataaggtgcggtggccttttcttttccaggcactccgtttgaagggtttctcgcccaaatggatatcttggattaaaaccttcatctcgggtggaagtgtagcggtggatgtcaatgatgatgttggacactacttccaaacaaaaaaagggctcagacagggagaccctttgtcccctatattattcaatataatggtggatttgctaaaagttctcataagtagggctaaac

SEQ ID NO: 105145 - DNA, 522 bp, Zea Mays
gcaattctggatggacctctttgctgttctcctcacgcacctcctccaacaatgcaaacacccatatatcattccctcgcagccatttctccacctgtagagtagaaacttcctccacaacctgctattgtacagtattgcccaccaactgaacttccacacctttgtccacaaagctaataaccttatcatcccaatcacaatgcataggactgtgtcgacgcaaccaatcatagcccaaaatagcatcatatgcgcctagccccaacaccctcatatcactctgatatgtatgcccattagcccaccattccaatgatcataccatcgtgtcactatacataatctccccatttgccaccctcactttagctaaagaacaaggatgcactggcagccccattctatcgaccaactgcttgttaatgaaacttgtggagctccccgaatcaaccaacaccaacagcaactgattttgcaataaggctctcacagccatacattcctcatttgtggtaccac

SEQ ID NO: 105146 - DNA, 979 bp, Zea Mays
cttagaaattgctatttttggctcttcagctgttcttggtttcttcaaagctttttcatcttcctttaccaatcgggcagcttgcctattcagaatgatgactattctttttctttttatccttttggctcctccgtcgagcttctcatattaaggggagctgtacaagctcatgtttcttcccccccccccttctttcttcttcgacattccccaaccgctagaagttggaaatgtcttgtttgccaaatattcttgtactagatccctagtactaatttcggcagcaaccaccctaaactcaacttcggctacctggcatggagagccaagttgcatatggcacaaggacctggtcatcctgaagcttagtttcatagacttcatgaccatagtcatcagcttctcccttctcttctcgtctgctttcacataaaaccattcatttgtccacctggttggccatttggtgcgatagccaatcactggagccttcatatcttttctataagcaaagttgtagcaaccgaagttcttatgaagaccatctaccctggccttcatctgataatgtagttcatgtacccggcaaaaagcttcgacattagcatccataccctggcttcatagagcccatataaaaacactaagcctaacgatagcattgggtgtcaattgaagaaggtatatctcaaagttcttcaaaacctcccctatcatgtcattcaaggggaaccgaagtcctgctctgaagaagctcttgaaaatgacaacttcgtcttcttttggttccggaataatttcctccccagcaaaccggacaagcttactttcagcctacccgaaataaccaagtttcctcatcataaccatgtcatcctccgttatagtagacttcccaaactcaatgtgactaggctttgttgggttcaggatgttgttatcttcttcactttcattgtcactttcgcctcctgct

SEQ ID NO: 105147 - DNA, 465 bp, Zea Mays
tgagggcagacaaagcaggagagggaactccactactttcaccgctggcgatgaactgccgactgtttttcctcgtcaagggagcttcattctcttcctcatcatccacattgacaacacaagcagcacccccattgggatcagcaacaggtggagcacccccattgggatcagcagcagattggttacacccattggggtcagcgtcagtaagtccagtcgcaggcacttcttcagtagcaggaaccgaggtaccagcgtcctgatcaaaactggatactcgccggaggcgtcttcttttcttcttttgctcatcaacagaaggatcaggtttctgagcgtccaaagtcgtatcagcttctaggaggggcaccactgccaacgccccagcaggagcagcatcggaagaatcctcagcaagcaaatcaagcatagcgtttatatctgcatcactagggttcaggg

SEQ ID NO: 105148 - DNA, 1047 bp, Zea Mays
agaatgacaagtagtaaaaaatagcaactttgttcccaatttaaaccacaaggttctccaaaaatggctcaaaaacttagcatccctatcagaaacaatattatttggcacaccatgcaaacactccatctcagtgaagaacaaattagcaatatgtgaggaaataattctatgaactcaatccatttagcatgacgtttgtttagattagattgtcccttaagacacttcaaagattcatgatccgaatgtatgacaagttctttagaccatagataatgttgccaagtatgtaaaactcgtactatagcatatagttctgtcatatgtagaataattaagagttggaccacacaatttttcactaaataaaacaacatgtttacctccttggatgagcagtccacaaatcccaatgtcgctcgcatcacactcaagctcatgtgagcttcgacttgagggcatcaaaagcttgttgttgtgctggtccccaacgaaacgacactccattctttgacaactcatggacatgtgctgaaatcccacaacaaatcgtctgtataatcatgcaagaccaaaaaaactatgtacctatgtgatcgtgggtggaagtggcaagctcatgatgacaacaacttttgcctcatccatctcaatgccctgcgatgtcacaacatatccaagaaaagacacacgatcattgctaaaggtgcacttttcaaggttaccaaataaatgtgcatcacacaagacataaaaaacaacacataattgttcaatatggtcatcatgagatttgttgtagataagaatatcatcaaaataaaccaccataagtttaccaatgaaagcaggtaaaacctcgttcatcaatctcatgaaagtgctaggtgcattggttaacccaaaaggcatgactaaccaatcataaagaccgaacttagttttaaatgcagttttccattcatcacctaaagccatacgaatctggtggtatacactacacaagtcattttttgagaaaacagtagaaccacttaattcatc

SEQ ID NO: 105149 - DNA, 438 bp, Zea Mays
ggcagggtgacccgctgtctcctattctctttaacttggtagtggacatgcttgctaccttgattaatagagcaaaggaaaatggccagatcatgggcttggtgctgcatttggtagatggggggctttccattctccaatatgccgatgatacaattttgtttatggaccatgaccgagaaaaggcaatgaatatgaaggtcatattatgtgcctttgagcagttatctcgtcttaaaataaactttcacaagagtgaggtattctattatgggaaggcaaaagaggatgaagggaggtacacacggttgtttggttgtagttatggaggtctgcccttcagatatcttggggttcctatgcatcactgtaggttgacaattagtgattggaaaacaatggaggctaaattcgagaaaaagctaagcagctggaaag

SEQ ID NO: 105150 - DNA, 344 bp, Zea Mays
tgggagatattttattcggaaccacatgaatcagagggcgagtttgaagattctgctaaaactttcatgatcctgctgtcgacagaggcaatgtctacaaagaaggctccatctcgatcctttcggcttcaaggccagcttcagggtgagaacatgttgatactcttggatttgggcagttctcactgccttttaaacgcttctcgcacttcattggtgtctgggttcatgagtttggagacacccctagtagtcacagttgctaatggcagaattatgcactgtccattggagcttccaaatgctacctgatcggttcaataattggaattttgcacaacctt

SEQ ID NO: 105151 - DNA, 345 bp, Zea Mays
gaaaaactcgcccgtgggtcatgtcgggtcaaatacccgaaatatatcacgtagggtacaggtaaaatattttacccgtgggtatccagtggatagccgagatattaattcaactatttacatgggttatattcactagaaattgtggcccataaagacatgaaacccacaaaaccctaatacagtaccatccccaccccacctgcatggttgcaacctatccattgcctttgaccttgttgttctttgttttaaggaagttgtttttatgtaggattccttgctacggcaactcggcgctgccataggattccatgctgcaaacatcacgtggatcggagtaag

SEQ ID NO: 105152 - DNA, 1509 bp, Zea Mays
cttcatcactgggtcaagcgataaacagtaacatgaggattggaggcgtaaaagataggtagtagctagattggtttttatttgattaaacgttggatacattatttggttgtaatcctctcataaatacaaagagacggggtcttatctcgatagaaaacaactccaaaacatgttttctagatttttcacatttaaaactatttgcaaacagatcggttcagaatctagacaaaccaccctaacgagccttcaatcttagcctagccgactttcatgagtcgtcgcattatgctcgggtcgacagtagataacctggccaaattgacttcacctcaaacatgtcgactctagacgcccgacttggtcgaatttaatagatagcctagtcaagtcgacttcaccctatcatggctggcttcatacacctagcttgggtggcgaccaaattgactatggctagacacttttgtggatcaacacatgcttcattgttttaggccaataatacatgaactttaaaaatataagagcactaaatattggtgaagtccaactcatagcctacctaatatataaggatgatacaagtatcgatcattgtttgaaaagcactataggcttcttttcattatttttcaaacaccttccattaattgctcttggggcaccttgttgtttgatactcgtagtagagattacaagcggacgagaaagagaagatttcttaagtctctatgggtcgcgttgctaagggttctatgtatcaggtgctcgctgccggctaagttgttgagtatcgtttctctgtttgtgtggtcttgtcctcccttcggttctcggtctcccccttttgtagaataaggagcggtggttacaagaggattatcaaggaaggagatatcgtgtcatggtagaatgacgtgtttccacctttcgtagagacttgtctgttagtatttgtcctggtcgtttaagctccctggtcaagctctttaagtcatgtgtgggcggcaggagactcaggcgtcatcattactcctctacatcacgctgactcctgtcctttgtagcctgagccttggcgtccctcatcgtgttgcgggtcttgtagatcgtcaagggactcatgcctaggctgggtagaccgtgagtgagccatatgtctacagactcgttggtcatgagtgggggctctggcccgggttcacatgtcatgagtggaatgaggaccgactcctctgtcatggctcggcgttaggtgtatttattatggtcacacatttatgatggggcagtcctgggcggggtacgaaatctactcgagtggtttcctcttggttcgctcgaccctccccattcggctccacctcgcccgaccaccatgctcgtgctcaaggttactcgggggtgggttattccggggaaaactctccctccgccctccctttgtcttatgggccctaggagcctagggatctaaccccctgtactttgctcctatagtta

SEQ ID NO: 105153 - DNA, 956 bp, Zea Mays
acatttgacaatcttgaatttatccctgctgcaaagcttatatatctaatgacgttttgaaaaccacctacctatcgattatatcatcttacaacatagttttgaaccaagtggcacgaactggaagttgcatatagtatttgtttttgataaatggatggtcctataaatagcactcattttccgcttatgtgtgtaagatgatcgttcaccccacgacgtcatatctcacgtgatcagaagagtgcgaaaacatttttttgtgggggaggggggttgaggtaattgaataccaagttcctgacgcacctacatcttttcattagcttattacctgaaagaatttataaaaatacagtgacctgaaggcagagtaggcgaagtggcaaacatgagtaaaactctcaatctgggcagattataatcccaaacaaacaccccattaactaagttgcaaaattctcaaggaaaaaactactgaggttctatttccgtaactgctcctaaatgagatatataattttcatgttaatcgaagtaagtgatgcggccagcggataacaagacttttcaacgaatagaagtatctgagcgtaatccaaaaaaaaaaaacaaattgctaaagtcaagagagatcattgacaccatgtctcacatcaggaacagtagtgcacagcattccgtagtgagcagagcactgagcacaaccacgaggatgacacgagttattagttagtacagtcgagtttgacctttccacctcggatgtagatctcccagggcgggtccaacagagtggaaccctccagcctccacgccgtaataccctcacaaatccgcaaacactattaggaaggagtgatagtagtagcagctagcaagcatattccctgcggttttaattaaacggtaatggtacagtggtactactcatgagtcatgacgcgacaggcaag

SEQ ID NO: 105154 - DNA, 441 bp, Zea Mays
ccaatgggtgtgacccgactgatgctgatcccaatgggtgtgaccttgatgatgctgaacccaatgggtgtaatctggccacagctgatcccaatgggtgtaccgtccgcattattgatgaagatgaggaagaggagaatgaagtctctctaattcggaagaacagtcggcgctacatagccagcggggaaagtagtggtgttccttctccagctttgtctgctctcgttggtctgcaataattgtctctggcaaattttgatcagactctcgaagatatggttccagaggatctgttgtcggagcaagcagatggtgggatgatggatatttgtgctgatgtgcctgatgctgggttggagttatcccgagcggcatcccccgtgcctcatcgaccttgaagcgcggtcttaagggtcaggaggctggtctggattgttc

SEQ ID NO: 105155 - DNA, 1099 bp, Zea Mays
gaaaggttaggtgtatttgaataggtaacccatcaaattatgcatatcatgaatgtaaacttagttatcatgtgttgaatagtgtcgaggaaatgatccccggtccctaggacccaccggccagtgagtgcaccgaggaaagaggtactgattgctggggttcgttagtcagtcggaagaggcaggtgtgctagccctggaaggacacaccctcgatcgaaccctgcgacaaacaagtcctaggtcgggcatggcggagcctgacaagggagaatgggcgtgtcgaaatggaaccactcaagtggatcccgcgcccagccctggactgaccctccataaatgactggtcgcattaaccacgcctagcaccgagccacaacatgggcgtcggtctgcttcccactcatcgatggacccctcagaccgcataacgctcatgacctacgtgccctccgactgcggtgcattaatggcccgcatacccctcgacctgtggcacacttatggtctaccagactaggcctgaatgcacagacctcccacagggcactacacgatgggctacgccgagcccctagctatgaaagccaagggttgtcatagcctgaatgatggcacctgggaccatcactgccccacatcatctaccacgataaatacacaacagctaggcagcccagagccccataagtacacttggtctcacctagggtaaaacaatggttttacccctgccttatggctcctttatagagaagccaccgctggccgaccccaattcccggcctataaaagggagaggttcacctcagggcaagggggagctcttggacacaactggacgccttcagacagagatgaacccacaaggacgaacatgaggagcgccgacgaggaccaggaggctgaagccccgccaagccaagacttcgctaggactccaccttgcagctcctaagctccagttccatcccgataagagatatgagagcctctcctcactctctcgactacttgtaatccctactacgagtttgatcatcgattgtgctggtagcgcaagacaccgatgactgaaagtagggacattctacctgag

SEQ ID NO: 105156 - DNA, 302 bp, Zea Mays
gcgtggacgtctgcgcgccaggggaggaagacggctcccggaccgttgatttgaacggaacggctccgattaaattgcgtgtaccggttcgatcagtttgcgtgacgaccgtccgatcgagatcggatgatggtcataactctgggattcatgaaaccgtgaccgcccgatcaagatccaatggccctgtgaaaccctagcgctgtgtgtgagaaatttgcaaggaagcccctcggtttagttaaaaccaacccgccatccactcgtactgtgctctatgtcttagaaaacttacaccgaga

SEQ ID NO: 105157 - DNA, 1011 bp, Zea Mays
gcaacatgtcctcactgacactctgctgccggaactctgatctctattcctctgttcttcctgcgaggttgctattaatcctggtatcaaagccatcggttctcggcttcacgttggattcagcatcctctcacgaccactacacccatcataaatcatgtggtgccatggcgctgaacatcaaacccagattgacaactcttaccgaatgtcgggtgcgctaaaccggatatctaggttttattcaaaacatttttttgaaccagaacgccttgaccggatgtctgattcgcaaaaccggatgtccaagaatattcaaaagctattttccctgaatccgagcacatggattgaatgtccaacctctgtggtgaaatagactctgacctttgtggccacctcaacaatgggacgcagtcatttctttgtggtttggcaaaacctcgggtgaaatcgtgtgtctcttgtgttcgacttgttcttattgttttatgctattattgtaatttttttgctcaagaggatggatgtgaaggtcgtgggatcaaatctcaagtcttgagcaagttctctctcaaaaccacacaagaagaagtgttcaaatcaaagtttagtgtgtttgagagagagggaggataatggcacatggtgctttcggcttgaggttggtgaagaagataaggccggagaaaggagtataaatactcgccctcttagattcaaccattggagagcagtcatgccaaaaactagacatccagtgggaaccagagttccgagaaaacggctaatgcagaactggacatccggtttgggaaatcgggcatccggtttgggaaatcagacatccggtccatgtgctcgagatcaggaaaaaatagcatttgaatatttctcgggcatccgggtttgcaaaccggactggacaacctgttaaggtatttgtgtttagaaaaaatattttgaataaaacctagatatctggtttatggcactagacatccagtaaga

SEQ ID NO: 105158 - DNA, 842 bp, Zea Mays
tttacagagtacattgtcgtcccgatagcctttgaaattcagctaggggtaaaacttcctgaggtgttctatattccaggagttcccaatttctgtgccgtccatctgagttagacgatatgatcctggccgagtgacttctgcgattatgaatggcccttcccataagggtgacaacttgtgccgtccctcccccgttagaattcggcggaggacgagatctcctactgagaaggatcgttgtcgcacggccttgtcgtgatagcgtctcagagtatgctggtaccgtgctgattgaattactgcgttcagccgttcttcttcgagtacatcgatgtcctccagtctagtagcttcggcttctgctatgctttcgaagaccaatctcggtgccccgaacttgagatcggcgggtaatactgcctctgacccatagaccatgaataaaggagtgtttccatgtagagctcggctaggttgagttcttaggctccagacgacatagggcagttcccttatccattttcctgcgaacttttcattcttttcgaagacccttttcctaagtgcctctagtatcatcccgttagctcgctcaacctgcccgttggccctcgggtgcgctaccgaagcatacttgatctgaatgcccttttgctcgcagaaatcgaagaattctgaacttgtgaagttggatcccaagtcaattatgatattgtttagtattccgaatctgaatattatgtcttgtatgaattccacggccttggctgaggttaaggaagcaatgggtttgaattctatccatttggtgaacttgtcgattgctaccagtacatgag

SEQ ID NO: 105159 - DNA, 674 bp, Zea Mays
gtggtggtggtcccgtggactagtagctcatttgtgcattcacagctttgagttgacactgctagttcgctttgctagtatcctagtagtgcacttgttcattggcagctttgaattgacactgctagtttgctgttgaatatgtgatactagaaaaacttgttcaatatgatcgtggaaggattttcatgccttgtagtagaataatctaatttcaggacacaaaacccttatgtcacaacaagtcaacaattgcgtgtagcaggggtacatatgcatcttatgatattgaataaatctgggagggaaccttgtgagggataagagcaaaacgagctccatccctgtatcaacttgaaaacgtgatcaagttcttgcagttggaagctacaaaggaatatacaacaaaagaaagaaaagacacacatagatcggcatcatggtcatttaatctctaccttgcaatctcctcaatggaactctctgcatgtccagtgtttgttttcttagcttatgaatcgttgtctcccagttgagttgaagtttgcattcattttctgcacaacaggagcacggttattttttatgtttgataactgaacattttctcttagtttgcttcaaaatgtgcgaatttgttctgtagagacccatgtgagcgaactgcaaagcgt

SEQ ID NO: 105160 - DNA, 626 bp, Zea Mays
catcaatacggcaccacatcaacacatattatccgagagatggagagaggatagggaacgtgggatgtgacacactcactgatagtttgaacgttggggacgaagacaggtagacagagaaggccatgacgcaactgagggtggcgctctggtgatggaagtggaggttgaagcgtcgaacaaccctcgcccgtcgtcgtggccgtccattcctcgctgtcatcactccctggccccgacgcctccctccctctccccaacatcccacctaagacagatgaggacaaaggagaggtgtaatgtccataaaattgcattaaatccatgatgcgaatccccctattttcaatggtaggctacaaacaactttataatgacatttgggcgaattgtactcgatcgactgaggctatctctagtagtttacccatctatactcatattcaaactttattaaacaaacattgcagttagtctacattgtaaacaatattttggatgattatgtgagggaactttttaataatgacacaattcaaattcctaacgcatatagtccacgaaccaaggttctcttagccctccgcctaaaccaggaatatattatgtgctcaaatggatatcgt

SEQ ID NO: 105161 - DNA, 379 bp, Zea Mays
agaaattcgatgagatggcagcgacatgcgatcaacgagacgacaacgtgagatatcggcacagtggaaaactgatctgttgttgaaacagacccccttattggcgtgccaaatatcggtgctaagtaccggcaatgcaccacgagatataccacgaggtgcttttgtgggcgtctggatcaacgcgtagcttcatggttcacgtagaacgcaacaaagaacacgatttatacaagttcgggcggccaaatcgcgtaaaaccctacgtcttgtgggtggcggttggtattgctttgatttatctaggttacaacgaggagcgcataggagattggatctaaggggggcgcggtctatatgatatctgagacgaaaggat

SEQ ID NO: 105162 - DNA, 750 bp, Zea Mays
ctttgatgagtttgttatgagattcattttattctgagattctcctactccaacttctttgatgagaagtagtggctggatcatgaggttggattaatttctttggaagggtttaattcctggtttattacctcgagttggcatagagtagagttcagtaccatagaagtgatctggaatgaattgattttgctgattttaatttttctattttacttgtgttttgatgatgaccatgggcttgtgtggcttcatgtatatctctcgtaaaatattttgtatctgtacttgaagtgatctggaacggattgattttgctgaattttaattttctattgtacttgagttttgatgatgaccatgagcccgtgtggctgcctgtatatccctcataaaattctttgtatttgtgcttgttgtatatataccgaagcagccggggctggctgctagttgaagcgagcaggcactttgcttgcgtacatgctttctttttactatgtttcgatgatgattaagcttgcgttttgatgatgacccatggcaccctgtggctccaaagggcagcaggacagggcagccccactggtctgtgtccacctggggaatttgcctggcaaggatttgcctccccggtgcgggctcccccagggttttcctagccgggctgccaaaggaggcctaacaagggctagaagtgtattaatagactcaggttgttgggtatggctcattacacatgggtataat

SEQ ID NO: 105163 - DNA, 287 bp, Zea Mays
gtggtccagagctgtgtagccgcttagcctggtcccgtaccctaagcctgcacctccaccactctacaacgggtgccctagtatttggagctgtgatcttgtaggtccggacatgaggcttggcttcccagactcaatcctgcaggtcctgttgcatgaatcaaaggatggctgataccagacgatgggtcctatgggtgtgctactaacacttcctagccgaagctgtgtataggtccaggtcccagtcgaggctacctcctgggggccgttgccaactctttctt

SEQ ID NO: 105164 - DNA, 552 bp, Zea Mays
aagcctttgaaatgtgaattctagctaaagcctcctactacggtgcaagaaatgatagctgttgatgccgacaatgtggaagaagtgatggaatgaaagccttctagtacggtctggcagatttagagttttctaggattagctagatattatcgacaatttattcaggattttcctaggatttctaaaccaatgactgcgctcttgaagaatggagtcaaatttgagtggagtcaaaaatgcgagaatgcctttcatgccttgaggcagcacttgacaaccgcacccgtgttagcacaacccgacaacaccaagtctttcgacgtatattgcgatgcttcacgtacagtacttggatgtgttctgatgcaagacaaccatgtcatcgcatacgcgtctagagcactcaggcctcatgagtagaattatcccacccatgacttggaactagcagttgtagtccacgctccaaagatctagaagcactacctgatgggaacctaatgtaacatctacactgaccacaaaagtctcaagtatatattcacctag

SEQ ID NO: 105165 - DNA, 404 bp, Zea Mays
aaaaaaggtctgaaatagaccaaacaacagcaggcctcctcatggggccagaaaatagcatacaataaagaaagaactcatcatgtgaaaggaacaaacaacacaccatcctagggagcagctgcagaagcagccagagaacataggcccttcgccccagctgcctcccaacgacttctctcctcgtctgcccaagcaaggatataggtgaggcaaggagacaatccatcgaagacacatttgttccgatgaatccaaatagtccaagcacccaggataataagggagctaaggccttttctggtgacacctgagaccacctctgaaacctcctcccaccaattcaagaaagaggtgaccgccggctagggagctagggagtgaagcccaaatttccggaaaag

SEQ ID NO: 105166 - DNA, 506 bp, Zea Mays
tggttgaggttctaaagacattcgagatatatcttcatcaacttacccccgaagctcttatcaaagtgggggttttgtatgggccatgaggagttagggactggaactggatgctaggtgcttctgcaacattcacaagctatcttaccaaacgaaggcgaccggaaaagaacaataccataacaacttcgactgttatagcttcgtgccccgctctgaggcaaattaccccgtgcctacattcggaagaaatggtcgggctcttcgatgaagcaatggttttacgtgaagaatgatctgaatcaaagggaggatgtgaggggcatcattcaacgtcccatatggtcacgtttcggcattaggaggccatcaaccgcaattgggaatgaagtgcaagcgtgcctaatggccttcaacaccatatgtacctacattggtaccagagatctagttcaagagcacatcgctttcaaagtatggcctcttacaaatgaatgagaaatgcc

SEQ ID NO: 105167 - DNA, 981 bp, Zea Mays
aaggcttggtagagacacttgttgacactggataaggtaattggtgactcttgccttgttgacaagcgtcacagacagactacttgactcactagaacatatgatctgattattattggctaattttcgaatgatctgcaatgatggatgacccagacgattgtgccatagagatggagaggacttgatggcgccaaatgccccctgccaagaactgtctgatggaaggggataaagaccatccttgcatctaccttgaagaagaaccttcctcgtgtccagatccttaatcaaaaaatgatttggaaagtattcaagtgaggcatgattatctgatgagaaacgatgaacagaaacaagacttttttgtgctgttgggacgtgcaagatattattgagatgcaagggtttagtaggggtatcaataacagcatgaccaacattgcagatgttaatacctgcaccacttgcagtgtgaatctgatatgtccccttgtacttctcatgagtggtcagtttgtccagctgagacgtgagatgatctgttgcagctgtatcggtataccaatttgtatcgacaccatagctgtgcattgctgctgctgcactcttggaatttgagttggaatagttgtcttcatcatatcggtaccagcacttgcgggcagaatgcccagttctgtcacaaacctgacaggttattgtgttcccatcagatctgtgccctcctggaccaccacgccctcctggcgcattgatgttgctgatgcgaccaggattaaaccgaccattgcgaccccggccatgcaggccagaaccaccacgaccatgacgagtagcaacattagccgatggctaggatcctccatacaacaaagccatcctgctctcaaaattgaggagttgcgagtacgcctccccaactgagacagaatccttctgtgcaacaagggcagagacaacagggttgtattcttcatc

SEQ ID NO: 105168 - DNA, 465 bp, Zea Mays
acgatggtgaattggccgcgggagaacgagaactcgggtatgaatcacccgagggggacctccaggacgtctggggattccgactccggggatgacagcgaccgtcgcaagaagttgtacgtcatgtacggcgggagctgggaacttacgtcccgcaggaacgtcaagtccctatgccgtgaggtcctgtcggcaactccaggggtcccaaaggctgccccacatcaatgatggaggagcaccaccatctccttcggggcacccgactaccccgacaacatcgcaggggccggcatactgccacttatcaccgcccctgtcatcgccaacatgtgactacaccatgtgttgattgacggcagggcaggcctcaacgtcatcagccatgctgcgttcaagcagctgcaaatcctagggtcccgtctaggaccctcacgcctattctccagagtgggcccacagccg

SEQ ID NO: 105169 - DNA, 742 bp, Zea Mays
tatactatttgcaattagtaatctgggacaatcataatcacatgacctttagcaactcaagttactgaacctcaaacaccagtgtcaccttggcatgagatagtagatttcgcctcggtccaaattgcaattcaaacaaaccatcagattcgtgcagaatttaaattttggaactactatactggtgctccttgaaatgaaatctagatagtacaacatagagattgcgcacctcttctgatatgggcttcaatgtctcactgaagtagcatcccggctagcgacatgcatgtgaaatataatttggaactaaaagagtactaagcaagtaagcatcattactcaagcaaaaaatatataagagcaagtgagattagtaaagtgcagcagatcaattaaagaaaaaaatctatgatcagttaactggatagtgtttgtatgcaagtgcacaacatatcaaggctccgtgtagtagtgccaaaactctttaaaatgcatttgtaagtcatttcatgatacaccaagaaacaattttcccaatccataaacaaatctgatagaactgattaaaaagatccacaaaaatgattccacaacatagctaagaaagtgtaacaggtaacccaaacaaaggtcatctgacaggcttgtgtcagttttaaggacacaattcattccaggtagataattgaagccaacatgcactctcaaacaattctttcagcggtaagctacctgtcag

SEQ ID NO: 105170 - DNA, 605 bp, Zea Mays
atccaccaacataaagacctttgattcgtaagtgaagagaacaatctcatccaaatcaagtccaagcccagcatcgaaatagcaaacataaaactgcaaatccaatcttacatagataccaaaacactaacgtgtccgtaactgcttagctgtggcatcaatgtctcagtggttgcttgcaggaacctgatcaatttgtcgccaaactatgcgcagttgtactatggattcagcagtaaaatcatatagagaagtttcaatagcttagcaaaacgaaccatccctttgtatgtgaaggaagtaagaacacatgacaatatcatgtaaagagtcagtgagtgttgtttacagccttgtcaggctctcgtaaaatatatggcgataaagtccaaatactacacacaacagcccacctagcgaatgtcaaggtcaattgactacaggttaagtcataatggccttacatcttttgtggtggtcacgccaacttaatccttttcaattttctttaactataaatagggccacagaagttttttgttctcctgaaatatttgcgttgctatgaatcaagaaaagttaccaattgcacacaagactgaaca

SEQ ID NO: 105171 - DNA, 848 bp, Zea Mays
ctccttgtgaccatatcatttaaaaaaaacatcggtgctcggcgaaaacaagaaatcgattgaaattcgttgaaattcaaatctatcgaccggtttgatttttcaaatctaagttattgagtgttatcagatggacagatggttgataatcggtttgtggttgagcaatctcataagatacaatttatctttggtacgctccaataacttagggacgagtttaggaagaagtcaaatatgttgcatacatcagggatccaccatgcttgacgacctacatgtgggttacaagtttcaacttcaaatgcggatagaacaagattagtactagttcgcacgcgggtccagcgcatgaatggaaagtgcagagatagagatgcactgcactcgcattggcccgatgactaacagcaaggtcgtgacggtaacgacaatatgtcactgctgcctggtacagtttgctcgttgcgtccgagagtgctacgttacgtacctttccatggagttggagatcgtcgtccgagacagcgagttggtagtaccaatggagcacgtacgacgacgaccccccggcgaatggcgagaagttgaccgagtcatgatggcctggacgacgggcaagaatccttctgcaagtcagctagcttagctcgccgtctttgtggataatacatggaaatgtttatgttccctgcattaacgtcgcagaatatcaagttgttgcagacttgaccactgcccctctgataaatgtaggagatcgatgggacgatctgcgctggagaaaaaaagcggcaattgaagtcaatgcgaggacgacagtcacgacaaaaggtagtaagtaacat

SEQ ID NO: 105172 - DNA, 482 bp, Zea Mays
aaagcttccagtgtcacatccctcgtcggtcttggcattggcaatggtccgcgccaaggctgaatcgaaactgtccgacgtggaaagggcatgccaaaggccacacgctccacctgacggccattagccccagaccgtaatggaacattatggattggctttgtctccgtattcacaatgacattaccggcaggaaattcgaattgttttgctggatgcccagccaaaacaccagattccttccgcgtagatgactgaatagcagaaacaaattgatttccttgttccaaaccatgtgactcagaatcaagatcttcatcaagatgagattcatggttagaacacagatcagataaaaccagaggggtgaactgagaagaactacttccagcatcccagccgagtttgcttagagatgacgtattcccccccaaatcgcagaaaagatcagggtcaaggagaacacttatcttgcatttcgc

SEQ ID NO: 105173 - DNA, 318 bp, Zea Mays
ggaatgaattgtactggtccagctaattcttcacatttgttatgcatatatgattgttgtgttacaatgcacgaacactcaaccaaggttaaccaaaccgttggagcctaaaacaccgccccctatagttagggatgaaaccatgacgaatacggccggatacagggtcatcccatatcctaccctaatgtatttctctcggatacgggaccggatacgattagttaagattcgtgatcggtgtcggtgtctactgtccgaccgcacaccccggggtaccctcgtggtgcctttgggtaggacagtgttgttgatcgt

SEQ ID NO: 105174 - DNA, 573 bp, Zea Mays
tcagcaaaagtagtggagtttatccaggagatactattcagattcggaataccaaatagcatcatcactgacctaggatccaacttcaccagctcagagttcttcgatttctatgagcaaaggagtatccagatcaagtacgcatcagtggcacacccaagagctaatggccaagtggagagagccaacaaaatgatactagatgcactcagaaaaaaggtattcgacaagagcgagaagcttgcagggaagtggatcagagagctaccatacgtagtctagagcctgcgaactcagcccagccgaacaccccgttcttcatggtgtatgggtcggaggcagtgttgcctgccgacctgatctttagggcgcctaggctgacctttgaaagcatagctgaggcagaagcaaccaggctagaagacattgatgtgctagaggaggaacgactgaacacggtaattcagtcggccaggtaccagcagaccctgaggcactaccatgacaaacatgtgcggcactgatcctttgcagtgggagacttggtcctccaccgagtactaacgggggagg

SEQ ID NO: 105175 - DNA, 336 bp, Zea Mays
cttgatccttgaggtgctgcctttttagacttgtgttccagtgcttggtgccttagaatcctgaagcttcttctgtctagtggcttcatcacatggaaagtgcctcttagtcgtcacaagaacacattgctgtcaacaaggaggaataaccctagaatggtgagtttggataggtgagaaatccttaaaataatagagctctaaatataaacacttaccgataagaggaggggcttgaagttcattcagtatgtgatggaacagatcagagtttgccgaagtgtctgatgccatattgttaagattaacctccaccaacaccaaatcaaggtctgt

SEQ ID NO: 105176 - DNA, 634 bp, Zea Mays
cttttttaagaaatcttcgagccagtgcaccactccagtcaaattctttgcattgtcgaagtggtgctcaaatatagaagccctgtatgccctagcggcacgatacatgcgctcagaacccaagaaatgcttgacataagtctgcattagatgctgaaagcattctcttttctcagcattggggaaatttcaacaactgctccagtcgatctttacaaagcatccgagcatattgctagtagtgggaggtctccaatagccttatgcaattgcttcatgaaccaaatccaactctctttcgtcttagactcaaagaaaccaaacgctactggaaacatccaattgtggccatcaacactggtagctgaaggcaagtgaccactccatctaccattaagtgcggtggagtcaatactcaaatatggactgcaaccgtcacgaaagccttgtagacatggtccaaaagcacaaaagtacctactaaaaaatagtttcccatcctctacagtgaggtcgaactcaatcactgagtctgacataatctccaacactgcttccctccatctaaacaacaatttgaaactgtcctcctaggttccatataattctttcagagccttttctttgcctttcc

SEQ ID NO: 105177 - DNA, 467 bp, Zea Mays
tgggatctcaactaggtcaacaactaaaactccaacgatgcatttcaacaagatgtcgagcaccaccactagaggccgcctatagcacgaatgcatcaccacagtcgagcaaaggtgggatgatagagccaaggtttaaaatagcggctatagtggcgcgctacagtccaactacaacgttttggaggatctaaagctatgatatttcactttcagacgttacgtcagctacaagtgctatagtctgatttagcgctgcacgcgaaatgtcgtagatttagcgctgaatagcgtaggctacttctagtttgcatggcgggccaaaaaagaacaaatggagagacccaattgagaagtatgttgctaatatcctagaagacaatggcaacgagtggaacgctggagttgcatcaactgaacaataaaagacactgaagctgttgaaggtgcaaacacgtcagcaacag

SEQ ID NO: 105178 - DNA, 531 bp, Zea Mays
atcgagatccacaatccttgcttctttaggatgaattttgctaaaaggcttcttttaggctatcacactctgattgcataacctaggactcagtgaggctacaaccttctctatctcaagtgtatgacttctttaagttgcctttgatggtgataactacattagggtctaacatcttgagtaccagataagtatagtgaggtattgccatgaacttggtaagtccatgtatttcaatgataacatgatgagctgcatcaatacccgcctccttgaaatgttaatactcattgcagaacttctctttgattccaaacatgataggcatggtgatctctcctagaggtgttgttgattttcctagtatggtcccatataatagagctagacttggcttcagaggtttcttagagagtctcattttcctaaaagtcttggcaaagataatgttgagaatgctgcttccatcaatgaggactcagtatagtcttgcatcattcactattggattcaggatgagtggataatgcc

SEQ ID NO: 105179 - DNA, 452 bp, Zea Mays
gccggagaggaggtgagtcaccggagcaaaactactgtggcgctcaccggggcaatgtctcaggcgacagatgggctatctactatgatctactgcgacgtggtaatgcctccaaatacatggcatccttgtggcaagcggcgaactccagcgatggtcatcttgatcggtcgcggggcaagtgggtatggtggccagctcacggtctcatccgtggtcaagatcttttcacccgccacggttatccacttcacacatgcacgaatcgcggcggccggcgtgaatctacgcgcggggatcaccgacggcgaggtgtgctgcatctgaagatcttttactactataccatcacgatcgttcatcagtgcgcctgacagagcaagttagagggctttgttctccaatttttatgtaacaacacactaatccgtctgtagaaaagttgctcttct

SEQ ID NO: 105180 - DNA, 414 bp, Zea Mays
atctaattcataacatggagagcgatgaatgtagaagaatcatatccaatttaagcaagaagaaatacaacataaatcattggatcgattttctttgacatgttggattacacatttccatagagaaacttattctctatatgtgagactatttagatcaattgggcaaaaacattagtctcactattctagttataaagagagattcccattataagtgtcctaaggatttgaattccttacatgacaccttattcttttaagagcttggaatatctctctatatctagaacaggacaataataggataattagtgtaaaacatgccatgaggtacttacaataatttaaagcatgtagattgacatagtatagaaatgatgaatatgcaatgtaccatatgagaggaatttc

SEQ ID NO: 105181 - DNA, 435 bp, Zea Mays
gtgtacggtgctgtattgaaatgcttgatgccgtgttcgtcacagtactccttgaactcgatggagttaaattccccgccacgatcactacggaacgcgcggagcttcagaccatgctcagtttcagctaatgccttcacccgcttgaaacacttgaacgcctcatccttcgttgtcagaagctcaacccacatgaaacgactgaaatcgtcaacaattaacatgaaatagctcttaccaccgggtgtctttggtctgatctggccatagagatctgcgtgaaccaggtcaagtcctttcttagctcgataattcgccacctaagggaatgagtgtccctaatgcttgcccaatgcacagccatcacatacttcttctggacgatttaacagtggtatcccatccaccattcccttctgtccaagctctctgagt

SEQ ID NO: 105182 - DNA, 863 bp, Zea Mays
gattttgagaaatctattgtgtccgaagacgacatgcccatgatgatgaaactgggctattttggataagctgaaagaaaacttgttcgattcgctggagaagaaactaccccagtgccgaagaaggatgaaattgtggttttcaagagcttcttcagagcggggttgcgatttcccctgaatgagatgataggggaagtcctaaaaaatttcaaaatataccttcatcagctgactcctaatgctatcgttaggctcagcgtcttcatctgggccctccgaagccaagggatgagcctagatgccgaagcattccgccgagtgcacgagctgcactatcagacaaaggtcagggcagatggtcttcacaaaaattttggttgttacaattttgcatatcgcaaggatacgaaggcaccagtcctcagctaccgtacaaagtggccaaccggctggaaaaatgaatggttttatattaaagctgatgagaaaaagagggagaagctgatgaccatggtcatgagcccgctgtctttaaacttcggaatgaccaggcccctatgcaacatgcaactgaggtcaccatgccagctggccgaagtagagtttagagtggtggccaagcaaactagtaccagggacctggtgcaggaatatctggccaaccagacgtatccaacgtcaagtggccggggaatgccgaagatgaaagaaacgaagcagaagcatgaacttgttcgactagcttatcgtttcaagtttaaaaaacaattcaaaaagtcgtacaaaaagtggctggacatgatcgagacaatgtgcaatgaaatacttggaaattataccaaaaaggaagaccaactcat

SEQ ID NO: 105183 - DNA, 349 bp, Zea Mays
gcttgagcaacaaataccggttttggtatgcaaacttgaaaaaaatatttcctccaggtttcttcaatccgatgcaacatctaatggttggtaataagagatgagttgaagggtgcatcgctgaagaatttaaatacaaagagatagcatcgttcacggacatgtactttgcagaggaacacaatgtcaatgcccctgcgttgcggtatcatgtcgacgagccccctattagtgatcttgaaatttttcaatggaggggcaaaactataggacccaacacagcatactgtttcaccaatgatgaatcgaagactactttactctacatgtataacaacatggaagagat

SEQ ID NO: 105184 - DNA, 562 bp, Zea Mays
ccgggtttgtgagctccggtgtgtgcgccgccgtgcggtgtcctgcacctcgtgtgccagcgtcgaaggaaggcgaaggtcctctaaccatcgattgaggagaggacgacgccgattagaatggggataccctttcggggtgtggaatcccgaccgttgggatgtaatccaagggccagtagcggatcgtggatcttaaaaccgtagtcgtagatcctcaatccgagggcggtcatcgtgtactggttgatgatacctagatctaatcgtggcccttgattcacgatcgggcggccagaaaccgtgcattccccttcgcgggtacattttataaaagagaccctggggtttcacctattcaacccgccgtcctgatacgcgtaaatgaattataaaacaggcccagaagtttgcgcagagcaccctaggcttagttaaaatagtgtccacagtccagaatccttgggaaactcagattttatttagaaaaaaggatttttagtgcaaaaataaatctaggaatttacttaattcatattaaattcattttagctccaaatta

SEQ ID NO: 105185 - DNA, 337 bp, Zea Mays
cgtcgaagagaagaagagaggagaagatttggccaccgtggatgcaaccctgcgcatgcgccactcgggcttcggtcgcatggtctgggcgacccgctggggtacatagatggcgtccgtggcacttgagcgaggagaagactctcggtggaggccgaattgctcaccggttcgtggacatcaccgtcgggccgcatctcaccatgggggcaggttctccactgctccaccgtcggtaaaatactcctagaattattctgggttgattccgctccgcgtttttgctacttcgattggggttcggtcgtcggggtgttggtttcgcgggcatcggtga

SEQ ID NO: 105186 - DNA, 362 bp, Zea Mays
gggaattccctccccccacggtcagggagacagccagatgttcgcactccgagctggactgaatcccccatggaccaggaagtggctgaggcaggggttttgttagcagaagttggcttgttgaaagaaaggggtctgactgcagaagctgtggtcgctgactttgttttcaagaacattcagccgctgaaagacagggcatatcccggcttattataccgaggcttggctgattcaacctaggtaaccaacagaagaattcctgctgtggacttggtgagccggctcgagatgatactcagaggcaaggtgtcgaacgtcggcgctcctgttgcatactcggcttggaatttgcctccttc

SEQ ID NO: 105187 - DNA, 375 bp, Zea Mays
attcaacccaatttagaccaaacaaacatgccctaattgattttggtgcttgatgaccatcacaaccttatgtactaactagtttgcctagtctttgattcacaggttcataagatcaatagttcagaaacagctcaaaaccaaccaaaaagacgtaaaactttgaataaatgaactatgtttggttctatactttggataagtcctaaacactcctaggtacatattttatacacttataggggttggaaaacttagattcacaaagtcacacttttggagctagtttaagtaaaaacgagaatatgagttagagagaatgaaacaaccaatctctccctccctctaaagttctcttatgataatctcttgttc

SEQ ID NO: 105188 - DNA, 443 bp, Zea Mays
gaggaagactccatcctaggcatgttaggacaatccacaatcctaatgccaacgatgaaagggccaacaatgctcagagtagtcaacacatctcacagtctttgagcatgcagcaaactttttatagaccaccagctccgagaggcagaggagggagaagcttcagtggaggaaggtacggtaatcagcccaggaaattgttctacctttctatggcgtggacaagggacacacaacgaggacgtgccaggttacgatccaaaagcaaaaggaaattgttgaagccgaggcacggcagaataagccaaagcaggtactgcatactgcttggtgctactctccatatatccctgaatacgtaggcaatcaacaacctacggtttctgctgcttcagcaagtcactctcaagcttcctgggctcaactaccaccacccccaccac

SEQ ID NO: 105189 - DNA, 480 bp, Zea Mays
cacatcaaatggcttgctgatgtcgggttgcgctaacactggcgcggtggtcaaatgttgcctcaatgcatgaaaggcatcttcgcacttctgaccccaaacaaacttgacttctttcttcagcaatttagttatgggcttcgcaatttgagagaaattcagaatgaatcttcggtaataaccagctaatcccagaaaacttcgaatctaatggatagtcgttggtggcttccagttcatcacctcttgcatcttatcaggatcaacagctatacatgcctgagagatagtgtgacccaagaattttatctcctttaaccaaaaatcacattttgacaatttggcataaagatggtgctctcgcagacgttgaagcactacatgcaaatgcccggtataatcttcttcgttcttcgagtacaccaagatatcatcgatgaaaaccactacgaacttgtccaattcaggcatgaaaacaga

SEQ ID NO: 105190 - DNA, 350 bp, Zea Mays
acatgtagactttcagacaccaagagatatggaagaaactgtaacatctagctatctatgaaaagttacaacaaacaaagacaccaaacagttgtgtcaagtcttcctttcaacactacaaggatcatatcttgaataattttcaactgcactacaaagtatacacaacatgaatgaaacaacgatgcatttacacatttaaataagtattgctttaaatatatataggtgcaacaaaatatatcgcggtagtggaaaagttcagttagaatttgtgaattctaaacaccaaaagcaaactggcatggacagttggcacctctttaggtagagtatccatcacatctttg

SEQ ID NO: 105191 - DNA, 544 bp, Zea Mays
aaaaaaagaaaataaaaaacaaaacgcacgcacactcgttcctagcccagcaagccaaaccacgttctctctcattctatattaccttatgacatatgggcccacgttgtcaggagctttcttcaccaaatcgtttcgtttgcagccaacgcactgctcgcttgtcctccacgccgctgggcaacataaccctcagatcgcctcctcgcatcccctaccctcacccgttcaattgcttcaagcactactgtgatgccgccccacgtctgttcttctcctctcgtcccactaaataggacgtttcttctcccctcattatctccattaacaagcagttttctccattaatgacgtttgaagtcttccttttctcaatccacatcaattcggcagcgattccctccatcctcgcctataaatcacgtccgccgagcccctttcactcggccctcatctgtgctctctctctcgcgcttgttgcttgctgcagcgtcgtgtcctactgtgccacttgccgttgccgagccacgccgtgccttgctgc

SEQ ID NO: 105192 - DNA, 785 bp, Zea Mays
tgaattcgtcgtttacgttccatttctcatccgcgggcttgctcttcccatcatccccctttttccgcgacctccttgatttctatgagttgaatctgacgcatttgaaccctaactcaattctacaagttgtcattttcgtacatttgtgcgaggcttttcttgggattctcccccacttcggactctagaagtatctttatcactgtcggcccgggatggctggggggccgcatcagcttgttggcggcgcaagtttagagcttcaccgtggaaggaaagtggagtacctcgatattcctctcaaggacagtattaaaggatggcgtcttgagtggttcatcgtggaaaaccactgcaaatctctccccctgggtcagggaacaaccagatgttcgcacacctagctgggtagaatctcctaccttttcagagataactgaggccaaagtattacttgctgagatctgcttgctgaagaatgggggtttcactgctgaagttgtggttgctgacttcgtcttcaaaaacattcaacccctgaaggacagaatttaccccgcttacttagatataggcgtcaatgattccacctgggttacaaataggaggattcccaatgaagatttgctgagccgattggacatgattctgaggggcagagtctcgaatgttggtcctcctgtagcctattatgcgtggaacctaccgccaaataggccattctttgaatttgtctccaaccctcctgctcgtgacagtagcccgggtcatagagtgcgacc

SEQ ID NO: 105193 - DNA, 870 bp, Zea Mays
aactaagctttgatttcatacaaagtttggagaaaaacaagctcaaagttgtgctgtcagtcaacctgaaacctgaattatgatattcagtgacataggatgaactttgggagccatttcgaagatgatccagtaggtgtttgagcatggttactatagcaagattgtagctggattatagggctacaactttgttacagagagattggcaaggtgccacatagaatttggagaaaatctgcccaaattatgctttgtcagttgttctgatgaacaatcccgatggtacagtgcacccaaatatctcagatacagagaatctcgccgccggtgacccttcgctgtgattgacgtcgatcgtcgcgattcgtgcgcagtgacttgcagataaccgtggacaaggaaagatctcaactcgggaaagggatagagacttatcgctggactgttcatcgtaacacttgccgcgcagtggacagaggtgtcctcgtcggagtttgccgtcagtcgtagtcgtgccacgtgcttagaagatctaccacatcgcagtagatatccgtaggaggtcagtttgtcgccggagacattacccaggggagcgccacgatagtttacgccggtgactcacctctcctctcggccgtcggtctcccctttcaaaattggacaccaccgcttagcgcccttataaattgatggcccggtctgttgcaccatgttatcacaaagccagagcacccattcccaccttcaattagccaccatagccggagaatttccttcttcccccaaattggtcgactgcgccgccgtgaatcgcctcatcgcggctagctgcccccaggtccgccctcgctctttttgtccgtg

SEQ ID NO: 105194 - DNA, 1653 bp, Zea Mays
gttctaaccactttttgcaaaaagtgcaagtggcaaaatagtagagttttgagagcttaatacttttcccatttggagatttccaagtattgtggtgaaaattggagaaaatagcaaaagttcacaagtgctcaagaattggaattctaagaaaaagtgacattgagcaaagtttgaactcttgtagcttttgatccatgagtgctttgcaataagtcaccataacaaagttgtagagctactaagttggttaagggacctagccctaaaatcgtgtggaacctagtgtaaaatgttcccaaagtcgggttgtcagtcaaggggtgatctgaaattggactgtcagtgatatttgaccaactttggaactaaattatgcttgatctagtgagcaaatgactaggatccttatgacaaagttgaagctggcatataggagaacaactttgccaaagggtggtaggtgtgtcactgcttggaacaggaaataaaattgacccaaacttgctctatcagactactttggaatgggattcagaatgtttagttaacgaaagaagatcataggtgtagtgcaccttgtggccgctgatcccatgccatgattcgcgcccatcggtaaagatcatgatgcgtttgagcgtggataaacgttagaggtgaaaatatttgtggaggggtggatttggtcactggccggctcgaccaccgtacccacttgcccgcgcgatcggccgagctatcgccgctggaggtctccattttcctttacacgccacgcaagtacatgcttaccacgtcgctgtgaaggtgtccgatggtaaaacacgtcccaaagccctccgtttacccgcgtgccacgacgaccgaccctagtgaaaaatctaagcaccatcgtgagcactcctatcccaaattcgcgaagcaagcgatcaatccttttaaattgagtgccctccctgctcttgttacgcacccagcgtaccacccctcactctagatcatcgaccatagcccgagaattccggatttcccaaaaatcagttggaacgccatcgtgaaacacctcgccatggccagtccttcttaggttagttcatgtccctctggtccatgttttagcatcctctagtgttagtgaagctcactgagctccccgattgaacgctactacaacagagcatcgagaacatcatgtcgccgcctcagagcaccatcgagaacgccctcacgtcgaacagccctcccgtgctcccttcgtccaaattcgctcacgtaccacacctttggtgagccaatgatactcaacttcaatttaaatgctaccacattatgttgcttgtaatgggctcgtcagaactctagcccgatcgtggctagggcagatgcaaattaagaccaggccagtcgaactaggttaggggatatgctcgggtagtctcagcaggcatggagtctggctgcttattacctcaagagggggtcgtcggcgatgagaacacgtgactccggccaggtgtttgaccggggcgccgtcagggacctaaagtcgtgaagaaatagaaataggtggacctatatgaagttgtcagtgacatagtggaacagtgccgcgggcgctttactagatgtttaaaacaccaggggcctttg

SEQ ID NO: 105195 - DNA, 488 bp, Zea Mays
ctctctcctctctctattgttgtgcttcgagttgtaactctgatttttgtatatggctgcaagggactccaatttgtggagattccttgtgaggggattataaataatataaggacgaccgtggcactcatgttggtcataggatctcttgagataggttgagatcaacccttgtttattgagacaccacaacatggagtaggcaagcatttgaggcttgatcaaatcacgagaaaaatcaacatgtctcttgtgcttgtttctttgtgattgctatgcctctatctaagttctatctttcacttgcaatattgctcttagttcattacatatcttgaaagagcaatcaagtgaaaagaacttctctcttcttctctcacttacttggtttggtttcaaactaactcttaatttagaccaagtttgtgtttgaacttgtgttttacatgcatcacatattgaccatcctctaggtgactctcagttac

SEQ ID NO: 105196 - DNA, 322 bp, Zea Mays
cagatgatgaaacaaggagggctgcaatgcaatgcggtttgcaacctaatctagggctagcgtggcgagaattcacacaaggcggctagcgagggcaaatcgagtaatgtggtgtctcgacttgtaatctgggtaaggtggatgggctagcggcggaaacaaataacagcgatggagcggttgaactacgattacgacacaacctaaaccagcaataagactcgaacacggacacaaattcaacaaagcaatctgaaacgaaattgcaaggctaaacatggttataggacaacggaatttttttgtatggcaattatctgaa

SEQ ID NO: 105197 - DNA, 336 bp, Zea Mays
tgatgaagttgtgtgccctcgcttgtataggtgtgcgaaggcgttgtatactttgtctagtatgttttgttatgctgtgctggtgtgattataattcggctgcgcccttaggcggcttctgcgcggatagtcttcggtcttttgcgcacttgttgtgctagtccggctgcacccttaggcgacttctgcgtggatagtcttctcgatagacttcggttttttcgcacttgttgtgctagtccggctgcacccttaggcgacttctgcgcggatagtcttctcgatagactttggttttttcgcacttgttgtgctagtccggctgcacccttaggc

SEQ ID NO: 105198 - DNA, 453 bp, Zea Mays
taacaattcgctttgcaaaggattgaatctcaaatgcaaggccaccatatgcatcccaccaacgaactaaaaaagagaagtttgagtgttgcccttgcaatgcctctcacgaaccacatcttcaggtgctttgcgaagcatggatgcaattgacttagaagacttcgacatgtgttgattgttttggcttgcttcagctgagagccttctcttttgggctgttccggaactgggctgaacaactgaatgggatgctctactttccccttctccaagtacttcaacttcatcatctttatcaccatccttatcaccatccttatcatcatccaagtcaataggcttatgtctagcattcttcttcaaataatcactcatctctttgctgattgccgatcttgtctttgggcacttagcaacatcaccatgaccaccaacaaggtgctgcttcaa

SEQ ID NO: 105199 - DNA, 964 bp, Zea Mays
gcccgtgtgtgcgcgcgctctcgctggcaatatttcacagaggcccctgatgacctaactaatacgctaagaaccctggccactatttattgtctcactgacatcatacacagaggtccctagaactctgtttcttctccaactaggtccctgaccatggtgcgttcaccgttcatcaccgacgcggcacggactggctctggccggcggcggatgctcaatcgagcgacagggggagcattaccaacccaaggcgacctaggaacgagctttactgtggcttgaacacttagaggacgtcctgcccatgtgcacggcggaaaccgtgatgttgatcccgtgttcccattcacttacgcctgaattggtcaaacagatgctacggtgagctttacgtgcctacagagctgctagaacaacactcgagaggggcagagctttaccagagtggtccggccacggagcgcagacacttgtgctcgctggtgacagagaaaaggggaaaatgacgtcgcgatggctctggatgaaattgggaggagagattggggctacacggccgtacggaactctagtttcaccgtgcacactcaatttgaagagaggtggagaaggcagtgcgaattttgggtttttctcaagcttgcggttgaggctgtgagagcctcgccgtggtccatgccgctatttaaagccacgacggaccgactagcgatcagcggccgcggatagcattgctagcgcatgttcaccacgtagaagagaggtatagtgagggaagagcagggtatggatgacaccgcggcggaggagaccgagccatggtgaccgccagtgagataactccggccacatgcggctgggttcgcggagtcgtgccacgtccaaggttatccttcccgcgatcaaatccacaccatttcatgcgagctcatccaattccacagtgcggtagatcttttcc

SEQ ID NO: 105200 - DNA, 456 bp, Zea Mays
attgatcaaagattatgaccttgagatccactaccaccctaggaaggccaacgtggtagcagatgcccttagccgaaaacccttcgggaagaaaggaaccaacttcttggaagattggaagaaagaatcagctcaactgaatgtatgtctgggagacaacgacagcctagaagtcaagccaatgctagaagacctcatatgcaaggctcaacacctggacactgagacagcaggtcttatggaaaaagttctcaaggaaccacttccggacttcaggacagatgaggaaggagtcctttggttcaagaaccgtctgtgtgtaccaaaaggagaggcacgagaagtcctgctcgacgaagctcacaactcagcctactccatccacccagggaccaccaagatgtacctagacctcaaaactagatactggtggagaggaaggaagaaagagatagc

SEQ ID NO: 105201 - DNA, 557 bp, Zea Mays
tggctggccaacccagtcatcgtccccaagacgaatgggaagcttcggatgtgcatcgactacaccagcctgaataaggcccgtcccaaggacccgtatccactgccacgtatagaccaaatcgtggattctacctccgggttcgacctattgtcattcttagatgcttactctggtttccatcaaatccagatgtctagggaagataggaagcataccgcttttgtaacagtggatgggctttactgctatgttgttatgccgtacggtctaaaaaacgccttgcctacatttgtgtgggcgatgagtaagactttcggggacctgattagggacaaagtagaaatctacgtcgatgacatcgtggtcaagactaagagagggtcgaccctagtggaagacttaaccctggtcttcgacaagctgcgggcaaccctcacaaagctgaacccggacaaatgcatttttggcattttcgctgggaagttgctgggattcctggtttcgtaccggggcattgaagcgaacccggagaagatcagagcgattgaggcaat

SEQ ID NO: 105202 - DNA, 565 bp, Zea Mays
cgccagacctagcgagtttgagcgagatttactctcaaatttcgtatgacaatataatcacttacctgtatcaaagctttggagctataccccaactgcaattcgactataggaactaaactcaatcgagcactagatcctttataatcttgatcccaaagtttggtcaataacactggcgaccacttctgcttttcagattcaaattcagttcttcaatacaagtctgacagagcaactttgggcaacaatttctttaatctctactactctataagacgttagtgtagacaatcacaaactttggtgcacggttctgcctttagagccgcccgctctctctcgcgcccccgctctctgctatccgccgccagccccacagattgcgctccatttcgccaccagagcatccacgccccgatctcctctctcggtcgccatcatggaaggttcacgtgttccatggaaatcgccgcccacaaatcgccgcgttttgcccaccagccgcgcccctaccgccccttccatccatggcagctgcgccctctctgctggatctctcgcc

SEQ ID NO: 105203 - DNA, 669 bp, Zea Mays
gagacttgaattattctaacactttatcatttgttagagttaacataatcaaaggagaactaacaagtagacttactaaatttctatccgtatcattttgtacgctagaatcaccacacacaattaacaaacacatccaccacaataatcggacccggtacatatacatgtatcgatgcgcccttcacacactaatttgcattttagcttagacatcatatgaacactactgtttttttacccgcggtcataaccatgcgcaattgggctacaacacgcaattcatcgtgaccatgaacttaaagtcatctaataagttgattaacctgagcaacaacctaggccgctatacaacatactcgtcggctagcctattattatcgaaatctgagacacaacatatgccacaacatttatataaacgtacatattcacatgtattttcacacatccactaaatcatatgacccgtaaaccactattctctaactcgaaaccatcatgtgcttacttcccaattcatgaacacataacgcgtattgaccctactcaagatatagaggaagcgatgactactttgacatgtcaccacctctctatataagccaaaacaatttctactatcgactaagagttctaagtattaatcacattattactttacacgcg

SEQ ID NO: 105204 - DNA, 707 bp, Zea Mays
tgattgggtaattttagttgatatgcaacttctcccactcgctttaagctcaagaaaggtccaatgaagcgaggggacaactttcctttaactttaaatctcctcataccccggattggtgacaccttcagatacacgtgatcaccctccttaaactccagtagtcttctccgagtatcagcatagctcttctgccttgattatgcaattctcaaatttttccttatcattcgaacttgttcttctgcctcttgtataagtttaggcccaaagaactgtatttctccaatttgatcccaatatagaggagtcctgcattttctgccatatagagcctcaaatggtgacatcttcaaactggcctggtagctattattataagagaactccgcatatggcaagctcttatcccaacttccaccatgtttaagagcacaagctcttaacatatcctccagcacctggttagtcctctcggtctgcccatcagtttggggagggaaggctgaactggaattcaactgtgtatccaagctctcatgcaacttcttccaaaaccgagaagtaaactctgatcctcggtcagacacgatcttcttaggcactccatgtagacaaactatctgagtcatatacaattctgctaacttggctcccgtgtaattagtcctcactggtatgaaatgagccacttttgccaatctgtc

SEQ ID NO: 105205 - DNA, 762 bp, Zea Mays
cgcgaacggtccacgctgccacagagaggaccctaggtcctcgcttctagcaggtgaggtccagggttcattaggtgattggctcgaaagagtgccaacacacctttttggtgactccgctacggacaagggtgtctaggtccattaaaatcggccctcaaatggctggttccaaggatcgcaccaaagtctccacaagcaacatcatgaggccggattttgaggatttgttggttgatgagcagtgataatttgaagatcacataaaaagatgtgggggaggcaaaggataagttcctatctcactttacagtggctcagcaccagaaggtaatgaggcaaggagaaatccaacttgactccctctggcctccaccccatgatggcaatgtaagtaattcaagttgtcggtaccccataactagggtatcctctcctactgtgttaaggcagatacccgtgccattacctctaaccgtgtattgaggaatagaccattcgggcccatgggtccagacccgtttaacaggaccactggcctcgggacccgctccccgctcgaggacacgttcgatgttgcctcatgtcctaggggtcaaaatgctcagggctactaccatgagtctggaccccagcctgtggtgctcggacctccccgtctaacattagaacccctagtaggtggggcctaagacttctcgccagcatgcgctcttggttctgctctccgcttgggaaggggtccggtgctgccatgtggct

SEQ ID NO: 105206 - DNA, 544 bp, Zea Mays
actgggtgtggaaggaactttgactaggctggtcgagacttgatggagcggatcatgctgacttgctgaagtttgaccccttggaagggaacccaaaagatcgaaccctctggtgcctgtcctgttgttgagctcggagaacttgaaattttctcttgagatgacctttttcctcttctcgtgctctttccacctggatggccttgttcgagaggtgcgagaaactgaggaagtcttggctggcaaggatggtcttaaccctttcaagaaacgggccatcttcttggcttccgtgctaacgtcatcaggtgcatagtgagcaagttctgtgaatttatggatgtattcactggtggatcgccctccttgagttaactcccgaaattcctcctccttgagctggacgattcccaagggcacatgatgctctcggaaagcaacctcaaactctgcctaggtagcatctcttactgcagcgctgaaggtgtcccaccaggatagagccatcccaaagagctggtgggcagctaggtgaacacgctgg

SEQ ID NO: 105207 - DNA, 552 bp, Zea Mays
caaaaaggaggcaaagagcccttttgcggagatgggccatggatcttctcagccatcggaacaaaaggagacaaaaaggaggcaaagagctcttttgcggagaaggagagagtggtgtgtaaagcaggaaggctgaagcagcatggtaacgatccaaagcatccatctcgggcgaatttatagggacgggcggagtcaccgaggtgcgagtcgcaacaaccaaacgatagtgtttcgaatccgacgcgccgcaaatggtatgctgaccggtcaggacatcctgtcacattgaatgaccgtgcccgctccaagaaaaaaacgcaccaagcgccatttcacattttgcctcaaaaggtatgccctcttccctctgcctctctttcctttttctttatcccctcaacggttaaccagaagaaggcgtcttctacctcgagcaactcaccttgggaaggaaaaaggcaaggcgaaatactgttcagaggttcgaaggttaggccttcgatagggttcgacaaaactgcctcaagacactagggcttcgagcccatt

SEQ ID NO: 105208 - DNA, 658 bp, Zea Mays
catggaaatcgaagaaaaatgcccctaaaatcggtttgtcaggcgaagcaatggagtcattaagggtgaatagtcaactgaagaagatcttcctcgccgccgatgtgtcaagcaccgtgatccgcgctcagcgtcgtgattcacgcaaggctaaggacggcatccgtgtggtgagaaaaaagatcagcaggagagtgaaaagatccgggggggttgaatcggggctttgccctgccgtgcccacttgcaggcgatgtggccgagcggcggtcattttggtggctgtcgacttcctcggttgcgccacgctagggagcaattcaccatgttagcgtaaccgtgtagatggcaagttaccccttcgtgagctattgtgccactacacgccacgaagcatagaccagtgaaagatctcaccgccgccgtgaacgttctcatcccaaattcacgaagcacatgagtgatcactataaattgagttccctccctgtttcgccttcttgttacgtgcccagtgcaccactcctcacctcaattcatccaccatagcccgagaatcccgagttttcccaaaatcggtcaccgacgccgccgcaacacacctcgccatggccagcccttctcatgttagatcatgtccctctgagccatgttttag

SEQ ID NO: 105209 - DNA, 276 bp, Zea Mays
tttttgtagaattttataatttttataaaccacagttgtagtttaaatctaccttaaaagcataaatggaaaaagaaaaggaagattggaagaggtacctagtgttactcataataacttcagtaaaaccccttttagtcttcaccaaatctttaagaaattgtctaagtccaaatccaccttgttaccactggtcaaccctgacctaaaccactaagtatgaattactaaggaccttgtataaagcaccaacactagtttactaagtgactagtg

SEQ ID NO: 105210 - DNA, 807 bp, Zea Mays
gagcacatcaagcggacagaagaatgatatggctgatacacatatatgggttttgttggccaaacatggaaaaagattgcaataaatacgcccgaggatgtccaaagatacagaccgagtaaaactgtaagcggaagaattacatgaaatcattaaaccttggccattatgaggttgggaaattgaaacaattggaaaaatatatcctccttccagcaccttttaacaatcttcttctgtgttgaagcgtaataggaagaagccaaaaccttctttcaagaatctccaaatcccccatccacataaccccttattttctctccaatggtagattcgaagaaattcgcatgctcatatcatgctctcatcccacgaacatccccaagaaaatagaactcaaagaggagccatatgcttcatatattgatggtttcttggagggatggatcctaatgcaagcaagccgaaactcttccacataattttcaaggcggcgcttggggccttccatatcgtgggtcaaacactgtatgtagatagagcccctatgctcctaatgtagagctggaactataacaaacagttactgtggaatccgcgatcacacatgagttacagttgttttttcggtgaagctagtactttacttgagtataccatactttgtgtgttggaaacaccattgtcacacgggtctaataagaatactgactggcaggtgagctaaaagccaacacctgagtcagtcagtcttccacttaagttgctggttgggtaggtcaaaccgcgagtacgagataactcaga

SEQ ID NO: 105211 - DNA, 469 bp, Zea Mays
gctgccaaagagtgtcgcggtacgagtccagtgacgcggacggttccacctttgagggcgaacagtctgcagcaacacagataatgtctaattcctctaaaggaagcacaatagaggaatttagagatctcgacaagttaggacaagggtttacatcggtcgatcctttggaggagattgacatagaagatggtaaaactccaaggccgacttttgtgaacaagacctaggaagccaatcctagagatgaaatgatcggtctattaaaagaatattcttattgctttgcttgaaattacactgagatgctcgaattaagccaagagatactagagcatcggctgcctattaaatccggtttcaggcctttcaagcagagaccaatatcatccagacttactcccacgaattaaggtcgaaattcactagttcttagaagctaaatttattagaccttgcagatactcag

SEQ ID NO: 105212 - DNA, 803 bp, Zea Mays
tccgttgccttgtccaagttgtgctccataaacaagattgtatcatctgcgtattgtagaatggaaagccctccatctaccaagtgcagtaccaaacctctacttgctcgttcacctttgctctattaatcaaagtggcaagcatatctgctaccaaattaaagattataggtgacaacgggtcatcctgtctcacccctctttgagtctggaaaaacggacccatttgatcattaactttaaccgccacatgacccccttccataaaagtcttaatccaactacaccatgtatctgagaatcctttcatacaaaggacttgctggacgaagctccacttcaccttatcgtacgctttctcaaagtcaattttgaaaatgaccccatctcttttcttggtgtgaagctcatgcaaggtttcatgtaggaccaccacaccctccattatatttcttcctggaagaaaagccgtctacgatgggttgattacattttgcgcaacgactgtgatcctcttagtcgccactcttgtgaaaattttgaagctaacatttaggagacatatcggtcgatattgttgaacagtaatcaccccattactcttaggaagcaagactatagtcgcaaagttaagactgtacaagggaaggttcccaacatggaacagatggaacaaagccataagatcatttttataacatcccaacagacttgataaaattccactgggaatccatcaggcccaggtgccttgttatgttccatactgaacaccgccgccttgacttcttcctctgaaaaag

SEQ ID NO: 105213 - DNA, 334 bp, Zea Mays
gtccaacgaacgctagcctggctgcaagggatgaggctccaaggtcatcctcaccctacagcggggtacccggtgctccttgaacaactgcaccatgtactgggaggcgtagcataaccggctccctgtagtacctcccacaaaatacggggaaaaccctctcgtgcaagcccgtatctgtgggaatgtgcattccccccttccgaggattcgtgacaagtcatctgtgtaagggcaagcgtaagcgaaaaagaattacaaaaataaaaggaaactagtgcttggctttcccagggttaagttgagatcttcgatgtagacttaaattcttatt

SEQ ID NO: 105214 - DNA, 502 bp, Zea Mays
agttgcaaagaggatgacattcgaagagcagtttactaaagaaccttaataaacaaacccacaacatacaagcaagccataaccttctcttcaccctggaggattccgaccggaatcttgggacgagattcctttaaggggaaggctgtaacaccccagtgttacttagggtttctcccagtaccccaacttgtgaccatcatcacatgtggctctaatgatgcaagaaacaccaaacttaaaggattaaaagcctaagcaaagtctctttcagctcaagaatcatacactaagcacatcatgcaccttaagagagaaaaacatccaaaaccctaacaccattcaaattggccatttgagcacaaaagggaaattgagaaaagccttgggaaaagtacaaatggaccaattaacaaagttatagtgcataaaataaactacaaagtgtagtaagaaagattggtcatctgaattttccaaaatccccaaaacagcccatgaa

SEQ ID NO: 105215 - DNA, 424 bp, Zea Mays
cttcatagtctaggtcgggaagcatcagggacacataaggatactgaaacgaaagagaagggggcatgagcggacctggagcatgctgaccacgatgagatcactttgcgcggtgctcgggaccgatttgggggaaatctcgaattagcgagctctagtggatgatttgaggcacgagttgctggattaggtgcttgactacctagcggagccgagggtgtgctcaatttatagtgtgcttgagtggtggccagtgaatttgatggagacgcgcggcggccgaagaggaggaggggcactggcgcaaacgattagtggctttcaccgtgtcagactcaccggcgacgagccagtgatatagagcggcttgcggcgaagtggtgaagcttcaaggcatgtggcatctgatcgacgggcgaccaac

SEQ ID NO: 105216 - DNA, 523 bp, Zea Mays
gggggatttccctactgcgagtacggggtataggcaacgaagggtggtgtcgaaacacagtgtgggtgaattttcgtgaagtggtaggcgtcgtcgtatggggatggagcatggccgtcttcgagtagaccggattggtaagcgagaattgttatccacgcctattggggcgagcataggtgaaggtgatttgcgaaatcttttcgagggtgaggaattgaggataatgttgttcaattacagggagatgggtatcatcccgaaggttgagccgatgtaatatatgatgccctcgccgagtgtatgtaactgtaatttgtatgatgtggcctgttggttgtattcgtatgcttgtgctgatccggctgcacccgtgggtcacttttgcgcggagtgtcttcttaatgagagacttcgattaacacacttgttgcactattccggctgcacccttaggcgacttttgcgcggagtgtcttttaagtaaaagacttcgattcacgcacttgttgtgctattccgg

SEQ ID NO: 105217 - DNA, 386 bp, Zea Mays
gaattgagaggggggaagggaggttttaagttaggatcacaagggtaaaggcaatagcaaacaaaacacattaaaagatggagttgaaagttcgcatgcagcaaagaataggacacatccaaaggaaaatgggtaagatacaactttcaaattgagatggaagagagaagattttagagggcagatataagataagcaacagggtgggatgtagagatgacaaaggtaaagatgatatccataaaagcatgacaaaggatagaattaaggtaagactcatgaaatggcgaagtagaggaaacaattaagggtaagataggtaaggttccaaccgaatggttgaagtaaaaattcattaccgagggaagttataacgaaacaacgag

SEQ ID NO: 105218 - DNA, 913 bp, Zea Mays
actggatatgcgtgtccttcctctgcccgctcgactactaacgtggtgctcaccacgtgagtcgtgcaggagatctacaacagcagatcttctgccggttggtttgtcgtggctcggcgtggcggctttagcactggcggtgtggtcaagaacttctttagtgcatcgagagcttcctgagcctctgaggtccactggaacttttccaccttcttgagcaatttgtagaatggtaggcctttctctccgaaccttgatatgaacctacttaaagctgccatgcatccagtaagcctctgcactttcttttgtgatcgtggtgcttccatcctcatgatagcttcgattttttctgggttagcttcaattactcggtggctgacaatgaatccgagcaatttcccagctggcactccaaagacacatttttctggattgagcttccaccagtaccgccttaggctattgaagaccagctgtagatcctcgatgaagttttctgagttttctgttttaaccaccacatcatcgacataagcccctaccttcttgccccagtgatcggctaagcatgtttgaatagctctctggtaagtcgctccagcattcttgaggccaaacgacatggaggtatagcagaaggctccaaacagggtaatgaatgtagctttttcctcgtcttcttttgccaggctgatttgatggtatccagagtagtagtccagaaatgacaacatagagcatccggtggttgaatctaccacctgatctattctagaaagtcctaagggatccttcggacagtgtttgttgagatttgtatagtcgacgcacatgcaccaatccactttattcttttcgagtacaagaacaggatttgctaaccactcaggatgcagtacttctctaatga

SEQ ID NO: 105219 - DNA, 325 bp, Zea Mays
gtggacggggttggccgtcatgtagacggcgctgacattgtcgcagaagacaactgtggcagaaggcagctggatgtgtagctcctggagtaactgtcgaagccagcagcactcagccacaacgtgagccacagcccgatactcagcctcggcgctagagcgggacaccatggtctggcgcttggaggaccatgaaactagattgtcgccgagatagacacagaagccagaggtggatcgtcgagagtctgggcagcctgcccagtcggcgtcagagtagacagtcagcttggtgacagacccggtgccaatgtgaagacccgag

SEQ ID NO: 105220 - DNA, 646 bp, Zea Mays
ggtggatagagtaagctgagttgtgggcttcatcaagcagggtctcccgtgcctttccaataggcacgcacagacggttcttgaaccagaggactccttgctcgtctgttcttaggtccagaagttgctctttgtgtgctctttccttaagcttggttgtttctgcgtcgaggcattgggccttgtatatgagatcttctaggtttggcttgacttccaggccaccgtcgtctcccagacatgcatttagctgagctgattctttcttccaatcttctaggacgtttgttcctctaatcccgaaaggtttccggctgagggcgtctgctaccacgttggcctttccggggtggtagtggatttcgaggtcgtaatctttgatcaattcgagccaccttcgttgatggaggttgaggtccggttgcgtgaagatgtactttagactcttgtgatcagtgaagatgtggcatttgtttccaatcagataatgcctccatatttttagagcgtgcactatggctgccaattccagatcgtgggtaggatagttctgttcgtgcggcttgagtaatcgggatgcataagcaatgactttctcattttgcattaagacacaccctaagccttgcttggaagcatcacaaaa

SEQ ID NO: 105221 - DNA, 350 bp, Zea Mays
gtaatcataatttatatggttgcataaacaaatctcacacgagatcaaagggactgaggttagataatcattgcatgatccaagaacagacaactacaaagaatctcaatgtgcatgagaacagatatgtccatgtagagaataaaacccttgttttgttttatcattaacacacgagatcacaattagataatcattaacacacgagataacaaatctcacacgagatcaaagggactgaagccattaattgaacttgttcacaattagcacgcaagactctaatgcagtagaagcagaagcaaacataagaccaccaaaaaatcaaagggagtagacagaaaacaaag

SEQ ID NO: 105222 - DNA, 544 bp, Zea Mays
ttatgatgatggaaattggtgcttgtgtagcgtcaccattggagcaaatggaatggaatgtgcaagacaaaaatatgacttgtagtgtattttatttcacaagtcaacggttgtgtataaaagtgtgtgcatgaccaagtttaggatagatggttgaactactaagagggacaaacttgtttgtatatcagtcatttagtgccacttaaatgatttaactttgcttatgttgctacgatcaagtggtgattgtaagatgagaggaaaaaactttaaaaatggtttaaaatgatcactaaggtttaaaggtgttgatcattctatggaagattatttagagttggcatacttcggaaaagggttttttatatgctcctaaccgagggttggatccttgtattaaaattttgggttgatccattgtgttaactctgttggatgtgtgggtagcaccccaaaattgttgtactaggatcgctggaaattcagcagtggaaagtgtatgcgagaagtttgaccgcttttgaccgagcgttgggccgtg

SEQ ID NO: 105223 - DNA, 292 bp, Zea Mays
acgaaacgttacaagcatgagcctttccataatatatgtggaagtcatggctcttcagtccattcatcttcattgtcttcaaattcatagatcttctaaaaccagtagcataaccatcggggaatttcaaatccttcatccacttcatcacttctttccgttgcttaggtttcagacaatagtcagcttttggtttgcctctgttttctctaagcacttgggttgatcgatcacatatcacggctaagtccatgcatgccttgtcattgtcttttgttttatcagggaaatc

SEQ ID NO: 105224 - DNA, 2047 bp, Zea Mays
gtccattgctgcaatgtgagatggggttatgggcatcgtgaagatgtcatcgtagaatttcttggccgcaagtgagctcaatgagtgcatacctattaggcccatccttcgcatgagcaggacctcattgtgttttgaggccgagacgtgcgccagctcttgcgccactagacgcctaatgtggctcgacatgcttggttgcagggcaccctctgcttggatggttgacttgtagcggtgtcctcatcttcttctgaacttcttgtcggacaagcgtcaggcggcttcctttggagcaaggttcacttagagttgtctcaacaccctcagctatgcaggcatcatgccctcgccctcggtgtcgtcttctggttgtgtgacgtggtcgaagtgatagttcttgtcatggccctcattccctcgtgttctagcagtgatagaaggttctgcaggagtagttgcccataccaactccgcccagggagtataggatctaggaccatctgtcttacaactctgacaactctgtagaagaaacaggttgagtaccagatccaggcccatcaaatcataatttgaaccgcccactaggcaaggcgaccgagggaggagaacgtggggtggcactgttgtcaggagcgttgctagccgatgggaggccatcatcgccggcttcattcgcggtaccatgtacgatattagaattggcgtaattggatggatgtattgcattgagcctcatgggctaattatatagggtacataggactaacaccccacatgggtagacaatatggtactatttctatttactctaactttcgcctcgtggtcttggtgcggtggtgagaactgtttcactgagttactgggttgctggttcgaacaagcttctttgtatttgcgggagaaagcttgcattggtttatcctttcccttgatcccgctcatgtgggagcctccagcactcttttattcgcttcgtggtctgagtctaggcaatcagagtcatcttggaccacctcattgccttggaccggcctagagaccccacagggaagaagggggggggggggtgagtggcaagagggggaggaaggcactttacctaaagcagcagttgcgcaggagcctttggtgtccgccagtgcccagtggtgaagctagagcaaaattgaggagggtgcaattgccttatgggtgcatataaggtgaaaataagataattataactagttttgtgttttagggggttgcagatgcaccccttaaagtgaatatagcttggcccctgccagtgccgtagtggcggccagcgggctggggttcatgttggcgtgggggtggagggagcaaggttgggagggagtcatcctcaaggacggagacccattaggtctccttttaaccaaagtttgctacctacttttattgaaagcatatgatttgttttacaaccaaactgctgggggcaccagtttgcagcgaagcaacagagcacataaacaaaataaaactggggctagaaaatgtagacagggagccaactagtaatcatattctaaatagatagaaggggccatatattaattgccaattaatttagctcgggaaaagtatatgtacactagagtttagatgaagtatgcgggaagcatgaatcctgaggtccagagtgttttccaggacatcatggagcaaaggaaaggtctaatttagggctggtgccgtagcacaatggcaattaggacagcagtaaattattaggcaaggctgttttactttcacaaaaacccgagacatggatccggcattgtccgttttctacctttaatacaatgatgtgcagggggctatgtccccctctcccgtcttcggcactgagcacagctatgtgatcacaacacgtactgagagttcaaaggaatgtgaggattttttataaaaagcaacacagctaccagcaggtgctaggctcaattaaggtggaggcctcgacctggatgttggcagaggctaaacatttagctagtctgctggcccgtcc

SEQ ID NO: 105225 - DNA, 366 bp, Zea Mays
gctgttgatagcagtgaagcagatccacttgagattatcaaggttgtgtccgagttcccagatgtgtttccaaaggacctaccaggtatgccaccagagcgaaaagttgagtttgccatagagcttcttcctggaactgcccccatctttaagagagcttacagaatatctagaccagagttggttgagcttaagaagcaaatcgatgagctgtcagagaaaggttatattcggccaagcacctcgccttgggccacccctgtcctattcgtggagaagaaagatggcaccaaaaggatgtgtatcgattaccgagctctgaacgaggtcaccatcaagaacaagtaccccttgcctagaatagaa

SEQ ID NO: 105226 - DNA, 502 bp, Zea Mays
cggaggtgtcaaggaacgttggtttcctatcatttgtagagactacgcacgagaagtatcacacataccatgtgtcagatgaagtcgatgtttattacaacttgggtgtgtcgggtcaagtaaaggtattcgtttggcctcaaggttcacaggactgggtactcgcccatgccgaacctagatctccatgcgatgtgtatgcagcctgtggcccttacacagtctgcgatgatggcgctctgcctcactgcacttgcatgaaggggttcactgtaacgtccgttgaagactgggagctagatgatcgaagcagtgggtgctcaaggaacaccgcactagattgcaatttgtcaggtgaaagttcagtcagatccatggataagttcttgtctgttccatgtgttagcttcggacaaagtgaacacaaaacagatggcgctaaaagcagtggtgagtgtgctcaagtctgcttgcgcaattgctcctgcactgcatattcctt

SEQ ID NO: 105227 - DNA, 681 bp, Zea Mays
gaaagaagcaccagttgccaccccaagtgggaagggacacgtccaaggaataacgacccacgaggggatagttgtcgcagttgattgggaggcggaagaacggacatcgcccgaccacaaaaaagaaagggaagtccctgaagggagacactcccctcgggggctcgacggctagtatcgaggataagctccccagtccctaggacctattggtcagcgagcatgctggggaaaagcctctggtagctagggctcgttgatgagttggaatataggggaaatgtctaccctagaagcaccaacccccgaacgaaccccgcggcaccgagcgaaccaaagggaaaccactcgagtggatcccttgcttggcccgagattgacccgtcataagtgatcggcctcattaactacgtctggcgtcgagccacaatagaggcaccaatccacctcccactcctagcctacgagcccctcgggctacaacgcactcataggctactcaccccttagactatggcacatttatggcctcctcgccccccgacccatggcacactcatgacctatcgggactagtgctgagtacgcagaccacttgtagggcacaataagacaaactgcactgagccctaggctacggaggctaggggttagcatagctcgaataatgtcgcatcgtca

SEQ ID NO: 105228 - DNA, 829 bp, Zea Mays
agaggtaggaggatttgacaaaaggagatgatagatgaatcactattgtaggtgggagaagggggcaccattgtttgcaatgggtttgtgccacttgggggagcttctgtgcatactaatactacttgagtgtggcgaatgacttgaactggaagcatcataccaaagcccaaggcaaggttgcataatgcagagttggctgacacaacatacacttgatccctaatagaggagcaaattttccacaagtagtttgaaacaaaagattctaccgaaactagggggcatgtgttggcacctaatcctaattaggctcgtgttacccttttctggtcgaatgactccaaagaaagccactaagccttggtgcaaagtagacgcgtagtatagaaattggtcttttacagtaaataggtaatcgattagatggatagtgtaagttgggatatgcttaccacttcaaggccacatggctatatattgtaacaaatacgatcataataatcagaaagccattcattcactaagcagtgtgtgcttctcatcctcttggcatatcgccaccccttcccctaaggcttttgcatggtaagcgacatgcagccctaatgcgctctcttaccgcgtggtagggcggcaaggtgtcacttccttactctagtagatcttgtactaagcattgttgttggtaagatctactatcatgtgtagttttaatctatgtttacctttaagcttcatcctatttgattgattttacaccgtgacatgtgtattccttgataggttgctacacccccatgacatgcaagctgcacatgtgcatgag

SEQ ID NO: 105229 - DNA, 574 bp, Zea Mays
taaaaccttctccctgtcagtgcattgtgcaataatcagcatcttctcaattgctttcagccaatcatccgcatcaagtggatctggtgagcttgcaaatgtgggtggcttatggctcatgaactccctatgcttgtctcggggtggaactggtggtggtggaggtggaggcagtggtacttgttgctgttgttgttgcagctgctgttgttgcgccctcctttcctggcgcatttcatctcgctcctggcgtaactcctgtcgtatatcttctctttcctgccgcatctcctggcgttcttgctgcatctgagcacgcatatcagccattgtgtctgccatctgctgcatcaccgccatctgagcagcaaccaatgggtcaactccgcctggtggaggattgggaggattcatccctgcaggttgtggctgaggttgtcttcgagtgtgttggttaggaggcaagtcaattccaccaccctgcctggtattgaccatctgagttagatacatatggtaagaagataatagacaaggcaggtatttacaaatcaggttacttggagaattttat

SEQ ID NO: 105230 - DNA, 439 bp, Zea Mays
tgatgattcgtttggctctgtgtctaagtgttttgagtctgatgattctgggagttcgattgcgtggacggaggagtcttcagatgaggacttggattattttgcagtgttagatgtggctgcagcggagccttcgccgcgcgtggagggttctgaggggctcccgggtgcgagtactgggtataggcggcggagggcggtggcgaaacggagagtgagtgaattgtcgcgaagtggtaggtgtcatcgtagtgagatggagagtggtcgtcttcgcgtggacgggactggtaaacgagaattgttgtcctcgccgattggagcgagtgtaggtgaaggggagctgcgaaatctttttgagggtgaggaattgaggataatgctgttcaactacagtgagatgggtatcatcccgaaggttgagccaatgtaatatatg

SEQ ID NO: 105231 - DNA, 645 bp, Zea Mays
gttgatccagtcataatgcattgggctatgttgtttcaaccagtcataccctaatatcacatcataagcctccaatgccaacaccctcatggcagttctatagacatgcccccagccttccacttcacctctctgacatttttttcacacaccatgatctccccattagctaccttcaccttcacaggagggcagtcttctgtgctcaaccccagtttagtcaccattctctgactaataaaagtagtggagctaccggagtcaatcaacataaacagcacctgatcttggatcagagattgcatcctcatacaaccatcacactctgtcccctttatggcattccaggacagctgatgtaatccttccactatatgctcctcctcctgttctagctttagcaacacttcatcagttagaattgtgctcatatcctccactgtcaactgatgtatttgagtcactactctcttgggacatttggcttgatgcccaggttcaaatttgtctccacatatgtaacatagcccattggcccttctataatctcttaactgtctttccttactcaattcaggattcaggatcccacttctactccccattgcctaagtcttgatccccataaccccctatgacttctca

SEQ ID NO: 105232 - DNA, 505 bp, Zea Mays
cgcaaacaaaaggagccgactagaattatttttgaatcagcatggatggcaggttagttttaccataccccgggggctcttatgcgaagttgccacgccgaaggggtatgcatgcgctccagccgtccgatcatggaccaaaggctcagattagatcgggactccactgaacggttatgcaaccaccactgatggataaagatccaacgacacagatttcattctgccctaactaaccacaaccacccgatcgagatccaacagtcgcgggcgaaacattacctagatctaattcgacgcgttcatcggaagatcaacgaccaccgccatcccacatccgatcggtacgccgatcccatccagatcgctcatcatgagatcgacggctaccaatacctctccctcctcactgtgacccgagctcgacggagctacagccccccatggcggcgcactacgcagtccggcaggagatttcaccgacgtaggccccaccaattccccg

SEQ ID NO: 105233 - DNA, 405 bp, Zea Mays
cccgtcctttgagttgacttctcttgcaggtgagggagcccttgcgtgtttggactatttgagttttgctttcctatcatctatcagccctcaactacaaactactatcaagtctaacgtctcaaaccctcccattctcttcttatgcgcacctgccgccagcctcatcaagttcggattttagcaggatgagacttgaaggtttgttgctttctccttcagttattcttcagtttgattgacaaaatgtccacctagggcttttctcaatctcaaatgctgcggaggcagggaaatttgttggcttctgttgtgttttttggatgtaaaattagagaatatatttggagtgatttgttgattagtgttgattaggattagttatatgctcaaaatgctgcttgc

SEQ ID NO: 105234 - DNA, 877 bp, Zea Mays
atttgatcaagcatgttttggcatgttttattactagcgcgttgggttcttaatggtttaaacccactcatgttgcatagacgaagaatttaaagtatacggctcttcttaccggtcattcttatcttgcaacaatgtctctatgagcaatcttttcttgagcctagttttatccagcgtagtgtctatttccttgagaatagtgtctatttcccctaaggtatgccctaggggtgattgttgaagatttattgtgaatgaggagagagcagcaacaacgaacaatgatgctcatatggaaggggtagcaatcgtcgtacgaataaagctgcaacaccggtaatttggcgaatctttaaagcaatcactctgtttgtgatgtttctgaacaacagtctgatggcgctctctggccgcctagcaacagtactctagtctgttactgggcgtcttttgcagtagcctggcggtgcttttgatggcaatagcagtagcctggcgacatttttctcatcctttttttgaactcttacatatatatttattctatctaccttagcatgttgtaggtaaacatacaaggaatacgtttggagttccagcctcaataggttaccattatttatttgggttgctattttatatgtaatgcaactaataatatggcgtatttaagagtattgaatatatataagaaacatggaaggagatgataaaatctgatttttgccaactagagcatatcttctaattttattgatgtagaattagactatacgtatatacgagatgtcatggcttaccattaattagcaaacgaagaaagacatcacaataataaattagaaacagattactctttccgtattgatcattc

SEQ ID NO: 105235 - DNA, 1010 bp, Zea Mays
agtagacttacaaattttatccgtgtcattatgagcactagaagtaccatatttaattaacaacgcattctccccgataatcgatatcgaagtgatgttgacaccataatttgcgttttaacttagacctcacatgagcactaatacttttcatccgcgaccacaaccatacgtatttagactacaacaagcaaatcatcgtgaccacgagcttaactaaagtcatctaacaagttggttaaccagtataacgcttagcaaattattttagatttcgcaactcaaaaacataggtgggagcaggttaattagtttttcttaaccattttgtcaacttaaactggacaacgcaccagtcacttaaaacaccatattttaggagacctcacatgtcgagcatcaatttataacataagtgactcaacctctatcacgcttgacaactaccacatcacctgatttatctatttggaacatcgcctgtctagcgtactactagtaccccgcattttgactcgacttaaaaacacttcggcatgtcaccacctcactacacaagccaaaattattattatttaaccacacgcctagataagcatgatttcaatttcaacttgcccatattttaaatctcggcataagcttggctattggctaacaaagtgaccattttctaattaccaacatacaccacctttcaccatttgtggacactcgcacgacacatggctattgtaatacatcacaagtacaaatatcttcctttgttgcgactataaccatattacggcatatactcgcacacctcaatcaattatcttacgccaccaccactataatacaccacggaacacacacacatatgtgtccccatattacgcacaagacatcaacaacatagtgactacgacaggactaatcataccctgattttgcatcgactatcaccatcaccgatcatatgcctaaaaccaatacacttctcacataaacatctatcgatgtattcc

SEQ ID NO: 105236 - DNA, 419 bp, Zea Mays
cagaaaatgacagagctcaggtgcgcaataaaactataggtagggaactggagcatcttgttatgcatgtctcatccatgtacaaggcaggtgtatttataggtaaccgggtgggtaggtggtaccaagtaccattatgtcgtcggttacctgctacattcctagaatattccccacaacagggtcattacaacatagtaaaatacactaccccaaacacacccaaaagtctaccccctcccaagggcttactagtggggccaggccctagctaagtggagtcgggtcccaaagatgatgtttgaagcctttgctcttgtaccgaaccattcgccacttggagatcgccaagggtgccatcgctaggatctcagctctgtctgttgtgtagttatcgagtcatcgcctgccactgaatt

SEQ ID NO: 105237 - DNA, 376 bp, Zea Mays
ctttctcacactgaagcatttttgatgtcgagatgcactagttatcattgaatctagaaatatgcgtcagtggagctgttacgtatgcatgttgcttgccgattataagcactgtaccaccccttgcacaaggttcccgagcgcgacgacagtgccccattttgatcccacttgatagatccgatccatcatggttagtctttggtatgtcaaagatctattcaacatccatacgacaatgccttgcatggttggtggatgttttggtgacgtgtcgtgcaggtggcatcagtttggagtggggattgtttccggagtcggctcatgtcggcttttaggcctctgttctagatggcgtttgggtgcctgccacgat

SEQ ID NO: 105238 - DNA, 632 bp, Zea Mays
gggatgtaaatatgccctagaaattcgtttgaggtatgcacagcattagagcaggggcaatagccctgtgcaaggttttggttaccaatcaggtagatagtagatatgactgcttcggttccaactacagccagaagagttcctatgatggaggttgtccagtatatggcttatgcagttagagtatcttaagtttggtgaagtttagtgcgcaacgcattagcataccgtacatctgtaagatagacctatgccagtttgtgcatagtgtgcttgttctggtaatataggtaaaagaaaagtcgttaaaacaaactatggcaactaaaggagacatttagtgtctaggacagatttcatggtttgtgatgtctagcaatcgaaccactctgtgcaggtacaagatatccctcaccgctgaagacgacactgacaccaccgaatttatcttctttggacgaatggcgcaacgcctcattaaaaaaaatgtggacaccctcatctcgactaatccacccgatttcattccaaaagagattacaaatctactggaaaagtctttcgagtggaatgttagcttcaccgaaagcacaattatttatggcaatgtttccttccaagtgaatgctata

SEQ ID NO: 105239 - DNA, 519 bp, Zea Mays
gtagaaggtgggatgcgcctgggccgttgatgtgcggttgggtggtcctgattagtttaaagataactcttctgatgaacgaacctagggcgttgattagtagatggtcggttagatttgatcacgacgtgaatcactgctgttcgttgatctctgatcgagtgggtgatatcggatcaggcttaagtaaataggggtcgtagatctcgtatcctgcggtcataaatcgataccggtttgggtcgtggtggatctaatcgggaccctagattccagatcaaacgaccacagtgtcaccgtaccccttcggaccgacccctttgctaaaccacccctgtgattacagggaaccaacccgcagtccaccctgtacagtgcactgagtcataggaattcttgcacgctagcccctgtgcttctggttaattggtgtgcggtccagacagatctaaaatctatagaatttatttagaaaatgagtttttattaggaaaacgattcctagaatttgtataattc

SEQ ID NO: 105240 - DNA, 417 bp, Zea Mays
cctcctaccatcgccggcgactctccagagccggccatctccacctccaaatggttatgcaggctttgtggtgttttttccgatgaaaggaaatcacggatactatacaagtaaccgcatccacgtttccagggtatttccattattttccgaaaccgtcccgatattctagcgatgtacatataaaactaattttcctaacacaatacttacgcacaatgactcaacattttacgccacaacgtatatactatttatgcactttttgtacattaccgattttatgccatatccttcaacatcttattctacattctatttacccgccaccatttcacctcatgcaagatccataaatttcgtgcccacgtaacagagtaatcacgtttgcatgtggaaattattccctataattcc

SEQ ID NO: 105241 - DNA, 419 bp, Zea Mays
ggagaaataggtggctaattaagtaggccccgtgggccagtacttagacttttaaggatgccctaagagcaccctattatctagagaggagacgttacttccagcatgcatgcattatgaacacaaaagggaattaaaacttgagctaacccacttcctttaaaaaccatccgggctttttttccttccaccataatctttacctttgatacccttccgcagatgaattcacccacccccaccagtggaggagacacccgtttcagttctaacttcctttctcacgatggctttccttccatcttgtgggaagtgctcaactccgccggttaccctacgccccctttgtacacggtgcagatgtatgaggagcatcaggtacctcgttgtcgggtctggctgactttggaggctcatcc

SEQ ID NO: 105242 - DNA, 709 bp, Zea Mays
tagtgatcaccaaaagacatcaattggaacaaactactaaggttaccaattgaaagattatcactatacatgtgaaacactaaaatggctccaagatttaaaaaacatcaaggatcaccaactatcatggagaaaacaatacaaagcacgagcaattttaaaatatgtagttacttacaactttagataccaattacacgacttgcaaaagtacccaagtcctgattgctccatatcttgctcatcttccctttttcacattgagactacataggatcactcaagaaacagttagtctcaaaatacacaagttatgtgtgctcctcctaaaggtgtgcattaagtctttgaatgacttgtactctgcacattctagcatcctcaagactagatgggatcacaacattccttagtctaggcatagtatatcaattgcatcacaaaaagataccaattgaaaatgacattattcaacctatgcctagtggaaacaaaacatgcatcaacagatataacactttaaaagcaacctaggcacactacacacatgatgatcattgcaacacatataccaattgaaaaaggcaagatcatatataaagcacaatatctaagcacaccatgattaagaagaaattttcttaggtacaccaaatgaaaggaaacaacatataaaagcataaagcacctaagccaagattctgccagt

SEQ ID NO: 105243 - DNA, 487 bp, Zea Mays
atgaggttggatttccgttgaagaaatatagggagcggaagaattgtaaatggttgaattgttcaatggaaggaaataatgctgaaagggtagctggaaatccaaggatacataaaacatgttcaaaatgaacacagtgcaaggctgggatgaaacttaaacaaatctacgatgatgctaaagaaaatgttatttccgtccgaattgatctggtagactatgagcataatcgtgaattcttaaagaaagatacagaaaaagggcaattgcaatgcaacaaaactcatgatcgtgattatatggagttcctcagtgcgatgcaagaaagcaggattccacaacattgcattatggattttgtttcagaaatgcatggtggtccagaaaacgttccaataaccgtgcaggacatgagtaacctgtaagtgtattatgcattgacaataatggtattatatattaccgaaacaatcaacttgtgttaaaa

SEQ ID NO: 105244 - DNA, 428 bp, Zea Mays
atcgcttagaaagaaagtattcgacaaaaatgaaaagctcacggggaagtggatcagggaactgccttatgtagtctagagtctgtgaacccatcccaaccaagccttacacaataatactccatttttcatggtatacggatcagaggcagtgttacctacatatctactcttcagagcacctaggttaacatttgaaaacattgtagaggcagaagcaacctggctcgaggaagtcgatgtgctagaggaggaacgtctgaatgctgtgatttagttgaccaggtaccagcaaaccctgaggcgctaccatgataaagcagtacgacaccgggcatttataggatgagatctgttgcttcgtcgtatacagttaggggaaggatgacacaagctataaccgccatgggaagtgccctttgttattg

SEQ ID NO: 105245 - DNA, 339 bp, Zea Mays
cagaagcgcggtgacgaagctcccagtggacttgtaatggctagagtgtcgatgcgggtgcgaatcgacggcgatggcccgtcttctctctcctttctctcggcagcgaaactctctcggtccggcaggctggtctatggcttgtgcttcggctatgatcaaggggttttgggggcctagcatttatatcctaggatcgcattgtaaccatctcccggatcaacattgaggctaggtttctttagccgattccctacacgagcggaggttgttgacaggaacatgtagctgtgccggtggcccacatgtcattgaaacatagatgaagtcagccacggc

SEQ ID NO: 105246 - DNA, 473 bp, Zea Mays
tgttacctcaatcagtatttttgccaagcatatttggtttagttctcagatttttaatctgttagtttcataaactttgtaatcaagaacatttagtttctataatgttgggatggagtcctctgcgaagagtccaaacactagagatgatgattacaatacagaccaatagttcaaaatgtcccattaaccattatttacgcgctgttcaggaggtatttatagggtagccaagaggtcagcccctaaagtataggcctaccctcgattacctactacatccctataatattctatataacaatgtcattagggtatctacaactccggattatagacactcaaatatatacccgtgatgtcatgatcggtgcacatgtgttcttggatgactgggcctgctaagtgtgggagccattgttcccacgaataccttgatgtccctgacacaatcaagggcctttaaggggcgc

SEQ ID NO: 105247 - DNA, 704 bp, Zea Mays
taatatcaatgattagtgaaggtagtgaaggggggagattagagctgcccctttacagggcctttttcctgacgcacaaagaaaagggggagggaaagagggaatcattggaacgatccaagaagtaggaacgattgtgtggatcgttagagtcggtctgacctcccttttgtggtgcccaagctcctccagcttcccccatccagtcaagtacctccacggtcaaccacgaccttcacaaccaggtgcaaataagtgatttagggtgttactagatggagtagcggtgcaaataagtgatttagggtgttactagagggagtagcgggagtttgctaattcttgctggctttttgacaagtatagagattctacaagctagttgttcactgttgatgtaaccgtgccattgtccatggtccatggaggtgagctcatcaatcttcatattttttgcagttcattaatatgcaacttatagtttatatttgtgtatctgaaaagggaaatgggaaattaagccatttctataagttttggtgattgaattaccaacacaacatctaagactaaccgatttgctaagtctatgaacataggttcactcaagtgcaaattgaagatctcaagtccaaatgggctcaaagaaggacacaaagtgcaacattttgaaaaaggaaaaaacaataaggtttgaacctttg

SEQ ID NO: 105248 - DNA, 779 bp, Zea Mays
ctcgtttttaaaaaactcttccctgcccgagcccgaggtcagggcacttctcatttcacatctctctgctctctctctctctcggtgatccacccctctctggtgaccatcctcgccagcggcgatcctccggtgaccaagctgggccctgtgcttgccttcttccccctctagtgagctgcttcctccctctcttttccctatctgtttcaagtgtccacctctctccttttttatccaattcaaattcttgtcaaaatcttgtgaatcctatgcatgtttgtgtgccatagtgcctcttgaatatccctgcaggttcctagctccctttgggagggtttcaccacctaaaataggcatttctccaaaactctaatccaccacacgccacgtgctcggtgaaatgcccaaaccagccaaaaatgctcctatcgatcccaaatttttcaggcaccttcacaatacctctattaacatagtcgcaaaatctcatgccaatccgatatcctaggcttcaattttacacaaatccccgcttctagcaatcgattccgagccaagtgcccaaattccactttcttcgcctaaaatcaaaccaagcgcacacttcactcatatttacccatataaacctattcgtgaagtatcggctcaattccaagtcatttcatgcctcaattccaatttcaaatatcctatggcactattcttcgttcaaactccgttttcacgtcgtttgatctctcgatcgccacatctcttgatttctgtgccataac

SEQ ID NO: 105249 - DNA, 629 bp, Zea Mays
ccctatgcgatgagttgtgcaagctaaaaatagaagtcgtttcctccggtgctttaagttatatttcagtggagcccaccttacatgagcaaatagtcatggcacagattggtgacaagggtgttcaagttatcaagcaaatgatcaaacagaaggcagaaaaatacaaatgcttctgttaggacaacaaaggaatcctatggtttggagaccgattggttgttcccaagaaccctgagctcaggaagaagatattggatgaagctcacctttcaaaattctccatgcaccccgacagtaacaagatgtatcatgatctcagatctttatactggtggaccagaatgaagagggaaattgcgaagtatatatcggaatgtgacacctgccagagaatcaaggccagtcatttgaaggtagcaggcactttgcaaccccttcccataccatcttggaaatgggaggatatttgcatggattttatcgtgggattgcccaatacctcccgccaccatgattccatttgggtcaatgtggacagattgaccaagacagctcatttcttgccggtacacaccacccataggacggaaaagtatgccgaaatttacattgaccagataatttgc

SEQ ID NO: 105250 - DNA, 465 bp, Zea Mays
ccgagcttgcttgcttgccgtcgaaaccatgccaggaagtttcatgtctcctggaaatcttgaaaacagaaacagcaattgggaccaactgcggagctttaggactcggtctagctcggacagaagcaaaggccccattttccgccgccgtgaaaccaaccggtcagaagtcaacctgattcagacgaccggattctacagaaaacatcagacgacccatcttcaggagaccacgactgggcgcattcccgccgttttcgcagctgcttcgcgacatgcgcgagctcctgctcctccaccgtgcgcttgtggctgatggagatgggatctctgtgtttgcagtaacgtcaagatggatgcctgtttgctctgcaaatagtgagggtgaggttaggaagacataccgacaatggtttagcatgcagtgctttaaaatcagttcgatcttttctgaatgagggcatt

SEQ ID NO: 105251 - DNA, 273 bp, Zea Mays
gtacaatagcaatcatcttgtttagggggaatcttaaaccagctttaagaaaacttttgaagactactacctcatcctttcctggctttgggatagtttcttctccaccaaaacggattaattccttcttggcctcactaaaataacccagcttcaccattttaggaagatcagctttagagatggtggactttccaaagtccagatgactaggtttacttggcaccccgcagctgtactcatcttcggaaccaacttcttcaacatcagctt

SEQ ID NO: 105252 - DNA, 797 bp, Zea Mays
cactgtgttacaagatcttggtttcataaaatgcaaaatcgaacatggtttgtacacaagggtcaagaactcctgcagattggtggtgggagtatatgtggatgacctcatcattatgggggagtccagcagtgagctaatttctttcaagactgaaatgaagaaggtgttcaaaatgacagacttagggacactatcatactatctgggtatagaagtgcaccaaggagacaaagggatcagcctttgtcaaacttcctatgtgaaaaagttgctagaaaaggtcggactgagccagtgcaacccatgttcaactccaatggaagctaagctgaaactgtccaaggatagtgattcttctcgagttgattcatctgaatatagaagtttgattgggagtctaaggtatttgttgcacactaggcctgaactgaatttcagtgtcagttatttgagccgttttatggaggcaccaagtcaggatcaccttgcagcagttaaacatttacttcgatatgtagctggcacaatggagcttgggttgttttatcccagaggaacacataaaaatgttgtgatcacaggatacagtgacagtgacttgggcggtgatttagatgatggaagaagcacctctggaaccattttcttcattggtgattgcccagcaacctggagttcacaaaaacagcacgtggtggccttgtcttcttgtgaggctgaatacattgcagggtctgaagcagcctgccaggcagtttggcttgctcggctaattgaggagattctagggaatt

SEQ ID NO: 105253 - DNA, 331 bp, Zea Mays
aaacatcctaaattattatatgccgaaagtacaccacctttattacattatgatgaactggtaataattatacatactcattagtacaactcaacttccttatttactttacataaggacactacttaaactacactactctaattatcttcgtccttggccgctcctgctccactgccagcctcaggagaacattcatctgtgaggttcatggaaggaggggctccaaaaaggtccaactccccattaggtcctccactagctgctccagatggtccgactcccattgctgcaacctctggtggcacattcggatgtagccggtcatata

SEQ ID NO: 105254 - DNA, 667 bp, Zea Mays
catgtgtcaacaccatccttggggtccaagttctctgcagtagccacctctaaggttgacgggccctcagctacttccataggaccaggacgatccaagtcagtctcccgaccctcgagatcgcgctctaaggtcgacgaggcacgggatgacctcaacccagcatcaagcacatcagcgcaaacctccatcacaccatcatccactggctccgataacaagtcctctagaaccatatcctcaagagtctgatcaaagttggccagggacagttcttgcagaccaatgagagcagacaaagcaggagagggaactccactactttcaccgctggcgatgaactgccgactgtttttctgagtcaaaggaacttcatcttcctcctcgtcgtcgtccacattagcaacacaagcagcacccccattgggatcagcaacagatggagcacccacattgggatcagcagcggattggatacacccattgggttcagcatcagtaaattcagtcacaggcatttcttcagcagcaggaaccgaagtaccagcatcccgatccaagctggatactcgctggaggcgtcttcttttctttttctgctcatcagcagaaggatcaggctgattggctcggcaagggcgcctcgggcgagtactggcaggtttct

SEQ ID NO: 105255 - DNA, 428 bp, Zea Mays
aggcgttcgttcgttcgagcgtggccagcaatttggaacctgggagccagggcaccgtgggtgcagtgcagtaaatgaggtgttgcaatggcgatttatcggggggtggtggtggagtgaatggatccacgagtttacgttggtgctcagtgctgctctgccagccaacgtcggatcgtattgatgcgtgcttttccctggctgtgaggccccgccgccgtaccccgtccgtgcgtcataggatacgcgcgcaggcaggggcagcttcgtgtctgtgtctgtgtctgtccaacgtgttgttggccgtggatgaggacgagatgagtaaacgcccgccggccattccattccattccgttccatgtgctttggagtgtgggatttcaacttcccgcaagagtgtcagcggcccatacgtacgtaactgt

SEQ ID NO: 105256 - DNA, 283 bp, Zea Mays
catgtaattgatgtgtgattctgacttttgcttgggtagtgggtagttgggtgcctattggttgtataaatttggctatttatgtgtgtacatatatttttccgttgttattagaatttagtagcctacttatctcagactgaggtgtcttcatatatgtttgttaaatgtccaaaaggcaatgaagattgcactttcttggaacacaataataccgtttactttagatgaacttggttattccaaaatcaattaatagatatatccaattattctatctttt

SEQ ID NO: 105257 - DNA, 359 bp, Zea Mays
agaagttcaaagcaattgaggcaatggggcctccggcccggatcaaggacgtccagaagcttaaagggtcattggccgcccttagctgcttcatctcaagactggctgagagggcgctaccctcaagctcttacagaagtccagaccattctcttggactgaggaggcagagcgagccttccaagagttgaagcagcaccttgtgtccctacaaattctggtagctctggagccaggggagctgttgtacttgtacattgcagcagctacagaagcagtgagcatggtgctggtcgtcgaaaggacggcacaacatccccaggggagtcagaaagttcccctaggagaaggtggtggtc

SEQ ID NO: 105258 - DNA, 393 bp, Zea Mays
ccgaatatgaagcccttttgttcggcttggaacttttaaattgtatgggagtaaaacatgtaaaggcatatggtgattcttagctggtcgtccaacaggtgttagaagaatatcaatgttttgatggtactctaaatagctaccttgaaaaatgttggagcataatccattcttttgacgaattcagtattcggcatatctctagagttgagaatcatagagctaacagtttggcacaagatgcatcaggttatcggataaagcgagggaaatttcacaacactgaaaatctgataaccagtgcagggccaaatccccaggtcgcggaccgtccgcgtgaagacgccagaccgtccggggttaccagggaagttctcctaatcgattcggctg

SEQ ID NO: 105259 - DNA, 395 bp, Zea Mays
cgcgaggtggctatctccggcgaacccatcggaagcaaccgtgactagctcaggtacggtggtcggagtaaattagtggccggagcatatccacggcgtgatatttacttaccccaagtgctatccaactcatccgagcgtgaatcgccaatggcaagcatgaatccgagcgcacagctcgtcggcggcgatgggatctgaacctgatcctatccggttactataccatcgaattgttctttagtcagcctgacagaccaagtttggcattgattttctcctgatttttcatggcaacttgttgatcggccagtagcaaagttgttgtctaatgatccagctacaaccttgctatagcaaccatagccaaactctcactagatcattgttgaatt

SEQ ID NO: 105260 - DNA, 361 bp, Zea Mays
cctagagagccctgtaaatgggcattggtcggttggtgcacaagaccaatatcatggtgtggtggactactttttctagagaggaattttgaagagttgaagatgctggcgcaccggaccttttcagggttcaatgattgaagttgcatatccaacgcctagttgacgtggtgactgaggtggcagggtccgatggtgaactagaccggtcatgtgagtctgataagactgctccctaccagaatagctatctgcaatagcaatttgacaaggtctggtggtgcaccaaacatacactgttcaaggtctggtgcgcacacataaattgtagattttggcattcaatgccgatgactatttt

SEQ ID NO: 105261 - DNA, 845 bp, Zea Mays
tcatttgggctatgtgggcccttggccttcatagctctgggcatggtgcggctcatcgtgttgcgccctgctagcggtatgcgcactcaggtctagcctcgataggttatgagtgctctactagtcgaggggctcgtaggtcatgagtgctctatgtctcgagggtttcataggtcatgagtgggaggtagactggcgcctctgctgtggctcggtgctaggcgcagttaatgcggccgatcatttatgatgggtcagcctagggccaggcatgagatccacttcgagtggtttccctttggcacacctgaaccccctgtctagttccaccacgcctgaccccgagctcagtgccgcagggtttattcgagggcgagttcttcaaaggtagacattacctatctcctccgaatagccagtgggtcccagccataagaggcattttccctagggtactcgctaaccaatgggccctaaggactggggatcatatcttcgacagtagcccccgagcccctgaagggagaatatttcccattgggggctttccccgggtcaggcactaccttttatcctagcatgtacttccacaactttgtgtatttggtgccgaaacatcacccctttgcatacgcggtgctcgacatccaacctgttttgccatgccttatgccttcctataaatggtccctcccttgggcgactttgtcgtgtcttgcagcgctttctttattgaggggtgacttctttgctgcccctatggactcaagcaagcgcctagtggaagagcgctcccttgtgtcacgtcctctccggcaaaagatgattaacttagggtacgagcc

SEQ ID NO: 105262 - DNA, 679 bp, Zea Mays
ttttttcataggtcgctcggccgctcggtattttttagctagtaggatgatactacgtgggagtgttgcgttgcgtgcgacttcttattatgttggccttggatggttttccacgacacatctatgaggtaacgattcactaataggaagttgggtggtttctacgtcttacctataggacaacgactcaatgttagggggaatagaactacgcgcgaagcgcgtgatgcacgacaaccgttaacacgtgacgcaaacaactatcaaaactagtgctttgtagtagtagagaaggaatattatctagatttctctcatctccaatatctcctctccagaatggtagcgttagcacatgctagacctgggcatgagccatccgattcgatcaacccgccccgcccgcctaaaaaactcgacctgaccaatggaacggacgagtacgactatacgggtcgtagtttttgacccgcaacaatccacaggctaagcacgcgccatgatttttttatatcaaaaatcgatccaacccgaaaaaacctgacccaaagccccaaaacttgacccaacactcccaccaggggagcacaagctgactccaccaacactaggcgagtcaggtacaggccatgtcaaacaacccacgactcgaccttaactgatccgaaatcaatcccac

SEQ ID NO: 105263 - DNA, 646 bp, Zea Mays
ctccgtatttggcatgatctggagctagcagccatgcgtccggatagattggactcgattggttcctgaacttgcatttctttacttggctgtctatcgtcggcagcaactatccacataaaaaggaactagacatccaatctcagcagcatatatgggcctttttcgtgaaataagggagacaaggagagattaataaccggccagtgagactgcgaaagcgacagtcagcaagctattaattaataatcctcgtgtttcttcattcaaaatgttggacagctagagcctggaggaagccaaattaatgcgcggctatcttgttggttacataaacccagaattcaacctaccgtcgcatcacatctgcagggatcgtcataaatcagagctcatatggcccatggatcggacacgactcaagttatatgatttttatcaagtgttattaccatgtaggagtatataatacttgatccgtcgtttaagaacatgaatcatcgttttacctttccaaagacagttgtagctttatctcaagtgaaactgttggtctaattttcatcaagttttattgaaaaaaaatcactaacatctacagtatcaagtgagtgcagtgtcaaatatattaattttatgctcaatc

SEQ ID NO: 105264 - DNA, 567 bp, Zea Mays
cacattacgtgaaaatccttcaatgtaaaagttatttggtttttgatattttaccactttgatatatacactttggtccaaaagtgcctaaaaattaaaatcaccatataggcataaattagggcttctagggttctctttagggttttgagtgtctagggtttgtgtgccactcaaatttatcaaacttaatcccttgtgggcatttccaataacttttgaggtaatactcattttggcctcacattcacccatataccccaaacctaaggttaagtatcctattctagggttaagaacactccaaatcaccacatcacaacttgtgtttaagttttagcctagtgaatgcattctaggtgtaacaaacataatgacatgtcaatgcatatgatgccatgctcaaattttagttctggtaacaccaggggtgttacaaagtgtttgatctagattaggaaagggaatctagattcagtaaattacttaacctaacaaataagaataatttataaggaccaactctagtaagctttgtgcaaactgagtcattggttcttgctaaac

SEQ ID NO: 105265 - DNA, 655 bp, Zea Mays
ggagtttacttaattatattttactaggtaggtgcccgtgcgttgcgacgacacataagttgttgagggaaatctatggctgctcgtctaagtcgatggcaggctatcattattgttaggcaccatcatccgaataaggatataaatatccgaataggaaggagcgtgaagttctacacaaaaccgaacaggtgcttggcggcttctatcttgcgaaacacgatagagatcctcttgcatggatgataaagataacattaattaatttaaaaactataagattgattaagctaaagtaaacgctcaacatccacaaacaagtattgtagtgcggtgcgctttaaaacgcaaacactcccactgctcacctccacctgccgttcataacacctcatgcaaattaatcccctatcaaagaatgtactgaagtaaaaaaaaggcgcgtatgatacatcatcattgactgatcagttttcataactatagtgaaattgtaggctcatgccacaccatatgcgataacatcatcgcttggtcattcacacaagtggacatggcttgctcgtatgggtttggagtgtttcccattgctgaggcaaggtcattcatgatggatgttttgctgacatgataatccttgaatatcttgaggata

SEQ ID NO: 105266 - DNA, 404 bp, Zea Mays
ccttggcggtaagcaatctcttagcctcagcctttgcaccttcggccttgtcttcagttacgtggtctgaaacttggatccacatttagggcatgctttattatgcttttatccactccacacaattcatttgttgactaggcaaagacatccttgttgtgaaacaaaaaccttcggagattagactctcgctccgaagttaactgattgccaaagaaaaccctctgttctgcaagatcatcacagcgaagtaccaactttagctgatccaccgaagatgttttttcttttaatgattttgtagattcctagatttgcacttcagcttcgactatgttataaacaatctttgtctcttgcagggtcccttctgcccttcttgctgcttcttggctgccataaac

SEQ ID NO: 105267 - DNA, 381 bp, Zea Mays
gccagctgtaatgccgaaggcaccttcgactaggctaattgaaacgaaggttgacgaagataaggctgaaaggtcaaaaactgaagaagcaaaaaagatgcccgggattctaagtccttcaacagaagcaacagtgctgaaggcagaaaaaagttctgccataacccctagaagaaaaaggatggtaaatgtattagatattttggaaacaacggattccaaatgccccgcttccataaagaaggttgccgaagttgtcaaagcgcaaactgaagctgatactaagcagatagaagttgaagctgcaacgattgaggctggaatagatactgggccttcaaagtctgctaaaaaagagtctgctgaaattgaagaagtggc

SEQ ID NO: 105268 - DNA, 575 bp, Zea Mays
gtccattgagtccttcaataaaatgatcctgctttctctcatcctcagcaacttcaacctgtgcgtatctggagagttgaatgaacttgtcgcggtactcgctgactgacatgcttccctgcttcagcgataggaattccttcttcttaatcttcatcagtccagctggtatatgatggttcctgaactgcgtagaaaactctgcccatgtgatagtgttagcagcatcgtgggcagcagtgtatgaatcccaccaatcagcagcaggacctgtcagacgaccagaagcatatagaaccttctcctggtcagagcattgtgcaataatcaacatcttttccacagatttcatccaatcatcagcgtctagtggatcaggagagctagcaaatgttggtggcttatggctcataaactcccggtgcttatctcagggtggaactggtggtggagatggaggcaatggtgcttgctgatgttgttgttgttgttgcagttgctgttgcgcccttctctcctggcgtatctcctctcgctcctagcgcatctcctggcgtatatcttctcgctcttag

SEQ ID NO: 105269 - DNA, 317 bp, Zea Mays
gcttgtatatcattcccaagggcagtggatggcctcctaatgccgaagcgagaccatataggacgttgaataatccccttaatatcctccctttcaactagatcattcttcacgtagaaccattcttgcatccacgcccccggccatctcttccgaaacgtaggaattaggtagcttgcctcagagcgagacacgaagttgtagcaaccgaagttgttgtgatattgctcctttccggtagtcttcatctcataagacagctcatggatgttgcaaaagcatttcacattatgttctaatccctggctcctcatggc

SEQ ID NO: 105270 - DNA, 444 bp, Zea Mays
atttagtgaatttgtcgattgctaccagtacgtgagtgtatcctccttgagctttcttgaaaggtccaatcatatccagtccccagcatgcgaagggccaagtcactggtatggtctgcagttgctgtgctggtagatgttgttgctttgacaagtactggcaagcttcgcacctccgaactaacttggttgcgtcactcttcgctgttggccaatagaatcctgacctgaagaccttcccgactagtgtcttgtacgctacatgtattccacattgcccagcatggacctcgtccagaagtcgcttcccagtagatgagagaatgcacttcatgaggacgcctgatgcaccccgtctgtataatgtctccccaatgagtgtgtagtgagccgactgtctggcgatacgctcggctgcatttttgtcatctggttcctcttcat

SEQ ID NO: 105271 - DNA, 506 bp, Zea Mays
ttttcttttatattatctcttacaaattgggtattacaaatcctaccccccttaacaagagtctcgtcctcgagatttaggaaggactagggaaaagatggggaaattctatgcaaagctcttcttctctttcccatgtagcttcgtcttctccgtggtgactccattgaactttgcacatctttatcactttattccttgtaactcgagccaatgtatcaagaatcttgataggatactccgtgtaagtcaaatcaccctgaacactgagctcttccattggtaactattcctcagggacatggagacatttcttaagttgagacacatggaatacattatgtacatcagatagattatcaggtagctcgagttgataggccatctctccaacttgcctaaaaactctaaatggtccaataaagtaagggaacaatttgcccttgactttaaatctcctcattccatgaagtggtgacactttgaggtacacataatctcctttc

SEQ ID NO: 105272 - DNA, 392 bp, Zea Mays
aggggatcgaacggttccggtggcggagataattcagctacagtggaaaaagttaattagtccgaagccataaaaaatgtcgaagctaaaggccacgaaacaatacctatacgtttttcaggctctgcagcttcttcagcttgttttgcttctactcgggcgtcatgaatgtctttttcacttttcttcataattttgtgagccatctctcagccaccatttacccagatatcattgtaaaatttcccgcccattaaacttgctttagctgagggatcctttgtatcatccacagagaaggcagcttcggcctgggccatggtcttgatatggtcgcatcacgccttctccaagatggctgaaattccccgcgcacaggaaaatgcacaaac

SEQ ID NO: 105273 - DNA, 1068 bp, Zea Mays
cgcgcttagctcccgtgcgattccatggctcgcggctcaatttggtttctgcgcggtccgacttgtctagttctgcttgcttggttagttcttcgcggttgcggcccccagtttgtgcggtgtggcgttggcggaaccttgtggaggctagttgctccaggactttgatgtgagtggattactgaataattttatttttatgctggaacatttgtacgcgctacgcggtggctttcgtgtcaggtgaaaaggttcgattctgcttaaccgtggccttcaattactattctgacggctttagcagagcaatttagtagtactagtcattaatggtcccaaattagtatgatcgttccgatttcatggggtttcggtatttttcggtggggatttcgtttctgcttccataactcggtccctttatctacttttatatagtaatagtattgctttttatatatatggtatgttgtaaatacatggggaatccaggatcagtatacgagttcttagttcttacactcgtttagagtgggctcaatggtttatagtgtgaattaaacggtcagaattactagttttggtacgtagctgtaatcagtgaaacatggataggtttagtttcgcaaatgactgctttgggcttgatcccttctgcagttctgttattctcagtgttgcctagtgacaattttcttacatagcactagctctcagttcattttagcttctaggagcaactggttctgtggcttgttgctgagaaactcactcaaaatatcttgtgtaccatttgtatcagcacgatgcatgatttactagttctgcccaaccaatatattcctatcaagagcaagagattttggcatgatgcaagaaatcgctttttactacaaagttcatagtctaacacaagattgagatcatggaaacaaggattatgcaacaaaccttgtttcttgggtagtaacatgttgatctcgctttgcattctcttttataaactattcaacattatgctcttgatttcagtgattcataaatgcatctacactgaagtagaattga

SEQ ID NO: 105274 - DNA, 290 bp, Zea Mays
ttttcatattaaatattcaatttctaattcatttatacagtttaaataggctctggactgggcctcaattatcagataagacaagggccactacgcaaaactttctagactcagcgcccaaacgagtggacagcgggttgattcacagatattccaggggttcttatgcaaaacggatggccgaaggggtatgaggcgatctgagccacccgatcagaaatctggggtccagattagatcgggcccgggacaaaccagtaagtgataggaaccatcggatcaaggatcta

SEQ ID NO: 105275 - DNA, 685 bp, Zea Mays
gcggtgcttgcatggtctgccagttaggctaacaacgtcacattgttgccttccagattcccatattgcccggcattcatcttctagcttctttgagaataccctgactgctggtcctttaaccattgagccaaaggaccgcaatgccttctgtagctgcacttcatgcattcttgtggtgtaaaaggcaggcaaacctttcaggtatatctccttatcagctggaagcaccctttgacaccatgatgaagaaaatttcatgttaagcccattgttactttccaagcacaataatgtgatctcaatagcattagatcctacaggaagttgtccattcttctcagtaggacttgtatgagtctttctttcagactgacatctcagcacatttcttccactcaacagtgcagttagaatagaggtacttatagacaaccatttatcaaaagtagggaggtcaggtgcattaactggtttcccagatgcagctgatactgcagctgcagcaacagccaccatgccaacacctgcaacagacccggcacttgcattgcttgaatatccccctctccctctcagcacatcagattgccgaaatataaaatccttgatcaactgaaagtcatcatggtttgctgaatatccccctctccctcctgcctctcgccaatcgcctcgcgccctc

SEQ ID NO: 105276 - DNA, 404 bp, Zea Mays
agtgtaattctcttttgtattcatggctttagaattctctagtgtaattctcttttgttcgcacctcagatgttagctagttaagaagcttgtttttcttattaatattttcttgtatcgatggcttctagtggtttaatactaatattatcttaatagtaatgtattgctccattttagatattactatgattggtatatttgctctttttatagatgagcaattcatccctcactgtgtggtttcatggtggttgttcttgcagaagactgtcaagtttcagattgtcagggtccctttcaggtgacatccagtctctatccgaattgcagaccttgtatgaaatatttcatcttttacactttgatttgatttgagtccccaaacaagcacatggattgta

SEQ ID NO: 105277 - DNA, 282 bp, Zea Mays
gcactaagtcgcaaggtttcctgccattatcttatagtaaggacctttgacattacattatgtcaagaaatggagaagttaaacctgggaatgattcatcatggaaccttgaaccaattgaagcttgagtcaattcttctgcaaaagattattgatgcccaaagaagtgataagggtatgaaacatattcatgagaaaatagaagccgacaaagcaaattgtttcagaagggataatcaaggcatagtatggtttaataaccgcatagttgtgcctaaggat

SEQ ID NO: 105278 - DNA, 462 bp, Zea Mays
ataaaatcattgaagattaaaaaaccagtagtaattccgattccatctcacctctgacgttgtctcgccttgctgagacaaaacaggttctagcaccacctcatgcaccacattcctggtctctttagcatccttaaaaaattgatcgcattctgattggtctgtgaacctatagatgtatttatccccatatatactgctctgcaagatcagattggacttttgtttatctgtcggcattttaatatcaagagtatatatggatctcgacatcacaatgtcgtggtttagtggtgtcgcttcaaagggctgctcttctgtcgtactgctaagcataaaagcaatgtgtttatcagttttgtttgttaggtgcagtaagcaagggattaagttgtcgtcttgaaaggataagtgggccttcagcgggtggatgtgatgaatctcacttgactcttgggtaat

SEQ ID NO: 105279 - DNA, 724 bp, Zea Mays
ggacggtgtagttggaagcatgttgccaccatccatttctgcgtttatagcattcacttggaaggaaacactgccataaataattgtgctttcggtgaagctaacattccactcgaaagacttttccagtagatctgtaatttctcttggaatgaaaccgggtggattagtcgagacgagggtgtccacatttttttaatgaggcgctgcgccattcgtccaaagaagataaactcggcagtgtcagtgtcatcttcagcggtgagggatatcttgtacctgcacagagtggttcgattgctagacaccacaaatcatgtaatctgtagacggtatgctaatgggttgcgcactaaacttcaccaaagttaaggtactctaattgcataagccatatactggacaacctccatcatagcaactcttgttgcggtagttggaactcaagcaggcatatctactatctatttgattggtaagcaaatccttgcacagggctattgctcctgctctaacgttgtgcatacctcaaacgaatttctagggcatatttacatccctgacatcagctaggtagctatgaatctctgcattgctgttactgatgggttcaaaaatcaaaggcaaacactgaaaggggtaaagttggtctatgtctatcatggttacagtgtgtttaatttagaacgcgtatgagttaacttttttagatctaaatagaagg

SEQ ID NO: 105280 - DNA, 523 bp, Zea Mays
cccactgttttgcaggaacttcccgaggacgaccccaccattcttatgcgtggctttgtcatatgttagacgcccctacttgtgtcgctattatgtagaccagagggtctgttccaggagatggcaacactgcctcccccttgagcatgatgccccagtcggcgtagctcccaccactacgatgtgactaccgcctcgtatggccaacaccgttccgaccccgacgtgccttcgaccgaccacagtgcaccagcgactggctgcgcctcactctttgttccggcaccagttctagctcgggtgcctccaccagtgccgcgttgcccagtcactcgctctatgattgacaccatcctgcgggtgcactacaggaacctcaacatcaccactccgtcgccagcacctccactgatcccggtgaactaccctagcggcctggctaatgccaactagggtgcggccatgactgacgaactttatgctcttgtcaacaacaagacatggcaactcgttccccgacccc

SEQ ID NO: 105281 - DNA, 607 bp, Zea Mays
ggcttttcagtcttatcaaccttcatttcaaccaccttgactgtaggcaccttcggcattacagctggcttttcaatattctgtgtaggtggggcagtttcttttgcttccatagcagaagatgtccctgcgccaaactcaggaaccacgaccggttcaatgtaacgcgaccggtgggtaagaaccttcaactttttgcccttcgacactggcttatctgggatgtccggagcagaagttttcctctttttctcttgtccccgcagcgggtagcgttagtcagggtatacgaagccgatggcgtcgaaaactctgtttaatcttttctttctccggccaccaaaggctgcggacaaggcattgtcctcggttttggagtacaccccaagtaactcgtcgctagtagtttcaatgcacttcagccaatcatcatttggttcatcaaacttatctccaaacctgaaggtgtatttcagccggaccaaataacctttgctagaatcattgatggtttccttcggcatttcccagccttccgcaagcggccacaccctaaaggctatgtgctcttgaactaaatctcttgtgcaaataaaagagcaaacag

SEQ ID NO: 105282 - DNA, 415 bp, Zea Mays
gaatttaacatggtctaattactttgtgttttcagtggcagacgacactcacattggattctaggtagcttgtctcttgtgttatatattgttgggcgtgtcgtatttaatcggtgcccctttgcctcaagtagttccccatctctaccactgatttaattttgtaggacacatgattttgtcgggtgctagccgagtttcccaaggatggcgggaaacaacattcactcaagcgacagggaccatccgcccgtgccggagcatgagaaagcgaattgggattgatggaggagtttggtaagagaaagtcttcctccgtgcgaaggtgtttcacgttcgaagggaccaccatgacgcctaagaggaggggttgaattaggtagcttaaaacctatttctaaccatggcatctaat

SEQ ID NO: 105283 - DNA, 379 bp, Zea Mays
accacgacatcaacacttgaagcactgaataccactactcttggatgttgaacccactgatgttgaagtggatgctgctaggttataactcgtgtttggagcagcaccgttctttccactagaattgtcttgaatattggatcgcaagcctccagttgaaccttttgtcgctgaggatgcagcagtaaaccttgagattgatttacttcctccagtcatggttcgtgcaccatatgacaagggcttggtgctcttagcatcttgttgtagctggcgttcagctttggtggcttgatgtaccaaatcaataagaccttggtacgactgaaactcaacaatacgctgaatgttgcggtgtaacccagccatgaaacgtgca

SEQ ID NO: 105284 - DNA, 455 bp, Zea Mays
atatcttgtgttcaatacttttttagtcatcccctttgcgtgcaatgcgattgacctatctcaaacagtaacaaatatcgtacccatgttgtagcacatctagtttgtcatgtttgttcacctgatgctctaatgcaatctctttttgtctgggtatttttttatagttgtcagggaagaagagggacactattattatgttccctccttctgatcagcaatcactggaacttcatatgcttacaatgatccaagatcttgctgcttctttgttgatggagtttgagaagtgggtcttgcgtgcagaatccacaggaactattttgaagaccccattggattcacaatccagtcttggctcagaggaggttcatactttaggtgttccaagtatttttttagcagtgttatgttgatgatgcaaattgcccaggattgtattacttatacacgac

SEQ ID NO: 105285 - DNA, 364 bp, Zea Mays
tgccactgatgcatacttgatctggatgctcctctgctcgcagaagtcaaagaattccgagctggtgaaattagatcccaggtcggtaatgatgttgttaggtattccaaacataaacattatttcctgaatgaactccactgcctttgctgaggtcaaagaggcgataggcttgtattctatccactttgtgaatttatcgatggcaactagtatgtgagtatatcacccttgagctttcttgaagggcccgatcatgtccagcccccatcatacaaactgccaggtcacaggaatagtctgcagctgctatgctggtagatgctgctgttttgataagaattggcacgcctcgcacttctgg

SEQ ID NO: 105286 - DNA, 727 bp, Zea Mays
caaaaccgtacccagtcccaggtgcacaacatcgctaatcagcagcaaactcgggacaccgctcgtcgtcacgaataccctccgcagcaagcccgcatcagtaacacaactagaggaagggcagaggccaaggcccatagcaacgaaggttctattgtcttttccatggtgaagacttggcacgcccaaccaggggttgccctgaaaccaaagccacaaaggatcgaatggccagaaaccaatcgactgacaaccaaagagttgtcgcccacacctaccatccccaacagtacaaccagcaccagttccacaatgaacattaccatactcatcagcaaaaccacaactgataccagcaacaccaagagatcctaactctaccacctccaccaccacatcatccaaatcaaccattaccaccaccagcagcatcgaaacaagaggactttgctgatcaacctttttgagggatcattcacatgattacaagaggatccagctctgagttcgacaccaaacgtcaaaagaaagaccactatcgaagggtcaatcacgtagccctcaccgggacagtcattcaaacaaagtagtcccatataccactcaccttcgaagtaagagacgtcgatatccatagtgcaccccatgccgagccatggtgataaactgttgagtagcaggatgggatctgcacaaggtactcgtcaataacgacagtcaggcagac

SEQ ID NO: 105287 - DNA, 658 bp, Zea Mays
ctcgagtgaagtcagctccaccctgaagatcctggcatttcttctcttccagaggtgccaatcaatagcatagaagggcgagagtggtgaaattttgaccgtgcaggttcagggtggggtaggagatggaaccttttgcagtcaggtttctccaggatctgaataccgagtgttgtccaaaaggtcgttgcaaagtgacagttgaatagcatgtgtgtggttatttctggtgcagtgtggcagatcttgcagatatcaggtctgtttggtgtggcgcctccaccaccacgcctaacttgcgacggtcaaattggccgccacaactatggcggttgaagtgcggcgggctgtgacggtttaggccatgcaccaaacatgtctatcatcctccacgatgcctttctttttgaggttcactcgagtctgtagcctatccttggatgctagccaagcaaaaaatcactctcgtgggagctttgttcttctagatgaaggcagatagggggcttccttgctttgggttttgagtaacttgtacatgaggcctatttcacagcatccatgacgtagttgaggtggttgtcaaggaccatgttgatgagcataaggcgtcctatgggattgaggaggctcgtttgtcaacctgtcaagtaaaaat

SEQ ID NO: 105288 - DNA, 421 bp, Zea Mays
agaaaacttaggcctctaatttcaatcttagtctgagggcatgagtgagtagctctaagttcacctcctggtgatcggattaataatttcttcttcaagggatggtttggtatattatgtttttccacgaatgaatttgttacgaaggaataagatgctccagaatcaaataaaactgatgcaggtatggagttaataagaaacataccatacaccacgtcggcatcctcaagaactgattctgctgtcacatggttgactcttcctctactctggttctgcagagtcttgttctatgtagatccacgagtaggggtgttctggtcattcctctggttgttgttcttctggggtgtctgtgggttacgtctggggcagttgttggcatagtggccaagttcgccacacttgaaacaaccat

SEQ ID NO: 105289 - DNA, 331 bp, Zea Mays
ctttgttcttgcgaggaccaagggggagcgatacccttgcgcgggtgctccaacgaggactagggagtgctgactcttcgatacctcggcaaacaaatggaggagtcttctcaactttgctttacattccgcatttaattcaagcattttactttgttcaattgtttagcaagtagttgaagtaatgacttaggattgttgtttttctagtagtattctcttattgctagtagttgggtgaagttgggctcttgcttagggtttaaatatttgcctagggtttaattcttgttgaatatttagaaaaacccaattcaccccccctcccccc

SEQ ID NO: 105290 - DNA, 588 bp, Zea Mays
aatagaataataactacgaataaacaacctgataaagtggtaaataaagtggcaaatgtgatggatccgatcatatcttcttcaaaagtggagtattgtgatttgaaatttgtattttttaatagctcactcatttcattttatagaagcagcataaaactctcactgatatgtaaaaagtttgagcctcttgaatcccctccaaagaggtaagcttttgtacagttaactccctacctgtcagctcatataattacttaccgaaagtatatatacataccatcaatgccaccctgcataaaaatacttccttaattacttaccaaaagtatatacacatactgttaataccaccgtttacaaaaaaactactttcgatgcatatgtataacattacaaacactatttgtttgtacatgtgcttttaaaattatataaattgtatctattgtttcacaggatcaaaaggattctacggaccaaagtaccccatgaatgatagatgcaaccacatgaaacccataaaaatagcccttaccggcagtgtcagcttttgctatcaatcttaccattttgtaaccaaaatac

SEQ ID NO: 105291 - DNA, 717 bp, Zea Mays
tggtccagtgccaccacgtggcctatgggtgcgtggcacaagccttcgactggaagcttgctcgtttgtctacatttaatgtgggtggttgagacatgtgccgttagcgtaggccatggaccaacttttgataggtcgtgtaggctcgaataactgcacagtaaaccacatgttaccgaggtgggcggttgtgtctcagcactacgccatgggcaacgcccatcatgaacaaccggtggcttgggcagagcgccctttgcagcaatgatcagaggcaacagcccggtactatcatcataactcctacacatgtcagcatagtcgactctactctgtagctaactcacgctgtcaaaggcacgcccgattagaagatccgcgcgaaggccaagggagaagatctccatctgccacaacatttaatgctccatgttgtacattatttaatactagatcgctggggccacctgtcaggacctagcacccttgtacgtgccccccttggactataaaagggagggcacatgcgatatgaaggggacaaggactcattcaccctcagcaatacaactcataagtggatgtagggtattacccttcggcgtcctgaaccactctaaactcgtgtgtgttcttgcaccatctcaggctaaccctaggcaacccctttgttcttaggattaggcgggtgctctctaccacctggctagaatttac

SEQ ID NO: 105292 - DNA, 455 bp, Zea Mays
atgggatttccgaaacttgaagaaggcctttcggttatgtcgaaggatgatcttgctgatagcctggcatacaacagtataaaggtatggaagttaaccttgaagttgggaatgaagtattttacttgtcatgctcaattctttcttcttctttgcagggtttaattcttagtaatgccttgagggcacagaaaaacgtcgaagacgaaggctgtacaatagccttaacaaccttcgctcagaggtgattcagctaagaaatgaaggtctagagaaagacaagattttgatttcattggtaaataaaataaaagaagacgaagctcaatacaaagctgaagccgaagcccaagaagatgaggttgaagaccttcagagacaactggccgaagctaatgagaggtgcgcgctcgcacaggctaaccaagagatcagtgaatactggaaaaataagc

SEQ ID NO: 105293 - DNA, 504 bp, Zea Mays
attagctccatgatgtgtaagaggagctagatgaggccaacgctcatatagaaatgcaccaccaagacatgaacacaatggaggcagacgggaacaacgaggaggaggatcccgaggagattgagctagcttccagtctggacacggtctactccggagtgccccctacacctgtggccagtgctgcctctgctactcacggttagatgggttagaattaaacatgttaggaggatgggaagaccacatgagcttagctttggcaccaactattgaactaggttgtaggatggatgtcctaatatgttgtaactcggaaaaacctgtatgaacaatgaaagacgaatgaatgattatctttgcttggttcgatataattttgtgtcattattctcctcatgctatgaaggcactacttgaaatcttgggctgaagtaacagcggcaaaattcctatttttcagatggcagctagaccccgtcgtgggcaaaacgagcaagttcc

SEQ ID NO: 105294 - DNA, 610 bp, Zea Mays
gcccaggcatattgaaacggctgaagtgccgaagctgattgaggggtcttcttgcgcatctgagccccatggcccgggtcctgtcgaagctagagcgaagccagccgaagacccagaatcaaagaaatcgacagagcaaccgaaggctccaagcccattgcaaaggatggaactgcggaaggcgtcgaagattcctgtaacaacttcgaaaaggaggaggatggccagcgtactctgttatggaatccacgaaggcgttaactcctgcctctgccgaagcacctagtgcagaaagcgagattataaagaaatctgccgaagctggcacaacccaggctgcggttgaggctgggccctcagtccccgccgaagcaagaccttcggaggctcttgaggagggtggtgaagcaagaccttcgaaggttgccgaatgatcattaatgttaggaaaagagggtgctacggaagaatctgagtcccctgctcctgtagcatctaccaaggaattggaattcatagtgcgtcatgcttcagggaaaaattaccgaaggaacaaattgtagaagcacaacattacgccagggatctacaataccctcaagggtccttg

SEQ ID NO: 105295 - DNA, 399 bp, Zea Mays
cagaaagactgagtacaggtgaagtccagagatcacaatgaactagatcaaaagcctgctcaactctagaagaagtaggaaatgggagacgagtatgtcggtctagctgacaagcacgacagaggctctcagaatgtcccctactacatgaaatatctaaactactgttgagcttggtcatgacgttagatcctgaatggccgagacgacgatgccaagtagtggaggaggtggtggagaccaggacagatggggaggacgcgtcagtggaggaagaccgaagcgtgtagaggggccccgaattatcacagctggcgaggggggtcctggtggccagatccttcacagagaaaccaaaagggtcaaacttaatggaacaagaattgtcggtggtgaacc

SEQ ID NO: 105296 - DNA, 603 bp, Zea Mays
ggactccattgtgtttagtgcccacactacctcgggtaactgttttgcccacttgccttttgtcttgcagcagtctttcttcgattgcggtgaagatcttgccgtttgcaaattccacgagtccaatagactatgaatggtagactgatgtgaagactgtgcgtgtaccgatagaggcacaaaattctcggaattcttggttgtcaaattgttttccgttgtccactgtcagctcataggggactctgaagcgacagacaatgttatgctagaataacttttgtgttgtcttcgccgtgatcgtggatacggtccttgcttcaatacacttggtgaagtattctactacaacaaaggtgaatttgagattgccttgcgctgtgggtagcgggccgactatatcgaggcctcaccgttggagaggccaggtgttagtgattagttttgtgaactgcgaaggtgcccccgaccgaggtgagaatttctggcatgctacgcaggagtggactacgtggtttgttgtgcacatgatggttggctagtagaatccttggcgcatgaccttggtggcaagggctctgggtcttgagtgggaacctgtcg

SEQ ID NO: 105297 - DNA, 813 bp, Zea Mays
gaaaaacccgtaaagaatcctttccactattcacgtgagtctctgacgttttcactaaagccctcggagttctattctttacaaacctaggtccccgacggcgaatggtggcgagtgtgccctcaagcgaacctgtactggctggaatgtgcagagactgatgcccaaactcggccaacacctatttctacccttggcaactctaatccgaccctcgattgcgcaaatccggcccggagtccttctgcccacgacgacagcgaaacccgaggggaaatcgatgtgttcttggtgattcagggcagtctagttcaatcaaacaggtctacgagtagcaggaggcttaatgaaggctagaacttcaagcaaggatgcttgaactaacctgcagagagctggccacggcgaggtgtttacggtggcgtggaaatccaatttgggggaaaacccgaattaaggcgctatggtggactatcatgcgcgagagtgggtgctctgggttcatgatgagaaggtgaagcaagggaggtgctcaatttacataagtcggccatggttattccgaatttgggaggagagtggagcacggctgtgacaagacattgcactggcggccgtgccgtggcgccagccggtgcaatggctttggatatggcaagcccgagcatgccacggttactactacgtggtaaagagctacgacatggcgtaattgaggtcgccggagtaccacgacgacaccggcggtccggccacgtcgcatggctacaggcgcagttgataagcttcaccccgcgaccaaatccacttcac

SEQ ID NO: 105298 - DNA, 390 bp, Zea Mays
ttcatccttctttttcacgaacaaggctggacatccccaaggtgaagtttgggtggatgaatcccttgtccagcagttctgcaagcttggctggtggcattctgtagggcctcttggagataggtgcagttcccgactataattctatggcgaactaattatcccaatctggtcgcattcccggcaactcgttcggaaagatgtctgcttactcacagaccactgggatcttcttcaaaggtagctctatcatagagaaagcacatgaccgagtgttttcttggctgggtaggtacaaggtaaattttccgcaagtcagggaatggattttgatgatgcggtttgcgacatcgattaccatggtgttgggtcatccaatcagtccccaaa

SEQ ID NO: 105299 - DNA, 457 bp, Zea Mays
gtctaaggtcctaaggacagagctggttgatgttgccttctttggcggcatgatttaggttgttgttgtggtcgtggaatcaccggcagtgggcaccaatgttggtcacttgatttcaatcccctgaaggcagtgagaatcaaggcaacacgagttaaatgcatgaaccttcgtccttgatttaacacttccatgaagtgttagcacggaggacgaagatctttaaaaggagacatgaatgaaacaatatgaaatgaaatgacaatgaacaatagagtatgaaactcatctcatatgccttagcatttttattccatcatcctttgtatcaaacaaatttacaaacatacattcagctccgtgatatagggtggcatgaaggttcttcaaggctaagcaatgcgatcctatggacctcgaaaggtgaatttatacatggcattgttcatctatttat

SEQ ID NO: 105300 - DNA, 368 bp, Zea Mays
tgttgacacggtggagtgcgatgttgcacccatgtctgtttgtcacatgctactaggaagaccttggcaatatgaccaatattctcagcattgtggaagaacaaatcagtacacgctagatctaaaagggagaaagtttgtactcaagcctatgaaccctcaacaaatcatggttgaacatttacaaaagaaaactgaaattagtacaacaagtagaggaggagaagagcaaaagaaattgagtgccatccataattcggtgagtgagtgtacaagccaaattcaagagataaaaagaaggaagagggagaacatctagttatgctagccacaaaatctgagctgagagaagtgaggaacaacccata

SEQ ID NO: 105301 - DNA, 573 bp, Zea Mays
acgggacaatttggtgttccggagtgtaggcttcggtgaagtttaattggctggctccgagagcaatagaaggttgaagataaggtagaacaggaagcaatttggtaggtactaacctgatgagtgctggccacggaggagtccttcacggcggtgcgaagaacagggccgaatggatttgtggactgtgtgagttctccggtgaaattgagtcgattgctcaagtgcttgtgtgcgtgatgtggtgaagaagcaggatctaggctcaatttataggccgatggccggagttggatgaggctcacggagctataaacgcgctgacaagctcacccacgtgggcagagccacggcgatggtccggcggccgccgattaaccgggcagtgccaccgcaacgttttaacgccacgtcgcggatgatctttaccatggccgcagacccattcccaaccgcggtggcgatcttatccccggcgagatttttctgatcttccggtgaacagtacgctaatccgcctgatttcaactggcgattgctcttaattttgtgtggttgcttgcagactaatct

SEQ ID NO: 105302 - DNA, 395 bp, Zea Mays
ctctcaccttgaaatgatgttgcgccatgctcggttgtcgacgtatggcagatcggcggtggtgtatccatcacggcaaggaattgtcgtgccctccaatctaatctcatacgaggatgcgatgtgtgtcctgcccaagtgcagctgaaaccccaaaccccacgcttgtgttggtcaccccgcaatgataggtcactccgcatgactccggtggatgccctccccccttccacggcgatggcggtaacacacggtcgatgccacccatggacgagtagaggaggttgtgactacgcccttatatagcccgaggattgcatgggagccgaggataacgtgagttggatggggatcagggtccgcaccggccctaagcggtgattccattgttctgt

SEQ ID NO: 105303 - DNA, 451 bp, Zea Mays
ttacagatgggacttgtttcatattggcaagggcgtgatcttttgtcttcggtagtcctgctgagtagttttcctggcgtcgcctttaggctcatgcgtagtcgtacacctggcatggcgaaccaccttatccgcctggtatacaggaccctctagcgagtctgactctgaggtccccatagcgacgcttgatgggtactacacggcagagtcagggtatgtttggggccgtgcatggcgtgaccttgcctctttgtcagaaaccttgtgtcacccttccggcatgcgtaagcatacaaccggtatggtgtattgctccgtcctgtccggtatgtagattactgtagagactccggtgcttaggtcctccatgactagggtcggttggacccacaaggcgaagacggggagcggtaaagaccgtatgtggtgatgtgatgttacttcaaca

SEQ ID NO: 105304 - DNA, 478 bp, Zea Mays
ccggacactaggtttatactggttcaagttttcgccctagtccaatgtagtgctcactgtagtattactttgaggcgtgtgttacaactggtgtgcttgtgtgcgtacgaggagagagggattctcttttatacttcaagggacggtccttacaagtgtgtgtgagagagagttcttcagctacaatgcgcagtggacccctctagggtcaatcttgggtcatgcctgcgcacggtatggctccttctaacaggtcgtgtgcttccgtattcctcgcatccatctgtcgtgcaagaccctgtaccttgctctatgcccatgccgcaataccagatgggtcccacagaacgtgctctcggtaaggttgaggttcgtgttcagtacggcttcatcttccttgaactcccttgcgtcagcatgtgcgagcatgcactatgtgtgtcgtcatgtcctttctggtatgtgggtggaggcttcg

SEQ ID NO: 105305 - DNA, 600 bp, Zea Mays
taggtataataattttgagagagaacttataacaatagttaattatttgtggtgttgccagcagggcaaacttttctcctcatattatataccaatttgttctataaagcattatttcgatctctttgttgttcggcaaaaagagaagctttggaatagaacagacaaggccaagaattcatttttatctgggaaaaatcaccatataactagcttttcatgaaacaaatgatgataactgcttggcaagaatgaaacaagactggtatccgcctaggattcgtcttcaacaacagatattactgctctcatacgaagaaatcatcaggagtagagagcatataacaggtctctacaagatcttcatatttctatcacaaattatcatcactagtagtctagtggtcaagacatatggctcttctggatccgaggaccaaggacatgttaatgtctaatttagcttcaagctctgtggtgatgtgggatttcatagttatttgtctactcttctcacttctggtagatcagagatagataatggtaagcatgccaaagggtggaattcagtgtagttcgactacataaaccccaggtatg

SEQ ID NO: 105306 - DNA, 619 bp, Zea Mays
gggacatcttggagagctgatgagcaactaggtgaacacgctggttctctgggcatccaatggcctctaacttcctctttactgtgtgcagccagtcatcatcatcgagcgggttgctagatccggcgaatgtgggaggcttcagccttaggaactctcccattctatcctaaggtcttcctccaatcaggcgctggttctcgaggcttctagtgaggacctcaatgagtcgggtttggttggccagaacttgggctaggtctaatggaagcttcggaggcgcatggcggtgggtctcactcccttatccaccgacttctcctttgatacctaggggagtccttgctccaattcccgaggcggtacgcatggttttatccgaggccatatgctagaggggagaaaggattactactatgcatatgccatcatttttttcaaacatgttattttattcagcactccagttcattacaagcataacaaccaccacagactacactacgcacgagcgttatccgctagagtgactccaaactccttgaggagatcatcaaggctagacagggacacttcctcgatgtcggagaagctctctatccctagggagggtagtgtt

SEQ ID NO: 105307 - DNA, 300 bp, Zea Mays
gggccataccttgaaagcaatatgctcctggaccaaatctttggtgccaatgtagctacacactgtgttgaaggcaatcagacatgcttgtgctttgttaccacccacgatcgaaggtctcctaataccgaagcgcgatcgtatggggcgctaaattatgctttttcacatccccctctcactcaaatcattttaacataaaaccattgcttcatccatgagtccagccattttttccgaaatgttggcacatgacgcctcatgtcagactgatacatgaagttataacatccgaagttg

SEQ ID NO: 105308 - DNA, 400 bp, Zea Mays
cttgtcgtgggcggtgctctccgcgcctccaaccgccgcgtgagtagctcgcttgaatggccgatagctggtaatagctctctctcctgtcttgtatggactcttcttcgctattcgcatgtatgcacgtgaaaccaggcgcgcgagcactggccattgctcgtcgttgccactgcgccgccgtggaaggaaacagcgttgccgtgtacggtccgcggtatggaatggtgggagaaagatgatgagccgttgatctccaatcgaatgcatgagattggacacaagataacgattcactcggatttcatcctgctcgtcgattgcatgatctacgcgtgaagttagtcctcgggctgctgagcttacatccgtggattggggatcgatcggttgatatccg

SEQ ID NO: 105309 - DNA, 471 bp, Zea Mays
cgttgtgtcttttgtccattttatttattgtgattactgtcttcttgagttctctactcacttgcaatattgctcctaagtttaatactcatcctaaaggagcaatgaagtgaagagttctccttttcctttctcttctcatcctaaattggttttagttctcactaacatatattataaaccaagtttgtgttgtttagagttatgttcgtaggatcacctattcaaccccccgtctagctctaggtgttctcagaagccaaaaggcctgcccagaagaagctcttatacaccatgactttcagcttaggaaaacttccttccctgacaaaacaaattaaattttcatcatcaatatatccaagccttttcaaaaccttttacatgttgggatttatgagatattgcaccatgtcagtataactaggcttggatggatgaaggtcatactcttcttccccggcaacatca

SEQ ID NO: 105310 - DNA, 450 bp, Zea Mays
tacggcacggattttatgatcgcgcgatctaatccagagcgctcatcaacgaactgacgcaccagatccgcccagatcaaaatatcccagggaggtcaccgtagccaaatcctgaccacagctttgacatcagacggctgctgtgcatcttccacctcacgccaaagcacgatgccacaggatcttcgcccgcggtgggatctatcgtacgggtcttgaggtcactcggcacccaaatcctatccaccggagtgcaagcagaggtagcgggcggaaacagtggtgttcttaccagttcttgtacgccgcgattcgcagaccatcgtccatggcatcccgcaactccacagtggttgaaaacaaactccaacgcgaccaccagggctggcgcggccacacgcaccactatcgcgaggaggagacagccactggcgcgcaggagcattacca

SEQ ID NO: 105311 - DNA, 837 bp, Zea Mays
acggttgtgataaagattggatcgtacaacatacaaaaagatctaataaaattgtgtggggacaacttcaattcaagataacaacggacatagaaactggagagtatacatgcgagtgcaaacagtgggaacatacaggtttgaacatcttgtcttgattatactaataaaagtgcatatttgatatgttttttattgttatacaaaataatatatatcattaacaatataatgattattcttcatgatttcaggtctattatgtgttcatcttttaagagccttcatgcatctacaagttgaaaagataccttcaaagtatatattgcaaaggtacactgtctcatcaagacaagatgtaccgttcgaaagaattgataagagcttcaggggaaaggatggagttactaaatcatacagacagaaaatgttgctaacgaaaacaatgaaagttgttcgctaggtgtgtatttcaaaagcagggtacgacaaggcaatggatgtgttggatgagcttgatggtgttatatgccgattggagccagacattggatgtaatgagtcatgtgatgttagtgatgatgaggaaaactaggtaataaaattcaatttttgtaatgttaaactatttggaacatatgagtatgtatggtcatatattttttgtaacaggaaggagaaataaataataataaggctggggagggaatggatgaagatgacaattcaattacatgccacaaaatagtatgtacaagataaatatataatcttgcatgaagtagtgtatgtaatgattatatgaaatcattgtactaaaaaatattttataatgta

SEQ ID NO: 105312 - DNA, 283 bp, Zea Mays
gttctcgtgtgctgtcatgctgttttgcgcgtcgcgcacattgttttcgcacgtcgcgcgttttgtcttgcgccatgaattcgcctcgcttagaatcgctcatattaattaaattacttatttaaccaagagccgttagtgtagcagattaatcgaaactaggtaatagctctaatttacatttgataaatgtcgattaatacaagtatgtcgaattaaatattctagttcatatttggataacataaacgcaataacttatcaatcgtagcttcgatctcgg

SEQ ID NO: 105313 - DNA, 486 bp, Zea Mays
gccagagtgcgttccacagctagggtttctcatgacggggaggaggccgaaggtgctgaaactgccccaatctctgaagtgatgaagcgctcagggctggtagcatcggaggatgcacctgccgctgaagccgagcaggctgatgccgaagaactcgagtctgaagatgattacagcgcagtgccaactaaacccagccacctggagtttgggaaatccaccatttccgaagatgacatgccaaagctgataaatttgggctatttcagtgaagcgaagaaagagctggttcgttttggtggggaagagattactccgaagcaaggaaaggatgaagtagtggttttcaaaagtttctttaaagctggtttgagatttcctttaaacaagatgattgctgatgtattgaagaagtttgggatctaccttcatcagctaactcctaacgctattgttaggcttagcatttatatctgggccctccga

SEQ ID NO: 105314 - DNA, 630 bp, Zea Mays
gatcgatgctttcactcctattcttcggcttaaaatgatgttgatttcacttgggggacagaacaacaggaagcatttgatcttattaaaaactatttgtcttcagttctagtattgaaaacaccgcaaacaggagtaccattcaggttatacattgcagccgaagataaagttatcagagtttttcttacacaggggatcgaaggaaaggagcatgttgtgacctacttaagtgggaggctggtggatactgaaacaaggtataccttcgttgagaaattatgcttatgtttgttttatgcatgcaccaagtgtatgtgttatctattgtctagtccttgcactgtttctgatcaaaaccgatgtgattaaatacatgttgcaaaacccaattatgagtggtagagttggtaaatgggcttatgcacttatagaatacgacttggcctatgatcactaaaatatatgaaagatggggtcgtagcagattttattgtaggacatcggattgatgatgctcataaatagacatgtcatatctcactattactccgtggattttgtattttgatggatcagtttgtaatgaaggacaaagaattgacatcgtgctagtttcaccaagtaacg

SEQ ID NO: 105315 - DNA, 953 bp, Zea Mays
cttctccacattctcttccacttccacctccgtccgttccccttctcctcctcctctcctccccttccatgccctcttagcttctgaaggtctccgccacctcctgctagctacccttctgagctttcaagctttgctgaacgcacgcgggcggacgcggtaaagcatcacatcttctttgagagctgcagggaagagatcgataagagttctattttttgcaaaggcacacagacatatatagttcttctgctagatctcaccgccagtcagctcgcagcgaaggttccctgggctaccttgtcgctggatctgttgctggtcgtgttgttacttgtcaggcaaggtataatatatctccgtacagctaggaataggattgggtagtaggggggtacgcatgtgccagtgaagaaatgggaaggagctagtgtggaggcagcaagaattagggttggagaggttccgcgagaggagaaatgatgatcccggcgaggcacatgccgccgacgatgatcgtccggaacggcggcgcggcgtacgggtcctcgtcggcactgtcgctcggccaggtaatctttgggcttggtgagatcagaagactgccttttagtttcatctctcttttctttgggaaaatcagaacacgttgttctcttgtttcttctgcgctctctttcttgctctggcctctgttgggtaaatttcttcgtttgatttgaggtcttagtctcatcgctagctagctcagtactggggattagagcagaagggccatgtatgcatgtagtacttatcctgcaaggattagctttttccttggaaaccgagaagtctctggagagagagagagagagagagacgtgttatagtactcagttggctgctgttcacacatagattaggtcatcagagtgtacgtatgagacccatttctttaagactttgctgac

SEQ ID NO: 105316 - DNA, 392 bp, Zea Mays
gtggatttctcccgttcttgctgcttccatgtgagcgtaccctgtccgtcgtcgtccagctatatacacacaggaacccctgcctgcttcaccaaaggcgacatgtacgtagcgaatcaggcgccagatctgacgcacaggcacaggcacaggcacagcagatagaaaaggtcggacgtgcacgcacggcacgcgcccaccctggcactagctgctagtatttttactgttcttactgtgcggccaacgtgcgacatatacatgcccatccatatatgcatcatgcagtcaacatgcgtgtttgttgttctcacttctctcggccgccggattgacgacgatctatcagttcctggattgtttccattattctcctaccacatatatatcat

SEQ ID NO: 105317 - DNA, 404 bp, Zea Mays
ccagactttagtttgagcgagatatttgcctgttgtcccagagctgaaacccgatgtgaaatttgtttcgcctgtgtccttaatttcaccttcagccgaaggctacgtttgttttggtaggatgctgtttactgttgcgagagatccctgactgtcactcccaagtgccaatttgattgaatttgaggtagggtgtctccggatggggtctatggttatgtgggtgctatagcttgaacccagttagatctggcctgaacttcagcttgaaccatcaaggttgtatgtttttcatcagtagttctagccttcactgttacacaaattgcttttggtggtttccagattataggttttaatatggttgcacgatacctttatgctgactcatctactgtcagctg

SEQ ID NO: 105318 - DNA, 838 bp, Zea Mays
aacgcagcgaagtagtctaagtccttagaagattccttgatccatgaaaaaggactcccaaattcatccccgcccgaagaccacgacccagtgtcagacccctcaaacatattttcattaaaaggcattgctttcgcagccgtcaaggagttagtatcaacatcatcgaggtttgcctacgcaggcccagacatcggaacctgcacagcaaatgacttttagtaccacaaaaagagagacccaaaacgcaaaatccctaacgtatcccttccacctgcgccagagcagacgccgccgcagggtcctcaccagaaccagcctaaggcgctgagcacttcagctcccacctcctccgcgccacccgtccatgtcatcaagctctcaagaccggcgaggtcctcgacttcttcctcattcatcatctgcaaaggcaacaaagaaattcagttaaaaaacatatgccaatgttcgatcagccctctaccggacagtgtcacgaccgtgacgaccccacatcctatcataaagcgccctagtggaccgctttagcacatcatcttcgacctggaagattctacggtcaaagtcctcgtttgcatggtcgaagaccttgaaatgcctacatccctcgcgggacaaggcattcgctgccccctcgtacgtgacaagcgatgcatacgacatgagacccgtcacgatggatgggactaattccagctcctcctgcagccacccgagaaagcgaagacccacccctccccagatctgtcaaaaggggtggtctacgcgccgagctcgcggtacacatccatgaatagcgtgcgcccgctcaaccccg

SEQ ID NO: 105319 - DNA, 632 bp, Zea Mays
gtgctgaaggcatgctgcctaagtgtatgttgcaaaggctggagcaaactactgactctgcaggcctgcaatttcctttatgtgggctcttgattgttctctttcctcctggataaggtggtgtatcctagcctagacttcgctgtggtgtctcttggctgctaaggtctcttttagcctctgcgggctactgctgcgcatgcagaggctcttgaggagtagttagtcttcaatgttgatgccaaggtcttcatcgtcccaaaaaatttcttcttcctcctcatttgggggcacaataatcatagacattggttgagttttgggagtgcgaagccgggggcagtaggcatgtttcttcttaggtcgggccaaattttgcatggtaagggtgtctttatttgttgaaaggggcatggcttagggtctccaagctacaagtgtggacacttccctctggagtgaggggctcttagtggtgggattgatgagtgttgccttcctgcttgttgattacggagggggcgatttttgctgggggtggcggaatttcgttagtgaaggcaaccttggctttcttggtgttagcaatgaggattgccttcatgactttgacctggatgggaggagttgtc

SEQ ID NO: 105320 - DNA, 326 bp, Zea Mays
tattctcatgtgctgtcccatttgtaggatcttcaaagtttaggaattcaaatgtgagaagaacaacatgttattgtactgtacccactaaaaacagagaatgaattgagcaacataatttctttcgccacaagtatcactttcgtgtgcatactaattaattttgttttgttaatttgtgagtccaaggacctgtaccattgacccattgttatagtttctgaagtctctgattattgctgtcgtaactgtttgcatgacttcaccatgacgctttgtttggtctggtttcatcagatcacacagatcgttatcttagtttgtac

SEQ ID NO: 105321 - DNA, 1031 bp, Zea Mays
ccctcgggggctgggtcatcgctcgcgctacccatccgagccggatcatccccggcaacaccctcgggggctgggtaagcaccagcgctatctttgagggtcgagccctccgaggcagccacctctaaggctgaaggaccttcaaccacttccatgggaatagtgcaatccaggccagcctcctgacccttaagactgcgctccgggacgccgcccgggataactccagcccagcaccaggcacatcagtgcaaacgtccatcatgccaccatctgctggctcggacaacagatcatctggtaccatgtcttcaagagtctgatcaaagttcgccagagataattcttgtagaccgatgagggcagataaagctggagaaggaacaccactgctttccccgctggctacgtagcgtcggctgtttttccgaattagagggatttcatcctccccttcctcatcttcatcaacaacgcagacagtacacccattggggtcagcgtcatccagttcacacccattggggttaacagcaggcaggttgcacccattgggatcagcttcagcaaatgcagacactggcacttcctcagcagcaggaacagaaggaccagcatcctgatccaaactagacactcgacgaagacgtctcttcttctgtttcttcccctcggcaggagaagtaggctgattggctcggcgagaacgcttcggatgaacactgtcagacttctgaatatccaaagctttgctaacctctgggatgggcgctaccaccaatgttccagcagggactgcatcagaagaatcttcagctaacatatccagcatggcacttatctctgcatcactcggattcaaaggcacctcaaaatgaacctgccactcgtcgtcaggaatttcttcaagagaggcaaccaaagcactaacttcttcgagagagggtcgcactccaaggcccaaactgctatcaccagcaggagaatttgacacaaaactggtaaaggccttggaaggaggcagattccag

SEQ ID NO: 105322 - DNA, 941 bp, Zea Mays
cctaactcaaatttaaactcagagaaattccccaggttcgtcggggctttaccattcagtaataaaggcgtatgatcagaccgagatctatcaagcgccttcactgagacgttagggaatttaagttcccactccgggctcattaaaaccctatcaagcttctcaaacgtgggtggattcaaatcatttgcccaagtaaattgacatcccaccatatcaatttcgtgcaattctaaattcgctatgatactattaaacaatttaggccatcgaaggctgaagttatcattacttttgtcttccgcacttcgcatgatattgaagtctccccctatgataaacggatgagtctcagaactacacgcacctgcaatttctgctaaaaaatcattctttaaatcatcttgagcagggccataaacagcaaaaagggcccaaatgaatccatcctctttgtttcggagccggaacttacaatagaaattaccttcatcaatagctccaagtcataaacccccgaattaacccctaacaacatccctcctgatcttcctctaggtggcataaggtgccagaggaaatcgacgccactacaaaaatgtctcaaagtagactctgagaatgcactacgacctgtctccatgagagcaataaagtcgagtctatgttctctagaaaggtgagataagtaattgtgtttagccaaatcccccagacctctataattccaaaaaatgcctttcattttaaactaattttagagggtgtaaatggctttatagaaggacgattaacctttctatttgagaaagccttgttcgatttctttctacgcggcgcgacagaaagctcacaacatttatctaaagtggtcaactcagactcatcatcccacctatcagcagtgtgagataacgcaacatcaaactctgcttcctcag

SEQ ID NO: 105323 - DNA, 710 bp, Zea Mays
atctcttcccctgacattcctttgtcgtttgtgtgtggaggcttgcaggttttgctaactggatcaagagatttggagagtgaagttgggtttgtctcactaccgagcacagagagaagatcttgggtttgacgtgtccagagcacgcgtcccgatgccatcttctggtatgaggtagagaggttagttaggcacatttttgtcaatgggagcattaggattagagctaaggatcaaggtgaacgcgcttggttttggttcaaaggctgaaaatttagaaatctgaatttcagatttccccattgaacctccacttgaatggcttgtttggagtatttaataaactattttggccaagctttcataatctttattttagcttatttagtgtatttcaatttttataattggcctaagccatgatttcatgtttttcatggtctttcatcccttttcttcttttctacttaaatagcttaattagggttggtattagggtttcaacatttttccctcttttgaaaacctcatttgttttgaacatgattctttagatataaacttagtggatattttattcttcattttatttggtgcctcatgctcactttggcttacatgaaatgatggttcttgagttagcactgagaagaaaccctaggtgacactggggtgtcacatcaacagcctgaggcgctagcgccgcgcta

SEQ ID NO: 105324 - DNA, 391 bp, Zea Mays
tttaaatcagcttcaatttaaaacgactgctccgctagtagggcatagtggtcgcctcgatttaagtatgcgtgagcatgtcgcaccaccttaagtcattactgacttaagctaattgctccgttagtagggcatagtggtcaccccgagttaagtatgcgtgagcatgtcgcaccgccttaagtcattgccgacttacgccgattgctccgttagtagggcatagtggtcacctcgagttaagtatgcgtgagcatgtcgcaccgccttaagtcattgccgacttaagccgattgctccgttagtagggcatagtggtcaccccaagttaagtatgtgtgagcatgtcgcaccgccttaagtatttgccgacttaagccgattgctccgt

SEQ ID NO: 105325 - DNA, 517 bp, Zea Mays
gtaatacaacattgattgtgcaccaaaattaacacataaacaaccagaaatatatacatagtacctgggattttctgggtgtcctctgtttaggagagcttgtttttgtaatgatatttgacttgacatctatatcaaactttgatctgcttgtcacaatcggaacttgtgggaagggacttttatcttctttgcacggtttttttctgaagggaaggtgcagctgatctgaattagcgcttcaaagttggagcatccatgaaatcatcatcggacaatgtggatggagctgaaggaggatttttttacacgacaagctagtgcctttctacggacacgatgaactggtgctggttgtggatcaatctgctgctggatatggggattatcagcatgatgtgctgagctgctagatcgagttcgtcttgaaatgtcaacggaaaaaacctcctaacttgactcaatcgttaatctttttgcattagttggagggcgatcaacagatctcatggttaaa

SEQ ID NO: 105326 - DNA, 532 bp, Zea Mays
accatacccacgtgggtataggtatgggggtaaatccatacccaccggtgtaaatgggtgacccgatggggttatttttttgtcgtgagtatgattatggggtagtaataaccgatgggtatttacccattgccatctctacctgttctgttctgttctaatcttagagttgagaaagcatgcgtgccaaacagaaaggagcaggtcgaggtaagtcgacgagattagacgagggcacggaaagcagcaaagccctttccaaacgaatcatgaacgccatacagagcctagccctagcgtggaatggaactctcggcggaaatccagaaggaaaagagagccagggggaggaacagaaccgaggagaaggatcaagaactcacttgcgtcggcgtaaaataaaacccaatggaattctctgctccgccgccgcttccgaagccgaaagaaccgccgccgcgagcggagaatggggatcagccgatcacaacgaccatgagaattcagagttgggaaaaaaagaactccacac

SEQ ID NO: 105327 - DNA, 708 bp, Zea Mays
atcaactcatatagttgccactcccattcatccgaaactgatggctcgctacctctctttgtgacaaaccatgagttagaccttcctaggacttcaacacgagctagtgatgctcttaatgctccacatgtcagggtcctggccgctagtgtacctatcaccgactgtcccttgctccatttttcgctggagcaactacgagccctctacggaccggtctttgaactctagaattcatgagtgacttgtcacatatattttggtccctaccaaaggaaatgaataagttcagggtcttaccggagagggggtctcggtgtttgcttcatttcccgtgcaggagcgcttcaaagggtggcctcgtccagtgcgtcactcccacgaactcaacacaagcgggtcatgttgtgcaccgccgcccgtcgttttcttgaggggagctgagctggaggcctctgaggcccttggcaatatcgatcaagtacttcatcgagaacacgcaaggccctacctagcgcgtaaaatgtcggtgtttaattttgaaccagctccaacaagtaaattgtttgtgcgtgttccggggtctggatggtgtgcttattgggctcgagatttaaactggttcggacagaatgtccctacatccagtcttcgaagactcacgctaccgtcaccttgttgctcaatgctcgtagttggggttacaag

SEQ ID NO: 105328 - DNA, 4228 bp, Zea Mays
cttcacttgagcaacatgatggccgccgcgtgagactgagcgccgcacgagcactagtacaggaacctggacatcaacgtgaacatgaggtaaagattgactgacgagatcaatagatttcacactgggtttgagctgtgagacatggaaaatagggtgaattgacgaagatggaggtaactcaagtttgtatgccacacttccaatccgttgcagtattctatatgggccaaagtacttgaaggaaagcttgtggttggcacatgctgcaactgagctctggacatatggttggagcttaagataaaccatgtcaccgaccgaataaacacgatcagtccggttcttgtcagcttgggatttcatgcgctgctgggcgcgaagcaagtgctggcgaacaatttgtgtcatgagctggcggtgtgataaccattcctgaagatcggcatgaggaatggcgtccgaggcggaaactcccagactgcgaggggaacgcccatataagacttcaaacggtgaagtgcccagggaagaatgtaatgaagtgttgtaccaatattccgccagcggcagccatttacgccagtgatgtgggtgagaactcacaaaacaacgaaggaatgtttccaaacattgattaacccgttcggtctggccatccgactgtgggtgataggacgaactcattcgtagcatggtgccagacaaccggaatagctccttccagaatgtacttgtaaaaattatgtcacggtccgagacgatggcttctggtagaccatgtaagcggtatacaaaatccatgaacagttgggcgattttcagagcagtaaagggatgcgccaatgcaaggaaatgtgcgaatttagaaaatttgtcgacgactaccaggatgcagtcatatctcccagatttaggcagtccctcaataaagtccatcgaaatcacttgccacgcatgagaagggacctgaaggggttgcaacagtcctggatacttggacctgtctggtttggcacgtgcgcagacatcacatgagcgaacgaaattgcgaattgtggatttcatagcctgccaagcaaacaattgtttcactcgacgatatgtaactggaaaccctgaatgccccccatggcgctgttgtgcagagcagcaatgactttggtctgaagggatggactgtgacccaaccaaatacggtccttatatcggatgatgctgtttgaaagagtataatgaccggtatcagatgaaccagcagataactcggtaagcaattgaatggctttagggtcttgattgtaactggaaataatgtctgataaccactgcggtgtgctaactgaaatagcattgcagtccagggaagtgtgaggacgtcggccactcggttggtcgatccttgcttgtaaactatttggtattgaagacctaacagtttggtaaataccttctgttgccagggtgtctttagatgttgttcattgagctgtatcagacttttttgttctgtaaaaatctgaaatatgccatgttgcagataagacctccagtggtcgacggctagtaaaattgcaaggtactccttctcatatgctgacaggcccatgttcttgatgcccaatggtttgctgacgtaagctagagggtgtccatcttgcaacaggacggctccaacactcgacccggatgcatctgtctcgatggcgaaaggatgagtaaaatttggtagtgctaaaactggtgccgatgaaagggcagttttcagcagagaaaaagccaaagtgtgttcatcagtccatacaaagatagtatgtttcttcaatagattggttaggggtttggcgattataccgaagttcttgacaaacttacggtagtatcctgccaaaccgaggaacccacgtaactcctttgcattctgaggtgttggccaagaagatactgcctccactttggttgggtccgtagatacaccatccttgctgatcacatgacccaagtatgcgattttctgttttgcaaaggagcacttagacagtttaacctgccaatggtcctggcgtaacagctgcaatacccaatctaggtgcagaaggtggttgtcccatgtatcactgtacactaaaatatcatcgaagaacaccaacgcacattttctgagaaggggtttcagagtgctgttcattgcgccctgaaaggtagcaggcgcaccagtaagaccaaatgccatcacacaaaactcgaagtggccatgatgtgtctggaatgtcgttttgtgctgatctcgtgggtccatccggatttggtgaaacccagctcgaagatccaaggttgagaaccaagctgctccaaagagttcatccataatgggtactggaaatttagccttagttgtgagtgcgttcagatggcgatagtccacacaaaaacgataggaattgtccttcttgaccaaaataacagaagaggaaaaggggcttttgctgtgttgaataaggcctgagctgagcatgtcaccgatctgcttctcaatttctgttttaagagcaggagcataacggtatggtctcatttgcatcggcctagccccaggtatcaaaggaatccggtgatcacaatccctgacaggaggaagaccttgcggcacctcaaacactgatgaatagcgatccaacaaggactgtaattctggtggaagcgattggatgatatgttggtcagtgtctggaagctgtgaaaggctgcacaattgaaccagagcaccctgtccatctgaagcttgtacgccatataacttgactagagaagaaccacagttagagacaaccatttatctgcccaatggacccacatcaggctatgttctgataaccaatccatgccaatgatcatgtcaaatggttgaaggtcgagaatctttagggtggaagtaaatcggtggccttgaatggaccattcggcattggtcagttcagcacaacaagacagcttagacccattagcaacttggaccaataatggctgacagctgcaacattggtacatgaggtactatggatgaactgataaatgaaatggaactgcttgaatccaataagataaggacatatagctccccgatctctcccacgaacctcatagacttggactggctatcatccctggacaaggactgacataaatgcaggcaattaagagtttctgactgatcagctttagacatgttgtcttcatgcggtagctggaattgttgccacagttcttccaccatgtgtaactgcactgtgtccggacattggtgacctcgagaatatgccaagccacatttgtaacaaagacccttagccttactgtaagcatatactgaagacaaacagtcgggttgagcagttgctggagtcttaacgtcatggtgagtgggtgggatccctgttggtggaggcaatggcatgggaaccctctgagacgtcttggaatatgatctggagtcgaatttgctaaattcccttggcttggttgtcgccccaatttcatcctacaattgggcaagaacataggcagtatccatatctttgggacgttgaatcataacaatggacttaatatcatggcgtagaccatctaagaaacacataatataatataatgggtcggacattggttggtaactgtttagctggtctaccaattgagcgaattggtctatatactcagccaccgatccaagctgtttgatgtgaaacagctgtctgatcaagatggcatgctggtctttcccgaaacgctctcggagcaaaaacccaaactttgaccatgatatgtggggtagcttatgttcaacagattgaagccatcgagatgcggcgccagaaaaatgcatcgtagctaccttaatccaaactctaggatggacctcatacatagcaaaataattctcacagtgggtttgccaaagcttggggttatcaccatcgaaaggaggaaaagacacacggggcagctgaccaactctgaactaggatgaaaaccatgagatcgttgaccactgctaacggaatttgggttgatgtgctgaaatggggggtgaaacaagaattcgggcgtactgttgtgtgggaggtgggtttgggcgtagacacgcccaaagccagactcccgacgttggtgttcgacgcggtgccccattgggccatcggccttgccagtggcaggtggtggacgtccc

SEQ ID NO: 105329 - DNA, 412 bp, Zea Mays
tgagagatgagaagggtaaaggcaataagaaacaaaagcacaacaaaggatgaggttacaaactcgcgagccaaagaagaggatacgaccaagagagggaaggtatgagacggaagaggggcgattttaaagggcaggtatgagacaaacatcaatgtaggatatagaggtgttaagggtgcatatgataataattaaaagcatgacaaaggatatagttaaggcaagactcacgaaacgacaaggtggggaaaacaatcaagggtaagataggtaaggttccaacagaagggttgaagtaacagaaattattaccgagggaagttatgaggaaacagtgagatcatcaaggatgtgtgaaatagaatggtcgctcagggaccatcaagaagcaagggtgatcaagggcata

SEQ ID NO: 105330 - DNA, 1849 bp, Zea Mays
cccgccacaactctagtttcctatttactcttgcacaactttcatcaactagcactacatcgtatgcaaaaaaacatacaccaagggatatccccttgtatgtcactaatatgcaaccacattggactgttggacatattaagagagaggtgaatcacttgaactcaataagaaaaaaaaatgtgaacgttgttgtaaatgcaaggtgggttgtttcttatgttactccctcctccccaaaaagaaagcaactctagacttgagacaagtcaaaaaaattaagtccggcaaagttcatagaaaatagtatcaacatttatgtcgccaaataggtttactatgaaaatatatttcataaccaatctaactatctaaggatattaatttgttatcataaatattagtatttttcatataaatttggtcaaacttcaaactgtttgacttgtcgggaagtaagaattgcattcatttttggacgagtaattaaagaaaccaaagttcaatacaatgcaacttatgatataaactatactgaccactcctgtagaattctgtaggacaagagatctctcccaagctgactcatcaagcatttcaacagatttggtttcttcaaagtaagcaagcccttcacatccagtggcttcccatttcaagcgaagagaagatgaattagcgaaaaatcttccatttacatgtatactcgcagcagctagacgtatatttcttccgttggagattacaatgggtgatgcttgcaatctatctggaccacggtcagctttcctagcagcttccaatatatcaagtcggttttctgtacagtcaacggaaaccatttagtaggctgggaacagtacaaaaactttcaacatggacatgttgaacttttaaggattattaaactgaattttaatgaaaagaacaagaaagtaccattttcatttgctatcaatgttatttctgatgggaagtcacaaataacagtgaactctgatttggaaattgcaggcacaggatgatctttaccaaccatgttcccacgtgaaaacagcaatttctaaaaaaaaagtgaattaaattaaatatatttcagtgaatcaattcaccagaatatattgcaatacgcagttcataaacaaaaatgcaaagatccatttgaagtacttacatagctcactttgcttaggcaagatactcgatatagtccactagatagtttcttcacagcggtagaactaataatatgatttttggatggatcaataacatcaactgtttcaacaaaatcaataacttggtcccaacgctcaggtcctccgaagataaggacatccattgttgatccaggaactaagtacagctccttgggagagttgttatccatgttcttaatcctactatgaattccagataagtcaaaccagtacccaccaaaatgatttccattccccccttggagaactacaagaggataatatgcagaaatttttgaagttgcctccagagaaatgggtccaccaaatgtctcaatatctgaatctgaatcaacagcaaatgttgcaactattgttgatctgccagcagcaaatgcactcagagagacccaggcacaaggattgccattttgtccccaataaccagaattatgttttatgtcgtcgatgcttgaggcctcagcggtgttaagaatgtgaaaggcctcatcctcggatagtagactccaccttataaaagcattaaaatgggtacattgtgagaatgggtgtcctgcagagagaaacggtgatagctcatttagaacataacagtttgaaggcataaaagcattaaaatggttacattg

SEQ ID NO: 105331 - DNA, 1144 bp, Zea Mays
cgcaactatggggcttcgtctgccgctggtaacgacctccctgccttccttcccggggtgcccttggaggcccccaaaagctgggtatgggcatcccaaaggacgaggagaagagaacagctagaggtattgcaactgtgttaattcttcgtggtcttggggtcatgctggtgggtgtgattggtaattacctccaccgggggtggctcctgtcatggtcaggcaattgtcattatacaatatgactgtcgaggcactgtcaaaaggcactcggttgatcgccccacccccagcgacacgaagattgcttgctggctcacggaagccaaggaaatttgcaaagatgcagacgaagccgtcatcccatacgttttctcgattctaggctgcccttcgatgcatactgagctaggattcatggagtttgagtttgtcttgttcccctactttccttcttcgtctctactctttgtcagtttcgcaccctctgatcctccttcttccttcttccagccttcctccccggtgctgtgggacaacctcattcccttgttgaaaagtgcggtggagaaggagacgactcatgcatgggtagagtagtaatggaaggacaaaagagatagggtggaaaagaagtggtgtagggccaagtgccaaatgcatagtgaccatggtgtcgagagtgactcaattgatgaggatgaagataatgacaatgcgagtgtgggctctgagctttgggccattcctgatgcctccctcgatgcctcaacaactgactctgtctcgacttttcctggcgaggtgccgagtgcctttcccatcgttgagaagactaagttcccaacactccctgccctttttctagaccaattgcctcggtagcacttgcccctctgcccatcgtgccctcatccgaccggccaccgagggtagcttgtgggggaaattcttctgcctctggtgtgtcggatatctcggctaacacaccattggggccacccacactctcctccaaggtgggtggcaggactgatgcttcgtttgggtgccacgggggtgaggcgccttttggggggcaaaggttcgtcagggcacgactaatcaggcgaggaccttatgggtccccatcgtctggctcctt

SEQ ID NO: 105332 - DNA, 456 bp, Zea Mays
cgttcttgattcttcttctgatgatgatgagggcctggggatcccgacaccgcctcctgtgccacctcgctcacatgatcacgaggtgggtagctccaatgctactcctgctaccccaccaactattgaccctgctttggccgctatccttctgtcacttacacagcagcaggctcatctagcagcagagcatgctcgacagacagctatccagcagcagatgtccgaacggatgctgtccatgtttcagactatccaggatcgttaggacaccctttagcagtagctcttggcagatagggcagagcaccgggccttcatggcgcatatccttcagtacaccggtgtttagctcccactagtgtagtctgctcctcctccagctctttaggctgctatcattccagcacttcaggcaggaccccactccactcatctggtcctactatctctccg

SEQ ID NO: 105333 - DNA, 444 bp, Zea Mays
cagccggactagcataacgagagtaaaaatcgaaggcgcattacatcagtccgaaagtctataggcgcagccggaccgacacaataatataccagaccgggtgcgcaacacctcacgaacacacccagatgcgtgaaggcagtcaaccttatcatacaaactacagttacacgcattcagcgagagcatcacaccttacataggttcaaccttcggaatgatccccatctccctatagttaaatagcattatcctcagctcctcaccctcaaaaagccttcgcaactcaccctcacccatactcaccccaaccggcgaggacaacaattcctgcctaccagccctgcccacacgaagacaaccaccatcaaacccgcccactctacgcttcgccaccgcccttcgccgcctacgcccaacactcggaccaggcaaaatttcagc

SEQ ID NO: 105334 - DNA, 441 bp, Zea Mays
cggcagcgatagcctctgcaagcgtgggaggtacaggcagcgggttcagagtttcctccccaccacgggaagttccagccccatcctgagcacgagttctggacgacatctgaagaagaaaacatacttgattattacatgccacgattacacaacctctgttacattattccaaacttgttctaattatacatactcaacttatacaactcacttttccttatttagattacataaggaaaccacatactactacactaatctagttatctatgtccttggctgctccagctccactgctatcttcaggacaacgatcattcatgatgttcatggaaggaggggctccaaagagatccaactccccataaggtcctccgctagttgctcctgatgcaccagctcccatcgccgcaacctccggtggcatgtttggatgca

SEQ ID NO: 105335 - DNA, 418 bp, Zea Mays
gcggggtcggacatcaatcgtgacgtccctagctccccaccggtgtcggggattgaacatgtgccgctgcgagcgaatcagttggccgttgtcaggaatcttcaaccgcttcaacgatttggtggtgctcggtggtcgcgaagcttctttggctcacccctcacatgtgtgtggccttattggacagagatagccttccgagctcgaccaattgctcatcggtgcaatggctccaccacgggcgggaccactgctgcagacccgtttcactcccttgccatcaccggtaatatgcatgtccttgtgttcgccatgtcccttattacatatcgcacaccgtggattaggatttagggcttgtttgtgtagcttcgccgacctccggccatctctccgccgtggaggattgttgcgccgc

SEQ ID NO: 105336 - DNA, 510 bp, Zea Mays
ccctgtatgagactaggaaagtgtgcgagccccctcgggcttgctactacatcactcgcattcatgtcagggtgatggatgcaggtgatagagggttttggactatgtcagcacatgagtctctgacgctgctatccacctatgttgcttcgatcagcgatgctactaggcgaactctgtggtccctcagccacacttgccggcagcagctgcacaacacgaagtacatgcatcttcctctgcgtcttcgtggagaaagccagaccaacattgttccaggtggagctgaagaagatcgcctcaacaccttagctggtgtggtggcaggtcttaacaccgacctagacagtgctaccctggacctctctagagtacacttgaagctggaggatgcacacgcaaggattgcagccctggaagttcaactagaaggaagggatcccccggaagctcaagtccctgccatggcgttgtcccctccccgcaagaggatccaagaaccaggatcca

SEQ ID NO: 105337 - DNA, 447 bp, Zea Mays
taggactttgttttggatccgtttgcaatctagagaggcaagataggtgtcgacatatttgtctcccacatttaataataatctctatcatttcccaaaatgaaagattcattgtaccgtattcccagcacaatgatattgtgcgcattactaggaacttcatcatcaagatgaacctcttcgtgaggcaaatcaccatcagggtgaattaatcggaggaaagctatcacagaccacgtgaatctgcaatcagaacatatgctttgactaaggccgatggatcatatttgcaggcgtccctgcagaatagatcaaatgccaataagtcaaatgtggatatgatattaatcctggatatatccacatctacatcaggtagaagcattcaaacctatttggttactcctcaacgatttctggcaaactccataatcacaggcgtacaca

SEQ ID NO: 105338 - DNA, 281 bp, Zea Mays
atgaattgtgcaagttgaacctggaagttgttgcttcaggtgatttaagttatatctcggtagagcccacatttcaagagcaaatagtcagggcacagattgaggataagggtgttcaggttatcaaggaaatgatcaagcagaaggcagagaaatacaagtgcttccgtcaggacagcaagggaattttatggtttggagatcgattggttgttcccaaggacctggagctcagaaagaagatattagatgaagctcacctttccaaattctccatgcac

SEQ ID NO: 105339 - DNA, 537 bp, Zea Mays
tgaagatctgttaagagcatgtgttttagcttttggtagaagttgggagtccagtctaccttacgcagagttctcctacaacaatagctatcagtccagcatcaagatgtcaccattcgaagctttgtacggacgaaaatgccagacccctctcatgtggtccaacgtgggggaaaaagcactagaaggacctgcttttgtcaaggaggcagaggagaaagttgcactgatccgtagaaggttgcttgaagctcagagtcgacagaagagttacgcagacaacaggcggagggaactccaatttgaggaaggagacttcgtctaccttaaggtttctccaatgcgtggggtcagaaggttccaagtcaaagggaagctagccccatgttttgtaggtccctatcccatcattggcaaggtaggacccgccgcataccgcctggaactaccagaatccatgtccgacatccacaatgtgttccacgtatcccagctccgcaagtgcctgcaagcaccagaaagtcacctcgaggaaga

SEQ ID NO: 105340 - DNA, 583 bp, Zea Mays
cttgagaatcatgtagtcatgcattagattgacatgcaccaaatttaagctaactggaaagtggggcaaaaggttgaggcaagcaaaatattcaataactctcatttgataacaaaccaaaagaatgatatctgaacctgttaaaactacaaagcgggaataagtttagcttgttaccgagtgcacaaatttcagggaaagaatgtcgcttttagaacgacatagccacgacaatccccttgtttccaaatagagcagaccagcaccaaggtccgaacctagaaataagatgaacaagtgaatcccaatcaaaaagatacaaaagagtttataccatctaatttccaatgagtgtgtttttagattctaacaacttgtgctcattctttaaagacttttagagctaccaatgtttacacttttactgaaattttttatccattcacaattcattttcatatgtcttgtgtgtctgaagcttttactctatgaatcccttcaattgctgcattggttatagtatatatagccctaagaaaaaggaacaatttcaaaccataaaattctgcaggctaatattttg

SEQ ID NO: 105341 - DNA, 299 bp, Zea Mays
gctgataacattgagaaccaagtccccaatgactagtttgactaggatgattctatctactagcctcttaacatctactaccccatctttaaggctcttttcgatcaagacgcctactccattcttgtttgctgcagtccccatgtaccacaacttgaagcatgtgccttccacttccttcgccttctgtcctttccacttggtcccttgaacgcataaaatatttactcgtctcctcaccgcaacgtcgactatttctcgtaacttacttgttaaggaacctacgttccaacttccaa

SEQ ID NO: 105342 - DNA, 351 bp, Zea Mays
aacaacatgctacaatcatcttcatgatcgctagattcttcatcactagaagaagtgtacttaggagtatttatagaatataccttcctctcttttgccattaggaaagtgtagcattcattgggaagagtgaagatttgtcgaaggcgatggtggcgagttcctcgtcgttggagtcagaggagcagtccgaatcccactccttgccaatgtgcgcctcccctccttgtagtatttcttcttttcagccttcttcccattcttgtccttctcatgttcattgtcatttttggaatagttggctataaattgactaaacttattgcacttgaagaagacatgtttcctctt

SEQ ID NO: 105343 - DNA, 293 bp, Zea Mays
tctccaaaatcttatatggaccagcagcacgtggcatcaatttagactttcttaactctggaaatctatcttttctcaagcgcagccacactaaatcacccacttcaagcttaactggttttctaccttgactaccagcaattctatatttttcagtcatcttttcaatgttggttttagttgaagcatggagtttcaaaataaagtcagcacgctccttagcatcactatgtacttgctcggtagtaggtagaggcaaaagatcaataggagcacgagggttaaagccatac

SEQ ID NO: 105344 - DNA, 910 bp, Zea Mays
ctgatcatgcttgttgtctgaaactgcattcttgttgttgtctgaaacaaccattcttgttgttgtctgatcatgctgttccaattacccaaggcctgagagcaactccaaaagaatgctaaaaacttttccccaaaatcggattattgggggcagactcaaacttgttaggggtgtatgacgctgtttgctccaacagttctccaatcaaaacactaaaaccaaatctgggtcaactcaaaagaagcacatgtgttgtttcagcctttttgtttgcatcggcccttgtttgaaaattacggcagtgttgtctcatgcgtttggaaacctgtatatgttcacgcacattccctatattagctcgtttctgtggcaaaaaagtttctgtcatcattggaataactttgcgaatagatgatcatcatgctcataaattcaataattcactcagtcactaaaatgtttggataccagaacttaaatcaacaattcacccacaatcactaaaatgtttggatacctgaactaaaaatcaacaattcaccatgttcactatgtttggatacttgaactgaaatgttttaataatattaacatgtgtagcacacaacccctcccctgttcccagcgcattaagtaatagaacagggtgactcatgaaagtgctcatagtgctatccaattttactattttagcaatcagttcagtaaaaggacacaatgaaatagtttctctaaggctgcaatgaattgactaatcattcttttcttctaaaatataaagtcggcattagtttgatggggcatcttttgagtcttgttctctgaattctaaatagaatgcaagcaaattttgattggaactcaaaaagctctatgacttctgaatattgtctattttgacggcttg

SEQ ID NO: 105345 - DNA, 450 bp, Zea Mays
gttgaagtgctcatgagaaccttttaactttaaaacgtttaagcgagctttaaaacgtctttttaaacaacatggacaaaatatgaatataacaaaatttcacataataatgtaacatgtccataaccacactaccacaaatccacaataacacaagttcaagtgttcaactaatagcaactagcaagtgacaaccacaaaaaagtggaatgaaatgtgcaatagtccacaatcacaaacatagcacaaaagcaactaaagtggaatgcaacgtccacaaacacaaaggcacaaacatagcacaaaagcaactaaagtggaatgcaatgtccacaactgcaagcacacgagcgttactcaatctccctctatcatatctcaataaccatcatccaaatcatctataccaccatcattcttgtatttgtcttgctcatcaccatagccagc

SEQ ID NO: 105346 - DNA, 793 bp, Zea Mays
tgcaacaatgctggtctggttctctccacgaatacgcagaggaagatgcctgtacttcgtgttgtgcagctactgccggtaggtgtggctgagagaccacagagttcgcctagcagcatcgctgaccgaagcagcataggtggatagcggcgccagagactcatgtgctgacagagtcctgaaccctctatcacctgcatccattaccctgacatgaatgcaagtgatgtagtaccaagctcgaggaggctcgtacactcgcctggtctcgtacaggggtcggacgtaggttcccaacgcgtgcagaacatcctgcagcaggttagggaagtaccctgtctcgaacattgaggtgtaatgttcagtgacaggccataacccccacgtagtggtcctactgttcttcgttggcttcatcgttgaggttttcctcatcttcttcttcttcctcgtcgtcttcatcatcgtcaccagagtcgtctgggtcgtcgccttcgggagcaggggcttggactactggtgctggcggtgctgaaactgacgatccagctgcgaaggctagtgattctgccaacggggtgggcgtaggcagaaactcctccgagctgtcctccagaatgactccgttctccacccgaatgcgagggagatccacaggaatttcctcgactaccactgggtagacaggaacttgccgtggcggagggatgtagttggtgttgatccgagtggtttgaatggtacataccatctataaaagaaaatatcaactcagttgatttttaaagaggta

SEQ ID NO: 105347 - DNA, 904 bp, Zea Mays
caacaatattatataagatatgatgatgtaaaatgacatactctaacaatttcatcattgcatagcataaaatatatgatggaactagctattacaataatgatcatcatcacataatattgttcatggccctaagccatcatcacaaggatacatgttcatggccctaagccatcaatccttctccccctttttggcaactagcaccaaaaaaacaggagaagagaaacaaacacaaatcactaggaaggggatggatcaaagaatcgtgacgccagattgactgcaaagttttcctccccagggtcagctgggggaggagtgctaccggaaggatcctggggggaggataggatgaagatggacccggatccccctggtggggaggcgggacgaactgatccctgtcatcaaagaattcttcagcttcagcttcttcatcttcagtcgtcatgaatggaactccataagtttgctgatgccattcatttatttctaacggaggtgcatggaggggcatgtcaggtgagcggggagcaaatgggatacccatagatgtagccagacgacggagattgtcatcagtctcccgctgtcgcctggccagctcatgaacatcagaagaaatattcctgcacatggagaagaaagctgctatcccatgagccaatcttgctccatgccgcgaccacgaccatgaccatgtggtgtgggagagccacgactaggagaaggacgagagggaccagcagcagtttgctcacgagagcttgcaggagccttcctcaactgccctactggattatttgggtcaatccagaaaagggtataggagagatgtcttgtgcccttttcatatcgaaattgggtgaccacttcaatcattttcatgatgaagggggca

SEQ ID NO: 105348 - DNA, 307 bp, Zea Mays
gacgactgtagtcacttctaccctgcaatattcttctggaatgtcgtttccatggaacttgcgtcctatgatcgcaaggactgtggctactttctttgtacgctgattgttaataccatatcttataactagtgtgcatgccacaggccttgtgatgtcatcaactggatagcagaccttatttcccgttgacgcgacagagcttgggatggtcgtaccctcggtggaagccggcgtttgagctgctggaattatttgcatctgtggagtggtcatctgttgaacagacatcacactcgcaatcgcc

SEQ ID NO: 105349 - DNA, 618 bp, Zea Mays
gttcaaatacttagttacattcttcatactactttgttgtacctataactaccaccaacaaagcaatcagcttaagttgggatccgactaagtcgttgttagatgctcagacatatagaaaagggtgattactaaaccccgccaacagagcaatcaccttaagtcgcgattggacttaagtcggtgttacatgctcacacatatagaaaagggtgattactaaacccctgccaacaaagcgatcgacttaagtcaagatccgagttaagttggtgctacatgctcatgtataaagaagaggttaattactaaaccccgccaaagaagcaatcgacttaagttgggacccgacgtaagtcagtgctacatgctctctcacagagaacaaaacagaatcctaggttccttgaaattcgatgcttgcatcacggagagggccagtattcaacaaacactaaaaaatacaatacaactaggagctataaagttcaacctaacacatagccaagcagcgccaccctttacaataccctgacctatcttgggaagaagctcctgcatcaagttctgacatcaaagtaatggccatggtaatatcatcagggacagtaacatcag

SEQ ID NO: 105350 - DNA, 432 bp, Zea Mays
aaaaaaccaacgtagagaagattgcaaagcaaacgagatgctggctgggatatctgagaactccagtgatagtgaaagttttgatgtagaaagtggaaatgaagatgccgaagatcagctctggagaccaagccatgttgtcttcgggaaatcaactattaagcaagggtagattgatgcaatgaggtggaggtactttcgtgatatctcaattgtgagagctggaggggagaataatgtccctcttcccgaagccgacgaagtggtattttatagaagcttcatgaaggcagggcttcggttccctctgtataaattgatggtcgaagtcttaagaaccttcgaaatttaccttcatcaacttactcctgaagctatcatcaaggtggggatctttatatgggccatgagaagccagggactggaaccaaa

SEQ ID NO: 105351 - DNA, 449 bp, Zea Mays
gcgacagcgatccttctcagtaggagatctcgtcctccgccgaattctaacgggggagggacgacacaagttatcacccttatgggaaggacccttcgtagtagcagaaatcactcggccaggatcatatcatctcactcagatggacggcacagaagtcgggaactcctggaatatagaacacctcaggaaattttatccctagctgtatttcaaaagctatcggggcgacgatgtactctgtataatggaaatatgtcatcaataaaaaaagggcttcaaagatactcagtttgttcatgattgacttgcattcttacttaactcggggtgaccactatgccctgctaacggagcaatcggcttaagtcggcaacaacttaaggtggtgcgacatgctcgcgcttacttaactcgaggtgaccactatgccctgctaacggagcaat

SEQ ID NO: 105352 - DNA, 304 bp, Zea Mays
gtttgtcggatggtagcggatggtaatgtccaaactgacccaaaacaaatctagactagcaacctaattaggcttgttggcgaggcaaatgaaggatgaatggggtcggttttgtggatgtgattggtttatggagattgagtttacgggacagcaacggatggtaatgatcaaactgacccaaaacaaatctaaaccagcaacaagattttgacctaggacacaaactcagaactgcaatctccaaaactgaattgtccaacggctaaggagatagttttaggtcgggataaacggatcgtaa

SEQ ID NO: 105353 - DNA, 534 bp, Zea Mays
gaagccctattagtggttacttcagctctgtccttctctggagccacatcagttataattccgtcaatctctgacattatggtcccgatgttttcagcttcaagcacaacttcatcagctttggcatcggtattagcttcagcattagcgggcacaacaattttttccgttgaggttaggggcggggtcttatggatagcctttattatggccatcattcgccatttcttctgacccctagcatttcccctagttaccgaagcagtcttcctcccctccgagctttgtttaatccccttctcctttgactgcaataggctagtcagatctgaccccaggggacttagcataacaaatgggaagggttcagtcattacctttaatatttttgtaacaccggcagatgaagatgatcaagtactggcagtcttttctggtacatcttgtacctttgtctcagcagaagccaacatggcagacttttgtttcttgggagccgaatccttcggttctgcccaaattttctgtttttac

SEQ ID NO: 105354 - DNA, 488 bp, Zea Mays
attggccacaagaaacgtacccatcataaccggctctccccccggtgtagtggccacttgagtgtagtatattcgctcagtcttcttaatattcttgcccactgaattatttgccatgtttcccttgccttgatttgagctccctgagttctgctgattgttggatttgttctgcctcggatatgggcagtctttgataaaatgtacagacttcccacaattgaagcagccagttgaggaactagggacggcggggaaacgagcaccaggggcactcggctgatttgttggagtgggggcggtggcagggcgaatgaagacaggctgtttgaatgggtaggagggtggacgaggtgaagaacgattttgattgaaaggttagattacctaccttgttcgcttttgaggtccctgattggacctgtcacctccgaatcccttcgattttccttggcctgtattcttagcttctactaccagcgctgtgc

SEQ ID NO: 105355 - DNA, 764 bp, Zea Mays
cttctatcggatcgacactagcttccactgtcacgtcaagaattgtctccgaagccaagggggtagcttcgacctgttcagcaatctctatcttctctgtaccaagcactacaaccgtcctctctaaagaatgtggcctcggcctgcgagttaaaatcttaacattctttggcttaggcgtggtggaagaaaatgaagttgccatttctcttttcaacccttgttttcgggcaggaaagcagtaatcaggataaaaaatccaatcacatcaaagaccctatttagtctcctcttaccgcgagcgccgaaggcagtggtcatagcttcgtcctctaccttcgtatgagctcccaacagttcatcgctggtagcctcaatagcctcaagccaatcatcattcggctcgtcaaattgactcctatagcgataggtgtatcttaaatagaccagaccaccttcgctggagccagcagcaatctccttcggcatctcccagtcattaacaagcggccacaccttataggcaatattctcttaaactaaatccctggtgccaatgtatgtacataccgtgttaaaggccatcaagcatgcctgcacttcattcccactcgcgatagatggcctcctgatgctgaagcgtgaccgtatgggacactggacaatacccctcacatcttccctctcactcagatcattcttgacatagaaccatttcttcatccaagagcccgaccatttcttttggaatgttggcacatgat

SEQ ID NO: 105356 - DNA, 1373 bp, Zea Mays
gcaaatcttcatgattgtgaaccatatgacttaagataccttactttcatagtttttgcactttagtccaaaagtgcattgattttgcacttagccccctagggtttaggtttagggttttccagggttcctttttagggtttttggtatttcaggggtgtgaatgtaatgtaggtccattcttagtaacattttatgactatttcacttaagctttatggttttctctttttggattttgttttacccttctaaaccccatttagggttaagtaccctactctagggttttatttgcaaaatatcatctcaatacaacttgtttgaaatttttgcctagtgaatgcactctaggtgtgtcaaacatatgaaatgccaatgcttatgatgttatgcttaagttttagtgacagtaactctaggggtgttacaggacacatccgccgtcgacgacctgccccctcgaccaggtacctcaccgccgccccctcacctctcatcgtgtcgatgagctacgtcgtcgccgacttcactcgccgcatcccgctctatctcattgccatccgcatttctctcgcaccttccacctaacacgccccatccacatttctctcgccgacccgtaaaccctaaccatcgctggatttgggtcatcgcagacgaccttgatggcttcagactttaggggcccctcggaggatctttgcgtcaacccaactctcgatcgacagggcatgagggtgcaccttctctttgatattgtccaactcctcgtcgtttcggctgatggcgaaaccctccacaatcacggcaacatcgatctcatcaaagtgggagaccatatgccctaagaacatgctgctcccatggtatgccccttcgaggaccacatgctccacatgtttgggcaacgtctgcagtcagtcaatcaagggcaccatggtcggtagcggaggagagaggtgatcgaacaccacacctgcggctaggcaaaactctagcagctcgatgccatgctgcctgtgcgaagtctccgcctgaacctacacgacaaagcaccatcccaggcgagcaagagcttacgcacctcgtcttttgtcgccttcctcgcctccttagctgccttcatggtgtctcgggcctcagataactttttctgaagatctatgaaggacaaatcatgagtggcccttggcgccaaagacaaaaacacacaatcaggaaaaagcttacctctaatcgcctgcgttccgcaagaggtccgagttcgcctcctctaggcgagcgttcactgcccacacggtcaactcagcctcttcggcccacgggttcacctcgcgtaggtcccccttgagttgggacctctacacctg

SEQ ID NO: 105357 - DNA, 504 bp, Zea Mays
cggacgcagcatcagctgatgacgcaatccgagttggcggctgcagtagcagagcaggcggcaatggagaggaacgagttgtacgccaaggtagaggagacaggcaaggagatgtcgtagctgcgtctggagcagatgggaagggaactgggagatacatcaggaggatcggaagaggaactccctaatcgagatcagaatcgcattcctcaacaaaacagacaggtgaagggggagcaaggaaagggaaacagagaagggcgacacccatttgatgctaacaaagaggtattgcctaaacttcctttttcccaagtttggcagtggagatccagtggtttggattgatcagtgtttggattatttcactatctatcgtgttcccgagtcaatctgggtgtcagcagcaaccatgaatttggaacagaatgctgcccagtggtggagatgttataagcttagtcatggaattgggaattggcaggagtttgttgcagctgtgac

SEQ ID NO: 105358 - DNA, 568 bp, Zea Mays
tgtccacgacgacggcgaaaattagagacaatccaaggtgttcatgatgatttggtgcggtttagctcaatcaaatgggtctacgagcaacaggaggcttgagggaggctagaacactaatcaaagaatcttgaactgacctgcagagggctggccacgcaaagtgttcacggtggcgcagaaaacggatttgggggaaatgcgaaattgggaggctctggtggatgctcagaggtgcgagctggtgcactgggtgcgtaataacctagcggagctcactggggctgcaatttatagagtccatcggcggtagcatccaatttgaagaaggcgcgctggcggcctaagagatgggaagtgcactggcgtgggttatcgtggctttcaccatggcaaagcctccggcgatggacggacttactactacggttcactgtgacgtgttaaagctcctaggcacgtggcgcacggacggtaagcggccaacgccggtgaggatcatctcgtccggccgtagaccaagtaggtacggtagactatctagtgaccgggtccgagccaatccggg

SEQ ID NO: 105359 - DNA, 445 bp, Zea Mays
gctgaaacgggagagcagagagcacgaacagacctggaacaagctagtcacggcgagggctctttcacggtggcggaaaacagatttggggagaaagagaaattagagagctatggtggctaataggaggtaggagcgggtgctctggcttcgtgattatctaacggagctagcggtgtgcttaatttatagtgttcaagagcggtggcctccaattttggaatggcgcggtggcggtcgaagtgcaagaagatcactggtggcgcaatcgtggcgttcaccggtgcagtggttcagagagggtaagcctaagtgtgccacggttactaccgcgtagtgaagagtcacggcgtggcataattgagatcgccggagtgtccacgacgacaccggcggtccggccacgtcgcaacggctacaggcacggtgataagcttcccctgcg

SEQ ID NO: 105360 - DNA, 576 bp, Zea Mays
accaattttccaaattgaaactctcttggtgttccgcccttatcagcatattgcttcatatgcaactgtgctctagccaactgttcctttaacatagcaaaaaagcattcctttccttgacccacttagtgacatccgggtcctcaatacaaactagaagctaaatacaaacaaaaccctctatatcccttttcttagtaatctcaaggacaagattatttttaagggggtagaatttgtaacaccataaaatattgattttaaagattagcaagatttctccaagttgttgataactatgttttctaatgatagattagaagccgaattccaatataggtgttatctttgcttcctctaaagatttaacttaaaataaagattatatcaatgtgcctttatgggaacagataaggcactagacttggttaaaatttaggaatgaggacactattaatttggccaaacatcatgtttgaattttgacaatgaaatataaactcggaaaaagaagggttttcaaattttgattaagaatgtgatttattctcttttatgtgcatgcaagactatatt

SEQ ID NO: 105361 - DNA, 502 bp, Zea Mays
gcacgcaatgcatcaaaaacaacacttaaatgttccaaatgatcttctatagatttgttgtaaataaggatatcatcaaaataaacaaccacaaacaagcctatgaagggcctcataacttcatccatcactcgcataaaagtgctgggagcattagtcaatccaaacggcataaccaaccattcatataaaccaaattttgttttaaaagtagttttccattcatcacctagtttcattctaatctggtggtaaccactacgcaaatcaatcttagtgaaaataatggcaccactaagctcatctagcatatcatcaaggtgtggtataggatatcgataacgaatggtgatgttactaatagcacgacagtctacacacatacgccatgacccatctttcttgggaacaagtaacacaagaacagagcaagggctaagagactcacgaatgtaacccttgttaagcaacttctgtacctggcgctaaatctccttagtct

SEQ ID NO: 105362 - DNA, 529 bp, Zea Mays
cggatgcggaggaattcctcatcgtcatcacgaggtaccacgtacccgccgtgcgccgtggctagtcaatctgccaccaccccgttattcgagtatagggtcattaggttcgcaacatcctatactttatatagggccgtcggtacacgagttcgtgcgcgggtgagccaaagggtagaccacctacgttggcttcgtcgtagaagagggcggcgccaccacgtccgaccgatatgggggaagggatgtgcctgaccatctatccgtggatggagggcctggattagagaatcacataccctttcgtttaacttaaccagagtcatcggatcgtgatcaaatggatccgtggtgatcttagttaattgaagtaggggtcatagatccaggatcaggtggctgggaatggataccgcttttataatccaatcgatttaatcctgaccactagtttcatatcgaacggcccacgggtcccgttactccttcagccatggttattttcataggagccctctaaaagtcagat

SEQ ID NO: 105363 - DNA, 447 bp, Zea Mays
ctcaaattcacgggccaccgccctcgtgtcctataaattgagcgtgccatcagctccgctaggtagtcaagcacccaatacaccaacccgtgcctcagatcgtccaccagagcgccccaatttgagatttcccccaaatcggtcaagaacaccgcgtgtgtgagctcaccgcggtcagcccttcacaagtccgatcaagccctccttgctcttgttttatcatccttgtgtgcttgtgatgcttctcgacccggccaattgagctagaacacgtaggatcaccgggaacgcttcgggttgtccattgatcacgctgtcaccttgggcagagagattagtggctagaaccttgaaattagttgaggggaaatggttattaggggtcgaattaggtgtcaaccactctagagcaccggtcatttcgtatcttggccggtacaggctcgt

SEQ ID NO: 105364 - DNA, 289 bp, Zea Mays
ctccccctcacccacactcgccccagccggcgaggacaacaattcccgtttgccagtcccatccacacgaagacgaccagcctccatctcaccacgatgacgcctttcacctcgtgacaactcacccactctccgtttcgccaccgctcttcgccgcctacgcctagcactcgcacccggatgatcctcagcacccatcacacacgaaggagtctccgccgcagccacatccaacgctgcaaaataatccaagtcctcttccgaagacccctccgtccacacaatcgaa

SEQ ID NO: 105365 - DNA, 397 bp, Zea Mays
ctgggtggaaagtagcgaaggggggtttcaaagatcactttgttgtagttctgacacagttgttggagggcttttcgggcgacattttggcaagtatctgggaaacggtatccggtaaaagtgacttggaaggaaggatggtttggatagtttcggctttctcccaggtagactgccatagagcgtttctccattccgccctcgatatgctccgtccagacgtattccggcttcttgcggattcccatgcgaagcgcacagcttcgcaagagatgtgggaacccttccacttctgagcagtaggatgtcctaatggccagagagtcttccatctggaataggaaaagaagggtcttgataaaaccgggggaggggagaaaacttttcttggggtaag

SEQ ID NO: 105366 - DNA, 1808 bp, Zea Mays
gccttgcttaatacaagtttgacacctgccattttgaagaggccatgccacatgtggctagtgagattcggtcgcgatcgctggcgatggaggtaggaaagctgtgaagacggatgacaccctcgaagaaggcgcgagcgatcgagcatctgagtacaggtagttgagggcgatgaagtgtgcgtacttggagaagcggtcgacaacggtaagtatgatagacttcttgtggaccttgtggaggccctcaatgaagtccatcgagatattgactcacctaggacgacacgtcgaggggttgtaggaggctagctggctatagggtctctgccttgttgcactcagcactagcatgtgaggcaagtgggcatgtagtcctgaatgagcgtccggtcgtgggaatgtagaagtttgctcgtagccgcttgagtgtcctcatggtcggttgtatgggccaatgcaagtacctggtggtgtaggtcctcttgtgtcggcataatgatggcaagccatgaaagaggacgtcggtcacgtgccacaactcccaaagggttgcatcctagaactgctaacagagctggcctacctccgtgtcgtctgttgttgttgtgcaaatctcatcgaggaggtggaacaagggcctcaagatggcgtgtatagcctggcgatgtcggcgtcgtggtgcgagagggtgtttgttgtcttattgaggcgaccggggtgatactccatggtgaagtcaaagtcgaacaacttgttactaaactgatgctgggggactatggataatcgctgatccagaaggaagttgaggtttttgtgtttggtgtggatgaggaagcgacaaccctataagtacgaccgctagtatcggatggcctgcttgaggtggcgggcgacgaatggcttcctaaagaactccagggggtggttccctagttaaggattggatcgaagctgacacccgacgcgtcgcagttgacgatgatttgtcgatcgaagtctagcatccacgggactagtccaatgggcagggagtgcttcagtgcttggtcgccaccatgacctcaagtgtataggcaaatgaatcttcacataggagctgtgtcaggggcaccacgatcatctcgaagtcttggatgaacttccggtagtagccgatgagtcccaggaagccacacacgccctaggccgagcgtggcttgggccaggaggagactacatccaccttgttgttcatggtgacaccgttggttgagatgatgttgtcgaggtaggcgaccgatggctccccgaaggagcatttggaccacttcaattgaggtcgtggatgcacaatgcgtcaaggatgtggtgtatgagttgtaggtgcttggaccacaacaagctagagataaggatgttgtggaacaatacgagcacagacctacgtaggaaggacataggatgtcgttcatgaggccctagaatgttgttggtgtgttggagaggtcgatggacatgacgaggaacttgaagtggtcgtggtgggtgtgaaacaccgtattatcaatattccttgagtgcatccgtgcctaggggtagctagactgtatgtcaagtttgttgaagtatcgtgtgccatggagctcgaagtggccgtggtgggtgtggaacaccatcctcaatatcttttaggtgtatccctgcctaggggtagccagaccgtaggtcaagtttgttgaagtaccgtgcacgatggagcttgtccaggcgctcgtcaaccaataggatcgagaacatgtctttagacggcaacgtcatacaga

SEQ ID NO: 105367 - DNA, 480 bp, Zea Mays
tctctgccctcggcatgcatgcgagctcttctagaaaacacagagccgaaacaagtggccgttgcactacaataatacactacactgcactgcaatttcgacaggttttgtgcaaccttgcttttcgtttgatcctcgagctgttgagcaacagagacataaaccaaatgcatcggatatataggccggtgatcccagatagtacttttggggaaagggatccaacgaaaaaaaccttttttgtttcataaaggcttccattccatattctagctctcgttgacaactgtgtttgcggcgcacacgctcgctctatcgttgtccacctgatttgggctgtcgaaaagtgtttagggtttagatagatagatagaccgtgtagcccatgcagaactagatgttatatttcttccgttaattcatcgttttcttctcaaaataatcgaaacagactcatgttataagttttgctcaacgact

SEQ ID NO: 105368 - DNA, 607 bp, Zea Mays
cctacccgccagcgatgaaaaagcactgtgcaggagctcggactagaatgcactgtgcaggaaccttttgccctcgtttctttgcctactcaataaaagagggctaactgcgattctaaggcatactattagtggactacaaattatctcatagcccgtttgcatgttaatattggaacacagaattgagaattgaaattgatttttctaaattctatcgtttggttgtacttataattgagatttggaatcagagacccaattctttagaattggagtataactagaaactctctattctccttcccagtaccgagcgtcagctctctgtattatgtagaattagacagtacaattctaaactccagttaagcgacatctaaacaatataattgaaattacatcttattccaataccttggttggtttggtattgcatccaattcaatttcatacacccaatatcaacatctaaacaaagcataatacaattgatgctattataattcatttagtctatactgctatataatccaccagtttaaactttgtaaaacacattaaatcaccttcacacccataacctctaacaaatccaccaaacaaa

SEQ ID NO: 105369 - DNA, 479 bp, Zea Mays
aatcagagttggcatagctacttgaaatgcccccatgacaggggtggttcatcatgcatgagctagttgtaccaagtctatgcggcgccgagcatgtgatatgaagccaaccagactttctcctcttccaacgtgtgttgtccctcgaagaattgttcacatcgagtcaaccagtgcattggatcttcctttccatcaaaggttgcaaactccaagcggtggaagcgaggaacagcagtagatggtggtggagagaaagcactgggtatggtgtgcggtagtgaggaaaaggatggggtgggtgaagtggtgtgtgggaatggtggtaatgatggaatagaagatggtgaatgtggtaacgacagcaagtgcggtggaagtgaggtggtggtgtgtgatggtgccgatatggtggtgcgtggtggtgggaggtggccatcgaccgctgtcatagctggtggcagtccgccatatccagg

SEQ ID NO: 105370 - DNA, 524 bp, Zea Mays
caagctctgagcagcaatcttcacaaagcacatttcgaccacctgcttcgagaggaagaggaggatgaagctttagtggcagatttggtgcgcctccaaggaagccattctgtttgttttgtggtgaggacaaaggccacactacaaggacatgccataacaccattaacaagcagaaagagcttgcttcgtcagctactcaaccttcacagctgaaagaggtgttcaatacatcttcatactgttcaccctacatcccacaatatgtccaaactcagtcacaggaaccaaggccaagtctaccttcggcctcaaatgcctcaagcaactcagtgatgagtacatggtcaccaactgcctccttcgtcctaggaccacctaccaatgatcaagttcccgctaatcaacccaaattcccaagacaagacctgcaacaaagggagggatctgaaaactgtaccgtcaatagcagggtccagagacgaagcacatatactgagtaccccaagggcagggtaagtgac

SEQ ID NO: 105371 - DNA, 435 bp, Zea Mays
caaccggagagatgattcgtgcggggtttggggtggtattagtccggccgaccatggcgctgccgcgggaggagcttaactccggcgtcgcgagatagaagatgccaggatatccctagatcttagaattgacggcttaggttagttagcgcggccactcggcggaggttaaatcctgaccgtcgatcagtcatcctgggcgcaagattcaacctcagattggagagctcgcgaccgtagattgtgaatcatgcgcccatcagcgcatctccgattcacgtagcaaggttttaatcttgaccgcgagatttggatccaacggccagaattcatggataccctttcgctgtgggcgattttgcagaagagaccctagaagacttaagaatcaacccgccgtcccatgctacagccctcggagtctcagggatcttt

SEQ ID NO: 105372 - DNA, 397 bp, Zea Mays
cggtctaatccaaccatcaagcagcaatcctacggcaccctcccggatggcttctctcctacccgagacacgcggcttggctcatgcgagagccgtgcccaacactgggcctcggcccaacagcgctgggactcctcatcttttaccgcgaaacaacgcattttggcgggcacctcgcgttttacgagctatgggcggcggcggcgattaggctgcttgtcattcatcaaacacatgtgagttaatctcgtttttcttcttcgcgacttgattgttttcagcaaactctactatgtgtgctctgatttgattgtattccacctcacttgtatgctctgatttgattgtattccacctcacctcattagactgtgttggaattcatcgaagaaaccta

SEQ ID NO: 105373 - DNA, 729 bp, Zea Mays
atatcttctgattcaactaagttgttctttacataaaaccactcttccatccaggatcctggccacctcttccgaaacgtcaggactggatagctcacattagaacgaggcacgaagccgtaacaactaaaattattatgatattgctctttgccagtagccttcatctcataggatagctcatgcatttacagaagcattttgcactcggctctagtccctggctcctcatggcccaaataaaaatccccattctgatgattgcttcaggggtaatctgatgaacgtaaatctcaaaagccttcaaaatttcaactaaaaatttactcaacgggaactgaagccctaccttcatgaagctcctatagacaacaacttcgtctacttcaagcgcaggggcagtgctatctcctccagccctcacaatagaaatatcacgaaagtatcttcctttcatagcatcaatctgactctgattgatagttgattccgaagatggtatgactaggtcgccaaggccgatcttcggcatcttcatttccactttccaagtcaaaactttgactgtcgccggaatcctcagataacccagccaacatttcattggtgattttctctgtgttcctcttctccatagcttcaaaaaacccagccagtgcagggttgacaatcttcttctcttcagccatttactcaatggttgcgcaaatgccgaagcttacaatttaa

SEQ ID NO: 105374 - DNA, 709 bp, Zea Mays
aggcttgcctgccggcaagaacagatcacgcttagtctctaagatcattgtccagtagtcagtggcagcgctgtacacaatagctaacatgcatattattagtgaagatcagttgttagttattagtcattgaacattttcttgataataacggtacagaagcatatgcacaacttgcccacaggccaaataatttccaacgcattaagtccgattctttcttttttattgattagtagatttttaaggacgttagtctttaatttccagcacaacttgtcctgaactttgacactctctgacaaataagatatagtacgtagcttcttgtacgttttgcatatactggttctacactatgtaaaatttgttgttgttgttttttaaccttgaatatgactaaaattatactcccaaatggcactgttccatttcttataggtattgtcctgataaacaaatcgagaaacgaagtggatgaaacagcaagccttcgttcattctgtttgcttgtttttaatccttttctatgtgtgcagaaatctacggtgtggaagccccacagaatttcaaatggcataccaacattcttcctttttctatgctttgtacatgacgaaggcaaagctagcactacccaagcatgtccaggtcaaaactaatcctccctctgtagctcaattacgcaacgtacaaaacagcatgatcc

SEQ ID NO: 105375 - DNA, 512 bp, Zea Mays
gctgagcatcgccatctcactcggcatgaaaagatcaatggtgtacaaccattcactggtggtcatcagctaggtaaacaaagactgggactactcaaccgactcaatgaatagatactgcacagcggtacagaagctggaggacaaattggagggtttggaattccatcacgtggaaagggatcccaacacagtagcggatgcactgacaaagctgtggtccagtcaggcccaggttccacctaggtttttgtccaagagatacaacagccaagcgtcaccgtacagaaggttgaggagtgccacgttctagactaagcagaagcagatcccaacgactggagggaaccaattatcagatacataaaaacgaggaagaaccagatgataaggccacaacaaaatgcattgcgagacagtcggcccactacactatcatagagggtctgctatatagaagaggtgtgagaggagtcctcatgaagtgtgttcactcggctactagaaagcag

SEQ ID NO: 105376 - DNA, 980 bp, Zea Mays
gagacacaagtttttatcctggttcgggcaagagaaggtcctgcttccagcagagggggattagacttatattacttgcacctaagtgcttgcggtagggaatacaagctgaccgggagagggaaaggatcccaagtccctggggttgattgaggcaagtgccaatattcgcatggaggtgaaaactgtgaagtgttcgccctccctctgaagacctgggctcctctatttatagcctccaggagggccaccaggaacgccagagtttgtcgtatatgggagaggaggcgtgtccgggcccctatagccggtatggcctttgtacttgttgttgacttaagtcgggaaggagatgtctggttcttgtatttgcatctttgactgtgcagagagccgaggctagtgcctggggctcagtcacgcacccgagcctattcaatggaggagttgtccgagtcgtagtggttggagcagtggtaagtatggcaaaaagctcttagcaatatgtagggtatccgacatcagatctgcagcttctggtgacgttgggtgtcctttcgtcggtattatcaaggccgaagccacgctcgggcgaggcagaagtcttcccgaggccatggccgagccagctctagggctcgcagtcgtgtagggaacagttgaaggagtggccttctgcgggatttgcgggagacaggtggtcgaggccaagctcagatgaggcggagtttcttcccgagggctagaccatgatttgtcgtacgcgcgtcctatccagagttggcagacatcgtgagggagcagtagccattattcccgggtatgtgtcatcgttgttggtgaaagtggacgggaccacggtcctgtcgctcctatttgactaaagcgttacgtggagtaggtatgcgcattgattgctcatgtcctcgtggttcccgtgacatttgattgagaccgggctcggggctgtcctctaagcc

SEQ ID NO: 105377 - DNA, 887 bp, Zea Mays
ttgctctaatcaaagccacccatcgcaagatcgacggcccacaacccatcttccctatatcgcggccagatgcgatggcgcagacccccatgtggagatggcctcgccggagaccatggaatcggcgccccggagcgccaagcccccccccccccccccccccccccccgaagggttctaccagttatacatatgaatgcaagccgattggggagttacgtaccggtattgaagtgggttgaggtgctgaccacgatgtcacacaggtccgcgacgaagcacgagctacaacgaggaattcctggggccactgcgcctaatcctggttggtaaggcttcggtaatttccccaccagcacggtgaagatcacaggtgagcaatcgggtctcgagtggtggcgtggatgagaattcgacggtggcggtggctttcggctatcgaccctcttctgtgcggcggagtctcacggcggtgatgatcgatccaaggagcagagatggggaaggaggtgctctcatcatggatttatagcttcagcggagatccaggatttatattcccagggccgtggacatctgtcgaagccactgcaatccgaccagaggaaatcttggccatctctgttgtagcacggatctcgaaacgaacgagcccaccagctgaccacaatgggtgcacgcgcatgagcgagattgtcgggacagaatgcaggttggtctggtgcggatggaccccagcgcttgggatcggggggagtccgagctagaggaagaacctgccatgcaggccccacatggaaatgacacggaagcccatcccggcgcgcctggtgtgaggccgaccagtgggccccacacgtaagcgacctagaaaaaagaaaagagaa

SEQ ID NO: 105378 - DNA, 408 bp, Zea Mays
tcatgtatttatttttttattattatttttatacaaattttgggccttacagagtttcatcaagtatgaacttctttcttttttctatgcgatttaagtaccggatcgacatccatttatttcagtgccctcatccgctccgtcaacttttctgaatcgtgagggttcaagtcaagtccctctatccctaataaaaagcccattttacttcctaactatactatactattgtactacgagattgaatatgttttcctagcctcccaccagtaggcaaatccctccaaccaataactacactaccttggttattcgctttcatgtcttggattgagctttctaactcttattatagttgggggtgggcggaaagaaaggacaagattcctgcttcgttcaaagtcctag

SEQ ID NO: 105379 - DNA, 398 bp, Zea Mays
tagcctcggccagggtaggaggtacaggtggcagattgggagtgtcctccccaccgcgggatgtacccgccccatcatgagcatgaggccgggatggcatctgaggcaaagaaacatttggaaatataacatgccaaacatacaccatctttattacattgctgaactgtaataattatacatactccattatacaactcgactttcttacttattttacataagtacattacttaaactataatattctaattttcttcatccttagctgcttcactgcctgcttcaggagaccgttcatctgcaagattcatggaaggaggagaaccaaaaaggtcaatccccccatcagatcctccatttgttgttctagatggtccagctcccattgctgccac

SEQ ID NO: 105380 - DNA, 348 bp, Zea Mays
gttgaatagggttgtggagctcctatagtaggtggtgtagctaggaggcctctgccgcgccgttggccacagcgcggtactcggcctctgcgttggaggggagacgacgagctaacgtttagtgacttaggagacgaggttgatgcctaggaacacgacataaccagaagtagaccggcgtatgtcgggacagccaacctagtcagcgtcggtgtagaccacgagcttcgacgttgggagggtcgaagtagaaggtcgtagtcgagggagccgtggaggtagcgcaagatttgcttgagagcggtgagatggggttcccgtagggtgtgcatatacagacacacctgc

SEQ ID NO: 105381 - DNA, 525 bp, Zea Mays
ctgccttctagagcgagcaagcaaggaatggttgtggttctctatagtgaaccactcaaagtatcatcccttgatgttgtccttcagagggatatctatgtattaaacatttctgccctgacaaagttcaaggttgtccccactaactacttgatgatgtccacccgccatccccgacttgcaatgctatagagatacttccacagtctaaagtgcggactaatcccaagataggcttcatagagatgcacgaagatgacaattttaagaatagaattagggttcaagtgagtcagattgagtgagtaaaaatcaaggaggccacagaaaaggggaaaacaagcaaacccaggcccaaatgaagaaaggaacaaaaagcacatattcgtggctatccaccgttgccacggtaatcccttgcccagttcactaggaacacaattccttcgatggaggaacatcaatatcaactagatggagcaagtcagattcagaaacaacagaagcgtcattaccgcataagag

SEQ ID NO: 105382 - DNA, 538 bp, Zea Mays
ctttgtagaagatggaatgtccccactaactttatgacatgcaacgcatagaagaatgcaaggtttactccgtcaatgcaaatacaacgataatagtgctacataagaaatgatgatacgagtcatgagtgcatagagagggcaatctgtttattctgttccaatttaggaaaacaaaaaggaacattgttatttccagagaaagaaaagtgcaaagtgaagaaactgccacatgtcttaaagcatatgtatcgttgtttagtaaccatacctagctaaaaggtaaacataaagtcatgttcaccagagaggcggcaaagaaacattagagaccccctccacccaaaaaaacatgcataaactcccagattcaccaattgtgactaaatacatacatagcttaagtaacacaaatacataatccagattacgtctgttaagaaccaaaattcagcaatgttgcaaaaagatacatatcaaacattacataaacatatatggcaagttatacttttcaaagaacaaaaaatgaatttga

SEQ ID NO: 105383 - DNA, 330 bp, Zea Mays
cgagagggcactacccttcttcaagctattacagaagtccgtcccattctcttggaccgaggaggcagaacgagcctttcaagagttgaagcagcaccttgtgtccctaccaatactggtagctccagagccaggggagccgttgtacttatacattgcagcggctacagaggtggtgagcatggtgctggtcataaaaaggacggcacaacatccctaggggagtcaaaaagttcccctaggagaaggtggtggtctgaccaccatgatggtgatagaaggtcaagagtttgagggctcgggaacaaccgtaggggtccgaaccatcca

SEQ ID NO: 105384 - DNA, 783 bp, Zea Mays
gttaagttcttactagcctaataaaaaatgggtgtaccttgttgaatattgatctcttcgatgggcaggtgtgccgagaaaggggtgggtcaagggacgtctctagttgagagatagggctcgttggttcgacaagctcgttgacctccaaggacgggtcacatcatcacgacgaacgagatcggacatgccgagctagctagcgtcatgaggatgacgagcgaggcgggggcaccgggaaggggtggggttgtgcagtgtcgcgacataaggaatgagacatcgaagcggactggatcaggcggtgtcgataagaatgggactgggccatagtcaaaatgtttctgggtcgattggattgaggagcggggtcatgggtcgttggtcgacattttaaaaagggaagtatacatctatgggacgggaatattatgaatttgatatgttgagtctaatgggccgatgatctcaggttgattctatgggtcaagggtcgtgttctaacatttcaataacaacctaacaccagtctaatatcatctcattctaccattgaaactttaggctatccctatcagattccctatcttatactctattttaaacctttactttacaaacagtatcatctacagttatgtgtcccctattttacactaactgctgtagacagtattatacttatacaaacagaaaacctcaaccgacctacaactttaatttttctctatactcactaaatgaatattagatatataagagagagaaaaggtcccagcctac

SEQ ID NO: 105385 - DNA, 576 bp, Zea Mays
tgagagccttgtggtcggtccgaatttcaaactcactccgctgtaaataatggcgccaacgatcgacagccatgatcaatgcaatgaattctttttcatatattgacagtttctgacttttaatgcccaaagccttactcaagaaagctattggtcggcccctctgcattagaaccgcccccactccatcgtcacaagcgtcagtctctaccacaaaaggaatattaaaatctggtaatgcaaggaccggtgtggacaccatggcctgcttcaacctctgaaaagccatctctgcctctgatgtccattggaatgcccctttttgtaacagcctggtgagaggcctagcaatggcaccataaccctgcacaaaccgcctgtagtatcctgtcagaccgagaaaacctctgagatctgtgacattcaacggcttgggccacttgagcatagcatcagttttcgtggggtcagtcgctaccccattcccagaaataatatgacccaaatatgacaactcctttttaccaaagacacacttcctttctttgagataaaatttgtggtgtcgcaaggcag

SEQ ID NO: 105386 - DNA, 385 bp, Zea Mays
aaattggtaaatgggtagcagaactcgatgagttcatcatcgattttgtgcacatgtcctccatacaatctcaagcattggtagattttattgttgattggaccccatgctcacaagatgaagcagcccagtcagatgaagctgtttggacagttttttgtgacaactcatagggatccttcggagccggagctgcagctgttattatgtcaccatctaaggtgaagacatcatatgatgtctggctacaattctagaatacaaacaatatagtataatatgaagctttgttgttgggactaaggaagctaaaagcaatcgatgtacgaagagcagtattgaaatcagattcccaggttatcacaggccaggtggataaatcaag

SEQ ID NO: 105387 - DNA, 1489 bp, Zea Mays
aataatggggtgatgcgtctcttgcttataacttgtggtgatacatcatattaaaatgaggtatcataatttacatttgacctcaaaattttaaatgaaaacataaaagagaattaggaaaggaaagaaaagaaaaggaaaatagtataatatatatatatatatatatgtctatttaaactggtacttttatttgtgcatataatctgtgtgaaacctacagatcaaatttgaactcaaatatcagatttgaaattgaggaggaaattcaaaatagaataaaaacaagaaaacaaacgctcgacccatttggaatttgtgaatcaaactagaaaaaaaaactaaaataggaatagcaaaaaaaagaagaagtcaccgaagcccttacctgcagcctggctcacggtctgcccaggagcgtttattccccctcccccgcatggcccatctaccgggagaattccactcacacaccacgcagcccacgttcgtttattctttctttattcatttggccggagcttacatcaccctgacctcagcaatgacgccaactctgtctaagtgacatgtgggcccttggccagccacacagcgtacccacgcctggtggactccaaactgcctggccgagttccacgccagctctcgcccatcggcaccgtaacaaccccacgcttctcggcatccggtgcataaatacgggagctgcgacctgatcctgactcataggctcggtggaaaccaatgtcccatgcccccatattgacccggcgtgaacgttgtggcaagcaagaagtagccgccagggacagcgctcgaagcacaaccatcttctgtcgtcgccgcgaaaatctaccaccaagggatcatcggcgcaagccgccttgaggtatgacactgatgcttgcgatagtacctcatatcgaagccttccacgttcagtcacggcctccgccgcatctagagtggtccgtcagaaagggataggatatggtgaagatgagaccaaaccacaaacggaaaatcaacggctaaattagaaaatgaacatatcctttcagatccctgcgcctagccataaatctttcactggggccccggtaatggcgtgccaccgcgggcgggggaaacgacgccgctgctgggtttctgggtagaagatgagccgtggcagttggatcttgattcgacggtcttgattagatctgggggaaatttgtgcgtgccgttgatctgcggatggacgaccccgattagcgcacgcgtaccctttcactaggattctcccgggtcgccggatcgggatcccgtggcccaggatggtgctgggcgttataaaatccgcggcgttgatttctaatcggacgactcagatggcctcgtaccccttcggccgtgtcaaattctaaaagagtccttgtgttctaacagattcaacccgcagtcctgatggtggtgatctgagtctgtagaagttttataattt

SEQ ID NO: 105388 - DNA, 423 bp, Zea Mays
ggttgagcaaccttcctcactcatttcaatgaacatcctcatatcaccggtcatatgttgagtacaaccactatccaacacccaatgatttcctcccgccttgtaatttacctacaaaaggaaatcaatctcttttaggtacccaactttgtttgggtcctcggatgttagtgaccaaggattttggcacccaaatttctttctttttggtaccaacaattgaagtgccaacaaacttagcatgcacaccttttgcattatgtgaaagaacatagcaataatcaaaacatggtaaggatacatttttgaatttaggacaatttttcttgacatgtcccttcttgtggcatttgtgacacacttggtcacattctttcacaaacatggtcttttgctttacaaatgcattctttcctttcttaa

SEQ ID NO: 105389 - DNA, 529 bp, Zea Mays
cttgctccccgttgatcgccggagcaattgccacggcgcaggacaccaatccactacgctagtgctcttctctttctccggccgccagcattgctcgaccgaattacgcgccaccgcttaagccctctattaattgaaggccggggcagctgcgctacatcatcacgaaactagagcccccaatcccaccctcaatcgttcaccaaagctcacgaattttgggttctccccaaatcggtttccgccaccgcaaagagcacctcaccgcgtccagcacgatccaggtcagtccatgtcttctgcttccccgtttaagtattctcatgtgtctacgatgctcgccgacccacataattgagctagaccaccgccaatcgccgggaacgcatgattctttggttcatccgcacggttaccgtggccagagcgaattaggtcaccatttctgaaattaagttaggggaaacactcggggaaggttcaattcagtgatagccgctcgggagcactggtcattgtgtaaatccac

SEQ ID NO: 105390 - DNA, 936 bp, Zea Mays
cacctattcaccccctctagacgactatcaattggtatcagagctcgacacttcatttagagtcttacaacctaaagtgatgtcggaacaatccgagaagtacaagatggccacctcggaggacaaggggaaggacaaagaattcgtccactcgaggtcaaagaagacccatgaaaagaagggtacaaggaagcccaaaaagaagatcataatctccgatgacgacgacacatccatatcaagctcaagtagcgatgacgagatcgtctacaccaagtgacaacataggaagaaatcagttaaatctaattattcccgcatgtcgtttaattacaatcatgtttcttctaatacgactacttctctactatcggttttacatggaaaacccccacaatttaacgaaactaattattccaagtggagccatagtatgagaggacacttatactcacaccaatcaagttattggaatattgttgaagtagatacggagatacggaatagcaatgacaaagactatcacaagcgaagttggagcaaataatccattgcaacgcctaagactccatgttctcctctcctccctcaacaaagaagagtacgacaaggttgacgggtgggagagtgccaaggagatttggaacacacttaagctggcccatgaaggaaacaagggcaatctacaaggctagtatcaagcttctggagggggagtttgggaggtttgtcatgcttgatgatgaatcaccacaagagatgttcaactgccttaagaagatcatcaacaagctttggagccacgggagcaagaagtggagcgaccacgaagtggtcaaaaaggaagttacactaaatcgtgaaagtcccaattatagaaagatcagctcgcaagtagttggcaagattatataccccatctgttccaaattaaaa

SEQ ID NO: 105391 - DNA, 326 bp, Zea Mays
gcaattagatttgacctcaaataaaatcagttcacaacatagttggatctgtcaacccacatcatctagttctcaagaatcactaactccacaaaacaaaacgaactaagtatcacattaagcagcacaaaaataaggagacaaaagaaagcacacatgttaaataaaggctcagataaacaatgggtagaaagtttgcttgtcggcccaaagagagaaaatccctcattcagagtggtgcatgactttgcatcatcattgcccttacaacctagctttccgctgctttcctctgcatcccagaaagaaaaaggaacaacataaga

SEQ ID NO: 105392 - DNA, 333 bp, Zea Mays
ttgattcccaacttgtctttaagtaattagagtgaaagcttagccctaggagcattatggtccaactcgtaatctgcagatctgacgatcacatgctcttcatgactttgcttcgtattgatgcaagctttatgatgaagccacatgttacctataattcctgctggaactccgccatgattttaagactcaatctcgagaaatcatccatccagtgggtttgacatccgaactaccaagacacttcaaagtagcgtgtcatctatgcccccttcatgatcttggcatatgtcatctttagccttgatcaccccatcactaagtcctctagtg

SEQ ID NO: 105393 - DNA, 407 bp, Zea Mays
ggatcagatcctgtaacttcttttgcctgaccaagtgcaagtgacagctcattacagagcaagaaacaaggccaacggattacacacacattccacagctcaggtggcagctcaagaagctcaacctcacagtcactagcaatgtcttcctcccggaacttgcttattaactcattccaaataagtgcaaaccattgtgcctccaccaaatttgactcaatcttctgaaaggatctgctgaaaccataccttagctgtaatcattgccagaaattgtgaaaaaggttgggcaagaagctctcattcacctgctgctcctctggcatgatgttgaatgacatggcacttgcaaagaactagaacctaagtcacagttgtttcatgtccctgatctctcccaaatgcgc

SEQ ID NO: 105394 - DNA, 764 bp, Zea Mays
tgttcggacctaagaaccagtgtgacataggttgtggacacggtcatgcatgtcctgtcatacaggcacaacaactctttgactccacaactccttgaccaactgcaacatgggtggccagaacgtggtgcgttcaaagctagcccttcaagggcgatagggcattggggcacgtggcgcacctagacccagttgcggttgttggagcaggtggacgtaggaggcctcctattggaccactggctctggtggggaccccatgacacgtggcgcatctagaccccatcagggagaagggccgtcagcgacacatgtcacaactggaccttgtcaacgaattggcgagggcatccacaggacaaatgtgcatggttaagacgtgtgtgactgggaccctctcacttgaccatgtggtaggggtcctggccaagcattcttctcacatctaggatatgacgacccaccgtgatattagggtcctcagcctatactccacgctgatctattatgcatagcgcataagatacccgtaccgagggatgctgacaacattcttctcccaaattcttttagcatgagataacgctaaatactcatcctctagtgagagtaatattagtagtgatagtaatgatgagaaacactataatcaagaacttgcccatgctgtcaaattctttaaagaagcttgcactaagcaaaacataaattaaaagtgctaaaatcaaagttattaatctcacaaaagatttagaaaacttttc

SEQ ID NO: 105395 - DNA, 384 bp, Zea Mays
catttaatatgatatacaaaagctttatccgcagtgccatcaccatgagactgttagagctagatctccaacgtggaataatgcctttgggggtcgccatgctgttagtggggggccagatacattcctttgacttgtgggtgcctccatatttagggcatgtacaaccctgagcccctggattggttttccaagcagaagatacagctaagagactacacagtgcaatggaccatctctaaacgatgtctcttaataagttgcggtattggggtggcggaggcaggtgcctatggcggggttggtcttcagatgcatcgctgctggctactagatgcgagtcctcacaatttgttgggaagtgaaatgaaatagaggaaagac

SEQ ID NO: 105396 - DNA, 501 bp, Zea Mays
cgctagacctaggacgaaaggccttagaaatagtagggaaaacaggtggctaattaggtaggccatataggccaatcttaggattacaaggatgccctaaagcacccttctgatcggtgaggatacgttcttttcagcatgcatgcattataaaatatgaaaggattagaaattaaaggaaagatgtatctaagcatgaatgtaacaatcgggataaaaataagtaacataaggagtagaatcaaatctaacccacctccttttaagaacctggtcacatgtttttcctttccacagtcgtaatgtttacatctaatcctctttcacagatgacttcactcaccccgccaatggaggagacactcatttcagttccgatttcctttcccacgagggtttcccttccatcttgtgggaggtgctcaactccaccgaataccctacaccccctctgtacacggtgcagctgtacgtggagcatcgagtgccacattgccgagt

SEQ ID NO: 105397 - DNA, 1073 bp, Zea Mays
ccgccattgacactgccgccgccgccgacacgccgtgccgctatccccggagacgtccaccctgcaaaagttcgtgtgccaatctggcaggtgtgcaacagttcttggccccaagaagcgtcgttgctgggttggggattacgacgtcgggcgaggagttactgaccaacgatggcgtagtattgttgtccccaccatgagcgtggatgtcgagcctgcaacgacactagcccaaccgacatgttagcaatacccaaacacttgattttgagagaattttggtggctttgatgcaaatttgtgaaagattttacgaggattcggaattagtctgctctttatgaacatagattctgctccgaactgatgagaaaaaatgaacaaataaaaaatcgtcgcctcagagattcgaactctcttcagtcgtgtgtgacgaactgacggttgtgggctcgtgggcggtcttcctcctcgccgtcatgcccgcggcctttcgcttccgccatccgtccttctaccagcggtgcccaggcttctattttagtctggctctaccactggatgtgatggtcatggctgtatctaggagaagacaatggggcgtgtcgaagacctacccgtagggcagcaacaattcctccattagtgcctgaagttcgatgagagctcgtgctgccacatatcaagtgcccacgtcgtgcttgtggtgggaacagacgcaatactagaatgtcatcgagagggcgtcgaactcctaaatgatggaccccaacattcggagctaaggtggacaacgccttgtaccgatgacgttcatacgcctgcgctgaggctcagccacatgcaagttggtgaggcattgaagttcaacgtcggaggcgagaggttggacgtggccactggtgaataggtccacctcgtgcctaggtgaggccatcgtagcaggacgagggtgaggaagcggtgctggtagtccactaccaaccctgtctgctgcagcagtttgtctatggtgttggagcggattggcgacccttagcatatgttgacgagctctgcgaagtgcgaccaag

SEQ ID NO: 105398 - DNA, 447 bp, Zea Mays
agaaaaatgtgtctttgtagtgccagcagggaagttgctcagattcattgtcagccaccgaggaattgaagctaacccggagaaaatcgaggctatcatgaggatggaagcaccacgatcataaaagaaagtgcaaaggcttactggatgcatggcagctttaagcaggttcatatcaaggttaggagaaaaatgcctaccattctacaaattgctcaagaaggtggacaagttccagtggacctcagaagctcaggaagctcttgatgcactgaagaagttcttgaccacaccgccagtgctaaagccgccacgccaagccatgccaaaccagccagcggaagatctgttgttatacatctcctgcacgactcatgtggtgagcaccgcgttattagtcgagcgggcagaagaagggcatgcatatccagtacaccatcccgtcta

SEQ ID NO: 105399 - DNA, 504 bp, Zea Mays
gagagcagagaacaacggtgagatacttccagagaaaacacgtgtattctagataaggaagagtaaaaaatagacacgtaaaagataaaagttaactttccctctccatatttttatcaaattagtataaacatatatctaacttaggcccgggttttggacgagaaacaatcagaacaaactggaacgatgtcaacaacggtattttagactgcgttcgattcgatatgaaatcaaataatttcatatgtgggctgaacacctgattccatggctatagacaatttactggagaaacagatctcatttataaatcctcggacgtgacgtttcgattaacgagaggtgactaaattattttacacctaaaaacttgagtcatcgagttctatttaatttagttgagcctagacaatttcaccgctatccgaacatctatctagaaaacagctcaatttataactctatgcctgatttttcttggatacggattgtgatcgaatt

SEQ ID NO: 105400 - DNA, 370 bp, Zea Mays
tagaaattggagataaatggacttaaagtcaggctgtcagtcacctctgaatctgaattttgactgacaacgaaatgggacaaactttcggagggatttcgggtaggatccaatgaatgtttgattatggtgattataccaaaattaaagctggtgcataggacaacacctttgttacagatggattagtgagttgtcacataaaaattggagaacgaagcctttcaatttgctctgttaggcgcactgaagagtgttcgtgatggtacagtaactaacccgatgccaggttcggtgcacctcgccgccgacgatccccatgcctggattcacgccggtgccacgattaatgctcagtgagtagcggata

SEQ ID NO: 105401 - DNA, 460 bp, Zea Mays
ctgatcgtggacagatagtttccagtggggtttgtgtcgattaaatggatgttcctaggtcgccttaagccagtgatgcctccccggtagttagtcgtaacagtcgtcgccggccatggccggtacggaccacgtcagggacgaacgacgagtgcgccatggccaggggtgtttttggagaagagatagaagatcgagggcctttctgcaatctgtcagtgacacggagaaatagtagccaaacccatctccaattagcaagaactccgagggtctttctgtaaagccgccagcgcgcgcgggcgcgcttctgcccatttttgggccgcctggaccggatttggcccagcactgttacatcttttctcttttctttttctgttcaagtttagaaatatgtagaaaactacagaaaattcctaaaattgtgaaaccaattttcctaggcttcttattttcc

SEQ ID NO: 105402 - DNA, 712 bp, Zea Mays
cgtgagtaagcttctcttttaaaagatcaaaagaatcctcttgtgactgcccccaattaaatgaaacaccattcttggtcaactcatgtaatggggcagagatggtgctgaaatccttcacgaaatgacgataaaatcctacaagtccaagaaaactccgtacttgtgtcaccgtcgatggcgttggccaactctgaatagcatgcaccttggcctcatcaacctcaataccctatggagtgacaacatagccaagaaatgatacgcgttcggtgcaaaaggtgcatttgtcaaggttagcaaataagcgcgcggcacgcaaagcatcaaaaatagcacgcagatggtcaagatgttcagataaacaagtgttgtagatcaagatatcattaaaataaaccaccacaaattttccaataaatgggcgcaaaacctcgttcatcaaacgcataaaagtactaggggcattagttaatccaaaaggcatcactaaccactcatacaagccgaacttggttttaaaaccagttttccattcatcgcctaatttcattctaatttggtggtacccactacacaaatcaatcttagaaaatattttagaaccacttaactcttaaagcatatcatctaatcgaggaataggatgacggtaccggatagtgatgttgttaatggctctacaatctacacacatgcgccaactgccatc

SEQ ID NO: 105403 - DNA, 563 bp, Zea Mays
cccaagggcacatttccctttcatgtcctcaatctcacaaatgagaaaatccacaacatcaaactcggagtgagagaccagggcaccaagtagccaaagctggaaatgagtagcagcctccctgttacccatccatggcagaagcgtccgtctcatgagttgatatagaaacttggccgctgtggtgaagtctgccggagaacatcgcgacccatctgagaagggtggtcgaaacagagctgcaacgtgagctgtaccaggagcaactccgccgtgagggcgacgaggaggatcagaggtgccatagcacaagctatgaagacgagtcgatgatttgttgaatccaaacaactggcaaatctggctagcatgaatggtaacatcctctcgctcaaagcggaatctcatccagtggtgatcagggtcgatccatacagtagcatagaaaactcggacccattcctcaacatatcggccgctagtagtcaaaagagatagaaggccaggcagatatgagaggtgtacctcagagtcagcatcgacggcaagcagaaacgcaggaa

SEQ ID NO: 105404 - DNA, 477 bp, Zea Mays
attctccacaataaagaagccatcggaagaatagccaagtgggcctatgaactgggatctcatgacattgagtttcgacctcgcaccgcaatcaaggctcaagcactggttgacttcgtatcagagtggaccgaacaacaagtgccagataacccagaaactgcagaagcatgacgaatgtatttcgatggctcgttaaagctgcagggggcaggtgcagggatcctcttcattgcacctggaggcgaacaactcaaatatgctcttcaattgctattctcagcgtccagtaatgcagcagaatacgaagctctgatccacggactaaacattgccatatcattgagcatcaagagactgatggtatatggggattctatggtggtcataagtcagataaacaaagaatgggattgctcgagtgattccatggggaaatactgcactgccgttcgaaaactagaagacaaatttgaa

SEQ ID NO: 105405 - DNA, 325 bp, Zea Mays
taccggagctgcttgatcgggacttttgtagtgacctcggtgccttcctcgtccaccaccacaacataccttgagttcttacagtgcatacaatgggtgtcattctcgtgatccctccagaacaacatgcaattatttttgcatgcatcaatcttctcatagttcatgttgagacccaagacaatctttttagactgatacaagttctctggcatcttatggttcggcgggaggagatcaataattagcttcacgatatcgttgtagcagttatttgagaagttgtacttggacttcatctccataagtcgtgttacgacctgaa

SEQ ID NO: 105406 - DNA, 887 bp, Zea Mays
ctgctttgcaccatagactgcactgttcgcagagcggagtatggatatggggatgggtaagttgctggagataacctaagggattggtgatggcgactttgctttaggttatccttctgctgattaattgccttgctcactaatggtcagtttgagttgatattaataactaagtcttgattgagaaccaataaacctgtcaagaggttgctgaagagggttcatattcttctcttgcaatgctttcagcgagggaatctgcattacttgctctattcatgagaatgcactttgtgtcactaagaccgtcttcagcagttcacctatatggtaacacaaaaaacactgctttgcaccatagactgcactgtttgcagagcggagtatggatatgggatgggtaagctgctggagataacctaagggattggtgatggcgactttgctttaggttatccttctgctgattaattgccttgctcactaatggtcagtttgagttcatattaataactaagtcttggttgagaaccaataaacctgtcaagaggttgctgaagagggttcatattcttctcttgcaatgctttcagtgagggaatctgcattacttgctccattcatgagaatgcactttgtgtcactaagaccgtcttcagcagttcacctatatggtaacccaaaaaacactgctttgcaccatagactgcactgttcgcagagcggagtatggatatggggatgggtaagctgctggagataacctaagggattggtgatggcgactttgctttaggttatccttctgctgattaattgccttgctcactaatggtcagtttgagttcatattaataactaagtcttggttgagaaccaataaacct

SEQ ID NO: 105407 - DNA, 394 bp, Zea Mays
gaacaagtcgttggtgcgaggtcggagcggtggcaacctgatgctcaaggtagttccagatgtccactcagacagatgctagaggcttttggatgcgacatgcctcatcaggggaaagtggctcctaaagccgatgttgctcgctaggagcagggtgctccaagccaagaaacatcccagaaagggaaggaggttgcgccgaacgagggtggatcaagcgacgatcgcaagaggtcacccgattggggagactcctcgcaaatagtaacgataaggtcattaggaccttttgggggcacatggcacgatcatgatatttagacttccttgttagactttcttttttgttgcatccttacatctattttcttagccctatgacatcagcccgttg

SEQ ID NO: 105408 - DNA, 315 bp, Zea Mays
gctgccacgatgtatgcaaacgttgctcgttgagttgcgagaggctttggtgatcagtaagtatgatgaactctccagattgcaggtaaggacgccactgttgtactgctaccagcacagccatgtattccttttcataggctgagaggcccctagattttggtcccaaggctttgctaaggaaggccaatggatgacccttctgcataagcactgctccaacggccaaggaactggcatccgtttcaattgtaaactgggaagaaaaatccggcatagacagaacaggagccgttatcaaagcttgtttcaaag

SEQ ID NO: 105409 - DNA, 560 bp, Zea Mays
ttgacatattgctactgtgtgatgagatgaacgacatgaaaatagagcaagcgtcgagcaggatagcgccgagaagtagaatgttgtatgatatgatgacatcaagccccttctgaccagccatggccctcacaaacaacgctagcactgctgatgttagggaaagagagacaaagcggtggatagcatagcaatacaacctggggttatgtggtaatggcgcgtgccaaacatggctgtcccggagacgaatacaagcaccatgggagccacgagccgccggtcatgtccatgcatctgcttgctgatgacgtagatggtcgtcggcacctgggtggttaggctgagaaggtggcttttccagagcgcattgtcctccatagagaaggccgtcatggtctctttccctccaagatgcagcagcaggaagagcacccaaaagagggctagctggttgccaccgccacggagagtgaggcaggcgaggaccaagacagcaagggaggtaggcaagccacataatgacgctgagaatgtgggagctgtgacgcttccggaag

SEQ ID NO: 105410 - DNA, 305 bp, Zea Mays
aaggtatcatagattaaaaaaatggacgtctagcctgtgcaaataaatcaataaacatacaaatactcgatctccgctataaatgctttaatttgcgcgtgctacgattcccgtgcaggttagtttagatcctgtgtgtcatttgtgtttggtgctaaaacctcggaggaagcaccagtagtattgcagaacgggaagttaccaagtgcgagcaaatagacagacatccgttggataaaagacatgtatttgcaaaccctaatagtgaggacactcaagtgcaagcagatagactaagatctgat

SEQ ID NO: 105411 - DNA, 540 bp, Zea Mays
gttctctggcatgcctttgtatctctgtactttcagtttgtcgtttggggccgggcagtgtgttagctcggcgaacccttgtttgaaggtcctagctcctgttagtttggtgcagcagggtctcttgctgatttatgcgtggtggcagcgtactgtatcaagtagagtggatgtttttaccttatgaatccaaaatgtactattttttcttggaatgtacgggggttaagtgaccacgctaagagagaaagcgtaaggcatacaattctgtccaccagtgcttccattgtttgccttcaagagacaaagattttgagttggtcaaatgtagtattaaaggaaactgtaggtgccaagcttgcaaatcaaacttttcacctgccttctctgggtgcctcgggcggcatccttatcgccgctgatccggatttctttgacatggttctcttaccatgttcaacaacatattcattgtcagtgaggatcagttctagattggaggacgaggtttgggacctcacgggtgtttacgggccccaa

SEQ ID NO: 105412 - DNA, 277 bp, Zea Mays
tccctcaacttttgcaataccagtcgtagatgttcctcatgttctccatcattcttggaataacatagaatgtcgtcgataaataccatgacaaacttatcaagatattccataaagactttgttcatcagattcatgaagtaggctagtgcattggtcaagccaaacgacatgacagtgaattcatatagcccatatcgggtaaagaaagccgtcttgggaatatcagaaggcataatcttcatctgatgataacccgacctgagatcaattttgg

SEQ ID NO: 105413 - DNA, 430 bp, Zea Mays
attgctcaatacctccaggcaccatgattctatttgggttattgtagacagattgaccaagaccgctcatttcttaccagtgcataccactcacaagacagagaaatatgcagaaatttatgttgatcaaatagtgcggttgcatggtattccggagaccattgtatctgacagaggagcactgtttgtggcacgcttttgggagcagctacaagaatcacttgggacccaggtaatacgaagctcagcataccatcctcaaacagatggccagacagagagagtaaatcagatcctcgaagacatgttgcgagcatgtgtactacactacggaaaggattgggacaagtgtctttctttggcagagttttcttataataacagctaccagtctagtttgaagatgacaccttttgaagccttgtatggg

SEQ ID NO: 105414 - DNA, 360 bp, Zea Mays
caatggtaatatccttataggcccctgttggaacatgcaaaggttgtaacaaaccagtaggcagttgtttttcacttttagcctgctggcacactgaacactgtttgacaaaactctccacatcagtcttcagcccttgccaccataacatccgtttaaccctttgataagtagtagtaatacccgaatgtccaccaaccactgagtcatgaaaagcagaaatgactttagttctaagagctgaattctgcccaatccaaatatgttgctcctttctaataactccttgatgcaaagagaacactgcctcatcggggctatgcaccgcgagcttttgtagcaattgttgagcctgtgaat

SEQ ID NO: 105415 - DNA, 596 bp, Zea Mays
gaaatcttgatgctcctacggagctgggcgtccaggggagttcgacctgggcgggctataaaaccccgcgtttagtccccctcctctcctcgacaaccccaacattcgctactggcgccgttcaagaacgtctagctacagtggtgaagaaagagaaactgagcgccgcgcgtgtaaaccgcctagatagtcgttcggtgtgcgtgaagtaaaccgtggtgtcgtgtgaaccaccgggtgatttccgttgcatggccggaagaattggaggggtgccgtatcctgaattgctgccggaggtgtcctaccaccgtgggaccgtgctccaccatgagcaggtgactttgggctacaactcacggtaattttgtttcctatagattagttatgctccttgggtcgcattgcgcttgttggactgaagaaagaagcacttgagtgcggggcagtgagttcaccggcgaagaattgtcgtgtggtgcttgggtgccgccgcccggtcagtgtcggggaggaagaagaaatgtgggccgtcggatcggcaacgcagggtcgagattatgacatcgcataccccttcgcctaatctgatctgg

SEQ ID NO: 105416 - DNA, 631 bp, Zea Mays
ctctatgaaggtcaaacaaacacagacccacaacaagtggttgaagctcagtctcatcacgctctctgaaataggtgggaggaactggtggagtggccgaggaagtgggagcagtggaagcaggtgtggtggaggctgtaggtgttgcgagggtggtggtaggcattggagtggcggaaggtggcgtggtagtagtggctagagcagaggggtctaatttggctagagtggagcgtgcccgagacgagaggcgacaaacatgaaaggttatctagtttgagccaatccttaactgagctccctgctctgctctctctcagttactgctactgctctagtagctctgtctaattttttcttcttctttcctccttgtcctatcggaatgggcgagggcgatcctgatcatcgccccctctcgtaggggtgacattctttgtcctcaccatactgattgctaaaactgcccacacactactgatatgttgcacaagaattagagaagataagcaagagcagcaccatagtagaaaagaagagagataagaaagatttgcaacctgggtcatgtctcaagaaaaataccaagcagaggaagagtcacgcgactaggcacgccgtcacaccgaaa

SEQ ID NO: 105417 - DNA, 272 bp, Zea Mays
gagggggactccactgatgctggcgacgaccgaggaaaacaggtgaagacccggcctaaagagggcacctcgaaggggaaggttgtggttgcagctacccaaaaaaggaaaatagatttgcaaggtatgggggatgacaagatggggccgagggcctctgggatttttgttgaggagttaatggggatgtgcgtgggtcctggggaggtgttgtctttgcccgagctccgggaaacatctttgcgcatgctgaaggttatcgggggtcaata

SEQ ID NO: 105418 - DNA, 706 bp, Zea Mays
ggagtggatgctcctccgccttggatccacggtatgctgtgggcagacaacatcatggcttggatagctggtgagttcctcttcatttggtttgcactcgttgtcgcaccggttggggcttgtttcggtccatttggttcaccatgggcgaggggaaagcttcactccggtgagacttccaccgatggggagctctactccgtcgtcgtgcatcggctgggaaggggggaagtctttgtccgttgatcagctaataaacagccacaatagaatgtatgggtaccgcttcggtgtattaaaatggtgccacaaatctatgatttgagggtctagggtagctgggtggcgtggtcgactttgaaccgttggatgatgatctgacgaactacgatgcgtaccggttcacaaaggaagacatgtaatccaggccgtagaagtcttgatcggatggatgaggtccaattataccccttcgtccggtaacttttacaaaagagaccccaagaaagaaagtagatataccgacatccacacatgagtacagggtattacacataggccctgatattcgtaatttaaacactgaagagtggagaaataataccagcagtccacgaattactaagatatataaataacatccaagaaaatgattttttagcatacgaataattctaaaaaatcttagaaaaatccataacttatt

SEQ ID NO: 105419 - DNA, 540 bp, Zea Mays
ctcgaagtagagcgactgaatacggtgattcaatcaacacggtatcagcaaactctgaggcgctatcatgataaggccatacggcatcgatccttcgcagtgggagatctcgtcctccaccgaattctaacgggggagggacgacacaaattgtcacctctatgggaaggaccattcatagtaacagaagtcactcgtctgggatcatatcgtctcactcagatggacgtcacggaaattggaaactcatggaacatagaacacctcaggaagttttacccctagctacatcccagaagctattgggacgacgatgtattctgtaaattgagaaatatatcatcaataaaaaggcttcaaaggcgctcaatttgttcgctgtcaattggcatacttactcaactcggggtgaccactatgcccttctaacggagcaatcggcttaagtcggcaatgacttaaggcggtgcgacatgctcacgcttactaaactcggggtgaccactatgccctactaacggagcaatcggcttaagtcgg

SEQ ID NO: 105420 - DNA, 584 bp, Zea Mays
ttctaagtgtatattaagctagcctttatagttttcaaagtccaaacccagctaccttttataaatacatgaaaataaaagtaatgttttagttgttgcttcttaagtgtaatattttaattgatcccctaccctcccaaaacacacaaagggcaaaaacgtcacataacacatgtcgtatgaaactaaaagaaggttggtatcctgcttatggttttagaacgtgcattgttaatttctacttgatcttatctaaagataactaataagggtttgattatagtatgtgtagcagggctttgcactagcttgccaagctgatcacaaccctcttttacctgtgcttcacccaatgtgttaaaacaacacaagcaggttattttcttaaagaaaaaaattgtaacttaatattgcagaatatacttcattctctcatatatgttagggtgcgctttttttgaaaaagcagtattaggtttttttttgaaaaaggagcagtaggtaaggtccctactgaatccctatccctactactaattaagaaagcagtgtgggcgctcggcgcggccatgcccccgcctcgc

SEQ ID NO: 105421 - DNA, 443 bp, Zea Mays
aaatgattctgtcatcaaggagttgcatgcttcaaagaagcttgccacgcaaaatctagaggccgcccacctcaacatcaaggccttagagaatgaccgtgttgtcatgaaggtgatgtgcgacaaagccatggacaaggccattcacgccgggtggatcctgatgaggaggcctagcgttgtggtgcctaaagacattgttgccgatgttcttgccgcacctgctatcgtgagccgaccttcttcttctgctactcctgtagctgaggcttcctgcaaaaatgctcctgcgcagtgatttgctcggatggaaaacacttttcattgagttagtactttttagtgacacattgtactatgaattccgtgtgcgtgtaattgtgctacgtttgaacagatcgttctgttagcaaggtgctgaaaccaccatcgggcatgtgaac

SEQ ID NO: 105422 - DNA, 425 bp, Zea Mays
aaataaaactcatgcatgtatggagttaataagaaacataccatacaccacgtcagcatcctcaggaactgattccgctgtcacttgattgactcttcctctactctggttctgtggagtcttgttctgtgcagatccacgagcaggtgtgttctggtcagtcctctggttgctgttcttctagggtgtctgttgattatgccttgggcagttgttggcatagtggccaagttcgccacacttgaaacaaccattaggttgaactggggtagttgtgttgttgttcttggcgtgtgtgttcacggcgcttctttgacggttctgttgttgaccactagacctatgaccggtctaagtgttgttcctctgttggttctggtattggttgctcctctgaccttgttgtccaaagtgttgtacttggt

SEQ ID NO: 105423 - DNA, 297 bp, Zea Mays
aggatatcacttgagggaatgcgtgggcttgttaaacttcatcacttacagctagttgattgtttgaatgattgtggggaggaactaaggcaagtgatgtgtttggggaacattgatcatctgcgatatgtaaattatgggtcgcgtagaattggtgagtttccaattggtagactcacttcacttcaggagctgcacaactatcgggtacagggaggtgaaggtaacaaaataagtgatatcaagaacctgggtgctcttcgcgaactagatgttttcagcattgagaatgttgaa

SEQ ID NO: 105424 - DNA, 676 bp, Zea Mays
ttctaaagcggaagatgatgcattatccacatcctttgggggtcaaggaaaaaggagattgaacagagtttttgatgccattggttttgtttaccccgactactgctacccgctacgggtacggggaaagaagagaaaaactgctgctttggccaagactgctgcttcggccactccagatgaggctgcgccaaagagcaaaaggttgaaagtccttacccaccagccacgttatattgaaccggtcgtagtgcctgagtttggcggggagacttctttagctgctgaaccaaaagagcccattccccctacgcataaggttgaagattcggctataatgccgaaggtacccttagccgagctagctgagtcgaagactgataaagataaggccgaagagccaaaaattgaaggaacaaaaacgttagaaattttaagcccttcggcagaagtaacagtgccgaaggcacaaaaaagttttgcggcaactcccaaaagaagaaggatggcaaatgtactagatgtgttagaaacagtaaaggctttaagctccactccttcagggaaaatcgccgaagcttcaaaaatgcaaaccgtagctgaaacaaagccggccgaaattaaagctgcaataatccaagctagtgccgaagctggcccttcagagctcaccgag

SEQ ID NO: 105425 - DNA, 451 bp, Zea Mays
caattgtgcatgtagagatagacctgttggacaacatacgtagtgttggtcctagtaaatgtgagatactaaagagatttgacaagattatggttgatagtggggttactgatagggacagtgttgctggagagcttggcttatgtgtccaccgagaccacacaaggggcttgcattagcacactagacgatatccagggtgtaccatcgttgttggagaaagagtcaaagaggccacctggacctaggcaacgctcaacaacattccctagaaaatagtcaagaggaaccaaatctttcatggcaaactcatgctgaagagcgatgatgatctggtgtaggaggcccgaagaagagacagtgagcataatgccatcaacatagaggaggtacacaatgtcaccgccatgccgacagatgaataatgatgtgtctgacttagcctcaacaa

SEQ ID NO: 105426 - DNA, 284 bp, Zea Mays
atcagactggccatagtatgtagaaaataaagttggctcgtaagcagcatttggtcaagtaactgcttgtaactcctaagagagcagacatgtactgtcgtaataagattggaataactgtgctccttttactagaatgtatttatgttctgatatttgttatactcttggctttgctcttggtcttcctctcttttcatacggtagagctcttttgatactcatctatttgcctccaaagatgagtagcctaaagcaactttttcttttgcatttctgtgtct

SEQ ID NO: 105427 - DNA, 375 bp, Zea Mays
tgccatccgccttgtgtaaacctcattaactatgctagtcggcggacacaacacaaatagtatcagtcatctttccactcatgatctataggtcctaggcctaagtcccactcatgatctataggtcctaggattaagtcccctgatgccctatgaccctgcacaatgacaaggaaggctagcagatgggctatgaaggcggaaggttgacgcaagagaagtagacaaaaattagtaatgatggtgcccggactatccttgctagcacgaatcgaatcatgtcccgacagtcccagggatacggaagaagacctacgcagggaaggatatcaatgcatggcaagttttcactaggggtagaaaccttgtttatgt

SEQ ID NO: 105428 - DNA, 396 bp, Zea Mays
gctggaggattttccagctgccacagagaataatgaagtaagttggagaaacacgattcatgagctaacaacaaaaatatactagaaagtaaaaaaaatagtggcaagctcaaaaagcagaatctgtggatgtagttaaatattctgcaatgataacaagccaaatatactttccacattatgcaaaggggctcacggcaagtggcaataactttctgcaattgttccttctttctgtcaagttatttcaattgtcttatgcaatgattctgcaattattctgcaattgtttctgcaagtggcatatatgtggatgtagttaaatattctgcaatgataacaagccaaatataactttctgcaaaggggctcatgagcaattgtcttaactttctg

SEQ ID NO: 105429 - DNA, 812 bp, Zea Mays
gccaagggggtagcttcaacatattcaataatttccatcttctctgtagcaggcaatgcagcagtcttctctaaagagtgcagcttcgtccaatgagtcaaaactttagccctttttggtttcgacacggcggaagaggtcgtagttgtgcttttcctttttgttccttgtttttgaatggggaagtagtggtcaggataaataaatccaatcacatcaaaaattttgtttagtctcctctttccacgagcaccgaaggcagtattcatggcttcgtcctctaccttcgtataagcccccaacagctcatcactagccacctcaatggcttcaatccattcatcattcgcctcgccaaactgacttttgtagtgatagctgtactttaggtaaaccaggccaccttcactggaaccagcagcggtctcctttggcatcttccaatcatgagcaagaagccataccttaaaagcaatgtgctcctgaaccaaatcactagtgccaatgtaggtgcacactatgttgaaggccatcaaacatgcttgtgcttcgtttccatgcccgatcgaaggtctcctaatgctgaagcgcgatcgaatggggcactagattacgcccttcaaatcctccatctcacctagatcatttgtaacataaatccattgcttcattcatgagcccaaccatttttctaaagcgtaagcataggacacctcacatcagaccggtacacaaaactatagcatccgaagttgttatgatattgctctttcccaaccgcctttgtctggtaggacaattcatgaatgttg

SEQ ID NO: 105430 - DNA, 484 bp, Zea Mays
ccactatttactgaacctcgcctttcttcagaagagttatagaccttggtaggcggtcacagccaagggtacactagaggagtaatggggcttcagatttggcttcaggattgcaccatgtttcatctttcttccatcgcgccttcccatgtccagcagcacgtcctcctgtaacaaggcgagcgtgcaagcagtattgaggttgggaggacgttgaatcacaataacagatttaatttcatctctaagcccgtctataaatgtagtggtgatcatggtcggggttagctggttttcatgggcgagcagctggtggaccaattgatcgaacaactcaatgtactcccccaccgaagagttctgttggatgtgatagaattgcctgataagtataatgtgttggtccctcccaaaccgagtggtcaaggctgggcataactcttcccagttcatttccctgattctagactcaatagactgcagc

SEQ ID NO: 105431 - DNA, 315 bp, Zea Mays
atcgtgttcgctttggcacacaactgctgaagggagaagctcagatttggtggaggggcgtgcaggcagctcactcctcttcaccaggagtcctgtcctgggatgtttttatcaggcagtttgagaggaggttctacccggtcaccttcctggataaaatgaagattgatttgcagtcctacaagcaagagaagaagtctgtcatagggtatgaagtgggcttcaacaagatggtctgttttgtccctcatgtggcttataatgagatggagaaggcgagccagttccgtcacggtctgaaaccttctattaggc

SEQ ID NO: 105432 - DNA, 376 bp, Zea Mays
ttggaattcagaataattctaccacaaagtagcagtggtgcatcacattggtttagttgtgtctttgaagtactagcaatttgttttttacatttactccaaggaaaacattcctagccatctagtagttatgattatgaaaaacatagacaaagcctgagtcatccagaggtgtgcaagaaaactgccagtttaattggtgtgcaaggaaactgccagtttattagggtttaatggctttgttggtcatgtgaataagtttaatgtgatcattttaatgcagcattaggtttagcttacttccattgaatcaacactcctgccactacttgttaactggcttgtgtgattagagcaatcctagccaacactgtca

SEQ ID NO: 105433 - DNA, 584 bp, Zea Mays
cagaagtccaaagagctggaacaacaaatcgcagacatgcaaggcgaaggccaccaccaattgcaataggaccctctccacatactagtcatgaccccagctactttccaaggaataaactaccttgacgagcgaagccctctcgcaccgcagctcgaagcctcaccttggcctagcaattttaggacgggtacctatcctaggtacaatggcagcaccgacccagcacagtacatcataagctaccaagttgtggtcgtatcattcggaggggacgacaccaccatggccaaatccttcattatagcattcaaaggtctagccctcacatggtacacaagattgccaccattatcaatcgactcatggaaaaccctccacaacaagttcttgttaaattttcaagggtaccggccagaaatagatgccctggcattatcactctccaagcagcatgaggaagaaacccttcgggagtactacaaaaaattcctcctcctaaagtcacaactaccttcagtcgatgaccacatagctatccactatgcaatcagtggtcttcgcgctggtgtcctatacagtca

SEQ ID NO: 105434 - DNA, 555 bp, Zea Mays
gaagaagtccttcgtccttgtggcgggccccttctcctgatcgtatgaagtagtgcttatgggtatggtgccgcctgttactcttgtccctgcggtacgttcgtggatgacgtccccgtggtgatgcgcggcaggtcccatggtgtaggcctgagactcgactaatacgacatggttcccctccaccatcttgggcaccatgttgtcctaccgtgcatgtggatttgtccattcgaaaaggcgccatgtcttgtcgtttctaccatacttgcactgtagatgctgaggttgctcctgatgggagagttgtgtctgtgtcttatcatctgggctcctattgtcacggactatcgtggtcaacatatgcttgtagctctgactcaatgcttagacttgctaggcctcacaggcttggtcgtccgctctgcctcacaggcttgctcgacgggggacttgatcatctgctccgcctcacaaacttgctcgtctggggacttagtcgtctgctccacctcgcagagttgctcggtgggggacttgatcgccagccccgcc

SEQ ID NO: 105435 - DNA, 612 bp, Zea Mays
tatgctcctgatgaggtggcagatgatgaaaggaagcaagagcacttcacagaaggactcaatggccccctacaatatgcattggttgctcacacatttccatcatttcagagactgctggataaggctcttgctattgaacacaagcgtgttcaactgggtgacttgaagaggaaggccatttactcaggggcagggtagcagcagtgttcgtcctcgctacgttctgccacagggtaccccagctcgtccaggaggaggaccacacctagctcaatacactccacaggggtctccacggacacctacttgtcaggctgcccccactggcaccccggcgaggcctacaggacagaagactggccctacatgcttcaagtgcagtcagattgggcactatgctaatgcttgttcggtggggaattctggtacactagctcagaacaagcaacagactcctggcaagggatattctattgccagggttaatcaagtcaccgctgatgctactcctgatggtgctgacaacgcacttggtatgttttatattaatgcaattcctgcaacaatattatttgattccggtgctacacattcatttatatctgctcg

SEQ ID NO: 105436 - DNA, 533 bp, Zea Mays
cggagcaatcggcttaagtcggcaatgacttaaggcggtgtgacatgctcacgcttacttaactcggggtgaccactataccctactaacggagcaatcggcttaagtcggcaatgacttaaggcggtgcgacatgctcacgcttgcttaactcggggtgaccactataccctattaacggagcaattggcttaagtcggcgatgacttaaggcggtgcgacatgctcacgcttgcttaactcagggtgaccactataccctattaacggagcaatcgacttaagtcggcgatgacttaaggcggtgcgacatgctcacgcttacttaactcggggtgaccactataccctattaacagagcagtcggtttaagttggcaatgacttaaattggcacagtacactcgtgcctactcgatccaacgcaaacatgtttgcaatcactcatcctagggcgacctctaagcctcgcaaaaatgcgaagagacttcaaaaccatcgcactgatttacttctgcaattgtagataccgt

SEQ ID NO: 105437 - DNA, 867 bp, Zea Mays
atgactaaaatactcggtgcaaaataatttggatcgcaatctcgatgttgcatcgatatcgcgcgtttatttcgcgatatgtcgagtcttgcgtctgctaaaaaaattaattgattatacgagtatgaattagtaagccctcgacgtttataaactggaccacgctcgctacctgagaaatcgtgcgtagagttattagtcgaatgttcggatggcggggaaaattcatctaaatttaactcaaacgaatgcaaatttaaaattaatcgattaaggcaaattagaaacgtcccctaaatatttcgctcttatacgcggtctcaacgaattcggtagacactaataagggcagactgtttaaataaaatgaactcgaactaaatgaaaccaaaacaacgaatagccgaatcagtttcctattccagaatccgagagaataatatcgtatccggacagcattttgatcctatctatttgcatcttgctcagatctgagtctctaaacacggatatgtatatattcttttgtagaagaaaaagcaagaaaaagaaaataaaaattcctcacttatcctgtcgtacatccctagctttacgtcatttttttgtgtttcttttctcatcatcacgcttatttctagaaaatatccaatgtgtttttttcttcccatcgttattttctcctcattcagcttccaggcgttccctgaaatgcttttagatatttcatatcatgaagacgctgactccctggaaggtctcacgtaatctcatcagccgactgggagaaaaactttttgttcttatcttcaaccgctcaactcccgtaaaaaaaatcctgccgccctccaccttccttgattttcc

SEQ ID NO: 105438 - DNA, 928 bp, Zea Mays
ctcgacgtggcgacatgacgtgggaagcgattgggtgggtggggagtgctcatacatggtcacacagcgtgcgagcacatcgacctaaattgcctgttgcgagcggttagcactgagttttagtattggtttctccaagttcgtccaacaagaagttcttcgggtattctctcactttcactttggtcttgctcaacttcatcccatatcatttaaagcgacacactgagtttagtaagcatttcagctggaataaaacagatacatattcttctgttgagaaaactttgtgtaccttgagttcttgaagtaagtatgcacatgaagacactggtagcgtagcagcactgggagttttttagccatctgtgatgagaatatgcatggaccatatttacttaccatcactgttataattagaaacatgactccgaggaggtcatctgtgttgagccgttaataccctcctgagcagcattattgcgcattgtagaggattgaaggcagcaccatatcggaggccatcaaatgtacacctgaaattcacttttaaattatcaatgtgaattgctagccacccaaatgccccattgagatcagttaaagtagaagctaccagcaatataaatattaatatagacaataatgctagatcactatacatcaataaacaaaatgtgtttaggtacatcaagtactttaatgtttctcaggtaacatagtatgcatataaacatttgcttcatagaaaaaaggtaaatagctggaagcagcatgaaacttactagtgacttgtcatataaaaatagacaaactgcaagaaggctccaccgaatcaccgaaatagcgtcagcaatagagagttctgtctctttgatgtttctattgcaactttatcatacaccaagctacaaaataaagatgatgg

SEQ ID NO: 105439 - DNA, 765 bp, Zea Mays
ctgggcataaattttctttcccttttcgtagattcatgttgatggtactaacaagtttgtcactgaagacaacatattctcagaagatgaaattaccaattttcagcaccatatattggagataattggaagtactcaggtaaaaagtatatgagaattcccgtaattacagttgaataagatgaaaaaaattctatccacatgttttgaagactaaaaaactttttgtgattttttatgaatgtgcaaaaaacatatggctggaaggcgttttactcaaaatggatcaagcagtactcagatatacgcacaaatgacgctgccatatgtttcaaaccaggtaataaaatgcaaaaaaacatgaacaacacctactaaattatatatgggaatttaattgatccttgatgattatgcagggtggatacattgatctgatgatggaacagatacgtaactcgtaaggagaatcagtgagtgaagtaggcaatgaaatgcaaagtggcctatgcacacaaaatgaaaccatgaacaaaaacctactagtggccccatgtgagacatacacacagatgattcttgaggaggactcaacgcttgcaaatgcagacatatccaaggtaagtgtgggggtgtgtgggaaaaaataatagtaatatacatttcataacataaacaatgatgttaacaatgatgtttatagcggcaacaggatgtgttaacaggatatgtttcaaaccaggtaataaaatgcaaaaaaaacat

SEQ ID NO: 105440 - DNA, 341 bp, Zea Mays
ctcctgggtggctgatgaggaaggaggctagtgtgaccatcgcgttggactcgaggagaaccgagtgcacgactgcacgtggatggaggcgaggtgactagtgaccgctgcggggactacaaccgccgacagagaagaagaggtgggcaaatccgatagagaagaggccaggctcccaatcgttgcggcgatcggggtggcaccgaggatgaagcgcgacatggcccaagcgagaggaggcgaggaggatggtagcgcgtggaggtggattggggacgatgttccctcgcatatatttgagggagattagagctggaatgagggatgctggtaatttgggg

SEQ ID NO: 105441 - DNA, 539 bp, Zea Mays
cggtcagctttgtctcggtttcaatctgtgccttcgaagccttggcaactttccttggagtagagtttgaagtttttattgtctccagcacatctagtacactagccatcctttttctcttgggggtcgctgctagacctttttgtgtcttcgacacctccactcctgccgaagggcttagaacctctaatgttttcgtcccttcaattctcggttcttcaattttgtcagtcttcggcattgcaaccggctcttcaatcctctgcgtaggagcaggtcctttggcttcaatagctgaagaagtctcaccaccaaattcaggcactatggccggttcaatgtagcgcggtcgatgagtaaggaccttcaactttttcctcttcgatgcgggctcgcttgaagcagccgaagcagcagcctttccagaagttgcaacctttcttttctgcccccgcggcgggtagcgatagtcagggtacacaaacccaatagcatcaaaaaccctatttaaccttttattttttcggctcccaaaggcc

SEQ ID NO: 105442 - DNA, 492 bp, Zea Mays
gtctagtcgggggcgaaaactctgctcggggccacatgctagtcgcccctcagtgacgtctcgtcgtggactgggtaaagggaaatgatggaaacgggccgacccaggagtgcgatgggcccacgctcggattaatcgtggcttgggcgtgatcacattgaggttggtcatttttcccacgcccgacatcctcaaacgtcggagatagctcggagcggtggcgccgggtttccctcggatagcgaagtttgttcactatagctaggagataagcaggaaaagtgtgaacaacgtgtacgcgggaagtaccctacgatcgtgtatataaggccaagggagatctccatcactttcatctcattagcacctcgcaacttggtagacaccacttgtaaacacttccacatacaaagacaccctaggaagtagggtattacgctcctcaaagcggctcgaacctgctaaaactcgcttgactctctctctcgtgcc

SEQ ID NO: 105443 - DNA, 773 bp, Zea Mays
cggcccgaccacccaagttgccttgcccgagcatcatctcttatccccccctggcctctcccacgccttagctagctctccaacaagcagctagcctccagcaaatgggcacagcattaccacacctcccactagctacccatctcgatctctgcccgtctaagctagagtacccttgcaagcgtttttgtcctctagaaagaaatggcctgccgagactagtaggagcatgcagccactaagtggttgatgacctgctgatgtttcttcaggccggcgcggctgttctatctatatcctctgtctgtcagtgttacattatggactttagtcatgcatgcatgcatggtctttttgttgggtcctgtacattccagcaagggctagcttactagtgatatgatgatggggaagtgtgtgatcatgttaggaaacatcctacccaggttaacacgtacttggatctcatgcatgcaatgcaatgcaacaacaactcacttttctggtcaactagctagcctgcctgcagtgcaatatgcccaactgaatcacgaatatgtggaaaggcgtccctgacttaatcatttgacgcgcatctctttcaaataatgctgcatctcagctccaccaccccaccaacaatctcctccactgccaggacgatccatccacagggaaaaaaaacacaagacaaagctagctagctagctatagtgagttagtgacttgctagcatagcagtcagtcccaaagaaaagaaaaacccagtgctg

SEQ ID NO: 105444 - DNA, 277 bp, Zea Mays
gaaataataactggagggcatatttgaggtgctcgcctccaggtgcggtaaagagaattctcgcgcctgctccctgcagttttaacgagccatcaaaatacattcgccatacttctgcggtttctaggttatctagtacttgttgttcagtccattctgatacgaagtcgaccaatgcttgagttttgatggcagtgcgaggtcggaattcgatgtcatgagatcccagtttgcaggcccatttggctattcggccaacgacttccttgttgtgaag

SEQ ID NO: 105445 - DNA, 361 bp, Zea Mays
tggtctagtaggttttatgtgagctgaacaacatgatagatgagcagttgaataattgggtgattggacgaacgatgaatagtatgatgaacgatctgttgaatcatgaatagtgattatgaacgaacgatgaatagttcgtatgaacaaatggcgatgaatgatgattagttcgtatgaacgaacgacgatgaacgatgaatggttcgtatgaacgaatgaggaacaatgaatagtggttatgaacgaaaatgaacgatgaatagttcgtataaacaaacgatgaatagtgataatgaacgaacgatgaatagtgattatgaacgaatggatgaacaatcgaacgaacgatcataatttc

SEQ ID NO: 105446 - DNA, 375 bp, Zea Mays
ggcacatttccctttcaatatccctagctcaatcacctattctatggtgtgataatcttggtgccacatatctcatggtgaatcccatttttcatcgacgaatgaagcatgttgaagtggattatcattttgtcggcgaacgggtggcgtccaaatgactagatgttcgaattacttgaactaatgatcaaattgctgatatcatgacaaaagccttacctgggccggcgttcaagaagatctgtaccaatatgaacttagctccctttagtccagattgaagggggtgttaggaaatagaatcatggaatgtattctgttagggtaatccctacaatctcggtcggccattgtgtcgcctcgttgtaatcctct

SEQ ID NO: 105447 - DNA, 598 bp, Zea Mays
attgaatttgaaaagggagaaaagaaaatggaaaaaaaagaaaaagaaaggaaccttacctgggccgtacaccagcaattcggcccacttcccttcattccgctcagcccacatccatcaagcgcgcgttcactgacctctgggacccacgccccagcccctgctcaccgtgctacacctcgcgcctctctggttcgtgggaccgcaccgtagggcttatcttcttcatccacccctctggcgtgcgcctgccatacactgacgagtcggtcccgcacgtcagctctatcccttcccctttcttcgctgcgtccgcgtgactcgggcaagctccagactctgcgcgcggcgacaacagaaacgcccgaaatcctcgccagtggcagtccacctccctccgtgcggaacccccctctctgtgccatatgaccggtgggacccacgtctgggcgcttcttccccgcagatctcgccaatggaagcaagtccgtccaaccttggccgccacgatttccgggtcaccggggacgccagctagagatggttttctctgttgcgttcaggtctcggggtatataacccaccctagacacgccca

SEQ ID NO: 105448 - DNA, 740 bp, Zea Mays
ttgaaatctagctaagggtaaaacttcctgagatgttctatattccatgagttcccaatttacgtgccatccatttgagtaagacgatatgatctaggccgagtgacttctgctactatgaatggcccttcccatagtggcgacaatttgtgtcgtccctcccccgttagaattcggtggaggacgagatctcccactgcgaaggatcgatgtcgtatggccttatcatgatagcgcctcagagtttgctgataccgggctgactgaatcaccatattcaactgttcctcttctagtatatcaacatcttctagcctagtagcttcggcttcagctatgttttcgaagatcaatcttggtgccccaaacttgagatcagcaggtagcactgcctctgagccatagaccataaagaaaggagtgttcacatgcagagctcggctaggttgagttctcaggctccagacaacatatggcaactctctgatccactttcctgcgaacttttcattcttgtcgaagactttctttctgagcgcctccaatatcatcctgttggctctttctacttgcccgttggctcttgggtgcgccaccgaggcatatttgatctgaatgcttttttgttcacagaaatcgaagaactctgcgtttgtgaaattggatcccaggtcggttatgatgctattcggtatcccgaacctgaatattatgtcctatatgaattccactgccttagc

SEQ ID NO: 105449 - DNA, 430 bp, Zea Mays
gaacaagcagacgtctgcgttaatggtagggttcggccgccgcgtgcgttacgggtgaggtgagctgaataactgcgtgctcgtgggtggattcgtgggcccgatacacgtactctgttgggcgaaatctacgcgaaggcccatgaaccgacacgtggattactgtttcgtaaacagaaacataagacatcgtaataccaatatttgtgtggggactagtacgactgcctagattgcgggaacataatcttctcgtgggcccggatgcccgaaacatgcgcataccagaagtgtataaactgatacacaaaatagcataacacgtaataatatttgacgtaagcaggtgggtatagtaagccaaaaagtgtacagtgcggtctgtgcacctggtcagtgggtggtcggggcttccaatagttatacagag

SEQ ID NO: 105450 - DNA, 772 bp, Zea Mays
gttcacgatatctctgggagtctgactgctgttgtcattagggagttccttcttgtttgggatctgattcaagatgttcatttacagacaggagttcttgatgtccacctttgggtgccttgcgcctctggcctctattcctctaagatggcttataacagcttttggaccggtacaacatcttttgaaccggctaaaagaatttggaagagttgggctcctccaaaatgtaaattcttcatttggctagcatcactgaaccggtgctttacgactgacagattggcccggtgaggtacggatcatcatgacaaatgcctcttttgcgatcaacacgaagaaacagtccaacatattttgctctcttgtgtgttctctagaaacatttggtggcaggtgttgtgtaaagtggggctgcaatacctggcacctggacctgaggacatgattttccaagattggtggagaaatgccgaaggccaccaggtatctaaagagaagaaaaaaggttttaacacattggtaatccttgcggcttggtggctttggaagcattgaaacacctgtgtcttcgatggagcatccccgagcactagagatatcctgcagcacatccaagaggatgcaacgctatggggtatggccggggctagaggtcttaggggcattttgccttaagactagcggtggcctgtttgttgtgccttagatgtgggatgagtgtgtttctgtacttgtgttttcgacctccgtaaggagtcgtttgttcccg

SEQ ID NO: 105451 - DNA, 366 bp, Zea Mays
tgttgacgatgtggttatcaagacagaaaacttcatcgaggatctgcaactagtcttcaacatcttgagacactgccgatggaagctaaacccagaaaaattcgtattcggagtgccagccggaaagctacttgggtttattgtcagtcatcagggaatagaagcaaatctagagaagattgaggctattatgaggatggaaccaccacggtcacagaaaaagatacaaaggctcactgggtgcatggcagcactaaacatattcatatcaaggctaggcgagaaaggaatgacattctataaattgctcaagaaggtggacaaatttcagtggaccacagaagcataggaggctctagaggcact

SEQ ID NO: 105452 - DNA, 628 bp, Zea Mays
ctggcccacatgaagcagaccacccggcactgcagacattacgtgatgtcgtcatcttcttcttcgcaccgtctactacgaccgcgtattcaaacgcggcgtcgtcggagaagacaattagcgagccggtggcggtagtggagttgctatcgggtcacactgttcagcttggaacttcgagggtttactcaaaatgcgtgcaagaaacacagcgtttaggttattttgtgaatggtgtggggcgtgctccagggccgaagaggtctgagagcaggagggtgaattggttgtgttcgaagtgtttttcactgttggacttcgcttgcctacacaccgattcatggttgaagtgctacaaaggagattcatgagctaacgtcgaatgccatggtggccctagcgaagtttgtgtgggtggtgacttcgtacggcgtagccctttggtccaaggttttgcaaagaactacttccttcatcggcagaaaaaggtgattggtgtcaaggttgcacagtttgtaacatgcaatttcatgccgaggactggaaagacttcgggtgaagtggtggaaattgtgccgtgtgatttttggcgggatttttggttctacatggagccggaggaccaaag

SEQ ID NO: 105453 - DNA, 1267 bp, Zea Mays
gtttgttacaaaattatcaccaaagttctaactaatagattggcccgctgcattacctctgtgattagtgaccttcagtatggatttatcaaagggagatatatcatggatggtgtcctttctcttcatgagattgttcatgaagtaaaacggaggaaacaaaatggggtaattttcaaagttgattttgaaaaagcttacgacaaggttaattggaattttcttcataatatgatgattaagaaaggctttggtgataagtggagtgattgggttttgaaaactgtgaaaggaggtaaagttgctatccgaactaatgatgtggtaggaccctactttaaaactcataagggtgtgcgccaaggtgatcctttttcccctctcctttttaatgtgtctgctgatggtcttgcttgtctgattcaaaaagctaaagatgaaggtattatcaaaggtcttattcctcatattatttctggtggctgctgctgtttacaatatgccgatgacactatttttctgtttcaagatgatttggaaaatgctagaaacctgaagtttattctctgtatctttgaacagatgtctggccttaagattaattttcataaaagtgaaattatttgtttgggaaatgcttgtaacagagaacatctgtatgctgacatctttacctgtcctcccagtggtctccctatgaaatatttaggggttccaattgataacaagaaactgtgcaaatctttgtgggatcccataattggaaaaattgagaacaagttgggttcctggcaaggtcggtttcttagtttggggggtcgattagtcttgatcaacagcagcctaaccattgttcccttgtatatgctctccttgtacaaatgccccaaggttgtgctgaaaaaaatggatatctttagaaaaagattattatggcaggggggcatgatcagaaaaaaataccatttggctgattggaatttagtctgctctcccaaaaatatgggtggtcttggtgttttggatttgcaaaaaatgaatgaagctttgttggcaaaatggatttggagactagaaaattctagtggtttgtggcaatccattgttaagagcaaatatgttaaaaataaacctatcatttctgtgaagaagagaccttcagattctcatttctggaagggtttactctcggttcgagacaaatattataattactgtaaaaagaatattggtgatggaaagagttccagtttttggaaaaacattt

SEQ ID NO: 105454 - DNA, 319 bp, Zea Mays
gctccctatgcatgtgcataaagagagaaggaaagcgctcggggtcggctatgcttaccgcattttcgcattcaagcacttgcctccttcccttagaagcctctctaatgtcgcgcctctgtgtctgcctagcttgttccctgctcccatggcatcattcccagcttgctcgatctgggagagtcgcctccttagtctagaaaacaaagggttcatccctgtgaaagaggttttggggtgcaggctagaaggtgagggcgaggtgccccatcctggagacgatgaggtggtcgagcttgcgtccttctatgagcgtggt

SEQ ID NO: 105455 - DNA, 381 bp, Zea Mays
ccagtttgaagatgtcaccatttgaggctctatatggcagaaagtgcaggactcctctatattgggatcagactggagaaagacagttctttggcctgagcatattcaagaggcagaagaacaagtgtgaatgataagagagaatttgagaattgcacaatcaaggcagaagagctatgctgatacccggagaagactactggagtttaaggagggtgatcacgtgtatctgaaggtgtcaccactccggggtatgagaagatttaaagttaaaggaaaggtgtctccccgcttcattggacctttcttgatcttaaagcgagtgggagaagttgcatatcaacttgaactacccgatcacctggcagatgtacatgatgt

SEQ ID NO: 105456 - DNA, 431 bp, Zea Mays
gtctctggtgaatctagcctatttgtagaatttagtttaattgcagttttggtacattgcagtcgttgaggaaccggaggcgacagttcacaggtctagctggtttagctcctcgggcttgtggtcgaagtcggggtcatggaccttgacgcggctgcagaggaggaggagcgccggcttgaggatcacaatgaggcgcatgatgctaggtactttctagggttcggtgacacccatggagatcctattgaagttgatattgttgtcagctctcaaattggtactggcactggatccacaagcccaccagtccctgatccaagtcaggctaatcctgatgctagtggtaccaacatgaagaaaaggtccaagtgctggaatgacttcgacgaattgactaagactgtcaatggtaagaaagtcaggtatgc

SEQ ID NO: 105457 - DNA, 497 bp, Zea Mays
gtctagctcttgtcttctgaatagccgcaagccccaacattttgatttttagctgcctacggaaaactagctcatcactagaaagctgcctagattcctgtgctttctccaatagggttaggacaatttgtataatagccatttgcaccttgatgtttcctactctcttttgcctccaaatcttcaaagctttggccgtgcgaatcattttcacatgtagacgtaagatgttatctgtagagttcactcttggtgtccaggcttgttgtatcacctctttgaaaccctcaatatttatccagaacgattcaaatctaaaccccttgtagaagtcataggaagagtaaccttgcatgatcaaggggcagtgatccgaggtcaaggtgcaaaaggcctggagatcagctgtcgggtataagtcgtgccactcggttgtcgctaaaaatctgtcgattcttgacattgttggatcattctgctcatttgaccatgtgaac

SEQ ID NO: 105458 - DNA, 350 bp, Zea Mays
ctaaaatcagcatcataaatctttgatagctcaattaacttctctaaatcaaagttggcaaaagaatcccttggatcaaggcaagcaatacatccaagtaactgagttgatctttcagggaagcgattgttgaactcaacaagaacttgatcaaaggcaacaataaaaaatccattatgaaaatgatggtagtaactcaccaacttagttccacgacaccttgatctgcctctaattggtattgtgtcatccatatttgggattactatgttcattttggtacaaaagcaataagctgcatctttctgtacactgtactctaaccaatcaaactgtttgaaccaagattc

SEQ ID NO: 105459 - DNA, 809 bp, Zea Mays
cgaaggtacttctggtgccgaagctgagcaggctgatattgaagaagaagaaaatgctgatgatgaagaagaagattatagcatcttgatcccatcaaaacccacccacctagattttgagaaatctactgtgtctgaaaccgacgtgcccatgatgatgaagctgggttacttcggagaatctgaaaacaagcttattcgttttgccggagaagaaaccactccgatgccgaaggatgatgaagtggtagttttcaaaagctttttcagagcaggattacggtttcccctgaacgagataattggagaagttttggataattatgaaatctatcttcattagctgacccctaatgttatcgttaggcttagcatcttcatctgggcccttcaaagccaagggatgaatccaaatgccgaagcattctgccgagtgcatgaattgcactatcaaacgaaggctagagcagacgggctgcatgaaaaatttggctgctacaacttcgcgtatcgcaaagatacgaaggctccggtcctcagctatcgtaccaagtggtcaaccgactggaagagcgaatgattttatatcaaggccgatgaaaagaaaagggggaaactgatgacgatggtcatgtgcccgctggctttgagcttcggaatgaccagacctttgtcaacgtgacggcagggtcaccatgccaacgggctatagcagaattcagggtggtggccgaacaagtcagcactagagatctggtgcaagaatacctggccaatagaacatctccaacgttaagcgaatttagcat

SEQ ID NO: 105460 - DNA, 522 bp, Zea Mays
gttgggataagagtataccatatgcggagttctcttacaataagagctaccaggccagtttgaagatgtccccgtttgaggctctatatggcagaaagtgcaggactcctttgtattgggatcaaactggtgaaggcagttctttgggccagaaattatacaagaggcagaagaacaagtgcgaatgataagggagaatttgagaactgcgcagtcaaggcagaaaagctatgcggatacccggagaagactgctagagtttaaggagggtgatcacgtgtatctgaaggtgtcaccaattcggcgtatgcaaagatttaaggttaaagggaagttgtcccctcgctttattggtcccttcttgatcttaaagcgagtgggagaagttgcctatcaactagaactatccgaccatcttgcggatgtacatgatgtctttcatgtgtctcaatttaagaagtgcctcagggtacccgaagagcatctacctatggagaaccttagtgttcaagatgatctgac

SEQ ID NO: 105461 - DNA, 510 bp, Zea Mays
tgacgggagaagggcgacacaaattgtcacctccatgggaaggacccttcatcattacagaggtcactcggccaggatcctaccgacttcccagatggacgaaatcgaagtaggaaactcgtggaatattgagcacctcaggaaattctacccgtagcactagcatccgaagttgttgtgatactgttcctttccaattgcttttgtctggtaggataattcatgaatgttgcagaaacacttggcatctgactccagcccttggctcctcatggcccaaataaaaatccccactttaattaaagcttcgggagtaagctgatgaatgtatatctcaaatgtctttaacacttcaaccaacatctcgtgcaagggaaaaccaagcccatccttcataaaactcttaaaaaccactacttcgtctgtttcaggaagaggaatggtagtctctcccccagccctcacaatggatatcatggaaatattttccctttattgtttcaatctgtc

SEQ ID NO: 105462 - DNA, 467 bp, Zea Mays
gtcgcagccttcgcagcttcggcttttgatcccccagccacgctagtgcgaagagccttcgtctcgcgatgagggtccactatccgcaacagagccttccttttcttatttgaagactcctggagatctttgtccatcacaaatgttataacaatgccaatattccgcccgtaaggaaaaactttaaaatactaggccaaaaaatatgtaaaatcatcctcaccggaagccatagggatggggtcatccctgcaccactcacccctgtcacttccagcatccacacaaaggcttctcgttgaatgggcgaaggcatgacctcccctagctcaacacatgtcttagccaactcttcagcaaacttgtctgagcccttcccctagtctccacccttttcttcgtcgctcgcagtaccaaagctttccccttagaacacccctcgtctgtcgcaccatgtttcactccgc

SEQ ID NO: 105463 - DNA, 372 bp, Zea Mays
cacatagaaatgcttttgaagccctagatcgttcccttcgtgatttactttctttgaaatctgctcaatctgctaccattccttttgggggtaaggtcatcgtactaggaggtgatcctagacagatattacctgtgatagaaggtggcaatcgtgcacaaattataaatgctgctataaccaattcgccactttggaattcagtcacagtcctacatcttacacaaaacatgagacttcgttcaacggatttaacagatagcgaaaaaactgaacttgcagattttagtgcatggatcttaaatattggcaacgacaatataccagctatacaaaaaccaggagaaatggagcccacatggatacaaattc

SEQ ID NO: 105464 - DNA, 372 bp, Zea Mays
gacggtgcaacatgctcacatttactcgacttagggtgaccactataccctgctaatggagcaatcggcttaagtcggcagtgacttaagacggtgcaacatgctcacgcttactcgacttagggtgaccactataccctactaacggagcaaccgacttaaggaggtgcaacatgctcacgattactcgacttagtgtaacatgatcgcgtttattcatcttagggcgatctctatgccttaccaactgatcaattagcataattaggaaaggattccaaaaccagcacaccgcacttctacaatcattcatgacaactgttggattctaacaacagaaacaaaacgttatagttttcagcaccaagaaca

SEQ ID NO: 105465 - DNA, 293 bp, Zea Mays
aagcgattcttctttgaaatctggaacaagggtggtcgacagttagccactttgaaggccaaggcttataccaaaaaggtctaacccttaggcttgtgttttcgaagcttttccattataacttctccttgataatgacttgctatgttttcctctctgcagagtaaagaagcgaaaaagaaggggaagaagtgagagaaaaccaaagtttgatttacgaagtatttcttctagcttgtaggatgaccagcgaaagggatctttttgtaaatgaacatttatgtaacaaactt

SEQ ID NO: 105466 - DNA, 1566 bp, Zea Mays
ctgatccagagccgctgggagcaacgacccctgtgtcgtcgagagatcctgacgggggcacgagaccacacccgcccggagtaggagcatccgaagcgccggatgggggtacgaaaccacgcccaccagaagagaagatgccaggtaggggcacaggtccacgcccaccagacgaggagtcactagctgcatgatcagtaacacaaggcgcagtatccaagtcgcgaccaagaagaaaatcgaaggagctagcgggagtaggcgggtcatgtgcgaacggaaaactgagctcatcaaatacaacatgacgggaaataataatgcggcgcgtggaaagatccagacagcgataccccttgtgagcagaagggtaccctaagaagacacatgcggcagagcggggcgcaagtttatgcggggacgtggcctgtaagttaggataacagagacaaccaaagacgcgcaagtgctcataggaaggaggagtattgtacaaacgggtgtatggaacctcatggcgtatggaggaggcaggtctgcggttaagcaagtatgtggcagctgcgagggcctcaacccaatacttgggtggcatggacgcatgaaggagcatggtacgcacagagttgttgagggtacggagaatacgttcagccttgccattctgtggtgaagtgtggggacaagaaaggtgaaaaacgatgccataggcagcaaggagttcatccatggcatggttaacaaattctgtcccattatcagcttggaagcatttaatagtgtagctaaactgtgtgcgaacataaggaataaaatcagcaatatgctgacggacctcagacttgtgcttaaggggaaatgtccagcaaaaatgtgtgaagtcatctagtaaaaccaagtaatatgagcagccagatatactaggaaccggtgatgtccagacatcacaatgaactatctcaaaaggggaaacagtgtgggaagtagatgtactaaaaggtagacgggcatgtttgcctagttgacaggcatgacaaagagtctggtctactttattacatgaaattaaatttttccgcttgagactagataagactgctggaccagggtgacctaggcgacgatgccacactgaggaggaggctgcgaggagggcgctggcagtggactgggcggctggtgaaagtgtgtagagatcgcctgagctattgcagcgaagaatcactcgccccgtcttgggttccttgacagagaaaccaaaagcgtcaaattcgatagaaccgccattatctcgggtaaattgacgaacaagtaataaattacggactatggaaggagcgacaaggatgttgttcaacacaaatttagtggagttgatgtcaaggatcgatgagccgcgggtcgtgacaggaatacttgcaccattgcctaccatgatcgaagaagcagcagctgggagatgagaatgaaggataccttcagaggagtgcatatgtgtagaggcaccagtgtccatcacccaggcgtcaccttgcagcgacatttgctgcagcgccgccatgaggc

SEQ ID NO: 105467 - DNA, 626 bp, Zea Mays
acgaagaaggctgcagagagggtctttgtcctgatggttagttcaacggttgtgacaccctttgccttgatcggtctgtcactcccgacaccgttgagcatcatgttggtactgatcaactcgctatcatgtttgcctagctttctatacaacagtaaggcattaaatttacggtcgctcatgtatcaattagcgtcctagaaattggtatcccatcaatgtggtggtgcacgaatagcagcttcaaatgattgaccgattccttgggtttggtgaagatcatgtatttatgaccgaaatcaaactgagcctccacaggttcatcatctctgataatagtataatcgactgaaaaggtaattatattaatttacatatctgcgcgctgcaacgaagcttcataatccaccatgtattctcctaataaattgtcattgctattgccactcaggtccatagggaccgggagtcttcaagagctccctagtggggcatggacggtacaaccgctatggccagacggtcctccatagacgcgaacggtccgacttctggagccagactgtccacgatacctacaggggcttgcgccttgggtgtttcatcttgcatttttgttaccgttt

SEQ ID NO: 105468 - DNA, 536 bp, Zea Mays
gcaccacgagcaggaagtccacaaccaagtgcgtccatcccctgcaagtcgcggatcaagggttaaaataatggcgaagaagccattaccatcatctatgcaaggtaatcgtgggcgggggcggggccaagttcgtcgaggttccggctctcaatcaacagctcaaattcatgctgtggtagctacatgtacatccatagaaaaggtgtgtgctgtgttcagtagctattgttgtatttggactgatcattagttgagaaataatgaatcagttaattattaatttgtgcagcatgtgcgaaatgaagaagaggaagatattttgattgatatgaatgatgaattatatgaggagggggatcattgtggtcgaagccaagtggagggggatgatgatgatgatgcagaggaggaggaggaggaattggagggcgatcattgtgatcagaagacaaatcgaggaaaaaaaagattgaaaggtggtgatcagctgtctccttccaaagataaggcaaagagaggaaagcgtgctggtt

SEQ ID NO: 105469 - DNA, 390 bp, Zea Mays
ccagggattacaacaattgcaaagagaccatatcgtatggcacctatagagttggcagaattgaagacacagattgcagaacttcaataaaaaaggcttcattcgccctagctcatcaccctagggagcctcagtcttgtttgtcaccaagaaggaccgccgcatgaggatgtgtattgattaccgatccttgaatgaagtcataattaagaacaagtatccgctacctctaattgatgacctttttgaccaactccaaggggcacgatacttctcgaagattgatctaagatcaaggtatcatcagttgagaatcaaggaaggagacatccagaaaacaacctttgatacccggtatggtcagtacaagtttgcagtgatgcccttcgg

SEQ ID NO: 105470 - DNA, 345 bp, Zea Mays
accgacaactcttgttccattgagtttgacccttttggtttatcagtgaaggatctgactaccaggacccttctcgctcgttgtgacagcttggggctgttgtacacactctggctacccgcttcctccaccgtcgcgtcttccttgcatgctttggctactaccacttcgtccatcacttggcatcgtcgtctcaaacaccctaggctcgattccatgtccaagctatctagccgttcagacatcttgtagcaagagccattttgatagtctatgccatgcttgtcagctaggctgctatgctcgcccccctttctctagttcctcctctcgggttgatcaggc

SEQ ID NO: 105471 - DNA, 698 bp, Zea Mays
gccataggcgggggcggtggaggtaaacatgcaggtggaaaaactgaggtggttgtcctgagggagccacaaggtcaatctggctcaactcgaaggtggagttggagggggatgagaaggggaagtctatctcatcgaaaatgacatggcgggagatcaacatgcggtgggtattgagatcaagacatcggtactccttgtgatcagaagagtacccgagaagacacaatagaagggtcgaggggcaagcttatgagaagtagtagcagagagattagggtagcacatacacccaaagacatgaagatggtcacaggatggggtgatgccaaagagagcaaagtagggcatgggagtacagatcgtcatgggaggagtttgagctagtaggtggtggtatgaatattcttaacccaatagcgagcatggactgaggcctgaaacaacaaagagcatattatgttggcagtagtgcgaataatgcatttaaccttactgttctagggagaggtgtatgggcatgacatccgtagctacacgccatgagaaagcaagaaagctcgaaaggagttatcaaactcacgacctttatcacaatgggcgatcgtaatggtgcgaatgaattgaatggaaacccaaggaaaatgtgcaaaagagtggtaaaagtatcagacttcaaacgcaagagttaagtccac

SEQ ID NO: 105472 - DNA, 556 bp, Zea Mays
tgtagggtagactggattcccaacttctatcaaatgctagcacacatgctcttaatagatcctcgaggactttgttgactctttctgtctgcccatatgtctgagggtgataagcggtactgaaatctagcttggtgcccatagctttctgaaggcttgtccagaatttggatgtgaactgggttcccttatctgacattatcttccttgggatgccatggagtctgactatctccttgagataaatccgggcaagggtggctcctccaaaggtagttttcactgggatgaaatgggctaccttggtgaggcgatctattattacccagatggaatcattccccttttgcgtccggggtagtccggttacaaagtccatgcctatttcttcccacttccattcaggtatcgggagggttgcaataggcctgcaggtttttggtgctcggcctttgttcgttggcagatgtcacaccaggccacatactgagctatttctttcttcatccctctccaccagtatctggttttgaggtctaggtacatcttggtagtc

SEQ ID NO: 105473 - DNA, 406 bp, Zea Mays
gatacctgccagaatgctgctcaaaaagccctccgccaactatgccaaaactacaataaggaagcctccgagacacccctccgctactatccacccaacaacaaaaataaccatgtgtggaggaaaagactccagactttgtcagggagagagcataatgaagatgaccccactataatctacatggtcggatatctccacacccttaacaaccactttgatgaccttttctctgactgcacccacctaaactcccgggtggaaagcctaaagcgacaaatcaaggaattgaaggaagaaaaggtagctcttcaagacagtctcgagatggccgaaggcgaggaagccaacactcgtgaggcataccggaccctaaagatggactacgctagaaggctgaagtggc

SEQ ID NO: 105474 - DNA, 571 bp, Zea Mays
gcgggctctcgaaagaatcgtcgaacaagcatactattgggccacccccagacagaacagatttctccaaagaaggtgacactcggagctagaggcaatcccgaagaatgtggcgcaaggcagttatctgtgcatatccgacacaaaaaggattgctgataatccgagggcatactttgcgcacaacataatggcgagatacatggaggataactcggacgaccgaactccacggtagtcggcacacaatagaagcggaagtagatagactcatatatgattagataagctgttacgatctgtaaagggacgtcttcctagctggttatataaggccgagggggtacccctacaaaactctctcgacgttactctcaccgcaaccacaccaccattagactggtaggagatctcatccatcaccacccgcaaatcatatgtaatctgtgcaccaccagcaaactcaatactcagcaccaaacatgatgtagggtattacacattcaggcggcccgaacctgtattactcccttgtgtatcgacgtgctcctgcacgtaccatcgagtcgcg

SEQ ID NO: 105475 - DNA, 659 bp, Zea Mays
agcaagatcatccttcgataagaccgaaaggccttcttcaagcttaggaaatcccatactcttagccatctcccggcaaacggatatttctttattatccgggagacagtacaggaaatcctcttcgttactaccattgaacactaaggcccccttcggatatttcagtctttgggcgtagtgtttggcctccaagatttcttcttcagataatttcttccccgaagcatgtcgaacaatgtaatcagtatccttagctaaggctttggggataggagattttgcttttttctgtcacgacttgctctgtcgtcttgccggtatctgaactttgctgacccaccttatcttcaggcacgacggtcttcggcttagtaggcgttgaaggcccagcttcagcttcgacttgatttttggcagcttcggcagttttcttggtagaagcaggagttaaggccttcgtggtatctataacaacgtctaatacgctgaccatccttctcctcttaggagttgcggcaggaattttctgcatctttggcaaatctgcctcttctggtgggctcaggatttctggcgttttcatcacttcttccacctgtgactcttcagccttatcatctctagcttcgactggcccgactgtaggtaccttcggc

SEQ ID NO: 105476 - DNA, 491 bp, Zea Mays
gaaaatatcaccaattggcatagcatctcagagaggccctcatgaaaggagcaggaagtatagcttggaactattaacccataggaatgttcgtcagatgcaacaaggctcacatcatcggtcttcagttcttgggcaagagatagtgtccaagacatgcatgtttcacttgtgatcaataaatgcaagatgacatagcactgctcagaaattgtactgaccatgtccagagtgtcatggactccagtagaaaaatttacaaactcgatcagcaccagcgactcagagctagtgttatggtactgccaaggtggcttccagacaacatttctctcaagctgaaatgtagataatgatgaatttgcatccgtcagcacacatgctactccactgtgatagcactgcaataacataggcatacttgaaataactgtcaccacagccacaacaattgcatctccaaccaaatacataggcacaaatggtggcca

SEQ ID NO: 105477 - DNA, 808 bp, Zea Mays
caagcttcttccccaacgagctcaaacagcagctgacgcagccaaacttcttggcatgccaccatgaccactgtggtgtactttgcctgacacatcgacagtgtcaccaccttctgcttctgtgattgtcgctcaataagggacgagcagaggaagacgagaaggaggaggtgcccttccgcctgtcaatgttgcctgccatgtcttcaccgctaaagcctttcagccacagttctgctctgccaatcttggggtgctggaccttgtgggctcttcttaggctgatgtggtgatggaggcctacgtatgtgcacaagaccttgtggactcttctcaggctgatgttgtgtgttttcaagagacaaaagtgcaaagtatatctagaggaactatagtttccatgcttgggagttgggaccactgttatcctaaacggtcgtttagaccgtttaaacgccgtttaaatgctactcagtagctaaccgtttaggtcattgatgccgtttaatcctgtataatctgtttttagtccgtttaaacgcccatgtaacgctaaacagaggatgaccgattgtttaccgtttagcgtttacgataacactggttgggacctagttcactgattttgttttccttccgtccattggtgctagcggtggtattttgatggcctgggaacatcaattgggatttacaggcttgaaaagaattgataatcacagcatttctgtgtagttcggcaaagagggaggaaatgcctggtggctcacatgcgtgtatggtcctcaaggagacaatgaaaaaattc

SEQ ID NO: 105478 - DNA, 373 bp, Zea Mays
ggcgggagaacagtcagtgagtatgtgcacaagttcacagagctggcccgctacgcgcctgaggatgtcagcaccgagtccagaaagatggcccgtttcctgagaggattaagaccgaagcttaagaccatcctcgccagccaagacttccacagcttctctcacctctccaacaaggctatccaggtggaaagggcaaaagaggaagagaaagggcacctcaagaggaaattccaagttctccgggctcaacagcaagaacgtcaccagagagctcgaccctttgggcttccgcccaggggtccaagcttcaataaacaatctggaccctctccatcacgctacagtcagcagagtcagagctcccatcagg

SEQ ID NO: 105479 - DNA, 355 bp, Zea Mays
ggcacatattataaatagagctgtgctaattttctgcttgtaccactggggttggggtgaaagcaagttcgagttttttagggcaatcggctttatgcccagttttgttagttgggcaatatgtcaactaggaaaattcagagacagaataatggtccaaattgtgaattatatctgcctactccctccgtcccaaattataagtcgttttaggtgcatagaaagctatgcacctagaaaagacaaaaccacttatagtttgggacgggcggagtacttctcaaatgagatgattaattccatcatcctgcagaatactgtcaatcctgttgtttatccttgtgtatgcttgtta

SEQ ID NO: 105480 - DNA, 389 bp, Zea Mays
catctttccgctttacagagtacattgtcgtcccagcagtttttgaaacatagctaggggtaaaactttctgaggtgttctatgttctaggagttcccaacttctgtgccatccatctgagtgagacgataagatccgggccgagtgacttctgctaccatgaagggtccttcccataagggcgataacttgtgccgtccctcccccgttagaattcggcggaggacgagatctcctattgagaaggatcgttgtcgcacagccttgtcgtgatagcgccttagagtctgctggtaccgtgctgattggattaccgcgtttagccgttcttcttcaagtacatcaatgtcctccagcctggtggcctcagcttctgctatgctttcgaa

SEQ ID NO: 105481 - DNA, 423 bp, Zea Mays
catctgaaacacggggccaggttgccattcctgattgatcatgaaattcatctctaaattctggaaatggttattgtttggatccccaacatgggcctgaagcggcaaatcagcaataccaggaacatggtccacttgaagcgtcggtccatcaacctcctgaggtccattgaatgcagcaatattaacagcaagcccatcccctagcaaaacaggtccctcctcaacaacatggccattctgaagaggtgcaacttgaccagcgccaaaggaactatccgacgacaagcctgagtgctgattactgagttgaagctcatccggttgaacgggttgcaaatcaggcgggaagggctgcggaatatgttgattgggttgtacgttttcgatccactggtcccaatccccatgggtgttgtcatc

SEQ ID NO: 105482 - DNA, 333 bp, Zea Mays
tctggacagcgcgccaatttctgggaagcacgggagtgattacataaaaattctgagactcagttaatagtagcactagattgcgggttggaatccagaaaactcaagatctctttaataaatctacctggccgaagaggtaggttttgacgaggaccgcaggatcctaaatctacggtcaggattagattgctaacgtgacaaaacggtacgcagcgcccaccgttggattgcagatctacggtccgcgttctacataatcgagatcgatgcgcacccctcggatcttgaatctacggtccgaattcaaccgagcaaaagggtatatcctat

SEQ ID NO: 105483 - DNA, 309 bp, Zea Mays
ccgcgatggcacccaagagagctagttcgaaggcagccccatctatcgacgaagcagcgaaggcagcgctgctagccgagaaaaaaggcaaggccctcgcagacaacacccccaagaagcctgcgaagatgaagctctcagcaagagacagcgccatgaacaacccactcccgaaggcaccctatgcacctgcaactccggaggacaaccacaagcaccacccccaggcttcgctccaccagagggcgaagatgcaacagagaacggtgaagtcattggcgtctcagccgaagaaccgcaacctccaaa

SEQ ID NO: 105484 - DNA, 420 bp, Zea Mays
aattacctaaattttaaatttagaaatgaaaaaaatgcttcttcaatagttctccaaataaacttattaaatttagtaacttgctattcaacctcatttgctttctagatttgtcaaatcgatcgacactctaaaaacggtttggcgttgttttcttcacaccgcatgctcatttttcccccctttccggcgcagcgagatagctcgacctggcgtgctcttttttctctcttttcctgcatatcaaggtaggcgtgacacaagcttcttcgtcgtcggatcgtcactccccctgtcccccacacatcgaggaggctgcttcaacgcgctgccaaatgaccaaacctattctccgcagttgaactcctcaccattggaccacgtcgccctaccaactcggatgcatcggctcaaggttcg

SEQ ID NO: 105485 - DNA, 415 bp, Zea Mays
tgaactttgctccttcaacgacaggtgaatctggttctggtctctctactatctcatcacctaaagattataatcatgagcaagtcaaaaaattagttgccaaaatgattatagttcataagtatccatttagaatggttgagcacacatggtttaatattctcatgaaatatatgaatctgttgtatgaatttattggtaggaagaccataagagctgaatgtttaaaggtttatgagtctgaaaaggaataattagcaaagttacttaagggtgtggatttcatttccttaaccattgatctgtggacatctaatcaaacattgtcctatatgcgtttggttgcgcactacattgataaagattggaaaatgcaatatcgtgtgctgaattttttgagttagaccctccacat

SEQ ID NO: 105486 - DNA, 949 bp, Zea Mays
gttttatgttgtcttatattaacagaaaaaaccatacttgaagaagttgttgtatgctcctccagcaaatgaggacttgcttgatgaattgtggagaggctacacagtggatggcagcacggcctttgtgcctggagatgattatggtgacaatgatggccaagacgcagggacagaggatgaagaagaagggtttcaggcaacacctactagtacccagaggagcctgaaaggcaagaggccattgagcagcactactagcactttgactagtccagtaaagaagagtaagagcccgatggtgaagattgtcaaggacatagcaagtaccttcaaagagtctgttgtagccaacactaagcaaatggagaaacgtgcaaatcagaaggcagagttttctgtcaagaggtgtcaagaacttgcatttgagtgtggcattgagagaacagttgacaacgtgtatgctatgtcaaagttgttcgcaacagagtttcaaagggagttcttttgtggccagttaactcctgagcttaggttgggtttcttcaacaaatggtgcagggacaacaatttggagtagagaaccgttatctcatatctatgcatagtagtgaacctttatctatgtgtgtgctgaacctttatctatgtggtgtaatgaacctttatatatgtgtgttcggtcttgaagtaatatctgtgtgtgtaatgaacctttatctatgtgtgtgaggtcttgaaatattatatatgtgtcttgaaatatttgaacttatctatgagctgtgatgtctagtcttatgcaacgtccttatagtttgttaaatgtgttgaagcaggaagatgatgatggcatcatgtatgaggaagaagtagccgatggaggcagctcaagtgaggatgaaattatatccaggtgtcgcaacaatttggtgcaacaacaaaaaat

SEQ ID NO: 105487 - DNA, 1059 bp, Zea Mays
gtgaaaaacactcttttggttggttgtgcatgcgagcggaaccatttgcttgtttgtacatttgcattttgtgaagtatgtgatgacgatgttgcacatgttgggatgtggttcttgccttacgatttttcacatgaagttttcattaatgagatattgtatggcatgatttccttatttcacatatgtgcaacgtgactcgccgcttactcataataaaatgtgcagatggtgactactcaccgcattaacctaggggcgctggagcctctggtagtgataaccaggagggtgaccatgaagcaccacttcctccacctccgccattcacacctgaacagttcttcacacaatttcttggagctcagaggaacatggagaacttgcaacaaaacatggaggtagagcttcgcaatattgctaaaaacaaccatcatgcgcagcctcatggtcaaccagtatagtagcttcaaggatttcatggataccaggtcatcgatattcaaggaagcagcaaaacccttggaggcagatgaatgaatcaacacgatggagcagatgtttcatctgttgagaccctcaaaagatttcaagacagagtatgcagcgcaccaattgcaaggacctgcagagatgtggtggtctcatttccgcaccgcttaccctgaaaatgctcccattgtgtggcaccaattcaccgcaacattcagagggaattatattccaccaggcttaatggcaatgaaggtgtcagagttcatgaggttaactcagggcacgcaatgagtgacagaatatctacatgctttcaacaatctgtcgtgttatgcgactgactatgtgaacactgaggccaagaagatctctagtttcaagagacacttgagttcgaagatgatgaaaagtatgggaatttcctcccgcacttccttcaacgattttgtcagtgactacttgactcaagagaaaaacaacaacctctacgcattggcaaaggggcgtaaaaggcctttggaatcaggaatgtcacaaccttgaaccaccatagtgactcaacca

SEQ ID NO: 105488 - DNA, 1385 bp, Zea Mays
gtccacgacggtggacggcgacgcgcagatttccggcgagcttgcaccggctaggatacttaatgaccatggacctaacgtggccgacactgaattctacctttggcggccatttcccctccatcaattgcataaatccgagttggactctccctgtccacgatgacggcggaaaccgagaacattttgatgtgttcatgacgactcagggtagtctagcacaattggataggtttacgagtaacaggagacttaatggaggctagaacattaagtaatttggtatgtactaacccaaggagtgctggccacggaggggtcccttgcggcggtggaagagaccgattccagggaactccgatgatctctaagggtggtggaccaaacaaggtggctagtgattcgttggcttcgcaactaagggacaaagagctgtgcttggttgatttggatgaagggggtgagagcgtggtgaatttataggccagtgagccaccatgatggccatggtgataaccatcaccggacatagctggcgaccaacgacaacgtcgggcgctgccctttcccatgagttcaccacgtgccgccgcgacagtaacgctgtcaaatcggtgagggtgtggatgaacggagaggagcagcgccggtgaccaggcacaaccggaaggatcagtggccgcatggcggccggaattattaccctccacagcgatgatcttacccggatcaagaatatcgtcgcgaaaagatgctcgtcgagcgcttaaccggatcacggcgcaaatcacggcgtggatcggtgccggcggcgagatgcgcggtacctgagatttttctgctactgtaccattggaacctctattcagtcagcgtgacaaatcaagtttgggctggattttctcctgattttacatggcaacaaggccatcattctgtagcaaagttgtagcctaatgatccagctacaatcttactacaacaaccatagccaattactgactggattatggtcgaatccaagcttaaagatggctcaaacacactgtcagtctgaattcagacttaagaaagtctgacagttaaactttaggcacattttcctccaatttctgttcagcaccagtgcttagtcacttaagtaaacttgttctcctatgatagctcaacaggtttgatgtgttgaccctaagcaaattctcaatatttttggatctacaaagccctaaagtcagccctacttcactgttttcagacttaaccaattgagcgcaagggtggcccttttgcaaataagtccaattcacatcttttgacttgggaatccccaaatatgtgaaccatatgacttaaggtaccctaatgccttggtttttgaactttag

SEQ ID NO: 105489 - DNA, 491 bp, Zea Mays
cttcacaatcatcatttccaacaagcgtcatttgcagttcagattgatgatgtgcatcaatatttaagcctccatcctactcattagtgcattatagtcaatattacaaataatgtataaatcatcccatttgtttgcattatacataaattacattgtttttttgccataatattacctgttgtcgtgaatgtactgccacatgctcctcgttatcacattgcgatacatgttcaccttcagcgtttccaacatcatcctcttcgccctgcaacgtttaatttttacaattagcaataattaagttctgaataaaatgttcaacaattttatataaaagaacacccacatggttgccctatccagtagttgcaccaccagcatcttcacatcctatatctggctctaaacgcccaatcatctccaacagttcatccattgtgtccaaagccttatcactccctgcctttgacatgctagcttggtttact

SEQ ID NO: 105490 - DNA, 571 bp, Zea Mays
aaatgaccagacttaccacacttgaaggagacacgcttctcccttgatttttccttgttagataagtcctttcgccccttgagtgcggtcttgaagtgcttgatcacaagcaccatctcttcttcgttgagactggtcgcctcaacttgtgccaccttgcttgggagttcctctttgtcgtttgtcgctttgagggtgacgggttgcgattcgttgtagtgggggctcccgtttgtggcgtcgtcgaggtatcttgcctccttggccatcatttgttcactcacaaacttaccaaggacctccccgtgcatcatcttttggtacttggggttctcatggatcaagtttacaaggttatgatctaaaacagtaaacgaccttagcatgagttgaacgatgtcgtggtcggtccttctcgtgctcacgtagttccgacttggttcaccacgaatttgagccggttgtatgtctcttgtgtctctttttccctcttcatggcaaacctcccacgttctccttcaataagctccatctttgtgatcatggtcatatcattttcttcatgagcgat

SEQ ID NO: 105491 - DNA, 370 bp, Zea Mays
ccttccacgccaaattctcttccctggccctcgatctctcgatcaacgcttcagattctaagtgctgaaagggtatcctcacgttctaatctgagccgtttgctatggaatcaacggccctcggcccgtcatctacctcatgcctacaaccgagctccccacgtcggcgctccatccaagcacggccagtaggggcctcggtaccctaatccaacccaagttcggtacatacactggtgaggacaaggagcatggcatggaagcattaccgatgtcaggatttgaggaggtgctcgaccacgtactggaggaggtccgccacgcccaacgacgacaatgcaagcatcgaagctcccgtcgacaaacgaac

SEQ ID NO: 105492 - DNA, 803 bp, Zea Mays
ctcagttcgtcgtacccacttgcacgacgacgtggccgggagaccatcaccatggtggccgccgtccttcgcggttgcgccacgacgtgaccatttcaccatgtagctataaccgtggcaagcaaggagttaccgcccttgagtcgttgtaccgacgggcgccatgacgaactcgtctagttgaatatctcaccaccaccgtgatcgccttcgtctcaaattggcgaagcacgtagccggctcctttaaattgagcactaccctcgctctgcatctctgttacgcgctcataccaccctcagttagtctctctcgtgcaccgtagcccctagtcaccagatttcccccaaatcgggtcactcacgccgccgtgagacatcctgccatgatcaaccgttcctaggtctgttcatacctctctatgccttgttttagcattcttgaatgttaacgaagctcgtcgtctcaaccgattgaacactaccgcgacagggcatcgagaacatcacctcgccgtcacagaacactttcgagagagcactcacatcgacccactctcccatgcccgctccgtccaaattcacacgtgtacccgacctctggtaagtcagtgaaactcaccctagcttcagtttaaatgctatcgcattttgttgctcggaacacgcttatcggagctctagcgccaccctagccatgagcaaacatcaattaggataagactagtccaattgggtgagggcatatgctcgggtagacttgcgcatgatgtcggagtgcttgttacctcaagtaggggtcgt

SEQ ID NO: 105493 - DNA, 709 bp, Zea Mays
ctattttcttggtttagtttttctcgagcactcttcgcgttttgaaagatctgaagcccctggtcgccgttttgcggatcctggcttcggttttctgaagagatgcgatatcatacctctggacctctggacatgcgggttcgttctatacatcctcgcattttctcgaaggtccaacaatctgcttcaaatacaccagtgaatcataagaattgttcttggcagtttgcattttttttgttttttctattttttgctatgtgaatctatttgaatgaatcatatgcatcttgaatccgtgacgacgaatcgatggctcgatgatgattattcttgctttaaccacaccgaactaaaggctattggaagggtgctttcttccttcctccatttgcgccaggctcctctttcttggtgtttcctcatgaaaccttgctttcttgttgaagaatgcagttcctgttttcttccgcgagagtgcgaggtagaaggattcggtaagatttggtagcgtagcaaggggggaaagctggaggcctcgtccgctggttcttggcttgtagaaaaacctggcctttctctgagagcctttgccctgtatttgcaattgatacccctctttgaataagtatttcccccttttcaagccaatatgttccgctgatcaattatttatatgggtgttggacgataatctggaataaaattt

SEQ ID NO: 105494 - DNA, 485 bp, Zea Mays
gttggtagaatatggttaagatagatatggatgagatggactacatgatgtaggtcaaaagtttgtttgatgttaggtgggaatagacagattatgcaatccatcatgactctattggttggatcagatctcctgcatgtggccgagttggtttaaggcactagtttagttttaagtgcatgtggggtatgtccttatcttttgtacctgcattaagtaacttactctagattagatcataatggattggatgaaatctagattagactagataagatttacttaatttattttagaatagatcatgtttgttaccaggttatgaggtaagccaagtggtggggataagtatgcttattaggacaagatgagtctctaagaataagacagaatattttgaggttagttggatccattagggtaagagaatatcttttgagataagatgaatctattaaggtaagagaatatcttttaaaataaga

SEQ ID NO: 105495 - DNA, 565 bp, Zea Mays
agccagggtggaacaacttcggtcagagttacgccacaggaacagggcacgtgagcaggacagtcaccgcatagcggaattgtcaaccgaagtcagccgcttacagtacgagatttcagaacaggattcggccattgattgggtcgtcaactcgcgttcgatcgcttgggaccgcgaagcaaaagctctagctcgtgtggcagagcttagtgcgtccctcgaaagcctgcaagtgtattgtaatactttacatgaagaagtacatgtattgtatgctcgactgcacccggacgtgccttcggatgttgctgcaatgggagccggaccatcgggaacagcaaatgaaggacctgatggggagttggacctttttaggccccctcctgccatgaaccttgctcacaaacggtctcctgccgcaggaaatggagcaacaaaggatgaagaagactagaatagtatagtttagatattatacttatgtaaaataagtaatgaagtcgagttgtacactagagtctgtataattattatattttggtaatgtaatatgatggtgtatgct

SEQ ID NO: 105496 - DNA, 531 bp, Zea Mays
gtgatgccctagtaggatacgtagttacttgtataatgttcgaggtcatggttgtaacttcacacaaagttgtacgtcaagccatccatataaataggtgaatagttcccatgcaggggacgagctaagaaacacagagaacatgcctatgtaatctcgagtagcttaacatttgaagccttagagcactcgagcaccccatcatcctttgtaccctttgaaggtactcttgtaaatatttatttatctgaaatcaaatagataatagatgacgaagttgatttatggtgtaatgattcaaaaactttgttccctgtttcagtgcgaattcataaccattttaaccttcactctttaatatattttgtccttgtgaatagattaaagaagagaataccatattactctaattatgttgccctattttggtcctcttcatgaatcttaacatgtgaccaacacaatgtttcttagatcccacacatcttaaattacagttggggtggtatttgtatcccccatatccaaact

SEQ ID NO: 105497 - DNA, 543 bp, Zea Mays
cggggtatcaaggacaactctcatcacattcatcatccgacgtttcttctgagcgttgcaccccctggcgccaaaggatccttgattacctctgcttcggcaattctctcaacatttttcttttgtggctgtaataagcttgttagctctaatcctagaggacttagcttcgtgaaaggcaggggttcagtcattacctctagaatttctatcacgccaatggaagttgtcaaagggtctctgatgaatactttagcggagaaggtctctcttcttctccgcggctagaaggcgtaaacttccttttctttagcgccgaaggctctggtgtcaacttcggattctttgtcaaccttttcttcttgtccttctcaacagatcttcgcgcttgccttttcaagatactcacaacccttttcctttccaatccctagcttcttcgtcaagtctttcatagtcaggatactcgaagcccagggcatccatcacccgattcagccttcgtttctcgcgtgtaccgaaggcaacggtcatcagctagtc

SEQ ID NO: 105498 - DNA, 526 bp, Zea Mays
ctcagcgatatgtgaaggagacgcgattgggtcgccatggatttggactgagcttccaatgccgccgagatgctgggatcagaggcagccaccatctgcttgctgcgtgtttaatatgccagatcgaggaaaccttagccgatacgagcctactacaactactacacaggaggagaacatgaggtaggagataggaggagaacgataatgttttctcattttttagcagccagacttagttttagtaactcctcactgtactcttacactgaccatatgtccgacggatatcgcccactgggtctagacacacgacggcccaacacttttctctgcagctgtttctgatttccaccgccattcagatgtctttctgctccgtcgcatgtaccatctcccttggagctgacagactgtgagtggcacagccagcgacgagaccagggataaattgacagacgctaatgataaattgctacatggcgtgtgcacgtggttctctacgctatatgcatatatagcatct

SEQ ID NO: 105499 - DNA, 413 bp, Zea Mays
ggcttggctgggctgggttcctagactccagactacatacggcagttccctgatccactttcccgcgagcttttcattttagttaaacacttttttcttgagtgcctctaatatcatctcgtttgctctctgtacttgcccattagctcttgggtgtgcaactgatgcatatttgatttgaatgcacttttgttcggagaagtcaaagaattctgcactgggtgaaatttgattccatgtatgtgatgatactgttggggtacccaaatctgaagatgatttcctagatgaactccactgccttggatgaggtcagggtagcaatcggcttgtactctatccactttgtgacttggtcgatagccaccagaacatgggtgtatcctccctaaggttttttaaatggcccgatc

SEQ ID NO: 105500 - DNA, 322 bp, Zea Mays
cttgtcggcctccaggggttgtcgatgtctgattttgaccatgcattagaagagatcatccctgagaaccttttatcggagaccccttaggttgacagttccatcatccgttcagaggtcccggacgatgttccgagggtgttgggctaggctcctctttggctgcttctatggacgttcacaccggatcaccactggttcaatctgaggaactcgtggtgacaaatttatctgctgctctcgtcggtctagtcaccttagaggctagtgatgtggatgttaggagtcctctgcccgctgatggagctgaggtctctccaag

SEQ ID NO: 105501 - DNA, 745 bp, Zea Mays
aaggaagttgaattgcacttatacccctgagaaaccaaaatccccatttgaaccctggaaaaccctaaaactaaaacctaggggcttatgtgcaaaattggtgcacatttggactaaagtgaaaaaaccaagttaaataagtatcttaagtcacttggttcattaaggtgtgaatttggaagccaaaccctaagatttggattcatttgcaaaaaggcccctagttgtgaattcactctaagtctgaatttcagtgtagtttgctcaactttggagccttgtatctttcaaaatatagagtttttgccctaggtcattacataaaaattatagacctaatataggggaacaacttttgttaaaatggtgagcatagttgttaaggaaatattggagataatcaagcttgaagtcaggctgtcaggctgattcagtctggatttcagatagacagtgacttgaatccaagtttgaaagctatttcgactaagatccagtgataatctaccaagggttgctataacaaagttgtagagttattaaacaggaacaactttgttatgggtgtttgggtttggtaccacatggaattgggagaagatggagctccaaagtgctctgtcagcagctctgaataagtgaatcgccatggtacagtaacaacttgggatcagactgccagcaccggatgttcacagccggcgacctcttcgctgggattcgtgctacgggcgtatgggttttg

SEQ ID NO: 105502 - DNA, 581 bp, Zea Mays
ggaccgccggagcttgggcctgaagcttgagaaaccttcagacaaatgactgaaggtgctcatctagctcctggatacgctaaaacaaagattgtgcagtaattggcttcgattgaaaaccctagaagctggtgagaagaaattccttgagcttcgaccatgaattgatagtccttagccgaagagatgagtaccaagtctgggccacactttggaccaccatgatgaaggacttcaccatgactgctgagttataccataaagaatatggtagtttcgtaactcatgaggaactacttcaggtcggtcaggccatcatagatacgcagtgtagtaggcctatacagtggtggccatggtgtggcctgtaattctggtgtcagtggggaagcttcgtatagaggaaatcttgaaaattgaattcttcatgacaaaggttgtcatgattgtgaccgacatgatcttggtccttgtatttgtacatgttttcgtgtgctttgatgttgcgcatctctttagttgctttgtcaatcttcctctgaagctcaaaaaacaaagcattttctccttatgcttcctcg

SEQ ID NO: 105503 - DNA, 318 bp, Zea Mays
gcgagcttgacctgtgaagactaaaacagtgaagctacagtgttgccactgacctttttgaaatgcctaaagttgtagttttcctctaattgggaacagacaccctgcctgttatgccatttgaggcatgttggatcctcatgtgcttccttcaaccttgttctggtgctgtggtgcatgatcaaactacctgctcctctcttctttttccagtttgatctttcgctttccgtcctgtttgcctgcctatgtttcaaacactctgtactaatcagtacagagtacagacgtacaaaatctacagaaatactagttttt

SEQ ID NO: 105504 - DNA, 299 bp, Zea Mays
gcgcctttgtgccctttatattaatatatcgatgttattttgtgatgacttcgtgttttttgttgtgcctattgtgagtttgttgtacccttaggcgatttttgtgtggatagacgtgtgcgtgccgtagacaacttcgcacccggtaggtgttgttacgttcgtgttgcgttgatccggctgcacccttgagcggcttttgctcggacaatgtgtgtcttgtaaacgactttgcaccatttaggtggtgttacgcacttgttgtgcctatccggctgcacccttaggcgacttttgct

SEQ ID NO: 105505 - DNA, 361 bp, Zea Mays
ctcggggcagtaattggttgtcctccatgacataccgtgacgtggaaacgtcctctagtacatggcatgatcgcgctcggccgagcgtgaagcaagtgggtacggtggctagcgcacgaactcatccacgactgcaatatttttcaccctcggtaatatccacaccgagtcgtgcacgaatcttcacggtgagctcagatcacggcatgggatctcaccagtggtaggattcacttgatccttgatcttttgtagatactgttcacgcctgaacatcattccagtcgactgatagtgcaatttgaaggcatttttattcccttttctaagcaacaatatacccacctctctttgacaaagt

SEQ ID NO: 105506 - DNA, 317 bp, Zea Mays
cagtagtatctctaccacccttcgtccatatctgagtgatgaacttgttgcccacactgctagattcggtagatattgctattatatcattaggagagatatcaaatattgtcttgctaatagttttctggtttgagtagctagccttctaaaaatcaaagtacctcgagaggcaaccaacgcacaaaaatcaccttgcccttcataacctcgtcaaaagcatctatctcaccctccacccactttagcgctctaggtaagtcatcaagggcataattagcttcttcagacgtcactctgatagagagagaaaaatc

SEQ ID NO: 105507 - DNA, 317 bp, Zea Mays
cgaggggctgaagaatgctagcaaaagctttagcaaaatgacatgcaaagtattgaacaaccaaaatggcaaaaatgtgctaacttatatggatgatatctttgtaagaagcacgaggcaagaaacccacattttagatctgcaggaaacctttagcaacttttgaagagctggcataaaactcaaccctgaaaagtgtctcttcgaggtaaataaagggaaattactatgttgtctagtgtcaaccaagggaatcgaagctaatcctagcaaaatggaagatatactctgaatggagccacccaaatcaagaaaag

SEQ ID NO: 105508 - DNA, 319 bp, Zea Mays
gtcagtaatatatgtatagatatttgttttgtatatgaatttttttatgtttcactgtcccagacaatgtatgtacctactgagcacacacattcagatagtcaacgaaatggagaaaaaatcccgcaaaagacgccctaggtgcgacccaaccggagtattaaaaaaactcccagttcatgtttcaacggagatgactcagatgtagagtctggaccacccaacgtttagatgtctgctcgggagaaatcgtctaaacgccagaagatcagcgaagctagcaaagatcaaactccgatgagccgacgtgaagctgtaa

SEQ ID NO: 105509 - DNA, 644 bp, Zea Mays
ttctcttgtcttgctagctaggtggtattgtaattgttcaaccctctttgccaaaaaaatttgttgcctattttgcccataaaaagacctccttctccaaacaacctagtggttagcaagtgaaaccccccaaaaaatatcaaatcacatgcttgtgttggtgttttctagcccttgtgtgttgcgctattggtaatgcacctgcacagcttatagacccccacagcttgaccgctagaccaacccaagtctccatgtgcatttgttgtgtcaaaaaaaattttgttgtttggtgtctagttgcacaaaccctatcaaggccatgtttctttccatagatcctgtcccgaatcttcataacctttctggtgctcgtcctaagcgatctcatgtgactacctctctttttcacctgaatctggtaatcattttccttgtgaatcatgttttggccttatcatccaaatctctggatccttcattgattttgccccgttatctgattatctgttataacctgttctaaactatcggatgttgatcttgcctaaatctctcatttctggtcgttctcatacccccttctctgaggatcatgatgcttgttttatcaacttatctctaaacggcatatccatgtggat

SEQ ID NO: 105510 - DNA, 709 bp, Zea Mays
gcaggccagggctgcgcaggtcatgactgggaggcagaccggctctttactatgactcgatgttaggcgtagttaatgcggtcagctacttatggcgggtcagtctcgggctaagcggagaatccactcaagtggcttccttctggctcgtccggccccctctgcagctccgccaggcctgatcccgggcttggtgcctcgaggtttatccaggggcgggtgcttccaaggtagacgattcctctactccctcgttgacggggggcgctctgtagttcgaaggttcttatctcgtgcgctctctctgatcggtgggccacaagggttcaggatctttttcccgacacatcgataaatatttgcccactaaaacatctgtgatttttagtagtagtatattgggagagaatgtgtcaccaaattttgaggccaatcccgtgaaaaccatcattgggtggttttaaggctcaacatctaaatctccataggtagcatactccatacgcatgaacaccggacgctgagggtggcgattggacaccagacgctgaggatggagggcggagagcaagcagagtctggtgggtggaggaacggagttcgattggaggatgggccggtagaggttgggatgggtggacgacgaagatctatggcggtggtggcggggtgacggggtggaaggctgtctggatgaagtcgtgaagaa

SEQ ID NO: 105511 - DNA, 333 bp, Zea Mays
caatgtactaagggtactagacaaatttgtagagttagaaagagagcaaagggtgtaggctaaaggctcattggattagggtgttaacatagctacaagcacaaacaatttaaagaagtttaggtcacgaaagcataatacactatattctcttagtggtggatgaattaatggaagggaagacgaagattacattttcaaatgtggtgtatgctaaaggactgactagttccattttactttagtttttgtgggagttctagtctaagtcccaaatatctcttcttgtggaaccttttggagttatggacttgcttgaacttcatgttcttc

SEQ ID NO: 105512 - DNA, 331 bp, Zea Mays
taaataggtgaaaaagaagactgagccatgtgaccggctagcaaagcgaccttgctcacctacccaaaggtaagatccattgggtcatctcactaatcagaggagtcagcacatcacgatattcattcaagacccattgtacctacatggacacctccacctccatacccacttgtgtcatatcagtatgcatacctaccatcaccttatatcccaaatcaaatgttgggcatgccaccatattcatatgtgatgccacagtgccccgcttgggggcaccccaaacttctgtatttgataggttggcaccaccagtgcaagatcgattgag

SEQ ID NO: 105513 - DNA, 418 bp, Zea Mays
ccctcgttcctatcaagtgatattcaaagactcaggtattaccgtcaggcttaccctagtttagtttatgttttttcatcctataactccagataattgccatacaaaagaaaatccgatgtcctacaaccctgtttagccttgcaatttcgtttcagattgctttgttgaatttgtgtccgtgttcaagtcttgttgctggtttaggtcgtgtcgtaatcgtagttcaactgctttgtcgctattatttgtttccgccgctatcccatccacctttcccagattacaagtcaagacaccacattactcgatttgccctcgctagccgccttgtgtgaactctcgccatgctagctctagattaggttgcaagccgccttgcattgcagcccctccttgtttcatcatctggcgctta

SEQ ID NO: 105514 - DNA, 444 bp, Zea Mays
tggacctgtaggtggctagcctcggcgcgacgtctcacggcggcgcagacaaccgatttggggggaaaacgaaattctccggctatgatggctaataggaggcgaggagcagtgctctgtgtttgtaacaaactagcggaacaggtcgaggcatcaatttatagagggcgaccgtgagtaggacgaatttgaatggagaagtgcttgcggtgataagggaatgagtcaccggagttcactaacgtggcattcactgggcaaagacttacgaccgtcactggctatcctccacaaccgcgatgacatggtgaaacgacttgaggcgtgttggggccgaagtaaacgacagcacaatggcggcagtcgcgcggccaggttgccggtcaagtgggtaaggccactgagccgtaacagtgccccaagttcatccccgcccgagatctt

SEQ ID NO: 105515 - DNA, 456 bp, Zea Mays
caggattgttgtgttgaacctgcataagaacacaaagaggccattctcgaagacgtaagtaatgtctagctttggttttattatattcattcatagaggcatggattcatcgaattgggttgtgagttggggtgtggctggtgtggacgcatgattaaggacatgtacatgcacttcaacaagttttcaacgagagatctgggctaatggcccctctggtcgtggaagatgtttatgaaatcatcatgaatgtgagattcttgtttcccctgccacacttatgacacaacacctgtgtagatagctggtctgtttctagcagttgaatctattgtttcatccatttttattacattgtttaagaaggtattgtgttctgcctccatcacaccgcccgctccaaatgcgctccgcatcccgcgcttgccatccgcactcgcagtgtcttgagatcct

SEQ ID NO: 105516 - DNA, 311 bp, Zea Mays
gaacgatgactagattggccagccatactgggtgatggacctcttcgatgaagccagcgtccagcagcttctggacctccttacagatgaaatcctgccgctcgatggactgtctccgaggcttctgactcaccggtttggcatcagggtggatcttcagatggtgctcgatcacctccctggggatcccaggcatctgcgacggttcccatgcgaatacatcggcatttgcctggaggaaggcgatgagcgtggtttcctatttatcctccagatcacccgcgatgcgagtggtctgggaggaatccgcg

SEQ ID NO: 105517 - DNA, 514 bp, Zea Mays
gtaagttgtcttcacaggtataaagtgtgccactttagtcaacctgtctgctatgacccatattgaatcatagccatcccgagtatggggtagtctaactatgaaatccataccgatttcttcccatttccattctggtaccttgagaggttgtagtaatcctactagtctttggtgttcggccttaactcgctcacacacgtcacataatgcaacatgagtagcaacatctcttttcaaaccgttccaccaatacttttcctttagatcctggtacatctttgtacttccagggtgaatagagtaagccgaatcatgagcttctctcaaaataagttggcataggtgttcgatttccggtacacagattctcttcttaaaccatattgtgccttgatcatcttctgtgaaacctagggctttacccaaaccaatttgtgtcttaatttctttgattttctcatcagactcttgtcctttacgaatctcttcttccaaagtagattcaacttcc

SEQ ID NO: 105518 - DNA, 481 bp, Zea Mays
ctagactctagaatatggaatcaaacattaaaagtaaaacaaaattgcagggtattatgaaaatcaagtgcattattattttgtgttatttaaacactactgcaacctctggccttaaaacctaacctacaaatgtggatttgggttgttgtcatctcaaatttaagaaaagatagggtatgtttggcaaagctccctgccaagagtgttatgccaaacaatatttataattttgaactgtttgtctatagggaaataagacattggttgttagaagttagctttgttaattatatgatcaagaggcaatgcatttagggtaaaagtttattagtagtggtctatatatacgaagggggttgtcgagctagggggttttcttgatatgtgtgtaattctgggacggatgcttctcgcgtaggtcgtaacgcgttgggtgcgagttcattgttatgtcgagtcgttgtcttcaagggtgatc

SEQ ID NO: 105519 - DNA, 329 bp, Zea Mays
aatgagttgaaaatctctcgaaacgaggtatcacgacttaacaggttgttgtcttcaagagattccatcaacagagagttgcgtgcctcgaagacacttgtttcgcaggagctagaggttgcttgtcgcgatgtagatgctgcccgtcatgatatcaaggtcttagaggacgaccacgatattatgaaggcgtggtgcgacaaagtgatggacaaggccgtccgtgctggccggatgctgatgaagaggcctggcgttgtggtgcctgatgacattgttgctaacgtgcttgctacatcggctaattcgagtaatccttctgcttctgg

SEQ ID NO: 105520 - DNA, 705 bp, Zea Mays
cttgttctacatggtgtaaaatgcgaatgatccgacgggatactcatacggtccacgtgtgtagccggatggtccgagcatttcaattaaatttcgtgaagagtacgacgaccctggtgttgctctaggtggtccgtcgtaaaggacgggaccatctacagggtgccggacattctgagatcaagctcggatagcctgtctgtgtgtaggaccacatgtttgtcccaaaatggaggaggttgtggttgcccagtgtacgagttcattggcatgctataatatggctaggtttgtgactgcccatttgtagccgatgagttctttgtgctagcttagcattattctcatatgatggaaaattagcaacgatagattttcatatgcacatgtcagtttttaaaggattcttccatacccgccatatatgttttgtaattgatctcgctgctcatctacataatacctaagagattggattttgttggttttacatacattggggtgtgtgtagcctgtacaagagatgccatctcaaactccccttaccggacgatcttcttatggcgatcaaccttggaatgcactagatatttttttctttgcctcttcgcgctcttggtcttgcctccgcatcgtctctcttcttgttgtcttatctaatctttgaatcgttgttgatctttgacaggctctcaagagtcggct

SEQ ID NO: 105521 - DNA, 514 bp, Zea Mays
tcgccgagtgtcatgcttggatcaggatgctggtccttctgctcctgctgctgaggaagtgccggtgccggtttttgctgaggctgatcccaataggtgtgacccgactgatgctgaccccaatgggtgtgacctcgatgatgttgatcccaatgggtgtgacccgactgatgctgatcccaatgggtgtactgcccgcgtttttgatgaagatgaggaagaggaggatgaaatccctttaattcagaagaacagccggcgctacatagccagcggggagagtagtggtgttccttctccaactttgtctgccctcgttggtctgcaagaattgtttctggcaaattttgatcagactctcgaagatatggtcccagaggatctgttgtcggagccggcagatggtgggatgatggatatttgtgctgatgtgcctaatgtcaggttggagttatcccacgcggtgtcccgtgcctcatcgaccttggatcacggtcttaagggtcaggatgct

SEQ ID NO: 105522 - DNA, 411 bp, Zea Mays
attcaccagagtactctcaactgacacgggatgtgattcatcataaaccagtaatacttcaatcattgtccccattaagaaagagggtaggataccctataaacatgcaatagagcccctataaggaatgtcgatccacttatttgcccaatccactttcataggactataatgttataactagtccatactgaccaccaagtcaaaagatgataaagacatgaagttaagatcagctgagaaaactgaaaatgaggtaactgaaaatgacaggtgagcttagccattggagacttgcatagacataggtttattcagtgccagtaccccagacaacgtgggaatcaacttatcactaaaaatgtatgtgaagagcatgaatcgaccaacaccaacaattgttgttgctaa

SEQ ID NO: 105523 - DNA, 545 bp, Zea Mays
cccaaataagccctgtcaggccaactgatgaaacctctgatggtacagtggcaaagaaaatctacagattccgtgaatctcgccgtcggtgaccctccgccgtgattgttgccgatcgccatgagtcgtgcttcaagtctgtggattgagctcgacggtgaaaagatcacgctgcggataggtccgggacactgtggccacgctgtccctcgaccacttcaccgacgacgtggccttatggccgtcaccggaatctgcattgttcaccgcgattgcgccacgcatcaggcccttaaccacgtcacaatagcatgggtcatctatatccggtgattgccggagagccaccacggtagatgccaccaatcacttgcattagtgatcccctctttctccgaccgccaccgtgcgagaccaaattcactggccaccgcttagcgcccttataaattgatgacacggtctactgcgctaagttatcaccaagccaaagcatccatccctgcccttgattagccaccatagccggagaatttccttcttcc

SEQ ID NO: 105524 - DNA, 642 bp, Zea Mays
ttgagccttctaccacactagttgtgcacactacctccaccacaccagcttccactgctcctgctcccgcttccactccctctattcctccaccatgcttccgagagcgtgacaagactgaggtgtgtccacttgttgtggactcttgcctgtttgacgttcagagagccacagctgatagggtgcgtcagtttagacacttgtcagaggactcttggctgcctgcgcatcaggatccggcagctacgccactcttcagtactaggacccaggagtccttcttcagggcttagttgtcagcttagatagttctataggctcaccggtgtctggatctttctgctttccatacagcgaccggtgcagagttagagggtcacatcacatatctaccaggattatactctctgctgacttttgatgccgatatgttgaggagtgggtccgagttttctatgccacagtatggatcgaccctgaccatcagtggatgaggttccggttcgagcgtgaggacgtcactatgcatacaactcagatccgggagttatttcgattccctaagtcgatgacaaggcttcatagcatgtgctatggtacctcagaccgtcctcgtcgtcctcatagtggagtagctcccaa

SEQ ID NO: 105525 - DNA, 297 bp, Zea Mays
gcagtgaactgaactcttagcttcttcgttcatctcgcgtctgattcatttgtccgctcagctcgttctctgtctaactaacgccactgtacttgtgatggcagtggataggaacgggagcacctctatcagtctcagccctgtggtttaggtgagagtaaaaacagatagatagttacgtacatttgtgtagagtattagtagccagcttgcattgactgctgctcgtcacacacagcctgaaatgtacaggtcaagctcagacgaggttaggcagcagttattagctagtatccg

SEQ ID NO: 105526 - DNA, 479 bp, Zea Mays
tgacacgtgtccggaccttatcgtatacacttctgctccccgcccaggcggagacccgatgcagccacgtggcctactgcacgtgacgtaagctaacggacggagcctggcataaatcctctgggctacaccgcccctgcatttattgcggataagatgagcgcctatccattccagtggcaggcagcgtgcctggtccacgttgcgtgggctgcgctattactcatcattactcgcacgttaccaagaaaacggtcgccacatatcaatactgcgtggactgcggccatcatggcgctcggtgattactcaggtgttattagtattaattatccacataatgtattccatccattatgctcctgggcccacatgtcagggctcagctcccttgtatgtgcctcccttaaactataaaagggaaggcacacaacgttataagggcacgcttaatcacttactcaatacagcttacacac

SEQ ID NO: 105527 - DNA, 518 bp, Zea Mays
caaggtgggccatggccccacctcaatttttcttaaccccttatacctaggtttaggtacacaccaaaataaacaaatttttgtatagttagcgtggacaaatctaatgaaaactaggttttgatctatttttctctcgatgccttcactactcagtccactcttcacctgagccatttgattctcttctctagcgcaagcccactcgtggctcactcgcttcttcggtcatctactgaccagtaagtcggtgacctaacccgcccgctgctgcgcactttgccttctcatcactcatcagctcgtcgactcttcgggatcctacacacaacgttgatattttgcctcctagtctgcaccagcacatgggcaagctgttggtgggaccgtggcatcacttgtccctcgctaactcactagattcccaccacgccattgcaacacgacaatgggtgtcgcttgtcgtcaccatcatctatcgccacctcgcctcctgcactcgctcctcctacttgtcg

SEQ ID NO: 105528 - DNA, 326 bp, Zea Mays
tcgaaaacaaaatgtcactggcaaatcgtagtaagtgaagtaactgagcagctaggacgaggtgtagcaactacgtgctcttctggacagctttagctagctagttatgagtttatgactccatgcgtgtgactgtgtgagtgaaagcttgcagattttgcttgcttttctggacagctttagctagctcgaggggaacagtacctgcagcacctagatcaagaggtatgtactgtatgttgcaataatattttttcacacatgtttttcatcattgatttaatgcatgtttatatatgttcatagtgtagactgctaccattttt

SEQ ID NO: 105529 - DNA, 566 bp, Zea Mays
tttaggaagattaggagttttgtttcaatagaactacttgttttgtggtgctgtgaggtgaggtgtttgatcttcttatatattcatctggtgtggatgtttcaccattgaattaaaatgaattgttgaagttggtaagggttgtgcttagtgcatattaccccttcataaaagagtgtcgttttaagacattgatgctgatgtatggctgcatccaaattcaatgttgtgaaatcgtagtgttgattgcatctatgacttgctttgagcttcattgcatgttgtttcatgcttgttgtcaggttgtgtagcttccttagaccattagtccgaggtagaagttcttgtgttgattaataccaataatggacccatgttttgaatggtgatgctatttggggtaccttggatgttttgctgggagtgttcgaattcgaggacaaattctttttaaacggggtagagtgtaatatcccaaaaaaatgttgaccaaaagttgatcttcggtgcgtgtatgtgggaaaatggttgtgggccgttggaagttcagagtccgcagatgtcaa

SEQ ID NO: 105530 - DNA, 997 bp, Zea Mays
ctcgactcaattttactccggaacgatcaccacggatcaccggccgccaacaaacttacagttcagacttgtgttctgtctattcctctcagttcgccgccaccttctcctagtgtaagccaatacttcttattacagtctgttacaaggccacttgggccaaataaacttagccactcacagctcgggccatatcgctctcttactccttctgagcccgtcgaggcctgcttctggcttcacatccttctcctttcccgcactggtattcttcgcttcttccgcgtcctggttgctgatcaccgggacactgacattttccctcccttgagttccagcttgtccccaagctggtgcaaaggaaaaatgtcgcttgatgtccgcctcctcttcccatgtagcgtagccatggatgtaggctagcccgtccactgagatgattgttgctaccagcatgcagttttcccatcgcagaggaggcaatcctgagataaaatacatagatactaccagccacgtatggtgttgaaccggcaatggaaaacgttcagagtatttcacccggtcttcccaattacgtatcgtaggatcaaagctaccttcactttgcccggcaggaaatgacaagttcgaaaattcgtgaagacctattttatctgtaaacaagttaaacccaaacggatgcctggtcgtcgcttgttgacagttaacacaagatcgaacaaagtcacgcactgagggcttcattcctggccagctcaacactgccttgatgcaccggtatgtaaccagaaagcctgactgcccacacagagtgctatcgtgcaaagttttcatggtccgttgctgcacttcatggctcgaaaccagccagattttgttcttgtgtctgatcactccatgcactaaggtgaagggttccaactgtccaccggttgagaagatagccattatcttttgagccgatgcatcactttcatacctttttgtcacttcc

SEQ ID NO: 105531 - DNA, 385 bp, Zea Mays
gaagccatacgccgtgaccggaccaacatcaagtcgtcctcctcgacctcgccatggtactcggccttgccttgctactggaccttagcgccatcggctcttcatccggctgtaatttcgccgtcactggccatgtccagcgtccaccttgttatgtcgtcgtggacttgtcggcgagctgccgtggtacctagaccgcgcttgcctcagcttccaagatgtcgtccttcctacgcctgaccataacgatgcagcttgcgtggggtggtgtcagactgggtcaccgccgtgagactcttcatcgctatgctcggccgtatctccctagtcgtcgtgtgtgcctgctcgtcaaattggggagctaacatcccccttgctcctcgtc

SEQ ID NO: 105532 - DNA, 287 bp, Zea Mays
gtgagtctatgatagtgtataaaacccatgggttccttttcctctcaacccgcagtcactagttaaccagaacagtagccacatggaagaaagggatggagcggcttacaggtggcagtagagctctggggaagatatcggtgatgttggggaggttatggtggtcacgttgaggagcggctcattggcggagatggctggagtcagtcaggccatgtgcgtatgcgatggatgtcaacgacggagaggatcctggctaaacgatgattgtagctcttgaattagtg

SEQ ID NO: 105533 - DNA, 998 bp, Zea Mays
gggtagctcaaaccaggtaaaagagctatgctgataatagaaggagaccactggaatttgaagaaggagattatgtgtaccttaaggtgtcaccacttcgtggaatgaggagatttaaagttaagggcaaattggctcctcgctttattggaccattcatgatctttaggcaagttggggagacggcataccaactcgagttaccggataatctgtctgatgtgcataatgtattccacgtatttcaacttaagaagtgtctccgtgcccctaaggaacagttaccaatggagaagctcagtgttcagggagatgtggcttatacggaatatcctattaagattattgacactttgactcgagttacaggaataaagtgataaaaatgtataaagtgcaatcgagtcaccatggagaaggtgaagctacatgggaaagagaagaagagcttcgcatagatttttccacatcttttctctaggccttcctaaatctcgaggacgagattctttttaagggggtaggatttgtgatacccaatttgtaaaaaaataatataaaaaagagaaaggttattttcttatttttaagtgggtgttttatttatttaccatcacatgagaacactttgcttaacaagaataaatagttaacaaaagacactcaaataacttgtgcatcctttggagcttttgtttgcttgtgcaataaaataataacaataataatcctagtagaaataaaacaatgacttgagatgaagttgaatcctaaattgagaattaagggtttgaaatagagaaggaaagaggaaatactataaaatacaaaataaattccacactagtatgttcaagatgagtacttaatttgagaacaaattatgctgcaaaataaatttgaattcaaatactagaattagaaatgaaaaagagaaaacaaaaggggaaataaaaagaaaaagaaaagagaacgaaattaggaaaacctcgttttgg

SEQ ID NO: 105534 - DNA, 513 bp, Zea Mays
atttttactctaaaaagtactttccaaatgaatttatttgattttctgattatctagatcgagcgcagcattattcgaaagtgtagggcttattatgtaaatatttccaagactcacaattcacttgcgatggaccgtgggttggtttctctaaaactcaggggcctttgtgttaatctgcgcctgcgaaggggtatccttcgattccagccacacgatcagagattaagcgcctggatttgatcctacccattaacaaaccggtatgcgaaataggccactggatcctcaatcaacggcacatatcagatcggacggaccccgcgtttcaacccaaacgtttccccatgatcaaatccccatcgtccaaactcggatggacgactctggatatcgtcttcttcctcctgcgcgcggccacggcggcaaacaaagcatgcgtgacggacattcgccggagccctgcctagacccaacgccgcaccgattcccaccccagaaacggttggggac

SEQ ID NO: 105535 - DNA, 560 bp, Zea Mays
cggagatgttgccgccgcgggggagctgttctccagtgactggtgaaggggggaatgtgaccgggaatcacgtgtcatcggattcctcgcggatgatggagatttatgcacgcgtacccctttcgccagtatggccctgaagcgttggatcgtgatctcgcgggccagagcgaatctaggacacttttcatcaacatcgtagatctattcatcagagggtaggattggtgtagggttaaatgaatgtcgactgttagatctggatctaggggccatcatcgtgttccattataattgtgcttaatctaatctggaccttcggttgtcgattgatcggctgatatcggccgataccccttcggccggtcgggtttgcagctaggcccccgataaattatgaaataaacccgccatcctccgcggggtggcatctgcgtcttagcacgtttcgcgttgagacccctgtactagtctgtttttatgcacgcaaactagagacccgagaagttaaataaataaatatggaaagtgatttttaatgtaaaaaatcattaaaattt

SEQ ID NO: 105536 - DNA, 592 bp, Zea Mays
ttttattaattatcattacaatttctagtttcaggttattattacttacttacttctaattgtcggtgtataaattatgtgtacttgtgtagcatcttttggcctgatctagctaggtgtagtcagtattccttccttccagacctcgctcgtgtgttgtcctataaggtgtgatgttctcaaataattcttatatatgagagtcatgctaattgatgctgttttgaatttaaacaatagacataaaatgctctcaagaaccatcgttaagttcctgtatgtcacagtagcagcatcagctgtaacacatgttaatcaagagcttagtgttaccagaaaattggagatcaataaataaagggtgcatgtgtttcactggagcttatgcaccgccgcctgtttgttgattggtaaatgtatctttgcatcgattacaagcaattaaatctacccttcgatattcatgtcgttatatatagcatgcatgtgtgtgcttactatggtcattaatccaagcattgttcctggtgacagttgttaagcacaatttctgaaggaatcatggtaggggattaaattttctgataataat

SEQ ID NO: 105537 - DNA, 691 bp, Zea Mays
cgtcagtaccgcgctctcccgcctcttgatccccccggccacacgctcctcggccacctctgtgccagcccgccgctcttcgtcgacctccgttccggcgctctggtcgagggccgtgctcgccgcggtgcacagggacgacaccgcgttctgcattggcgagggggaggcgactagctgctccatggaggagaaggcatacatgcaggaggcaatggcagccttgcgagtggctaaggaggtgcttgggatgcaggaggggtggaggaaggaggcaattagggagatgaacagaactgggcgattctcgcgctcattggccaattcggctactgactggccgtgcctgttgctggatgttctgtcacgtgcggcagaggaggaattcttccaggtagatctgatgttatttcagttgggtttgtggtggctttgtggcagggttagtgtaacttgacattattgtcttgatgctgctgtcgtttttgtacagccaaagctgatcctgaacaatgtggatgtgttgaggaaggcaatttgtgaggatgagacgatggtgcctgcagcgatgtaccatgatagcttcatttggagggtgattgcacttggcgccaatgaaaagtgcttgccagttattatgtcgacttcagatgggtgagttctcgtactccttttcttgcattgtgcatgt

SEQ ID NO: 105538 - DNA, 826 bp, Zea Mays
gtattcacacactattctgatgtgttctaaagatttctcctccaattgatttaccatggcttctactgttgctggcatactggcattgacttcaattctttctccttgcagactggataatgcaaccatcctcttagcacaagatattactccatcatacttggttaagtagtctattccaagtatcacatcgattccactcgattccaagattatcagctctgctagaaagcttattcctctaatttcaatcttagtctgagggcatgagtgagtggctctaagttcacctcctggtgatcaaattaatagttttctcttcaaaggatagtttaaaatattatgtttttccacaaatgactttgttacgaaggagtgagatgctccaaaatcaaataaaactgatgcaggtatgaatttaataagaaacataccatacaccacgtcggcatcctcaggaactaattctactgtcacgtgattaactcttcccttactctggttctgtggagtcttgttccatgcagatccacgagcaggtgtgttctgatcagctctttggttgctgttcttttggggtgtctgttgattgcgccttgggcagttgttagcatagtggccaagttcgccacacttgaaacaaccattgggttggactagagtagttgtgttgttatttcgggctggtgtgttcacgacgcttccttgacgattctgctgataaccactagacctttgaccggtctgagtgttgttcctctactggttttggttgtttctctgttcttgttgtctagagcattgtacttggtaattattgtttcca

SEQ ID NO: 105539 - DNA, 580 bp, Zea Mays
gcaaaatcgaagtcttccccaaaatactatccgtgcaaaagttgcctaagggtgcagccggactagcacaacaaatgcgcaaaatcgaagtctccctcaaaagactatccgtgcaaaaaccgactacaggtgcagccggaccgacataataaacgcgctagaccaagtgcacaagtcccccacgggcacaaccggatcagcgaaggcacacaacctcatcatacaaataatcatacaaattatagttacacacatacagcgagggcatcacaccttacattggttcaaccttcgggatgatacccatctccctgtagttaaacagcattatcctcagctcctcaccctcaaagagacttcgcaactccccctcacctacactcgccccaactggcgaggacaacaattcccgcttgccagccctgcccacacgaagacgaccaccctccacctcactcactctacgcttcgccaccgccctttcgctgcctacgcccaacacttggaccaggaagaacttcagcatccatcacacgcggagaagcctccgccgcagccacatccaaggccgcaaaataat

SEQ ID NO: 105540 - DNA, 572 bp, Zea Mays
atttcctattcattaacaaggggccataccttgaaagctatgtgctcttggaccaagtctctggtgttaatgtagctacacatagtgttgaaggccaccagacaagcttgagccttgtcactattcacgatcaagggcttcggatgctgaagcgtgattgtatcagatgctgaattatatctttcacatcctccctctcaaccaaatcattcttaacataaaaccattgcctcatccaggatcctggccacttcttacaaaagattgggatagggcgtctcgcatcagagcggtatacgaaggaataacaaccaaagttgttatgatattgttccttccctattgccttcgtctggtaagataattcatgtatattgtagaagcagtcgacatctagttctagcccttggctcctcattgcccaaatataaaccccaattttaattaaagcttcagggttaagctgataaaggtatatcccaaaccttttaagcacttcgactagcattttatgcaaaggaaaccgaagaccagccttcataaagcccttgaaagctaccacttcgtcagct

SEQ ID NO: 105541 - DNA, 638 bp, Zea Mays
gtagggcagtaagctaaccagccaccacaaatcagccccgaccattcgctagagcccgagaattttgaattcttccacaagttagcttccgccaccgctgagaatgcctcaccgtggccagcaccgaccaggtccgttcatactatcttcttccccgtttaagtgctctcttatatcaatgatgcttgccaacccacgtaattgggctgagaaccctctggtcgccgggaacgcgttgatccatccgcaacgttcacggtcaccgtggccaaagagaaccagtcacccatttacgaaattaacttgggggaaacctcgggttagatcggaatctggagtcagtcgtcggtgagcaccaatccttgcgtgctccgcccagtccagctcgacggagcacggctctcgcgcggttcgccgtcggggagcagtcaatgtaaaaaaatagaatttcaaggacctctgtgcaaatcgtctgagactcagaaaaatagtaactgcactcgtttccaattagccagaaccccgaggccctttgcgcaaaacaaccagcgcgcgggcgtgggcgcgttttccctctggtgttgggccgcttgggctagaattggcccagcactattgaagcttttcctttttctttt

SEQ ID NO: 105542 - DNA, 720 bp, Zea Mays
tcgacctaggagtgcctcgtgatctcgtcgatcgggaacccgtccttgctcttggggagccttgaggggaccctcgccaatgccacggtgcgtgccacagtgtcagccccgcctcaactcgacctgtcataccaagaatcgccaccagtatggggccctgctcagggcagctggggtcctcggcagggagcaagtgttgcctcgacggcgattagggaagctgcaatgaggcgttttgcaaacacgcatcgatgtcgctcgcaccctgcattgtctgatctacggtaaggtcggaccaccacggttccctcgggcatgccaaaacatcatgactactgcaatagccctgagcagactccccagggcgaaaattcagagcaaacgggggacccgtcgagaatcccgaagcttactcggtctcgttgcgcgtcagtaggctaagggtcccataccacgacatcaggagcaaggggctagcctgagcgccatgtatacaccaacagctaacgactgctcgagcctaaggcgggctcagaatagaccccatcccactagaacctagaaatagacgagggagcacagagcatgcctgaaccatggagcgatgaggaaatatggatggagccagacgacgaccatcggtacagtcggcgctgtgagggacaatttaaccgagatgaggactgaagctcgatatcatagtttggacagcttaaaaat

SEQ ID NO: 105543 - DNA, 422 bp, Zea Mays
ctgcaccttcaccagtttcgttggtttcacccagtccttatcgatctcggcctctaccgagctccggtcaatggcgcccatcttcttccccattcgcgagaccccgctcctctgcacctgtgcacccattctagcgatctgtcattcccttcctcatccatggcaccccatgccatttccccacctccggtggctgctgtattcgcgactaaacggcagcagacacgctggctaggggcaccaacagccgacaggaagctctccagcagggcgtcccttcccagccaacccctacgacgcacaactcctgctcgccctattgatgctcgacataatgcctaggaggagcgttacgttgcatacagctagcgtttcatccaagtggcccatcttctgcaaccaaggtccctcgtcatgccccc

SEQ ID NO: 105544 - DNA, 960 bp, Zea Mays
caagtactgtcagacagttcattatagtgtttggtgaccacatcggcaccaaccgtatccttatagtttggatttgtgacgagtgattaccaacaagagcatcattttaggttgagatgtatggactaaccgaggtgtgagtgtacgtataacaagtgtcttgactcgtggtgtgtagatgtggagtcccgaggcggtgagtgatagtgaaggtgaagatcatacatgttcgtgctaatagaccaaaaagcgttgaaggaagcgctgagccttgactgaaggattcgaaaagctagatgactagtcgtggtggctgacacctggaacactaacaagcgcaaaaacatggcggaacggatcgtgttgccgacacgattgaagatcgacgagacacgtgctcaagatgcgggagatgcctatgaagtacgctgtctatggaggtttggtggttgagccttaactatccagcaaaagtttcgcacgcttgacaccgagtttgggcctgaaaacttgacagcacgttctggagagaaccaaagacggcacatgatatcatcacggagaatatgtcaaggcagagtaacttcaagaagagagtatggatgtcagctcaatatcttaagagttggttcattttgtccccgactgagtggataaactctatgtatctatgtatagtttagagaagacaaaattctttataaataggggggttgcacaaccagctatctctcggactatatctatagtcttctacatatggtttcgctctgtaatttatcttgttaggcgatccttatttgcttttggacttattgcatctatgattttatgaatcaagaagtgtgggtcgtgacttctatggtaaatccctacacaaaatggtttgcttgaagttcttcctttaagttttcttcctgagctcttcgtttcgattttttgtgggattcaataaatatg

SEQ ID NO: 105545 - DNA, 351 bp, Zea Mays
ctatctacttcttgagctccaccaattctggtccagataccctatagactcttttagaaatagggacggtgccagcgataagctctatggcaaaatcaactttccgcttaggcgacatacctggtaaatctttagggaacacatctagaaattcatacacaaccttgatagcctcgagtgggtcggcctccttactctcttagaccgctcgacctctagatccctcgtaagggagtcggcacggagagaggcctcggtggcttgacgccaagacttgtcccgctcaccacccaagcccaaaggtttccttcaacagccacacatcctcctctagcggtgccactttctccc

SEQ ID NO: 105546 - DNA, 531 bp, Zea Mays
aaacctgcgaggcggagtggacgaccaagtccccactgagcaaatctgcgaggcggagcgactgaccaagtccccactgagcaagcctacgaggcggagcgatcgaccaagtcctcaccgagcaactcggcggggtggaggtcctagtctagtgctactaacccacgtcagctatgacatgacacatcatcaccaagttacgttcgaacatacgtgcagcatacctaaagagtgtcgggaggtcaccgtcaacatgactgcatgaccctatgaaaggtctcaggtgtatccccactaccccgtgggttcagtcaacctcagccgttggaggacctcaacacctgagtctctatagtgacccatatatccggaaagacgagacagtatgccataccgagtgtatgccaatgcacgatggcaggtaacacaaggctagtgacgactggcgaagccgcccatgcacgaccacaccataagactgacctgtgggacccgccatgcactactacgaatagatcaacaacagattca

SEQ ID NO: 105547 - DNA, 372 bp, Zea Mays
caacacctaacaagttcagtgttggaatgcttacttctgaacttattttagagttggaatgcttaggcgatgtcgtgacctaggaacagaaccaacacatccacacatatgcttgggcgatgttctcagtaggaaaagatgaagatggtgcctacaaaggaacaaccgaatacacacctcccgttgtcctcgcagtgggtgacgacatcgcatctggcgcccctttcccactctttaatagtaatcgcggtgtgctagcgaagatgtaaggagcgcatcatgggggagaggatggaaggggaacgcagagcactgattgggggcgtggattctggggcagctcctgtggaaggcgagaccggtgtggtggcg

SEQ ID NO: 105548 - DNA, 559 bp, Zea Mays
ccccctggacttgtgcttgctagaggtgtacctgcttacccttgtgccgacctgagtgatggttgtgtgagccaacctcctgcttacccttcttgggacagttgaagcatccacccttggactcgccacactgctgattcaggtggttgttgtggaatcacatgaaccgactggccataagcgccagctcctcattcctaaggctctccacctgctcctttgtgatagacaacaaagaagatcgagcaaacaaagtaggtgaggggttagaagcagaaccacctcaagggactagggtcatggtgggtgcagcagggttctcaatcttggccctagtctggtggtcaatctcgatggacttgagcttactaaataacacgtccataatgagagtctcatagttgggagacttaataatcatcgagaccttcacctcccaaacccccaatctagagcatgtagtaacctgagtgctctctcacgatcatcatagagcagctatgccttatttgcgtgcatcttgttcacaatcgactggaaccgagaaaacatattgtct

SEQ ID NO: 105549 - DNA, 418 bp, Zea Mays
cacagttagtttgcgcagggtaaaagatgtttactggtgaagtatgaaccaaagcaaaacaaaaaattgaagcgcggatcaaaaatcctgagagagctagggttttgttggggttttctcaaagcgagctcaaagagaattcaactcggatcacgaccaagaactacactgtaagggcgtacacattgatccaaagagtctatctcctcacaaaccaatccaaaacaacacccaagaactcaaaggttctccacaaatccacaagagaagggaagggaagaacacgagattgaaacaactctaaatttcagcaaggatgcaaaattgagatggaaaagtggcaaaaaatgtgggccataccggtgacccttcctcgaattatgcagatcacaaaaacagtcaatcattacagaatcat

SEQ ID NO: 105550 - DNA, 419 bp, Zea Mays
caacttccaatggcaagtttgggtgtagctggttatacaacacatgcacttcctcgtgcagaacattgttgtacacttgcagattttccaaggccatgctcagctcttccacccgggctcgggcagtcacctcacaatcccaagctatggatctagaattcacatcccagtcaatagcccgatcgtgttctacaatctcacgctgcaaaagctctacctcttctaacaactcagcgatgcggcgactagcacacgcacgctccctgcctccatggcacagctccacagtcagacgttcgactctagcctccaggtcttctatgggatcattgctcccactgctgctcccctcatgatgaggagccaactggtgatgaggcaaacctgaggtccggtcgttttccgaagggtggtcttcg

SEQ ID NO: 105551 - DNA, 371 bp, Zea Mays
aagttggatcctaggtcagttatgatactattcggtattccgaacctgaatattatgtcttgtatgaattccacggccttagctgaagttaaagaagcaatgggtttgaactctatccatttagtgaatttgtcaattgctaccagtatatgagtgtatcctccttgagctttcttgaaaggtccaatcatatccagtccctagcatgcgaacggccaagttactgtatggtctgcagttgctgcgttggtagatgctgttgttttgacaagtactggcaggcttcgcacctctgaactaactcggttgcatcactttttgctgttggccagtagaatcctgacctgaagactttcccgaccagcgtccta

SEQ ID NO: 105552 - DNA, 629 bp, Zea Mays
cttttggtgatgctaataaaagtatagaataacatataatatttttgcatatcaatgtattttatcactatttgaattgcgcacaaatttcatgtcattagtgttaatttgtgagatatggggttgatgatatatatgttgttcgttttcatgtaatcgttgtgcactaatatttatcaaatagtttatacgctgtcgtaacgaacgggcacatacctagtaatagattaagtatagaagtatagatatagatataggaagccccggtcggctccctcccctaggacccacgaccgtacggccccaccaccccgcatcccatgtctagatcaagtgggcacactattttagggatcagtttttatggtagttatatacttatatacgcgatgccaggctttcaacgtaaaaatcatcacgtttgagcgtaaaatagtatcagacatagcataaaatcttgttttcgtcacctcgcatgcagggtcctgtttttatggaaggtaccgtcatcacccaccaaatgtgcatgttgttttcaatttttatagcaggtgcggtttcagatccaaaaattatagtagatccaaaaattatggcagatccaaaaatcgttatgcatgcgaaaaatt

SEQ ID NO: 105553 - DNA, 317 bp, Zea Mays
cgctttcggagtaagaggaacttcatctccaatctgctggatgctggcaggacagttaccactcatgatcagatggaggaggtattacatgggtatttctctagtcccttgggttcagatttccaaaggcaatttacgcttaatttggcaaattgccataggcctgctttggacttgtctgcccttgatctccccttcaccgagaaagaggttagagacactattgcatgcctcccttcggataaagctcctgggctggatggattcacgggtagattctacaaaacttgttggcatataattaaagcagatttgat

SEQ ID NO: 105554 - DNA, 1089 bp, Zea Mays
gtcaagatgaatcatgctttgcacctgggaatcgaccgggtcaagactgacaaggtcggccacttgagggcgggcgcacgcgcctagaataaggtgagtgagtccggcgagatgcgccagcggagatgcctctgatgggcctccgtggagtagcacaaccaggatgcatgccggacctccgcaaagaggaactaccagcgacgcaagaagcagaagattcggcttccatgcatggaaaaaggaaggagagctggagggcagtaattgaggttgtttcaggcggctgttgtcagcgacggaggggaatggcgattggacgcaacagcggccacccataggtcgtaggtgtggaagaagctatgggggcaaagcttcacagcaatggcggccacgcgccctaggggcctaaatgcaaatatgtcggtgccaggggcttggcctgcatatcaaccaaagcattgagctactaatcatcaatgaaactaaaatgcaaaggaactaaaaagcggcaagaaacaaatgatgagctacagtatgggagggctgcaactgcagaatgtaaatactagcaaaggatcagcaggggaaaaatatgctagcaagacattggcttaccagcaggcaggcgctcaagagttcatgtcccctgcattcaggctaccatgcacctgctttgataacagtaagtttgaacaaatacagctaaaaaattaaaacatgaacaatttagatgcctggcttacctttactttacaggttcgaagcacgaaacccatcctttccttaatgtctgaaagcaaggcgaatgcatccaaatttgccttatctttaagtacttcattagctatagcatactgatcagaatcgcctttaatatcattctgtctaagatatttcattgcactcgtgtgggtcatgcgatgtgatgacttaggtgtaccaacttttgagctcctccgccgagtccggtgggtgaagggctgaatagaccctgtgttgctgctgctgcgttttgtaggagacatggttctacatgccattaccgctggtgtcttgaactcatcacagaaacaaaatatttcatccaac

SEQ ID NO: 105555 - DNA, 776 bp, Zea Mays
gtgggagcaatgatcccataggagacttggaggctagactcgagcgtctgactgcagagttgtgccatggaggtaaggagtgagtgcgtgctagtcatcgcattgctgagctgtaagtagaagtagaacgtctgtagcgggagttggtagagcgtgatcaggctatctactgggctatgagttcacgatccatagcctgggattgtgaggcgactgcccaagcccgggtggaagagctgagcctagccctagaaaacctgcaagtgtataacaacattctgcacgaggaagtgcatgtgttatatggctagctacatccaaacataccacccaaagttgccaatatgggcgctggcacagtgggagcagatgaaggaggaccctatagagagttggacatcttcggagcccctccttctatgaacatcgtggatgatcatcctacggaagcttgtaacggatctagagcgaccaaggacgtggaggactagagtagtatagtagtgggttgtttcttttgcttatacttaataagaaaagtgagtttgtatggactctaagtatgtgtaataagtaacatcttggaaaatgtaacaaaggttgtgtaaccatattgtataataataaagtatgttttcttctccagatgtcatcaaggacgtgtggtcatgatagagcagggacctctcgcggtagtgttgaggagaccccaatcccaccacctgtacctccaactcttgaggaggccattgctaccctgctaaatgctattgctg

SEQ ID NO: 105556 - DNA, 548 bp, Zea Mays
gctatatatacaccccaaccagctcatacaatacacaagagctaagcattcaagtatattcattatagcaacacatccattgttccaaagcgatccgatccttagggacacctcaacggagatgtaggttttgtttggaaactgaactccggtaaataaattgtcatgttcatttgtgttgttttgcttgtgattcgttaccccttctccctctctaagttctcttgcttgatcattactcgaatcaatttgtgttgctcccaagttaattctgcaatcataagagcaacacttacaagaagaactactctccattactttgattgttttatctctcattctaatgcctaagcgtgaatcacaatgtgtgtgttaagtgacatttcaagttttgcctattcacccctaggtgactttaactcgtacatctacaaaatcactccactcggtcctttggagccaaacacctaagtgaagtgtacattaaaccaacaaaagctataccctataaacatggatgccgaagccaacatttgtgaaacccattt

SEQ ID NO: 105557 - DNA, 502 bp, Zea Mays
cggggatagtgcggagaatctaaggaacagcgtgttcccagcaacccatggcagtctagttcaattggacaattcggtgagcatcaagggcatgggaggatgttggaacaatagcacagagggcgagatcggacctgagttgagctggccgcgacaagcttgatcttcgtggtggcggagaccagtttgggggaagttttaaattccagagctcaggtgagtgattaagggtgggagcgggtgctatggcttcgggattatatggcgcaacagccccggccatcaattttaaggaggcttaggcggtggcgcgtaatttggtcgagcagtgctggcggccgagatagagaagaaccttagctcagtggattggtgtcctcagtcgtggcgaactcaccggcgatgattagacgggtataaagagtcacggtgccgcgacggaggtgttcagatacgtggtgcaaggccgtgcgacggcagtcaccggcgttcttatcggttt

SEQ ID NO: 105558 - DNA, 344 bp, Zea Mays
attctcaaatggtatcaagaatccatcattctattgtgaaggatcacccatttgatcaaattgtgggcgacattagtaagggtgttcaaactcgctctcgtatagcttcattttgtgaacatttctcttttgtatcttgtatggaacctaaccgtgtagatgaagctctacttgatgttgattgggtgaatgcaatgcatgaggaattaaataacttcactcgaaatgaagtttgggagcttgttgagagaccaaagaaccacaatgttattggtaccaaatgggtgtttcgcaacaagcacaatgaagatggattagtagtaagaaacaaggcaagattagtg

SEQ ID NO: 105559 - DNA, 320 bp, Zea Mays
atttattatacagtggtttccaagcaaaagtcagtaaagaaggcccaattggagcatcgcaccaccaatgcggtacatgacaagcatatcttctggtcaccggcaaatgtttagtgacaccactaagacaaaatcataattttgcaaggtctaattcaagctatgaagtcttgttaatcctaaagattttgtccaaacgcccaccacaaaaccaagccattgctcccagagagttattcacgacagaactcatagcatgccatctgctgattagcaaacaccagaacatacctctactatattaaagcagctgacataag

SEQ ID NO: 105560 - DNA, 742 bp, Zea Mays
attttccctgcctcatagatttgctcggcggggacttggtcgtttgtcccacttcacatacttgctcggcggggacttggtcgttcatcctgccttgccaacttgctcgatgggaacttagtcggtaaatgggccagagagaggtttatgggcctcgctttgggtaccccatttctaggtactcgatagcaacccccaagcctttgtgcgagtccttggaatcagttggaggctttcttgccaagggttagaagccccaagtgtgtgaaagcgcatcattatgatgtagcccctgagccccgagtgacccattatgattgcttaggggtttacttagttcctagcgaagacatgggtctactttttgccgacctcttctgacctttttggccgtgtcagatacgcttccattttgtgttgtggttcttgatctggctctttgggttggtcgttagagcggaggtttcctcggtccctcatagagttgcccaggggcaacgatcaccggagcgggcgtagttcccaaggacagacccatatcgagttgcccggaggtggtgcccccccggatcgtggcttgaatgcacacaagcgcaccagtatgatgtagcccccgagtaatctgtgaggattgcttagggttacttgccttctattgacctttcttgatctagcccttcgagttggttgttgatgcatatcggttctttgttatgcacgcatctcccccggaagggctttt

SEQ ID NO: 105561 - DNA, 484 bp, Zea Mays
caaagggagtgagggagggaccaaatagaatgaggtaggaaggaagtagatgggtgggcacggatggcaacgttcatgagggtggtcaacatggctagagtgggtgtcgtagctagagctcgataggtggtgtggcatggaggtggaagaagacacagagagagaagggcttgtgtcagattcctttctctccttccatgttatgcaggttatcgtggcaagggggtgcaacatcgaagttgatgatgcgacaaccaccccacacatggcagcatgacaacgtttgacgtgtttgggtgtcttaggtagtgtttgattctcaagactagccagatggaatgactctattatggttttttatatggaatatctctgtttcatgtttggaagatagaatggagtggtgctattttttgtttggttcaggagcgtaggtagaacagagtcatgttgttttttgtttggtttgagagttgggattcac

SEQ ID NO: 105562 - DNA, 859 bp, Zea Mays
ggaaccaaccatggcacagctcaagcaagtttgaagtgatttaattcaaaaccgattggatttaggtctaattgatgattgatatcgagctgcagcagcagcttgggagcgattcaatttcttggttgtacctatgtttgcggattcaatttggaagagagatttagttgacctctgaactggattctaatctgcactgttgtgaagaagtctatctgatggtcagggtcagggcaagttatctggagagcgacacaagctggctgagagaggaatgtgtgtgatcagacattatggtggaaaatactccttagacacgtcgcagtagcagtagtctgaaaacaatgaaataatgaatggtggaggaataagtgctcaggcacctgtttatggtgaagaagacatgctaaatggagacagcaagagatggacataactttatggagattgtcggagtggtacattgttagcactaatcctgacatgcatgcgtgcgatgggtcggttagcttctagaattgttagctgctgcatgggcgcatgcaaaggatgctcaccatgttgtgcggatgagcggcatgtgtgatcgtcgtgatccgtcattggaggatctacatgcggtgagtttgttgcgatccgtcgggcggcgtcggacgcgcacgacaagctggcaagcgtggagttcgtgctagcatgtctgtccagctatataatcatgtgtactgctcgattgtggttatagaaagcaatacagaagctgtgtgtgtgtgtgcagtcagggagtgtgagcgccatagccattacttgttctagctactgttcatcttccttctctagcgtcctatgttctcgagtgttt

SEQ ID NO: 105563 - DNA, 447 bp, Zea Mays
ccgtgtgtggaggttggcgaggctagtgcgaggactaagtacaggcggcgaagggtggtgttgaagcacaacgtgggtgaggtttcgcgaagtggtagcaccgtcgtatggggatggagcggggtcatcttcgagtagaccggattggtaaacgagaactgttgtcctcgccgattgggacgagcataggtgagggggatctgcgaaatctttttgagggtgaggaattgagaataatgttgtttaattatagggagttgggtatcatcccaaaggttgagccgatgtagtatatggtgccctcgctatgtgtatgtaactggaacttgtattgtaatgtgacctgttggtcgtttgtcgcatgcttgtgctgatctggctgcacccgtaggcgacttttgtgcggagtgtcgattgacgtacttgttgcgcttacccggcggcacc

SEQ ID NO: 105564 - DNA, 732 bp, Zea Mays
gtcccgacgagcgtcatggtcatagattctagagtttaggaatggcttcgagagagagcaagaagtcagagatcatgggtgcgctcacctgcagctaagatcggtggtgataactctcgttgaagatggcttcctctccaatttgaagagtaaggcaagtgatgtttgggctgcgggggagcaacaacaatttgatggatatgttgatggcttaagcaggtgtgaggctttatggtatggtcatcagggtcgatttataggctgaggaatgacggttcacaatagaggacaaaatctcaatcggtgtactgtaagcggcggacgacgttatcagttatcacaatgtagtcacaacctctcgaggttggcagggcaacttggctcatggtggggcacacgttcggcgatgactgcggtgcatggctagcgtgtgctcaggtgggtgcacgtggtcttaccagagtagtagctctatgcactgaggcatcatttcaaggtctgcaatacaacactttaactcaatagctcgttgggcacgacaaggttgctttatggcaatgggtgtaggtgggggcttgctggagtacccggtcgccaaggaggtcagaggcaggcttgcggtttctacacgcatgttcttgctatggatggttatctgctccttccgtctgggcgtgagttatggtgggggtatcagcaacttgttagggtgaaatttaccacggcgagaga

SEQ ID NO: 105565 - DNA, 571 bp, Zea Mays
tcataaggcgttcgcacatattcaccttcatctgtctaacaatatcctgcatgaggttctgacggagaaaaccgccactgctctttggttgaagctggagtcgatctgtatgtcaaaggatctgaccagcaagatgcatgtcaaaatgaagttgttctcccacaagttggaggaaggaggctccattctgacgcacatatcggtgtttaaggagatcgcggccgatctgacgtctatggaggtaaagtttgatgatgaagacctagctcttcttctcctgtgttccctccctgcatcgtttagcaatttttgagataccatcctatacagtcgtgatactctaaccgtggctgaagtgtatgaagctttgactgcgaaagaaaagatgagacagatggttaactcggaagatgctgctggctcgagtggagaagctttgtatgtccatggccgcactgagcagaaaaagtccaactcaggtggcaaaggaaagggaaagaactagaggggtcgctccaagtcaaggggcccatccgatgaattattttgcaaatactgcaagaagacgaac

SEQ ID NO: 105566 - DNA, 509 bp, Zea Mays
gggggagaggaaaaaccctagctagataccatgttagagtgggagaaaacccgtaaccataaccagggttgggaatatattaataatagagttaggtgggccaagacccattagaataggggtctatacagaaaccctaaacagccctaaacacagttacactaacaatgagggtgcttcacctaatttcagcagcatcatgattcatgaaggacattagagatgagccacattgtggtgtatggcagggaccaaaggcctagtagctatggtcgtgattcttgttttcgtagctggttgtagttgtggtgtatggcagcctggcagagaccaaaggcctagtagctatggccatgattcttgttttcgtagctggttgtaggctcttagcatagctatattttggcaggtcttcatgcaattaacatcaccctattgggcttgtgttttgtatgagtctgctaagactccttttcctcttcaaatgtaatgaggggcactctccagcg

SEQ ID NO: 105567 - DNA, 374 bp, Zea Mays
ggtgttccaaaacatgctgttagactttaatttcagacttgattcagttatctaaaactgattttcagtgagttttgctcaacttcggagctttcttgtggctaatctatggggttatggactatggtttctatagtaaaatggaagaccatacaatagtgaacaagttttcttaaataaggttgactttgtactgcatgaaaagtggagtaatagttgcttaaaactgggactgtcagttacagaaactgaatttcaatcagtgcctgaaaactgaagttgcactgtttggtgtcagtttgggaacacttttgtgaccattccaccaggtgttaggctaagaactatgtaacaaggttggagaccaagtaaag

SEQ ID NO: 105568 - DNA, 288 bp, Zea Mays
tggcggtgcccttctgactgctgattgcgaggcaaaattggagccatgggtggtggtggtagcggggtccatgcagcttgtgaatggcttgctgaagcaactgatgctgtggactgctggttgctcacatactcggggatatatggggagtagcacgaagtagtatgtaggacctgcttcagttttttgtgtcgtgctttggcttcagctatttccttttgtttatggatcgtgacttggcacgtccttattgtatgtcccttatcttctccacagaataagcaaaac

SEQ ID NO: 105569 - DNA, 454 bp, Zea Mays
atacacaccctacgcctacgctaagaagggacggcgccaactcggggcaggcatctcgcacttctcgccgctggactggtactggtagtagtacaaaagaaaggccaggcaggcggcacttcttctttctgccacacagatatatagctcatagctgcagcgctccctccctcgtttgctttgcttgccttcttcagctggcctggctagctaggcgagggcattcctcgccagtgttctcgtcaagagttctcctcggctagctggtttgtcactgcacctggtcagaggtgagttaattctttgctcctgcatccgctgaactctgttgttgttgtgctgctaagtactacgaactagagagaggctacccttgttgtcgccttggctggatcaatcatcggtatgctgagagatcactcacgattgggcgtttgaagtgactttgttgttg

SEQ ID NO: 105570 - DNA, 1372 bp, Zea Mays
cttctaaataatagtatgaaaatcatcactaagttgttggccaaccgtcttcagacagtgatgacctcccttgttcacaaaaataatatggcttcatcaaaggtagatccatccaggattgcctagcttgggcttatgaatacatccatttatgccatgtttccaaaaaagaaatcatcgtgctcaagctggactttgagaaggcctttgacacagttgagcacgatctaatccttcaggtgctgtccttcagaggatttgggcccaaatggctaggctggattagggatatcctccaatctggcacgtcctcggttctccttaatggtgtgccaggcaaatcttttcattgcaagcgtggggtaagacaaggagaccccctttcgcctcttttattcgttctagcggcagatctgcttcaaagtataatcaataagtcgagacagcagggtcttctccagctgccactcactgagaactgtggtcaagatttcccgattgttcaatatgctgacgacactctcttgattttggaagcttgccccagacaattatttttcctcagagcagttctaaactcctttgctacctcgatgggtctcaaagttaattaccttaaatcaagtatgtacccaatcaatgtctgcccagcgtcgttggagattctagccagaactttaaactgccagacaggttctatgcctttcacttaccttggtgtacctctaggcctgtcaaaacccagaatctgccattttttaccacttattcaaaggattggagggagactgtcctgtacttctggtctcctctcccaggccggaagactggaggtagttaactctgttttctctgctctcccgactttcttgatgagcacgctgaaaattcatgcctccactgtcaaaaggattgatgcttcccagaggcattgtctctggagaggaaatgatgtgaactcaatcagatcagctcttgctccttggagcatgattactcagccgaagcgaaatgggggccttggggtggtcaggttggagacgcaaaacaaggccttgcttttgaaatttgtgcacaagttcttcaacaatcatgacttaccctgggttaacctggtctggaacaactactacaggacaaacagactccctagttgttcaaatattggttccttttggtggaaaagcctgcttagtttactccaagacttcaagggcttggcagccccgaccattggcaatgggagaactattcttttctgggaagatctgtggaacaagggcatcccggctcagcaatacccggaattattttcttttgtttgcaacaccaaactctctatcaaagaagctaagcaaaaagagcacctcct

SEQ ID NO: 105571 - DNA, 474 bp, Zea Mays
ttataggtgcctatagcgatcatcagttgattgtattttaatatgttaaccatttgcatagatattttgtgctttcatgagtaatatacgtgtaaccaagtaacaccaactacaagtggaaatgggttattgaaactaaatatgcatacatagttctaattctcatttatttttagatattcaatggtcagatttggtacttagtgactatgaacacctagccttgtgaaggtgtgaatcccaactctaataacacttgttggtgcatgtgatgccaagaggaggaagtgaattgggtcacttataaacttgcatctaggagatattgatctacacttttaaagcctcaaactaaattagtgatataacaccttagggttatttagtgtgttctagttaaccaacccaagatgagttctacaacctagcacgaatcttataaactagcctatgttaatctagggaatataaaag

SEQ ID NO: 105572 - DNA, 640 bp, Zea Mays
tgcaagttccaacatccagctttggggaatcataagcgagaagttccgttccagactaggccatcgctaccatattcgtttgttgccctagagatgcagagttcgccgacgtacatcgtctacaaagtgggtggtggtcctgatgaatgacagttcttcaatgaaccacctaagcattttccacacgagtattcgtgtgtgtatgtcccagatcatgtcaacacagtacgctcagtataacttggggctacatgagtttctggaccagatgttgagaagtaagcatgactggacaaatacgccactagaccgagtcatgatagcacgacccaggggtcgctactgcagattagctcatcatcattctaagggatcagtttgacatgattccgaggcggaggacagtcaactatactaatccatacccaatgagtatgatttgattcctctgccacctaagtatcggctccacgagttcatcaaattcaatggatcggaaggagctagctccatcgagcatgtgagctcatactgacgcagctcgggacaattttagtataagatcctttgctggtgagattcttttcgcagtctcttacagggccagcctttgcgtggtatacctcgctaggcgcagtat

SEQ ID NO: 105573 - DNA, 698 bp, Zea Mays
agggatgtgcccggaaactcggctcatatagccaacagaaacaaagccgacgtcggaggcagttatccaaggttagaacccagcttttccgctccagtttgttacgacgcgagaggaacgaagagattctggtagaatggtcccatgcggcaatctcagcaaaatgcattacgtgcggtgatagctggcactggcactgcagtcccacagaccagcgacccggccacagcgtatggcgaggctcgtttttttttattccatgcggtcctcatgtcagcgagcaggggatgagagtggatgatattacacctgatatcacaattacacagcgtccgatggaaggaataaagaaatagagaaaagacaagaaaataaaaagaacattatgcatggcacttgacgtgcatggctggtagtgtgtgtcgacctatgtagttagtccagttagtcattttctccttatctttttttaatttaaatatttcaaactaagctctaatttgaggtttcaaatctaaactggatgcacaatcataaattcagcatgatgcataagtttgaatatttcaccttgcctttgtttttagcaaaaagaaatatgccccaataataaaacacctaagcaaaatctccttagcattatttctttaatgactcgggtttatataaccccaatagaaataatttaggtaacattc

SEQ ID NO: 105574 - DNA, 599 bp, Zea Mays
taaagaagctcagaagtactcatcttttttctatgtttccccttattctatgtcgcttaaacttattcctgttttcagttatgaaaatatctttatatttgtttcgttttcttatgggaacaactatatttccagatttacccactctcctggtgatgttgtttacccctttgacatttattttgaattttttttgtgaaggtattctccttgtataatacttcttcgccactttgatgcaattgggaatgcatcctcaaacgaaggtccacagtctgagcaatctgggattgcatcgaacattgaatctgtcattaagcagtacattggacaacgttgggttgctaaggattcactgccaggaaaagatgtaaatgggagctcagtaagtttggattccttacttcaatgagatctaatgatataagaccttctatatatcacatttcttattattaactcacctttttgcagtacctcgtggagcctgaatgtgtaagctctcttcaaatcatactagttgcaactgcggacagttctgaaggaatgcaacagtcaattagaagatgcttccgctatgagatcgacatgaagactat

SEQ ID NO: 105575 - DNA, 335 bp, Zea Mays
ccacatttgacttattggtatttgatctattctcggggacgcctacaaatatgatccattagccttagtcaaagcatatgttctgattgcagattcacgtggtctgtaaataactctcctccgatgaactcaccttgctggtgatttgcctcacgaagaggttcatcttgatggtgaaaatcctagcaatgcgcgcaatatcattgtgcttggaatacggaacaatgaatctttcgtttttgggaaatgacaaagatcattattaaatgtgggagacaaatgtgttgacacctatcttgctcctctagattgctaatggatccaaaacaaagtcc

SEQ ID NO: 105576 - DNA, 444 bp, Zea Mays
caaagtcggtcactgcttaggccctgttccaatgcacacaagaccatgaggaatatctacaagcttacgtctaaaggttcctttggcttcgagctcaagcatcgacggtcccaaatgaaatggtcatagaatccatgatcaagggacttcatccacaactagctgcccagtattttgctagaaagccttcccaatctctagagaagcttctctagaaaatgaatgaatacataagagcggataatgattttcaccaaagaagagaagaagcccagagatatgcagaaatgactaggggcttcgagggaaggtttcatccaagacatgttagaagcatccacaatccacttctgaatgaaggtaaaacaagtcagacccaagggcaacataatcaaccacggggctcagggactcaacaacaatcctctcataataatttccgtc

SEQ ID NO: 105577 - DNA, 838 bp, Zea Mays
gcgtgctcccccctgctgtgttctggtgcgcttcgcggcgtggattgggtaggggtctgttgcgaacttggtataacgccgctcgctctccctgccgtgttctggtgcgcctcgcggccgggatcgggtagggctccgtagatccagttcggttggtcgcacggttgatgtgttgcgctaggttgtaattttggttctggttcagaatgttttcttgaatctaactacttcgattattccgcattctctgatcagaaagcttgtgcgattatgctacttcttgcttctgttcttttaaactgtattaaatcacccctatttgatttattggtaggttgtagttttggctctgctctagttaatttagttattcagcgttgttttggttataaagcttttaggatcacacaactgcgtgttgctgttcttttaaatcaccccatttgatgtaagttgctaggtttttaccagaaattaattctaggatttagttcctattcctaattttacgaaattggtccattactcctaggattttgtaagttgctgttcttttaaatcaccccattttaggatagttactattcctaatttttggaaactggtccattagttctgggatttagttctagaactcgaatgctataagcaaactactgtctaggagcatgtgtcctcttttattctatttattttaatgaactcattctgatatctcggcgcactattcaaatgttccataacttcatctatgaccacttttcacttctctggaagggaatgatgggcataacagttctttagttgttctttattaaagttataatattatctgcat

SEQ ID NO: 105578 - DNA, 363 bp, Zea Mays
cagcgctagaacatcgcaatagtagacgaagcagatcgacatcggtgtagagaaagcagacaaacaacgagcaatcacgacaacgcttcccaaaaaggcttatacggcccctacttcgtacagggacacatggggacgtaggcttcggagattctgctcagcgatttggaacaaggaggtagaggcgagaaatcgtcggaccattcacgcgtatgtcgtgtgcctacacccattatcctgcccggtctggtccggcccagcgagcgcactcaatagcttcaaccaggcggagatagttcaactatttaagttggctttactctatctagacttctagagtagcaatgtggtattaaagctacc

SEQ ID NO: 105579 - DNA, 338 bp, Zea Mays
gtgcaatcaagggtcctggagtcgcagatacatgcctcgataggacgaacgctaacaagaatgaagcaggaaaaagagcgtgaaaccctgacaacattcgttaatttattcacgcttacaaatcttttgggaaaaatccctcgttatctcttgttagggagaattggctgtgtaccattaaaagaacacatgtttggcaatgtaccattaaaagatcccttctttgctgtataccattaaaatattgcattcttttgaggctcaccacatccgttaagtcacagttaaataggacacaaatgcccttgccccttccaacgtagaatataacagatcaa

SEQ ID NO: 105580 - DNA, 471 bp, Zea Mays
gttcatctctcttcctcctaaagcagaaaacagcgaaatccccatccctctcacaatactcacactggaacctcacctctcttaggtagattttgtttgtgggagggggctttctttttgggtggctaggcttttggagggggaacactggagatgttgggaagggtatcaagtgtgttcctgaggtggttaggtttagggacccacacattttctaaggggctctcacaggctcctcaatcacaccatctctcacaggggtaataggcttaggtggggtgattttgataagcttgggaatgactgaaggtttctctgatggtttcaagctgaacgtcactcctagaactagaagcgaagtctattcctagtcgaccagttcccctcttgaattgactaacaagcatgcccaactaaggctcactacacgacacccagcacaagaccgaccgaaggtatgtgttttcttcc

SEQ ID NO: 105581 - DNA, 1124 bp, Zea Mays
ctcatttctctctcacaccttcacacttctctccaaactctctcgagagctcactcttttggaagagtggttggagatccgttcttcccggcgtgtttccaccatcttcctccatctcgttgggagttcttgacccaatcttcggatcgaggtattgtcctatgttatttccttgtactcgatcctacgcatttttgattatctattgtatcgttcgttgggtacactttagtttaagtgattgctacacttagactatcttcatttgtcacaaacattgttagagattagcgattcgatattgttcgttgcagttgaaccactcatattaacggttgaagtgcatggtcaatatcttatgcgttccttctcaaacatgtttgatccttgctcataataggttctatttcttatttcttagaatggtgcgtcgaaggaacccgtcggtggtcgaatccgactcatcggatgaccaggaaatccacggagatactccacctcgctctcgatccaagcgagggcgcggaagcggcaatgtcatgccgggtgctgaggcctccgggtctcaaagtgctcgcggtcggacttcccggaatccttccggtcggtctcgacctgcgacaaatccgcaggcgtgggagcctgcaagtgatgatgatggtgggaaggacgatgaagttgatcttcccccggcccacgctcctgtgattcgcggcttggtcctccaccgtgcagaggctcggcgtgctggcaatgagccagtcactgacttcactgccagtggagggtctgctcttctccaggatcttcgtttccaaaatcctgtattgcgtattcgtgatgccaggatcgatggaaatcgcttttggactcttcaccacgtggatttctataattccgtcattctacccaagaagcatcaacccatcctacatcaacggtatattaactgggaaggttgtgaagcgattggggaccctgaaatgtcacaggcactgagggcctgtgaaaggaaacaaatgaaaaatatcatgacattccaatatgattggaatgatgaagtgattgctcaattctactccactctctggataaagcttgcagacgaggagaatcattacaac

SEQ ID NO: 105582 - DNA, 341 bp, Zea Mays
gacgacgtcccgaaggccgtaaccggaccaaagctccccgacgagcaatgccactacggttccccggtgaatgccgaagtcaacaatatcccgaatatgacacaagacattgtccaaatgctccaccagagaggaaccacgagcccctacgtagtccaagaactgatccaagtagcatcacagtttctctagtttggcttccaaagctgtcaggagaaacgagcagtgtaagagaggggatgagaaaagctaggtaaggagtgagggataatcaccttatcgattatgcgatcgttggactcggtgagctgagtccgaagcagctcggccttagcctcgac

SEQ ID NO: 105583 - DNA, 353 bp, Zea Mays
ctaagaatgccctaggttccgactaggtgagaggtggattgcattgatcatctcgttggcaatgcaatgataattggtgggtgtacttcgttgattgatttcctttggggccctgagcactcgtgtcgtattgtagctagctgtcgtctaaatgacatcgatcgttggcatattaatggatgtacattagttgaattctttggcccttagcaagcactcgtgtcgcattggggtgttcatctagactccagaacgatggacgagcttttcactgccatccgaaccacctaggatgggaggtgaactgatcgtctgattataaaccttaaacccaagactcaaatgaacctatc

SEQ ID NO: 105584 - DNA, 421 bp, Zea Mays
ccttgatatccctctgaaggacagcattaaggggtggcaccttgagtggtttaccatggagaaccacaacaagtccctccccctcgatcggggaggcagcccgacgtttgcacgcctagctggacagattcccccacagcttcagagttagccgagtctagggtgttgcttgccgaaatatgtgcactgaaagacaagggtctgatgccgaagccgttgttgctaactttgtcttcaagaacatacaacctctgaaagatagaatgtactcggcttatctgtatactggggtcaaggattctaccagaattaccaatagacggattcctgatgtgggtctgctgagccgaattgacttgatgttaaggggcaaggtttcgaatgccggtgctcccctatcttattctgcctagaatctacc

SEQ ID NO: 105585 - DNA, 512 bp, Zea Mays
ccgggcatcgcatggttggggagtggaggcagcgttgggggcagcgtatgggggatgaattgaattacatgataatattacttcacatcacatgcttacgaaactttcttgtcatttcttgtttatcttttgtccatttttcttgaccaaatagcaagcatgaaactttacaggaaggtgagatgataagctaattgtgattgggatcccgtggatgcccgcgcatggcgcaccaatccctgaaaggtacgcctacaagtaccaagagcacacggttcaggctgaaaaatgagcatcagaaaccagagagaagcaaccttaccacaacagtagacacaactaaatacgcagccatggcaaaagagagaagcaaccttaccacaacagtagacacaacttttactggccctgcccgtgctcgagttcttggcattaaaatcagatcccagcttcatttttgataatctcgtacaatatcagatcagggcacacaaaacacacgtatcagatca

SEQ ID NO: 105586 - DNA, 592 bp, Zea Mays
aattgctaatccaatacttcatgtctgttagcaagtagtacgcattagttcattggctgcagtccttcctcaaatctgttgatttactggttgacctcatgtctgttagcaagtagtacccattagttcattgggtgtagttgacctcaaatctgttcattggctgtagttgacctcaaatctgttgatttactggttgtatatttttagattatctgtatatgatcctgttaccactgcagagtttgattttgtttgatctgtattgttcgtggtcctgttagcactgcagtgtttgatttttgtttgatctgtatatgacttgggctgtctgcatcaattgtgaaactggacagatattcggaatttgatttttgtttgatctgtatatgacttgtagtccttgctgtccttttatataatttggattgagctgaataaggcagttgaacagatttgaggatgccattgacttgtaattcgctgcaatgcgaaatgcttttctagctgcgaattgcttccacgaaacagatcttggtttctgaccaagactgctgtagtccttggtttctggcattggctatagtccttg

SEQ ID NO: 105587 - DNA, 418 bp, Zea Mays
gcagaccaaggtccacgacggcgtcgagcgcggagaggctccggcgaggttctataccggccgattggggctatggctgggttctctgagcgacggacatgaaatcggggtcaccatgattatttcccctaacttaattgcactattgatcaactatggagctctggccacggtggccgtgagtatggcggctaaacggtcatgttcccggcgaccagagggctcttagttcaatttaatggctcggtaagcatcgtagacgcataagaatgtttaaacaagggagcagaggggaggagctaaccagagttgggctgaccacggcggggttgagctcacggtgttttagaactgatttggggagaatgcgcaattcgggcgtactggtggacgatcgagggtgggagcgggtgctaca

SEQ ID NO: 105588 - DNA, 397 bp, Zea Mays
cgacggtgatctgccgccgcaattcacgcccgcctgggagattcgtgccgcgggagaggtagataacatcgaggcagggtgaaaatatccgaggaggggtgaatccagtcgctggccggaccagccgtcgtgtcccaccacggtcagtcgcgctggcattaccggagctcaccgttctccagccatgccacgtgcttaggaacgttaccacatcgcagtgaatcgtaagagggagtctatccatcgccggaggctttgccacaatgaaagccacgttagcgctcgccggtaattcccccctctctccggccacccacgtgtcttccccaaattggatgccaccactgttgatctctataaattgagcgctcaatgtgctccgttaggttgttacgcg

SEQ ID NO: 105589 - DNA, 486 bp, Zea Mays
aatttaacagaaacacaggggctatggagcaagtattcctaagacacagagcgctgttaactgaactgcgggttgatatatataaagtgcggggtctctttaggaaaatggcatggcgaagaggtatctgttgatatgggccgtcagatctaagatcaagggttaggattagatcctacttaaaatgaatcggtatgcaatcggggccattggatttctaatggacgcctaggattttaaaatactcagctcaactcatgcccgtcggattagaatctaacggcgcctggcacatccgaccaaatcactacgtttcatctaatcctagccccacgtcgcacaatcgacgactcacactatcccttcctcctcactggcgacagacacggcgaacacgtcctcgcacgacggcggaatcacgggaggtcgcaaatccggccatcccgagcgtcatgcaccaattcacacggccttcgagaaaattac

SEQ ID NO: 105590 - DNA, 680 bp, Zea Mays
gcaatacgtgaagactcgacagtgaccgccgtagaccgtaaatcagtgagcgccacattagcaactccggtgtctcttcccctttctcatcacaatcgcttccccgtccaaattcgccctcctcgcagtcgtcctctataaattgatgcttcgacatgttccatctacttgttgcaaacccagtgaaccactcctcgcgcccgatcgtccaccatagcgccctaattcggaattttccccaaatccgttctccgcaccgccgtgagcaccccctccgttgacccaccgtccagtccctccacgcaccttcctagctaccgttcttgagccctggtatgttgctaaagcttatcgttctcccaatttgtacgttactgcactgtgtcgtcaggaacacgtcgagaaagtctcaagctccgcgggtgtacgtggaccgagctctagaatggcgttcggaccaaattggtgattcccagtggagaaccaaggttagaatcaggcatagaccgtattagagcatggattgttgggtattgcggccagtacgagttcgctgaagtgcccacgccgccgtccgtggtcgggacctgatcttgcgaagaagagaaaagggaggggcctcggtgcacatgtcagagacacggatgaatagggaataggattctttaatggtttttcaa

SEQ ID NO: 105591 - DNA, 638 bp, Zea Mays
tgatccttgtgaatgatgatggagaatatacatcagctagtgaagaggaagctgaagcaggaaatgtagatgacactcataaaattgaggaacatactggatgtgaatttgagcatgtagtgctcttgtggttacacaaatcttgattgttcaaatgaaagaagttgaaattggacagcgacataatctttttcaaacgcgagcaaaagtgcaagacaaagtagtaaaggtgatcattgatggagggagctgccataatcttgtaagtcatgagatggttgaaaagcttggtttgaagttgcagcgacaccctcatccatatcatgtccaatggttgaatgaatcggaagatatcaaaattggttataaggtgaaagttccgttcaagattggagagtatgttgacacagtggagtgcgatgttgcacccatgtctgtgtgtcacttgctgctgggaagaccttggcaatatgaccggtattctcagcattgtggaagaacaaatcagtgcacactagacctgaaagggagaaagtttgtactcaagcctatgacccctcaacaaatcatggctgaacacttacaaaagaaaactgaaattagtgcagcaagtagaggaggagaagagcaaaagaaat

SEQ ID NO: 105592 - DNA, 488 bp, Zea Mays
tccatcgaagattcaagcggtggcatcgtgggctaccccacgttcactcaaggaattgcgtagttttttgggcttggcgggttattaccggcggtttgtcaggcacttcggtattctggccaagcctttgacaaccctcctgaagaaaggatttatgtttgtgtggacttctcagcatacaacagcatttcaggcgctgaaggatgccttagtctctgctccggtcttggctttgccaaactttgctctgccgttctgtttggaaacggatgcaagcaatcagggagtgggcgctgttttgatggggtcatccaatcgcttatttgagtaaggcattggggccaaaatctcaagggctttctacttatgagaaggaatttttggcgatccttactgcaattgatcattggcggcattatctgcaactgaaggagttccatattgtcacggaccatcgcagtttggctcagctggatgaacagcgtctt

SEQ ID NO: 105593 - DNA, 331 bp, Zea Mays
tttctttcatgttttaatatgtatcatatgcagaatattatctgcaaatctcatggaacatctgtctagctatctgcaagaatcctatgtgctactacagtttagctaacaataatatgtacggctagcaattaagtttatttttgttttctgaaaatccagtactaactttgtaagttccattaatttatcccactaatcaaacatttttattaccatctctatagccacatcccactgctgctttctaccatgcagagcacttctgttgctttgtcaggtctatggtgtgttttctgaagaatacaatttggtgtctggtactatttgc

SEQ ID NO: 105594 - DNA, 444 bp, Zea Mays
gaggggcgggggcgcggttaaggataaccctaattcgccaccagcaaactgacagccgccgcccacctctcgccctcgccaagccgccgtcgcgaacctagcagttcggtacgcggcgcttcctccctgtacgtgtggatacctcggaggtgctacatctggagcacttggacgaaccgcgcgaggacttgaaggacgccggcgactgcacggcactgctcgacgcgttcgtctacatcgagacggcttccgctgctctgcgcgtctagtggtaattccatgacctataaccgcagtagttcttggtattatggggatgaaaatttttgttttgcgctagcgtagcctccccgtaatcctacatatatctagtactgagctagggtcgggcgagacggagtccccgaagactcgcccacccggcttgttgtatttaggcgtccc

SEQ ID NO: 105595 - DNA, 629 bp, Zea Mays
gtgatggatgcccttaacttcgagtatctagactacgaaaggcttgacgaagaagctgggggagcgaagaaaaagagaattataagcgttttgaagaggcaagcaatgcgatccattgaaaaatacaaacagagggctgctccaaggaacaaaaagtttcagcggagccgaagcttttggctcccaaaaacgaaagtcctcgactttggcccctatcgaggcaaaggtacaagatccactggagaagattgctagcgcctcttcgtcctcttctatcggcgttacagaaatcctaaaggtaatggctgaacccttcccatttgctatgctaagtcccctggggtcagatctgactaacttattgcagccaaaggagaaaggagttgaaaaaggtgcgaaagaagagaagaagactacttcggcgactggggaaatgagggtgatcagaagaaacgacacatgatggctatgatgagggctatccataagaccccaccctcagtctcgacagaaaaattgctgtcgcccccgatgccgaagatgctgaagcgaccactgaagttgagaatagcggaggccctcttggaaccacaatgtcggagattgacaggattatagctgatgtggtt

SEQ ID NO: 105596 - DNA, 452 bp, Zea Mays
ggaacccttagaggctacttagttttcttttctatgtgcatattcaattaataggaatatattgatcaaataacaaataaatactaaaatatgcatctcatgccgatggttttgttatgatgcatttttgtttgaataaaggaatcaagacttaatttaagataaatgaataaaatgaaaggaattaccctctccataattaaataataatgaaaagaggattcaccgttacattataattatatttgagagttgaaattggagagaaagaaaattcaaacagggatttgaatctgaattggatatctaaaatttgaaatagaaaaggaggactaaaggatcagggaagtcacctgcgtgggccaaaacctattaacccggcccaacaccccctcctaattcctctccacggatggcccattactctttcccccgtgactgcctaggagcac

SEQ ID NO: 105597 - DNA, 480 bp, Zea Mays
gcaaaaacaaaacatgtgttatacctttgccttcacctgatccacaaccaatgctttaagtctccaagactttcaataaagcactttttacctgtggtccaaccagcattcttatttctccaagaattgttagtccacatacagttgtcattaattaccaaaacatcactaaggggcctcgatgattcacacccgcccagccgtgggacctcaagttaatcaggagcaacaacattgagtccttccactcgttcctcaagcatttccaatccatgagaaactgcatccccaacattaccgagatgacggtgattgagcacttcttctatggtcccacgatggggcatttgtccaagccatccttcaaaaagctccaacgacctccgagcaactcttctgggaggccgacgtctacatcaccgccgacaaacgggcccacaacctcatcattcaaccaagggctcaaaccctagaaggagg

SEQ ID NO: 105598 - DNA, 327 bp, Zea Mays
tgcagtagtaaaatgctatgtggtggttttgaaacttgtttacgggatatagaagtcacccctatatgagtattcgtaagcatgcgaaatcgccttaagtcgttgctgacttaaatcgattgcttttgttggtagggcatagtggtcaccctgagttaagtaagcgtgagcatgttgcaccgtctcaagtcgttgccgacttaagccgattgctccgttggcagggcatagtggtcaccctaagttaagtaagcgtgagcatgttgcaccgtctcaagtcgttgccgacttaagccgattgctccgttggcagggcatagtggtcgc

SEQ ID NO: 105599 - DNA, 1021 bp, Zea Mays
gcaaaatggtcacgtgccccggacgccatgtagaaaccatccccgtccttaggacgcgatcctccccgacaacgaagggaactcaacctcctcacgaacaacaatcaatgaggggaggctgatgatcctagagagcgattcgtcagatgaacataccctcgagatgagagcgccaaccgaggaagcccgccgccaactgtgttcattgcagaaagctcctagatcgccagcaaaggagacgtggggagactgaggactctagcaacgcttggactccacccaaggaaggcaccaagcccaaaaaggctaaaaacactgaacctcacaaggacgactgtcccgggccaggagttgaagcgatggcgcatgtttgccccgcaggttaacctcggggcaagagatctttgatcaggaaaaaatgcaagaacaacaaaacaaactcctcatgatggtgagataagaaaagggacaagtggagatagcacaagaagcttacaaactcgacaaatcctggctcagggctcatcggaagaccctcggagatagaaggcaagggtgaccgtgccgtgccttgtgcctccttcttaacctctagggcctggctgagccattgggtgccacaagcactagtacctgaggacgaaggatcccccatctgatccaaagtcacagatcggcaggggagccacctctcaccagagataagcgccgataaggcccgctcctatgatgcctttctctcggagggtacacacccccaccagatgtctttggatatgaactttttctttaggcatgaaattgtggcttcagctgaaagggagccttagtcagaatgctccgatagatgccgagaagctgcgaccccgacagggccctcgactgatgtcttgcaggtagaatcatcacctgtgccagcccttattagacaaggaaagggggaacgagatatactcaagctacctcttgctttgaaggaggatagtggcgcactcgatcgaccatgttgggggtatgcttc

SEQ ID NO: 105600 - DNA, 606 bp, Zea Mays
acttcttcaaccttaagtggttcaagagaggaaacaaacaagtaaaattcacaaaacattgctaaacgagatcgagttgttacccctctcctgatgctacccaggatgttgtccacaggatgatctctttggatgccctggtgcactcgaggatggtgcaccagagaatgcctctgaatttgatcatcactttcatcttgttcaaggggttctccactagcaacttcttcttgctcattttccacaatggttggcatatcttgcggtagaagcacttcttcaaggattgcatgacttgaggttgatgggtttgcttggatagaagaattttcaccaaccactttagcacccccatcaacgaccctatttgtcatccaaattctcccttcatcatcgtccttttcttgtggcttcacttcacctattgcaagctttttgatagcttcataaggtgggatttcatttcctacaatatcactagagatgtgcccttgcgagccattagattcatcaaatgtcacgtctaccgctatttcgacaagaccagtggtattgttgaaaacacgatatccatacgcatttgatgcatagccaagcaagaaaccc

SEQ ID NO: 105601 - DNA, 345 bp, Zea Mays
gttgcttcaggagaggagctggtaatgacgatatcatcaacgtacacaagcatgaacatggtgatgtcgttggccaagtagataaacaaagaagaatcagcaactgaagaagaaaaaccaagctggtaaaggcgctcactaagtcgagagtaccacgccctgggggactgttttagaccgtaaatggacttgtgaagcttacaaacattgtcaggtcgagaggcatcttgaaaacctggaggctgttgcatgtatgctgtgtcatcaagaaaaccatgaaggaaagcattgctgatgtcaatttgcctggtgtgccatccacgagagactgcaagggaaagaacg

SEQ ID NO: 105602 - DNA, 435 bp, Zea Mays
ctctcttgtctcagcatccttaggttctcctaatgctactcgacccattcaattgagctagactgccctatatcaccggaaacacgtttgttcatccattgtatgcgctgtctctgtggactggacgaattagagctccgctagtgaaattgattgaggggaaacgattattaagggttgaattaggtatcagccatgtgggagcactggtcatcgcgtatcctggctagtgcaagctcgccggagttcctgctccaccgtccacggtcgtggactttcccttgtgaagaattagaaccttgggggtctctatgcaaatgtcagcgagacagaggaacagtggggagggctctttataggtatttcaaaccgtcaggctcccctgcgcaaaatggacagtgagggcgcgcgcgggcgtgctttcgcctgtgtacg

SEQ ID NO: 105603 - DNA, 385 bp, Zea Mays
ggtgattaggtgatcgaggacgatagtgacatgtattgagatcatggaggaggcatagtggatacacttcttaggtgatcgggcctcaaaaccactggatggatggtttctcgggtttgagcccaaaacatagttggagttccaccgggaaggagaggtgacacgtggcatcatcacgaagcttgtgtcaaagcaaagtgaagtcgtagcccaatccttaaaaacaatccacaagagacacttacttaagaagagttatttctttattaattattacggatctacatatagccattttatataaacataaccttcaaagtgtatacatgggtgtttggttccactgaacgtctagtccgtgtcacatgaaatgtttggatggcaa

SEQ ID NO: 105604 - DNA, 669 bp, Zea Mays
tctatggagagttccatgtcctgaagttgggtatctcatctgattggagggcgatagtggtactccacatccacacattaacatccgttgggaccatggttgctgcattagatgtacattttggtaacaattaaatatcctcaaggtgggccggggtcacacatgtttctcttcataagtgagataaaagtttacactcacctcttgtatgtaaaactattggaaaaattgaagttggattctacatgctctttatacaatgaggttattcttgaaaacatgttctacttttaaaattgcacagtataaaaaatggatacgactgtagccacatgaattatttatgttggttacatgttcttttagtcttttagatatgtggcagtgttgatagtctgtaatgccaaccttttattgaccaccattttaaagaaaataacttctgtggataatataatgccttttttattactcttctttttgcatctaacatttctatttgtaagaataaccattacttggcattgtgtttctcctttggtttcttcacatctccacacaacatttctgcgttcacatgtgttatgtgtacatgaacatggttttttttgctactaaccattggtatctttttttgtcctcatttgttgttagtttcatcaatcctaa

SEQ ID NO: 105605 - DNA, 788 bp, Zea Mays
gttgggtattatcggaagttcgtggcgcattttggaataattagcaaacctctcaccagcttgctgaaaaagacaatatatttgtttggaccgaattggcagaccaatcatttagagctctgaaaacagccttaacacagactccagtattagctatacctaattttgccaagccttttaccattgaaacagatgcaagtgggggaggagttggcgctgtcttacagcaggaaggacatccagtggcatttatcagtcgagcactggttccaaagaatcttggtttatctacctatgaaaaagagtgtttagctattctctttgcgatagaacaatggcgtccctatttacagcatggtgaattcatcatcaagaccgatcatcagagcttaacccatctcgatgatcagagattgtccaccacctggcaacaaaaagcgttgactaagctgcttgggttgcagtttaaaattcaatatcgacagggtagtgacaacaaggtagctgatgctctgtcctgacggccagacatgaatcaagattcggtaaccatgcaactgaatgggttatttgtgtcttctataacacctagctggatacgacaagttacccatggatatatgcaggattcaactgcccataaattaatagagagtttgaccactggtgcaaaactggaacattatactttaactcaaggagtcatccgtttcaagggtaggatttggctgggagcgaacaaggaattacaccagatggttatgtcagcgctacatgacagtgctgtt

SEQ ID NO: 105606 - DNA, 439 bp, Zea Mays
ttgaaaagagatgtggctgcacatgtggttatgtgcgatgtgtgtcaaagagtgaaggttgaacactagaggccagctggactactgcatccactgatgatacccaaatggaagtaagaggagattgatatggacttcattactggattgcctcgcacctcgaaaggatacgattctatatgggttattgtgaatagactgacccaagtggctcattttattccggtcaagactatttgtaagggatcacaattggctaagttatacatgtcttggattatgtaactacacagtgtatcgaaggagatcattttggatagaggatcacaacctacctctagattttggaaaagttttcatgagaatatggatacgaagttgaattttagttcggcctaccatcctcaggctgatggatagactaaaaggactaatcaag

SEQ ID NO: 105607 - DNA, 276 bp, Zea Mays
atcgtgtattccttcatgagttcttctgaaccccgaggtagaacaaacctcgttaatagcttattccatatttgattcttgacatcatctgacacatctttccaatgtcggattgtgatgtcaagattatccctaactaagaacccaactgcattccgaaacttagggagtgcctcttctggagctaggggctgacctttcgggctcacatctgagattttatatgttttgtcagtaaacttgttcagtcctctatcacctcttttccagtcgctc

SEQ ID NO: 105608 - DNA, 293 bp, Zea Mays
gacggtttggtttggagcctgatgaaaattttgcgccatgcttacgtctactcggtgttcctacgtgcgagtaaattaatctcctgcgtacgtgtgtaattattccacagccacgtgagcaataataatactcctctatattttgcatgcttccttgtactagcaaaagacggttcttgagagattgttcggaagtcctgagtcaaccgggtggctgctgctgaagcggcgaacaggtactgagtcaaccgatcaaaattaagacggaaaggaaatttgggagccacgggcaa

SEQ ID NO: 105609 - DNA, 763 bp, Zea Mays
tagaaacgcgactgatctggcgtggagggaagacagtgtcacaggttttggtcaaatggtcgggatgggatacttctctagcaacatgggaagatgaagtaatggtgaaacaacactttccttttgcaccagcttgggggcaagctggatctcgaggaggggaatatgtcaacaactctacaccacgcgaggacggcgccaggccgactgcagaaaacctgatgggaggaaagccgatgttggaagcggaagctgatggagctgtgaagctgagaaggagcagcagagttaagaagccgaactccaaatatattggtgccaactggctgtaacacaggggatgggcgtatctctagttggggtttcagtagcaaatataaaaggcgaactgctgccatttctgtaatttggcttttggcttttggttgttgaataaactcgaacagacttgaaccgcaaggaataacacctgtccacatcgccaatcccagatcgcgagctcctccctgtgaacgtgctaacaaacgcccaggggccagggggaatgggagctagcgcagctgtacttgtgtagccatcctccactccatccatccccagatctctcccggcccggccggcctccgcgcgcgtccatgtgttccattggcttaatttgtttggccccccatcgtacacttcggattgtttggttgcacttgcaccaagctagaaggagatcaagagtcatgagtcatgactaacaagagagattacatgtctc

SEQ ID NO: 105610 - DNA, 296 bp, Zea Mays
aacatacacgtcggcttgcctattattatcgcaatccgagacaccacatacactaccacatttttatatacacacatattcacaagtattttcgcacatcgaccaatttatacgaatcgtaaaccactaatctccaactcacaatcatcatgcatttactttccaaaccatgaacacatacatgtttaccatatgaactgagtatttcgataattatcctaaaacaactaactccattacacacttgtatcacaaacctacttgacttacttgaagtgtctactcgaaatcgtgag

SEQ ID NO: 105611 - DNA, 411 bp, Zea Mays
gcgcagatcacgatactctagcgaagatccgccgagtacaggggcgccgccgccgctgcctagggtagagtggggaagacgcaccctgaacggttgatgcgagatgagtggctgggattagatcactcgtgccatttcggctagatcgctatggtgcgtccgatcttgatccggtggatgaggaacgatctcagtcacttaaagcctataccgttgatcttgtatcctacgtctacggggcgaataccggttgataaatggtccgatctaatctatgcagcgggtcgtcgatccaatggccgagatagactcgtaccccttcgtcgcgtatatttattttacgtaagagaccccgaaacctttacaaatcaacccgcagtcctcaacctgtacagaataattgcattcatg

SEQ ID NO: 105612 - DNA, 397 bp, Zea Mays
gaaaacgagagatatggcgatcgagaggtcaaacgacgcgaaaacggcgtttgaacgagaaatagtgccataggaggtttgaaattcgaattgaggtatgaaatgatgtggaattgagtcaatacttcacgaataggtttatatgggtaaatatgagtgaagtgtgtgcttggtttgaatttaggcaaggaaaatgaaatttaggcactcggctcggaattgatcgctcgaaacagggaattgtgtgaaattgaagcctggtatatcgaattggcgtgaaattgcgcgaatatgttactgaaggtgttgtgaaggtgcctgaaaagtttgggttcaattggagcaattttgtgtggtttgggcatttcaccgagcatgtggtgtgcggggatttagg

SEQ ID NO: 105613 - DNA, 338 bp, Zea Mays
aaaggcagataggtattgcttaatagcttttaactttattttttatttttgtgacttcgaatttatttacgttttctaccgcagccgaactatctcctcccccagagcccttcgagtcattggtcgagccagaggcaaaggaatcagcagaaatcattaatatggccgaaagtattttggacgaagtcgttactcaactgctgactgaagctgcaagcgaagttttgaaggaagaataatagatattgtaaaaacattgctggaaaaattaatgtaacatttgctggactatgcttgtaatatttggtgctcatgaacttttaatgtaatgtataaat

SEQ ID NO: 105614 - DNA, 992 bp, Zea Mays
aagacattagtgtcagagttcatatattagtggtcgcgccacattgattgaagtgtctcgagtgcacgccacaatatggttgtatgcgagacggggttatgtgcatgatgagtttagtaaaaatccattggtgtcactggtgttaagttgaggtttatttgcgcgtggaaagtaataatgtgtttaatacttagaactcttagtcgatagtagaaattgttttggcttatatagagaggtggtgacatgccaaagtagtcatcgctttctctatatttataagtcgagccatgacgatgcgtattatgcgttcgttaaattatgcttcgcatatagtgtataattgtgctcatgatttcgagtagatacttcaagtaagtcaagtagacttgtgatacaagtgtgtaatggagttagttgttttaggataattattgaaatactcggctcgtatgataaacatgtatgtgttcatgattgggaagtaaatgcatggtgattgcgagttggagattagtggtttacgatccgtatgagttggtcggtgtgcgaaaatacttgtgaatatgtgtgtttataaaaatgttgtagggtatgttgtgtctcggattgcgataataataggcaagccggcgtgtatgttatttagtggtctacgtcgttgctctagttggccgaattgctagatggtttggttaagctcgtaatcacgatgaattgcttgttgtgacctaaatgcgtatggttatggtcgcgggtaaaaattagtagtgctcatgtgatgtccaaattaaaatgccaattactacatgaagagcgcatcgatatatacatgtataccggatttgagtatcgtggagaatgcgttgataattgtgtatggtaattctagcgcacaaaattacttggataaaaattagtaagtcgacttgttggtcctaatttgattgttttaactataacaattgataaagtgttagagtaaatttcag

SEQ ID NO: 105615 - DNA, 540 bp, Zea Mays
cgatcatgacaatgcggtgaatcaggcgactatgtgtcccttgctgcgatcacggcgagcaccgacggtgatatttcatcgatcgcacaggcaagtgggtacgaaggtgactcagctctggccaagccctcctcacccaaaatcttttacccaccatggttatccactccacaccggcacaaatcgtggcaccggcgtgaattgcggcgtggagatcaccggcggtgaggttcactgaatctggcatttgattcagtcactgtaccatcgcgctcttcatcagttgttctgacagaccgaattgaagtgctttgttcttcaatttttgtgtggcaactaactcacctgcctgtatcaaagttgttgtccaatgtaccagctataactttgttacaaagaccttgctcaaacatccgctaaatccccagcaatttgatctcaaagttcatccgatttcactgatggtcaaggttcagtcttaaagttgactgacagtacaaattcatacccatttttctcaattttctgtacaacaccaag

SEQ ID NO: 105616 - DNA, 512 bp, Zea Mays
ctggaaacgcgccgccgcctgtttcgccgcgaattcctagtcgccggcggcatgagctgatgccgccgtttggatttgtgcggtgacacataattcactgtaaattactcaaactactagcaatagctagctagtgcagtacagtatacttatatgattccatttgatgcgtacggtctacaacgtgtaagtactagtatttagcgttgccaataattagcgacagggcacgctccggcagcgagtggtgctgttgttgttggcggtgtgctttagtgagcattcatcattaagtattgggtttacgttcaaagtaacttcgctgggaactttaagcttgtggttgaattcagctgggtgaccactaccgctgacatcaaaagtccaagcctgtaatcgtgaaaagctgatgacgacgaaaagatgaaagcgtgtacaagcatgacatatattatatatactctatgttttttttatctgtcgcgatggaaacgtgccggttaaactttgtc

SEQ ID NO: 105617 - DNA, 621 bp, Zea Mays
agagttttggattccctactgcatgctagcaaagtaaggatcaaagtacccaagggtagcacccagaactgttgctactatggtggtggaggaggaggcatatgctgagaaacctcatcctactaagcttcttgctcctcatcaccgtcaacttgctccacattaggaaaaggagtgagagggcgatgaagaaatgtagtgtcattcttgaaaggcctaaaagatgtaagtatcacttcacatctgccctggaacattgtcttctccttgatcaaggccatgatgtagggagcataggctagattaagatttttatccactttgagattattaagctatctcatcatgaatgtgataacatccattatgtcaccattcatcacatggtagataatgttccaaaacttatccctgatttttcttttatctccactcttgggagaatagtatctctgacaatcttattgatgactgcagggtggtgcctcaaccccagagtcagagtctcaccatatcttcttcctagagatgacaatggataaatacacacctgatattactatctcatacccatacccacgacaaaaaataaccccatcgggtcacccatattcactagtg

SEQ ID NO: 105618 - DNA, 377 bp, Zea Mays
ccctcatataccataccagtcacctccatatcgcctactagcttcccctcttctctacaaacacattctaggcgtcgtcgatctcctttccttcccctttatttgcttggttggtccttgcccgctccatcggcactactgtgatgtataagacaagggctcactgatgctaactatatctagattctcgaagatctatcgtgcctcctccgttcttacgacacaaatatgcttcctccgatcttgatgaggcggcgacactaaggtccagcgtgatggtgcgggtctaacgagctcattgggccgatacaacatgatcaagtcctttgccatgtccagcgagcacaacagggcacaactatagctcactcccatgt

SEQ ID NO: 105619 - DNA, 298 bp, Zea Mays
tgtagggaaattgtaatccaagtgaatatgttgattgggattcaatcgaagttgaagacaggtggaccgaggaaggaagacagaatgttactagtgaacaagcattgtatatccagctgggtttgcataatgaggatgtgtttgaatctgctcaaagggaagaagaatcagctcgtcatgttagatggagtaatagagactttttggatggtgaagcatcagctgccattccatgttctgattctgtggtagatgaggaacggattgtttatgacatgaacaatcctgttaagaaaaa

SEQ ID NO: 105620 - DNA, 451 bp, Zea Mays
tcgcactctattctagccttacctactgctctactactctcgcttatcttttctccttatcttgcagcagtcagttcaggatggtgaggatgaagaatgtcacaccgtcagggggaggagatgaccaggaccctccttgccccttcagacaagtcaaggggaagactgtctaccttgagtagcaagggggcaaaaagaagagatgtctggacagagccactcatgcaatgatttcagcaacagcagtagtagatcaagaagagcaaggaggtcagttgcagatatcttctgatcagatcgccttctgagtccgtcgcctcaggtctcggactcgctcctccactgctcgctccactccttctgacccagtcaccactccacctcccacttcgctagctcctgccgctctcgagctgtccaccactctggctgctaccaccacctccaccac

SEQ ID NO: 105621 - DNA, 748 bp, Zea Mays
cccttttcttgtaataagtgtatcatgctgtctaatgggacgaggcagctctagccagaggcgacctcatcaccggagcctccacaatagccggtatgatggaaacgacaggatgaggcgccacatcgaatagacaaatccgtacgcacgaaaggacaacgtagggtccatgatgacgggaggaagttgtgtcgtgtccgtcaagcccgaggctataccatgggaccgccaatcattatcgcagagacgacatccatgaacctgccacagggatgggagtaacgggtgtcgctataccggaaccactacttcacacgactaggagagggggcacaacagccaaaggactcttactccctttactctctccctctctaagagatacagcaatgtaaggttcgtcccttgagatataaaagggaaagcccctcttccacttacacacaaacactacagtagttgtaacacgccctcaacactacactagaatagggtgtgaaccaaaccagtataaatctcgtgtctcagttctctcgtggagtcccaacgattcatcattcggagcgagtccgcgctagcacccctattgaacataaatcttgttgtcccacggttttcgaaaccacgacaattttgttcagaaaaccgttacatttatgaggaacaaatgtgcatacttccacaatcgatataaaataaagttgccttttaacaaaattttcttacctcatttattgaatgaaaggga

SEQ ID NO: 105622 - DNA, 536 bp, Zea Mays
ggccggattttacgaagctatggaaaaaattaacatggagaaaatcacaatgagatattggctgtgatatctgaaaagtctagcgatagtgagagttttgacgtggaaagtggaaatgaagatgccgaagatcggtcatggagaccgagccatgtggtttttggaaagtcgactattaaacaagggcagatcgaagcaatgagaggcagatccgttcgtgacatttcaatcgtgagggccggaggagagaataatgttcctcttcccgaagctgacgaagtggtagtttttagaagcttcatgaaagctgggcttcggttccccttggataggatgttggtcgaagttctaaagacttttgaaatttatcttcatcaacttacccccgaagtaggggtttttatatgtgccatgagaagccaaggtttggagccagatgacaggtgtttctataatatccatgagttatcatatcagacgaaagcaactgggaaagagcaataccacaacaattttggttgctatagcttcgtacc

SEQ ID NO: 105623 - DNA, 516 bp, Zea Mays
gcaaatatgtatagaacattagatttaggactggtcaggcctgtcgcatcaacgaaaaagaagatcgttttgtttcttagttagcttatggcacaactatataggtgatttattttatagaataacaatcctagtttaagtcatcatgcgtatgttataagcattagaagttagtttattattattagaaaaaacatgtacactagttgtagatcatgtcactaccatatctgattcttaatgaactactgtatactcatgcagtcatgtttgtttgtatatgcacaccttttaatttttaattctatctattttgtcctttcatcactcacataagctaattttttatgttgttgttccctgatggctataatctcatgttttcgatgttcaagcaattgccttttgtttatttgatgctttctattgctaatttatgcttgctacatatctacacatatatatacataataaaaatcatgtacttaaaaagcaaaatgacttataaattaaaat

SEQ ID NO: 105624 - DNA, 696 bp, Zea Mays
ggcggtttgcccgcctgcgtccatccttcgtcgtcgggatccttgcccagctgcgcttgacccttgacttgtgcgcgctgtggggacaggggaccgtgatattttgcgtttcctctttctgtaggcaggggggcgtggaattcctcttgggctcttcccactccggtcgcgatcattgaccgattagttcccagtcgagcacgttggcgtttcgtaattgcgcttagactagcaacaaatgcgcccgggtgcgtgagtttttccttgaggtggacttggaatagtgcggtctccttgacagggtagcctttggagtcgatagtcgaaactcgttttgtggtgatcgattggttatatcggtgtgaccgtttcagtatcaggattcaggctaacgtcgaagtagggatcggcactggaacaagtttggaccgtcaagttctcgacgagagggaaagttgaaactccataatcgtcggcttcgtcgggtgaagacaattgaaaccgattttgtccccccacgtcatcagtttgaagtctcgacttctagaatgataccatcggggaaaggtaatctagttcttccattcaaatttcatcaattttcgcaggctataggctaaagctagactttttctcagtgcatggtgtcatatatacatttaatacatgtcatgaaatatggaaagctgatgcggc

SEQ ID NO: 105625 - DNA, 364 bp, Zea Mays
gcataacctaggatatagttgaggcaagaattgtgaagcgacgaagtggagaaaacaatcaagggtaagataggtaaggttccaacagaagggttgatgtaaagattccttaccgagggaagttataagaaagcaacgagatcaccaatcatgtgcgagatagaatgatcgttcatggatcgttaagaaacaagggtggtcaagggcatgttaactgaaatgtcttgaacagtcattggggtatgcaagattccaatggtacgaacataccaagaccaagagagtagaaattgccaaacgatagcgacttaacaatagaataggaaagggtatcaaaagatagttagatcatggacatataaac

SEQ ID NO: 105626 - DNA, 339 bp, Zea Mays
tgcttatgctcttaagcaaagttgttcttctatgttaggtatataactttgatgtggtagcctagggcaaaaaccctagtatttgaaagttacaagactcaaaagttgagcccacaaatctgaaattcagacttagagtaaattctcaattggggtcctttttgcaaatcattccaaaacttagggtttggcttgtaaacctttccaaatgtgaaccatgggactttatatgtcttgacattgtagtttttacactttagtccaaatgtgcactgtctttgcacataggcccctagggtttggacttagggttttctagggtttcaaatggggtttttg

SEQ ID NO: 105627 - DNA, 391 bp, Zea Mays
aaaacaatccatagaaatattctcccaaggtgcactaggaacagaaaggggcatataaagaccatgtgggttaagtcggaacttagctttgttgcacgtggtgcaacaagagatgcagcgctcaacaccacagcgcatccaaggccaatagaagtgactggacaacacatcctcagtcttcttaacaccaaaatgtcccgtcaggccacccccatatgcttcttgcaagggtagaagatgaacggagctaactggaacacacaacttattagcatggtagagaaggccttcatgcagcacaatttttttcacgttcttccctctcggcaattttcaaaggcatctttgaagtccaaatcagcagcatataatccctttatagtctccaaac

SEQ ID NO: 105628 - DNA, 519 bp, Zea Mays
gcttcggttccctctacatgacatgataggagaagttttaaagaattttgagatataccttcatcagttaacacccaatgtaatcgttagactcagtgtttacatatgggctcttcgaagccagggtatgagtgctaatgccgaagctttctgtcgggtgcatgagctgcactaccagacgaaggacagagcgaatggtcttcataagaactttggctgctacaactttgcatatcgaaaagatacgaaggccctggtaattggctatcgcactaagtggccgaccggttggacaagtgaatggttctacataaaagcggacgagaagaaaagggagaaattgatgactatggtcatgagtccaatgaaattaagcttcgagatgacaaggcccttgtgccacatgcaacttggctccccatgccagctgcccgaggtggaattcagagtggtagctgccgaagtcagcactagagatctagtacaagagtacttggcaaatagaacatttccgacctc

SEQ ID NO: 105629 - DNA, 405 bp, Zea Mays
gaagcttctaaaaaccaccacttcatcagcttcgggaagaggaacattattctcccctccggccctcacgattgagatatcacgaaagtatctccccctcattgcattgatctgtccttgtttaatagttgatttttcgaagacaacatgacttggtctccatggccgatcttcgacatcttcatttccactttccacatcaaagctttcgctattgctagtcttcagaaatcccagctaacatctcattggcgatcttctccatgttggttttttccatggcctcgtaaaacccggccagcgttggatcaatgatcttcttcacatcagccatttggacaatagttgctagaatgccgaagctcaaaaaacaatcaagcttgatgaagtagggagggttaaaat

SEQ ID NO: 105630 - DNA, 1152 bp, Zea Mays
gcagtaaggagtcaagggatagaaccgagcgcaaagtgcttctgtagtatgcacgaacttttatatgagacaaaagccatgggtaaagaacagtaccacaacaacttcggttgttatggatttatcgcccgtcccaacttaagctacccagtaccaacatttaggaaaagatggccgggaaattggatggaggaatggttttatgtgaagaacgacttggtagctagggaggatgttaaggaggttattatgcgccccatttggtcccgcttcggtctccgaagaccgaaggttgaaatcgatgaagccgccgaagcatgccagaaggcctttggcactgtatgcttcttcattggtacaagagacttgattcaagaacatatagcattcagagtatggccgcttgtagagagttgggagatgccaaaggagactatcaccaagtctggcgaaggtgagctggtttggctgaaatacaccttcagatacggagataaatttgatgaaccgaatgatgactggctgaaatgtatcgaagctacaagtgatgaactgcttgggccgtattcaaaagcgaaatataatgccttatccacatccttcggggcccggggaaaaaagagaattaacagagtttttgatgccattggttttgtttaccccgactactgctacccgctacggggacggggaaagaagaggaaaactgctgcttcgaccaagactgctgcttcggccactccaaatgagcttgtgccgaagagcaagaagttgaaagtccttacccacaggccacgttatattgaaccggccgtggtgcctgaatttggcggagagacttcttcagctactaaaccaaaggagcccatttctcccacacagaaggctaaagatccggctgtaatgccgaaggtaccctcagccgagctagctgactcgaagaccgataaggctgaagagccaaaaatcgaaggaacaaaaatgttagaagttttaagcccttcggcagaagtaacagtgtcgaaggcacaaaaaggtcttgcggcaactcccaaaagaagaaggatggcaaatgtactagatgtgctagaattagtaaaggcttcaagctctactcctttaggaaaaattgtcgaggcttcaaaaatgcaa

SEQ ID NO: 105631 - DNA, 665 bp, Zea Mays
gtggtcgagctacccgcagtattctggagcctactatccacactatccagggtgacaggctgcacatctttattcctggcatttggtgtggaagccgtgttgccctaggaactagaatatggctccccgaggactaaggcttacgatgatgtatgagcaactacagacgcacaactcatcatcgacctgctcgacgaagaatgcgacacggtcgtgattcgctccaccaagtatcaacaagaattgttacgctaccataaccgacaggtgcgtggcagatcatttaacgtcaaagacctgatgttgcaaagggtaatgaccaccaagcacaaacataagctctcatcgcggtgggagggaccttacatcatcgcccagatcatgcgcccgagagcctactgtctcaaggacaacgacagaaacctaatgactaacgcgtggaacatcgagaacctaagaagattttacccatgagtaagcgaactcaatcccctcgtcttcatgatcgagaaagcaaaacatgctgacctaactgcaacgtcctgcttgaggactaggagagaagcaccccaggatgcattgccaagactcggaagatcgaccacgacaaaactcaacattcgcaaaaagaagcaaattcggaaaataaatctccacgatcaagt

SEQ ID NO: 105632 - DNA, 902 bp, Zea Mays
ttctttttgctggggagtggtagctttgcgaccaagtttttgaatgttgtcaatctggccgctctacttagtttcggagaggcaattggtatgagtaaacaacaatatgatcacttggcatgtagggaaaaataaatcaaacatgactgactctttggtgctctggcactatagctgatgttgatgtcaattattgcaatgactctgttcttccgtacgaagatgaagcatgacatgttgaatgccggggtccttatatgggcgcactcttctttggtgggcttatgatcatgttcaatggcttatctgagctgacgctaattgtcttcaagttgtctgtattcttcaagtagagggatctccttttctttccggcatggtcctacactatacccgcatggatcctcaaggtacccatactgttccaggccaatcaagaggttgaacagagctgtgcaggtgagcatgcattcattatattcccacagttgatattctttgcggtactacatctatggcagatttagtcgctgctgccatacaccagatgctcagatcttcttcaggcccttcgtcggtgaggagtatcacaaggtatgccaatcgcttggtcttatcttcctgctctgcgaaaacaagcacgcaaacccaatttactatgttacaccccttggcttccgacgaggtggtcgaggcgtgaggctgacagtggcgctggtagtccgctaggaatcggatttggacgcgctctccctcgtcactaggtaagagacccaggtaaggaacatataagtgtttgttctgatttctggtattagccaatttcccccctccaatctgttactgatttatatgcccttccggggatcaacagatcccacacctattacatgatctgtcct

SEQ ID NO: 105633 - DNA, 495 bp, Zea Mays
ccaggctagaggatatttacatattgtaggaagagcgattgaatacagtaattcagtcagctagataccagcaaaccctgaggcgctatcatgataaggctgtacgacatcgatccttcatagtgggagacttggttcttcgccgaatcctaacgggggaaggacgacataaattgtcaccactatgggaagggtcatttgtagtagtggaggtcactcggctaggatcatatcggcttactcaaatggatggcacggaaatagggaattcatggaatatagagcacctcaggaagttttacccttagcaagatcccaaaagctatcggaacaacattgtattctgtaattggaaaatacatcatcaataaaaagatttcaagggcactcgaaccgtttattatcaatcagcacgcttactcgacttagggtgaccactataccctactaatagagcaatcagcttaagtcggcaatgacttaagacgatgcaac

SEQ ID NO: 105634 - DNA, 362 bp, Zea Mays
tcaatctctaatcctgcagaaccatctgtaaattagtgtaattctaatttcataaaatatgtctcctaggatctttcattatacctctttcaactgcttcatttatggtaattacatatagtttgatgtatacctgcaagacgagccctcacctgtattcaagttttgtagccatgtctcaaatctaaagcttctcgcgcaacaactatgtgatccttgtggtgttgtttgtaacttgaatttagttttgaattttgtagattcaattttcatattttgttgtattccgcactagattaccaaatatcttaaattttgactaaactgtactttgcagaatgcatacttgctttatttgtaaa

SEQ ID NO: 105635 - DNA, 649 bp, Zea Mays
ctactttcccccctcaccaacatcttcctccatcacaactcagaaagtcgaagcaccattcctgtcgttgttgaggtgctgtacaacagttcctcacgacctacacaacataatcaagataatcgcaagatcaattcaacacttcatcggttcattagttcatcacaacaacaagcaagggaataaatagagaaaatagagacaactcacaactcagacaactgagacaagtaaacatccatggatccaagaatcattagttcattggttcatcacaacagcaagcaatggaataaacagagaaaatttagacaactcacaactcaaacaactaaacatctaggagcatatcaagataaatctggttcatcagttcatcacaagatcagttcaacacaagatcagttcattagtttaacacttcactagttcatcacattagcatgtagaccaggagaagatcagggtagatctggttacctctttgttggacacgactcattaatggcgctagtagcagatccaaagcataggtttcatcgctgactcactatggagatggcaccagcgcacactagttcctcacagatcaagatagctcacgactaagtcttgcaagggaataaacagagaaaattgagacaactca

SEQ ID NO: 105636 - DNA, 326 bp, Zea Mays
cggagggtgagatggttatgttcgacgcattttttactgccggcctccggttacctgcgcatcgttttgtggcggaggtgttgcagaggtatgaagtgcagatgcatcagttcacacataacgccgttgtggctttggcgaagtatgtgtgggcagtaacttcatatggcggtcagccctccatagaggtcttcgccaagaattattgtttacactggcagaagaggaaagttggaaacaagattgcacagtttgggtcatgcacctttacgccgaggactgggaagacttcggcggaggttgtggagctagttccctgcgctcgc

SEQ ID NO: 105637 - DNA, 755 bp, Zea Mays
tcggaccttctggctctaggcgcggaccgtctgaggtacggtatgcaaaactagatgcaaattgttatcagcaaaccccctacccaccccagcataacttctctctacctcaaaatcatgatgtgattccaccaacacattggtatgagtccttttcgacccctagaaagtcgaaaaaatccaacacataatatggggcacctagatctagcattaatgccccacaaaacccaaactcatgggcaagggaacaatacatagaaacacaaacgcccccaccgttggaccaaagggtcggtgtagtaccactagccgccattgacatagtaagagaagagacagccgaggcattgcaagacaaacttagagttaacatggcacatgggggaaatcctatcggaaaccatatgatagccaactcgactatgacccattcccacaggggacaaggatacctaaatttatgaatttttcgggtgaccagagcaggaccacacatgagcacataggccaattcctagcacaattaggggaattgtccaataatgaagctttccgcgtgcatttatttttgttatccctaaccgatattgcttttgcatggtatgccaccttgccacctaactctatctattcttggggggatttagaacaaattttcatggtcattttttctccaaggaatatgagttacacctagtcgatttaggagccctgcgacaaggaaaagacgaatcggttaatgattatattcg

SEQ ID NO: 105638 - DNA, 553 bp, Zea Mays
gcaagattgaagtcttctccaaaagactccccgtgcaaaagtcgcctacgggtgcagctggactagcgcaataggtgcacaaagtcaaagtcttctccaaacgaccccccgtgcaaaagtcgcctacgggtgcagccgggctagcataaaaaagcacgcaaaatcgaagtattttccaaaaggtttggatcaacgaaggctcgcagtttcatataaattacggttacatacatacagcgagggcatcacactttacattggttcaatcttcgggatgatacccatctccctgtagttgaacaacattatcctcaactcctcaccctcaaaaagatttcacaactccccctcacccacactcgccccaaccggcgaggacaacaattcccgcttgctagccccatccacacgaagacactctccacctcacacactctccacttcgccactacccttcgccacctacgcccagcactcggaccaggaagaacttcagcatccatcacacgcggagaagcctccgccgcagccacatccaaggccgcaaaataat

SEQ ID NO: 105639 - DNA, 728 bp, Zea Mays
gtcaaattaccagtacaactggtgcatgccagttcaactggtaccaggtgcggtgaaaccactctgaatcagatcaaccactctgaaccaggagcaacttcacaaaatccacacacacacacacaaaggatcgctagaatccttgcttgctaaagatggaacacaacgaatgaacaaaacaagaactcaagaacacgagatttatcccaaggtttggtcacattacaaaggtgctctactccccattgaggagcccacaaagggacgagtcttttctaaccctaattctcccttagtcgaccataaagttcaaggcaaacactttctcaatcttgctcaacgagcaggtgatacaaacttcttaggatcatctaaaaatccagagactcccaggcaacctcaaccatcaaggaacacaaggtttcaagagtaacaaatccacacaagttgatgtttgcaacaagctctaatgagggagaaagagggaagaatgaaaaccaagagggaagaatgaaaaccaagtcactgaatcaaagaactcaaaccttacaccaagtgctcctttaatcaatcaaagagggagaggtttggggtgtgagaagagaagttaatgcttttgtttgaagtttgtaaaggagtaaagacgtggaagtgaacagggtaagtcaaagagagcaaaagtggtataagtatccacctctcaaaagttcctagccgtttggactttc

SEQ ID NO: 105640 - DNA, 1629 bp, Zea Mays
ttaaaaagtacagaaaactttacctgaattaggtggtggtggaggtaatgtccaaataggatgcgctgacggtgcttttggctctggtaggggagggattgaaggaagagtaggagaaatatgatttcctgtggaatccagcagttctgtaaatttctattgacaagaggaaaagacaacaataagtgaagcaaagagacaaggcactgaaagtacttttcttcgcgttcgcaggacccctcgatgaggctggtgaaggggatggggagtgtacaggaaagctagggtgtcctggacagaaaagaacaatgtgaaagttgttagtaagtgaaatgaatgcaatctttaaacccgcatgttagcgtagattaccttgagggaatggtggaggcgcatggtgagtatagtttttagtcccagtctgtcttggggttcgtgagacctcgggccctgtaatgcaaagtcttttagatcaatgttgagaagtgacaatatttaggctgccgatagaagttcattgtcaaaccttgagcacgaggcggtggataagatggggcatgtaatctatttgttttgttattgggattactggatttccatccctgagcatgagatctaccagtgggtgccaattctggagctatacttggtggtgagggatgggcatgtggcactgatgaagcattcttcgggattgaaggcatgtttgtgttctggggcaaaggacttgttgcaggcgcagatcctgaaacaagtagttttggttgtcaatctacaattctacattgtaatgttcaaatggacacagcctaagtttaatagctgagattacctgtaactggtgatttgtgacctgggacagtttgaccagtggatccctttggaggggatgcatgtggaacatgatgcttcttgagatttgtaggagggtaagtatttgctggcggcactgcgtttcctaaatattcatccaatattaagtacaaaagggattaaaacacaatcagatgtatgaaactgggtgattttatcctcaccgttcttataatctctacttggaggatctgctcgtcgctgtggtgcttgtgcaataacaggtgatgtggctggaggtgggactgctgttcaagaaatgggaaatgacaagagatatatgttgcctgagtgatttgatgtactttcagagaggggaattttacctgaagtggcaggaggaatagcaggaaaccttcctgaaggtgggtatggtggaatgccatttgccggagggggcgatgcagggggtggataaggagggactgcagaaatttttcacaagtgaattgagatttttttaaaaaaagaaaagtttcatgaaaatcaagaaccttaatcacttctatcaatcagaaaatataccagacccaaccggcctacttggttgattattcgcaggtggaggtgacaccacgactggtggattaggcttgagaacgacagatggagcaggagcctgaacataaggtagcaatgcaggtgtcccaggaagaattggagtgggatttccaactgcagcttgtggtggagctactggtggaggaacctcatcggtgggatcagtgggtgcaacctcaactggaggaggtgcac

SEQ ID NO: 105641 - DNA, 354 bp, Zea Mays
caaagtacgacttcggtcggtgggttagaatctttgctctctttggcttcggcacaacagaataagctttcggtgcacttttcctttttgaccctctctttcgagcaaggaatcactaattagggtaaacgaatccaatagcatcaaaaaccatgttcaatcttcgttttccccgagcaccgaaggcaacatacatggcttcgtcctcgaccttcgtatagctccctagcaattcatcacttccctgcggccttcatatactccctagcaattcatctcttgttgcttcaatggcatcaagtcaaatcattgtatggctcaccaaattgattcctgaatcgataagtatacttc

SEQ ID NO: 105642 - DNA, 529 bp, Zea Mays
ttttgtcagaactacgccacgggagtagggagcgtgcacgagatagccaccgcattgctgaactgtcagcggaggttaatcgcttgcagctggaaattgcggtacgagacacgaccattggctgggccgtaaattcgcgctctttcacctgggattgtgaggccaaagctctagcccaggtagcagagctaagagcatccctggaaaatctacaagcatattgtaacaccctgcatgaagaggtgcacgtgctatatgaccggctgcatccgaatgtgccacaagaggatgcagcaatgggagccggaccatctggagcagctaatggaggacctgaggggggagttggacctttttggagccccttcttctatgaacctcgtagatgaacgttctcccgaagctggcggtggagcggccaaggacgaagataattagagtagtgtagtttaagtagtgtccttatgtaaagtaaataaggaagttgagttgtactaatgagtatgtataattattaccagttcagcac

SEQ ID NO: 105643 - DNA, 623 bp, Zea Mays
tggctgagcacgcctcgcacctctacgcctgttttcagacatctgtagaaatcacacacatatatcaaatttgactctgcagtctttcagcacaagaaaagatgtatagaaaatcttcatagcactgaacaaatgaccatcttcactgacagcttctcatataaagaggaaagtggaaacaaatggattacccaactaaataactgactttattaataactacaccaagttgcagaggatacccacaccttggtgacaatcattacaaagattcaacttcattacatgtccatcataacaagcatccagcataagataagcaaactaactctaactaagactaactagactaagacactgaattaagcattattacagactctgactctgtcgatctatggatccaaatctatccaggtcctgcagtctggggtaccataatcgaagcgaccacggggcggtgaacggtaagggtgctgaatcccgataggggcgggagaacctccatcgagatagtggcgtgctgcgcactcagcacgcaattccacaacctccgctcgaaccttgcccaactcatcaagggcgtggtctagctctgtgttgagcacgacagctaggttgac

SEQ ID NO: 105644 - DNA, 506 bp, Zea Mays
ttgtagtgggagacttggtccttcgccgaattctaacgggggaaggacggcacaagttgtcaccactatgggaagggccattcattgtatcggaggtctctcggccgagatcatatcggcttactcaaatggatggcacagatgtgggaaattcatggaatatagagcatctcaaaaaaatttacccttaccaaggtctcaaaagctattggagcaacattgtactctgtaattggaggatccgtcgtcaataaagtcttcattttcaaagacattcaaactattaactatcaactgactttgattcgattggactcggaatcaacgcgcttactcgacttagggtgaccactataccctactaacggagcaatcggtttaagtcggcgatgacttaaaacggtgcaacatgctcgcgattactcgacttagggtgaccactataccctactaacgaagcaatcggcttaagtcggcgacgacttaaaacggtgcaacatgctcgc

SEQ ID NO: 105645 - DNA, 418 bp, Zea Mays
actgtctatggatgatgtcatttgtaaggcttggtgacccaccattgttgtatggatgattgtgtcatggtcgcactgtctatggatgattgtgtcgtggttgcatcgatcctaaccgcaaattcgacgatgacaactacctccgaaaagctaaaagaacggtaagattgatgtagctatgtcgatcaccaattaggatgtttgcttatgaatgagttttgtctatataggaagctacgagtggctaaaagcctagcgacattgaggtgttcatgtagggtcatataggagtagaccctaataatcccaagcagctgtgcagccagatggccatggatcggtgggtgagttttggctcaaaactataaaagtccaaagtataaaaatttctgcatttgtaagttcatgaatgatgtat

SEQ ID NO: 105646 - DNA, 434 bp, Zea Mays
acattggtaatagaggttatagaaacaagcatcataaccgagagtaaagagataagacctagagagaggtgataggagaacgattttggcatccgtataagatattttattatattccaagtttgaactacatagatggatatgggtgacgcgctaagtaattgttttcataactctggtgatgcggaatatcttcctggagcacgcctagctcctgtagatgggcttcagtataccgaatgtacattaaatttgttccgaatttgatttgtatatttgacgtaatttcacgagcgaagttacgatttcaatgtcaaacatgacacaacattaaaccaatattgttctaaatggaaaacgtacgggctaaatgatttgatgttccatttattcattgatatttcccagtagaacaaaatgttttacaaatcttg

SEQ ID NO: 105647 - DNA, 406 bp, Zea Mays
ccgcccaacaccgtcaccgaaatatccaagctattgcatctcctgcacgtgaaccaaggaatcctcgaggtgccgaactcgatggtgtggcccggctgcaactctgtcaccaccaaatcacttggggtttcctcggacgatggaccggctgacgacgcactcgcagcagatgaagaagaagacattgctacgtaccatcggcggcggcgtgcggtctgcttgacgtgggccaggtttccgaagaaggcaagcaggtgagcggattgaaaaaggtagggtttccgcggtcgacacgcacaacgggtaagaggtaccagcggccgcgccgcctccttttatagacagggtgcgacgctttgggaaacccgcagtccaacggtaacacgtccatcaacggtcatttcaa

SEQ ID NO: 105648 - DNA, 703 bp, Zea Mays
aattggatcattgttgtggttttggaaactagggataataagatttgtgttcggcgggggtgcaaacgcgaactcactctgaatggtgaattgttgggactcaggtgtgagttgagacatagggtttatactagttcggccttgtgccctagtctagtgtagtgttgatcgtagtattgcttgaaggtgtgttacaactagtgtgatcctgtgtagatggaaagggatcctgcccttttatagatcaaggacaaattctcacaattggagacttgtattctgcttgcgagggcacgcttcgtcgctcctggacggtgtagcccttctgacgtcgttcgtagggtcatgtgtagccatactcctggcatggcatactgtctcatttgttcatcatacgggtccctatagcgagtcttctgctaacatcttcgtagtagtgtgtggggtcccacgggtcagtcatatggtgtagtcatgcgtcgtgtagtctcacctgttgtcatgagctcgcatcattcaccagcgtgcgtaggcatatacctggtatggtgtatctaccatgtgttgtctggcatatgggttactatagaagcttcgatggtaaggtcctccatgaccagggtcgactggccactcgggcagtgggggtgcacctgagactgcacgtggggatgtacagtcatgttgatagtgacctccaagc

SEQ ID NO: 105649 - DNA, 411 bp, Zea Mays
tcggaagagacgttggaacagtggaactccgggtggacagccagtccgccctggcgttggccaagaaccccgtgttccatgaacggagcaaacacatccgggtgaggtaccacttcattcgtgactgtttgacagaagggagcatcatggtgcgctacatcaacaccaaggatcaatttgcggacctgctaaccaagctccttgggaggatcaagttccttgagcttttttccaggtccggaatggctcaactttcccacaaggcgacgcacaagacttagggggagaacaatggaataagtcatgtggtcttcgtgtggaggacagcatctctaattttgtggtgtggaggacagtccgcacagcatctttgttgtaggacagcagcagcaacagtcttttgactgcaag

SEQ ID NO: 105650 - DNA, 317 bp, Zea Mays
accctttgacatgcttaccataatctatctctgatgtactagaagtaagaagagtagaaaatagccttaaaatcccacgtcaccacagagcttggagccaaattggacattaatatgtgcttagtccttggcgccgaaagagccataaatcttgaccactagagtggtagtgatggtaatttgtgatagaactatgaagatcttgtggagaccggatgactccttcatatgagagcagcactatatgttgttgaagactggtcccagacggatattgatctttttttcgctcttgccaagcagttatcaccatttgc

SEQ ID NO: 105651 - DNA, 460 bp, Zea Mays
ccagttccaacatttcggaaaaggtggcctgggtcctggatggaggaatggttttatgttaagaacaatttgattgaaagggaggacataaggggatcatccaacgccccatctggtctcgctttggccttcgaaggccgaccgtggcaattgataatgatgtcgaagcatgccaaaaagcttttagcaacatctgtactttcatcggtacaagagacctgatccaagagcacatagcctatagggtatggcaacttgtggatagctgggagatgccgaaggagactgttgctgggtccagcaaaggtggattaattcgtttgaaatataccttcagatatagagaccggtttgacgaaccaaatgatgactggttgaaatgtattgaggctactagcaacgaattacttggggcatatatcagagccgaagatgatggtttatcctcatcctacggggg

SEQ ID NO: 105652 - DNA, 327 bp, Zea Mays
caggatatgtgttcctgagattgataaccttcgagagactatactaaaggaagcccatgactcggattattctattcatcctgggaataccaagatgtatcaggatttgaagcagaagtactggtggtatggactgaagagagatgtggttgcacatgtggccatgtgcgatgtgtgtcaaagagttaagaccgaacaccaaagactggctggactattacatccattaaagatacccgaatggaagtgggaagagattggtatggattttattactaaattgcctcgcacctcgaaaggatatgattctatatgggttattgtgga

SEQ ID NO: 105653 - DNA, 710 bp, Zea Mays
ggaagatgcagtcgagactgaatgaatggagaattaatgagtgcaactgcaaggtgggtttagtacgccggaatggaatatctcacggcatatgccatgcatggaggtcgggtcggtgagggggaagggaaggtgagcggattgatggtacggcgcgcaacgtcaacgtgactgaacaaggtttgttagtctccagcctgaagtctgaaccaaccgtggcccggtgacacaggggagaatcattcttcagacaaggagtaaaagtaaagcgtcagagacggctatgagctatatctccgaaaacatccaagaatatgtgcaaggcatattccatacatgcttgccaggacgtacgagggtgccttcgaggggggtcgctgtcccgttgatcaagcttacatactactctcttgcattgcatgcgtggaaggccatgggatcttcaaaagtgcacacatggcattcaacggaaccttcctattatattgtcactctcatggagtcatagctagtagtagtattaattgcttccatcgatcctctagatattttcttccaaactaatgctagtagtactgtggtgcttcgttctacacacatactattgccttcacgtgctcctctagctcctttttaagataataacaagaatatattcagtctcatcctctagtagatcgaggaatcagatcatattattataaatagtc

SEQ ID NO: 105654 - DNA, 364 bp, Zea Mays
cactggagacccgtcctagagcgacaccacaccaatagacccccagatcgatcctacatgattactaggctaaaggtatccgagtggggaaggactcacctgagattcggcaacgggaaatagttgtccacacaccatgcaaatccgcggccaagtccgggcaatggcgaggaattacgggcaccccgatggctcccggtctccctagttgtcaccactatgagcgcgatatcgtgatgaagatcccgactccaatctaggcgccaaactaccgcacaatccaagtatggcgtggtgtccctcaactccggcgagaagtaccccttccccccgctccgagcacgctaacgtagaatctttggga

SEQ ID NO: 105655 - DNA, 396 bp, Zea Mays
cctcgctctataaggcctgcaggcgatgcagtgcattcatgcactaaaccgtcactcgaccaacctactcagggtgtagtgcccacacatcctttgcatgacgcaccctatcacgccacatcggatctgttggttacttgttttttattgctgtgaaccagaaacaaggcaagacaattgttaaatattaaagaccttcgcccttcgaaacattatctccttccggatataacgagcctcggacgaaggtcatgaagaacaagtcttcatcattcacaaatataaaaacattattacagatgtaacattatgttatttactcatttcatatcacatgataaaacaatgctacaatccacttcatatattaataaaacgatacaaaatgtacattac

SEQ ID NO: 105656 - DNA, 651 bp, Zea Mays
aagctcatcagcatcagaaatccagttggcatcacaatagccttctagcacttttgggtttccagtataatgaatatcgtatgtcatagtacctttcaaataccgcaacactctctcaagagcacgctagtgatcatctcctggttttgacacaaaccgactcagcttactcacagcatatgagatgcccggccttgttgcacttgcaaggtacatgagcgagccaatgatctgggagtatgtcaattgatcccttgctattcttcgattctttctcaatagcatgctagggtcataaggtgttggagcaggatcacagtcactaaaaccacagcgactcaataccttttccacataatgagattgtaacaaagttaccccaccatcaccttctctaacaagtttgatgtttagaatgacatcagcatctcccaaatctttcatttcgaaattgctcgatagaagatttttaactttctcaatcgcattgagatttgatccaaagatcaagatgtcatcaacataaaggcacagcataacagactcacccccaccataccgataatacacacacgtgtcagattcatttacagcaaaaccagcagttgtaagagtattatcaaacatttcatgccattgcttaggtgcttg

SEQ ID NO: 105657 - DNA, 682 bp, Zea Mays
ctttctcattttttctaatcgcttcatcaactatctcacgaacgcccttcatccacacatcggagtaaaatctcccgcccaacgtagaagcttcagccgaagggtttttggtgtcatccgccgagaaaacaaatctcggctgagctgcagccttaacatgttcacaaccggctttctctaaggtcgtcgcgacccctcgtgcgccagcgaatgcgcagaagtctcctcgatcactcaagatttcgtcaaaggcttcgacttctccgctgatccactggacgacaccatcggggtcaccatggatgaatttctgctcggaagcatatgctcccacctttgcaaaactatcctttagagttttggtgcattctaaggatatttcgtagcatctctctttggagtcgtggagctcttcgacattttttgtacccttaatctttcaatttcgcttatctcgtgcttcgcctttgcaacttcaaatttctcgctcgtttctgcaagtttcttctttaaatcttcaacttcggccttgtgagcttcggcttgtgcactaagtttggcttcgctagttttcagtctctccactaaggaaaacaatatcttatctttctcgagagcttcgttccttagtgtaatgacttctgaccaaaaattcctaagagctatttgacagctctcgtct

SEQ ID NO: 105658 - DNA, 542 bp, Zea Mays
cttgtaatgtattggtgtaatgaataaaataacttggttgataaaaattggcatgtgcataatagtgattatctccccctagcagatggcttcggataaaaccacgcctaccgcctccgggattggagcagggtttcccctgagagctgaaagggaagccggtagagaggaaagtgaaacccacctccctgcacctccagaactacccttagatctagcccaagttctagccaaccaaacccgactcatcgaggtcctcactcgaagtctggaaaatcaacgtccgaatggtggaagaacgcaagacaggatgggggatttcctgaggctcaagcctcccacgtttgccagatctagcaatcccctcgatgctgacgattggctgcgcacgattaaaagaaagctggaagccatcggatgcccagaaaatcagcgtgttcaactggctactcatcaactctccgggatggccttagcctggtgggataccttcaatgtcaccatcagagatgctacctgggcgaagtttgaaacagctttcc

SEQ ID NO: 105659 - DNA, 303 bp, Zea Mays
gagtgcgatatatgtatgccatggtatgcaatgtggtggtaatagaaatgattaagttgatagagtaaatttaaatcttactacgggaatgctagtggtatacttaaccaaattagggtcaagtatggttaagttaaatggtcagattattttagtgccccactgatttccttttagtgtcttagtgaaagtttattatgatccttgctgaattcattggggtgagaatcattatccttactaattctctcttcttctatttttctattatgcttttaaagtgggtttgaactacaacatagc

SEQ ID NO: 105660 - DNA, 476 bp, Zea Mays
ctctattaacaaaagacagtatcttatgatcccagtcacactccatgggactgtgtgacctcaaccaatcaaaatcaaggattgcatcataagctcctgagtccaacaccctcatggtatggttgtaggtatggccattggcccaccattccaccttctgaaccagctgatcactcaccataatctctccatttgccactttaactctgacagatttatatttctctgtgggtaaacacaatctgtccactattttctaacttatgaagctagtcaaactccctgagtcaatgagaatcagcataccttggttctatataagggcactaagagacaatcttctgatggcactcagagataacttgtataaatcctccactaccttgtcttcctgatccagcttgtataatacagtatcagataacaccaactccttgtcttctttggttaagacatgcaactgtgcccctgctcgc

SEQ ID NO: 105661 - DNA, 451 bp, Zea Mays
attctatgcatgatttggaattagctgtcgtagtgcacgctttgaagatttggaggcactacatgattggaaacaagtgtaaaatcttcacggatcacaaaagcttgaaatatatcttcatgcagaaagaagtcaacctaagacagagaagatggcttgagttaattaaagactatgatttgaaaatacaatatcacccaggaaaagcaaatgtagtggcagatgctttgagccgtaaaggtcaagtgaacagcatcactactcatttgatgtcacatgaattgtgctgggaaatggaacaactcaaccttggaatgctcaataatatggaagcaacaattatggaagttgaatctactttggaagaagagattcgtaaaggacaagagtctgatgagaaaatcaaagaaattaagacgcaaattagtttgggaaaagccccagatttcac

SEQ ID NO: 105662 - DNA, 339 bp, Zea Mays
tgccatggagcaagtatgaacattagtcacattgatcattcggttgttagttgtagtgtcaagctaaacatcattttttatgtttctaaagcaacacaaaatcttatctctattcataaattagattctgatagctcaagtttcttcgactatattattatcaaggatcgggtctgattagcggaagtgattcagtggtatgcatcctctgcccttgaattcgctcaaacaggtctttgcagtcactaagccatccacaacacgatggcacaaccatcttggtcacccattaattcctatagcggaaaaagttatccataccctcaatttattgtgcta

SEQ ID NO: 105663 - DNA, 413 bp, Zea Mays
acaggggagacaaatgggtcctatattctaggcccaaagttgacaactacgaatcaagttactatcaaaccatcataattgtgaccttgtgtggcccaattagcatgtttcgagaccccgatctgcaaattcaaaagcccaggatggcaccattgtccaagtgtagtgtcatgatacgattgtatcatgaatgttgcctactatcgtccgactttgaggttgtatcttgaatgtgaggcattgtgtgcccactggaatgtccatatgatgactagcaacacacacaaacacgttttgtggtcaataggcccctaatagagtgtttgcggattgtgtcatctagtttaatttcttggcaaaacacacaataatgtgtcctagcttgaaggcccctaacaatgagtctgtcaatt

SEQ ID NO: 105664 - DNA, 362 bp, Zea Mays
atgatgaggaggctgaggaggtggctcatcagaagaagcagggcctccggatcctgagggagcctgctttgtacgagcagctgggttgctggaatcaacccagtatggtacatagcgggagtgtttgacaagcttctcgaagcgagtctgagtgaccacttcgatcatcttcataataaagggtgcaaggagacaccccttgagtggagaccaggaagcacgaaggatctcttcttagatcatgtcaaacacgtttatgcgggcaagactatttggagcaaggagaagaaggagaatccgactctccccaaggacattcattcgatttccgcctttcgggagaacgatcatcctggacaaag

SEQ ID NO: 105665 - DNA, 671 bp, Zea Mays
ctgcagtctgcactaagcacacaaataaaaaaacttgagaacaacaaaatagaggtgcgatgtgcccaatgtggagagctactggacagggcagctacaatcccaaaaaaataactggatgcagcgccgagaaggccctccaccaaaataacaaatgtgagactagaaagaacccaagtgacaaaagaaatgagcaagacatctctgcaaaaataagctatcaatcaaatgcacacaaactaagaactctgcacgccaacacttgaatgaggttgctgtaatctatcagaataagcgagcccatactataggatgaatcaatggcatgtagagtaaggggctacagatgtttggcgagccgtagtagttacaggcatcaatcaataagctatgctctagcaactgtggatagggtaggagtaggactatttgttaattcagtaattataataaattggtcatgcactccactctatgccctagcaactttgtggatggggtaggactatttgttaaatcagtaattataatgaattgggcaaccatactgtagcacagttgctagacaacaataaatgcaaggactagacaacaataaatgcagtcttaattctgaacacagaacccccacccccgccccacatacgtacactagtattacagaacaaaaa

SEQ ID NO: 105666 - DNA, 404 bp, Zea Mays
tgtattacaatagctgtgtgccgtgcaagtatccaaaaaatggtaaaatgtggtgtatgttggtaattagaaaatggtcacttcgttagccaatagccaagcttatgccgagatttaaaatgtgggcaagttaaattaaaatcatgcttatctagacgtgtggttaaataataataattttggcttgtgtagtgaggtggtgatatgccgaagtagtcatcacttcctctatgtttttaagtcaagtcaaaatgcggggtactagtagtacgctaggcaggcggtgttccaaatagataaatcgggtgatgtggtagttgtcaagcatgatagaggttgagtcacttagctataaattgatgctcgatatgtgaggtctcctaaaatatgatgttttaagtgac

SEQ ID NO: 105667 - DNA, 442 bp, Zea Mays
ttttggctcaacattggggctttgtatcttttaaactctagggtttttgccctaggtcaccacatcaatattgtagatctatcataggggaataactttgcttaagagagtaaatatggttgttgtgcaaagttatgagaaaaataggcgccaagttgggctgtcagtcagtttgctgactgaaatatggtcaccagtggtattggtcgaacttgtgatcagatttgagctaaatccagtaggaattcgattaggattgctataacaaagataaagaggatctataggactacaactttgctgcagagactcaggtatgttgccataggaaattgtgaggaatttggtcctaaactgtgactgtcagacacactgaagaagtatcccatggtacagtaccaggatcggatcagaacgctagcgtcagaaagatctcgccgct

SEQ ID NO: 105668 - DNA, 373 bp, Zea Mays
tgaggtaagcgcggcggctgcaatgattacctctccatatcagttcacgttggtggcatctatggctcgatctctctctctgtattggcggtagtgtttggcttctcaggatgattatggctctatgggtcaggagcatgcaccaggctcctaatatactccgacgtattgaccagggaatacatatagctggcgtaacaaccaacagctggatacgggagggcggctaggtgatccgtgtttgacgcgcgagtctgttacagccgtagaataggagattctgttgaatccacacccacaagcagcgacccaggaagcttagatcacgtttcgtgaggacttctgatggcttgcatgctgacctcattatgat

SEQ ID NO: 105669 - DNA, 388 bp, Zea Mays
aagatagagcataccccacatatctgtatcgaggcctggctaattcaactggggtaatcaacagaagaattcctgctatggacttagtgagtcggctcaagatgatactcagaggtaaggtgtcgaacatcggcgctcctgtcgcatattcggcctggaatctgcctccttccaaggcctttaccagttttgtgtcaaatcctcctgctggtgatagcggtttgggccttagagtgcgaccctctcccaaagaagttagtgctttggttgcctcacttgaagaaattcctgacgacgagagacaggttcattttgaggtgcctttgaatctgagtgatgcagagataagtgccatgctggatatgttagctgaagattcttctgatgc

SEQ ID NO: 105670 - DNA, 681 bp, Zea Mays
atttatcccacgtaaccagctggtatgatcatacccttcttcccttgtaatgaactgtcacgacgcagactcggttgtctgtccgccacaatcagtataacgcgatcgttctcgccctgcagacctttccacacttgattgtgtgaaacaacaggcatatgcatcgttcatgtcactttgagttatattgacacctaccttgggtagtctccatcctcgctcacgtttgggcattaggtgtaggaacagaatccggattgcagaactgatgtgtttcttactgttaactgctagtagtagaaggggagggagcagagtcgatttgctgtcactgaattcctagtgtagtggggcactagtaaaaatgacctgcagatgtgtttcttggagatgacatgtgaggctttaaaattgcagatgatcattttctttaaggagattgataatcctcattccattcttgaaataaccttgaatatcaatcgagattcttctttttgataaatacttactcaatcatattaaatgttggtggggatctatattattttagcaaagcaactactttctcaatgcagtttgttgttgctggtgcataatactaagtaagctcgacttattaaaggttagcatatgcagatatatacactgttgatatagtgacaatcaactcattcctac

SEQ ID NO: 105671 - DNA, 635 bp, Zea Mays
ataggaacacccctttatttgacacaacccctactggaaattattcgtccatgatcatggcggaaaccgagctcaggaacacgcgttcccgccaactcatggccgaactaggtaaacgagtgccaccatgagcttcacaagcatacatagacatgaaaacaatgtttgatttggacggtgtcttaccagaatggattggccatggttgagctgctcttcgtgatggcggagaccagtttgggggaagtttgaaattcaagagctcaggtgaatgattaagggtgggagcgggtgctatggcttcacaaagaactctagttttactgcacacacttaatttgagagaagggggcagaggtagcgtgaattcttgcttcggttcaactcactgtgtgcgggatgttcatacctcgccgtggatcacgggctatttatagccacggcggtccggcgatcacttcccagccatggataacttctttagtgcatgcctagcacgtagaggaaaggtacagtgaggtaaatcgaagcatgtgtgacagcgcggcgagagctcactgagtaacggtggctgccggtgaataactccggctggactcggggtatggtgccacgtacgcgttatctaacttcgg

SEQ ID NO: 105672 - DNA, 960 bp, Zea Mays
ctggctgaaatgtattgaatctataagtgatgaattgtttgggtcatattccaaagcaaaagatgatgcattatccacatccttcgggggccgaggaaaaaagagattgaatagagtttttgatgccattggttttgtttaccccgattactgctacacgctgtggggacgaggaagaaagaggaaaatcgttgcttcggccaagactgctgcttcggccactccagatgagcccgcgccgaagagcagaaggttcaaagttctcacccaccggccacgctatatagagccggtcgtggtacccgagtttggcggggaaacttcttcagctactgaaccaaaggagcctattcctcctacacagaaagctgagaatccggctacgatgccgaaggtaccttcatccatgctagatgagtcaaaagccgatgaaaataaggtggaagaaccaaaaattgaaggaacagaagtgttaggaattttaagcccttcgacagaagtaaccgtgccgaaggttggaaaaagttttgcggcaactcccaaaagaagaaggatggcaaatgtactagatgtgttagaatcagtaaaggctttaagctctactccttcagggaaaatcgctgaggtttcggaactgcaaatcgaatctggaacaaaatcggctgaaattgaagctgcagcaagccaagctagtgtcgaagctaggccttcagaacttaccgagaaaaaaccttcggaagcagaagaaaaaacctcagagcaaacttcgcctgaaaaggttgctactcctgctcccgaagctttggaagaaaacattgattacatcatcattcatgcttcgggaaagacacttacttcggaagaaaaacgagaagcccagcattatgcccaaagactaaaatacccgaaaggggcactggtgtttaatggcagcggaggagaagattttttatactgtct

SEQ ID NO: 105673 - DNA, 1313 bp, Zea Mays
caaatgatctatttcatatatgtgtaatgttctgttgtaacaggcgaaatatgtatacttgccagtaccactcttaacatatattcactgccctttttccagatgcttttggttcaacatccatgcatgtatctcatgacactgtacaaagctcaccccacacaaacttaggttcttctgtacaaaatccacactagatctttctttttccccccttctgtttatactagcaccaggagtagctcattgtttgtaaactagaaataggagtgtaggcagtgatcagtagtaggtcagaagcaatagaaaaggattagtgctaccacaggcaggttctaaccaggtaaaggtgagtatatagccatgtgcccatgatctttgaattcttgactagagcaaagtgtttgtgcgtgacgtcctgccacaagtatctcgagatcaattaaatcttggtcaaaatgtgagcttcagtgtttcgctccatgatttgtcaagggaaaaatggtcacctgttgcttttgcattctcattttctgcacctcctataatcgatgttatggttttgatgacactaatttctgttgtagaaaaatagaaagcagttcctacaggagttgagagaaattcacgatgcttgtcagggaccttgggatgttcttgggaattttaaccttatatacaaagatgaagacaagaatgatgggcagatttcgaaagtttattaatgatttagccttgagggacattcctttacagggtcggagtttcacttggtcaaatctgcaagctgatccggtgttggtaaggcttgacagttgagtgggagcagctgtttccaaactgccttctgcagagtgcagcctcggaggactctgaccactgtcttctgttgctcgggctggatgatattaagcctggaaaacctcgatttcacttcgaatccttttggccaaaaatcgaaggcttcatgcatactgttgaggaagcttggaactcggttctaggatcctcctgcccttttgatgttttgtccaggaaactcaaatccactgcaagaaagcttcagaattggagccacagagtttcttcatctactggaaattgctcaagactctcggactttgtccaacgaggaagcatggctgcacaataatatcaagaaacattgccttgccctctcctctcaagcgtattgcgaggagccgctctaggatcagctggctgggtgagggcgatgccaacacagctctgtttcatgttcatgctaggaaccatagaggaaaaactttattatgagattatgtgaggcgggt

SEQ ID NO: 105674 - DNA, 757 bp, Zea Mays
acagggcatacccggcttatctgtatcgaggcctagccgactcaactcgggttaccaacagaagaattccctctgtagacttggtgaaccgacttgagatgatccttagaggcaaggtgttgaatgttggtgccctagtggcatactcagcctagaacttgcctcctcccaaagccttcgctctttttgtgtcgaatccacctgtcactgatggcagtttgggccttagagtgcgaccctctgctgaagaagatagcgccttggttgcctcgctcggggagattcctgatgatgaacggcaagtccatttcgaggtgcccctgaatcctagtgatgcggagataagtgctatgcttgatttgctggctgtggactcttctgatgctgctcctgctgggacatcggtggtggtgcccctcccagaagctgatatgaccttggatattcagaagcctgccagtactcgcccgagacgcccttgccgagctaatcaacctgatcctcctgctgatgagcaaaaagtaaaaagagacgcctccggcgagtatccagtttggatcgggatgttggtacttcggttcctgctgttgaagaagtgcctgtgactgaatttattgacgctgaccccaatgggtgtgcctgatctgctgctgatcccaatgtgggtgctccatctgttgctgatcccaatgggggtgctgcctgtgttgctaatgaagacgacggggaggaagaggatgaagttcctttgactcgg

SEQ ID NO: 105675 - DNA, 703 bp, Zea Mays
aaaagtgtcaccacagtgacagtgccaagtcagcaagtgccgtcgtccgagccgcagacggatgtgttcataagcagcaccaggaaccgtcggttgcttgacacgaggcaaccgagtttagagtaatccctacgtcgtcagctagagcagaactagctcgctatatacactgtcccagaaacaaaaggaaaaacacgggcttttgtggagtaccgtccaactgcacctgctgcaaataaacgcatttgttaatttacaccttctcttcaaggaaagaaaaatggaagagaaaaaaaagatggcacgcgcgcttaattggttttgggtgggagtgggacacagcacactacagtctactgctatgggggagctctgggaagaaacaggaacatgacccttgagtgacgtggtgcttgtcgcgtagctctttctttcttctagctcgtgccccccagaccccagtactgcgaaagtatgtggttggtagtgcagcaggccagcagcggtggtgctatggctgctggtgcatagcatagcgtcaagaattggccatgtccatgactgtctcgtcttaatttcttcccctggagctggagctttgcgtcgtcactcgtcgtcgttgtgtgtacgccaccatgcagctcatcaccacaccaccatgcatctatcgcatcatcagttgggccgccgcgcgccggccgac

SEQ ID NO: 105676 - DNA, 283 bp, Zea Mays
aaaatggggacctcaagaagaaaattctggatgaagctcacctctccaagttctccatgcacccagggagcaccaagatgtaccacgacctaaaacccctatattggtagacaaggatgaagagggaaataaccaagtatgtgtctgaatgtgatacatgctggaggataaaggcaagtcacctaaaagcagtcgatgccttgcaacccctatcaataccttcatggaaatgggatgacatcagcatggattttattgtgggtctacccaacacctctcgaca

SEQ ID NO: 105677 - DNA, 2516 bp, Zea Mays
gtattatagcaatactctgtctaagcaagccagtcaacccaggcacgtggacggttccccaaggcgcaacagttgtacatggtgatcaccttgttgacgacttctgactagccgtttgtctgagggtggaacctcgtgctcaagcgaagctcgacgtcggccatcttgaaggtcacgccacatgtgactggtgaagactgggccatggtcgctaccgatggaggtggggaagacgtgtagacgaacaacgacctggaagaagacatgtgcgaccagggcagctatgtatgggtggctgagggcaatgaagtgctcgtacttagagaagtgatcgacgacgataataaagatagacttcccgtggagttgtgatgacaggcggcaaagggccagctgaagaaggccaagggaccaattccctggcggagaacagcaccgaaacccacacctaaagcgtccagtcgatgacaaactgtaggtcgaagtttggcatttgcatgaccagccccttcgaaagggcgcgcttgagtgccgctaatgcctctacagtctcgcgttcaggtaaaggcagccttgtgcaacaattgtggcaagtgagcaacgatcgtgctgaagtcaaagatgaacttctggtagtagtcgaccaactccagaagccgagtacgccccgaggcgagcgaggctcggtctaggacgagacggcttccaccttgtcattgtccatggaagcgtcgttggtggagataatatagccaaggtaggcgaccaacaacgcctcaaaggagcactttgaccacttcaagtggaagtcatgtgcatggagggtctcaacgacgagacgaatatgctccaggtgctcaaaccacaacaaaataccatcaaagaagacaagcacgaacctgcgaaggaaggccgaaggacatcgttcaagagcgcgtcgagaatggggccagggcattgaaagaccaaaggcatggagacgaacttgaggtggccatggcggatatgaaacgtcgtctcttcttgatgtcctcaagatgcatccacacctagtcatagccagaccacaactctagcttggtgaaatatttggtactatggagctcgtcaaggagttcatcaaccacaaagtccacaaggatgggaaacttgtccatgtatgtcttgtcatttaatgtgtggtagtcaaggcagaacctctaggagccctccgccttcttaattagtagcaccgatgtcgagaacataaaagtgatcgaccggatgatgccctgctctagcatggcaatgcactgttgctcgagcttatccttgtgtagttgtgggtagtggtaagagcaaacggccaccaacacggtactcaacagcaggtggatccaatagggtcacgccaatggcaaccaacagggctcgtcgaagaccatgtcatactgttggaggctgtccagcagcggatgctggtggtcgccaacgatgcaacaaagcgatgatggtgtgtcgtcatgatgggatcccacgccgttctagaggatgtggcagtcacccctccagaatgccatgcagatgacctcaaagtcgcacaagaagggcgcaaggttcgaaggtaattaatgcctaggacgaggtcgtaggccatttgcaggtcctaggttctcggagctcgacatcaacccaaatatgatccggaagaccccaacgaagcggttagacttttgaccggtagaagatttgacatgtggcacaaaagtgtgttgaagcactcctaggaccatggcgtggaaggggagcctcgcgagttcgataagatgattgatgtagatgaccaagccaaaccgtggacgtagaagatccttgaatcactcccataatggcatgccctcatcttgctgcagagcatagtaccatgtctaagttgcgcatgcgaggtggtaggaagcgagccagaactaatccaaggcatggatgctgcccatgaaagaaatactcagtgattgaaccaattaacagggccctccttaccatcgtaggtggagacgtggagcttgctgaagcgaggaacgtccaaaccggcaagtgtgcgggtagcgtcttcattggagggcacccacacatatgagaaaggtggcccctatggaaactttggtagtgaggatggcaaggaggggaattcgatctggtggatgggaagaggaacaataggctgttgtgatgtgcaggagggtggcattgggcatgacaagcagggtgacagagggtgtcacaacggtggtggtggagatggacgagaacgtcatcgccttgtacctcgacatcatgtagggattcatgacacccacagaggaggatacctcttggtgctctagtgatgacatgcaagtggagggattggcaagctacatggtgatgtccgccaaggccatcgtagtggtgtcggcgcgtaatgatggtgggattggcgactgcttctcggagtcatagtcacctggtatctctaataccagattgatagggtttga

SEQ ID NO: 105678 - DNA, 1211 bp, Zea Mays
ccgacgggggaaacagacgtggagctcgaaactgagacgacataggagtagttggtgcaggagtaggcgcagccagatactgaggaaaaccctgcatcgacacgaactgagatgtcccaggcacataaaactgttgtggaggaagtggaactgaatattgctgctgagcgcttgacatcatgttgacagtgccctgagaagagcaggaagtcactggctcccatctaagcttcccattgggattcctcctacacaccacatccttatggtcttggctgcaaatagaacacctgccactccactggcactctgcacgacgatgtgcatcaccacaacagaaacacaccagccctagcccgggcttagggacagcccgaaacctttgagtacttcctcccgaagtacccgattcagaggatttgccacggtaggggtggtggcgctggtgctgagacttgcccctcttgtgggctggacctctagtgttacccctcctcccgtcctggccacgaggctgatcaacacccgaagacttctgtgactccatggtgtactggtgttgcatctccacacccaatgcctgctccactatagtacggaaatccaccaacggaaaggctcctagagcatgcctgatagaaggtttcaggccctgacagaactggctcgccttctccaactcattgtaagccacataaggaacaaagcagaccatcttgttgaagcccacttcataccctgtggtagacttcttctcttgcttgtaggactgcagatcaatcttcattttctccaggaaggtgacctggtagaacctcctctcaaactgcctgatgaaaacatcctaggacaggactcctggtgaagaggagtgagctgcctgcacgcctctccacaaaatctgagcctctcccttcagcagctgtgtgccaaagcgaacacgatccccatacacaatctcgaagacattcatcttatcctccacgtaagttagccaatctaccgcctcgaccggagtgccactgccatcaaaagtgtccaacttcaagcccatccactgcatcagagaaaggccactgatgggaagaggcacctcagccccgccacctgaagcagcacccgtgggaacagcgcccccaggcacacctccaccaccagcaccctgagcagcacccgcagaagcgacaggaatagcctgcctcagaatgacc

SEQ ID NO: 105679 - DNA, 381 bp, Zea Mays
tggtctaggtcttcgccggatggcgttgttagcctgtatgcgctgggggacgccttcgacttgacgatgaatggaccctcccactttggctccagcttgccccgtgactctgtccgagtggttcagacgagtacgaggtctccttcggtgaattctcgtgggacgactgcatggtcgcgccaggccttcgtttaagcttggtatttgttgagggcctgcagggcgaagacacggtctccgttgatgaggtctttggacgttggttcgtctacgtcggggatggctgatgcacttgttcgtggtgacccgtgctttatttcctgcggggtcatggcctctgatccgtatagtagatgaaaaggagtgaatccagtcacccgg

SEQ ID NO: 105680 - DNA, 1661 bp, Zea Mays
tgcgtttgggaggaatggttgtggagttggtggattctcattctccgctggggttttaggaggattccgggctcttggccggggaagcggagatcggaggttctgccaggcgtacggattgggcgctggagctcctgtttgtttggtgggtttctggctttctgctgtcgggctgtagttttcagatgttcttctctttcgttctcggtgtttctgttgcactttatgatgtgtacagagttctgcatcctagaatggttagattttgaatgggccatccttcgttgaggaacttgtgggaacaatgcttggtttttcatgtcaaaaattacattttgtgtgtgtgtgtgggtaagttttcgatgttttcctctttttgttatttgtaaattgtaatcgaacagtgaggcacttggttccaaataacgctgtggatccggcgtagttttttcgtacttgcttgaaaaaaagtggaggtttcgtacaactgctccctttttatatttcctgtcagaattccatgtatatgtttcttttatttggtgctactgtgataaccttgatgatcttagctcgttttcgttctattaaattatgtgttcagaattgaattttggggaaaagcttccacctttcttctgcctttaaaaggagatggctttttcacacgacggaaagatgaaggtatgaattggtgtgcctattgtttcacttttgttcatatcatggtcatgatctttctgacctttctatcattgttcctcttccttctgttctttccaactaaatcttgaatgcatttgcgtagctgtaattaaatggaacatttcacctaaaaagtgttctgctttgtactatagggctgtcagacaaaccttttccggacaaaggataagaaagtcgtcaagatgacagatagtgcaagctgctccacaggttagttcaccttatgtctttcggaaaactgtatcaacactcaatgcagtaataaatggaatatatagctcactagcttactggctaatttcatccgatcaaatgggtaatggctgaagctcaagtcagttggcaaccacaaagatattgtcgattgagcctatgttgactttgtagaactatcgatagctactcttccagtctgtacacaattttgaaatgaaataaagagatcagattgaattcaaatgtctttgcagaactatggatagtcactctttcagtttatacaaaatatcgaaatgaaacgaagagatcgaactgaatccaaatatggtcatatagtactgcacttgatatcttcattacagaagttcaacattttatacataatggacacggtataacttttctagtttattctgaaaccataatagtaaccaattgttccatgttttcttgtttattgtagctaagtatggatcaagcaactcaaaatcaccatcttcatcccccttccggaagctttcaggttgattttatacttgccaattttgcttttgagctaactctactgacagtacaaaactacagatttaatttgtttttcttttgttgtgtgtgtgtgtgtgtgtttttctttggactaaatgaaagcagaagttaggagcatacgtctcaaccattttctaagtcactcttcaaatgctacaaaatatgaacat

SEQ ID NO: 105681 - DNA, 411 bp, Zea Mays
gtaactattattatatgagaactcagcataaggtagactcttgtcccaactactaccatgctgaagggcacaactctcaacatatcctccaacacttgattagtcctttcagtctgtccatcagtctaaggttggtaggccgaactaaaattcaacttcgtatccatattctcatgaaaacttttccaaaatctagaggtaaactgtgatcctctatccaaaatgatcttcttcggtacaccgtgtaaagacacaatccgagccatatataactctgccaattgagatacctaataagtagtcttgaccggaatgaaatgagccactttggtcaatctatccacaatcacccatatatagtcatatcctttctgggtgcgagacaatccagtaatgaaatccatatcaatc

SEQ ID NO: 105682 - DNA, 708 bp, Zea Mays
aattcatcttatctttaaaaaaactctctcttatcctaatagattcatcttatcatgaaagattcgttttatcctaaccactatatttatctgatcctaaagtaaccaccaggacctaatccaaaataatgagatcttaactagttcaatctagtcgtaccaacctaatctagattctatctaatctattatgatctaatctagagtaagttacttaatgctggtacaaaggattaagccatacttcaaatccacttaagcttaaactggtgacctagatcaactcggccatacccaacaacttgacctacataacaaatctatcttagccttttgtcccgaacccggatggagacaccaaagagcaagaccggagaaggaaaagatcaaccacgtcaaggaaggagagaagtcaacctcgatcttcaagatgcattaccaccgaacaaggcgtcctttctcaccgtaaactttcttacccctggctattcttgccctaacctatccatcttttatcccacataataagtatttggatacctatgctctcataatcacccaccattgacaaaaaaagactctagatttttgaaccagttatagactaaaagccaaattacaaaccaatccttctgtatcccttttctcacaaatctcgaggacgagatttcttttaaggggggtaggatttgtaatacccaaatttgt

SEQ ID NO: 105683 - DNA, 578 bp, Zea Mays
aagagctccaccaaagaaaaatcgagtcacagcgaaagcccaaggacactccgcagtctagcaggacatgggtcaggcctgcataatcgaactcagaccgacaacaccgtaaccaatcccaagtgcacaccatcgctaatcagcagcagactagaaacactgctcgtcgccacgaataccctgcgcaacagggatgcggcggaaacaccagaggcagaggccgagtccacaacagcgaaggttctattgtcttttccatggagaagactcggcacatcccaccaaggactgccctgaaaccaaggccacaaaggacataatggctagaaaccaatcggctgacaaccaaagagttgtcgcccacacctaccatccccaacaatataaccagcgccaattccacaatgagcattatcatccccaccaccaaaaccacaacatatactagaaacaccaagaaatactagctctaccgcctccactaccaccacatcaccaaaatcaaccgcctccaccaccagcaccgaaacaagaggacttcgccgatcaaccttttcgaggggtcattcatatgatta

SEQ ID NO: 105684 - DNA, 512 bp, Zea Mays
taagcatgcaagcctctttgtatatatagaccgtctttgttactgggcttttatcctaaagactcacgaacgttttcatggatcatgatttgttcttgactatatatatccaacaagagctatcttgtctggcatggtttagggatgaatctgcctcgcgttgttctccatgtcctgcagcaggtaaaaacatgctatggcgagatttggacacgcttagaaaaaccaaaaccagcgtacacactacgctcatattgcttgagattctagccatgttgagtttgaacaacggcgacatgccgacatgcagtgcgtggccggcagcgacataattactttctagtagagaaaacagacaggcaaaagtacgagcgcgtggaaattaacaagctagccagaccgatcgatcgacttagtcgtgaacggcttccgtgagaagctccagctggtactagcttggacacggtgcgaacatgtagagaggggccaaaaaaacacttcaacaaatctcg

SEQ ID NO: 105685 - DNA, 586 bp, Zea Mays
tagtttttgttcatttgtttaggttcatacccgattgagttcaagtttagttccacactaaatatttgtgatacaggttcgtgacaaaaaaaatgtggtaaaaatgttaaaacaggaaaatatagttcatgcggactcaactcagtcgagtacgtacgtcgtacgtcctgcacctgatgcagatgtggatgcatggaccatgcatgcatataatgatcatgttatctaagtggggcgacaggaggcaggaaatcaaagatacaccgtacggccatgactgcaaccgtgcaactaatttttttgtaacagtacctaatcggcggccaaattaagccctgctttgccgcctgattagtgccatgcggcagatcggttgcagaacaacagggacatcacatcactcaccgtccatcttttctcctcccctttggcccatgatgtcgtcggggatgcaaatgtcgctgcagccaacgagctagctctccttgctaatctccatggatccatggattccatgcccttcctcctctcaccgttgttgccttccctcaaaatcgaaaacctacgttcgcatcaaacagctgca

SEQ ID NO: 105686 - DNA, 1087 bp, Zea Mays
aagacctcagccaaacttcgccccgtgtaggactatgaccgtgtcggctaggcccatggccacagtagcacctatgacccaccgattgaggcaacacccttgacttggcaaaaacctccgtccacatcactcacccgggtgtggacccagatcacatgaagaaaaggtgccaaaagccctggcaccagcgtaaccgctgtagcaagaccgaagactatcctagctgcctcgcccacatgggagacaatcggaacataggaggcggcttcgagctctttctactcggatgtcctctttatccagggaataataaaggacactctcatatctaacgatgagcccaccttactgggggaggatcccctgcagagcgaggtgcgccaataatgaaacaggcgccataatgtttgtcgtcatcacgaggtcgaagaataggaccccgctcagctcgtatcttaggatgaggcatccgaagcaggagaaactcctgatgatagggcgttttagaagcgtcacaattctcgacgccgtgatcgccgccacacccaggagtgcgagcgggaatgagcgaaacacgatgcagacactggcgtgacaactcgctccttctctagaacctgctacccgacttcgctcgagccctgcacacgccgagtgaagtcgctcaaatcaccaatgacctgccccgtaccctagatgcagagggctactgatagatacttacttaggcggcgaaccatcttctcccccctcatctaggtctgaacatgcaccacatcatcaacaaccgacaatacgcgtggagcaacatcaatgcttcacgcgatcatcgacattagagtaagatgaggtggcaggaagaatactatcgggatcatggcgctccagcttgcaaccacatgacgaggatggagtttgcagtagcctctacaaacagcccagctgatcagctcgagagaggctgcacgaacctcatgttagtctcctcctagggaccgccattgcgaccatgtttgggaagaccaccgagagacctggggtacatgcggagtctcagcactttccccccagcttaaggagattcaat

SEQ ID NO: 105687 - DNA, 429 bp, Zea Mays
cggcgtcccgcacgagaatctcccccgggcacggttccagcctgtttggaaggccgattcgtggtgatattgactcgatgtcagcccaacttctgcgtggaatcatgcccgatgtccgaaggtcgggtggttatcccgatccgtttcctcctctcgtctcgtgtattcatggttcccacctgtgtgctgctgctgacacctcctccccacaaatttcacctctgttgtcgacttcggccgtgaatccaccacagatcagcatagggcgccgcttgatgttcgatctgtgatggcggcgtgccaccacgagggccttgctgcttatggcgctgctcatggtactcccaaacagcttccaaacaacaacgtggaaattcctcactaggtggaaacctgccctgggatccaactgtccaaaataatcccgtg

SEQ ID NO: 105688 - DNA, 572 bp, Zea Mays
tattttgaacgtaagtattttataagattacctacatcaacattatgtacttgttttcattatattgttaactgagtatacatgtgattaaatgttgcactcattgcagcaattcaaaaggctttggtggcacggaacgatcgtaagtttgccattagatatcttgacgaccaaaggcgtagatagagtctataacttttgcaactctgaattttatgatggaatacatgtactgttattgatgcaacttacatgtgtcaagatttgtaaaacattttgttctacttggaaatatcaatgaataagtggatcatcaaatcgtttagcctgtacgttttccatttagaacactattggtttaatgttgtgtcatgtttgacattaaaatcgtaacttcgctcgtgaaattacatcaaatatacaaattgactcccgaacaaatttaatgttaattcggtataccgaagcccatctacaggagctatgcatgctccaggaaaatattccacatcaccagagttatgaaaacaattacttaccgcgtcacccatatccatttatgtagttcaagc

SEQ ID NO: 105689 - DNA, 463 bp, Zea Mays
ttgtgctaagaactggtctatgtgctcacgcgtgctcttttcttggtcacccaaaaactttgcgaattcaggtattctggtcccttgtgggtatgggagccggtcaaactggctatcataaggtctccgatatgactgcccctggggactatactaactccgagcttatcttggaacgccccagctatttcctcccttactatatcgatggcagccgttgggagaccactggctctttgatccaatatgggtgagtttgtttggatgttggtatgttgttttcctccccattggtttgggttttgcagcgcgttaatgcatgccctatgaggttcataggactggccattcctttctggccttctaggggccggaaagtactcactctcatgggtttgatagattatattatggtgctggtgcgtcatatggtgagatggggagtctagctgggacggatacg

SEQ ID NO: 105690 - DNA, 545 bp, Zea Mays
cacattcctgactaccatgacaaatgattttacaattactgctgagttacccccatatgaagatatgctagctttgtaactcatcaaaaactacttcaggtctattaagccatcatacattgaaagctggggtggcatgtatggtggtgggctggtggccatggtgtagcttgcagatttgctcataaaggaagtgtcattatatagataggcatcatgattatgcccttcaggatgaaggttcctctgatgatatggttcttcaaattgctcatcttcttgcatcatgtggcacaactcttctgacgcttcataaatttgtagttgaagttgggaaatccaaagcatgttttctttacgcttctccacatgttattgaattgcttcaaggttctagatttcttggacgagatcatcttgtggcagagggtccatggccttccttttctgtcttcgtgccaagaagtgcttcttcattcaagttctgatctatgagagtacagaaccaaatcaccaatagctattgttgggggccttcggcttcc

SEQ ID NO: 105691 - DNA, 436 bp, Zea Mays
cacagaggaccctaggcttttaaataactaataaggaatcctgcacactattcctatgtgtcactgacatttgcaacgaggtccctcccttttctgtttcttcgctacttgagatccccaaccacggcggcagagcagtggctccggtgagccaagaccggccggaaaacgcaacgactatgcctctccaaagctcaacacctaattctaccctcggcgacactaatccctcactcaattgcggagttctagctcacaatctctctgtccacggtaatggcgcgaactgcggatgaactgaggcgttcccgacgatctaaggtggtttagttcaattggctaggtcgatgagcatcctgagcacaccagggtgcagtaacaagagcgaggaggacgtgaacggacctgcagaaggttggccacgacgagctcactc

SEQ ID NO: 105692 - DNA, 330 bp, Zea Mays
aaaaattgtgaagaattcatcatcaaatggcaagggtatgttccactactagggttacacatgacggagaagaagccaaaactgctgagaccactccgatttccgaagtgatgaaacggtcggggctagtagtgccggaagatgtttctgacgaaggtgcacctgccgctgaagctgagcaggttggtgctgaggaagatgaatctgaagatgattatagtgtcgtgccatctaaacccagccacctggagtttgggaggtccaccgttaccgaagatgatatgctaagttgatgaagttaggctatttcagtgaagccaaaaaggagct

SEQ ID NO: 105693 - DNA, 896 bp, Zea Mays
gaaaatacgtcctaattataatttaagcgatgacggagattccgacggggatttaccaccacatggaacggagattgagaagaaatatctccgcaagtgttcgtcgggatacctcctcgcggaaacggagagctaaaacccgacggagaattatccgttcccacccctaatccttatttactgggagctagtaatgtcgtagatgctactactactagtactctacaagatgctactactattatcaaattattaattctctttcagactaataaataaacttgctgaataagtcgtctctgtgcagctgcatcatcgtcgctcgtctcacttgtcattgagccaagtgtaatattcaggcagtgggcagtggtgcaggttccaggaaaaaagagtatactactactaactaggtgcattgcattgcatactttcaggcgtaacaagttactgtcttgtgacgctgtgacagacagtaacgctgcagccgacgatggatggatggatggatgggtgtgcaaaggtggaaaaaatatgtatccatgtatatcgtagaagatttgcaaagcacctgatcaaatgcgtagaaaagagacaacactttctggatcagaatcctttaaattaaagaagagcttttcggattagtttgtgcgatcctgtttcttgctagctgtggctggtttttttggttcatagcctaccgactccgacacacgctatgttaccgaatccagatctccccaagatcgtctataaatatatacatctcctggctgttcttgggcgacgacctaacctaccagacgcacgcacgcacacaacagaacagctaacgtcggtttcagaccttcctgacatgcagtttctttcttggccatctgctttctctgaaa

SEQ ID NO: 105694 - DNA, 307 bp, Zea Mays
gtgggcagctgccttcacgaccttgttactgaaagaggatctgagcctgccaggggaatgcagttccgaagacatggaattaacaacatcacagacattgacattaccactggtaggggcagacttatcagccaatgaatcaagatcatgttgcagactctggtccctcctagaataaaccagaatgggcttgcagtatcgagggcaagagggtccaggaaagatatcaggccgaaccaatggcgcagcagaccccatgcgggagcaattcatcatggccgaacattccaaacgtgaataatccgca

SEQ ID NO: 105695 - DNA, 642 bp, Zea Mays
ggttaaaatgcattgaagctaccgacgatgagctactcgggacatattcgaaggccaaagatgatgccttgtccacagccttcgaggactgggggaagaaaagattgaacagggtatttgatgcaatcggcttcgtataccctgattatcactacccgctgcgaaggcaagggaagaagaggaaaattgtcgcttcgaccaccactgctgtgccagaaggcaagaaaatgaaggttctgacccaccggccatgatatattgaaccggtcgtagtgcctgaatttggcgaagggacctcttcaaccgccgaagcaaaacaagccgcttccattgtgcaaagcgctgaagagtctattgtaatgccgaaggtgcttacagttgggccagccgaagctaaggatgatacggtcgaagagccaaaggtggaagaaacattaaaaatgccagaaattctgagcctaccggcagaggcagatttgctgaagatgcaaaaagctcctgccgcaacccccaaaaggaggagaatggctagcgtgctagacgctgttatggagaccacgaaggccttgacccctgctcctattaagaaagttgccgaagtcgccaaggtccaggccgaagccgaagctgagccaaagtgcc

SEQ ID NO: 105696 - DNA, 572 bp, Zea Mays
gcgctcctgagcgacatacaccggattaaacccctaaggagtatttcccctcactcaattgcgcgaacgaccaactactgagctctggccacggtgaccaagagcatggcggacggatgagtgtgttcccgtcgattcatggcggtctaattcgatttaacgggtcggtgagcatcaagagcaaacaaggatgttgaaacaaggaaaccgagggcaagattggacctggggagggctggccacggcgaggttgagctgtgcggtgttcctgagcgttttgggagaaatctcgaattgaggctttctggtggaggattggagatgcagaagggtgcgctagatgctcgagtacataacgaagctgacggtgcactggatttatagtctccgggggcggtggccggtgaattttgaggacgcgcggcggccggaaagggagaagaaggcgctggcaagctttccgcgcggcggtttccggtgagggcacggggtcgccgcttaaccagaggtcgccacctcggtaactctttgccacggtgccaagaaactttaccgcgaccaccgacgaccgg

SEQ ID NO: 105697 - DNA, 350 bp, Zea Mays
agaggaagtccaaggtaggcgaaaggctttgatcctatctgacagttaaacgttcttgaaagaatctccattttctccgggttaacattgatcgggtacatacttgatttattgtaattcaccctgagccccgtcaaagttgcataggaattgagaactgcttttagaaaaaataattgctttgggcaggcttccattatcagtagtgtgtcatcagcatattgaacaatcggaaaatcttggccacaattttcagtcaagggtaactggagcaaattctggtgtcttgctttactgataatactctgaagtaaatctaccgccaagacaaacaacaaaggtgagagagg

SEQ ID NO: 105698 - DNA, 324 bp, Zea Mays
atttatgtgaaccaaaaaacatccaatccaccctacagcttacgtcagacaatgatcagtacctagagcaactctaaaaagatgttaaaaactttactcaaaaactgattattaggagttagctaaaaaaatttaaaagtaaatcaatgatatgtactccaacagttcccttaaatatgacaggtgacacaatttgtacagtcaccggacggctgaggaagatccgatgtgttgaagaataaatcgaggagcgatagaacacgccaaaatatgaaggtgaggaggatgtagatgtaggactcgattttttaggggaataacgag

SEQ ID NO: 105699 - DNA, 420 bp, Zea Mays
ccctggcattcttctttcctcttttgctactttctgggttctgctgctttccgtgggctttaggataagggcaacagaaaagactgacaaagatctgcaaccgttctttttataatttcatccatctcataagcttttcgtctgtgttgatttgtttatgcattcaatagaaatataatgtagctttagagaagaccaccggcccaccgccatgcagaatttatgttctctatatatgttacgaatacagcaactggacgctgcatacgtgagctccctctcagggaacaggtagtcaggggacatcattctcgcgacacggggaacaatacttgcaaataaaatttatctgggattagaagaaccttggcatctcttgcctttttttcagaaagttgagtgccgtttggttgcgacgcg

SEQ ID NO: 105700 - DNA, 295 bp, Zea Mays
cgggaatgaaatgagctactttagtcaatctatcaacaatcacccatatagaatcatatcctttctaggtgcgaggcaatccagtaatgaaatccaggccaatttcttcccacttccatttgggtatcctcagtggatgcagtagtccagttggtctttgatgttcagccttgactctttgacacacatcacacatagccacatgtgcagccacatctctcttccacccgtaccaccagtacttttgcttcaaatcctgatacatcttagtgctaccaggatgaatagaataaat

SEQ ID NO: 105701 - DNA, 324 bp, Zea Mays
ttgcgctttccatgaggcgaagttcgtcttcgtgagcttctcagccacggtgagtcctgcgagcggattgatgttgacggtcgaagaagaactcgccatggcaggagcagatctacacgatgaactctagtgtttgttggctctggtaccatgtgagaagaatcagagggcaggtggaggaacaccgccccctatgttgggtaccaggcggatgcatgttgaatcaattgatgattggaaaagccccaaccgtggcatacaaataggtgtacacagatcacagtccgtaactcaaggagctatatttggtagcttataattaca

SEQ ID NO: 105702 - DNA, 315 bp, Zea Mays
cactttaaagttgcttattatctccaggcatccctttggtcgggagatcaagtcacgttctgcaggcacctcttcccctgcttctatgttctatctacgcaaagccatgggcggccgcgagctgcatgcatgcatgcgcgtcgctgttgcctgcttctttttcccaccccggcggccatgatcgagcacggcgcgggcttgtcagataggacgcacccgtacgtggaggaggatcgggacgagatctcgtgcacgcatcgcttttgcttcggccgccggcatcgtggaatggttcaggtgcaccgcatggagttt

SEQ ID NO: 105703 - DNA, 752 bp, Zea Mays
tgtaattcccaagtatcgtgttgcacatggtctcaatcatatctaaccattctttgcaaggctttttgaattgtttttcaaatttgaaacgataagcaagacaaacaagttcgtgcttcttcctcgcttctttcttcttcggcattccccagccacttgacgtcggatatgttttattcgccaagtactcttgcaccaagtccctggtgctaatctgttcagctaccactctaaattctacttcggccagttcatagggtgaccccagttgcatgttgcataagggtcgagtcattctgaagttcaagctcagtggactgatgaccatggtcatcagcttctccctgtttttctcatcagccttcatataaaaccattcatttttccagtcggttggccactttgtgcggtagctgaggactggtgttgttgtatccttttgatacgcaaaattataacaaccaaaaatttcgtgaagaccatctgtcttggccttcgtctgatagtgcagctgatgcactcggcagaaagcttcggcatctaggctcatcccttggcctcgaagggcccagataaagacgctgagcctaacaatagcattaggagtcagctgatgaagatatatttcgaagttctttagaacctcccctatcatctcattcagcagaaatcgcagccccgctctgaagaagctcttgaaaaccacaacttcgtccttcttcggctctaggtagtctcttctccagcaaatc

SEQ ID NO: 105704 - DNA, 520 bp, Zea Mays
atgggaccagcgaaccagaatcgtccccgacaaaatcgcgccgcacggcggagctccatgcaatctggcacagctaatcactcgagaagctctcccccatccttgaccttgccctcttgagtccgcactcgccgcactattagagacccgtattcctcttctttcgaagtaacccgagagcctggcatgacccaaggaaaaacacggtgaggaagagggaaggccaggagcgccgtcgtagccactgcgtgtgattgtcgccgttcgaccattgggggtatgcagggatcgcctgtgcatgcagattcgggataggaacctgccgtgatgaatcgtgggcgggccgccgtcaaattcctcaccgaagctcagaacaggggcgacatacccccttctcgtgggcggagctcggtgcaccatcaacgtcggtaagaactcccccgatgaactcgcgctaccttcttctgcattttaaagtcattagacaagcctgggatggccggggcgccaaatcaaccgt

SEQ ID NO: 105705 - DNA, 600 bp, Zea Mays
gacccctttaagcgactaacccttgtaataatcattacaaatacaaataagaataagtacatgacaaggtagtcaaggcaacagtgttgaatattgaagatgtaaagagaaaggcagcaagatgaagacatgtgaactgcaatccatgcaaacacagtgcacagaagaagtaagaactatttttatgttacctgttttagttaccaaattgaaatctgcaggtctgtagtattaggttcagctaaaacagtgcagagcacacaacaacagtgatgcctattagtcccaactcccaaactgggaccacagtgacaacaatccaacatcatgcatacaaaccagagcattagatatgtagctcctggctattacactgtagacaatttctggagctccactctctgtaagagacttatgagtaggttctatcacataatgcatcagaatggtcctccaaactacataatggatagttcggtgcaaacaagacaggtagatgaaacaatggtgattagtagttccattaagttgcagatgagcagaacaaaatgatcctcctatacatctagccatctaggagatcaagaaccccaaaagaac

SEQ ID NO: 105706 - DNA, 339 bp, Zea Mays
aacaatattcttccttgccttttttttcctccaggagtgacacgccgaggcagaagacaactttttccgattcgttgctccctttccgaggggattgcccgaggtagaagacgcttctttccagtttgattgccgagaggataaaggtacttcattggaaggctcgagggctactgtcggggacaataattagggacatttgaattatcccctaacaaacacacacagagaaataaggactaaacttccgaggggtgacagccaagccacctgtaaaaaccgagacatctccccgagagtctcctgcctcgagtagggctccacctcacccgaggtcac

SEQ ID NO: 105707 - DNA, 531 bp, Zea Mays
cgttggattgtgggtggtacacagaggcaaagataggcttggtgtcgatggaaaagcagaaatccctgaagtcttggctgtcgaactgtttgccattgtcgactgtgagttcggacgggactccgaagcggtagacaatgttttgccagaagaatttttgggcggtcttagatgttattgtggagactgccctggcctcaatccactttgtgaaatattcgacggcgacgaaggtgaacttgaggttcccttgagctgtaggcagtggtccaacgatgtccagcccccagcgttgaagtggccatgtatgggcgatgagcttggtgaattgcgaagggctgccggagcgaggagagaacttttggctgactcgattagcagtgcaaattattgcgggccagtaaaatccctgacgaatcaccttggcagcgagggccctgggttctgagtgggagccgcaagttccactgtggacttcacggaggatttctatgccttcagttttggttatgcacttcagcatgggctggc

SEQ ID NO: 105708 - DNA, 273 bp, Zea Mays
agctgaaatgtatcgaagctacaagtgatgaactacttgggccgtattccaaagcagaagataatgcattatccacatcctttggggggcggggaaaaagagattgaacagagtttttgatgccattggttttgtttaccccgactactgctacccgctgcggggacggggaaagaagaggaaaactgctgcctcggccaagactgctgcttcggccactccagatgagcatgcaccgaagagcaaaaagttgaaagtccttacccatcggcc

SEQ ID NO: 105709 - DNA, 571 bp, Zea Mays
gacgagcctctgccctgtgaagaaccaacccccggataatgggtgcgttggcaaaggggaggtcaacttcatcatccttgcctccatcatcatcacttgttggctcccatgcctatggatttgtcgcgggtcgagaccgaccggagggattccgggtcgtttgaccgcgagcaccatgagaccctgaggcctcaccaccttgcatcacatttccggatcctctcccgcgcttggatctggaacgcagaggagtttcttcacagatttcttgatcatcatcggagtcagtctcaactactgacgggttcctatgacgcaccatccttaagataaaaaaggagaacaaatgatgagcgaggagatcgatgttcaaggattttaacaaacacgtttgagtaaagacgcgtatgatattgagcatgcacttcaaccgttcatgcgagcggttcaactacaacaaacaataccaaactactaaactcaaacaatgttcgagacaaaacaagacagtttaagtgttgcaagcacctaaactacatagtatccttgaaaagatacacaagataatcaa

SEQ ID NO: 105710 - DNA, 418 bp, Zea Mays
taaagatgcaacaagacgatgaaggcaggaaaaacgaaatcattatcaagggcttagaggataaggtcaaggaactcgaagactctttgatggagaaagacaaaatgctatgttcagccaaagggtcccttgccgaagcgcaaactcaaaacaaaaactaagtatagacctgtcagacgcccaagcacttttgaaggaaaactctaatcaattcgaacaggaacacaaagctttgaaagcaagacttaaggttgaatctgagaaaaattcgaagcttagtgaggcggtgaaggctttgaaagagagatgcttcgagtttgcaagccaatgcatcgcccgattaaggaatgtatttaattcagttggagctgcatccgaagaaaccagcctctcagccaaagatatacccagggcactc

SEQ ID NO: 105711 - DNA, 427 bp, Zea Mays
tgccaagggagaatcggctgaagtgccgaaagtaatggaacaggagaaatccgagacggtcgaagtgtcgaagcgtcctgccgaagctaaggaaaaaacggtcgaagaaccagaactaaaggagtcggcagggcaggcaaaaaccctgagcctgccaccagagccggagttgccgaaggtgtccaaaattcctgcaataactcccaagaggaggagaatggccagcgtgctagacgctgtcatggagtcgacaaaggtacaaactcctgcttaaagcttgataaagaaggtgatattccgaagaaatctgacgaagctaggatatcaccggatactgccgaagccggaccaccaacttgtactgaagaaaaacctttgggagctactttgattttggaaaaagaaagcgcacctgagaagattaaat

SEQ ID NO: 105712 - DNA, 1723 bp, Zea Mays
gtgcgagcgacgagtgtaggcaatcagcgaagatggccacactcggggcaccgaagccgcgtgtagcgtggcaagaggcacaggtgctacttacgacgcgtcaggggtgtcggtgtcactcacgatccaactagcaggggagttgcgcatagcataacgaagttggcgctgccgcatagggcagaaatgctagagggaccgtaaggtggaaaccgaggaaccagactcacagagaaaatcaaagttatttagatgggatgagggcatggcagcgagcgggaagctgtcctcatcaaaaaccacatggcaagagatgaagagatgagcatgtggttagaagatagatcaagacaatgatagcctttgtgatcgtcggagtagccgagaaagacactaggtggatcaaggagcgagcttgtgcgaagcagtagaggcagtgttagggtaacatgcgcaacccaaaactcaggtggtcatgcgaaggtgcagaaccagacaaagcgacacgaggacaaccaacatcgatcatctttgtggggagaagttcagtaggtaagtggaagtgtggagcccctcaaccaagtaccgtccacaaagggatgcctggatcagtaacgagagaatgacattgttaatggtacgaataatacgcttggctttactgttttgaggggacgtgtaaacgcaggacatccacaactgagtgcctttggagagctgaaaaaactgggtagaagaactattaaattcatgcccattgtcgcattggatcgccttgatagtgcagctaaactaagtggcaacataagcaaaaaaaagttggacggggtggtgaaggtgtcagatttaagttttaacggaaaagtctagagataatgagtaaaatcatccaagaggattaaatagtacttatagctagcgtagggtggacgtatgttgaccacgagggcgtaaaatcatccagagataaggagtaaaatcatccgaggtacatagcaatgtgccccatgccatgggtggacgtatgttgaccacgagggcgtcaccttgccgtcggtgctcccagctcccacagaaagtgtggcagatgtgctagagaagccaccacaatcattgttgaggctgtgtgtgacgccgccaatgccgctattgcggtagttgttgcccttgtttcggttgtcgtcgaaattggtgttgccaatgctagtgtcgtttctgatgccagagtcgggcgaacgagacaatgttgaggatggcaactttgaagcaaatagtgtgcttttggagtagaccactgtcgaagtcgtcgctagaccggagatgtccagatggatctccagcaaaagatcatcacgaacctttagaaatatcaggaacgacaaatagcgacggatgatgatgccgaggtgctcgaaacgctggttgatccctcgcaggatgttgaggacaaggaccatgtcatcgatgggagatcccagatgagttagggcatcgaccatgcgttttgttagacaacctatttgcttccatgtttaggaggtttccttccctattaggtgttggctgattgcccctaattaggtgatacccttccctatcaggcgttggatgatatcccctgattaggtgctaatgggtgattctttcctatatggttgtttcctacttagtgtgagatctccctgatcattgtttctacaaatcaggtggagcacaatctggt

SEQ ID NO: 105713 - DNA, 562 bp, Zea Mays
cgggtgaccaagtccctgtcgagcaacctcacgaaagaggagcgggtgaccaagtcctgtcgagcaaccttgcgagacagaggaggcgaccaagtccctgtcaagcaaccttgcgaggtagagcggacgactaggtccctgccgagcaaccttactagagactagcgtaagggaaggccgacccaatgatacgagcccacgttggcgggacaatacgggtcatcaccacactacatctaggcctcgggtacaacatcgaatggtctctgacagatgtcagatgacacctcggcacgtactgtcttaggcgaacccccatcgactaatagggacagtcaatcccagtctaagggatctcagcattagagtctctatagtgaccatcatatcgggaaagatgtaatggatacaccatatcgggtgtatcgcacgatggcaaatgacacaggctcatgatgatgggcaaagctacactacacgctaccaggacatgggactgacccacaggacccaccacactactacaaagatgtcagcagaggactcacaacaaggacccgta

SEQ ID NO: 105714 - DNA, 493 bp, Zea Mays
aaagccggccgtgtcaagctcttttaacaaataatacgcataagagacgatgggtctttatttgcaaacgtggaactcactaagctgacggcaggttggggaacatgcatatttggtgccaacccttcaccaagtataagatatatgcatatgaatgggtacaagggaatggtacgttataagtacattcggagcacttgttggattgggtgaatcaaaagggacgtacgtggtgctcgtcgttttcgtcgttccaggagaactaaatactacatggaaatcttttgctggcttcctgaagagtatcactgcatgaaagatatgcttacgtacaagaggaatatatggcgagtattatttcgtagaaaacgtctcatggaaggaggcgatggtagctagcctcacgcgacctccgtagttgactcatgcaaccgaagtagattatcatattgtttccgaggtatatatattgtatgcaggatgttgagcagcg

SEQ ID NO: 105715 - DNA, 358 bp, Zea Mays
gagaccatcaccgaatctagtgaaggtgaactggttcggctgaagtacacattcagatatggggataaattcgatgaaccaaacgatgactggctaaaatgcatcgaagttacaagtgatgaactgcttggatcatattccaaggcagaagacatgcattatccacaacctttggaggccggggaaaagtgattgaacagagtttttgatgccattggttttgtttatcccgactatcgctatccgctgcgaggacagggaaagaagaggaaaactgctgcttcggccgctccagacgagcctgcgccgaagggcaaaaagttgaaggttcttacccaccggccatgctatattgaac

SEQ ID NO: 105716 - DNA, 546 bp, Zea Mays
gcagttgtacttttaccccgaagtttgggaagatgaaggataaaattgttgagtcagccccttgtgcgaagaataaagtggctgtgatgggcagaaaattggtcttatgtgcggtgcgctgagggcgaagggtggcctcgtgtgattaccatgagtgcatttcagtttgaggctttcccacgctttgcggttgaggagagggaacacaacgaccgtgccttcagttttgctgttgttgccagcaactgccaagatctggttgaggagtctttggcgtcggggtctggctgcttggtcaagactgggctgtgggtccggttgctcacagacacttcgctggttttgataggtcaattttgagtcctatctttgcaattgagcttgggcaccagtctcgacacacatttgttgcggattgggaagcgaaggagctttttggtccagttactgagcaggagattgagaaggcggtcgaaattcgcggagaccatgtgcgtgtgaaccatgtgtttaaccagatggggcttgcttatgaagagcacacaa

SEQ ID NO: 105717 - DNA, 668 bp, Zea Mays
gttgcatcatcctaaaccagcatacagatgagatctcgaccgtctatcccaggatggacggtgtagagggcttcatcatccaccgtgaggcaacacctgagcacggcggggcacaagctcatgatgacggcgttcatgccggcgagttccaaatcgaagtcccccggcgctatttcttacgcagtttagggcatcgcgaggagcagagggaggcaaagctaggggtgggattataccagagtagtaggccgcgaaggcacccgcccacggcaggatgcagtccagagctgtccgccgagctccggtgaacaattgctccaatccggttgacccagtgtgcgattacccacaggagcacgtttccccaggtgttgtgtatagctctgaaccgatcccggtcaccggtggacaccgatgatggagacgcacgacggcgacaccaacttcttcgtttgcgtccacggtggagtttttgtgcgggcgctagttcaacaggggcgagagggcgatgctgtacgctagtacttatacacaacggggagggtccaagtggttgcaacaaccccaagattcccccgtcccctatgattccggcgccggattccacgcgttaagcgtggctctgttgctcttcgtcgcgctcggatagggacgaagggaaatctgtt

SEQ ID NO: 105718 - DNA, 309 bp, Zea Mays
gaaacaagattgcacattttggatcgtgcaccttcacgccgaggaccgaaaagacttcggcggaagtcgtggagttagttccatgtgctcgcaataagtggagcaactagtgggattattggttttatgtttcgggaagcgaagtcgaagacctcccagggctccccgcgaccgtgatgtgctcccattgttatgtggcattcccacaatttgaggtggcggaggatgatgaggacgaagggcccctccggtgcgctgcccgcatgagcagcgagcgtgatttggttgaggattttattggttatggag

SEQ ID NO: 105719 - DNA, 779 bp, Zea Mays
ccctcccaccatctccaacctcacccagctcgtagagctcgagctgtcagagaaccggttcagcggcctcgtgcctcgcgatcttgggaggctgcaggatctgtggaaactgctgctggacgacaacatgctcgaagcgggggacaaaatggaggggtgggaattcatggagtcgttggccaactgcagcaagctaaatcttttcggtctgggtggcaacgatttcaccggagatcttcctgcttcggttgctaagctctcgacaacacttgagtggctttacctagaaaaccttgcgatctccgggagcatcccctcggagatcggaaacctggtcggcctgaaagtacttgttctgacggatactgacatctcaggagcaattcctgatagcatcgggaggatggagaacctggttgagctacacctggacaacaatagcctgtcggggccggtaccgtcatcggtggggaatctcaccaagctcatgaagctatcggcgagcggcaacagcctgggaggatcaatcccgaggaatctcggaaagctcaccgacctcaccagccttgatctttcaagcaaccacctgaacggctcgatccctgaagaaacattccagctgcagtctctttcgctgctcctggacttgtcacacaactccctctccggaccactccctcccaacgtcggaaggctggccaacctcaacacgctgagactgtcaggaaaccagctgtccggccagctaccggcaggcatcagagactgcgtggttctgg

SEQ ID NO: 105720 - DNA, 428 bp, Zea Mays
gttttctaaaagggttaagaccggagctcaaaactctccttgctagccaagacttcctcagcttctctcacctctcaaacaaggccatctaggtggaaagagctcgagaaaaggaaagaggtcacctcaagagaaagtttcagattctccgagctcaacaagaagacaggcaccagagggttcgatcttttgggtttcctcccaaggggtcaaatctcagcaagccagcaggatcttctctgtcgcgtttcaaccatcttggtcagagttccttccacactcagtccgtcgcaagcagccaacctccaaccaatgcttgttggcactgtggtgaccccggtcacttcaagaataattgtccacaactgaagccgaccgcacctgcctactccaacttagtgaatggccccaagaatgttacaacaccc

SEQ ID NO: 105721 - DNA, 449 bp, Zea Mays
gttagaacgagagataaaacaatcagagtaagggagatgcgttcttcttgctaatgttgctcaacttgggagcaacataataagattcggataacgatcaagcaagagaacttagagagggagagtgtcagttctcctggaggagtagctgcagctaccggtgaagatagcgcgagaagggagccagttgaattagcaagcggcgttgtcttgggccggcatgctagaatgcctagttccagggtctctgcggccgaatgaatccgctagttggcccatcggtgaacaggggtgattgtaatgaatagcagagttcttgtaaccagaagacagttttggaaataattgaacaccaaagcttgttaccttgaattctctttttctcttgcctctgtcttcttccctatcttcgttcagagttcgttcctccggtaagaacgctggtagag

SEQ ID NO: 105722 - DNA, 565 bp, Zea Mays
ccaagatgtttcgtgggtggaagaccgagatgaatagggattttgttaagaagaataaggttcctccgcccaagaaaatggggaaaatcactcaagctcagtgggaggaatgtgttcgtcagaagaccgaactgaaggccaaagaactgggcaaaactaattctcagagagcgaagatgaacaaacacccccatcacctggggtcaaccggatatcaccataaagttgtgcagtggaacatgataaccgaggaagctatagctaacggcactttggacccaatattaaaagatatcaatgagcgagctattcgttggatcttaggtcgggcaggtttgactgaggacggcaaacttttgcatctagaattggtaggcgaagtttcgacaaaaattcaagaatatgcagaaaagagaaagaagggcaaatttaagcctcgaacggagaatgacatactaactgcagcactaggcaatcctgaacacactggacgggatcggggaatctcttctaagatttcctggagagaggcgtttccagagtatgcggcgtcatataggaaaca

SEQ ID NO: 105723 - DNA, 890 bp, Zea Mays
cggtgatctcgcgccgtgattcgagcttgccgtggagatgtgtgctgggattggagtagatattgctggaggtgaaaagatcggcgggtggaagaacttgggcacggagtcggccgaacaccagtgaccacttgccccgacgtcatggcaaagttaccgccgtcatgatccgtcggtcacccttgtcaagccacacatatccttgcttcaccccgtcttagcgagggtggcggacggtgaaacaagtccccaagtcactgagctaaatgtgcgccatggtgaacgaacctagtgagaatatctcgtcgcctccatggatactctcatcctgaatttgcgaagcacgcaatcgatctctttaaattgagtgttccccttgctccgcctctctgttatgtgtctagctgactctcaaccccctttcgtcgtttaccgtagcccaagttcactagattttcccgaaaccaatcatcagtgccgtcgtgtggagctttgccgcggtcagcgctcctctggttagttcatgtccctctagctcatgttttggaacctctctagcccctagttgcttacaaaatcagacgtttgaactctaccgtagcgaaactttgagaacgtcgtctcgtcgctgcagaacgtagcctcagactgcctccacgtcgaccggctctcccgtgcttcctccgtcagaattcgcgtgtgtatcgcacctctggtgagccgatgatactcgccttgcccccaatttaagtgctaccacattctgttgcccggaacaggctcgccgatgtattggctccgccgttgtcgcggacggacacgagcatgggacaaactaaccaatttaacctaatggttatgctcgggtggtcttcgggatggtacccgtg

SEQ ID NO: 105724 - DNA, 538 bp, Zea Mays
caacgacatagatcaatataacttttgcatgacctaaaataatttggtgtgtatgtaagtatagatcagtttgtatttcctaggcagaatgagctaattttataatggatgactggagaccaaaagatattgctaacatcttcaaatgacttgatatatagatttttaatttgatcatggcgttgggtgattttccttaggtgtggtatgactaccatgtgcacatagagccagactccggattatacaactgacttaaagcttttaaaataaattggacgtttatttttttgtttgtctagattaacttaggatgatgcacctgacttatgcagtggatttagttatttctgccatggcgttaagctggtggccgcttagtggttattgcataatatagtgcacggatggaatactattggtatatgcactgcataagtggttgtttaactcaattttactcgtgctaaaaggatataatgtagtgagagaaccatataattatatgttaattaggattatttcggatatgaccttg

SEQ ID NO: 105725 - DNA, 634 bp, Zea Mays
attgatggtaatcttgtcagtctctattagaactgtgagcgtgagatggacacgtggacaaagcataagcgacatggatcttggtttgtagatttgactactgctctgtgagtgtggttagatctgctagtctgcggtgacgggttgttgtaagtgagccgagattttctttttggcctggacagtaggtaaaatggctttggatgcataggttagaatatcatagattttgcggacattacagtcctactctttctagtttctgattctgccgtgccttgtagctatggcaatcagtagtttcagatttttggtcggtgtcaaaatgcatgccgcctagcgctgcacctgcaccagcaccacctctattcctcctgcttcccagcgaaacgcagagatgccgtgcatgatccacatccatccacaaaacttgcggcatccggaaaactcggcccgtggtgcggccggccggtgcggtgagaataacaaatgtccacaaggcttttagcccagccaacccattggaaagcaagagcagcaagggctaattaaaggaagacaaacccaaacagaaaaaaagactcatataactaattaaatattttatttgaattatacctattggagatagtta

SEQ ID NO: 105726 - DNA, 459 bp, Zea Mays
ccgaagccatctgccagggaaaagagttactaccatgcatatgccattttttttactagttactttattcattacatcaagccattacatcacccagcacacggctaccataggttcgttacacacgagtactagccagggtattcccaaactccttctctaaagtgtccccaaattccttgagaaggtcatcaaggctggctagggacatctcctcgatgtcgggcgagtcccttaacccagcagggggtagggtcggaggggcttcttccttctgctcagtctgacatccttggtgtttggtcttcttgcggatttttcttgcaggggcgagcttcttcagtttcttgtcatagtccatcttcagggtgcggtaagcctcacgggtattggtttcctcgccttcagctattgcaaggctctcttgaagggacgccttttcccctgaaagttccctga

SEQ ID NO: 105727 - DNA, 450 bp, Zea Mays
ttctagctagcttcgttcgtcttctactcttgtaggaagcgcatgggggtggcctgatgggacaatttgttgttaagaagaccgagtatgtgttgtctactcatttctattggccttggatgtggcgatatgttgagcgctacgtctctcgttgcaccacatgcaacaaagctaagtcccgactcaacccacatggtttcataagcctcttcctattcctagtgcgccttgggtggatatttctatggactttattttgtgctttcctaggacaaagagggggagtgatagtgtttttgtggttgtcgaccgtttctccaagatgacacattttataccctaccacaaaacaaataatgcttcgcatgttgctgatttgttcttcactgagattgtgtggttgtatggtgtgccaaatactatttttatgatagggatgctaagtttttg

SEQ ID NO: 105728 - DNA, 337 bp, Zea Mays
gcttctgactcagctatgtttttaaatgttagcctgggtgctcaaaagatcagatccgctagtaatactgcctccaatccatataccatgaagaatggggtgtttccatgcaaggcccagcttggctgcgttcacaggctccagaccacatacggtagttctctgatccattttcctgcaagcttttcgctcttgtcgaacacctttttcctgagtgcatcaagtatcattccgttggctctttccacctgcccattatctcttggatgtgccactgatgcataattgatctggatgatcctttgctcacagaaatcaaagaactctgggctagtga

SEQ ID NO: 105729 - DNA, 711 bp, Zea Mays
atctattgtgcctattttgatgatgtccccttttgtcgtccttttggtgcctgtagaccattcctctccatgccccctgccggattggttggcctttgtggccgagtagtctggtaatcttgttcgacccgcgcctagtgactggattgaggtgcactcaatcggtcttgcactggaggtgccaacctatcaaatagagaagtttggggtgcccctaagcagggtattgtggccatatgaatatggtggcatgccccacatttgatttgggatatagggtggtggcaagtatgcatactgatatggcacgcgtgggtatgggggtggaggtgtccgtgaaggtacattgggtcttgaatagatattgtgatgtgctaactcctccgattggtgagatgacctagttggtcgtacctgtcgtcgttcttgggtaggtgagcgaggtcgctttgctggccggtcacttgggagggccttctttttcacatatttagatactaattgatcaaaggtcatgcttgctttgaccagttgaccgtatgccttaaacgtgtttgtcttccatgaacctatttctggttgtcgagatgtgaaggtacgtggtcatcattgctcgtgggtgatgccggaccgtctgcctaacctacctgactgtttggccgtgtcccggaccgtccacggtgcgcagaacaggggtccgcgcctagccgt

SEQ ID NO: 105730 - DNA, 469 bp, Zea Mays
cttccggagtgtctgggcttccatgtgcaccgccgtgcgctagacctcgttgcgacagtcggcaactcatgtcaatggtggtggaccgccagccaccggatgcctgcaggagcaggagtgccagtgtctggatctgggcggggaacgaacggggagaggaaagagtggagagtggctatcactggtcatcagcttccacatcatcaaccgaattacactcaccagtcatcatcttccaggtcttcaggctcctgcagttctagcagatgcagaccgccttcaagtatatagtttgtaccattatctatcacctcgacaggtttagcatccacatcaacccattcaacagtgcaatgaacttgttaccaagtaatgtcaatccactgccatcatagacaggtttagcatccacatcaacccattgattgttccaatcaaaatcatctaaacacaaacgataaaaagctac

SEQ ID NO: 105731 - DNA, 455 bp, Zea Mays
atatatatggtctcttatgaaatcttcaaaaaagaagagatatgacatcaagctgccgttgcacaggatcaatacaatatatatgcatgagggcggattagaatatgtgtcatctacagactacaacgaattagaatatgtgtcatcaactatacaaccaccatgagcgctttcttcgtcctcgctattgttgttttatattaacttctaacttttcatctcttttctcgtctccatcttcttcgcctagattctttcgcaccaccatagagggcatcgacattcctccgtcggcaagcgcctcaaaccgctatcgtgactctccgctgaccagcggggcaagaagaggcgaggtagaggaggagacgtcgctgtcagcgaagcggggctgggtaggcggacaaggagacgctccggaactcgagtttagttttggttcttggcaaaaaaaatcg

SEQ ID NO: 105732 - DNA, 422 bp, Zea Mays
attttgaagttgaaaaggaaaaacgtgaaatagtcgagactgagcggaatagagttcaaaagaacattgaagagcttcatcaatcgaaagaagaaggtttttctgtcgctatgcaatgttgtaataagctgaagagtatgtttgctaaagttggtgcattcttgaatgagcaaaattttattcgcgacgatctcgaaggggtaattagatggatagagggtgaagtcaaggcttttaatgaagtcctcactggccgaggtgattactgtgcccgcgtaggggcccgtggagcagtctctgcttgagaaagctggctgcgaacatgcaaaggttgtaattcaaccgaattttgtagtgtccgccgaagatgtaaaagaaccttctgccgaagctattagtctaggaggaaaattctattatga

SEQ ID NO: 105733 - DNA, 352 bp, Zea Mays
gaggtttccaagaaggcgatctggtgcttctgttatgacaagacaaccgagggcgtcacaagctcactcctccttaggaaggacccttcatcgtcgccaaggtgctgaatccaggaacatgcaagctctgcaacgaggaaggagaggtctacgacaatgcatgaaacatagaacatctacatcacttttaccccttggcatgtaggcctaattgtactatgatccccataattaataaagagtagctctcaagagaggctcgaccttgctttcaaaaccgaggctccctcgggggctagcggggggaaccccgcctctatgttgttttttcctcgcaatttttaaaacaaac

SEQ ID NO: 105734 - DNA, 736 bp, Zea Mays
gggagccttcggctgattgcagcggtatatctttttcttttaaagaatcttcaagtttcttaattttatcttctaagccttcaataataactttgtttcttctatcttcagtatcctgctgcattttcaaggccttgcttaataacatactctgcaaaacaagttaaaattagaatactcaaaccactacgaaggtaatattaaaaaagtttagagaaaagcctcaccttgaaattggaataaaacaaactaccgataatatgttgtcgtctgtagcagctaatgtcagtctccaactttgggaatccagcactcttggataaggtgcctacaatcttcgccccggcgcggtcgtgaatgcatcccaagatttcttcatcgaccccaccgaagagcatggaccccggttggtaaccacaagacatagcgaattctttcaactctaacttatcttccttagaaagttcctggccacccaggtgccgaaggtcaaaatctttctcttccgaaggagtatcatcaattttcttccctttatcaggcactgtggccatgctttcctccgcaaaccacacctgtcttcttcgcgaccacatctaatataagtttgtcaatttttgacattatggttgtgagttcttcagcttcggctccaccagcatctttagtatccgcaggaattgctcctttcaccgcctaagctgaaggtgacttttgctcaattgcttgcattacg

SEQ ID NO: 105735 - DNA, 568 bp, Zea Mays
agcgcctctagctaccttgtttgcgatttgggtagaaagtcgagctcaaatttcaagagaaagaatggcttggtgtggaggaagagacgagtctacccttttatagacatagggagggagaaacaaacatgttgtgctcgatctttgcatccatgatggggaggggaagggagtaggcgccatagggggtgtttgttccagcttaaaatcgatgattgtcagaatccaaaattttcagccaaacactttgcttcttagtccgcttttgtgagaattacttctgtaaacatcgctcaaactgcgaatgtagaatctgttgagtcgcaagatgggaggaatgtgttgctttctagaacctaaatcctatggaccccttcatcttcatccgcacataagccctgtattcagattctcttgatagctagattatccacaaattcagattcttagaaaagatttttagaaaaagttttaatgaacaagcccatagattgttggtggaggggataagtcgattgcaaccacccaccatcagtcgcaagtgcttccacccaaccgctcctaccgg

SEQ ID NO: 105736 - DNA, 343 bp, Zea Mays
tgagcatgagtgattttccccattttcttgggaggaggaaccttattcttcttaacaaaatccctattcatctcggccttccacccacgaaacatcttagccatagcagagagcatcgactttcttactgcatcctctgtgccttttgggaccttgaatgactcggacaacttagcccataccttattgcgggtgtcttcatctaaatccttccattttcgaagtgtgattggcactatatctctaacagtagacccacaggaatttcaaaactttgtaaccacatcaagtggttcttcaggaaacccctctgcattgagttttgttacgtacataactgtac

SEQ ID NO: 105737 - DNA, 389 bp, Zea Mays
aaatcgtacctgtcaccacgtctccttgctctctgccatccgcagcgggtagcacataagccccggaaataccagcagaagaggaagctcccggagtgaaattaacagaagaaccccactgagccgccgggtgaggcagacgcggagctccaaactgagacggcataggagtagtcagtgcaggagtaggtgcagccagatactgaggaaaaccctgcatcggcatgaactgagaagtcccaggcacataaaactgctgtggaggaagtggaactgaaaactgctgctcaacacttgacatcatgttgatagtgccctgagaagaggaggaagtcaccggctcccatctgagcttcccattaggattcctcctacacaccacatccttg

SEQ ID NO: 105738 - DNA, 498 bp, Zea Mays
caagcacgtgaggagttggacaccaccgagaggaactctctggtcctgctcgtggtggtcgtcgtcatcgcttcccgggcctgagaactgtggtatttctcttgttctgaactcaccccctgcctttccataattccatctccggttcaccccgcgtgatctgtctcgtgcggcaaggcgtacgcgtcctttccctcccgcggcaaggcaacagccgccgtcgccctaagccaggtgcccaggtattcgtcggtcccttcgccaggcctccctcgcttgccgccaacgagcacccactaggtatccgcaacctccctctcccattcatgctgtgcgaaaccgatcacccgattcatgctgtgcgaaaccccatccgaaccctcgcttaagctacttggctatttcgtattcggatctgatctaattacgagtgtatacacatgcttactaacttacaacttcattttttttggcaaaaaatattgggcacccacgtcc

SEQ ID NO: 105739 - DNA, 821 bp, Zea Mays
ttgaaattgaggagcaatcgattgtgaatcaggaattttgtgcttgcaataatgattcctcgtttgaatttgttgatttgcggagtatgaaaatcaaacatactcctatgatgcttcgttggaaatccgggagaaatcaaagccttaatccatggaaaattcatggagacttgattccgtcctggatcacgccccctcggggagatgctgttttgcctcaatttcgggattctagagggtgtattgaggaaaagtgtaaggcggtggtcaagaaaactgaagaagttgaggggctttggggaaaaatacctgaatcagatatatcgaggaatgcgaacgccgaatcggctcatttgtgttcccctccaaaccctaagccgcatacctacatctcttctccagtgcacacatcaaaaccacaaatcgaaagatttgttgggcatttctgggggagatctcagaagtcttatgcaagtgtggtgaaagcaaactgtgctccaatcgttgttgtgaagatgcagccaagaggagcaggtcgtcgtggagctgcgcacggatatggtcgcggatctggtcgcgatcacgtctggaggagaatcgaagatggagctatacaaaatcaaaaaggtggtcgcactattgaggaggcggacatgggggaggatggtgataccttgaatcaaggtaacccatctccctgggaaggtcaagttaacagatctgaagaaaagaatgaagatagttggaaaggtaatccccatcctatgggagaagatggccccaaagattctcacgtgaaaaaagaggtaacccgcaatttt

SEQ ID NO: 105740 - DNA, 676 bp, Zea Mays
atgaatttgtccctatattcactcacggacatacttccttgtttgagggatagaaactcctttctcttaatcttcatgagcccagcaggaatatggtaattcctgaattgagtggagaattctgcccaggtaattgtattgacagcagcatgagcagcgcagtacgcatcccaccaatccgcagcgggaccagcaagacgacctgatgcatagagtactttctctctatccgagcactgagctatgttgagcatcttttctatggactttaaccagtcatctgcttgcagcggatctgcggagttggagaaggttggtggtttgtggctcatgaattcccggggtggaactggtggtggaggtggaggcagtggcgcttgttgctgttgctgttgcgcccttctttcttgacgtatctcctcccgctcttggcgcatctcccgacgtgcatcctctctttcctggcgcatttcctggcgttcttgctgcatctcagcgcgcatatttgctatagtgtccgccatttgttgcatcatactcatctgagctgcaatcaatgggtcaactccgcctgttggatgattaggaggattcatctctgctggctgtggttggggttgtctatatatccaccgagtgtgtcgattaggaggtaaatcaattccaccaccccgcc

SEQ ID NO: 105741 - DNA, 772 bp, Zea Mays
tataagtggatgtagtttaatagtatcaaaatgacttattttacatctatttatgcaggttttaactcctcaaccaaacataaattcaaataaaatcttagatggtgcgtgcgggtaaccaattaggtcattagagtttcaggttcagtttttctagtgtccagtcaacccacatgtgagctgattcaattcttcagtgatgcgttcatgtgggagtagtaatggggggttagttaccggtcttagcgtagacgtggggatggacgcgtcaatcacgcgctaaggcagccggccttattgtagtcagtctgaacttttcttaatatagtcaatagacagaaaacgctgcaagtgttcagcagcaccaaaattctcctgtcggtgtccagtgtgtgtgatcgtgtgtgtatccagcgtccagattgttctccagctcgccgatccttgttgccggtgtacatcgccaggacgaagggcaacatccgaggcgtcaagtcactaatggacaacgcatgggacagaacccgccccttatcacactctatcacattttctatttcaaacttcgttttacaaacaatacaatttacagtactttgcacggccgtttacatggcctcctggagatggcataagaccgaggccttcctcttctttaagcaccccatcatgtccacgaccacataaatgggatccgaagatttacctttaggattcttggcagctaaaataatacctaaaatgttatacaagtgcgggtacacttgaaaaa

SEQ ID NO: 105742 - DNA, 610 bp, Zea Mays
tcggtgcagggtgctcacatagctctccctcgacgacaactatttcaccgggatcccgatgacctgtacacgttgcccatcctgaggagagtgagcttacatgaaaatcagttcactggcaacctcggcagtgaccttggtaacctctctcagatcatgcaacttgacttgtcctataataagttcacaggctccatacttgatgtctttggagagatgaggaggctagagtccgtaaacctggccaccaataggctggatggtgagttgcccgattccctgtaaagttgtccacttctgagggtaatcagcttgaggaacaactcgctctctggtgagattgctatcgactccagcttgctgccgaagcttaatacttttgatgttggaaccaactatctgagtggcgctatagcttctagcatcagtgtgtgcaccaagttgaggacactgaatcttacaaggaacaagctcatgggggagataccagagagcttcaaggagttgagatccgtgtcgtacctctcgctgaccaggaatagcttcacaacctggcatagacattgcaggtcttgcaacacctgcccaacctgacaagcttggtgctgac

SEQ ID NO: 105743 - DNA, 352 bp, Zea Mays
agctttgtgaactgcgaagggtttcccgagcgtggagaaaatttctggcaggcttcgtaggacctcatcacccgattcgcggcgcaaatcatagcaggccaatagaagccttgacggatcaccttggcggctagggccctaggtcctgtgtgagagccgcaagttccgctgtggacttcgcgcaggatctggatgccttcggtctcggtgacgcatttaagcatgggttgactgaccccctttttgtaaagttgtccctcgatgagtgcgaagtcccggctttggtgtttgaggcgcttggcctcgttgatatcgcttggatggtagtatccctgcaggaacagggttattg

SEQ ID NO: 105744 - DNA, 497 bp, Zea Mays
gttgttaatgggggaaacccaacctagccccttattagccttcatctggtagagtcatgccttgcctcgggtgaggttcttcacgtggctggcgtcaagagaccgcctccaaagtcgtgttgctcttcacaagaagaacatactctctgatgacatctgtgaggactgctccaacgacccaaaaacatcatcacatatcctcttccactgtgactttgctcgcgaattctgggttgctactgggatcaacatcgacaactccatctgttgctccatgttgcatgagttgcctcaccctgcgacactgtcccaagaagccttccctagtccccacctttgtggccctacattgttggcatttgtggaagcaccggaacagatatgttttccacgacgagtccaattcagccgctgccacccttcgagcatgtctggcgcatgcctgccaatgggaatctcggctacccgctagtgactctacccaatcgagctcttgg

SEQ ID NO: 105745 - DNA, 436 bp, Zea Mays
caaaaatagaatctcattcatttgaatgcaactgagatcgtagaatctaagatcgacgatttagatttaatgagctaagggatacacgaggttctaatcgggaccgtccatcccaagactttcggtccggattcaaaaggtcgaagaaatattgtatgatctaatctcatctgttcgacggagatcaggcggtcaaggaactgtctccctcccctggcatcaggcaatgacgacattgccctaaccgtggcggaagctcaccgacgacgagcattcccgccctatggtgcgaaatccgtgaatcggctaggtgatacacatacatggggatgtgaatagaaggatcaatggcatctcacagtggatcgtacattcactagcttcggccacagtgcgacacgaatccattgcaattggcgagccactagaggatcat

SEQ ID NO: 105746 - DNA, 519 bp, Zea Mays
caagtacgcaacacacctcaattttgctctcaaaacagataagtgtaccaataatataatagaatatgaagccgtcattctaggacttcgcaagctcagagccctcagcgttaaaacatgcataatcaagactaactccaaaaccgttgttgattagatagaaaaagattacgcaacttgggaaccaattctccttcaatatttttcagtcgtgcgcagtctagagaagcaattcaaaggcttcaccattcagcacatagaagcaaaaatgaagaagcagacacacttgtgaaggccgctgcaagaggaaaccccatgtccttggacgtgttctatatatcaagtaatcgaagccccagtcgtaagggaaccagatggctagatagtcgtaagcctcatcatgactgaagactagaggacccctataactctatacctctagggccattaccacccccacagatcaagccgaggccaaaagattaaaatatcaaagtcgtgggttcatgataacagaat

SEQ ID NO: 105747 - DNA, 379 bp, Zea Mays
gaaatgagctgtcttggtcaacctatccacaatgacccaaatagaatcatggtgtctggatgtgtttggtaaacccacaataaaatccatgctaagatcctcccatttccaagatggtatgggaaggggctgtaaggtacccgctaccttcaaatgactgaccttgactctttggcaagtgtcgcattcagatatatacttagcaatttccctcttcattctggtccaccaatacaaaggtctgagatcatgatacatcttgttactgccggggtgcatggagaatttggaaaggtgagcttcatccaatattttctttctgagtttgggattcttaggaacaaccaatcggtctccaaaccatagaattcccttgctg

SEQ ID NO: 105748 - DNA, 450 bp, Zea Mays
cagctctcctgcgcgttcgagagaaaaaaacattctcacgacctgcgtttttacaaggcaattttggcaccatttgttgccccactggggttgggtggtatttctcctagacagaacgaggtctgtttcgcggaatggtggaggaaatcaagccggcgagtgaagaaagatagaagggaaggttttcattctttcgttatttttggtgcttggaccctttggaataagagaaatatttatgtttttgagggtgcctctccttccctttcggtagcccaaaacttcagcagagaagaagttagattgtggtgtttggctggagctgctaagctccaggttttagtgagtgggtgggtgatttttggtcatggagggatggcttaactctctcctttctagaggtccctcttgtttgtgtcaggcgcggattcgtctttgttttttctcaac

SEQ ID NO: 105749 - DNA, 589 bp, Zea Mays
agagaattgctttatgttgtttggagcctgagaactcaacctagccgagctctgtatggaaatactcctttcttcatggtctacggatcggaggcagtgctacctgctgatctcaagtttggggcaccgaggttgatctttgaaaacatagcagaagctgaggctaccagactggaggttattgatatactagaagaagaacgattgaacatcgtgatttagtcagcacggtatcagcaaactctgaggcgctatcacgacaaggccatacgacatcgatccttcgcagtgggagacctcgtcctccggtgaattcttacgggggaagggcggcacaaactgtcaccactatgggaaggaccattcatagtagcagaagtcactcggcctggatcatatcgtctcactcaaacggacggcacggaaattgggaactcatggaacatagaacatctcaggaagttttacccctagctatatctcaaaagctattgggacgacaatgtattctgtaaactgggaaatatatcatcaataaaaagacttcaaaggcactgaaattgttcactgacaacctgcatgcttactt

SEQ ID NO: 105750 - DNA, 491 bp, Zea Mays
cattgagacagccgatgtgccaaggcttattgaaggtgcagagactgccccatctgccacagaatcaggtcctgtcatgccaattgaaactagtacagatccgaccaaagtgtgaatcatctaggccccttggtgatgttttggtaattaatgacaactgcttgtgggctaacggttcttggagaaataagaatgcagggttggaccacatagaacaggaaatcttggagattcataagcattggttgtggatcaagtgaaggcaaaggtataacataggtttcgtttttgccggtcttgaggagtttagagaagatacttgaccggattagtaggctagatagtcgtactattaagaggggtcaatgactttgatctgtgtaaaacttagtgcctcatagagcatctagtggttgcatttgcatgaggactaacaacgcttcaaatttcatgagttaaaattctttcaaaagcttgtttgaaaagtgcaa

SEQ ID NO: 105751 - DNA, 405 bp, Zea Mays
aatgattaaacttgttgagatactgcatcacagtatcccctccttgttttagtcgaatgaattcctcttgtttcatgtgaagcactcactctcgaatatagtgctcacggaatgccaatttaaattcatcccaagtgacctgatgtccggcttgttgaatctccacaaaatttccccaccaggtactggtaggacctcttagttgttgggcggcgaacaatggcttctgtgtttcggtgcaacggattaatccgaacttctactttattaccctgatccactcatcagcttcaagaggatcttcagctttaacaaagagtgggggacgcgtttcagagaagtccaggtatgaggtttcacgcggtccctagggaggagccctttcgccttgctgctggaattggt

SEQ ID NO: 105752 - DNA, 471 bp, Zea Mays
aaaattttcagcaatccaacttgttgggcatcagattacctgggaggaattcaagctagcgttccgggagcattatgttccagggggagtgctccatatgaaacaagaagagtttatccggttcaagcaaggaggagatactgtgatgcagtatctcaataagttcaaccatctctcccagtatgccattgaccaggtgaatacagatctgaaaaagaagaattattttatgaggggactcaatgacaggcttcagcggaaaatggcaacatgcttggaccttacctacagtaaggctatcagtacggcactggaagtggaagccaaaaatgcgggacatggaaaatcaacagggtttgcaggtgaaaggtcaaatcaagggcctgaaaagagaacaaggttggtgatccgaccttttaatcaaaatcgttattcgcctcgcccaccttcatatccatacaagcagtctgt

SEQ ID NO: 105753 - DNA, 590 bp, Zea Mays
ccaggactcaggagtccttcttccgggcacagctgacagctcagattgccttgcgagcgcaccggcttttggatttacctacttttatactagtcgacggtgccgatttagagggacatctcacctctctgctaggcctgctttcactattggtcgtgaatggcagttatattgaggagtgggtcagagtgttctatgctacagtgtggattgaccctgaccatcagtggttgcgattccgtttcgagagaggatgtcactttgcatgccagccagatttgccagctctttggatttcttgagtcgtcgactcagctccacagtctgtgctattgcacctcggatcctccttgtcgccctcatagcggagttgcacctgctacagctcacgtcgtggccctgttcagacctcctttcacagatgggtcgcgacgatctcctgctgacttcactactgcagcgaagttcctatatgagctgatgagacggacagtgctacccaggatgggatacagggaggtcactacccatattcagctatggctacttggtgccatgatctcacactccaaattcgacgtggttggctt

SEQ ID NO: 105754 - DNA, 425 bp, Zea Mays
attccgtaaaaatctggacctaaccgtaataatcttacgccatcagtggacggcgggtttatttaaaagaagtacgaagggtatgggccatccgagaccgttggatcagagttggacgtatgagattaaatcaagtccttctgaacttgtacaggcccacagccgtaagatcctaatcctacggtcacgattttatgaaatgagatccaacaggatccgtctgttaacagatcagtggtccagatcggatttccgagctgccatctaccgcatctatctttggcccacgatcgagatcccacgatcaatatcaccccacctttcatcacggatccgatggctcacgagcttcttctccccccagccgacccacaggcggggcgcgcttgtgaacacagtggtggctcgtcggacttcacaaatcc

SEQ ID NO: 105755 - DNA, 291 bp, Zea Mays
agatgagcttcatccagtaccttctttctgagctcagggtccttgggaacaaccaatcgatctccaaaccataaagttcacttgctgtcctcacgaaagcacttgtatttttctgccttttgcttgatcatttccttgatcacctgaacacccttatcttcaatctatgccctgactatttgctcttgtaatgtgtgttccaccgaaatgtagcctaagtcacctgaagaaacaacttccaggctcagcttgcacaactcatcgcacagggtggtgactcttgtatccatg

SEQ ID NO: 105756 - DNA, 654 bp, Zea Mays
aaccaaaaaaacactaagtatctcatagtcttttatttgtctaattgttcatgccaaccgaatttatattggtcttgtagaatataaagagctagcacaactatacaaggctcgactgagattgatgatggatcgtatttactgtttggagacatcggatagctctgctactctatagagattacacattccagagcgtatcaacaccttcaatcagacctatatggaagagaccagtcctataatcatggcattagcaagtcacattaccctagaatggaagtgtcctaggtccaagaaggattggctattgttgggggaatgacccccggaccctaggacccatcggtcagtgagtgcgttgagaaaagagcccttgatcgttgggtcccaaaagtcagtcggaagaggaaggtgtgccaaccttggaaggactcgccctcggtcgaacctcgcggcaccgagctcgaagccgggcgaggcggagcctaacaaggaagaacgggtgtgtcgaaagagaaccactcgagcggatcccacacccggccctaaactgactcaccataaataattggccgcattaaccacaactggcatcgagccatagcgtgggcgccggtccgcttcccactcatgacctacggacccctcggt

SEQ ID NO: 105757 - DNA, 387 bp, Zea Mays
ggcggctgttgctgctcggcctcggtcgggagaagaagaacatgtgggagtcctcggatccgaaatggagggctggtgatgtcgatggtaccatgcgggtgtgggcggagatgtaggcgaagagcaggccttccgtcacccagcttggactcaggtaggagaaagaaggctagccattagatcttcaattggacgctctagataacgtttcatccggatccgtccctggccgtctgatctggatcgggtgcttgatagtagatctaagagttttaaatctcgggcgttggtttagaatcggaggactgtctgttggataccggtttgtttttagttacgcttaaatctaggccctttgtgcgcgatccagtggccaatcttcacccg

SEQ ID NO: 105758 - DNA, 600 bp, Zea Mays
tacggggagaaaatgagcagtcttggtaagtcgatccaatataactcaaatagaatcatatcctttggatgtcttgggtgatctaaccacaaagtccatacttatgtcattccatttccaggttgggacaggtaatgattgtagggttccagcagttttcatatgcaccaccttaactcgtctacaagtgtcacattttaccacatagcgagcgatttctatcgtcatcttagtccaccaataatgttgtttcaatcttggtacatcttagtacttccaggatgaatagaatacctactaagatgggcttcatcaaagatttgttgacggagttcaacatccttaggtaccactatacggtccttaaaccataacaatccttggtcatctttcctaaaacaagtagctttaccagcttccattttctcttggatatgtttcatacccttatcaaccttctgagcatcaataatcctttgttgaataactgactcaagcttcaagtgcatcaggatccttcttgcactattcccagatttagtctttccatttcctgacataaggttgtgtcaggcaatcccacagtgaggcaatgacaaa

SEQ ID NO: 105759 - DNA, 506 bp, Zea Mays
caaggccatgcaagttgaaagagctaaggaggaagaaaaaggacatctcaaaaggaagttccaggttctccgggcacaacagcaggatcgacaccagaagactcgatcatttgggtttccacccaaggggcccaacttcagtagaccagctggacccactccgtcacgattcagccagtagagtcagagctctttccattctccctcagtggcaagcaaccaaccttcggcaaatgcatgttggcactgcggtgatccaagtcaagtcaagaacaactgtccgcagctgaagccacagggacccgcctactccaactcggtgaatggccccaagaatacctcggcacccgcccccaaggcgccctccgccgtcagccagcagaacaagactccgtaccaagggagggcacgtgtaaatcacatcgatgctcaggaagctcagcaggctccgggagtagtactcggtgagttccttgttgaatttactcccctaccgtacttttcga

SEQ ID NO: 105760 - DNA, 280 bp, Zea Mays
tgagcaaaggttgacatattcctttcttgtacaattgcccttctattaggatgaagcaacgacttcggtacttgagtcttttggcctcggcttcgtctgtagggtggtagtgtccttggaggtacagggtgatgggggccctccagtattcagtcatgatgagacttataatcctgtgccaatcggggtcccttatgacggggcttcgactatctagaagaaaatgtccgatgacatagggtctcctcttgtagcggccttcagtccacatgttggattg

SEQ ID NO: 105761 - DNA, 487 bp, Zea Mays
gtccacctactaggagtctaggacactatctttgagctccattgcctcgaccagagaaggggcttgacattgggtaacttgacaaggcatctcaaagggatagctacaacgataagtcttgtaaagagccactaggagatctagagcccatcggtctacgagacaatgtaaggacgagagcccatattgcactgaggacaattcagagtagaataatctaagtctctgaggcctcttgtccccgagggcactgatgaacaatccaaagccttggagcccctcattccctagggtgctcatgggtctaacatagcccctcgggccaaggtgctatggaaagtacatgtgcttaaggcagtttagtccttggagactcaactacactaggcactaagctccttaaggtgcccaacctcgtattgtgagggtcactaagccttgaaggctcgtgggaacaagggacttaatgcaactaagtgtaatcctg

SEQ ID NO: 105762 - DNA, 472 bp, Zea Mays
gaacagcagtagttctagcagtttctagatttttcgtgggtaattagtgggaatcagtgggagaatcatgtagagctttgtcataccttttcaacgagtacttatgcgctcgattcggagttatattttaggagatatcgctgtttgaatccgggtatgttgctgtccaaaaaaacagatttgcaggtgggcgaacaacagtagtattagcagtttctggggatttttcttgggtaattagtgataatcatgtagagctttgtcataccttttcaacgagtacttatgtgctcgattcggagttatattttaggggatatcgttgtttgaatccgggtatgctgctgtccaaaaacagattgcagggtttatcttgtggactgttttggactaattaggctttggaatttaattatcatttgaatataaaacttgtggggaattttatgaaaattcttccggagtttttgat

SEQ ID NO: 105763 - DNA, 842 bp, Zea Mays
cgatcatgtctagcccctaacatgtgaatgaccagataacatgaatggtctacatctgctgcgcgggtaagtgttgtcgttttgacaagaattggcacgcctcgcacttctggactaactcggcagcatcactctttgcaattggccagtaaaacccggatctgaaagcttttcccactagagtccttaatgcggcatgcacaccacattgcccagcatgaatctcatcttgtagctgtctccaagtagccgagtggatgcacttcatgaggactcctctgcgcctcttctgtacagcaggccccctatgatggtatagtgggccgactgtcttgcagtgcactctgctgcggccttgtcatccagttcctcttcgtttttatgtacccgatgatcggctctctccagtcattgggatttgcctctggctaactcagggcgttgcattcttccatctgatctgtgataatgcttggttgctgtatttcttggacgaagatcctaggtggaacttgggcccgactggaccccagttttgacaatgcgtcagccgctgcattgcgatccctttccacgtggtggaactccatccttcgaacttgtcttccagctttcgcatggctgcgcaatatttgcccatggagtcggtcgagcagtcccaatctttgtttatttgacttatgactaccagtgaatcgccatacaccatcagcttcttgatgccgagtgaaaccgcgatgctcagccccgtggattagtgcttcatactctgctacattattggatgccagaacaaaagctggagtgcatacttgagttgttcacctccgggagcaataaag

SEQ ID NO: 105764 - DNA, 413 bp, Zea Mays
aatgaggaggagccggatgacaaaaatgcagcagagcgcattgcaaggcagtcagctcactatactctcattggggaaacactataaagaaggggcgcgacaggagtcctcatgaaatgcattctttcggctactgggaagcaactgctagatgaggtccacgctgggcaatgtgggatacacgcagcatctaggaccctagttgggaaggtcttcaggtctggtttctactggccaacagtaaagagtgacgcagccgagttagtccagagatgtgaagcttgtcaatacttatcaaaacagcaacatctaccagcacagcaactacaaaccatacctgtaacatggccattcgcgtgctagggactggatatgattggacccttcaagaaagctcaaggaggatacactca

SEQ ID NO: 105765 - DNA, 523 bp, Zea Mays
gaagaccctacgtgaacatccatggaagtatgagagggagaatcaactcggacaccctcgggggctgggtcatagctcgcgctacccatccgagccggatcatctctggcaacaccctcgggggctgggcaagcgctagcgccatccttgagggccgagccctctgtaatagccacctctaaggctgaaagaccttcaaccacttccatgggagcagagcaatccagaccagcctcctgacccttaagaccgcgctccaaggtcgatgaggcacgggacgtcgctcgggataactccaacccggcatcgggcacatcagcacaaatatccatcatcccaccatctgccggttccgacaacatatcctctgggaccatatcttcgagagtctgatcaaaatttgccagagacaattcttgcagaccaacgagggcagacaaagctagagaaggaacaccactactctccccgctggctatgtagcgacggctgttcttccgaattagagggatttcatcctcct

SEQ ID NO: 105766 - DNA, 311 bp, Zea Mays
ggttgcgaagcgtagagtgagtgaggtggatggcggtcgtcttcgtgtgggcagggctggcagacatgaattgttgtcttcgccggccggggcgagtgtaggtgagggggagttgcgaagtctttttgagggtgaggagcttaggataatgctatttaactatagggagatgggaatcattccgaaggttgaaccgatgtgagatgtgacgccctcgctgtaagtgtgttattatgatttgtatgatgaggctgtgtgcattcgcgtatccggctatgtctataggggcgttgcgcgcttggcctggctga

SEQ ID NO: 105767 - DNA, 294 bp, Zea Mays
gaaaggttgacctagaaaaatttctagaggacttctctccagtcaatggaagtgaccgtagagagggggagaatgatagtgaccaggatgattgtgaccaaggtagtgatttagttagtaagacttcaggaggggtgattgttggaggtatggttccaccataaatgagggaagtgataaccacagagattgtgagtaatgatgaaagaagtggttatggagatcatgatgatccaactgtcaatggtctggaggggatacaggatgatgaagctgtgattgttgggacaatcc

SEQ ID NO: 105768 - DNA, 715 bp, Zea Mays
gataagcacaacctttgttctgttttttctattcttcctgataggatcagttttcacatatacaggtggaagcaacagttaaggtttttagttctacttcttgaaaagattaagctctttagttctggtatgggttcatctagagctatatgattcagttgttcatcgtttgtttacacctggagagcattttttctattataacaaggtagagcatgtttccttttgtgaaaaaaataaaaaataattaattctaataaatgactttgtagcagactatatatgcaaaaatcaattggtcagtgttttttattctctagaagcttggaacatgtgaacatatagtcacttgtataagttgcacatgagcaaatcatagcagactatttataagggagttagttgacgtcatctctagtagaactgtataataatggcaaatagttcttgctcaaataattgaaacacgtgtatttaaccaagtcatgtgttaaatcaaaaattattaactagggcgttctccaagaagagatgagatctgtatcaagacacagacatgaatattgtgcctcttgggaaggaatattgtgaagttattgtgaacactgtattgaaaagggatgccatcttgccttgtccttatggttatgtagagatgatggctggtgcgcatcaaatgtcagttgcttggttttataagagggtaatgaactac

SEQ ID NO: 105769 - DNA, 507 bp, Zea Mays
atttgtttttgtattaaaaatcaattttctaactcatttattcgttttaaaacagcactggactgggcctccaattccagaaaacgcaggggctcaagcgcaaatatttctaagacacagtcgataagggttcatggactgcgtgttaaaatccagagaacctagggtctttttaataatttactcggccgaaggggtatggatgggtctcagccgttggattagaaaccaagggcccagatgaaatcttcactttactgaaccggtatctgatgagattgatgatcaagggttgcgatctattatgtgcacgatttgatcttgcccatacatcgacaatccaacagccgggacaagtcctccccagtcggtacacagcctctaatctcagtcgttggccgccagatcaatagtccccatgattaccccctctttcctgctctccgaccaacccgagacgacggcaccctggttttcaaggaggcgccatggccggagctcccaaac

SEQ ID NO: 105770 - DNA, 333 bp, Zea Mays
gcaggaagccctggtaaacaatagatgggtaaatgacatatctggcagcctgtcagctcagattatcatcgatttctttgtgatttgggacctagtacaaagttttcagttacatccggggactcctgatgtgcatcgatggtcaccatctgcatctggagattattccactaaatcggcatatgatcgttttatggctggttcagtcacttttgagcctgctacacgaatttggaaaagttgggcccccacggtgtaaattcttcatttggcttgcttctctaaatcgttgttggacagcggacagattaagcagacgaggtcttgagcatc

SEQ ID NO: 105771 - DNA, 312 bp, Zea Mays
cttgggaggaggaagccactttaaaagggagagccacccttcccccattggactagtcttttgggatgattgggcctttccctgagttgggtgtgcttaatgaactgttgggctccaggcaaccctaatttgttgggcctcggccaaccccacctgggctgggtgtatcatctggtatcagagctagggcccattttaagaaggtgggaacgatgaggacatcctccactattacccgttggcaaagacgcaattggcccagttggcccaattgtagtcggacgatgaccgtgtgagcctcagaattatccc

SEQ ID NO: 105772 - DNA, 469 bp, Zea Mays
gtggcattgaccaaggcagcgatagcctcggccaaagtcggtggtactggtggcgggttgggagtatcttcccgaccacgggaagtccccacaccatcatgtgcgcgagtccgtgatggcatctgaggcaaagaaacatttggaaaaaatataacatgccagcacacaccatcatattacattaccaaaatgtaataattatacagactccagcgtacaacttgactttattacttattttacataagtataatatctaaactctcttattctattcttcgtcatccttggtttcttcatttcctgctgcaggagaccgttcgtcagcaaggttcatggaaggagggggcctaaaaaggtccaactcctcattaggtccttcatttgctgtccccgatggtccggctcccattgcaatagcgtcagcaggcacgtccgggtgcagtcaagcatacaatacatgtacttc

SEQ ID NO: 105773 - DNA, 312 bp, Zea Mays
aaaaaatagtagcttctatggaatttggggaggattaggggggacattgcccccctcagcccctccctggaatcgcccctggttttgcgttgcgtgtggttgaggagatgcatgcactcggtggcggagacggcatggggtagtggcagttgggatcaatcgagggaaggaccgaaggaggagacttcgggcgaagattgtgggaatctggatgtacgggacacaatattatggtggagatgagcagtagaaccacggaaatggtaaagggagaaagattgtttttacctgacatagaagtataggtggtgg

SEQ ID NO: 105774 - DNA, 284 bp, Zea Mays
gaggaccttcagaagccgaaggcccccaacagtcagatcaccctgaacactaagatcttccattgttagctgttcctcagggacacggaggcacttcttgagttgtgacacgtggaatacatcgtgcacatcagatagatgatcaggtagctcgagttgataggccatctccccaactcgcctaaagattctgaagggtccaataaagcgaggggacaatttgcctttgactttgaatctcgtcatcccacgaagtggtgacaccttgaggtacacatgatcac

SEQ ID NO: 105775 - DNA, 548 bp, Zea Mays
agttaccaggccagtttgaagatgtccccgtttgaggctctatatggcagaaagtgcaggactcctctatattgggatcaaactggtgaaaggcagttctttgggccaaaaattatataagaggcagaagaacaagtacggttgataaggaagaacttgagaactgtgcagtcaagatagaaaagctatgtagatacccagagaaggcagttggagtttaaggtgggtgatcacgtgtatctgaaggtgtcaccggttcgaggtatgaagaggtttaaagttaaagggaagttatcccctcgctttattgggcccttcttgatcctaaagcgagtgggggaagttgcctatcaactagaattacccgaccatcttgcggatgtacatgatgtcttccatgtatcccaattgaaaaagtgtctcaggataccctaggagcagctaccaatggaggatcttagtgtttaagatgatctgacttatacgaaatatcctatcaagatccttgataccttgactcgtgtcacgaggagtaaagtaatcaaaat

SEQ ID NO: 105776 - DNA, 548 bp, Zea Mays
ctgggttcttggcgagggctagcgcagacttattgtcgatgtagaggagtggcgcgacgacctttgtgttcagcaagtctgcaagcaggcgtgacaactatactccttgacacgccgcggtggcgctggtgatgtattccgcctcacacgacgatatcgcgaccacgcgctgcttctgggaccgccagctgactaggctctagccaaggaagaagattgcaccagaggagctcttcctgtcatcaccgtctccggcgtgatcggcatcactgtacccgatcaactccaatgttcctttcccgtggcgataaacacacccttgggtcatcgttctggcaatgtacctcatcaaatgcttgacgacgcttcagtgctcagtcgtgggctcctccatgaaccgtattacatagccaactgcaaacgcaatgtcaggacacgtgtgaactaagtacctcaaactcctgacgatgttgtggtacaaggtcttgtccactagtggatttgagctcgccttgctcagcttgaggtgtggctccatcggagtgttg

SEQ ID NO: 105777 - DNA, 879 bp, Zea Mays
ttatttgatcaaatgaaatgttcccatattatcccctttagataagtagtactttgaaggtgtgccaagatcaaaggttaataaatattcgttgcttattttagaatgaacaaatgtttaatctgtacttttggagaagtgttaatttaattatacaattcaacccataaaaattaaatagaatccttttctttaatgactattagaaaacatgtttattttagggattgtagcttccgcacaatgaaccccttactataaggtattccaattcaaaatcgttggagaatttttaatacattcttaaaacactaacgtaattatatttatttatttatttcattctttttctctgatacaaattttgggctttacagggggaaaggcccgcgacatctccctgttcagagtggggggaatcgtccatgacatcacggagacgaagaagcagaacctcgccggcggtgataaaggtgcaccgtcgctcggtcggcctatgtctcaatcaccggtaagagcaagttcatgtagttcgcttcgctaagcgcagtttctgctcacatcggcggtagcagaggagaacaacaaagctgggcgatgacccgcctgcgtcgtcgggtggatgggctccgctaaagcaggcaccgcgcgagatgagagagggaagaatggctggagcgcgtgagagggaagatgatgcgattatcgttcgatttagattgagtggatgggattagatctggggaagcaatcaccgtggaccgttgatcgagtatccaacgcgtggggtttgatctcgcgtaaattgaatccgagccattggtcacgaatccatcggcggaaatcgtgtaccccttcggcttctaatctcgacccttg

SEQ ID NO: 105778 - DNA, 570 bp, Zea Mays
caggtgataaacattgacacccaccttcagtgaactcacaaccttgaaggagaacatggcaagcaataccaaccttggtacttcttcacaaggtcaaaagacagcttatcctccctatcacacagggatcgtgcttcaagcccagcaacaagaggcagaagaaagaaacacagagaagggtgcaacatgttgggtccaagggccctacataagatccaaatggtctcattctaatcactttctccgaaaaagaccttcagctcaagaattatgcacagaatgatgtcatggtgatattgtgtttcataaaaggctttatggtccataatgtcttagtggacacgtgcagtgtggtagatattatttttgcaaaggctttccggcagatgcaagaacctgatgatcggttgcaagaggccatgaatcccctttgtatcttcaagggaaaccaaatagtggtacttggaaaaataagcatgccagtaaccttcggctatgtaaacaacaccagaacaaaagatatcacatttgacatagttgatatgaaatactcatacaacgcaatcatcg

SEQ ID NO: 105779 - DNA, 694 bp, Zea Mays
atttgtttagcctttcaaatctatcattatatccagttattcctgaattggattctatgaaatagagctcggctaatgatattttattttgaaggtttgctgagatggaatcaactcttctgaagatgttgtcacaaaattgcaagcctgatgtgtggacaatgaattctactctcagagcttttggcagtagtggtcagattgagacaatggaaagctgctacgagaagttccaggcctctggtattgtcccaaacattaagacctacaatatcttactcgattcctatggcaaagccaaaatgtatgagaagatgggagctgtgatggaatacatgcagaagtactactattcttggacaatagtcacatacaatgtagtgattgatgcatttggaagggccggagacctcgagcagatggaatatatatttaggctaatgaaatctgagcgtataaagcccaattgtgttacactctgttcagtggttagagcatatggaagagctggggaagttaagaaaataaagacagcgttgagaatcattgagaattctgacataacattggatattgtgttcttcaactgtttggtggatgcatatgggagggtggggtgcttggcagagatgtgggatattcttgatttgatgaaggagcatagatgcaaaccagacaaggtaacctgcactac

SEQ ID NO: 105780 - DNA, 692 bp, Zea Mays
ccggcattcgtcgtggacctgcgcaggcgagatgcggctgcattcgtgcgtgaagtggaggccaaagccatcaagattgttggtaaatatgcgccgaagaccgaaacatggaggagttgggatattcgcgattccaacgtcaggttgaaccatgtattcgaactgaataatttaccttatggtccttacccggtggggattccggcgacaccgttgatcttcgagggaagcaagtgaagccctatgccgacgaaggcccctcaagggagagggctctaggtgcagctattcaaaagagaaaattaggtacaatggatgatgagacgaggctgagggctactaggccttttgttgaggaattgatggaaacgtgcacggttcccagggaattgttgtcttcacccgagctccgggaaacctcttcgcgaatgctgaaggttaccgagggttgatggcctagaaatgatccgataccccgggcgttggcgaggaatttatttacgtcttgattggctcgtgacctaaaatttttccttacagaaggaatattggtgctgttgtgtcgacagtgatggagaaggatcgtcaggatgcgcagcgaaagaaacacagggctcccatcaggctggtggacccacgccgagaagcaaatctagcgcgccccagcgtgaaggctgctgcgtcaggtgtcg

SEQ ID NO: 105781 - DNA, 281 bp, Zea Mays
atgtttctgctactggatctcatccttccctgttggaggttgggcagcaagcagtgaccgatgtgttaacatcttacatctacacatagtaggacgcagtcaaagctagttgtttcttctccaaggatgggcagcagcttaccagtaaggtctccatctcctcatggaaaggttgcacaaccttcaagtcccaacttagggacaaatgagtcatgtcatgtcagtagtttgggtcctggaaagaaatcagctactcaatagaaagtcttgcagtatgttcc

SEQ ID NO: 105782 - DNA, 390 bp, Zea Mays
aaataatccttaataagttcaaaagcatgttgctgctctgccctaagtgaaatcaacattatccttaggctaaagaatgggagtaaaagcatcaactttgttggcaagattagaaatgaatctccataaataatttactttgtcgagaaacttttaaatttcaagcttactagtaggtgctcctatgatctgaatagcccttattcggttgggatcaacctctatgccatgttcctgaatgataaatcctaagaatttccaagccgacatttcaaaggagcagttgcgtgggttcatttttagcccatacctacacatcttatcaaaggctttacgcaaatgggctagatgtgaatcaaatgcagccgatttgactactatatcatcttt

SEQ ID NO: 105783 - DNA, 442 bp, Zea Mays
gataatagctttaggacaaatatgacgaaggatacattggaatgccaaagacatgagttaacacattgcatgtttcttccgtcatttaaccttgatctgaaggttatatggagggaagaaatgataaacaataagacttgtgaatcttttaatcataatagaaagtgcgaataataaaagataaatctaacttatctgtgtatccgtctcaaatattattccttttaatatgataaacgtttacaaccataccttcaacttcacacaaatgagagctcaaagacaatcttagaaactgaacaacgctgagttcttttccttctcccttctaaccgaaaaaggtgtccctatgcatgatattgttcatctatatatatgtgagaggtacaacttcgtatgaaattacaagcatgtctaaaagcttgtacatatgatttacaaa

SEQ ID NO: 105784 - DNA, 321 bp, Zea Mays
tttttattctcctccactgttctctttatgttttctgctctctttggttagccgtacaaggaagatttgatgccgtcgaatagaacttcgttgaaacgcaacgtcgcctggataaactagagaaggaaaacatcacctgtcgaatacggtggatgtcgtaagcatgcaatctggggttaccttttgcgcctgggtccgaatcgcaaatctcccgctttgagagcttcacgggtcgagtctgggagctcaaaatcgaatttttctgctggggggatctgccatgccttcacagttgctatgtcccattttgaaggttgaatt

SEQ ID NO: 105785 - DNA, 387 bp, Zea Mays
gtcaaaagaatttgttattaacaaggaagaggtgttagtgtaccatgggtatgcagaacactgaatttatttttacagccatagtgaacactctcttagttgaccttttggtttgaaataaaccactatagaacattgatttttcttttacagtcatagtgaacacaagataccttaagcacaattataacagactgtcccatccatgtatcgaggaaggaagtttttctgatttgttgcttaattaccacttttatatacttatggaggtttcatcaccttgctctgttgaagttatagaattttcagcaaggatatggagtacaccccctacacaacaagctcctatgtatctcacatctcgctgctcgaggaagttcttggctg

SEQ ID NO: 105786 - DNA, 489 bp, Zea Mays
gaatgtacaatcaacagatgatccagctcatattgacatttctgaaagtgaggttcatcaacttttttatagtgacagtgaggtggaagaggatgatgcagatttgattgaaccagttgggacacctgttgaaggaaagactaacaaaaaagctagaggcacaagactgaaagcctcgctgatggatagaacattaggaggtagtgatgatgaagacactgatggttgtgtgacaatgaatggaaccatatgatgtgttctctttcatttgttatctgtgatgcttatgtgacaaggatcaactaaatgattaactaaaaccatatacacaaatttagacacaaacatctgaaattcagccttaaattcagataaacaaaggttctgaaatagtacataggttccacatacatttaaccacctggtacacattgtgcactaaaatgcaaacacacacacaagcaatgatcttcaataactcaattattt

SEQ ID NO: 105787 - DNA, 293 bp, Zea Mays
gtgctatttggtagctctcatcctctgcatctttctgggccttcaaagccttgcttaaaatcaagccttggaaaactaagagtgaacacgtatgagaccaggcgagtgtgcaagccccctcgggctggctactacatcactcgcattcatgtcagggttatggatgcaggtgataaagggttcaggactctgtcagctcatgagtctctgacgccgttatccacctacgctgcttcggtcagcgatgctgctaggcgaactctgtggtccctcagccacacctaccggcagca

SEQ ID NO: 105788 - DNA, 573 bp, Zea Mays
cacctaggaggggggctataagccagacgtcatgtgcttctcctcctattccacctctctagacttccagttgtgggcaaggagagatacacgaggtttggagcttggtggctgccaccgtcgcacgtccatcggagccactccgtgatcgacatgctatgggatgacttcatcgcaactccattgcaggtaagaaactcccagaaccgtcgctgatcacccgtgtggtgtggtacactaatagcttggctagggaccagaatttctcaccagaattggggccttccaccgcgaggatgttccacgccatggcagagagtccgtatcgatctccatggtagaaagaggtatgcataggttagttgtcgtcttcacatcctttagcacgtgtcggatttggggaaatgcattagagcctcgggttatggacatcggccatggcgccgccgtgttgggcagggtccaccaccgttgccagccatgaggaaggtgaggctctctccaccattgatctggtgatcaacgatagcgatcagaatgggggctgatgcttgggcactcttgttggatggc

SEQ ID NO: 105789 - DNA, 494 bp, Zea Mays
agatcataaaagtgctctaaaaattctgccatcttccttgcgttttcccaatctatctcatcaggatgaccaaaaccaccccttccttcagataggtccataacataactcatgtcttcgtctgctaattttgtgaacaccttctcatacacaattgcagatttaagcataatatacgtggagttccatctagttggacatcagcctttagatatggattgttggttagcttctcttcctctataatttccttaaatttgaccattcttgaaccacaatttctaatgtacttcacagctgccctaacacgcttcaccgataagtccacttcttttaggccatcatgcacaattagattcacgatgtgagctgcacatctcatgtgcaagtacttgccactagctagattagtggtactcaattgcctcctcaaatagctaataccggtatcattagcacttgcattatcaacagttattgtcatcactctctcc

SEQ ID NO: 105790 - DNA, 394 bp, Zea Mays
gggccatcctggaaagttgatgagcagccaattgaacacgctgattctctgggcatccgatggcttctaacttccttttaatcgtgcgcagccagtcatcaacatcgaggggattgctggatccaacgaatgtcggaggcttcagcctcagaaaatctcccatcctgtcctgtggtcttccaccattcgggcgctaattctccagacttctagtgaggacctcaatgagtcgggtttggttggctagaacttgggctaaatctaatggcagctccggaggtgcggggaggtgggtctcactcccttctccaccagcttctccttcagctcctaggggaaaccctgctccaatcccagaggcggtaggcgtggttttatacgaagccatctgcca

SEQ ID NO: 105791 - DNA, 320 bp, Zea Mays
gcctgatttagttaaagaaatggaagaaaaggtccaccgcataatacataacttgagagaagctcaagcacgatagaagaattatgcggataaacgacgtcgacaattgatttttcaagttggagatcatatgtacttgaaagtaccatcgatgaagggtgttagtcgattcggggttaaaggaaagttagcaccccaatacattggcccgttccctattcttgaatgatgtggtcaggttgtgtatagactttggatgccagaatcattgtttgttgtgcataatgtcttccacgtatcccaattgaaaaaatgtcttc

SEQ ID NO: 105792 - DNA, 366 bp, Zea Mays
tcgtcatcattttcgatcataattctaagcccctccctagatgtcgcacgcgaaacagcaacatagagctggccatatgtaaatactggtttctttaggtagaggcaatagtggaaagcgtctgtccttggcttttatttattgtcactggtaggatgcataataggaattgtgtcctctgcaaagtgaaaggccattttacgttcgttgtgttcagcgcaatccgtggaatcaatacctcatcgccaatcctggatcatgtgagtattatgcatcgcagaacacgctgacctagctgggaaataagcagccttgtcccattacagaggcccatagtttggttcagattgcgaagcagcatcacca

SEQ ID NO: 105793 - DNA, 468 bp, Zea Mays
ttgctaacaaaggtgttttgatgcagtgatgtcctgcaaaacattcgatgtaatatgaattctatgtgtatgtgatggttatgttagaacttgaatattttgcgagcagggcgccagaacatgctcctagtgccaacaagtaaaatgttattttttcctggagtgctaattgttttgctgttagggtatagcaatcaccttgaacaattgtgaaagcaagtgtgccatgctggttttaaggcgttttccgacttaagccgatcgcctggttggtagggcatagtggtcgctctatgatatgtagtcgtgggcatatcacatcgtattaagtcattgcctacttaaggcgattgctccgttagcagggtatagtggtcaccccaagtcgagtaagcatgagcatgtcgcaccgtcttaagtcatcgccgacttaaggcgattgctccattagcagggtatagtggtcac

SEQ ID NO: 105794 - DNA, 354 bp, Zea Mays
ccaaaatccgacgcatatccactatcccatgtttgtatcggatattcgaactatactattggtatctaaatccaaaatctaaatatggtgtggatatctaaactatccgaccagataattgatctcttcggacaatcggacaatattcacaccgtttacacaccctatgtagatgtaggtctcattcgatttttttgtcctaactctttgtgtgggctagtggacaaagaccgacgatgggcctgaattggatgggtcgctagatttcggctcctgcagggacatcgtctccatcgtccaatcctgtccatcggccagcgctcatgcttatccatgttgggagtggagccaccg

SEQ ID NO: 105795 - DNA, 443 bp, Zea Mays
gtgctgctggttcttggcccccttctctccggggttaagattaaccctcatctaggtggtacaggccattagggcttttgagccaaaacgtcacgggctagggtgtttgcgtactatgccgtgacacttggctaattctttagtagtcagaccatcaggtggccagtgaacgttattttcttcagattgctagcccttggtttgctttgacaaccctttcttctcccccctttttgtgtgctcatcaatgcttgagttagatgctcctatcctttgcgactgtgtggaccacgttgcgtatcgttcgtccgagcccatgcatggcgacggttgggaggagcgtctcctcaacgttctgattgagattcgcagcactatacaacatgacgtccaccatggcatggcatgtctgttattgctctagccatcaatcttctagtcag

SEQ ID NO: 105796 - DNA, 1213 bp, Zea Mays
gacaatagtagtgtccaatctagtgacccaactactaagttcaaatgtatcaacctacctcagaacttgtgtaggactgtcttgtatcattgcataactttgtctcaatggattcccttaggtcctcttgatatatagctttttcaatatccaagactgttaaggcataactctgtccaatcacaaacctatcacaaaaacacaacttttgtttacattgccataataggaactaagaataatgcaattatgcttttagcttaacatctcttgtgggggtaatcttgcctccccactaaaaatgataaagtccaagttgagaaattcatatatagttggagtttaacgttgccaatccaactatagatttaggaaatcattggccatgaaactactaatattgatcaatttaatccattaagatggctttagatatggttttgctaatgtggttgacatgtaagtgtgtgtcaaaaatggccttaccaacaatatttctaggtgactttagtgattgaatgccaacacggctagctaaatgggtgtgttaaccatgtgatttgtaggatcataatagggatgaagttaaaagagaagtcacaaagaattagcatgaatgaagctaaacaagtttaaatgagagtgtaacaccaaatattcttataagttataaaatattctcatcacagtgctaacgaaataccttagcaatggatgctagaattgaagaacatgtgaaaaaggacccattgaagtatttaggacaagaatttaagaggagaacagatgatattattcgattaaccggcaataaacaaaatatttgtatgagtgtttaatagtagtattcgagaagcagaagcctccttgaatagtccaagtatggataagtgtgcatgttagactaacaccaaacttgttttatagagatgcatgcatggtagaatctccactcatttggactcataagttagtccatctataattgaagttgaatgagacttttgtgaatggtctaatgttagctccattttcttattgtgaaaaaataatgaactagaagattttaggttcaggataaacagagaacctaatgattcaaaaatgttagattcatccaacaactactgaggctatctccaacagctctcctatcccattccatatctcatctccttttcaaactctactacaatacaaaatactgttttgc

SEQ ID NO: 105797 - DNA, 350 bp, Zea Mays
gaaaaaattaatgaatctatggcacatgcttgacatgatgagataggaaatgaatctactgtgccgtcgtgcttgacacgagatagtagtactttaataaatctactgtgtcgccgtgcttgacatgagataggaatactttaatgaatctacagggcgccagaacactgcgggcgtcaaggctcggcaggggcgacgacagaaatgtgcacgacgagaaatatgcgtggaaagtggagcgagcgtacgggaggagggagatggcgaggcatgcagactgggtaatacctagcaacttcgatgggatggcgagtaggaaacagtagcgagaaaggagagtctgttggata

SEQ ID NO: 105798 - DNA, 330 bp, Zea Mays
gaaatcaaactcgtgaccctttggaaaaaggagcacatctccattgcactagtgaggattatatgctctattttcggtatattttctaataaacttttatttcattagtttattggcaaaaatcttaggagtgcgtatacaaggtccattgtgtcacaacccaccgtataatctagaacacactcattgcctaacatgttttgtttgcttatatctaccgatgtcattaattcatattgtttgtatttagtatacttgttattttaaaatccatgcaagttgcatgcttcacacgtgaatactagctaggatgagacaagaaaattcttt

SEQ ID NO: 105799 - DNA, 1038 bp, Zea Mays
cttcgctttgtcgttaaatttcgccatcactctagcagaaaatttgggtccggttgcttgcgctgccaggctggcgtttggagcgagggaatttaatgtcgttttggttctatccacctttgtgatttgattgactcctgaagccgtaatcccatgctaatggtcgatctaagctctgcccacgatgaatacttcatatattgcagctttataagttacaattgcaaactcctttttcggttttcgaaaatgatgttcagtagtttcagtgccgatgccaaaactgactgaactctgtgtcgatctgttaccttgaaagcttaagcagctggtgtccctgcaaccgcctctgggaatattctgttgaatatcttaggtgttgatgcttgtggtgctggtactctggtagtaattcgatgacaccagacatgagttataactacctgactataagagtagggattattttctgttacctatgactatccatgatcgtttagttcattccagttcagctggactcttatgttggatctgtgctgggcactctgtaggcccgtactgaatgtagtagatacatgcacaggtttaaaatgagtagcatgtctttttttatactgtaccaccctcagggtatgatttccatttctgtatgatatccatgcaaaagctggtctgcatgtggaatctcttttattttgtatgcacacaccataatgataaatattcccactaataagtgcatgttttcttgatttcttctctgtcaattgactatctattgctatctgctgtcaaaagttagattaaatgttagcaacctcgttagggttttgggttagtcctcatgtaattaactgtatacccttgtgtaatgtgcttggcccaactactttgtctatattaatacatttccagccctgcttagggtttcccacattctaacctggtaccagagataggtttagttctctctcccctctctcccacccacagccgccggtcacctcttgctcagcccgccggccacctctgctc

SEQ ID NO: 105800 - DNA, 463 bp, Zea Mays
attcaaaatgctttataacataacctatgtgaaattgtgtggagtttttgaactatagtcaggaccaaccaagaaaagacagactacatgttcttggacgatgtagactatcttgtagaagctcacgtgtaatagatcgattttgacatacgtatacatcacatgcatccatacgcaccatacatctctcgcatgaagcatcatgtatactcatactgcatccatacatcatataggatcacaggaggaagtaccagtggggattgttttagagctgccaggaattcttgtggaagagggtggacctgaagctcaagcccaggagtgtcctgaccaccgccccaattccttcgaggaaggcgagccccggcatctaacttcctatatttgcaatattctaatttattcactgcctacctatattgttgcattaggcataggagttgattgaatccaattgctg

SEQ ID NO: 105801 - DNA, 468 bp, Zea Mays
ctggtgttccataggaatcatccttgtgttggttccaagggcacttctaatgacgagatgaaagcagacatatccatcaatgtgacagaggatagaagcattaacagttttctatttctgatgtccatcaacatcggcacaccacctgttatgaaccttgtcgggatcaacacatgatcgacactttcttgggtacagtgccagccatgccagccacattgccatgaacaagctgccaaggcgggtcagatctttgaccctagtagatcaaccacatttcatcgtgtgggctgcaaatcaacagaatgccttgtagtcaaggattccctacgggctgtacatgaccgtcatgaagacaactgatgtgggagtcaaaatattggggaatcggccgactaggtccttcagaactaccttcgacattcaaggcatgatctttggctttcgatattcagcatgctgattacg

SEQ ID NO: 105802 - DNA, 544 bp, Zea Mays
ggtgactgacgtgactgaatgtcatgagtgcactctacacatgttgaacatcacaactttgtagaccaagtatgccacctttctagataagcgtgacgagttaagatctaggtctagcttcttaggtgcgtgtattgcttggcctggcttgcagactaagctagaagagggagatgctaggatagccttgcttgagaaggctaactcagtgagtgtcccttgtacctgcatagtgtgcacttgtgagggtttgcagtttgctcttgagtcctacagacatgacaagtcctggatcgaggaagaacacacataccttcggttagtcttgagctggatgtcgtgcagtgagccccagttgggcatggttgttagtcagttcaagaggtgaagtggtggaccgaggttaggctttgctgctaaggatgggagtgttgtgtgttttggaaatgttggtgagtggagtggattgaaaccatcaaagaaaccttcagccactcccaagctcatcaaaaccaccccacctaagctaccacccctgtgagag

SEQ ID NO: 105803 - DNA, 433 bp, Zea Mays
aagggattggtatagattttattactggattgcctcgcacccagaaaggatatgactatatatgggtgattgtggatagattgactaaagtggctcacttcattccggtaaagactatttataaaggatctcagctagcagagttatctatggctcggatggtgtctctacacggtataccgaagaagatcattttggatagaggatcacagtttacctctagattttggaaaagttttcataagaatatggatacgaagttgaattttagttcggcctacctcagactgaaaggactaatcaagtattggaaaacatgttgagaacttgtgcccttcagcatggtagtagttgggacaagagtctaccttatgctgagttctcatataatagttactaggccagtctaaaagatgtcaccgttcgagactct

SEQ ID NO: 105804 - DNA, 353 bp, Zea Mays
accaaatgtgagacaccagatacaattgagatagttcctatttctgtggtgatgaaagagtcgggtatcattgagccgaaggtcagtgaagaagtaggtgttatagaaacgagtggttccgaagccgaagctagctgcgacaaaaaggtcctagtattcttcgttcaaacaaactgatccacattgagttttgtgggtctattgtaaaatccgaagaccttgatgtgttaaaaaggctttggtatattggcatgaaagaatacgatatgatcagatttgctggtggtgacaccgttttggagatgaagaaagacgaagtagttgtgtttagaatcttcttctgggcagggctt

SEQ ID NO: 105805 - DNA, 578 bp, Zea Mays
ctaaaaaaatctaaacccacagcaggctgctaacaaattaatcctaaatttctaaaacagtctaacctgcacttttccggtccttcagccacgcgcaagcagcgtgtgagacaaaaaaaaatagtgggaaacaaccagatggacgtgtgctgagcaaattgggaaatgaatgtgcgacaaagaaatttgatggagaaaaagctatgtattcggtacgccaagatagtggggggataaaaagaagagctattggagggctcattttgcactttttgattgcacgtataaaagacatcaacctacgacccactgcgtttatgcatagggctagctgtgtatacacagcaaaactacgaagccatcgattacagaaaataaacagatcgtctgactcactcgactaaaccgtacgactattgctgtgtcgtcgtcgtaagtatggctgcagccggtggagaaggcgataacggcgagaaatcggggttccggtgcctagacgcggcgaggtacgtggctgccgccgtggtaatcgtgctgattgtcgccgtcgtcgtcaacgccatcaaggtagtcgcccg

SEQ ID NO: 105806 - DNA, 338 bp, Zea Mays
tgatcacaaatttagtttggctaacttcattcagcagtaaaaaaatgaactatccaggcactgcaagggaatattatcataattccttacaatgtgtgcgatgttgacaggaccaaacaactatatgaattatgtttactatgcatattttgtgcactaacacgaatatattttctgcactttcttttgaagacaccagcgggctagtccaacagaatgcactactaagaaatcaaactcacatgctctcagctgttcttgaccagaggacatgcaaccacatgtaagtgcgagacgacactgtttttttaccgcaaaattttgattgttcgatctgt

SEQ ID NO: 105807 - DNA, 301 bp, Zea Mays
cattgaggaggatttagcttgaaagtagcagtcaaatgcttgggggctcaatcaacaagctattcaggaagaaacattttatcctcgtcgttcaattactcaagcattaatctacagaggaaagtaattttccaatatctgcatgctccaaacaagattgaacaacattaagaaaattacaactgaaagagtaattggagacacctcaacgtgtggctcaagtgaagggtaggtttcaaactttcaataaagcatcattcagaccaatttatgatagaagaaaagatttgatggaactaag

SEQ ID NO: 105808 - DNA, 326 bp, Zea Mays
ccatccggcagtggaattcaccctatgttttacgtttcacaactcaaaccaatggtggttcttgggtgcaagtcagtccttccttccccgatctttcactaggattacaaattccagaggctatcctagactccaaactgacctggcatgggaacaaagtggttcagcaagttttgattcagtggtcaggatggtcgacaactctagctaccttggaagtcactcggtctagggactagggagcagcagtggcatgtctatgtttgttattggtatggtcccctgacctagttccctgactagaccagtctcggtcttgatcacct

SEQ ID NO: 105809 - DNA, 409 bp, Zea Mays
cgagcccatggccccggcgagatccctgctagccggtctcctctccctctgttctctgctccgtccgtggaagaagaagctctgctgtgtttgtgcgattgggaagaaggagatgagaagaagccaaccgtgcaattgggatttggggagatgctagccacatttgatcccactcattttgactagttgtggctgagatccatgtggcccttcgtgtggcttcgctttgaccaatacaatcgggccacataatttaaattcgagagatgatatctattcaatataaattgcgtcgtaaacccgtcacgactcgttccagtcgcgttaacttcgtaataacttcaatttcgtattagtaacattattttggtatgtcgcggatcttaagtaattaataatttgttcattc

SEQ ID NO: 105810 - DNA, 334 bp, Zea Mays
gaaatcccacatcaccacaaagcttgtagctaaattagacattaacatattcttggtcctcggagccagaagagccatatgtcttgaccactagactactagtgatgataatttgtgatagaaatatgaagatcttgtagagacctgttgtatcctctctactcctgataatttcttcgtacgagagcagtactatctgttgttgaagatggatcctaggcggataccagtattgtttcgctcttgccaagcagttatcatcatttgcttcatcaaaagctagttatatggtgatttttcccagataaaattgattcttggccttgtctgttct

SEQ ID NO: 105811 - DNA, 429 bp, Zea Mays
ttcttggcagacctaactgtcttgccatccaaagggattgatgtgatcttagggatggattggttaactaaacacaagggtatcatcagttgtgcaagcaagacagtcctcctcaccgaccaccagggaaagtcagtctcttgtcaggcccagccactcgccaatgacccaatgatgttcaatctaacagcagaaagcatatcagtggtcgaagaattcatggatgtgcttctagaagaattaccaggaatgccaccagaaagagaagtggaattctacatagatctgatccctggaacggcacccatcgcaaagagaccataccgcatggctcctaccgagttagcagaactgaagttccaaatcgcagatctccaacaaaaaggatacattcgtcccagctcatccccttggggagcaccagtcctg

SEQ ID NO: 105812 - DNA, 793 bp, Zea Mays
gtcgacggtgagctcgtcgtacccacttggattgcggctggccgggatgatcctcaccggcgttagccgcttaacgatcatgtgccacgcatcttggaagcttagcacgtcgcagtgaacctgtgtggcaagcccgtccatcaccagaggacttgccacggtgaaagccacgaatcccttgcgccagtaaccttccttctcttcggccgctagcacgccattccaaaattaggagccaccgcccttggactctataaattgagcacaccactagctccattaggtaatcatgaagccagagtacccgctccagcctccgattagccaccatagctctctaattcctcttttcccccaaatcgggtttccgcgcctccgtgaacgccgcgccgtggccagccttctgcaggtccgttcacgccctcctcgctctcgtttcagcaccctggtgtgctaaggatgctcatcgacctagccaattgaactaaaccacgttagatcaccgggaacactgttcgtgccatcaccgtggacagagagattgtgagctagaactttgtaattgattaaggggttatggtcgtaatgggtggaattaggtgtcaaccacacctgagcaccggtcattgcgttatccggccgttacaggctcgccggagccactgctccgccgtccatggtcagggacctcaacttgcgaaggaatagaaagggaggggcctcgacgcaaatgtcagtgacacatagaaatagtgtgcaggactcttaaccagtttttcaaatggccagggtc

SEQ ID NO: 105813 - DNA, 384 bp, Zea Mays
attttgtgtcttcgccttggtgacgtgcaggcatttggtgtgggaggacggttgctgcggccacgtgtcatgctccgccgggtctgaggctcctgaagctgggtgcgagctgggcaccagtgtgtgcacgcttgttaggaaggtcatgacctcgcaaattcatgttgttggtgaggggtaagcaggaattttgctttgcttgctacaatgttcttagctaataagtgcttcggcgttttggagaagttcaagctttactgatgtatgtatgctatgcttgtattcttcagtaccattggccgtgctgctttcaccggaaatcatcaatggattgtccatgatcctgccaatgatcacaatctcagacccgaggtacaattcctt

SEQ ID NO: 105814 - DNA, 373 bp, Zea Mays
ggaaggtggcatacaaccggaaacagatcggggcaggtgtttgggtcagtcctcgcggtctcgctgaccatgtccctggcatagctctgtagtgttcctcccctcctacaagtcattgtctaaccagatcagtggggtcttgaagattggaggagtgccatgggaacagacagacagaaggtgaacggatgggcgggaggtgaaagcacatgaggacgagatggcggtcgtggcacccaattcatgtgtcttgagaaacatggagacatgaagcaagctagacttgccagctaggcacggtgcgaacaattgggccagggatgcaaattttgttagttggccagggatcatgaaaccacccagatagaccaac

SEQ ID NO: 105815 - DNA, 313 bp, Zea Mays
gttgcttggtcttcagtacaaagtagtatacaaaaaggggtccgacaattcagtggccgatgccttgtcccggcgccctcatgaccaaatggaactttatacattgtccttggccactccagtttggatgttgttagcaccggttacacggagcagaactgaggaagggaatggggtttcgtggagaagaagaacaggaggtggaggaataaggataggcttcgatagatattttcttcttcgataaccattcctccacgtttcagcagtataagtatttacttattacatgggcagcactggccctcatttc

SEQ ID NO: 105816 - DNA, 563 bp, Zea Mays
cagaaaattactcaatgagagatagtttttcatccattttgttttttttttgaaagggagaggcaaaagacttgccgctccaatatattagaaggtgtaggactaacaggaaattacaagaaaccaagacgacttacaagactagaagcgaactcctgaacaaaattactaagcggacctactaagcgtacctactagccagccaggccatggaaacaaccaactaactctttgaccactagcgcgacctgctccgctgatttaagctgactgtgaaagattctattgttcctctctaaccaaatgctccaccaaaaataaatgataaggccatcaaaggatcttctccaaggcttgttgcacctacttctcaaatttctccaccagtcgtacaatgaatcagagccatagatccccttaaaggacgaaagattcgcccaagccaagattctgtcccacacctccctgctgaaggggcagtccttgcagagatgaaccgtcgtttcaaaggtcgaattacagagacaacaagaaggattgtgaggccatccccttttctgaag

SEQ ID NO: 105817 - DNA, 300 bp, Zea Mays
gctaaacataatatagctacacgcattgctccagcccactagcccacgacggcccaaacgctttgatgcttcgcttcctcggtcttagtccagcgcagcccattagcttcggtagttgatccgacacattgtctgacactatttctctatttacataacacatttatatttgtacaattactttgatggtcttctattcctagaattgttatattagagtaggagtaaaatacatggcccttaaacttagcacgttgtgttacctgggtcactaaattcataaaactagcaaaacatatc

SEQ ID NO: 105818 - DNA, 1262 bp, Zea Mays
gtttcttggtcacgaccagctaaaacaaaagttccattaaagagtgtttccacgtggtagaacctcctcagggaatataagattttcatgaggttgatcgtgagctgacatccacgcacgaataccctcgtttaaaagaatattttttggtacagaaagtcttaaattcaagatcatccactgcacggatttcctgggaaacgaagtcatatgcacgtggttcagagctagaccaactacgctaatagcacttatccataaaccggtgacgagtacaaatagcataaagaaatgtaaccatcgtttattgcaaaaagcaacaccaaatatttgggaccaaaagcggttagcagtgaccattgaataagtttcttcagcttgagatgggttaaagcacgaaaggtatatgcaccatcgccatctttgaatagaatgttttctacggtatcctcatggatagcgcatagcagagctgcgcctaatactctggcaactcccatcgtctgaaatgggttcaacgtccaattatgaaatccttggaagggaaggatgaaccgaaatataactactatgccaaaactcggtgtaaagaaccaaccagattgtcccagtggataaataaggtagggaaacaaaatagcgattggaccaggagaatgaaattacattataagtccacaattgaacaaaccaagcaagttcaaattgacatagcatgaaatccattagtgcaaaagctccatggagcgcgacaaaagtccaaagaccacctaatttacaccgatgagtaaaatctcccaatgtttccagaccccatagtagcaacaaagagtggctaaattattgacatgtgtggaaaccgtcgcagttaagaaattgcaacgttccaaataggaactagccaatccatggatataccaagaagttacaaaagtagtccttgtaaaccaaccccctaaagcgaagtaagcacaaggaaagagcaataagccggaccatcctacaaaaacgaaatggtccctttgtaaccagtcgtccataatatcaaatagattgttttcttctttagtaactctaccaacggctatagtcatagtgatcctcctattcaattacttcaacccttttcgagcacctcgtattacttctagggcatacgatagtttaatatctgtggacggtttctttctcgttcaatgccctttttcagttgactcggatgtagaaatttcgtatttttatctatggggtcagaaccaagg

SEQ ID NO: 105819 - DNA, 732 bp, Zea Mays
tggacttgcgaaatacgaaagtattcacacgttgcttttacaatcttttttagtggttaaagacctccttactacaatgttcgactagaagggggatatatctgcacccaacctgcttgtggctagagctacttctcgttccgcttttatattagctctttgagctttgcactctttattgtaatattaatgtaccagactttgttccatctgatgaaataaatgtggttactagtaattgtatcacattttggtcccaaaggatggggacctttcactcggtgttatcccttacgtagccacataccaaagttggttgttcgaaggggtactcaagatgtagtttgatgggtgggtgtaaggtcccttcagggaagacaattgagttctaggcaaaatcactctaataaaagacataacatgctcggaggagtttggaacttggttgcctaacataattattccaatatgcatacgaagagaattgagttctaaatgaaagcactccaataaaaggcatgacatgccacaaggactttggaacttggtcgactacgacgattatcacaatatgggtgctaagagagttgagttctagttccaaccactctaataaaatgcataacatgtttagaggagtctagaattcggtcatctatgacgtttatcctaatttgggcgccaatgtgaagctaagctaaacagagactcgaccctaagataatacccaac

SEQ ID NO: 105820 - DNA, 579 bp, Zea Mays
cgcgtggattcacgccaccgcggtgattcatgctcggcgcgactggataacgctgagggagtatgaaatatcccccggtggatgaactccagccaatgttcactccggctgtcgtgtccgcttagccccggtcgctttggatctaccctcgccagagttagacacctcacggccttgtgccacgtgcctcggcactttaaccacaccgcagtgactcatgatagcccatccggtgatcgccggtgagcttgccacggtaattgccaccaatcgcgtacgccagtacccctcctctctggccgccgtgcgtctctttcaaattcaccggccaccgctcaagagccctataaattgagcacaccctcgactccgttaggtattctagcattcaatccacccgctcgtgcctccaattactcaccagagcccgcgaattgctcagttcccccaaatctattttccgccatcgtgatcaagctctcaccgtggtcagtgcaatactggtccggtcttgccctctactctcttgtttcggcactcctacataccactgatgctcctcaacccattcaattaaac

SEQ ID NO: 105821 - DNA, 539 bp, Zea Mays
ctgcatattagagagaaaaactgagcacgagaagagagcagaggaaatgattatgactcaggtgacaaatacctagaaacctcacgaggaagaatctaggcaggacaggagatgggctcaagggcaagcgaggtcactgaaatgacagaagaggtgagcacgtattagtcacatagtcataagtatatgaaatatgaataaatacatacacagagaattatgacacagaaaacgagtgatttggcgatagagaggtcaaacgactcgaaaacggcgtttcaacgaggaatagtgccataggaggtttgaaattggaattgaggcatgaaatgacttggaattgagccaatacttcacgaataggtttatatgggtaaatatgagtgaagtgtgcgcttggtttgattttaggcgaagaaagtggaatttgggcacttggctcggaatcgatcgctagaaatggatatttgtggaaatttggagcctggggtatcggattggcgtgaaatttggcaaatatgttactggaggtatcatga

SEQ ID NO: 105822 - DNA, 338 bp, Zea Mays
gtcgtttcatagcaggacgaacatctgttggtggcaataaaggagcatctagatagccctgtaatagcataaaaacattaggacataaaaacatcttatgtcctaaaccctaaatattgaagatttcaatagaagtgacactctgcaaaagagtaaatatgtttatctgtgcctatgcagttagatggtatgaactgtatttgccagaggtccaatgctattaatatgtttatatgtgctggtaaatgtgactaggacccatcatctattatgtgcggcactaagttcatgagtagacctataccatcgtagtgtgtgttgctggcattggaattgtt

SEQ ID NO: 105823 - DNA, 564 bp, Zea Mays
tgaggctaagcatgagcagcatctctgtctcgttctgggtgccctaagggagaatcagttctatagcaagttgaagaagtgtgcattttggccgtccgaagtggctttcctggggcatgtgattaatcagtagggcattgcggttgatcccaagaatgttgcggctgtggtggagtggaagagaccctctagtgtctctgaaattcgaagtttcttggggctcactggatattatcggtgtttcgtaccaaatttttccagcattgctaagcctttgactagacttttggagaagggtgttctcttcgtctggtccagcgattgcgaggtcagttatcaggcattgaagagcaagttggtggacgcccctatcctagctttgcctgacaacggtaagcgtttcacggtttatacggatgcttcgcgaattggacttggctgtgtgttgatacaggaaggcagagtgattgtttatggctcaaagcagttgaggaagcatgaggggaattatccaactcatgatctcgaattggcagcggtggtttttgctctaaagtcatggag

SEQ ID NO: 105824 - DNA, 618 bp, Zea Mays
aacttggaatagatagagagtatttaaatcattcatacggctttctctatttgatgacaaattaatgtgcgcccctagctaataaaaagttgaacgattagcgataaaattgattatattccccaacttctaccatacaaagtaaaaaactgacagtgataacggtttagaatcggtggttgtgtagtcgtgaatcaaacgtgctcaaatatcgtaaattaaattttcttttcgtcctcttcaccccatcctcaccgtctctctagagagttatgagagggctagggtttggggtcaaggcctttctaacttattaaggaaaaaagtaggacaatgttgcacactgtaggaatcgaacacacaacctgctgatttaaacactaaagcataacgccgcactacatatgcattagtaattacaaaggaatatataaaggttttaaaagttgaggtatgatactaagccataacgggtcctccaccactgcttgcaaggctagggcaagggcataatgacatcatgtcatagcgaagctagtgtggtagttgtaaatggggatgctctaacactaaaggcgacagacaccaatgagtggaaggcattgtgtgggtagagat

SEQ ID NO: 105825 - DNA, 432 bp, Zea Mays
gttgaatatcagcgccccttttggatatttcaatttttgcgcatagaactgagcttctcgtttttctttttcggtcagatttttacccgaagcatgacgtaagacatagttaggaacttcggaagatgcttcgggaataggtgtggcggttttttcagataaaatttcttctgcagattctttttcaatttccaagaattccctcttggtaggctctgaaagctcagtttcagtttctgcttcacttttggcagcttcggcctcaatttgtgtctttggaacttcggcagttatcttcaaagtagagcttgaagattttattgtttccagcacatctatcacgttaaccattctttttctcttgggagttgttgtaaggtctttttgtgccctcggcattggcattagcacctcaactcttgctgaaggact

SEQ ID NO: 105826 - DNA, 280 bp, Zea Mays
tcaaaggaaaatggccaccttcctagatctcacatatataagggctgtcagcacggcgctggcagtagaagctaagaacacaggccaaggaaaatcgaaaggatttggaggtgacaggtccaatcaggggcctgaaaagcgaccaaggttggtaatccgacctttcaatcaaaaccgttcttcatctcgtccaccctcctacccatttaaacagcctatcttcatccaccctgccactgcccccacttcaataagtcagccgagtgcccctggtgctcgt

SEQ ID NO: 105827 - DNA, 417 bp, Zea Mays
atcttgcattggcaaagtttgcttataacaacatctaccaggctagcatcaagatggcaccatttgaggctttatatggcaggcgttgtatctcccctctatgctgggagactttgggagagagctccctggttggtcctgattgggtttagcagacttctgagaaggttcaggaaattcgtcagaatattttggccgctcagagccgtcagaagagttatgctgatgtgaggaggcgggatttggaatttgcagtgggtgaccaagtccttctcagggtatcacctactaaaggagttgttcggtacggtgtcaccagaaagcttagcccgagatacattggaccattcactatcttggcccgggtgggcaacttggcttatcacttgcaattgtcggactccatggcaggggtac

SEQ ID NO: 105828 - DNA, 516 bp, Zea Mays
gctatgagcaattcttttttgtctttaaattctccagttattttctcgaatattatttttttgctatgatatcttgagagtgcacaggacccaaatttatattcaatatgattgtaaggaatatatggatgccaataatgtgctgtaacgttgcgctgctagcctgctactttgagatgaacttccgctcatgtgtatgttcatgagttcatgaccatgaccaatctgggttttcataatgatgtttttgaagcacatgaaagtcaataacaccagtgtctaagaaatttccatgcatttttgtttcaggcactaggaacttaaacttgaattgaaatccacatcacggcatgaatgttttagaattgaaacactgaggtctaaataacatgctagccattttcattgtttttttctaactccaaggcaataagatgattgctttagtcatttcaattctagcataatgaaatacgtgtggtattccttggattattttggatgtttccaaggaaa

SEQ ID NO: 105829 - DNA, 2004 bp, Zea Mays
tgccgagctggtcctgttcctccattatatcccttgtgaccacctcaagcatatcttggaacaaaatgactacctgacccaagtcttcctccttgtttttttgctgcactcaagaaatcgacaaagttatgaggtatccaccatgaacatgacctaaaaggctaaaacaacgatgacacgatttataccagtaattcaagtaattcaacaaacttcttgctcagtgcaggaaggttcctcatattgagatcctttatcagagtttcatcttctatatgctgatccacaactgcgaaaatctgtgctaggacactgaaataggcatcacatggttattcagaaggaaatccaagcggctcaaatggacttagtcaaacagatgttacacaccaagggttaaatacccattcaaaatgaactcagtttatattatcttcatgctttcacactaaaatgcatcacttatgttttgagcccttgatttggggtggtgtgttcagagtagaattggtactattttaggtttagtgtgcctgtgccatattgcttcaattccagagacgacaaacaaccacgtgaccggggcccatatttccctaataaataacaatcttgggaagagaagacatactctttctcccgctgaccaaacactaaagtattgatgatgttcttgaatgaagcatagcattctctgatagcaaaggaaaagtatggatctgattttatcctcttcgtcagatcacggtcttttccgccactgtctgctgccatatccagtgctattgggatctacaatccagcagataaacaataaactgctgaatccacaaatatagtaagtagaaaaaatacagaaagagcaagatgagcaaccttgctagcaagtaagaaaggtggccattgaaatatatcgagctcacggtctttacagtatggaaccagtagcagatccatctccctattgtctatgaggtcttcttcacggaaacttgtaataatgacattccacatttgagcaaaccttgcagctcttttctctttctgtctttcgtcaccagaagcctaaaaaactgtgtcagatcaaatagatagatactcaattgaactgccattgatctactcataacgcccaaccttacaatataaacaaataccttgggtctacttgaaaaggcagcacgaagacctttactcttatttgcatcagaaggaatcaagcgttcattgaaggcctcgggcaaagattcaaagcgagatctcaacattcctaatgtccgtatctgatattatggaaccacaaaaggagtctaatgtgagtcccatcgatcatgataaattatgctccacaacactaggaaaatatataataaagtaaagaggcgacataaaacaggcagaattgggtaaataaaatggtataaaaaataaaaacacttttattgatgctaccattatggaaaaaactataaacagttgcttcaaaatgggaagggtgaaacacaatcctaggactaattttctgattgctactagacacaatgcaatttattggacaaggaaactgtttcaaaggctaaagaaagacgcattaaaaatacacaagatactatttttttaccaacctcaccaagacgacgataagccccatagataccaccaattaatgtcgagaacagtgcataccaaatttgggtgtccatgaaatatacctgtattttaactaattaaacttgtactaagaaaaagttttccttatgagaaacaagatggatcaagacatactagaattattggagcccacagtgatataacaacaccaatattgttagttcctgcaaattaaacctaaataagaagccaaaaaagttatcaaaatgtaaaatatggatttcatgacaaataccatgagggaaaaattcgtgccactggaaagtcctgataggttccctcattatatctatggttggctgtaccagaggtttgatctgcaacaggacagta

SEQ ID NO: 105830 - DNA, 566 bp, Zea Mays
ggataatcgaggaagctatagctaacgacactttggacccaatattaaaagatatcgatgagcgagctattcgctggatcttacgtcaggccagtttgagtgaggacggcaaacttttgcatccagaattggtaggcgaagtttcgacaaaaattcaagaatatgcagataagagaaagaagggcgaaattaagcctcaaagggagaatgacatactaactgcagcactaggcaatcctgaccacactggacgggctcggggaatctcttctaagatttcctggagagaggcgtttccagagtatgcgtcgtcatataggaaacacgagaagtcgaaaagtatccttgaagagactattgatgaaagggtactaaaggctattaatgacgcgatgaacaaaatgaagaaaacagaatgcatatcatttgaactcaagccaggccacatgagtccacctatagtccctagcagcgtaggatctgtgcaagacttcaccaagtaccctgtagatgatattgttgaggacaagccttgctttcttcatattccaatcaatcgatctggg

SEQ ID NO: 105831 - DNA, 647 bp, Zea Mays
acatctttataaccttatttctcgtaactcgagtcaaagtatccaaaatcttgatggggtgctcagcataagttagatcatcttgaagactaaggtcctccattggtaattgctcttcaggtaccctgagacatttcttcagctgagatacatgaaagacatcatgaacgtccgcaagatgatccggcaactccaattgatatgcaacctctcccactcgctttaagatcaagaagggtccaataaagcgaggggacaactttcctttgactttgaatcttctcatacccctgagtggtgacaccttcaaatagacataatctccctccttaaactcaagtagtcttctccgggtgtcagcataacttttctgccttgactgtgcagttctcaaattctcccttatttgctggacttgttcctctgcttcttgtataatctcaggtccaaataattgtctttcaccagtttgatcccaatacagtggagtcctgcactttctgccatacaaagcttcaaacggtgacatcttcaaactggcctgatagctattattatatgagaactctgtatacggtagactcttatcccaactaccaccatgcttaagggcacaagctcttaacatatcctctagcacttggttg

SEQ ID NO: 105832 - DNA, 344 bp, Zea Mays
gctttagacacagttgattccccaaaatccagatggctgggcttcgatggcataataacatcataatcaatctctccttcattagcatcaccctcttcaatatctgcttgctcgatttcagcagcgggtgattcttcgccagcagcgccttcagtcacaatcaatcccgaccgcctcataacttcggaaatcggagcagtttcagcagcttcggcttcgtctccgtcacgagtaactctagctgtcgagcgtaccctggccatttgatgttgaattttttgcattttgacgaagttgaaaatttttatctttgccgaagctctttcttgtcatgaagctagagc

SEQ ID NO: 105833 - DNA, 505 bp, Zea Mays
aaacaccaagagagcggaagctgggggcctcgggctggggagatgggagagaaaacttggagccaccaggaagatagtcgcgcttgatgtgctcctgggcatctgcttcggggttcggatgatcatccgatcttttgtataactgtcgtattcttctctatagacgcgtttatggtagatcgtttgatggccgctgccatcatggtctggtgtccggtgggggaagaagaagaagctcgcgaaccattggatcgtgatgaacgacgtagattagaacgcagcgtccccctttggtaggatcaatctgggtcatccatgttgtgtccaacgtggtagattagataagcccttcattgaatattcatcgtcgatctcggatcggttgggtagtgatgcataccggttcaggcgagggaaagatttaatctgagcccttgttttctgatcggacgactctacccacgcgacaccccttcggcgcactagttttacacaagagacccta

SEQ ID NO: 105834 - DNA, 317 bp, Zea Mays
tcggccggaggttgcagaattgtgtgctgagtgcgcaacacgccactatctggatagtggttctcccgcccctgtcgggattcagcacccttaccgttcaccgccccgtggtcgtttcgactatggtaccccagactgcaggacccggatagatttggatccctatatcgacagagtcggagtctgtaataatgcttaattcagtgtcttagtctattcagtcttagttagagttagtttgcttatcttatgttggatgcttgttatgatggacatgtactgaagttggatctttgtaatgattgtcaccaaggtgt

SEQ ID NO: 105835 - DNA, 765 bp, Zea Mays
ctgctaggaaaataagccccttagcccctgccatctcccacaacggcacaaccttcgctcttctccaacctactctagaacagcagcaacactcggattgccgccctcgaagacacactgattacagtgcttccataaggtccatgcaccaagcaaaacaagggagttaatccccatcttcatttgtccaactgccatttcacttattgtcctccaccagttcaggaaactatcattttctagttgaggggacagagtatgcagtccaaattgtctcaacaaaaggaaccagcactcccttgagaaaacacaagagaccagaagatggtctattgtttcactttcttgttcacaaagagggcagctatcagggtgatccaatcctctttttgcaagacgatcagctgtccaacaccttttttgagcaactaaccacagaaaaacccgacatttaggaggcgcccaggttttccatatctctcatacggttcaaaaggaatcgagccaatgaaaaacccctcgtaggcagattaagctgaatattttccattggcagccagcctaaaaatgtgctgatcttcaacattcggccttaattcagcagttacagtaagtttcagaggtgaagataatcagcaattgcccccacagatagggcccctcgaatatccgacatccatgctcttccagttatagcttcttacactgtccttgtattgatttttcttttcggaacaacttgaagaagtcttggcgcaatatcag

SEQ ID NO: 105836 - DNA, 455 bp, Zea Mays
attttacgaagctatggaaaaaaccaacatggagaaaatcaccaatgagatgttggctggaatatctgaaaattccagcgatagtgagagtttcgacgtggaaagtgggaatgaagatgtcgaagatcgtccatggagacaaagccatgttgtctttggaaagtctactattaaacaagggcagatcgaagcaatgagagacagatactttcatgacatttcaatcatgagagccagaggagagaataatgttcctcttcccaaagctgacgaagtggtgatttttagaagcttcatgaaagctggacttcggttccccttggataggatgttggtcacagttctaaagacttttgaaatttatcttcatcaacttacccccgaagctattatcaaagtagggatttttatatgggccatgagaagccaagggttagagccagatgccaagtgtt

SEQ ID NO: 105837 - DNA, 1325 bp, Zea Mays
tcttgtgttggattaagtaggcgcgagtgtgccgtgccgatttaagtcattaccaacttaaaccgaccgctccgttagtagggtatagtggtcaccccgagttaagtaagcgtgagcatgttgcaccgccttaagctgtcgccgacttaagccgattcctccgttagtagggtatagtggtcaccccgagttaagtaagcgtgagcatgttgcaccgccttaagccgttgccgacttaagccgattgctccgttagtagggtatagtggtcaccccgagttaagtaagcgtgagcatgtagcactgccctaagccgttgccgacttaagccgattgctccgttagtagggtatagtggtcaccctgagttaagtaagcgtgagcatgttgcaccgccctaagccgttgccgacttaagccgattgctccgttagtagggtatagtggtcaccccgagttaagtaagcatgcaggttgacagtgaacaatttgagtgcctttgaagtctttttattgatgatatatttcccagtttacagagtacattgtcgtcccaatagcttttgagatatagctaggggtaaaacttcctgagatgttctatgttccatgagttcccaatttctgtgctgtccatttgagtgagacgatatgatccaggccgagtgacttctgctactatgaatggtccttctcatagtggtgacagtttgtgccgtccctcccccgttagaattcagcggaggacgaggtctcccactgcaaaggatcgatatcgcatggccttgtcatgatagcgccttagagtttgctgatatcaggctgactgaatcactgtattcaatcgttcttcttctagtatatcgacatcctccagtctagtagcttcagcttctgctatgttttcaaagattaaccttggtgccccaaacttgagatcagcgggtagcacagcctccgaaccatagaccatgaagaaaggagtgtttccatgcaaagctcaactaggttgagttctcaggctccaaacaacatacgacagctctctgatccactttcctgcgaacttttcattcttgtcgaagattttctttctgagcgcttccaatatcatcccgttggctctttctacccgcccattggctcttgggtgcgccaccgaggcatatttgatctgaatgctcttttgctcgcagaaatcgaagaactctgaacttgtgaagttggatcctaggtcggttatgatgctattcagtattccaaacctgaatattatgtcttgtatgaattccactgccttagctgaagttagagaagcaatgggt

SEQ ID NO: 105838 - DNA, 579 bp, Zea Mays
gcagcctcgtcatctgccccgaccgccgcagcaacatcgcgcggttcatcaacggcatcaacaaccacacgccgtgagtagagagccccatgccgtcggttcccattgcgcattgcagtttccgtcgatctttggctgaacgactgaacccttgtgtgcttgtattgattgctcagggaggggaggaggaagcagaacgtcaagtgcgtgcggttcgccgtcggcggcgagtgccgggtgctgctgttggccaacagggacatctccaagggggagaggctctactacgactacaatggctcggagcacgagtaccccacgcaccatttcgtgtgatgtgaccacgaggcgaggcaatctcagtccgtgtccaccattgcagctccagctccacagctgccaaaatttcgtgtgatgtggggacctgtttgaatcggctttggctagtgactagttggagcgggaagttaatctagattagctggccttcttgtttggacagattagagtggctaactaaaatgtcgattcttgcataacagtgagggcagatgaagcaatctagatattcatcagcac

SEQ ID NO: 105839 - DNA, 514 bp, Zea Mays
cggcagcttcgttcagcagcttgtcgacagttttgtcaatagcatcattagcaatcttgattatatcgagcgcctccttgacagatgggtcagtttcaggatcatatggctcgggagggggagaaagctcagttgcattgaaacacaaatatctattagtgccgaagttgaaaaacttacaaagctgagttataaagggtatacctttaagtccggcccgctcatcagcttcctcgactcttttagcctcttctaaggcatcatgaggttctttttcattctttttaatggtttcatcagcaatttctcatccacccttcagccatacttcagaataaaacttcccacccaaagtagtagcttcggctgaagggtttctaagatcgtcagcagagaaggcaaaatctggctgagctacagccttggcatgatcacaagcaaccttctccaaaatgaacgcagccccacgggcaccggaaaaggcacagaagtcccctctatcactaagaatttc

SEQ ID NO: 105840 - DNA, 673 bp, Zea Mays
cagccttataactcaccaaggtcaaaaacagtctcctcagttcttacaacaaggcaagcacagcagagcaacagcatatgtttccccagcaccccgccacgctgtgagctgttgcctgttggtccgtggtggctgaactgccgatcgaggtcgccatccttcgctaaagttctgaagctatattagctgtcctggccacaaatttcgatggaattttctcctggctgggaccagcatggttttattggaagcggacacaggagactcctggttggcacttggcggttgggccgccccagtgcatttccaagctggaacgcgaagcattccttgcagctgtacgcctgcagccctgcacaaaaaaaatatcaaactgaaagccagagaatataaggcctcctttagaacacggtcctgttttttttttctgtaaaaatgaactgctttatataaaatttctatatgattcttatgaaatttctacgttttaaagaaggtctaagaaagaaaaaatacaatgctgtccggagtgatgcgagtgcaagtcctttttatgagttttctgtggaagtcaagaaggcactggcccacccccaactttagtccttcctgaacctgatgcgacagggcgaatggtatcttcactgctttcgtccctgcaggaaaatgaaca

SEQ ID NO: 105841 - DNA, 343 bp, Zea Mays
ttaacctttttcattggtttgccctttttgacttgtttgaggtccgtgttggactccaaagcatcaagttgccaaaacttgatctctaaagctatccatgagcttcaacatcctataatggtcacatagaatatttccaaacacaagaatgaccgaaactaaaggttagagtgaacttagctctttgggtcactactaactttaatactcctctttctagtgatcatgtccatctccttgagctatgatcttgagccttatgacttgaaccataaacattaggaattacatcaatggttacaagtcacgtccttatgtagtgatcctcaatgcaccatgacct

SEQ ID NO: 105842 - DNA, 381 bp, Zea Mays
ttgggaatattgggagatccatgatgctttctgcatggtgctagaggccgttgaggctagactactttgagcccagcttgtcgagtccaacgatcatgtggctggaaggtagctcgctcctcgttctgtactggctgcctcaacctatttcttatctccctcatttttccttttagttctggaagcctaactagagaaattgtgctatcgtttgggccaaatcgtggagtacgtcgggggtcgtggcccctccttggtggagagcttggacaatgtctcgtgctatatatgggatatcgtcgacttcagtgttcactaggggcgacgtggctctgctcgtcgtagagattcggtccagccacggtctttgggacatcgtcg

SEQ ID NO: 105843 - DNA, 605 bp, Zea Mays
gtttagttagaatatcagcaatttgctgactagtatcaatgtatttaagctcaatatcacccttctcaacatgatccctcagaaaatgatgacgaacctcaatgtgtttcgtcttagaatgaagtacaggattctttgcaacacttatagcactagtgctgtcacacaagagaggaacgtgagaaaacgacaaaccaaaatcacgaagggtagctatcatccataaaagctgagaacaacaactagcagcaacaacatattcagcctccgtagtagattgagcaacattagattgttttctagaggaccaagagacaagcgaagaacccaaaaattggcaagtacccgatgtagactttctatccaaacgacacccagcaaaatcagcgtccgaataaccacacaaactgagagtcgaagcagtagagtaccaaagaccaaattcaggagtaaatcgaagatacctcattatgcgtttcaccgcctgacagtgagaagacctgggggacgcctgaaaacgagcacacatacacacagcaaagtgtatatctggcctcgtagcagtcaagtataacagcgacccaatcatgcttcgatattccttt

SEQ ID NO: 105844 - DNA, 454 bp, Zea Mays
tgtgataactccgcttaggtctaggattttcatgcacaagtataattcgtgaattgttacttcgaatgcattgatgacaccctacctaagattgtgttgtatggatacaccatgtcaatgatgttgaaggtgatctgctctatccgcgcgtttggttggtaccaaatgacagtggtagtatatttttttccaaggggtaatgtggccttgcctccgaatctgaactggggattgtctaccagctgtaactattttggatttatacccatcctctcgaagcgtgcaggaatatgatgtcggtctagctatcattatccacgagggccttgcgaatctcccatcctgccacattgcagccgatgaccatggcgttggtgtgcggggtgttacggaggttaacatcgcttgcgtcaaatgtcagggggatgtgggaccacttcatttggataaccgg

SEQ ID NO: 105845 - DNA, 465 bp, Zea Mays
gcaaggatggtcttaagctcgggtcttagtcctttcagaaaatgggccatcttcctggactcggtgctgacatcgtcaggcgcgtaacgggccaactctctgaacttgtgcacatactcactgactgttctcccaccttgagttagctcccggaactcatcatcctgcttgagttgaactatcccctggggtacatggtgctcacggaaggctgtttcgaattctgcccaggtagcatctctgacggcctcgctgaaggtgtcccaccatgctaaagccattcccgaaagctgatgagcagctagttggacacgctgattttcggggcatccgatggcttctagtttcctcttgatcgtgcgaagccagtcatctgcatcgaggggattgctggaccccgcgaacgtgggaggcttgagtctaaaaaattcccccatcctgtcctgtggccttccaccacctggg

SEQ ID NO: 105846 - DNA, 517 bp, Zea Mays
gaagttagtgccttggttgcctcgctcggggagattcctgatgatgaatggcaggtccattttgaggtgcccctgaaccctagtgatgcagagataagcgctatgcttgatttgctggctgaggactcttctgacgctactcctgctagggcattggtagtggcgcccctcccagaggctgatacaactttggatactcagaagcctgccagtactcgcccgaggcgcccttgccgagccaatcaacctgatccttctgctgatgagcagaaaaagaaaaagagacgcctccggcgagtatccagtttggatcgggacgttggtacctcggttcctgctgctgaagaagtgcctgtgactgaatttactgacgctggccccaatgggtgtacccaatctgttgctgatcccaatgggtgtgctgcctgtgttgctaatgtggacgacgaggaggaagaagatgaagttcctttgactcggaaaaacagtcggcagttcatcgctagcggtgaaagta

SEQ ID NO: 105847 - DNA, 580 bp, Zea Mays
gaaccagaggactccttgctcatttgtcctaaggtccggaagttgctccttgcgagctctttccataagtctggctgtctctgcgtccaggtgttgagccttgcatatgagatcttctagatttggcttgacttccaggctaccgttgtcccccagacatgctgattctttcttccaatcttccagaaagttggttcctttaatcccgaaaggttttcggctgagggcgtctgctaccacgttggccttcccggggtggtagtggatttcgagatcataatccttgatcaattcaagccatcttctttgatggaggttgaggtccggttgcgtgaagatgtacttcagactcttgtgatcagtgaagatgtggcatttgttctcgatcagataatgtctccatatttttagggcgtgcactatggctgctaattccagatcgtgggtagggtagttctgctcgtgtggcttgagtaagcgggatgcataagcaataactttctcattttgcatcaagacacaccctaagccttgcttggaagcatcacagaagatgacaaaatcctggtgtatatctggc

SEQ ID NO: 105848 - DNA, 397 bp, Zea Mays
cttcattgaagggagctggtataaagtgagctacagaagatttgctcacattctgggatttactgatgaggatatctctgacgataagattaagatccatgactttcgccctcctaccagggaagaagccaagaatctacacatatctgagtctgatgaatattagaaatccacaaatctgcacaagtactacaggtacatcaactctctgcaggatgactctcatccccaaagggggaaatcagatgaatatcctgggagaaagtaaagtcctgctttccttcatgaagccaaacaacactgaaagattaaatgtttttgacatgatttggcaagagatcatccatgcatccagcttccctctcaaggtatgtctacatgcccccttcatcctgaa

SEQ ID NO: 105849 - DNA, 367 bp, Zea Mays
gtactactggcccttttgcggctgctactagtgggtgtggagttaaggaatccttcaccatctccatcatctccttcttcttcatacacttcttctgattgtctgttgtcacttccagggatacaagaactagacccatcaaccatgattccatggaacatctctgctaagtgttccatgtattaggaatcccatattgaaacttcctgcacttagttcttttctgcaatcaaatgtaacacacccttttagctaacattactaaacagttacatgcatcctaagaaagacaagacaaatagtgaattaacatcaatatgagtcttccaaaaggactctgaagctataactacatcgttatcccttc

SEQ ID NO: 105850 - DNA, 622 bp, Zea Mays
atcggagcagcttccttggcctcggcagctgaagaggtccccgcgccaaatttaggcaccactgtcggttcaatgtaacgcggccggtgggtcagaaccttcatctttttgcccttcaactcagctgctttagccgaagcagcagtctttctctttttctcttgccctcaaagcgggtaatggtgatcagggtatacaaagccaatagcatcaaataccctgttcaatctcttcttgccccgacccccgaaagctgcggacaaagcattatcttcggccttggagtatgccccaagtagctcatcactggtagcttcgatacatttcaactagtcatcgtctggctcatcaaacttctccctaaatatgaaggtatacttgaatcggaccagaccaccctcactagaatcggaggtggtctcctttggcatatcccagctttccacaagtggccataccctgaaggctatatgctcttgaatcaaatccctggtgccaatgaagacacacacagtgctaaaggccttctgacatgcttcaacattgccatcaatttccaacttcggccttcggaggctgaagcgagaccagatgggtcgctgaatgatttctttgatgtctt

SEQ ID NO: 105851 - DNA, 796 bp, Zea Mays
tgttaaggagaaagacgacgagtggagattgtgcatggactatcgacgtttgaatgcatatactgtgaagaatcactttcccatgcctatcttcgatgaaatcaccgatgaactaaatgatacccatgtgttttctaagctggaccatagaccgggggtatcaccagattcggatgaaagagggtgatgattatgaaacaacatttctgacgcaccacagacattacgaatataaggtcatgtccttcggcctgacgggagcacctgccacatttcaggaattcatgaacaaaatcttagctccgttgttgcgaaaatgtgtcgtggtttttctggatgatgtcttggtttacagtaggaacctgaccgagcatgtggatcatctggaccaagtgttcaaactgttggatcagcatcaactgaaactgaatcgttcaaaatgttggtttgcccgagatagtctggagttcttagggcacatatttagtgcagttgtgctgtccacagaaccaaccaagatacaagcaatacaagagtggccacgtcccaccagtgtcaaagatgtaaggagtttcctcggcatggcaggttactatcgtaaatttgttcggggtttcagcatcatcagtcgtcccttgtccaacttgctgcgtaaggataccatttttgcttggactgacgaaacagaagaatccttccgcactttgaaactgaccctggctcaagctccagtattagctctacttgacttcagtaagtcattcaccattgaaactgatgcaagtggaaaaggaat

SEQ ID NO: 105852 - DNA, 839 bp, Zea Mays
tcgggattgaaacccactcaatcccacccaaaacgaacaagcccttagtgggcaattgccaatctactaggcgtctagatccaatagacctagcaaggaatcccacgtacgccaagaccgcagaggcccacatgaaacccacaaggtccgagaacacgaacacaaaagcgagaaagcaaatacacgctgagaatcaaaggctaatcgcaccaaccatacattaatccatgtcttccaagccaagaagacagccctgacccaacaaaaaaaaagagagtcgccaaactctatgaataatatcattcatagatatcgtggcaacgacatgatcagccgcctcgtcgtacccctccagcatctcctccagtacgttgtctttgacgtcacgaggaagaacaacatctcgaaggttctggccaaatcaaagctccccgatgaccaaggcgacgactgcccctcgatgaacgacatctcgaacatgccttgggatgtcatccaggcgctcctcaagggatgacccaacaaaagggagcactccttggttgccttcgacgcaggacatcgtgtttagcagaaaaatcgaacattaggaggttgaaagggaaaagctaaaaacttccaaaaccaaagccttactccgaccccaacatgccatgacgcggcctttttcctgttggacactcatcggcaacctgcatgcaaggatccaactaagaaaagaacgagcatcgggcttaggattgggaggcgtggaggtacgagtacaacaagcaacgacccccgtgcttataaacactgagagaacgtcatgccaatgaataaaaggggatcaacccgtg

SEQ ID NO: 105853 - DNA, 621 bp, Zea Mays
ggaaaaggggcggctagggttagggaaggttagtgggccgaaacacgaatcgcggcccaactcgcccacgcgacagctcccgaccccgtcgcaagcgcccaaccaaacaaattctactgccctactggtgaatgtttttccccaaattccaaattcccaaaacgcatcaaccgaatgagaaaaaaaacaaaaagaataacctccaacttcccttctttgcaaactgggtatcacactctaccccccttaaaaagaattcgacctcgaattctgacgcttctatcggaacgacaaaaggaaagattaaagaataaacaacacttacccacaacaaaaagttctggatacttctgctgcatcagctcctcaagttcccacgtagcctcacgctcagactgattagtccataagaccttgacatacttaattgatctcttcctcaatgcacgctccgagaattccaatatacgcaccggacgacactccaaagtcagaccctgctgcaccgcaattggttccatctcaatctgatggtctggatcctgcaagaactttctcaacatagagacatgaaaaaccgggtgtacccctgccatggaatccggcagtagcaagcgataa

SEQ ID NO: 105854 - DNA, 505 bp, Zea Mays
atcaattagaagcaatagcttgtagtcaaacttgagaaagacaagttgcaggatgatgatggtgattgtcaccccaagccattcttctatcgctgatacacaccccgttaatagagacattccaccaaagcacgccacactgaaaactaatagccagatcacctgaagagcaatgaatgttgtagatcggggtagaacttgatgtggtaggcaaattcgctttgcgcttgaacgatgcacacgggatcaacaagagtggcggtggtctccacctgcgaaccaaacttagagaaactcagtgtaagccattctgggtggtgcatcccaaaaaatagttcttagcaaaaggtacaaacctaggagacaacagtgtttacggggatgcaggacgaaaagaaggtggcgagcggcatgttagctgtaccttggagccgaacttgaaatctaataaattactaacaatagaaagaaacgccttgatcaaacaaagttggacataaagagg

SEQ ID NO: 105855 - DNA, 662 bp, Zea Mays
atcgagggatgacaaaggtgagggtgacaatgggcaaacacacaacaaaggatggagttgaaaactcgcaagtgacaaagaagatgatacgtccaagagaaaattaggtaaaacgtacaactcttatattgagatgggagagagaagattttaaagggcaggtataagataaacatcaaggtaagatatagaggtggtaagggtaaaggtgataatgatgaaaagcataaccatggacagagttaaggcaagaccgacaaagtggagaaatcaagcaagggtaagataggtaaggttccaacaaagtggttgaagtaaagaaaattaattaccaagtggagttacaaggatacaatgagatcaccaaggatatgcaaagtaaaatgaccgttcatggatcattaagaaacatgggtggtcaagatcatgtaagttgaaaaatgtcttaaacaaatattggggtatgaagataagcatacataaaaaatacgagagtatgcaagactctaaggacacgagtatactaaaaccaatggaatataaattgttgaaagataatgacctaacaacagaacaggaaagggtctcaaaagacaggaagatcatggtcatatgaactgaaatgtctaagtaggcagtagaaattcaggtgtaagtatttg

SEQ ID NO: 105856 - DNA, 666 bp, Zea Mays
tatggtgtaggaataattgaacaaggctttattaattccaaactcacagcagttaccacggcaattacccaccgagacatacagggatataagtaaacacccttactttatttaactcatagtttatttaaatgataacttaaaagcaagtaaccgactataaaaagaatggtaatcagaaacgaaccactctggtggccttagccataaacagtagagatttgggtagttgacagttatatgaatccttcttcacataagttcacgagcattacttgttgctttaggacacagtactggtcactttgcttgcttgctcgctcgtctcagccacacactctgtcatgcacgtcactgtcatccctgcaaaaaccatggaagatgagttcaaagctttccttatggatcaatggtttcacgagaaattgtataattaagacaaaggtgatgcaaactttttgaatttatccaatagcctgtgacagttttggatgatgctcaaccgtataaaaaaacagcacttgtgatccatgtatgagttattggatagaaggaacaaccatatatggaggtaaacgggatgatcccatatcattgggttgtcaaaagaagagcgaaatgatcccatgttcgtcccgctataacaactattctagagtaattggc

SEQ ID NO: 105857 - DNA, 578 bp, Zea Mays
gcgtggtggtggtggtggtgtggattccaactgcccacagctcctgtctcaactctcaaagcatgcaggtaggcatcagtgcgtgcgcatgtaggatgtagcgcatcaaaagcaagctagcaccggtcgatggatcatggaacggtcttccaaaaggtgctgcacactgcactgcatgccaaagggaaagggaaagatgtgctagctttataagtagcttcaagcacgcatgtgtgttgtgtccactggatccatagcctcttgcaatgtgtaaattagttacacagaaggcacccagcatgatctctgccatccgtggccacgctcaggcaacagatgcacattcatgcagtacaaaatacttcatttttctatgaaacatagaagcaagaacataaatatagacacacaaaaactcctcaaatctgcattccatcaacagtccaataccacttcgctaacgtgtacatgcacaaatgttaaatatataatttcattccgagctttatgtacatggagtttcggcattgccgtagattttgtttttcttcttttggatctatccttggtttattatg

SEQ ID NO: 105858 - DNA, 593 bp, Zea Mays
ctaagtcgtcgctgttcaacggccaagccgaaccggcgttcggagcagtggtgcaggcaacggcgtagcgggtggagggaatcaaagctgctgcggcctggggagttcatctcgggcgctgaaatcattggtgagaactcccatctgttttctccttgttctaccgtgcgtgtcgtattttttcggaattaggatcggggcaggcgcttggctgtcataccagcgtgtggtgatgccctccgccgcgggctcttggccatcgccgctagcaacgatcgggaggtagaagatggttgtggaccgttgatctccgcagtggtggccgggattagaatggttgtcggatcttcaatgatcggtcggatctggtcctagtatgatctcggctagagtagttttcggccatagaatttagatctaatccgggtcgtcagatctgaccggacgactcctatcgtccgacacccttttggcctgtagttttacaaaagagaccccacggaacatagaaatcaacccgcagttcatcacagttttagcctgagtcttgggaaaattaagatttggcccctgtacttttcagtattagtgcg

SEQ ID NO: 105859 - DNA, 294 bp, Zea Mays
tttgtatttctgcattttctcaggggaagttctcgtgtcaaggagaagtttctgtttctacccatctttgtgtttgatgagtccacttgtcaacaagggggagagactttgaggttttggcctccaaacaagggggtgagatttttgctttgggagaatgatttcgcaaggggagatattttcaggggaagagactctggattttggagcttttgctagttgtgttgaaccatttgcctctttctagggggggctagcttggatttcagcttttgtgttgtgtgctcagatctg

SEQ ID NO: 105860 - DNA, 837 bp, Zea Mays
atgctcatctatgactctattttaatgcgttataaaattgttgatatataaatatgtaatatgtgtggtattatacgtatcaaactgtaagactttatatagtattatacatgctaaattttttaccccttaataattttaaatatccatgtttcataatgctgggcccgccactatagaaaaaaagcaagctctaccaaacactattttttaaaacggttacctctcaaaagcacctaaaagcaagagccatttttatactacgcagaagaagctatcaatagtagcttcaccgactttggctctgactctaacactttaatataggaaaatgtctctcgctctaggataagagatagatgatttacgaaatggcttggaaaagcagagctaaagtttttgggcaaactagagtactaccaaaccgacccttagaattgtctctctgctgacagtgataggcaagtagtctactccgttttgtggtgaaagggaagtattcaaggacgcatattcagacagtcagtatgatgatgcagggagaaaacgtggttcatcaagctggaagtcagtggtcagagtcaagacatgttgaagggagcaagagcaaatccacctctctgtctataatctgcgtgttgtttcatctacaaatgaggcaggctcctcttcagatgcttcagctccagttccagaggtgcacttgaggagaggtctcggcttctctggtgctcaccaagaaacgacttctcccaaagtgtttggcaggacgtagaagcgtctgctggaagccttgccaacaaaacggagccgaatttttttccagtccgatcggcc

SEQ ID NO: 105861 - DNA, 685 bp, Zea Mays
gtagttgttagctgtcgctagaggatatgctaacccttttggatactgttactaggagtaggaacaagacttatggagtaaggctgatgtaatgatggcttctgacgcaggtacgcgtgtgtgggaaaacactcttttggttggttgtgcatgcgagcggaacaatttgcctgtatgtacatttaaatattatgaagtacgtgatgatgttgttgcgcatgtgggtatgtgattctcgccttatgattttttcacatgaagttttcttctatgaaatatgtacgtcatgatttccttatttcacacatgtgcaacgtgactcgttgcttactcataatgaaaatgtgcagatggtgacaactcgccgcattaacccgggggccactagagcttctggtagtggtaaccaggagggtgaccatgaagcaccacttcctccacctcttccattcacacctaagcagttcttcgcccaatttcttggagctcataggaatatagagaacttgcagcggaacatggaggcagaacttcacaatgttgctaacaacacccgccatgggcagccttaggaagctcaaggagtcaatcaatatagcagcttcaaggatttcatggataccaggccgccgatattcaaggaagcagtagaacccttggaggcagatgaatggatcaacacgat

SEQ ID NO: 105862 - DNA, 647 bp, Zea Mays
ccaccttttccgaaatgttggaactggatagcttacatcagggcgaggcacgaagccataacaaccaaagttgttgtgatattgctccttgccagtagccttcgtctcacacagcagctcgtgcatgttgcaagagcattttgtgcttggctctagcccctggcttctcacagcccgaatgaaaacccccatcctgataatggcttcaggggtaatttgatgaaggaaaatttcgaaggtcttcagcgctccaaccaggaatttgcttaatgggaaccgaagccctgccttcatgaagctcctgtaaacaaccacctcatcttcttcgggagcaggtgcggcactgtcccctccagctctcacaattgaaatatctcggaaatatctccatttcatagcgtcaatttgactctgcttaatggatgattttccgaagatagtgtgacttggtcgccagggccgattttccgcatcttcgtcttcactttccatatcaaagcttccactatcttcagaatattcagacaaaccagctagtatttcgtttgtaatcttctctatgtttgttttttctatggcctcataaaaaccaactagtgcaggatcagcaaccttcttctcgtcagccatttgatggacaattgaac

SEQ ID NO: 105863 - DNA, 588 bp, Zea Mays
tttcgaaagacgcgctggccgaaggggtacggaccagtatcggccatccgatcaggaaacaaggacacattaaatctgccccgtttgaaccggtaagcaatatgagccctcggatccaaattctacgcctaggatttaatgtgactgcgatctaatctggtccgttcattacgatctcgcggtctagattcagtgaagacacgatttgatcgtagccgttcacagacaatcccacggccacctttaatcttcaagctcctgacgccgagtcccgacggccaaacagagctccacgacagcggcaaggaccggccaccccaccatgccaccccaatgccccaaactcaactcaatcgggtgctaacttacacggaatcgatggctaacacgcgggaggaggacatactggtgatggcgcagtagagacccccggccacgcaacacggcggatacacgaaggacttcacaccctggttgaccaaattctgggccccgatcgccaaacctccacagcgagatcctagatactgtcctcggggcgcggtggggcttctaagctcgatccccacgacgtgacgatgacgaatt

SEQ ID NO: 105864 - DNA, 743 bp, Zea Mays
agaatgaaattaggcgatgaatggaaaactgcttttaaaaccatgttcggcttgtatgagtggttagtaatgccatttggattaactaatgcccctagtacttttatgtgtttgatgaacgaggttttgcgcccatttattggaaaatctgtggtggtttattttgatgatatcttgatctacaacacttgtttatctgaacatcttgaccatctacgtgctgtttttgatgctttgcgcgccgcgcgcttatttgctaaccttgacaaatgcaccttttgcaccgaacgcgtatcgtttcttggctatgttgtcactccacagggtattgaggttgatgaggccaaggtgcatgctattcagagttggccaatgccatcgacagtgacacaagtgcggagttttcttcgacttgcaggattttatcgtcgtttcgtgaaggatttcagcaccattgcttccccattacatgagttgaccaagaagggtgtttcatttaattgggggcagtcacaagaggattcttttgatcttttaaaagagaagcttactcacgcgccactactccaacttcctgactttggtaagacttttgaactcgaatgtgatgcaagtggagttggcattggtgctgttttgatgcaaggaggtaaacccattgcatattttagtgagaaattgaatggtcatgttcttaattattccacatatgataaagaattatatgctctcatacgatcttt

SEQ ID NO: 105865 - DNA, 854 bp, Zea Mays
gatggtgggagcaggttgctctatttcggcagcgaaagatgtcccttcaccaagcttcggcgttgtggctgtctcaatgtatctcggctggtgtgttaagaccttaatctttttgtccttcggcacaacagacatggccgaagcggcagttttccttttctttccctgcttacgcgagggatagcaataatcagggtatacgaaaccaatgacgtcaaaaactctattcaatctatttttgcctcagccttcgaatgccaatgccattgcatgatcttcggcccttgtgtaggccccaagcaattcgtcactggttgcctcaatactgcttaaccattcattgtttggctcatcaaactcacctctatatctgaaagatattttaaatagaccaagccgccctgactagacccaacagcagcctcctttggcatctcccattcattcacaagcggccatactctgtaggcgatgtgttcttgaacaaggtctcttgtgctaataaaagtacacacagtgttgaagcttctccggcatgcctctatatcgttcccaagagcggtggctggcctcctgatgccgaagcgagaccagatggggcgttgaataatttcttttatatcttccctctcaattaatttattcttaacatagaaccactcctccatctaggccctgggccacctttttcggaatgttggaactgagtaacttacatcgtgacggggcatgaagccataacaaccaaagttgttgtgatactactccttgcctgtagccttcgtctcgtacaacaactcgtgcatgttgcagaagcattttgcgcttggctctagcccctggcttcttacggc

SEQ ID NO: 105866 - DNA, 387 bp, Zea Mays
gcgacaaatgccacatcgttttgaattctgatgtcgtacacaccatcttctactttgtcaagcatgtttgcgtcatgccttagacaatgctgcaattcgttctgttgcttcatgtagtctgatgatgcttcaatgactggtgaagggcttgcccatttgttgtgctactggtctgttagcttttttgctgagagaacttttaagagtgaaaacgacctcctaattgatattgtttgatgcacctgaagtttcaaaccatgtcataaattggatgtcgatgtatgtccacgttcctgcattttgtgccttcttcttccaacctattttgctgagctatcaaggtaggcacaaccttaatttgtttctctttgagtaagtccaagaacg

SEQ ID NO: 105867 - DNA, 567 bp, Zea Mays
gtcagattaccacagtcttgttggcgccctgcagtacctgaccttcacatggcccgacattgcctacgtcgtgcagcaggactgtcttcacatgcatgattcgcgagagcctcacctggcagctctcaagcgcatccttcggtacattcggggtactcttcacctgggtcttcatctccgatcgtcgacccaggatgacttggtggtttactctgatgctgactgggctggctgtcccgatacgcgcaagtccacctcgggctatgatgtgttcctcggtgacaacttggtctcctggtcctccaagcgtcagaataatgtctctcgctccaatgcagaagctgagtatcgtgttgtcgccaatggtgttgctgaggcttcttggctacgccatctcctccacgagctccacattccgattcgtcgcgccacaattgtgtactgtgacaatgtcatcgcagtctacatgtcctccaacccggtacaacatcaacggacgaagcacatcgagatcgatcttcacttcgtccgtgagaaggtcgccatgggtgtcgtgcgggttcttca

SEQ ID NO: 105868 - DNA, 365 bp, Zea Mays
atctggcggcgggtgctaaaccgtaggatgagtaaaggatggtctggattggatccaactgtgaggttcgttcttaggtgtttgcgccatcgatctgggatcgaacggatccccatcgatctggcttgtttaaaatctgggatgatggatctagatccaagggccagcatcacacatgggtctaggactgctcggatccattgatttgaaatcggacgaccctaatggccccgtaccccttcacccgagccatgtttcacataagcccctgcgtttgttttaaatgaacccgccgtccatgctaggggcactctgtgtctctggaaacttgcgcgtgagcccctgcgctttccagaattcatgcg

SEQ ID NO: 105869 - DNA, 427 bp, Zea Mays
catactacaaaacattctagataagtgaagcctgattcagcctccaactaatttaaaatgcctcctgaaaccaaacaacacattatcaacaataaaaaacaatataaaatgaaacccaagtcattggcaggtgcaatcaacactaggattttccactaccaaactgggatgcaactccacaaagtctttaaataacactctaccaaataggttagaacactaagcacaacaatcaatgaattcaatagcctcatttgttaatgccactaaggtcaaacatccatgtatcgacaatgtatgaaacacctgacatacccgtctccagcactataaaacatggttgttattacactagaatccaactactagaaatctccaaactattctgttgatgtgaagcaaatggtgctcatgtcatataacatct

SEQ ID NO: 105870 - DNA, 591 bp, Zea Mays
tccgggtatcatcagatcagtctagcaaaagaggttgaggagaagactgcattcatcacaccatttggagcctttttctatacctccatgccatacggcctcaagaacgctggagcgacttaccaaagttccatccaaacatgcttagccgatcactagggcaagcgggtagaggcttacgttgacgatgtggttattaagacgaaaaactcagaaaacttcatcgaggatctccaacaagtcttcaacagcttgagacgctaccgatggaagctaaacctagaaaaatgtgtatttggagtgccagccggaaagctacttgggtttattgtcagtcatcagggaatagaagtaaatccagaaaagattgaggccattatgaggatggaaccgccacggtcatagaagaaggtacaaagactcactagatgcatgacagcgctaagcagattcatatcaaggctaggcgagaaaggaatgccattctataaattgcttatgaaggtggacaaatttcagtggaccacagaagcataggaggccctggatgcactgaagaagttcttgaccactccgccagtactgaagcca

SEQ ID NO: 105871 - DNA, 908 bp, Zea Mays
atgcctctgaagatcctcggtcagaacaactgatgaagcttccaatggtacagtgcactgaaatatcccagggttcagtccccctcgccgccggtgatccgcgcgcctggatgcgtgtcggtcgccgtgattcgtgcctggcacgccgtggatattcgcggggaggtagctttggacgtgtcgcgatctcgcggacctagcccgagcctagtcagagataattcaccggcggccaccgtggctcggtcatttccgccactgtgtcgtccatgcctctctcctccctcattgtgtcccttatttacgtggtaaccatgcacgaatggtgtaatccacgaccgtggatccttagccggactaccgcgcctttaaatagcctcgccacccacggtgaggtattcacatcttcaccagtgaactcggttgaagcacaaatttgcggaatcctctccacctctcccaaaattggtagtgcatggtgaaaccatagtcttttgcgaccgtgtagccccaacctcacctcctaattccgcccggacccgtcgcggccccgttttcccccttttctatcaccggtgagcgaaaattctctgcgctctgtggctagctactcctaggtctgctcctgctcgttttaatcgtgtttcagcacctatatacgcttgtgatactcattggctccaccctccctgcttggccacgctcaatcacccggaacacatgaacttgtgttcgacattcctcgccaccgtggacagactaagccagggccataaccactcaattaaagctcgttctagggttgtctcatgtttgtaatacttgcccagtaattaatttgggcagccaccgccaatcttggccggtccgagcagcagattcgtcgacggtgagcacgccgtagtttt

SEQ ID NO: 105872 - DNA, 830 bp, Zea Mays
ccgtggttgaacgtggcaagctctcggggagcaatgtgctcggtgccatcgctgatcgccagctaaggtcggcaatggttatcatcgtaaccgcggcagtggctcacacgcggctataaattcaccccttcctcgcccccttttctcaaatcaaccgagctccggccttcgtctccaaattgcgaagctgtagcaaccattcctgtcctcgattagtcaccctggccggagtattgccgttttccccaatccagtccaccgcgccgccaagaacatctcgaccgtggccagactactctggtaaagctctgcatctctcaagtgttgttctagcagctatgtaggcacttaaagctcaccgtagcatccgtttgaccaattcgggcgtagataattaagaacacgagctcgacgtccccgcttccgccataagcgtggacagaacattttgtaggtgtgccagtcgaaattgatgggtgttctcggatcaccttaggtcaggaatgcccattccgtagccattttagatagccaccgccaatcgaggctggaacaaatcgcatggtgctcggcggcgaccacgccgtgaccaggggtactcgtggagaagaaaatagaaacccgagggcatttctgcaatctgtcagtgactaaatacaatagtgaatggacctatttctgtttagccgttaagccgaggaccttgctgcaaagttgccaacgcgggcgtgggcgcgccccggtttcacgtgctgttgggcctcctagtttgaaatcggcccagcactgtttctatttttcctttttctttttcagcagaactttgaaaa

SEQ ID NO: 105873 - DNA, 782 bp, Zea Mays
ggattacaagggcgcgtgggccctgagggttaaacataaaatttccagagattgtcaatgttccaggagtgctctaagtcttcgccggagggcgttgatagcctgtacgcgctgggggatgccttcatcttgacgatgaatggaccctcccatttcggctccagcttgccccgtgactctgtccgagtggtccggacgagtacgaggtctcctttgttgaactctcttgggacgaccgcattgttgcgccaggccttggtttgagcttggtatttgttgagggcctgtagggtgaggacgcggtctccatcgataaggtctttagacgttggttcgtcgacgtcgaggaccactgatgtgcttgttcggggcgacccatgctttatctcctacggcgtcatggcctccgatccatataatagacaaaaagatgtgaatccggttgcccggcatttggtcgtgtttagggcccagaccacttcaggtagttggtcggcccatttacccttcttgtggtcgagaagtcttttcttgatggcgatgaaaatcttgccgttggcgtgctcgacgaggccgttggattgtgggtggtataccgaggcgaaggcaggcttggtgccaatggagaggcagaaatccataaagtcctggctgtcaaactatttgtcgttgtcgactgtgagctcagacgggactccgaatcggcaaacaatgttttgcgagaagaacttttgtgcggtcttcgacgttattgtggatactgccctggcctcgatccactt

SEQ ID NO: 105874 - DNA, 644 bp, Zea Mays
gcgacaaccgcaacatcaactctggtgttccctcctatagcgtcatctctggtgttgcctcttgcagcgtctactctggtggtgcctctcgcggctctgaccaatagccccatcggatacatccttatgcgccagcaagcctacacctagtcgtctatttcctcctcttctgccactacgcacccagcgcaccattgccacttttgtggtggcatggtcaaccctacatttaggtatgacatgtagtcatcacgctgtgacattctcaccattgttctaaggccatgggacctaacccccttgccttgccctccacccacgtcaccttcgacctctctagctagcctaatgatctacctagggttagaatcttcccactcgtcatcaccccgaccctcgccaacaccatcttgcagcgggtcctcatcgacggtgcggtggacatgaatgtcctttttgtccatgcttttggggggatgcaaatccccgactacaggtagactcctgggtaccccttcttgggggtcacctcgagtcatgtccactccaggtgcgccactgagactgatgggaactgagtgttagcacgtgacagaccctacctggcatgccaactatcgatgtttggacccgtggacctaacc

SEQ ID NO: 105875 - DNA, 348 bp, Zea Mays
ttaccctttcgtggagtcccttagtagtcgatttcagcttcgactctagtcttgactctaacccaggctgtaggctacctatggggcctttgtcatgaatgggtagttcaactacctcttcctctccatgcattaaaaaaattaacactaaactcttcaaataaactcaaatcttagaaaatcgtagcttttacctttatcgagcctgaagagccaaccttcgcctcagtaataggcgtgtattaggcagcaacttcctcaacatgagtagttattgtagacaacattggcgcaataatactcgccctctcttgataataggtcttggttgcttcgccgagatcttca

SEQ ID NO: 105876 - DNA, 602 bp, Zea Mays
agaatgggacacgagcgaaggagaagcatgtgggctagatcagcaaggaatgctggtgaccgccgctgcatgccggcggcttccccctcactctatttatcggtcggtctccaaccacatgatgcacgcagcgaaagccacgggctcgtcggtgtgatgttccttgacgaatacgtgcaggtgctttctctctctcttttctgcaggaggaagaagattgccaccccaacctgttagcagctggcgtggggaagaagcagagaggggcgaacggaagaggaagaacagagagatacgacaggtaaggtgtttgtttaatttcttcataggtttttcgggcaccgtatccaggtgtttatatacgttgactgcttcctctcgttcttacttgggctaccattcgattacaaggccggatcacttgacccactgtggcccaattactctagagtttggcttcctttggcgcttcagcatttccggcgtcccgccatgcttcttcttctcagcacttctctttttggcgtccacagcgtgcctcctctggttgctgctaacacaaccgcgtctatctttggtttgttgttgtttttacttcaaga

SEQ ID NO: 105877 - DNA, 298 bp, Zea Mays
atgctagcaaacgagactgtactgcccagtcaagtgctaagtctcgatcagcaagctgatcctgcaggtgacggatgtcccttcttagttcattgattctacctccgtctgcgacccaagcatcggtcctgtgttgcagcgctgcttgaagtcgactcactcgggcttcaagatctcttatggggtcattacttccactgctgctgctttcatgtcgaggggccagttgatgccgaggcactccaattggtcccgttgactttcgtgccgttagccttgtgcgtggcggcatctttct

SEQ ID NO: 105878 - DNA, 896 bp, Zea Mays
cgggtgttaaagggatagtgggccgaattcgagatcagggccaactgggacggtttttgttttattcttttcttttctatttcttttcttttctttttgtttctttcctctttattttcaaattcaaaattcaaattccagttaaagttcaagtttcatgataatttgtttcacctcaaaatgttcaacttgaacatggtatggtgattatttatttatttctaaattttatttggttttgtatagtatttctctttctatattatttcaaattcttccaatttgcacttttgggttaaatcccaattctcaacctattattatatttttatcccttttactaggttatttaaatgcacaaacaaagatccaatatgatgcaatggtttatttccgggttgcaatgagtatgggcaaaaacacatagtgggatctactcttttcagattgtttacagattgggtattacaaattctaccccccttaaaaataatctcgtcctcgagattagtaagaacagggatgtaacaagtttggttttaaaatttagtttcccatatggtttagggaccaaaggttttgtcccaagttctttaaagttagtagatgattgggaaaacatggacatagtatgccgagccatattattaggtcagatgaggtacggttatagcaagtatggtcgtgggaaggaagagtataataaggaaagacttcatcctgaactgtggatcttgattcctcttggagttggatttgactcatctccttccttgtcggggttgagctgttcttttcagaccttggtgtcttcattcttggggttgccaccagagttagggacctatggttaagatagatttgtgggtgacaagtaggtagagcagctagtttag

SEQ ID NO: 105879 - DNA, 674 bp, Zea Mays
agtatgaagatactttctgttcaaatagtatggtacatgcagcctctaagtaaggcagaaatttcagatgtctcccatattgtggtaacatgaatactaaatctagagtataagctcatattagtttatgtgaatttttaatctagtgtacctaacgaaagactaacttgagaattgagatccctagcaattaaaagctatcacgtaacacaaaactggcgcttattgctagttcagctaaggtaatgattttgagatgtgaccaaaccacttggcagaacaagagcatagaactttttcagtgcaaataaataatgaaatatcaattaacgacatcgccaaaagcataactattgacatttttaacaggaaactttaacttccacaaagtcagtattcaggagcacaaaatgtccaaatgtatctaagatttatttgaatttaagaacattatccatacaaaaagtatttataacttgcaggtcttctagggaaacatacaaggttccataagaaattatgccagccaaacaaataagaaaccaatctagaagtacactgatctgaatagtaaattaaatcatactagaggttctgaatagaaaggtgagagcacatgataataactttatctgaatagtatatccatttgctactcaacatcacaaacaaac

SEQ ID NO: 105880 - DNA, 819 bp, Zea Mays
gcgtaggcgtacactcgatatggtgtatctattgcgcactacccgatattcgtgccactgtagaagctccgatgcttaggtactttatgaataggatcgtctggtccctcaaggctgtgggagcgtgtctagggccgtacttggggaggtgcagtcatgtcgatagcgttcacttgatgtgccctcgacttgccgctcgggcgactggccacaacctgggatgccatgtcttgtcttagtcggcgtggactttgtgacgtttgacttgagtttcctcggtggtcgtcatgactaacgaaattgctcggccgggacctggttggttgcttcgcctcgtgaactttgcttggcagggacctggtcggtcgctccacctcacagacttgctcggtagagacctggtcggtcactccacctctcgaagttgttcggcagggacctgatcgatcgctgtgcctcgttgactcgcctccttttttcttgtctcggaaaggggactcatgagtatctatttgagattcagaggctcaaccaacaagttgtttaaggaaggaactagggactacctcgtcatcattcttggtcgtccaagcataactctatagatggaaataacgttccaacatccaaataaatgtgaaaaatactccataaaaatgatgatttcaggaagagtgtaaacaagagaattgtggaagctactttagggtagaagttcttagaaggaagatataaatacaattgtgaatgagcacttggaagcaaaaaatgaagactacttgtttggagaagctgaagcgctatggtgtttatttttta

SEQ ID NO: 105881 - DNA, 314 bp, Zea Mays
atgtccccactaggagaggaagtggtgaccgagttagtcccgcctgagccaaagaaaggaagttgttatcagatggctgttgatagcagtgaagcagatccaattgagattatcaaggttgtgtctgagttcccagatgtgttcccaaaggacctaccaggtatgccacctgagcgaaaagttgagtttgctatagagcttcttcctggaaccgcccccatctttaagagagcttacagagtatctggactagagttggttgagcttaagaagcagattgatgagctatcagagaaaggtttcatccagccaag

SEQ ID NO: 105882 - DNA, 384 bp, Zea Mays
ctcgtcaaaggcttcagcttcttcgtcgatccattcgatgattccttcgggatcgcctctaataaatttttgctcagatgagtatgcacccacctttgcaaaactatctttcaacttcttagcacaatccaaggatttttcgtaatatctctccttcgattcctgaagctcatctacattcttttgcagtcttgcgctagtccattcacttatttcttgttttgctttagccacttcaaaatcctcattcttttctgtaagctttttctttaagttttcaattttggctctatgagcttcggactgtgcagcaagattggcttcgctaacctttactctctctaccaaagaatgcagaattttatccttttctacaacttcatt

SEQ ID NO: 105883 - DNA, 346 bp, Zea Mays
ctcaactggtcgaacagatcttctattctgggtaaggggtacttgttcttgattgtgacctcattcagagcttgataatcgatgcacatcctcctagtgccatctttcttctccacgaatacgataggggcggcctaaggcgaggtgcttggacggatgtaacctttctctgatagctcattgatctgcttcttgagttcaactaactctggtccagatactctgtatgctctcttaaagatgggggcggtgccaggaagaagctctatagcaaactcaactttccgctctggtggcatacctggtaagtcctttggaaacacatctgggaactcggacacaacct

SEQ ID NO: 105884 - DNA, 338 bp, Zea Mays
tgaccaggcaaagacatccttgttgtgaaataaaaacctttggagattagattcttgcttcgaagttagctgattaccgaagaagactctctgctttgcaacatcatcacagagaagcaccgacttcggctgatccaccaaagatgcctttttcttttactgttttcttagaattctggatttgcgctttagcttcatccatgttataaacaatctttgggtcttgcagggtcccttctgctcttcctgctgcttcttgagtgccatagactgatatcactccttgattactaggtaccttcatgcaaagatgagatgaatgcataactacttcgaac

SEQ ID NO: 105885 - DNA, 440 bp, Zea Mays
gcctcaatggccttgattttcttcgggtttgcttcaatgccccggtacgaaaccaggaaccccagcaacttccctgcggagacaccaaagacgcacttgtccgggttcagctttgtgcgggttgcccgcagcctgtcgaagaccaggatcaagtcttccactagggtcgaccctcttttcgtcttgactacgttgtcatcgacgaatacttccaccttgtccctaatcaggtccccgaaagtcttactcattgcccgcacaaaagttggcaaggcgttcttcagaccataaggcattacgacatagcagtaaagctcatccactgttacaaaagtggtatgattcctatcttccctagacatctggatttgatggaaaccagaataagcatctaagaaagacaaaaggtcacacccggaggtagaatccacgatttgatc

SEQ ID NO: 105886 - DNA, 292 bp, Zea Mays
gaaacggctcggcgggcgcatcccccaacggctgacatgacgtagcagcaccagtaccctacgggtctacggctccgccgcagcggccgtgctggccggccggccggcccaccgtagcgaaaggcgcgctggaatcgaaggcgtttcgactgattttttcccccctccatgtcttttccatcgcaccagctggtgaattgaatgaggtttccgtttgggcccgggtgtcgtcttgtcagatgtacgtatcctactagtagtactgtagtaggcaaggaaaaggagacgcaga

SEQ ID NO: 105887 - DNA, 388 bp, Zea Mays
ggttcgtctatcctgactactgttatccaatacggggtcaaaaaagaaaagatacagcttctgtgaaggaagttgcttcagccgctcctagtgagccggcgccgaagaggaaaaagatgaaggttcttacgcaccggccacgctatattgaaccggccacagtgcctgagtttgtcggtgagacctcttcagccaccgaagccaaggagccgactctcctgtcgaatattgaagagccggccaaaatgccggcgatggaaaaaatagaagaaccgagggctgaagagacaaagacatcggaaattctaagtccttcagcaagaattgaggtgccaatgtcaatgccgatggcacaaaaagaccttacgacaacccccaagaggaaaag

SEQ ID NO: 105888 - DNA, 651 bp, Zea Mays
tcaaattctttggtgtactccaataaggagtgctgttaccgtaggccgagcagctgtcgcatggcttgggggtaagactcagctccaaatttgttcatgactgatttagtgaagccctcccaagactcaataccatgcttgattttgtggacttggtaccaacgggcagcattctctttcatgtgtaacgaggcagatacgacccaaatgtcctgtgggattctgtatatactaaagtaagtgagacagtgatcaatccataccaccgggtcacgacccacaaactcgggaaactgcatcttgggaagcgaaggtggtggtgggtcatgccgaagaccagttcttcctcttcttggtcgctgggggcgtcttggggaatttgaaaggtgaagactttctgtcctgggggtaaaagaagcatcttgatggtgcatccgacggtgatggggatgagggtcaccctgtgatccctgatcagagtcaagctgtgctgccagtcgctcgagccgcatctgcgctaccaccttgccggtctcttcaatctgccgagacatcaacgacctctctctggcggcttcttgtgcaactccagcggcgagatcagcttgtgccatgagttgctgctgaactccatccatcgttaacatccgt

SEQ ID NO: 105889 - DNA, 1225 bp, Zea Mays
gcgcctgtcaggttgctggttcgtgtcacgccgtggtgtgggtggtacgggtttagtacctccggtgagatcctgggcccgctcatctacggtgatgtagaggtctgcctctcgaaacagttgctcagagttggcgtgcgctttctgtagtatggctcaaacgaaggctgagtcattggatcctcggtagaaatcttcaatcaccgctgcctcggtgacttcggggatgtgattcctcatggtctgaaacctcttaaggtatgactggagtgtttcatcgcccttgcgcctgatggatttgaggtcacatggctgcgccggcttgtcagagagggactggaagttggcgatgaaacgccgactgaagtcgccctaatcgtcgatgcagtgtcgtggcagatgtcggagccactgcagtgcgtcttgccctaggacgatgggcaaatatgctgccattacatcttccgtcaccccggcggcccgagcaacagttgtgtagacgaccaaccagcccccgggtcctgcttgggctcgtacttgtcgacgttggagactttgaagttgggggggggggcactgaatggctcagagacgtggagtaagcgtggagaccctgcatgtatcttcctgtcggtgttcgtgaggtcggtcctgaggaggtgagctggtggtgtgtcgtctcgaccgttctcgggttgggccactagtcgaggccacaaccgactcaactcgagtggcgtgacttcaagctgggacgccatgatctcggtcatactcctcctggcgccatatctcgctttcgtgccatcggtcgcacgaagcattgatggagctctgcgtgtctcgttggctattgatggcttggtgtagttcactcggggggatgagcgatggacagaaggtgattagctgctcgagtaagcagcccctggtagccttctgcgtccagagttcgtgggaggccatcagctatttgggctagcacccctccaacttcacttggcatgttcattgcgcaagcgaagtcggggtacaagtttggagcaaagagagggttctctcggcgcaaccttgcgccttgctcgacttgctcccgctcggtcctgagcctgtcggcgatcacggtggcgagaattccgtctttctcggtgtagtcgctcgtcgggagtttctcccacttctgaagcttcgtcccgggatacgggctgcgctgggtcccgttccc

SEQ ID NO: 105890 - DNA, 574 bp, Zea Mays
cgctagtgaagtttgatcccaggtctgtgatgatgctattgggtatcccaaatctaaagatgatttcttggatgaactttactgctttggctgaggtcaggttgcaatcggcttgtattctatccattttgtaaatttatcgatggctaccaacacatgcgtgtttccaacctcagctttcttgaacgacccgatcatgtctagaccccagcatgtgaagggctaggtgactgaaatagtttacaattgttgtgttggcaggtgctgctgttggtcaaaaattggcatgccaaacatctttggactagatcggctgcatctttctttggtattggccaataaaaaccggctctgaaagccttccccacaagtgtcctagatgctacatgtactccacattgccctgcatgaatttattccaacaaagcctcccaatgcttgaatcgatgcatttcatgaagactccagcgacccctctcttatacagtacttcccctatgactacataatggcccgactgccttgcaatacactcagtagcagccttgtcatctggttcttcctcattcttgat

SEQ ID NO: 105891 - DNA, 374 bp, Zea Mays
gttttccatttgaaaatggtttaatgaacttcgcattagatacctccgaccccaacaggagcaccggtgcatgatttttggttcgatcgggtggggactagcccgatggggacattggtgggcacaccaccaagtttaagcataaaatcctcaagtttgagcgtaaatagtgtcagatatatcataaatgttattacaatggtcaacacgatatcacgtacgtgaattcacgtgtttatcgtaaatacggagccaacatgagagacgtgagtatatctgttacgtcgtattcatggtcgtaaaattctcatgtttaagcataaatggtgtcagatatagtgtaaatgttgttacaatggtcagcacgatgtcac

SEQ ID NO: 105892 - DNA, 1562 bp, Zea Mays
atcgattttgcgcacttattgtgctattccggctgcacccttaggcgacttttgcacggagagtcttttggaaaagacgtcgattttgcgcacttattgtgctattccggctgcacccttaggcgccttttgcacagagagacttttggaaaagacttcgatattgcgcacttattgtgctattccggctgcacccttaggcgacttttgcacggagagtcttttggaaaagacttcgattttgcgcacttattgtgctattccggctgcacccttaggcggcttttgcacggagagtcttttggaaaagacttcgatattgcacacttattgtgctattccggctgcacccttaggcgacttttgcgtggagtgtcgcacgtgagggtaggctgtgctgcctctcgcggtgacttcggagtggtcgaatgccgaagaccgtcgatgcggtctttttcgacatgctgtatctgaatttttgcgggggatttttgcgggtatattacatggctccgcctcgttaaaaacgtcacccccgggaggaaaagggaccgaaataacactgtttgatgaattacaagggcgcgtaagccctgaggatttaaacaaaaaatttgcggagattgtcaatattccaagaatggtctaggtcctcaccggatggcgttgtcagcctatatgcgatgggggacgccttcgacttgacaatgaatggtccctcccactttggctccagcttgccccgtgactctgtccgggtggttcggacgagtacgaggtctccttcgttgaattctcttgggacgactgcgtggtcgcactaggccttcgtttgagcttggtatttattgagggcctgcagggtgaagactcggtctccgtcgatgaggtctttggacgttggctcatctacgtcgggggctgctgatgcacttgttcaaggtgacccgtgctttatttcctatggggtcatggcctccgaaccatatagtagacagaaaggagtgaaactagtcgcccgacactcggtcgtgtttagcgcccagactgcttcaggtaggtgatcggcccatttgcccttgctatcgtcgagtagtcttttcttgatagcagtgaaaatcttgccgtttgcgcgctcgacgacgccgttagattgcgggtgatatactgaggcgaaggcgagcttggtgccgatagagaagcagaaatccctgaggtcttggctgtcaaactgtttgccattgtcgaccgtgagctcggacgggactccgaatcggcaaacaatgttttgctagaagaatttctgggcagtcttcgacgttattgtagatactgcccttgcctcgatccacttggtaaagtactcgacggcaacgaaggtgaaattgaggttcccttgagccgtgggtagtggcccgacaatgtccagcccctagcgttgaagtggccatgtgtgggcaatcagcttcgtgaattgcgaagggttgcccgagcgaggagaaaacttctggcaggcttcgcacgacctcgtgactcgattcgcggcgcagattatagcgggc

SEQ ID NO: 105893 - DNA, 713 bp, Zea Mays
ttgttgtttttaaaagcttcttcagagcagggtttcggttccctctatatgatataataggagaggttttgaagaactttgaaatataccttcatcagttgacacccaatgcaatcgttagacttagtgtctacatatgggctctccgaagccagggtatgagtcctaatgccgaagctttctatcgggtgcacgagctgcattaccaaatgaaggctagagcagatggtcttcatgagaacttcggttgctacaacattgtgtatccaaaggatacgaaggctccggttctcagctatcgtacaaaatggccgaccggttggaaaagcgaatggttttacataaaggcagacaagaaaagaagggagaagctaatgactatggtcttgagtccattgaaaatgagcttcgggatgacaaggcccttgtgccatatgcagcttggctccccatgccaggtagccaaagtagaattcagagtggtagcggcagaagtcagcactagggatctagtgcaagaatatttggcaaatagagtatttctgacctctagtggttgcggaatgcctaagaagaaggatgggggcaaaaagcatgaacttgttcggctcccctaccgatttaaatttgagaaacaattcaagaatccatgcaaagagtggttagaaatgattgaaacaatgtgcaatgacattcttggcaactacaccaag

SEQ ID NO: 105894 - DNA, 299 bp, Zea Mays
agctcataaaacgccttacaccgttcaccctggcgaaaccaagatgtaccgagatctaaagcaaaacttctggtggaagcggatgaaggttgatgtttctaagtatgtggccacctgtgaagtatgtcagcgcgtgaaggccgagcataagtggtctgcaggtttactgaagccattggaaattctggagtggaaatgggagcatatcaccatggattttgtggtgggtttacctcgttctcctcggggcagagatgctatatgggtggtagtggatcgcttgactaagtctgcgcatt

SEQ ID NO: 105895 - DNA, 595 bp, Zea Mays
tgaagatgtccccgtttgaggctttatatggcagaaaatgtaggactcctctttattgggatcaaactggtgaaagacagttctttaggccagaagttatacaagaggcagaagaacaagtacggttgataagggcaaacttgagaactatgtagtcaaggaagaaaagctatgcgggtacccgaagaagactgctagagtttaaggagggtgatcacgtgtatttgaaggtgtcaccgatccagggtatgcgaagatttaaagtcaaagggaagttgtcccctcactttattggacccttcttgatcttaaagcgagtgggtgaagttgcctaccaactggagctacccgaccatcttttggatgtacatgatgtcttccatgtgtcccaactgaagaagtgcctcatagtaccagaagagcagctacctatggaggatcttagtgttcaagatgatctgacttatacagagtatcctattaagatccttgataccttgactcgtgtcatgaggagtaaagtgatcaaaatgtgcaaggtgcaatggagtcatcatggagaagatgaggctacttgggaaagaggagaagagct

SEQ ID NO: 105896 - DNA, 480 bp, Zea Mays
gcagatcaacatccaagcaaaaagcatcagcagcagctttccctcctccagattcagattcatcttggtccatacccctagttgcttctaatggttgttcttgttgttcttctacatctgttgtatcattaccatcttcttgagcatcactatcatcttctccaatatcttgtgttgctgcatttcttgaacgcttcattgtcctaacataggttcgttgagggcaagaacttgaagcagcacctgcaacagctaatcttggcaaatttctatcttggagaacctgagttgcccctaatgcctcatccatagcatgccatatgttgctatcaccatcagcttcattatttttcttcaatccattcattttcccacataaactcttcaagcaccagtgggttgcttctttttcccttggatcccagctctcttattgttcgaaacctattttccatctttctgttgtaactgacatagacc

SEQ ID NO: 105897 - DNA, 291 bp, Zea Mays
aatgaataaaatattaatatgctaaagtacttcctccataatcagtattcagtgtactgaactacaaatgccaacgccacgagtctgatcggcttcatcgcggagggagacaataatttgctgtggtggaaccgttggatgactagaacctgttgtggcggtggggatggaggtgatcctactgcgacgaggagggaggtgatccatggcggcggcgacgtgaagatgacatgagttgtagggaaatgaagtcgatcagatttctctcgcgatcaaacggatggagacgcc

SEQ ID NO: 105898 - DNA, 660 bp, Zea Mays
gcttgtgcatccgcttaataaaaggcttccaccctgcaagttcagaaagcacgtagccgatatgtgtctaatgaagcgactatacttctgaattaatgggtcataaaatacaacaatctcccttaagactaggttctctgttttgagatagaaatgtatattatagtcattgaggccaatagcttataacatgctactataacacctcggtcttggtacatcaatttattgaaaaatggaaattataagttaagaagtaaagcaaagtaagttctaaacataaacagaacaaagggggataatgttggttcaatcaagaaactagaccgaatgcaagaactgtgcccgggttgagggcgtagcaacctctctagttgcgggcctctttcactcgacatacataaataggaagaggaccaataccacgtttgccagtagcatcctcgcccgtacactcctagagaaaaccgatctagtctcctacacgactagtgaggagaaagaccgtcgccgccactcatcctcatcgtctcaagccaagcaacacccttctaatagtctctgtcaaacgtcgaaggtaaagctcgtttctacacctctaacctaaattcggtgattacttcctcatcctttgacatggtggtaaatctatctttcgcg

SEQ ID NO: 105899 - DNA, 558 bp, Zea Mays
gtaatgcagaccagcaactaagataggaaagatgggagctaaagtaccatgtggaaactcagtcaagttatggaaccacagaatcccaccctgtttggtagtacagaaaaaaaagtaggaagttaaatatattgaatgaaaatgagttaaccctgcagcatagtaggatgaatataatccttgaaaaaaaagtatatgttcttcacaaacaggatacacttgccattagacaatgtatatctgggaaataaacggtaactatagtactatactactatcaacattagcatatagattgatgtgcctttggctttttggcacatcaagtctgaatgttgtccatatgtccttccttctcttgtatatataccagttttcaactcaatacaacttatttgttgagtacctagcatggcatccaagctctatagtatcaaaacccagccagtccatatttattacccggatgttggcaactatggctgactaccttcagctgaatccagcccgcaatcccttcaaccacctaacgatgcccctgaatatacattctctttc

SEQ ID NO: 105900 - DNA, 501 bp, Zea Mays
gtcataacctagcgagacagctacggtaaaccatggattatcacctctccacaaaaacattcccaaacatagtgtttgcggcggcatcaaaatcatgtgtcaaacgatccagatattccaccgtcacgcccgcccgcaagccaatgggatcacgaagttcatcaccgtgtaactgtgcgatagctaaagtcactaccgcgctatgatgaatctcgaactctacagcttcgcggatgtgatcctaaatatcaagaagagtcgtgattcctgtctcgggcacggaggaaccctatggcctgatccgcacataagagaaggctcagaactttaagttccatctctgaaagcgccgaacttcagtattagtggcgcttgcagcagcatggactttgaatttttagagcctctattttaatcttgttctggggcgtcagtttttcctaagataggcatggctattacggctgagcatatataagcaatgcaaaacgtcatttactg

SEQ ID NO: 105901 - DNA, 590 bp, Zea Mays
attcatgtagatcatcgctagggtacctatttagtggcctgtaaaatttagaatattaatcttttatttttagtgcttaattctgaaattatatcttaattaattcccgtcatactctagaacaacaatattgttatgttaataactatatatctagaagtttgatcaatgtgattctagttgggttagttgcgtaactttatctagtttatactattaaatctgagtttgatttgagttatatacttcggtcaacattgtttttactaatgtagcagtaatctgtcctggtctataaaatgcagtattttggttaattgattaggagatgagatatttatttttaagcttatgcaatcgtccaccctgctctaattgactatcctagcgtcatacgatcataccttgggctccaaagtgacgaagcccttgacgaccgagaccgttgcgacgatggagcccccgacactcgaagatggagagatggcggagcccctaaaggctggagatgggaccccattaagtcagggcaaaggtcattgaccttagtgtagaaatttagggttgtttatataaacctaggacatttt

SEQ ID NO: 105902 - DNA, 528 bp, Zea Mays
aaggtctagtttttgattggtactgcagcacgtagatcctgtagaaggctttcacatctgctcaagcaccttggctttgcatgaaccatatgtagacacttagtcttactatggcatttagcgtcaactggtgcatgtaaatttcatatttcttcattacattgacaatcatcttgaacatgagcagccgaagtccaccactaagaagcttttgaaaactacaatctcatcttccttcgactcaagattggtctcatcaccagcaaaacgaatgatattatcatcttcaacgtacccaagtttattcaagagctcttggtcactaagcttgatggtagactagccaatatcgatgtagccaggctttgttggccgaagatcgttgtcttctcccgcagcatccaaagcaccctcctctatatggtcttccttagcaacctcgttagccttcagcctcctcgtcctggttgtccccttcatcacctcagaaattacaggacccacaaccatggtgtaaagagtgtcttt

SEQ ID NO: 105903 - DNA, 532 bp, Zea Mays
gctggcttcttagaactagttggatgctataagtaggggtctgctccatgtttgccccaattggttttaatcgttgccccatgttttgccaaagctatatttagtcgggagggttttgttacctccaaactctcggggtcctatcgtctagccatggctcatggtaaacgtctagctctggagtgctctcaccaaggtcggtccaagcgtcgcccgtcacaggaaaggtgggtagtgaccaagcactcactcgactcccgccccttcatcatatcgatgactaactttcctcatagggcagtggactcaagcgttaaaggagaggtcatatcgctttcgtcttctagctcaccgaacggggagtcgaaggctggcccttgtggcgacaaacctgtatcgctggttttgccggccggcaccattggcaccccggtcattgtcgattgtcccgtgatggtcgtgaggttggttagagctggaccccaacctggtcatgttatcttatgccggagggtcgtcgcttcctcctccc

SEQ ID NO: 105904 - DNA, 408 bp, Zea Mays
atcccctgctctggttgctttaaacaatctggaacctttggggttgcatcgaagatctagtcattggtgcatttttctccttttcggctcggtgagccagaatacaatccctcttgagagatggctaggttgaccaactcattgtagctatttgctcgaatagtgttgagacgttcccaaagtcgtgttgagccctctctagaatctatcccttttcttttcatctgagttggcgtggtatccggcgtactagcataggtcgttgaaagcttaggcatactgcagcaccgagcgggttcattgagtcaatgcgaggagctcgttcagcttgcggtccatgaagtctgctaggatatgatgtcccctgatggctgccttgaattcatcccaagtcaatacatggtgagc

SEQ ID NO: 105905 - DNA, 632 bp, Zea Mays
cctggtcagctgcggcgaggtcctggaccccgcttcgccgcccgtgttagccccggcatgaaaagcaaccccagggacgacgctctcaaggaacgagaaagactgcagctgctcgtccagccgctttgccggcgcagctgactctcgggacaccggtggcttctccaactccaacgacgcccctggctcatgatcggcgacctggttccggccaagcgcggtgtcgctcggtgacttgtctacagctgagaccttcgagcagagaccccccatcccctttcccaagacgaataccctgatccccacgccgtccttttccaatttcttgccgccgtcgcagcccgtgatccccacctcgtcctattccaattccttgccgccgtcgcagcaagtgacagagtccatccaataatgtttgggctctatgggcaagaaataaaagaaggaaccgatcaagtccggatggatctgcgaaccagctttagtgtacgggggtaggagaggagggcaacgactccgggagaaaattcggggtggcgtgctccagtggaagctgactagaggtgtgctcggcggtgacggcggcggtcaggggaagagggggtttcttttattttttttctttattttta

SEQ ID NO: 105906 - DNA, 310 bp, Zea Mays
ggacgtttttaggccccctccttccatgaaccttgctgacaaacggtctcctgcagccgacaatggagcaacgaaggatgaagaagattagaatagtatagtctaagtattgtacatatgtgaaataagtaagaaaagttgaattgtataaaggagtctgtataattattacatttcggcaatgtaatatgatggtgtatgttggcatgttatatttttcaaatgtttctttgcctcagatgccatcatggactcacacacacgatggtgcggggacatcccgcgatggggaagatactcccaacccgcc

SEQ ID NO: 105907 - DNA, 665 bp, Zea Mays
tgaactttgagatcggaattgaccatgatccagtgattgtttgactatgattactgctggagtatagatcaacaactttgttacatgaaggttaacaagttattacttaaaaatttgagatcaagaccctaaaacttgctttgtcaggcgtctgaatcaagtccccatggtacagtgacctgacaaagatcaccagattcagtgtatcgccgccggtgatctcgcgccgtgatcgtcgccgccgttgcgattcgtgctcagtgaagtgcatataactgctcggggtaagaaatatcgcgttggggatgtgctcgggacactgtttcaccctggccaccatacccccttgccttacggtcagtctagataacctcgccggagttgtccgcctgccgcgcgatggccacgtgccttgaagctttaccacgtcgcagtaagccgctttagatagctggttcatcgccggtaagcttgccacggtgaaagccacgcatcccttgcgccagtgacctcccctctctccgatcgctgcgcgttttctcaaaattagccaccaccgccgatggaacctataaatttccgccctagtgagctccgctaagtagttgtgcgtccagtgaaccagccctcacctccaatcatcccccacagctccccaatttgtg

SEQ ID NO: 105908 - DNA, 579 bp, Zea Mays
ctatagaggcaactagcgatgaactgcttggagcgtactcgaaggctgaagacgaagctatgacaactgccttcggtgctcggggcaagaagagattgaaccgggtgtttgatgttatcgggtttgtgtacccagactactgctatcccacgcgaaagcaagggaagaaaaggaaagctgctacctcagcatcttctagtgtgtcgaggtcgaagaaggttaaagtcttgatgcgccgaccgaggcacattgagacggccgaagtgccggagctaaatgaaaaggtggacactaggggtgtaaacggtactgatattatctgaccatccgaccgtccgaagaggctaattattaggttggatagttttttcgaatatccgcagaatttttggattttggattcgaattcagatagtacagttcggatatcggatacggatatgatatgactgatatccgccggatttcggatatccggatatcttctcggataactgtccggattttatatttcggatatccggacatctacccagatatcttaccatatttcagatttcagatattcgaatagttaca

SEQ ID NO: 105909 - DNA, 714 bp, Zea Mays
gtaacaaggatccaagagaggaccacactatccatctgacattaggaatgcgtcgacacgatagcgtcggtgaggatgtgtttgtcgacggcgtagtggaggagagtcaacaggacctggtcacaccagcggatgtacttagttgattctagggcaaggactacggagacaagggcctgtattctagggagccccatcgcctaatcatgaagattgatgatgaccgatgcgttggtgtgggaagggcatagtcatcaacggggtgagggtcgtcgcccgggacacccacaaactagcgagtggtttcgatgagctagcgctcgagggtgacgaaggtcgcacactccagctcccaggcacgggcggcagtctacacgcactaatgaatggcggtgagggtagtgaggacatcgttaggagcacgacgttgagaggaagtgagcgccaatgtgtgagtgtagatcgatagggaagggacagagcacgccaagcccctcgcgagagggtaggacccactagctccactcactaggcccaaatatgggaagtgaggagctaaaagctcgacacagagggcagcggtgttgggtaaggagaacgtgggggcgccgccggctcattgagcaagggcggtgggatgaggctactgttgagggccatgtgctggagggaggtggtcgcgctagacattgtggcgttgctggctagagtggg

SEQ ID NO: 105910 - DNA, 286 bp, Zea Mays
cggatgggttgtagttttgcgggcacttgagctcactatctgcaatttgacctgtgactgttttctgtgtggttttttagtgcgaagttgtatttgagaacacttaagagcgcagaatttgctcagctgctgagatccatagacgttctagctgttggttttagctacaaatgctgtttctgaggggacacacgcaaattatttatgttgatttatgatgctagttttctgcagcagatgatacttagtttccttacctggggctgaaatgctgtgccctgtgtct

SEQ ID NO: 105911 - DNA, 327 bp, Zea Mays
gtggcccacatgaatttatgcatcttaaattgttctagttgtccttggacaaactatcaaaaaagctagtgaccaagtttatagaagaatatatagtatcaatatttatgaaacaaacgacacctttttgatatactctttgtataaatttggtcaaactcaacatagattaactcgatgggtactctgaatctctgatatatagaattacataggctatattcttagacagtgcgattatgaaaacatatctgttatctttagtgttccgatggtatcctatctatgcataaatcgtgtcctgaagctgcagattagattgctgag

SEQ ID NO: 105912 - DNA, 557 bp, Zea Mays
gcaaatttcacatcgacaggcatcaccgtcgccgtgccgccattgctcgtcggtggagctcggctcttcaccatctaaggcattatggcggggaatgagttctatgtgttcaccgcatcgtgtagtaggttttggattgggttatgatgcacctgggcgcgtgatgtggtagctccaccgggcagtccgccctgaggcttgcgcgccgccgtctaacggtgacagaattagggagagtcacgtgtgccgtcagaaccttgatggacggtgtggattagaagtagtgtatcggttcggcttgggcttgtcccggtcgttggattgtcaatgtggggacgagatcggatcgcgtgcataacagaccgtagcccttgatcattgatctaaccgcccagatcgcgtaccggttcattttatgttaagtctaatctgtgtcgttcgcgttggatcagacggcccacagttgtcgataccccttcggccagcgagttattcaaaagagccctcggattttaatggattcaacccgcagtcctggcagtgaagtctgagtcttg

SEQ ID NO: 105913 - DNA, 380 bp, Zea Mays
gcggggtttgccccatgcccattttctactaatcatgcagaggaagtacaagctcacgtgccctgagcagtatgaccttttgatctcaaccgagatcccaaacaaaaagtaccctgaactacgaaagatggttatcaagcatatgatgcatggcccatgcgggtcgctaaatcctaactgcccatgcactaagggtcgtgcatcgtgcaagaatcattaccctcggcctttctgtgacacaacttttcatgggaaggattcatatcctgtttacagacgtcatgacgatgggcgtaaggaaaaggttcgagggttcaaattagacaatagatgggttgtccattacaacccttacctccttcggctcttcaactgtcaca

SEQ ID NO: 105914 - DNA, 811 bp, Zea Mays
acagtcaagactatggttgttccaattataatcaagataaagtgaaaatgcagcatgttccttatgcactgtatttgtcccattagcccaacaatatgtcacgtcccctctgaactatgaaggcaatacttttccagttgaatgttctgattagcttgaccgttgtagcatggagacttgcaaacataattagggacactattcttcgagtgcctctgtttattatagtgaggaattccctattgttttttttctcagatgttttgtcgatactcgggattgggttgtgtgcctaggattccatgttttttatttgagctttacttcccagttatacttctcattctttgggttttgtacctaatgacctgtatcgaaacatctaaggttactaaattgttcttaatcggatcatgtacaaacttgtcatcgtggctggggacaaaacgggtgaaactgagtttgctatgtttggccggataacacagcatgtcagcatctcatgcggaaaatggctgcagcggtgtatgccctgtcaatagcatcagcggtaatagctgattgggggaaggagaaagcgttttgggctggacatgtcagttttcttgtttgaattcagtattatcagatgcaatagtcctatcctaattttgattctcgcagaactctaaggtgggtggtggaggaggaggagagcaagggaggacgacgaggctgcctggcggaggcacgaggggaaggtgagcgtcacctgcaaggccacaatcttggtgagactgccaccatgagcgtgccccacgaccgccaccag

SEQ ID NO: 105915 - DNA, 613 bp, Zea Mays
gccgtgggccctgagcgcgcgtttgaatccaacacaaagcaaatcatgctgattgctgccttgttggctagttccatcgtgcatttgattgtcttacccatattttcatctaactggagcattttttattttcttgtcaccacgctctttcctcatataaatatatgtgaaatgcatgttttttttggatttttcattgttcgatagctatatcccatctactccctcctccgaattacttaactagtagcccgtcactcaaattagtgcatgtataaccttatttattatagtctcttgattaaaaaatataagctcttcgcgaacagtctgtctatacatgactcttcatacatattgtatctttaactgtatttatgatctagagacaagggttgtattatgcagtctttttaactatctcttgtacttagaaaatcgatctaggatctcagggttgtacatgtcctaaggtacacctaccctcaccccgttctcatttactctgcttttattataaatgaaacatttgtatctttgatcgttatttaaaaaatacaaattcatgacataagattcatggtcgtgtctgaggggggtcgagggggtcgac

SEQ ID NO: 105916 - DNA, 432 bp, Zea Mays
atttatagcttctacccaaaacatgtcaggtgttttatactcacttagcattgttctagccatatcaatcaacgtgtggttctttctagttaccagtcaatttagttgagaagtatatgtgtcgagtactcaggaaccaggtacctgaaataggaccttcataaacggtcaactccatcgaccaactctgtgagacagaccgaatgaccaactcttggatgatgaccatctctccgatgaccaactccaccgaccactatgcgagatggaccggatgaccaactctccgatgatgaccaactcttcgatgaccaactctgccaaccaactctatgagatggaccagatgaccaactcccagatgatgaccaactctctgctgaccaactttgccgaccaactctgtgagacagaccatatgaccaactctcc

SEQ ID NO: 105917 - DNA, 291 bp, Zea Mays
ttggggaagaagacttggaaacgaggaaagcagggaggaagacgaggctgagaaccagcgtctttgtctgttcattaattcttcgataccttcttacaatactagagagagcttataaactaccgaccagtccgaccaaatacacgacccattcgggcccaaatactcatgtgttgcctcgcctctaccgcttcgttggtgtgacaccgtcagtattgttggtcagcttttccatcttcagtgctccatcttcagtgctggtgagcttctgacgtctttcttgtattgttg

SEQ ID NO: 105918 - DNA, 731 bp, Zea Mays
gtttacatgagttctggtgtgagtcttgctgttgtagcacagaagttatgtgtttgagcagtgttaaaaagcgcaactaaacgctcgcttacacacgtacttttaagcacttatgtgtggaatgcacctcgcctaggccacaggcgtccaattcagcgctggctgacgggtaaatagcgtggaatcaggaagaagggaagctagctcgtgcatgggcaagcagcaggagtaagcgcgagtacagtggaaagcagcacacacagaaacaagattttgtgctgtggccacaaccaccacctctacatctgccgttggtgtcagcagcaaggataatctcaagcactaactcctcatggcgtcaacggtgcagcgcagccctgcacccctgcaccacacatgtgcctcccaggtgcatgcttatcaagaggcttatgccacctgagttgactacctgatgccagcaatcccaaacctgccaaagctactgctggccttttgttgtaacaaggattgggctaaagttgtgatccagtgatacaattaaacatatcacagtcaaaaaaagcacaagcacttaattgtgtttaatctccagttctccattaaggcatccaaggcactaatcagtggcctggcgcctagccccttttgtccgccagtgcctcaaaaaccatgtttgcaagcaaagggaactgataaataccaaataaaaaaatgatattttatgcgcc

SEQ ID NO: 105919 - DNA, 502 bp, Zea Mays
ttcccatagcttgacccctaaatcgactaaagccttcttgtgcactcgttgtgtctaagaaaaaaaattgttgtttggtgtctagttgcacaaaccctatcaaggccatgtttcttccatagatcctgtcccgaatcttcataacctttctgatgctcatcctaatcgatctcatgcgactacctctcttttcgcctggatctagtaacctttacctttgtgaatcatgttggctttatcatctgaatctctggatcccttaatgattctgctccgttatctggttatctgctataacctgttctcatgtatcaaatgtgaatcagtctaatatatcattatgatcgttctcatactcttctctgtggatcatgacgttgttttattgattctatctctaagcggtgtgtccattcggttcaatggattatgttgttgtctttagttctctaatgtctcagcaagttgccaaccatgatctcatgagtgtttccttctcata

SEQ ID NO: 105920 - DNA, 630 bp, Zea Mays
tcgaggctggacaccagcgcgtataaaagagttgtcagcggccttcgggaggtagtctcaccgagacctggatctgtacacagctttagctaaagagcgttagtgatacacccgcagacctcgtcatctgacatttttcatcctttgatacaagctcgggatttgcagtgttttggctaggggaagcaagttgtgtgtccggaccccctggatggtggttctagatagggatggcaacaagtttaaaacctgcgggtacagggattacaaacccgtacccgcgagattaatgttaaacccgtacccgcacccgctacccgcgacgggtagcgtatgttacccaaacccgctacctgcgggtttatggcacccgcgggtacacccgcgggcacaatcatataataaatatttattaaactgatagcacataataataaatatttattaaactgataaaaacatgtaccgatcttagccaaaagttctatgagttccctggcgcatgtagtcttcttttatatcatttgattggctccgctcgctcaaagctttcggggtggcactaaattgagatgcatgtgctctacagtctacacagacacacatatgggtatgcgggtttgtgggcac

SEQ ID NO: 105921 - DNA, 1268 bp, Zea Mays
cgcgattaatcggacgatttgtaaacagaggtatggacctcaatctaatgaagccaagattcagtttctgcaagagctgagacaaattagagcagcttgtcagggtccttggatgatttctgggaatttcaatctcatattgcaggccgaggataaaaacaactcgcatattaatcgggctatgatgggtcgattcacaaaattggtagatgatctagctcttaaagagattcgactacacgggcgcaagtttacttggtctaatcagccgaatcagcctactcttgtcaagcttgatagagtgctatgctctattgactaggaggaattgttccctaatgcaatgttacaaagtgcagcttctgaagattctggtcactgtcctttattattgggtttcagagataacaaagatgttaaaaggcgttttcattttgaatccttctggacaaagattgaagggtttcttgaagtggtgcagaatgcttggagttctgttcctattggccaatgtccattttccacttttgatttaaaactcaaaggtgggacacattgagactcggttgcatcttgctagagacttgatccatcagcttgagattgcgcaggaggaagacgcgcagcaaggtggagtactgggcgtcgagggccaggggaggcacgaccaccagggttggggcgcgatgggaaacgacggcggctggtaaaggataaggaagaggatggatcgtgggaataatgccaaggagatatttttccacatttcctctctttttttatttctctttggcttttctatttatgcaaaaatctgtatacatccgtgttctaagatttagatcaaaacgagatgcaaacgaaccgaacaaaatcacatcagccttgatatttgagactgcacttgatccggttgaaatcagataaattttatttgcagaccgaacactcagatcagggcaagaaacaaatagatcgaaccaaattacatcggctttgatattttaagcgacatttggtttagtcaaacatatatgaattttgccgccatccaaacattcgactagataacaattcgattaaggaatcggtgcatggtttttctcggacaacgggcggggtcccaattttacagaaaatcagtcgttttccgatttttcatattcacttagacgcgtaatccgaacgtctcaaactcgccatcatatgagattagtgaattccgaacttcatgaaatctttttaataatctgatatggacagagatg

SEQ ID NO: 105922 - DNA, 366 bp, Zea Mays
gagatcgattggttgttcccaaggaccctgagctcagaaagaagatactagatgaagctcacctttccaaattttccatgcaccctagaagcaacaagatgtaccatgatctcagatctttatattggtggaccagaatgaagagggaaatcgccaagtacgtatctgagtgtgacacttgccagaggataaaagctagtcacttgagggcagcaggccctttgcaaccccttcccataccatcttggaaatgggaggacatttgcatggactttatagtgggattgcccaatacatccaggcaccatgattctatttgggttattgtggacagattgactaagactgctcatttcttaccagtgc

SEQ ID NO: 105923 - DNA, 891 bp, Zea Mays
aattattatttgcactctgatttccagagcgatactgagaaccgtgggagttgttgtgatgacaggtgctccttctagactgtccctgaaattttcttttgtgatcagatagctccttccttttgctttacaagtcaattttcttgttaagtagagcctgaaagtttggaaatttgtggctctgaagctagtagttcaaaggtccaatcaagctttctaagaaacgctcttggcatttttcatcagtgtctacctcctctggagcataacgtgaaagttgagtaaagcgatcacaatactcactaacagacatgtttccttgggtaagtgacaagaattctttcttatttagctttattattctcgagggatatggtgagcaggaaagctatcttgaaattcctgttaggtgataatgctagcatctgtatgtgctgcggtgtaggcaccccaccagtcagacgtagctccttccagtcttccagaagcatgtaagactgtttccctgtcattgcactatgtgatatccaacttcttacttatcaccttgagccaatcatcgacgtccaagggatcaactaagtgagagaaagtaggtggctgatggctcataaaatccctatgcttatctctagcttgtggtgcattctattggggttgattctgttgattttgttggttgttgtagttgctgcactgatgttgtgagaccctatagtagtttcatctgtgcagcaatgaattgctccatagttggattcgatggcgttggtggcaactgctgacgagagtgttgatattgattctatctcgaacctgagcgagtattcaccatttggttggttagaaagtgcatccttttagataagtgaaaatagagaaagattttag

SEQ ID NO: 105924 - DNA, 424 bp, Zea Mays
gtgtttatgacgacgcggccgcgtagtgtggtgagctggaacaccttgatcgctggattctcattgaatggtcgcggagttgaggggattgatctgttccaggagatgaggaggcaagggatggagcctaatgctgtgacgttcttggcagtgcttggatgctgtgcgcatgctggggcagtggatattgggcgggagatcttccggagcatgctgtcggagcatgggactgaggcagcaattgagcactacgggtgtatggtggatttatttggaagatctggtctccttgaagaggcacacgtattgattcaggggatgccaatgaagcctaatgctgcgatatggggagcacttttaagtgcgtgtcgggctcatgctgggcttggccttgctgaggtggctctgaaagagcttatcaatc

SEQ ID NO: 105925 - DNA, 665 bp, Zea Mays
tcttctactactgctttgtagccaaccgacgctgccccggttagccgcatcttgtaggatcagaggtagggtggttcggtaccctcataacccctatagatggatagaaggacagattgagacaaagaaataagggcgaatgtagaagcaaaaggtccaggactcaccggggatacatagccctgctcggggcgcattacgacagggatggtataatccgccttccccatcgccccccttgattcgcttgaggagctcgttggtggaaagggcggccaacgccatacgggaactctccatggaggcctcgggcgtcatctcgtccaggcgcaagcaccgctccaccagcggcagcaccctcctatggtggaaggcaacgatgaccctgatcgtgttaagcccccagtcacggagcctctgtagggcatccaggaggggatatagctaggcctggtgctcccacggtgtgcctcaccaccagtcctcacccacagtagtcatgacccgcttagtgtacgtaggtagcctctcgtcatcgttgcgaaggtagaaccagtgactctgccatcccttgttcgaagaggtaagagtggaagggatgtacaactgtgcccgatctgagcgcacctagagtgtgcagtcaccgaccctcaccgcgtggtgga

SEQ ID NO: 105926 - DNA, 1719 bp, Zea Mays
aattaatgtagattgaaatctttgcttgcttttagctagtatctgtaagtaaatcaaagcaaatcacctcttaagaagattgatgaaaatgtaacaaccaccaagtgaatttacttgctccaagaaagatggtacaagcgagttctgtgaaagggcgcggataatcatatggagtatatcctcaacacatgcaacatcttgacttcgttcaagaaaggaaacaagagctctgatatcatgttgagaaacctttagcctgaaacagataattccatcaccaattcagcccaaaataatatgaatgaaaatgtaagcacatgcaaatcaagaaaaaaaagtttcagatttgtgtacagggcaacattgaaaatgaaaaggacagaaatttgggactgctaatggagagaaaaaacataagataatctttgacgaacagttgcaagtaatttactttaagctcatttctgccagactcaacaggagaagtcggatcttgcgaatttcttccatgcttggtctctccccagtcacctttttgcttaccagcaaaggcttagaaaaccttggatctagcttttccgagtagaactgttttatgacatcaatgatcctagggagcgcacataatactggtaaaaatttcccatcagcttcaaaatattgtatcagaaacaaaaaaagttctctctgtacttgataggttgcatatgcccagatatgtggattcaagtaaaactgtgaaagagcatctctcaatagaatatctgacatgcctgaaaaaaggcagataagctactgatataacctcttccaaacaagtaggaagataagagagggagagggaggaggagagctcactagaggtcttcaaaatagtaaacatgtatttcgatgctgaaagagtcttgatatttagcagctgcggtgaaacagactggaacaggaaccctaaaatagaaaatccagaaagaagatgcatctgttgctgatttgctatatttccatctagaacagatgcaacaagctcaataacttgaccagccaattgatctctggtggcaaactctccattctgaaccacagcatcatcaaagtggatcagaagagggaaaaatacagaaacgccaccaacacaatagattatttcttgcagcaggcgccgggagcataattttgtcccacccatggtggttgcctcaaacttactcttgtcaagaccatccagtgcagatgatacattaaacaaagtccgattgttactagcctacagagaagaaaaggataagtattcaattatatgattccagcattgtcttgaaaaagatagaatatcatgcttggaggccggctcaaacctgtgcattcaagccaaaaatcattttcgatgaaatgccatcctttgcatcaagtattcccttgtaccgtgagtcatcatttgtaagcaaattctgatcaccaaggaaagagtacatgtaacttggtcctaggttataaatgccccttatttgttcaggggagagagcatcggaaaatgcataaacagggcccatttgaccagtaaaagcaagagtgttctcaaagccaagagaagaaggttcttcaccgatgggcatcaattctgtaccaacactacagcgagtcattagttcatttacttttgtgtacctgcaaataccaaaagaaagataagatactattgaaaaatagacatcataaaag

SEQ ID NO: 105927 - DNA, 732 bp, Zea Mays
tctggcccagacacttgataggctcttttagaaatgggggcggtgccagggataagctctatggaaaattcgacttttctctcgggtggcatgcctgttagttcctcgggaaacacatctggaaagtccgacacaaccctgatagcctcgagcgggttggcctccttgctatcaaccgaaatctggtgacaatctcctttcgctgttttaggcatccttagctcagccactacctcctctccgggcggggacttcaatgttatggtcctcttgtcacagctaacattcgcttcatatttcattaaccaattcatccttaggatgacatctaccccaggggtgtctattactattaggttgctggggaaccctatcccccttatttccacccttacatttgagcatatcttatctgcttgcactttaccaccgaccgaattaaccctcatgggcggcatcattgactctactgagatgttatgcatttctacccatgttgtagtgacaaatgaatgagttgcaccagtatcaaatagcacttttgctggatgagattcgactaagaacatacctactgccacatctggtgcatcctggatcgcttcggcctccaagtggttcacctttccacggttgtacgcatggccacgataacctgttgcctgttgaggtacaccttgccttgctggagcattggggtttgtttgctgttgcgccatcttctttgggcaa

SEQ ID NO: 105928 - DNA, 336 bp, Zea Mays
gcacagatagcccatcaggccgagcatggcccgacacgactcatttgtggcctagccatactcgctctaatctagcccaccatatatacacctatgatagactcgacctccattttaaaactattaccgagctctgttggagaaaatgatctatagaaaaaatagagaaaaataagataatttgagctctgttacaaagcgaaccttagaacacccggcatggtagcacaacacgaccagtttaaaactagttgggccaggcttgggcttagaatttgggcatcccaactcatttaagaagattagatccatacttttcatgagtaagtacaatcc

SEQ ID NO: 105929 - DNA, 359 bp, Zea Mays
aggagttggtttgcacaagatatgttccccttcaaatttcactaagtgaacacaaaaaataacctcacacatctcccaccaataaaaccaactcaccgaatcgcttcatacaccttatctctcctacctcgatcacatccaacagtcataaattgttggatcattcctcatcatcactcataaatcatcagtcacaatttggagagcactcccagccccaagctcccgacgacgcgatcaacgacctaaccgcaatcaatggcgtcacttgatcaccgcgatcaacagcccgcgccaacgaccagctccctctcaagtctcaaacttgatccacgtcgtaacttacgcgccacttccgc

SEQ ID NO: 105930 - DNA, 612 bp, Zea Mays
gctggtacaaaaaaataagaccatactcctaattcacctaagcttaaatcggtaacttagatcaacccggccatacccaacaacctgacctacataataggttacataacctatcccaatcattcagaagcaaaacaaccaaaccagattatgactaatatcatttaacttatagccacctactaaactagctgctccacctactactttatcttaactacatgtccctaattctgataacaacttcaagaacgaagatcgaagatgatcaacttcatcaagaaagcatgagcaccaactcaagtcttcaaggatcaagtgagatcaccaagatgagtcaagatccacaatcttggatggagtcttttcttaccccattccttcttatccaaaactatatatgctttaaagatatcattcatcctgcataataaagtggttatacccatatatacccaggccttcctaatcacccactattgtcaaaaaaagggaaactccggatcttaaacctattatagactaaaagccgaatcacaaaccaattcttctatatcccttttcttactaatctcgaggatgagattatttttaaggggggtaggatttgta

SEQ ID NO: 105931 - DNA, 424 bp, Zea Mays
gtaacttctaaaccttcattttatagcacaaaggataaagttacatccttgtctagacgacaggcctgaccaacagagatccaactacttttatcttatcagagatccaactacttttatcttattgtagttattgtatagtatatgatgcatgcctctggagtgccatcatggcaagtgtgccatgccatagtgataggtatgagtgtctgtaccgagtatgacgtagttggcaacagctctagctgcaagcagtgatcacggatacacatgtggcctcaagtgtagctacagtgatgcttttgaccgcaacatcgtcccttgcaataaatacgaagaatatggagcttatctcaaccacctaaagcctcgcaatcggcctggtcgagacccaagggcacacatggtgccgaggccgtgtcac

SEQ ID NO: 105932 - DNA, 453 bp, Zea Mays
caatcaccacctgggtcatccctagccataaatagctaacgtcgctgcctccctagctatatctggtgctgacgggagagggtgacaatgtcttgttccgccgtgcagagagggaagagagcagtcaccgccatggctatcaatctcgggccggggcatgacttggccctcgataagggtatagagagcacggccgggtcacgtggaacctgcccaagggagtaatcaagcgcaaggagttgtgatcgggggcgatttctcgccggggtacatcatcctccatcgggccgccattcaccgtggccgaccctcgctccatctccaccgtcgttaaggactcctctattgagtttgctatcacctccacatcgcgtagagacttgtagattgggggttagttccctaaagcgttggcttagtacgtctccgacgggggaccaacgcaggaagggc

SEQ ID NO: 105933 - DNA, 676 bp, Zea Mays
gataagcagttcaaagggttcacaatacaacatatagagtgaaacaagaatgaagacgttgacatgctaagaaaagcagcagcgaaaggcgaccccataccctcagatgtgttcttccacacaattggcacaccagccataagaaatcccgaaggcctacaaatcacagaagatcccaaaggccaaagaattgtaaacctaataatgatagaagactagagagcacacataaccctttaccttcatggccactatcaccccactgactaggatgaagccaagaggttgaagcaccgaagccgtgacttcgcagtaatagaaggccagccatacaaaaaaggaataagtcaacatatgctcaagtgcatcacagcggtcgaaggcatcgaactcctccgagaggtccacaaatgcatatgcggttcacactcgggacccagagccctcgcctacaaggtcatgcgccagggattctacttaccaaccatcgcgtgcacagcgaaccgtgtagtccgctcttacgaagcatgctataaattttcacctcaagcggggcaccttcacagttcacaaagctgatcacccacacctggcccttacaacgatgggccttgacatagtcggaccactacccacagcacaaggcaacctcaaatttgcctttgttgcagtggaa

SEQ ID NO: 105934 - DNA, 496 bp, Zea Mays
cgataaaaattgatccaaaaaggtgggtcgaaatttgacctctcgtctagatgaaccacaacaagtacaatgataagcctctaacgatgcactctttctttcttcctcttcttctcacgacaatctatactgttgcaaccatctcactgtttcaatcaatgaaaaacatggtttatccatcataaatagagagaggaaccaagaaattgaaaccaaaatggagagacaagattatttctaacccaaagttcaatgaagatgatggcagacggcgacgacggcaagctctaaacctttcttcccctttcttctcttctttctttctttctccatgtggtagacagtatgtggtgctcaaggagaaaggaattgcacgtcttgtccctattattaggtatgtggggttttatttatttatttaaaaactgatagttagtgtgactctatcattcatagctcgattaatatgactcaatagttaaatagaaaatatttg

SEQ ID NO: 105935 - DNA, 520 bp, Zea Mays
gaccggcggcggctcatcaggggcagcgtagtgtcctagatctgcaagcaccgtgggaatcgggaggcggttggagaaaggcatgagagcgctcggcaatcggcatcgggaacagaggaagatgtccaaggtagacacgaacgatgggaacagaagtagcgttcccctagaaccagagggagatacgtgaataggactcataggagtatccacgtttggccaattagggcttgatgtttaatatacataacgctagagtatgttatgatgattttaataatgaatattaaatttttatcaccagtcttctgaaaattgtcataaacaagggaatctaatgacgaattattatattatcattgactatttgtcgaagaagaccataactgttgtagtgaatattaaatgttactagcaacacatattaactattattgtcacatcctagttcatcaatacattccgctagcaatgcatattaggtgtcgatgcatcctatttaaacaacgaatggtgctag

SEQ ID NO: 105936 - DNA, 506 bp, Zea Mays
caccctcattctttgtggcagccatacacagcattggcgtcatgctgctgttgatggtcagccaaacgcagtgggcagggcagccaaagagatcgaaaaggaaggacaaggcaaggacgatagcgaacagagtgaggtctcactcacatcctgtcgtcacgattcgtgaggctccaaacaccttaaagaagatgacaatatggatagccccatctttgttttcattcacaaacttcgttttcagcatcacctccaactccagagccaaaaacaaaaagcaggacacacaaacagtgcagtggagtggagtgggaagagctcatcttagccatactgggtagggcaggggccgtgcacactcgcctccactcagccagcgagagcgtcctggccacacaaaactgccaccagaagtgacagctgagcctgagcttcgcgtgtcctgaactcctgatgtcaacccaagccacagccaagcaacattcagacaagagcttcagctgaac

SEQ ID NO: 105937 - DNA, 400 bp, Zea Mays
gcggattactcgttgtcctctgttgccttctctatggtagggtggttggcctagtgacagggtccacgccatgacaggtgacgcctttctcctagcatactttctcctgagccatcatttgaactgcatggatgtgccatagcctaacccgcactttcccttacccagaatggccattggtactatcctgttaattctggatttgggaggtcggacgaggtagactctacaggatgttggtttgcgctctgacccctgggcgatcagaggtggggtgaaatggggagtcggcctgtcctccttttggtccttctaggatcgggggtcggtcgaggcgaagtctcgatgcaagactgcttgtgaaggtcttgggtcggataaaacgtgtcgttttttgttg

SEQ ID NO: 105938 - DNA, 685 bp, Zea Mays
cgggttattaaaaattcgggttttaagaaggcggaaccgaaatactgttcgggtatctgataaccgaaaattcggttacccgaccttaggagtcggttttcgggttctacccgaataataaccagcagcccatactcataaactgtgaacacaaatataacaagccaataagcaacaagggcataagggataaggcataagggccaataagcaccaggcagccacgccacagagacagaggcacagtcgcactcgcacagacacacagttcacgacttcacgccacactactcactacactagacatttagagttcaagacataggggccattcggccagcatggagcagcccagcaacaagccaacaacaactcggccagttaagcagcaggagtgcaggaccagcaccacgcgtcgccagtcgccaccgcccaccaggcaccaggcaccagcccagctgtacagctcaagtccaagactaaaaagacaacagattaggatgcaactcagtaactcaccagctgtacagctcaagtccatttactcattttgtcacaaaaacaactcagtaactcacctatttaggaattaggatgcagtggaccagtggttgatgttgatggtattgtcctgctagacttgtttccttgtgactgggaaatagattcatccaacttgcgttta

SEQ ID NO: 105939 - DNA, 462 bp, Zea Mays
cccacttcctgaaggggctcagaccagaactcaagaccatcttagccagccaagacttcctcagtttctcgcacctcttcaacaaagccatgcaagtggaaagggcaaaggaagaagaaaaaggccatctcaagacaaaattccaagtcctccgagctcagcagcaagaccggcaccagaaaactcaatcctttggatttccacccaagggaccaagcttcactagaccagctagacccaccccgtcacgtttcagtcagcacagtcatagctcctatcatgccccctcagttgcaagcaaccaacccccggcgaatgcgtgttggcactgtggggatccaagtcacttcaagaacaactgtccccagctgaagccatcaggacctgcttactccaactcggtgaatggccccaagaatacctcagcatccgcccccaaggcgccctcctccatcaaccagc

SEQ ID NO: 105940 - DNA, 581 bp, Zea Mays
gtttggttagagggtgtacttactcgtttctagagattagtgcgctctggctagcagctagctagagaggagagggagtgggcgctgagcagcaagagctagctaggagtacagtagtacgtgctactagagtagaagaggcccaccggggaggcacaggcacagagcagtctgcgatgcattcattccttgttgagttattatgggatgtgaccgtgcgtacagtgcgtgtttagtgtagctaaaacaggcatgcatgcagtgtgaagctactatagctggtggggggtacggtacctactaactaggctttatttgcagagctcattactggtgggagaggagatcaaacttaggttcatgaatatcatgtaatggaatgttccttgcttgccggtcccccaactcccaacctccaccaattcctctctctcactctctctctctctcgcatctagatcaagatccctcctgctccacaccctgtgtcgctccgtgtgtatggacttttcttttgcctgccttatcttttgtatgtgtgcccacgaaagaataagcagcctggtctttttggattggcg

SEQ ID NO: 105941 - DNA, 426 bp, Zea Mays
atcatgtgattcagccttcgttttggccgggtgccgaaggcagcagtcattaactgatcctccttcttggtgtagttgccaaggatttcattgcacatagtttcaatcatttctaaccactcttggcatggcttcttgaactctttctcaaacttgaaacggtaagggagctgaacaagttcgtgctttttgcccccatccttcttcttgggcattccccagccactagaggttggaaatactctatttgctaagaattcctgcactagatccctagtgatgacttcggtcgctaccactctgaactctacctcggctacttggcatggggagccaagttgcatatggcacaagggccttgtcatcccgaagctcaatttcagtggacccatgaccatagtcatcagcttctctctccttttctcg

SEQ ID NO: 105942 - DNA, 337 bp, Zea Mays
gccagtcatttgaaggcagcaggccctttgcaatcccttcccataccatcttggaaatgggaggacatttgcatggacttcatagtgggattgcccaatacctccaggcaccatgattctatttgggttattgtggacagattaaataagactgctcatttcttgccagtgcacaccacccacaggacagagaagtatgcagagatctacattgaccagatagttcgtctgcatgggataccaaggactatagtctcagaccgaggagcaccatttgtggcacaattttgggaacaattgcaggaatcacttgggacccaggtcatacgaagctcag

SEQ ID NO: 105943 - DNA, 997 bp, Zea Mays
gtaatatttgacatctgattaaagaagttgcatgatatttgttaatcaagatctctattcctattaattaggaagtatataaataggctcttatgctctaaggacatataatgtataaggtagaatcaccctaaaggcatgcaaagtgtataacatagaatcatactttaaggtacaatgatgtggctaaggccaaagtgttgtgcataagtgtcatggttttgacccgacgttagtgaatttgtaggttaggatggggttagcgtgcttttgtcctaatggctttgcacttggtgattctaaggaagaaagtttagatgggttcggagagagccctacatttagtatggagctaaagtttttgttgcttggttttgtgtgttacaaggcgaagcgcttggctttcgtgctcgtgtgaggaatgttaccaacttagtttgcctgcctccacaacgaggcacccaatccattatatagcggagggagcgagtaatcattgttatatgatgtttttgatggggtacgtcatctctacctttagtcgtgtagttgctctagtgtgtctgctttgtcatccttgagatgacttggctataggggtggttgagtcctaaacgtgttcgaagccatgttgctaggtatgcttttctgagaggcatgtggtgattttcctcatatttctcttgctttcctcacatctggctttattgacttctatacccttggagcgtgactgaccatgacctgtgaggccctattcgtacctttgatggtgaaatagttggttggaggagtcattagtctcatgtatcgtacatgtttctgccctttgcacgcctcagttaggagtccgcgccgagtgatcaaaatatcataaatgcacttccccctagccatgttgtgtggcttctaggtcatggggtctatcggtaccctaaatataaggtacccactcctgttgggtcaaggcgagacccatgtggttgcccataaccac

SEQ ID NO: 105944 - DNA, 493 bp, Zea Mays
cgggtggtataccgaggcgaagacaggcttggtgccgatggagaaacagaaatccctgaagtcttggctgtcaaactgtttgccgttgtcgactatgagttcggacgggactccaaagcggcaggaaatgttttgccagaagaacttgtgggcggtcttcgacgttattatggatactgctctagactcgatccacttggtgaagtactcaacgacaacgaaggtgaatttgaggttcccttgagccataggcagtggtccgacaatatccagcccctagcgttgaagtggccatgtatgggcgattagcttggtgaattgcgaagggttgcttgagcgaggggaaaacttttggcatgcttcgcaagacctcgcgactcgattcacagtacagattattgcgggccagtaaaatccttgacggatcaccttggcagcgagggccctgggtcctgagtgggagccgcaagttccgctgtggacttcgcgaagg

SEQ ID NO: 105945 - DNA, 363 bp, Zea Mays
aggtcgaatcctgagctggtgataacctaacctcagatttatctttgaaaacacgctggctcctctcaactggtcgaacagatcttctattctgggcaaggggtacttgttcttgattgtgacctcattcagtgccatctttcttctccacgaacaggacaggggcggtccaaggtgaggtgcttggccttatataacccttctccgacagctcatcaatctgcttcttaagctcaaccaactctggtctagacactctataggctctttcagaaatgggggtggtgccaggaagaagctctatagcaaactcaactttccgcttaggtggcacacctggtaagtcttccgggaacacatctg

SEQ ID NO: 105946 - DNA, 605 bp, Zea Mays
gttgaattgtgatggtgtctgcctacttgtagtttgtatttgcagtttagatgatatgattcctcagttcatttgatttcctattcaagaaaatagtaattgtgtgataagatgataattacccgatgaccaaggtggtcaaattggtacttgtcaggagatgtcatgaaacaaacatgcaagcataatttattaattattttgttccagatgtagtgtaatacttcaatagaatgatatgctgcataggaagagtgttgttgctatagctgttcctatttcaactaggtaggccttcggtattcatgcttccttctatcaagagcattgtggcagtacgaaatccttcctcagccttgattataattttcaccaggcatatcttatttttggacacttgctgcattctaaccctatcgcttaaccgttcgcttctttccattgcttcaacgcttgtttcaagcaatagtcaagagttactaaagtagtttgtcctattcaaagctataatcagtgactaatatgcacacaacaataaagacagttgttttttctagtgagaaatcaagtactgtttttacacagctatagcgtctgtgaatttg

SEQ ID NO: 105947 - DNA, 429 bp, Zea Mays
taaaatgtgcaatatcatatcagatctctgtgtttagttctataagaaaagagagtatcaaaaaaagagaagaaagaaaagtacccaaaaaagtgttgaacaagattgtgaaagaaaagtagaacgatcagtttgtttatgtgcacaggtgctgaaagttcatcaagttgttcaaccagtttgctattgtcatttggtgcaaaattttggttgggtctgatcgcaacacttgcattccaaccatactccttgatttgcatcgaatctgaaaaattctttgcgcgcgtgtttgatctacttacatcactcgtatcttgtggtcagcactaggcagtgaacttctagttggatggttatttaactttacaacaactagaattcagattgcattccttgtttactattctccaccaagctccacatataagc

SEQ ID NO: 105948 - DNA, 546 bp, Zea Mays
ggtgtttctaatggtaatggggatattggtggtgatgtgtcagcaaagggtgctaaaccatctgtttctagggcaaagtgctggaagcatatggataagcgggagattgtcgagaatggtataaaaaagttatattgttgtatgtcactatgtaaaactgagttgagtgcagattctactggtggcactgggcatttgaatcgacacttcagagcttgtttgaaaaaggcagggcaaacttttggtacaggtgtgcaaactcaactaaacttcgccgcggacggcactgtaagtacttgggtttacaatccacaattagcgcatgaagaaattattaaatacattgtttttgaagacttacctattatgatgggagaaagccctaattttaagaatctgattcagcgtgccttctgcccacaataccaacatgctagtagaactactataaaatctaatttgatgtctcagtaccgcaaacaactagctgctcttaaagaaagtttaaaaaaagttcagttttcgttttctttaactttagatatt

SEQ ID NO: 105949 - DNA, 298 bp, Zea Mays
acctctgacaccacattgtgtcaagaaatggagaaattaaacctgggaatgattcaacatggaaccttgaaccaattgaagcttgagtcgattcttctgcaaaagattattgatgaacaaagaagtgataagggtatgagacatattcatgagaaaatagaagccggcaaagcaaattgttttagaagggataatcaaggcattgtatggtttaataaccgcatagttgtgcctaaggatgatgaaatccgccagcaaatattggacgaagctcatcttagtcgatattctattcatc

SEQ ID NO: 105950 - DNA, 693 bp, Zea Mays
tccctccaacagtcagcagagcaggacccagtaccagggcagagcacgagtcaaccacgtcgacgctcaagaggcccagcaagctccgggggtagtgctcggtgagttccttgttgaatttactcccgctactgtgctttttgattcaggagcatcccattcttttatagccactaagtttgtggaaaagcatggcatcccctcttcacccctagaaattcctttggtcacccgaaccccggggtcagaccttctatgccagctcaagtgctcccaagtcagaattcttttaagtggggtagtgttcctagcggacttaaccgtcttgccatcccaagggattgatgtgatcctaggaatggattggctaactaagcacaagggtatcataagttgcgcaagtaagaccgtccttctcaccgaccgccaaggaaaagtagtttcctgtctggcccaaccacccgccaacgatccaatgatgtttaatctggcagcagaaaacatattcgtaatagaagagttcgtggatgtattttcggaagagtttcctggaatgccacccgaaagaggagtggagttctatatagatctcattcctggcactacgcccattgcaaagagaccataccgcatggcccccacagagttagcagaattgaaactccagattgcagagctgcaacaaaaagggta

SEQ ID NO: 105951 - DNA, 285 bp, Zea Mays
ggatcatggaggaggagaaggtttggatggcctcttaccacctcgagggcgtggcccagtcgtggtacctccagctacagacggatgaggggactccgcgctggcaccgcttcaaggacatcctccagttgcgcttcgggcctcccctacgctcggcgccgctgttcgaactcgctgagtgtaggcgtacaggcaccatggaggagtaccagaaccgcttccaggagctactaccgcgcgccggaccactggaggaacgccagcgcgtgcaactcttcacgggcg

SEQ ID NO: 105952 - DNA, 4440 bp, Zea Mays
cacgaaagggaggggatactgggtagcaattggtgtggagaggaaaggttcaagttgattttaaccaaggcagcacgacggcagcgacgacgacatacaacaacacgacggtaggggtgatgatggcagcgccatcgggtggtggatgcagtggctgtcttgactgcctgcatgatattgtgcatgcactatcgatgggatcatgcctgacagtagagcagcggcctgccatggctacgggaggtgcgcacaaagggagagatgtaaaagagaggaaggaaaaggtggagggtaggataataggaaatggagtgggtaatttggcttgcatgttcacgcgacaggggaagaagggtaccaaccaggatgccatggttgtttgggaggtatgttcccatcgaccttgattatatttctttacattgctaaagggttcacctcttttacactctgttctttttaaatttctaatgtttattatcattcagatcgtctatctataagaatcaataagaaatacatgcatataataaggcatattgaactagaaaagaaagactaaaaatcaaattttgctgagctatccacccttttaatatctaaggtgacattatatattgaaacaattcagtttttgtacgtgatgtatcttggtggaaacaatcaatgacgtagagtattggccaccgatcttcattattcctaaaactgtgcatagcctcttgttcctcctctacccttggatgcacccctaacctattcttgtccattcagcatgctaccaccctcccttcttttggcctccctcaactatcaccttttgatgtgtttttcttcctccttgcacatccatagatcaaatagttaattttggatttctcattgcgttctcatggaatatttctttcatttttcttattttctaaaaatataatataatgcaccaatcaaaattataaaaaggacaattcaaaggatggtttagcgatggagcaagcaacatctccatcagggatggaggcagcagtagggcgggcgctcgagccccctcctgttcctgagaccatggagtcccactgaagtctccactaaaatttaaaatgtacacaatataatataaaaggggcttctatattgtagtgatttagtttaggctctcctaaactttctcttggctccgtctttgatctccatacagtttcaattaaaattagaggtttggatattacaaacaatatattgatttataaaaaaacatcttgtgatttgaccacctcaaaatagtatcactgcttattattaatgtagtaaacgaagattgtgctttgggagatgtatgcaataaaaatatttaaatatcgattcattattgactgcagtgagttgtatataaacatttgaagtcaaaacaactatgtttctttgttgatctacaaatatggtatatataaattagagcatgtttggcatggctctggctcttttaattatgctccggctctggcttctcttcaagagcaccttatctataggagctagtgttttttaacaaaatcgtttgataaaacagctcctcttgacacaagagaagggcaatatggagagtgggggaggagccgctaggagctagttttttttgctctggcttctctctataaaaacgactctggctcctcagtgctctttgttgagagctatttttagaccatttggaagggctcctacaggaactggagccggtttggaagccctctcaaacacgcccttagttgtcaaagttgtattttgtagattctgtgatgtccaaaacaaacttcctctgaccagatcaagtacattttgcctaagttttgacaatgaaactgttgagatttaaatagcagaacgtgacacgagaaaactgcggagagagtggcagaggggccctttctccctcaagccatcacaatgcgcaattgggtctaggagcaaggttttggtgtcgtgcacaaaaattccaccgtgcagcgcgttatccttcggtagtgtgtggtggtgatacaagtttgacgagttttgtgggtttgtttgttcctgccatttgcctgtctgcattggctaaaaaccttggcaagcataggttagatccaacaatggcgaccctttaggcaccactctcttcttggaagcattgccaaatttcccttgaaatatggggaaactctgccttcattgttaggtgcgctagggctacctgtgcgtaggtagctgatgcccgaagatgtggatcaagtagatgagagatgatgaggatggttggttccattggttgtatgttcttgtcatgtttgtgttggttgcttccggttggtcagtcaagatgttgtttggaggcttttcgatggttttcttcagtgatctttttgtttctaaggtctttgaacctatttaaccttataaacttagtcaattatcttctagctacgatgaatagtagatctgccccatttctgaagtttcatataaaaacataatggatatatgttctaggttcaacaattctatatagggggcattagtctagattttagaatcattataacgctgtatcccaaaagacaagtagaaccacatgctaaacacaataagaacatgtctcaaattattgaccaatcctaaacaataaagaccattcatgggatacaaaagtctgcatagctactgcattcgaattgtgggaatcatgcattaataggtacattgaataatcggtttgatgcaagtgtgtctagtgcgagagtaagtcatgtaaaagggtttttgtttagacatcccaaaagaaagttcattcttttaagccaatttatgcttcaaataacacccacaattgtcaatagattcacactaatagtttatcacatcgattcaggtgaatgggattttcccccatatttctaggtggtgtaaattgtaacacaatatgagcagtgtgtcgaataaacataacataatggtagtcaagaaagagacattgaatggattaattctaggtacaaaagcatcaatgtttactttcattataattcattagcactagattatgttccctttcattacaaatttggcttattttcacttccattttgacatgctcaaataaatgttgtgtcaaaacgtatttcataagaaaattaataaaacatatttaatgatgtagatgttgatgcatttttctaaaaattgggtcaaatttagcaagactcgtcctatctttagtagtgtaagaatatattaatcttcataggtatcttaaataaaaaatatgtgtagagttctagatcttgtcgaatactacaacatagttatagagcatttgtccatccatggttgtttgactatttttttttaaaatagcatttaaagttttgcatacttgaaacatataaatgggtctctagaccatctaaaaaaatagttgccaccttgcacaatttcaagataaagtttgtcttcatcctttttatttataaaaattataaattccatgctgcacctatttctaaggtggtccatattaccgtacctaaggtaattttaaatgcttgtttttctaggggtgcttggtaaaccaacccttggaatcactttccgttgagggtttgtctcaatatccatttatatgagcagctgaaattaaaactgcgtctaaaacaagtgcacctctaaaaactacttcgtgtaatactccattcttgtttttctaccacattaggtttgttctaagtaaaacattactatctttgaccttcattttgaaaaatacttaacgttatggattttatatattgaaaatactttttatagtcactcttaaaacctaaatcttatattataaatatatatatatatatatgtatatatttaaattaagtcacttttaagacgtaaatcttatattacaaacctatatatatgtatatatttaaattaatatctaataatataaacatttgactgaggataaacctaacatgatatgtaaataaaaacggagggagaagtgataaaaggatgacatataagcttgaaatctaataaaaatagagattgaaaattttccattaaggcagactccatctttctttgacaatggcgccctttaaactaataagtacatttgtctcttttctatcttgtatatttgtattctatttatatatgaccataacttgcattgtgttcagaattttaatggaaggtcagacacgattttttgtggagtttttgatggccacggtccgcatggccatattgtagcaaggaaagttagagatactctcccttcgaagctgcgtgctctgatatatgatgactttggggagagccccatttgcaattcagatggctcaattctagaagaaactttatctccgtacgctgatgaagaagacaagtctccag

SEQ ID NO: 105953 - DNA, 439 bp, Zea Mays
ataatatattttctcaaatttaaagcaccctaatcatgaggtctatatgaccaattggctgcatctaagctattagacaaactaatgatgcatcattctgactcggactattaatgttttaaaaacatggtgagaacaaaaccaactaagagtgtacctgagcataagtagtagaagtatagtgcatctggctcttaggggaatgaacaaactattacctgatctcatctggaccacggttcaccatcctgttgagaacccatttctcgctcatcaccgagaacgaaatttcgacgaaaaccgtccaaaaaacactaatcctgagcaatttgcaattttcaattttgaaatcatcttttttcatttttcttgctgaaaaccaccgcttcccgattggttttcgctaaaaaacaaccgagaaaccgattttcaatttttt

SEQ ID NO: 105954 - DNA, 287 bp, Zea Mays
tcgcctaaaactctgaatggtccaataaagcgaggggacagtttgcccttaactttgaatctcctcattccacgaaatggtgacaccttgagatacacatagtctccttcctcaaattctagtggtctccttctattatcagcatagctcttttacctggtttgagccaccctcaaattctctcgaattatacggacttgttcttctgcttcttgaatcagttcaggcccaaagaactgtctctctccagtctgatcccaatatagaggagtcctgcactttctccc

SEQ ID NO: 105955 - DNA, 1001 bp, Zea Mays
cggccaggaggtgggaaggagggagagggaaaaaggagagagaactaaacctagctctgataccaagttggagcccaatacactgagggtatgcaagtaactacacagtgactagacctaaaaccctaacaatactctaacattctcgataagcacatacaatgattgtttctattcaagtatgtctacttctatatgggcaagacaatgttgcgaacctctccttgcactaattgagatcaacaactttaaaaaggcctcctcaaaatttcgattggtatgggtattagtgccacctatagtggtaccaccattaggtatggttttgcatagtgcaactacattgtccacttttatcaattgtctggtactcactaagataacaagttatggtgtctatctatgacaaaacattaagggtggtatgtcaactatagattgaaattttgcattgcttgaggtacttttatattatgttgattgtgtagaggatcgtaggataagactatttgttcttagattgtcccattacacctcttagaatgctctaattattacacatttatgtccactagtctaggctctaatatcaaggcactatgccaataatagctagggaaaatcttatgtgtaaaccatggcgatttcaaggcatataccaatagtaccagcaacatccaatctttgtgagctactcataagttcaaatatagagaggctacctcagaacttgtgtctccttgccttgtatgagcacataattgtggctcaatagattgccttgggtccttttgatatattgcattatcaagatgcaatattgttaatgcataatattgtccaatcacaaacctatcaaaaaattcaagtttagtttaaatttttagaataggacacgtgaaatgcaaacaaattaccacatatgaataaaaataaataaataaatttgctctaatagtggctcaatagtgatgctcttggcataatttatctgagggaaa

SEQ ID NO: 105956 - DNA, 340 bp, Zea Mays
ggtgtcatcatgtgcctatacgttgatgacatattgatatttgggaccgatttggaggctatcatggagacaaaagtattcctctccaagaactttgacatgaaggacttgggtaaagatgatgtaatattgaacatcaagctaataaagggtgaggatgggattactttgtcacaatcccattatgtggaaaaggtcctgactcgctttggacatatggactgtaaaccagtcaccacgccctatgatccatcctacacgctcagtaaacatgaaggcgagcctgtgaaccagctactatattcgcagatcatcggatctctcatgtacctgagcagtg

SEQ ID NO: 105957 - DNA, 540 bp, Zea Mays
attggacagtgggtactgcgggggacggatatctctcgagccccataaagactaaaacgtgtcacgagacgcctggtaggttccctcctaggccgtcctatgggacgggccagctaaatgcagccaagtcaggcaggcccgatctgagccgatgaaatctagcgcccgagttaagggctgcaggggcacagacgtatcgctacgattatgaacaccagacaagctaagcatgcggcggtagctcggacggatgggcaagaaggactccagatgtgaagggatacagtctgctacaaactaggagacaaacaagtagatagccatcatcatcagtatgagataactctccctggtcgagcatataaggccgggaggtacccctaccatttcatctcaccctagccttcaacactcacaattctcagcttgtaatcctcacctcaataccagagtcgccacagaaagtagggtattacgcaactctacgcggcccgaacctatataagtctacgtgtcatcccaccatgttataacacgaac

SEQ ID NO: 105958 - DNA, 471 bp, Zea Mays
aatttgccacctcctaagtcctttttcaatttcgtgtccaatcctcctgctggtgacagtggtctgggtcttagagtgtgaccctctcccgaatatattgaggtcttggttgcttctctttgtgatcttctcaatgatgagaggcaagttcattttgagatgccaatgagtctagatgatgtagaaatgaacgttgtgctcgacatgttggctggagaatcttctgattcggacccttctaaaacaatggttgttgtggttataccaaagactgtcaaaacagtggatacccggaagcctgggggtactcgcccaaagcatcttcgccaagtcagccgtctagctgtgcctgctgaggagaagaagaaaaagagacagcttcggcgactatcgtgcttggatcaggatgctggaccttctgctcctgtttgcgaagaaataccaacagaggtatttactgaagttgacccc

SEQ ID NO: 105959 - DNA, 659 bp, Zea Mays
taaaaagcacccttctgattcggtgaggagacgctcttttcagcatgcatgcattttaaaacacgaaaggattagaaattaaaggagtaaattttttatctaacccacttctttttaatcaacccgagcacatgattttcctttccactaccatcacctttatatctgcccctctgtcacagatgacttcacccaccctcgccaatggaggagacactcgtttcagttccgatttcctttctcatgagggttttccttccatcttgtgggaggtgcttaactccgccgattaccctatgccccctttgtacacaatgcagctgtacgaggagcatcgggtgccacgttgctgagtctggctgactctggaggctcacccacttcagccaggttggtgttcccttgactccgagactattggattcaggatggacgacaccaccgaggcggtagctttgaagaccctgacgactttctgcggctaccatcccctggagatggtgatgcacccactgggactcttccccgttgagaagagggatgaccccatgtggtgcaaccgtgtgagccatgtgaaggacgtgtgggctatgtatcccgacttagttgggaggatcactgttcagtgcatgagcgcattgtactgcctataggccctg

SEQ ID NO: 105960 - DNA, 599 bp, Zea Mays
ctttcacggggttggccaccacaacctatgttttctcagcctttgccgcatcctcgtatgccttcctcgcctgttgcagaatagtcagaaaatgaccaagcaagcaaactaccaaaagcatagcaaagtgcacttacccgctctagctcagccatagagtgcttgtgagcaacctcagcgccgaagggggcccaacatgcggtcaagcatttcgtctgcggtcgtgccaacaaccttgctgattttggtgtcaaaattctcgctggaaccaaaattgggcgaggacaaccgagccaagtggtcgcacccttcgtgatccaatgactcaaatctgctcttgtaggtcacgagggcagaaaaagtcattagtccttgaatcacctcggatagccccgcagtctccatccacagccatgtcgtccagcgttggaagagaccttcgccatctaggtccaacggatggacgacatcccccaactcctgatacacacgattgaagtaattaaatacatatcaagcatgtgtttgcacgctctgggccaagcccaccgaacaaaggcgatcagtagacagttcgctatccgcggtcgctagctctt

SEQ ID NO: 105961 - DNA, 618 bp, Zea Mays
cattatagtgtggtaaagtatggttgttcggttacacttcggaacctatcgcataaggaggcttacaaatggacccgagcgatgtgcatgccggcgtctaggtcccatcataatcggtgtgcttttcgtcatcagttgcatccttgactttgtgaggtcgcacccttgacttcaccgtcagagccttcgagaagcgtgtgtggggttgctaatgagctcccctccttgtctggcatgggccttcgcctcgcgccctctcaagggagagggtgaagactttgatacatgcccgaggcaaaagtacccttcgcctgatgcacatgtgccaaaacatgtttgattatagctaggttcgacaaatcgaggttgtgttcggacttcgctccaacatacaccagatcactgtctccacaagattacgacaataagggcatgtacaaggctgtttaatgtaccgtgtctaaggggttaagagtaaaatttttcaagagtcgattcttcagcgagccacgttcctagcgtgcggttcaaaaccaagacacggagacggagctatgtctccgttgtaccacaaccaacgacttccttagattcgctgctccccttccacaattcttc

SEQ ID NO: 105962 - DNA, 544 bp, Zea Mays
gatgaattgaacctgatacatattccttgtgtgttgtggctagaaaaccataatgtacttttacaatgttatgataaattaagaacttgaatttatagtttaaagtataaatagttttgaagactgttattgatgcttttcatggctcatgggccgtacgtattagcatactaagcataggcacccaaagatatcccaacagctggctaaatgggggtgtaccagctgttaagggttagggagattagcttaaatataggagattggttagatgtattaggcggcaggactatataagccgcatagaggaggagagggtaagcagaattaggaatcttagtccagagcctccaagggagggcggacagatttatctaataaaatgtcttcagttcggagccccccaacaaagacagattgctagaatgaacgtcactctctagttaactatcccaacttctcatgatatggagtcagttgatgcagcatgatgccatctaagtatatctatttggttggaaacaagtgtagggtgcattgcagt

SEQ ID NO: 105963 - DNA, 704 bp, Zea Mays
ctggaagatgcatcatggcttggagaacttggtgatgctctaggatcacaatggggtggcctgtagaggcaagggtgcgatgataggtgactcggtggtggcagagacaacatcgacgaattctccaacgatggagtgggccaaagagccatgcaatcaatccatggaggttaatcaaaggttttgttagtgtttgattgagaggagaagggtgtgagaggggatgtcacgagaacatggcgtcgattgcgatggcagacggcggcgagcgcgctaaagagccagagggtgtgagtgagcgagtgagggagtgagagggagagtcgaagagtgtgtatgagaatccacctaggcacgaggaggcaggaggtgagctccacacagcggccgtgttcgagcgcatgtgggggcacatgttgggcgtgtgtccttggccggtttagtgttgagcatgtggcatacgtgacagtggatgactttgggtgcaaaaataaataagttagagtgggtttctaggcacgaccaatatatagaaaacgattccctttcacccctcttcctttttatatatagggctctcaatcagcatctcgatggttgtgaagataattagttgctaagttgtttttgttagagcagtgatccctggttaagaagcaatgccaaacgatgtcaaacattctcggacaagtcccaattttttg

SEQ ID NO: 105964 - DNA, 295 bp, Zea Mays
cttgcctgaatcattgatccactgaatgtggtatggatgtggtcgtggacgtgtggtcaggccaagcttcttgaccaattctgaactcaccaaattattgcagctttcaccatcaataataacacgtgcacgccgattctcgatggcgaagaaagtctggaacaaattatggtgttgctgcttctctgatgattcaggctgagaactaagaacacgctgcaccatgatgcttcgaaggttcaccgtagcatcagcaccaagcatggcatcatcattagcaacaacatcactggag

SEQ ID NO: 105965 - DNA, 439 bp, Zea Mays
ttaatgatctccagcgcttccttcgtctctggatcggctaggggatcgaacggttccggtggaggggataattcagctgaagtgggaaaaattaattagtccaaagccacaaaaacaaaatgccgaagctgaatatcaaaagatattacctatatgtttttctcgctctgcagcttcttcagcttgtctcgcttctatctgggtgtcatgggtgtctttttcactcttctttataattcatgagccatctctcggccgcgttcacccaaacatcattatagaattttccgcccatcaaggttgcttcagctgaaggatccttcgtgtcatctgcagagaaggcagcttcagcttgggccagggtcttgatgtgatcacatcccgccttctccaaaataggtgaaatcccccgtgcaccggaaaatgcacagatatcccc

SEQ ID NO: 105966 - DNA, 346 bp, Zea Mays
cgctagtgtgggtgatgaccatcctccggcggggcaccaccgctggtcgtgttcgcgtcgccgctctggaagtcgtggggtagaagaaggcgtctccactgtggatctcgaagctaagggccgagattaactcacgtagaaacgaactccggccttcggatcggtgatgaatggctcagattagaaatagaatgtccctttgtcgattgcatctgagtcgtcgatcgcatgatgtgcgatcgagatagtatttggtcgtggaagcctcggggccatcagatctcgatccgatggtctgtatcacgtgcgggttcgacttaatgtcgatctaatcctggccttcgat

SEQ ID NO: 105967 - DNA, 274 bp, Zea Mays
tggtcgtctagtgtaggggcccatatatggcactagggtcataccgccccaattgtcctgcctcgtggctcgcttaggtaggcatctctgctcaatgtcatcctacctagggagcttctcatttcattgtttcttttctctagggactctatcttatagggccactttgccctgacgcaccttggagaatgttcgagaggtctagacaggccctctagggggccccaaccttgggcaagtaggtaggttagctcgtagcctatataggccctag

SEQ ID NO: 105968 - DNA, 480 bp, Zea Mays
tataatttcatttagaattacatatgtaccttcgagtcatgcacatatgattttttgaacttatcgagggtattgtggacctttcatgtcgcgttgcgcataccgcttaaacccatcttcgtcccatgggcaccatttagcaaataggctagaacccatcttcgtcccatgggcaccatttagcaaataggctagagtgatttcaattgattctctaacaaaagtaaatctattttatgaaaatcatttagcaaataaactgtaaagtgtgaaatgattactaagaggttagagagtggagaggtttaaagtagtgggaagctgggttttttttttgctccccctttatagtacaaaaaagataatacatttcacttcactttcatcatgaagcagtttaaagttttactatttggctctgctagagtgattctcgtttgaagcggagctataagagctctgccaaatgccccttaaaac

SEQ ID NO: 105969 - DNA, 525 bp, Zea Mays
agttgcatctattagttatggatgtgtggctgggtcaggggtgacaattggttggagtcaagttagtcttacggaatacagagtatttcactaggaacccatctgttttggtgttgcatttggtactacatatgccacttgtgactggctattttgttgtggatgggattctaggaattcttatttagttgagccattcctgatttgactttactagccatgtacatagatcataatgctttccttgttggaatctccttatgccaggaaaatgcctcgcaaagttgtatctggacccgactacgatgatgactatgatgagtatgatgatgagtatgatgaaaccagatatggcaataatactcctgttatgacagggaaaggtatccttccgaatcttctagccttattcatatcatctgtaaagagggggaaatggtcattagagctgctttatactctgagccatacaatcggaaaagtgcctgtttttttcacaacaactgttcaattgctcagatcaat

SEQ ID NO: 105970 - DNA, 379 bp, Zea Mays
caagagtttgaatgcctttgaaaacaaaaactttattgatgatggattctccaattatagagtacgatgttgctctgatagcttttgaggccttgctaagggtaaaactttctaagatgctctatgttccatgagttccccacttccgtgccatccatttgagtaagccggtatgatctcggccgagtgacctctgatacaatgaatggcgcttcccatagtggcgacaacttgtgccgtccttcccccattagaattcggcgaaggaccaagtctcccactgcaaaggatcgatgtcgtatggctttatcatgatagcgcctcaaggtctggttgtatctagctgactgaattactgtgttcaatcgctcttcctcca

SEQ ID NO: 105971 - DNA, 272 bp, Zea Mays
aatggtatgcaagagtgtggtatcaggtctgatgaagttaccatgttaagtgtcatatctgcatgtgctaatttaggttccctcaataaagccaagtggatccatgccttcattaagaacaatgggttgaataaggtactgcacatttgcaatgctcttattgatatgttcgccaaatgtgggggtattaaccttgcattgaatgtcttcaatgaaatgcctctaaagaatgttatcacctggacaagtatgattagtgcctttgctatgca

SEQ ID NO: 105972 - DNA, 334 bp, Zea Mays
acagcttcagttgctctgactgcttttagagaattcgtctttagatgggttgaatattgttatattacctgtttttatgtagtaatgtagaaatcatgccacaacacattttcccacaacataaaagataagaggtccatatttgtgtgctaaaataattttgataatcacaactcaccatcctctttcaataggcttaggatctcctttttatatttttcaccctacaatgcaaaattgttatatggaggccatggtatatcatcatatcatgtattatcaacttaggatttgcctatttcaattaatagtggcattgagccaattttggtta

SEQ ID NO: 105973 - DNA, 504 bp, Zea Mays
ttggcctcgaaatatgctaaggttcgattcattgtcgccatcattgtaacgagggggtggattatgcacgctcggtagtttgtcaccataataagttgttgtgaagtttgacacctcctctagaatgtatgcctctgcaatggaagcctcgattttgcatttctttctacatttctttcgaatagtctttatacatctctcgattggatagcaccaacatccctgcacgggctcccccattcgtgcctcataggggagatgaagaatcaaatggtgcattggattgaagaagctgggtggaaatatcttctcaatcttacacagtaacatgggtgccaatctttccaagtctgcaaccatggtccgagataactcttttgcacaaagctgacggaagaaatagctcaactctgaaagcgctagccagacatgcttagggacatagcctcgaaccatcgcaggaagaatccgttcaatccatatgtggaagtcatgactcttcat

SEQ ID NO: 105974 - DNA, 354 bp, Zea Mays
gctgggacaaatgtatcccttttgctgaagatatgcgatttggagcttcagttctgctaactcggtaggagccatgcggtatggtctctttgcgatgggtgccgtcctagggatcagatctatgtagaactccacttctctttccggtggcattcctggtaactcttctggaaacacatccatgaattcttctaccactgatatgctttctgatgttagattgaacatcatcggatcattggcgggtggcagggcctgacaagagactgactttccttggtggtctgtgaggaggactatcttgcttgcacaactgatgatacctttgtgtttagttaaccaatccatccctaa

SEQ ID NO: 105975 - DNA, 479 bp, Zea Mays
tttcagaaagctttagagtttgtttggatccatataacaaacggtttgtcgactaattttaggatattggacttcaagtattgttgactaataaattgcctaattgttagccgaaaagattggcaaattatttgactattagccatttgaccatgtgctaataggtgctaatagatcataaaaagaggaaaaaggacatctattaaactgacttaaactaggtcctatcttcaaatataagacctaagagagaaaaatggctttcaaaagaatagctattttataaatttgtatcaaattaatataggagtctagacttgaaatgtgttgtccgtggaaatggatcgacgggaatcttagccacatggatgtccgatgtgctgtgttgtatattgatttgcttcagtgatgtgcagtatagatactaggccttgcagctcaattttgtctatgtagaatctgatgagtgcctgtagaag

SEQ ID NO: 105976 - DNA, 410 bp, Zea Mays
caaaatgtggtggtttctcaattttttagtggggacgtttgcagcaccaatctgcttgttacttaatataattttttccttaccctggaaatgtgatgaaaaaagtactagaaacaaatttgtaaggtgaaaacttggatgctctgtgctatactgaactccttgtgaactttgaggacatttgtctttaaaattccacccaaagcttagcaaatcctaggtggcatgtctactttaaagttatggcatcaaatcttacttgcgtcattgcatgcatatagaagttaatcgatcgcttctttcaatataagaccttaaaggacctagtgtgctcatgtatgtccactttactgaagtgtgtccaggctggtttcttaggtggagaagagtggcataacccaaaatttggc

SEQ ID NO: 105977 - DNA, 503 bp, Zea Mays
caacatagagaagtttgtgcgtctcaagatatctagcctttgcctcatagaggacctcgctgacgtagtagaccggcttctggatggttcggacccctgtagtcggtcccgatccctcaggttcctggccttcttgtgccgtccttttgacgaccaccaccatgctcaccgcttctacagccacagcgatgtataaatacaacggctccccaggttctagagctaccagtattggtagggacaccaggtgctgcttcaactcttgaaaggcttgttccgcctcttcggtccaagagaatgggccggacttccgaaatagcttgaagaagagcagcgccctctcagccagcgttgaaatgaagcggctaagggtggctaatgaccctgtaagcttctggacatcctgatacgggccggaggcctcatcgcctcaatcgctttgatcttctccaggtttgcttcaatgccccggtgcgaaaccaggaaccccagcaacattcctg

SEQ ID NO: 105978 - DNA, 425 bp, Zea Mays
gtcgggctcatggatgaagcagtggttttatgtcaaaaatgatttgagtgagagagatagaggatgcgaagggcataatccaacgccccatccattcacacttcggcattaggaggcctttgattgcaagtggaaacgaagtgcaagcatgtttgatggccttcaacacagtgtgcacttacatcggcaccagagatttggttcaggagcatattgcttataaggtatgaccgcttgttaatgactgggatatgccgaaagataccactgctggctccagcgaaggtggactggtttatctgaggtacacctattgctatagaagtcaatttcacgagccaaataataactggcttgaagctattgaagtgaccagtgacaagctactgggggcttatacgaaggcagaggacgaagccatgaac

SEQ ID NO: 105979 - DNA, 506 bp, Zea Mays
ggcaggaaatgcaggagtcctctatattgggatcagactggagaaagacagttctttgggcctgaacttatacaagaggcagaagaacaagtgagaatcataagggagaatttaagaattgcacaatcaagacagaagagttatgctgatacccggagaagactactggagtttaaggagggtgatcacgtgtatctgaaggtgtcaccaatccggggtatgaggagatttaaagttaaaggaaagttgtcccctcgcttcgttggacctttcttgatcttaaagcgagtggtagaagttgcatatcaactagaactacccgatcacctgtcagatgtacatgatgtctttcacgtgtcccaactaaagaagtgcctcagggtacctgaggagcagctaccaatggaggaccttagcgttcaagatgacctgacttatgctgagtaccctatcaagattcttgatacactgactcgagttacaagaaataaggttataaaggtgtg

SEQ ID NO: 105980 - DNA, 472 bp, Zea Mays
gcagtctcgagtaccacatgagagctaggcctttgagggcaatgatgaatgacttggacatagtataatcatctcccctgatgatgcgacggtgacatgttaactcattatgcactctgatgggtcggtgttgccattatactttgggcatgtgcctgccctgtaattatgtggccatggtgtggcctggagatgtgcggagagagggcttcgctcatcaagaaagttgaggccatggaatgcacctagctcttggacaggaatgagaaactggttgatgttttgatgatgggatgcaccgacctattaccaatgagggggcctttgtgttgtagctctgatatttcttactgtagtgctcttgctttttcttcctcgtcttggatcagttgtctgattctactctgcatcatggttctctgtcttctagccgtgaggacctccatctgcttctcgaggtggttgtttttca

SEQ ID NO: 105981 - DNA, 305 bp, Zea Mays
ggttcgaaggttggcctcttggaagggctccataaccaccccagagcatagagtcagggatgactgtgggtacgcccatacatggctctagctcgggttgcaacccgaggtaccttaagacatatccaagacccccaggagcgattcgtgatggtgtcccatcgtaggtaggcatcgagccctcgatccgaatcacccgctggtatcttttggggcgtgtctccggaccactagccgacacttatcgaaaggagctcgaaccccagctcggattatctgataacaactcaacggaaatgtcttgc

SEQ ID NO: 105982 - DNA, 643 bp, Zea Mays
acctccatgttagtcaggcaatcctgaccaacctcttcacaccgaagactgccttccaaagtcgacgatgcacgagataccgcccgggatacctctaatcccacatctagagcgtcagagcaaacattcatcatatcatcaacagtcggttccaacaacatatcttcatgaatgacatcctcaagggcctgatcaaaatctgttatggataaatcttgaaggctaacaagagcagacagagctggagaaggaatatcactatcccccctactacctctgtaacgccgactattcttgcgaattagcggaacttcttcttcctcttcttcgtcctcgtcacaaatgcggataatagatggtgcaggatcacacccattggggtcagcttcaacaggatcacacccattgggatcagctggcgcacggatacactcgttggggtcagttggtgcaagattacacccattgggttcagtttcaacaggatcacacccattggggtcagctggtgcacggtcacacccattggggtcagcttcagcaggcacaccactagtggggtcaacttcagtaaaaacctctgttggtacttcttcgcaaataggagcagaaggtccagcatcctggtccaagcatgatagcc

SEQ ID NO: 105983 - DNA, 543 bp, Zea Mays
gcaccatccaatgacatctccatgtccttattagctcaacatatatcttttggggttccattagttcttttgtgtagatgctcacttgctaaaagctcatcaagaggtcccatctaagtcacatgtgagaaagcgcttggggtagacatccacattgcatatcttgtattgccttgtcatgtgcaaggtatatacattattacgctcctgatgataaatgaaaagatgcgtaccacaccttttcattattgggatccaatgtccttggatattatgggtgatgatgtcaaccttaagggccacaactagtgccttgatcttggtgacagctatgggaggttgtcactattgttggccattgatgagtgtagattgattaagcaatcatagatttattggaaggaggttagagggtgacacaagagaggctaacaacctaagaaatagcaacataagagaggctaacaacctaagaaatagcagtgacacaagagaggatggcatgcaacacatggatagataggaagaaaagcatcatagagg

SEQ ID NO: 105984 - DNA, 623 bp, Zea Mays
ctcccaagtctcttgttgtggagatggttatgctaagggctacaaagtggagtcctaactaagtattggcttggcggtggggctccgacctcttggtcctcttctatgtgtcctccttcttacgttggtccgccgtctttgcgtatgggtgttagtctaggcctgttccttcgtcaggagatcggtctcctccttttataggccaagaaggggtcggccagcggtggcttcctcgagaaggagtcaccgggtgatggtaaaactgagcgtctaccatggggtgaagccacgagcgcccatgggccctagggtcacctagttgtctcgcattctttatatcggacgacataagcagtgtggggcctgagtgccatcattcgaactacgctgacccctagcctccgtagcatggggctcggtgcggcttgttgtgcccggcaagcgatctgcgcactcatgcctagtcccgataagtcatgagtgcaccgtaggccagggggcgtgcgaaccataaacgcgccatagtccaaggggttcataggttatgaatgcgccgcagcctgaggggctcataggccatgagtgggaggctgacaggaacatctgcagtggctcggtgccag

SEQ ID NO: 105985 - DNA, 330 bp, Zea Mays
gtaagaaaatgaaaagaatcactggcatcttatggactttatggcccaaacatttttagaattttatgtagacaaatgttaaccctccgtcaaattttatgattttctaaggctatttgtgtattattaatttctttctaaaaatcatcaaaatgcaattaaaatcataaaataatctagtgtctaccgaaaattgcaaataagttatcaggaccaataaacattctattacatataatatgaagtccctatgtgaaaataataaagtgaagtattgattatgttgaaacttggataactatggtgattttatatgtaacttacacaata

SEQ ID NO: 105986 - DNA, 274 bp, Zea Mays
cttaagtctgacaccttttccacccttacaaattttttcgcttatgttcgcacccaatttggtgtcaccatccggggtgtccaatgtgacaatggtcgcgaattcgacaacctcaacgctcgcaattttttcacctcccatggagttcttttacgcatgtcttgtccttacacttcccccaaaacggcaaggtcgaacgcataattcgctccatcaataatgtcgtccgcacgcttctcttccaagccagcatccctcccactttctgggctgc

SEQ ID NO: 105987 - DNA, 561 bp, Zea Mays
catatgcaaatctcaacgcctagacccagagacagcaaaacttgcagaaagggcctgcaaggaacagctcccggacctcaggacagacgaacaaggagccctttggttcaaaaatcgtctgtgtgtaccgaaaggggaagcccgagaagtcctgctcaaagaagctcacaactcagcctactccatccacccagggactaccaagatgtacctagacctcaaaaccagatactggtggaatgggatgaagaaagaaatagctcagtatgtggcccggtgtgacatctgccaacgaacgaaggccgagcaccaaaaacctgcaggcctattgcaacccctcccgatacctgaatggaagtgggaagaaataggcatggacttcgtaaccggactaccccggactcaaaaagggaatgactccatctgggtaataatagatcgcctcaccaaggtagcccatttcatcccagtgaaaactacctttggaggagccacccttgcccggatttatctcaaggagatagtcagactccatggcatcccaagaaagatagtgttggt

SEQ ID NO: 105988 - DNA, 500 bp, Zea Mays
aagaaatctcccacctcgaacgagagaggtttccttctcttatcatggtaactcttctgcctagcctgagtagcttctagattcttcctgattagtttgaccttccttttggcttcagtcactaagtcaggtccgaaaacttctctttctccaggctgagaccaattgaggggtgttcgacaccttcttccatatagggcttcgaagggtgccatctttaggctggattgataactgttgttataagcaaactctaccaaagagacgtgcttatcctacttcttgccacagtcgatcgcacaagccctcagcatatcttctaggatttgatttaccctctcggtctgaccatcagtctgtgggtggtaagctgaacttctgattaggttggttaccaaagactcttgcagttgttcgaaactcttgcagttgttcgaagaatctggcaacaaattgggctcctcggtcagagacaatggttcgggttaacccgtgcaaac

SEQ ID NO: 105989 - DNA, 629 bp, Zea Mays
gggttgttattattcttgtgacgatgaacagacggacagacagatagatagataagcagcagatccgatccgccggagaagaagagagggatactgtagtagtaccaaccaaaatacagggggctcgggataaatagtgcgtgctgctgggtttctttcttcagctttgcggaaaagagggagagggaggagtaggagatcctgtgggtgctggtaaactggtagtattctgtatttctcgcgggtgacctagaagaagaaatctaaccagctgcactgcaacagcaagcacgagagagagagaggaggaggaggtgcgagtgtgaaaaggtggatagcaaagggtgttgctgaaattgtgcaagaacagtgggcaggcaagcaaatggcaaagtctgccttgcttgcccatgtccgtagttgcttttgggcttaaaccatgggcagcacctttgtcctttgcttgcagtaatgctagtgctggagtacactgatagttaattcattggttggttaacgcttgctttgcggtcaacaactgtacaatcaggtcttatgtgtaagcgtgcaagcgagattttttatctgttagattatgatacaatcatgtatcacatttaatacttaaa

SEQ ID NO: 105990 - DNA, 988 bp, Zea Mays
tagatctaactattggacgcgacgggtgaccaagcctagcatgccaatggtcactgctaacagaccgactaagaagggcatgggataaagcagcaacatcatctggttggagaggatagaggcccccgttacacgatccctccaaaagtgtagtctttgtttgccgatccttaataaaaaaatgccaaggatgaaactcagaatacatcattatctcgagaaatttatgcactgagattagatgttttttcatatcaagaacatgaagaatgtgacgcaaagcaagtgagcgatcagcagtattgatggaggaatggccaatatgtaaaatttgcaaacatgtagcattgccgacttgaacttgatcaccaccttgatagcgttcacgcatcgttagagggtcgagatcacttgtgatgtgatcggttgccccggtatcactataccagtttggatcaactttgaacgaggcagtggtggccatagccgctgatggatgttcctgattatagctgtcatcattcctgtggcagcagcggacaacagtgtggccctcctcgccacatatctgacagatcaggcgaggtgaggtaccgcggccacgattttacccttgacattgtggagggggtgcacaacgtccatgtcgtcctctgccacgacccccgcgcccagcgtaatttgctaaggatgcataagttggctgctagtcagcctggtgtttgagctgacgtgcttcaaatgccatgagatgggcataaacatcatccaacgtgaggtggtctgaccgggtggtcagcgacatgacaaatggatcataatctgtcggtaaacctgcaagtaaatacgcaatcacctcatcatcatgaaggggggcattagccgcagccatcttagtggctaggcccttgaccttgcgaaaataatctgcagccgtgagactctgcttcttggccgtagcgagttcaactcgaatctgcaagacacg

SEQ ID NO: 105991 - DNA, 396 bp, Zea Mays
tcttcagtcgctcggcggctatctctaaagcgtcgacgatgtcctcagtcgctcggcggttatctctaaaaaacgctggcgtcgttacaagtcactcggctgtcacctctaagatcgccgacgtggtcaacagtcattccgacgctgacatggtttcgtcatcactcggactctatttcaaatgcataaatgttgacaataatagctcggccatcacccctgaagcggcgatatgatgcccgagttatttagatactattccgaatgaatcaacttcacaaataagagatcaacttactatgaagtaaagtaattggtacaggaggagataaagtcattcttcattaagggaagtaacagtacttacaaatcaactcattatgagttgatacttcc

SEQ ID NO: 105992 - DNA, 651 bp, Zea Mays
acccctctaagttggcatggaatgtaattagcatcaaatatactggtatatgaatagaaaatggaaaatcttcctaatcattattcgtttatgcaccctagtccacagcaggttaatttataagcttttaaagccacgtatctgaagataaccaagacaacataaaagttaaggttcaatgctcatgcagattttgtgcatgatatcataaaactcaaaaggggacgcacgagacacagtagctatcgaaatgatttcatgttagttgataaacaaaaggacagctttgccaggtatagacatgaatgacatagctgctgtgttgtcactgatcatctagtctttgttccaaaacttagaaatagattagacatagcaaccatgcatcaattactgtcgaccatagtatgacaggttctgaacttctgattgtactttattgaacatcatagtacattttgcccccaccagtcttatcgcacagctttggagccccttcactcaaactcaaagaacacatcatcattaagaacatgaccctggacagcccatgcacgtcaatgatcccatcattatcattataaccatatcaaacagaagatggatcaacagaacagatagtaggcaattccactcaaatacaaatataac

SEQ ID NO: 105993 - DNA, 684 bp, Zea Mays
cgttccttccctctcctcgtgctgcttcttatgttcccagagcgtgtgcccatctcgattaccctttgataatttttcaatccgcaagttgggctccagaaagaggagacgtgggttggattagagtatagctcaaactaggattgatcttggcgtaggtgcattttagagagcatcaggatatgttccgtaaaatgttccagtggagggttcgtcgagctgtggtgcttctcgacatgcttgcgaaggtattgagcagaagttccacactcttttggaccaggcagcacgcctaggatgtttctgccttatctgatcgctactttcaatgggataacacattggaacaaaatgccaagcttttcaagctctatatgtgtggactgggtatgtaagttagctattattaacacctgcccttagttctgtcaccttatccctgtggttactttgtcaattcatcaaatactgcttgaatgtgaaaaaacatatttagcacttaccttacagatgtatggagatacggtaatgattagtgtgtgttgactaaccccagaacaggacacactacactgcaaaccactaggcatccattcatgttagtttatgtttgttttcagcagcagcaaatcgagcaggtaaagcaagaatagtgaaatttagcatggatgtgttagatcatct

SEQ ID NO: 105994 - DNA, 1005 bp, Zea Mays
gttcttctcttctttgaggttgccaccttcggcttaggactggtttttctcttttttaaagatttttcatcttcttttaccatcctagcagcctgtctgctcaaaacactgacaactctcttccttttcgccccttcggcacccttattgagacgctcgtaatcaggatactcaaaattcagagcgtccattacgcggtttaaccttcgtttcggtcgggtactgaaggccgcagtcatcagttgatcctcttttttggtgtaatttcccagcacttcattgcacactgtttcaatcatttccagccactcttggcaaggttctttaaattttttctcaaatttaaaccgataaggaagttgcacaagctcaagtcccttcttcgttccttttagcttcggcatgctaaattcgctcaaagtcggagatgttctgttagccaaatattcttgaactagatctctggtgctaatatgttcggctaccaccctgaattttgctacagcttgttggcatggtgaccccgatgtcatgcgtcacaggggccttgtcaacccgaagcttaaactcagcgggctcatcactagcatcttcaacttctccctcttcttctcatcggcctcgacatagaaccactcacttttccatccggttggccatttggtgcgatagctaagcaccggggccttcatatccttgcgatatgcgaagttataacagccaaagttttcatgcagtccgtcttctctggccttcgtctggtaatgcagctcatgactcggcagaaagcttcagcatttgggtctattccttggcttcgaagggcccagatgaagacgctgagtctaacgatagcgttaggggtcagctgatgaagatatatttcgtaattatccaaaacttcccccaatcatctcgttcaagggaaaccgcaatcccgctctgaaaaaacttttgaaaactaccacctcatcatttttcggtgtcggagtggtttcttcctcg

SEQ ID NO: 105995 - DNA, 883 bp, Zea Mays
tcattcctggtaagatcgatgtctggagtttaaggaccaacagggtctctttatctccatcttccatcgatccagctgaatatctgtatttggatttattctctgaaattttcagagttccatcttatgtgccaacttgatttctggacatgacttaccattttttgttggtacagttttctcaaactgatttgtgattttgcttccctgaaattatttgcgaaaaaagaactacgagactgctgtctaattccttatcagtgttctctaaatgttgatggctgtgttctttgccttatatgttgatagctttggactctacgcacatcatatcaactacatttttgtgactatttttggattccaaagaaaacaagaaaggactcttacggtccatttggttggagagccacgtgagtggagcggtttcattccagatctggagagtggagcggcggtccgtttggttggagagccacgtgagtggagcggtttcattccagatctggagagtggagcggctccattccagattttgatattgtgacttacctggattcaactacgtggcctgagtaaaagaaatcctctcgtccgactatgcgccaaagcatggtgtaaggcccagcccacattcttatgggcaatgtggccaccgtgtaagcatggatatagaaaatattattttgtattgtacacagcactatttacagagtgtaagaaaggaggttcgaggtttttcttgatctatgtgaaaggtttttatcaggcaatgcctgttggttgttttaccctgcaggtcaagtttttttatcttatcagtcaccaccgcatgtataagtggatggtgagggcctactcatccattgctcttccttttgcc

SEQ ID NO: 105996 - DNA, 754 bp, Zea Mays
gtaccccatgcacctctgcatgctctaaatggttggccacacgtgctagccacaacttgatgatagaagccttcttcaaacgaactgaaaacatatattgaaactctgctcgcaacgacatgaccaaaggggtgatcaattaccgaaggttcaaaggtgtcaaggcaagggaggcacaacgacagctatgacaaacaggatcgtcgtccttatcatggaaactgatgggttgagaagccgacagaggattgtaatgtccttgcgatggagacttggcgacgacatcggtgacggtgtcagctgacaatgtacttggtgaaggcttggccactacctcagcccaagtcctcgattgttgaggatgatcacattgcacggatgagttaactcaacagacaggagaggaagaccgaaagcaacaatgctgctctagatgaccaggacgacgacagtggatacaacagaaagagcttttgcatgagctgacttggtgatcatgtgcgagacagcaataacacctgcaccgatccaacctcttgaaggaaaagctcctctctgacttactccttgcaacaacatctgaggatattggcaacatggtctgaagagggaagatccttgacgacgacgtggccggtgatggcgggtaccccagatgacggttgttggagacggggcggggcctctgttagcgctaagaccggccaccgccatcaacggcaacaaccaatctagggaagagagcatccctaca

SEQ ID NO: 105997 - DNA, 481 bp, Zea Mays
ctagggagggcggggaaatgagaaccaggggcactcggttgatttgtagaagtgggggcagtggtgggacgaatgaaaacaggctgtttgaacggataggagggtggacgaggcgaagaacgattctgattaaaaggtcggattaccaacctggttcgcttctcaggtccctgattggacctgtcacctccaaatccctttgattttccctggcctatgttcttggcttctactgccaacgccgtgctgacagctttgctgtaagtaagatctaggcaggtggccattttccgttggagccggtcgttgagtcctctcatgaagcaattcttcttcaggtcagtgtttacttggtcaatagcatattgggataaatgatttaacttgttgagatactgcatgacattatctcccccttgctttagtcaaataaactcctcttgtttcatgtgaagcactccttctggaatgtagtgttcag

SEQ ID NO: 105998 - DNA, 597 bp, Zea Mays
gaaagcctcaatgtcctcagaagagggtcgcactctaagacccaggctactgtcacgagcaggagggttggacacaaactcagagaatggcctaagtggtggcaggttccatgcagaataggccccaggagcaccagcatttgaaactctacccctcaggatcatatccagtcggctcatcagatctttagtggggatttttctgttcgtgactcgggtagaatcgttgacaccgctgtacaaataagcagggtatgccctgtcctttaagggctgaatgttcttgaaaatgaagtcagcaaccatagcttcagtagtcagacctctatccttcagcaagcagacctcgacaagcagtactttggcctctgttatctccgaaggggtcagagattctatccaactcggtgtgcgaacatctggatgcctccctgaccgagggggagggacttgcagtggttctccataatgaaccactcaagtcgccatcccttaatgttgtccttgagaggaatgtcgaggtgctctgccttcctcccccagcgaagttccagacttgcgccgccaacaagttggtgctgtcccccagccatcccg

SEQ ID NO: 105999 - DNA, 475 bp, Zea Mays
ttgttcgcgccaggccttcgtttgagcttggtatttgttgaggccctgcagggcgaagacatggtctccatcgatgaggtctttggacgttggtttgtctacatcggggacggctgatgcgcttgttcgagatgacccgtgctttatttcctgcggggtcatggcctccgaaccatatagtagacgaaaaggagtgaatccagtcgcccgacatttggtcgtgtttagcgcccatactgcttcaggtagatggtcggccatttacccttgctgtcatcgagtagccttttcttgatagcagtgaaaatcttaccgttggcgcgctcgacgacgccattagattgcgggtgatatactgaggcaaaggcgagcttggtgccgatggagaagcagaaatccctgaagtcctggctgtcaaactgtttgccattgtcgattgtgagctcggacgggactccgaatcggaaaacaatgt

SEQ ID NO: 106000 - DNA, 378 bp, Zea Mays
ctttccttgacataacctttgttgatgagctcttgcacttggcgctgaatttcttttgtttcctccggatttgtgcagtatggcgcacgattaggaagtggggcactaagaacaaggtcgatttggtgttcaatccctctctttggtggtagccctagtggtactttcttagggaacacatcttcatattcctgtaacacatcaaaaacaacactaggaaaagtagagggtaagtcgttagtgataagaaaattatctttgtataggagtacaaagaacatggctttgagttcactcaattcttttaaatcccgcttcctagccatcataactaatccctcttttccctttggctcggttctttgtagctgtggagtt

SEQ ID NO: 106001 - DNA, 326 bp, Zea Mays
atcgacgacatactggtctagtctgagtgcaaaaggagcatgaagagcatttgagaatcgtgctaactagactcagggagcacaagttgtatgccaagtttagtaagtgcgaattctggcttaaggaagtgcaatttctggggcacatcttgtcagaaaatgggatatcagtggacccaggtaaagttcaacaagtaatggaatgaaaggcacctaccttagtcttagaaatcaggagtttcctaggattggctggatattattgtcgcttcatacagatttctcgaagattgccaaacctatgactcgactgctagagaaggacc

SEQ ID NO: 106002 - DNA, 377 bp, Zea Mays
aacagtgcaatctgcagtgaaggtcatatctgctggccacgggttaagggatcgcttgttgatatatgcatcaaaacagggtgaaagctagatagagatccataaaaacagcctggttccttactttggtgccactttggtaggtcacatttgttcacccttcattctaagttgctgagtgagcagaaggctagaagctacactggcccgtttcagttctactgatgtctgcataaagaagcaggtgcgcaatgcaaggcctttttgtaacttgcccgtggttgaagctaaaggcctgcatctttgctttgctgatcaagcgagaaagcatctgatgatgatatgtcatgctactggtatataaatgaaggttgggc

SEQ ID NO: 106003 - DNA, 671 bp, Zea Mays
gctggtgccctaactcggctaacaccaaatcctaccccaggcgaccctaatccctcaactaattgcacgaatccgggccggaacctctctgtccacgacaatggcaaaaatcagagacaatccgaagtgttcatgatgatttgttgtggtctagcttaatcaaatgggtctacagcaacaggaggcttgagggaggctagaacactaatcaaagaagcttgaactgacctacagagggctggccacggcgaagtgtttacggtggcgtggaaaacagatttggggggaatgcgaaattgggaggctctggtggatgatcagaggtgcaagctggtgcaatgagtgcataataacctagcggagctcactagggcagcaatttatagactccatcggcagtggcatccaatttgaagaaggcgcgctggcggccgaagagagaggaagtgcactggcacgggttatcatggctttcaccgtgacaaagcctccggcgatggacagacttactactacggttcactgcgacgtgttaaagctcctaggaacgtggcgcatggacggtaagcggccaacgccggcaaggatcatctcgaccgaccgcagaccaagtgggtacggtgaactatctagtgattgggtccgagccaatccgagcgccaagatctttt

SEQ ID NO: 106004 - DNA, 324 bp, Zea Mays
ctactttgtggctatttcagatccactattgtgctattgtattatgaatttgtgatgatttatagtttatgagctgtttggttgattggtatttggctagtaaggcgtcgcctaggcgcccgcctaagtcgcctaggcgttcaggcggtggctgggcgcctagttccgcctagccgcctttaaaaccatggtaactttgtcattgactatattcgccatcaatctcaagtctatcaggcagcagtctaccaaaggaggcatagccaaatagcaaataagaatattaacggacatcctaaaatttcaccaaacaagaacaaataa

SEQ ID NO: 106005 - DNA, 542 bp, Zea Mays
gttgcagtgatgcttttgcattgtagattagggcatctttcttttgataagatatgcaaagcttttcctgatgtaatgtgtggggtggataaaagcaagctattgtgtgatgcctatgagtttgcaaaacacacacggacatcttatattagtcgaggtatcaggagtgtatctccttttgtgctagttcattctgatgtttggacatgtcttgtgacttctattaatggaatgaagtactttgttacttttatcgattgtttttctcggatgacttgggtctatgtgatgaagcataaagatgaagtattgaagtgttttcaaaattttcgtgcactagttgagaatcaattcaatactcaagtcaaaatcctaagaacagacgatggaaccgagtatgtaaacaaggaatttaatgtctttctgtcaagaaatggtatattacatcagacatcttgtcctgatacacctccacaaaatggtgtggctgaaaggaagaatcgtcacattttggaagttgctcgttcgctgatgtttacaat

SEQ ID NO: 106006 - DNA, 345 bp, Zea Mays
gatgatgttggggagggaagcatagggttgtagagacccaatgtggctgaccaactatagcaggcgaggttggcgagtacagcgaatgtcggtggaccgttcgcaggtactagaggtggcatgttcatggagcatttgtggagcattggcaggggtgagtggaggaaacccgatcacatgcaccaggcaagttatgctggtggagcaagagtagatagaaggcatgacgagcacgggatgaccatccactaagatgacgaatgcattggcgagtgtcgaagaagagagtaggcaagaagacggtcatgccatcagtgatggctagatgggtgatgacgtttgcac

SEQ ID NO: 106007 - DNA, 330 bp, Zea Mays
tcgctgctactttctttggatccacaactagtccatcttggtttattatatgacccaagaacagaactttgctgatccagaactcgcacttgctaagcttggcgtacaactggcaatctcgtagcctctgaagtactttcctcaaatgttcctcatgctcttgctcattctgggaatatataagaatatcatcaatgaacaccactacgaacttgtcgaggtagtccatgaacacactattcatcggatacatgaagtaagctggcacattcgtcaattcgaatgaaataaccatgaactcatataacccatacttggtgatgaaagcgg

SEQ ID NO: 106008 - DNA, 670 bp, Zea Mays
gttgtcgtcgttgccaatctccacgtctaggcagttgctgttccgacgctcgattgttggtaacgattgtccttaagtcccttgataattacgcctgttggtgtgattaggtgttgttgttatgcagtacaccctcgttgatcatgtcttgtctgacccttcgtcagacaccgattcatggtgagatcagatggacaacatcatcatttgctggatctccgacaccttcgtcctaagctgcgccagatcaccatggagcgcgatggcatgacacaccacctctagctcgctcttgagaactagtttctcaggaatcttgagactgcaccctctagctcgacggcaccttccacacctacctctagggcgacgtccccatcagtgattactggtgcaggctgaaggggatggccaactccctagctaactttggcgcccccgtcgactctcggatcctcgtactcaacgttcttcgggacctaaacaagaaatttgagcatattggtgccatcatgttacgctactccctcttgtcattcctcaagctccgggacgatcttgttctagaggagctcaacgtgaccacactggccttgctgctgctcagatggccttcatcgctactcccacaccggctgccccagctccttcctctactctggcatgctcc

SEQ ID NO: 106009 - DNA, 575 bp, Zea Mays
gcggggtcagaaaagaaagggtgcaacttctggaaaggctgctgcttcggctgcttcaagcgagcctgcaccgaagaggaaaaagttgaaggtccttacgcaccaaccgcgctacattgaaccggccatagtgcctgaatttggcagtgaaacttcttcagctattgaagcaagaggacctgctcctacgcagaggattgaagagtcggctgcactgccgaagactgacaaaattgaggaaccaagaatctaagggacaaaaacattagaagttctaagcccttcggcaggagtggcggtgtcgaaggcacaaaaaggtctagcagcgacccccaagagaaaaaggatggccagtgtactagatgtgctggagacgataaaagcttcaagctctactccacagaaaattgccaaggcttcgaaagtgcaaattgaaaccgaaacaaaactgaccgaagccgaagctacaatgagccaggctagcgccgaagctcggccttcagagcccgccaaggagaaaccctcagaaattggagaaaaggcagcaaaggaagaagctatagaacaaattttgc

SEQ ID NO: 106010 - DNA, 912 bp, Zea Mays
atgttctataaatagttaactcaaccttaatctagattataacttgactaggaatcatattttaatcaacttcccatcatggactagtttaacttcggttagtaagattaacctaggttaaaccattatctattcctaaactatgcattattagacaattaataccaccagtgcaaagacaattttattatgaagccaacacaattttaatggactaaatcggagaaaatacagaaaagttatggtttaaataagttttaggttattttaatacctgttttgtacttaaaacagacttcaggggctttattgtaaattctagggacctaaattctatttctcccaactcttctaggacgacgggtttaatatgaaagaacccagggtctttttataaatctaccacaacgaagggttatcaggtgatcctatccgcccgatccactatctacggccccgattagatcttctccccatcgaaccggtatgccatactgaccgcgtgatcacagatcaacggtcccgattttatcttagcccattctattattacccctctgatctgatattgatgactgggatcaacgaaccacacatcttctatccacaggattacttgcatctaatctcagccacacatccacctcactacggcaccggtctcgtccccttcctctagctatcgagcacggcggggcgcccttctgtggcgttgcacgccggccaagaaacgcgtgtccaagcccagtgaccaaaatccatctcccaagtacaccaaaacatagccgaggaaatgtattaacgtgaggtgcacattaccgggcttgaggcgatggaggagacttgtccctaaagtacggtggctctgcggcggactcccctatccggcgagaaatcgctgcccaatcatag

SEQ ID NO: 106011 - DNA, 279 bp, Zea Mays
aattatagcctgacaatccagctacaattttgtcatagcaatcttgatcaaattctcaataattcaagcttgaattcatgcttaaagtttcagtgatcacactgtctgtctgaaaattcagacattggcaccctgacagcccaacttcaaccttaattatctccagatttttctcaataacatggcttccactcttaagcaaacttgttatccattagtaggtctacaagtttgatgtgatgacctagggcaagaaccatatattttaaaagatacaag

SEQ ID NO: 106012 - DNA, 650 bp, Zea Mays
ggagcatcttgtcttgcttcggcagttgaagaggcctcttcgccaagttcaggcactacgaccggttcaatgtatcgcgaccggtgggtcagaaccttcacctttttgcccttcagcacatctatggtggccgaagcggcagtcttcctctttttccttgccctcgtagcgggtagcgataatcagggtatacgaagccaatcgcgtcaaataccatgtttaatcttttcttcccccggcccccgaaggctgcagacagggcatcatctttagccctggaatatgtcccaagcagctcatcgctggtagcttcaatacatttcaaccagtcatcatctagctcatcaaacttctccctaagtctgaaggtatacttcaagcgaaccaagccaccttcactggattcggcaacagtatccttcggcatttcccagttctccacaagtagccataccctgaaggctatgtgctcttgaattaaatcccttgtgccaataaaggcgcaaatagtactaaaatccttctagcacgcttcaacatcgccatcaatttccaccttcggcctccggaggccgaagcgagaccagatagggcgctggataatttccttgatatcttctcttttaatcaaatcatttttaacataaaac

SEQ ID NO: 106013 - DNA, 382 bp, Zea Mays
ttcatcgcgacatcattcctagtaagctttctgccaaagctattgtcgtggcgtagggattccgtagcaccaagtatagcagtgagtaggggcaggatcacccgtattgagctactccggcgggggtgccgtcatgctcgtgtcgcgtcgccaatctcgggtgagcgaaggaagaaaggagaagggacactagatccaaaattatggcgttgattagattctagagtagagattcgtgtgggtaacttgtttcgtcggcttcctaatgtacgacgtagattagaacagcgtggcggattcggcctatttgatccgaaccgaagatcgatgatcggatggttgtgggtagtctaggtttcataaaaatctggttcgtcgaatc

SEQ ID NO: 106014 - DNA, 335 bp, Zea Mays
ctggcggccaagccataccatcttcagaaagtcgaccattaaacaaagtcaaattgacgccatgaagggaagatactttcgtgacctgtctattgttagggttggaggggacaacactgcccctgctcctgaagaaaatgaggttgttgtgtacaaaagctttatgaaggcgggtcttcggttcccattgagcaaatttgtggttgaagtgttgaagatatttcagatctttcttcatcaaattactcctgaagctataattagaatgggtttgtttgtttgggctgtgagaagccaagggctggaaccgagcgtgaagtgtttttgcaatatgc

SEQ ID NO: 106015 - DNA, 342 bp, Zea Mays
atgatcctcatcaaaaggatactctaaggtccttggtgagctgtgtaaacccctccattgtgtgtgttcaggaaaccaaaccctccttttaatcactgggatttggctttctgccttggctctgagtttggtgactttgcttttcttccatctaaagacacaagagggggcatccttgttgcttggcaaagaagcctttttactgcagtggacaggaaaattttgaatcattcagtcttggtttgctttcgtagtgcctctaatgtctgctggtggttctcagggctatacagcccttgtagggatgaggagaagcaattctttcttgatgaactctccctg

SEQ ID NO: 106016 - DNA, 579 bp, Zea Mays
cagagatcctcaaccacttcaatatggttgcgaagcgtgtacacatggcctttttcagatctgtcggttcagcatggtgagcacccacaagaggcagaggggtacttataggtggtaattcagggtcgggttcagacaccgttagccacacctccttagggatttcacaggggtcagagcaccatgcccaaaggtcaaaagaacgggtacgctctctacgcctagagcgctcctgaacataatgaatagtgcagctcctgcctaaggcccttgatgccacctcctcaccccagcagtgaacaggaatcccttccacccggaccttaactctaaactcccagctggtctttctagcatagctctcttctgaccagtcaccgaaatgaaactcacgcccacgataagaaactgatcttctatcaatagcccattgcttggttcttgcatcaggaaagataataaaaaactgttctgggaaatgtttgacaagttgatactgaccatggcagagattgaacttctctctcaacatgtctcctaccacaatggtgtcaacctcatggctatttccatcgaatg

SEQ ID NO: 106017 - DNA, 394 bp, Zea Mays
cgggggtgcaattgcttcatggttgcatagacattaagtaatgtggatgcatatatggtaaaaatttgcgcattataactgattctgtattgttagggggtgcatttagaatgaacctagcttcgcccctgcctacgtgtattcttgtcttgttgtaggtaaaatctgttgtaaatcaggagcggaatgagtagttggcggggtaaagtgggccatagttccacctcaaactttttctctttatatatacattaaatatattataaattgagaaaaaatagcaagtatttggagccaaaactaccgtgagcaggcaggccacttccaccgtcctggcctaccgtccaattccagagtctgctaacactatttccagcaacattctttatatctg

SEQ ID NO: 106018 - DNA, 295 bp, Zea Mays
ggccctgattgccccacttcggagccttcctgaggatgagaggcagactcactttgacatgccggctagcactgacgacgcggagatagatgttgtgcttagtttactggctggggaatcgtctgactcaacccatgccgagccaatggctatcacagatgggcaggaacttggtgaggtggtgaaggcccagaaacccgaagacgctcgcccaaagcatccacgccgagtgagtcgaccgactgcacccgttgtggaaaaaaggaagaagaggcggcttcggcgactgtcatgc

SEQ ID NO: 106019 - DNA, 306 bp, Zea Mays
ggaaaattaagtcagtgtagttttattttccaatttgtgcaactacaaccatcttaaaagcctttctcaataaaactgtgggtggtaccgtcttaccaacaatggtgccaaatgtaaccaggaagaacacataaagtaatgatatgtgaagaaagtagcaacacataatatatatttggaaacagctcggccccgttcggcagcataggaacagtcccaagccagaaactgtttcaggcctagatttagtgcatccgactctttcgctctttctagtccagaattaatccaattggaacacttttg

SEQ ID NO: 106020 - DNA, 525 bp, Zea Mays
ctagggcccataactttctcaattaaggactttgcaacccaaacttgtttaggtctacttttgtttggtggacctaaaaatattatttttaccttcccatttgcaacttttctaagcacatagtaagtgttgaatgcaaaaggtcttgaatgctttggcaagagagttggtggtgtgaccttgcaattgtgagcaaagtgtccttcttttccacactcataacacttgatgggctaaggattttgcttagccttgttttggtttcttgctttcttttgcacaattgaattgtatccaataccattcttgttatttttcatgactacgttcatgaggagctcattttggatgtattggcccttgttgaatttttgcgcactagtggcaaggtgatctttatcaagattgagtttctttatctcttccctaagcctctcattgtcaatcaccaactcattatcaaagtctttgctttctatggcaaattttcccttagtggttgcatcagtcaagtaattctttaat

SEQ ID NO: 106021 - DNA, 630 bp, Zea Mays
ttctctcacccactggaaagcaacttctggatgaagtccatgctgggcaatgtggagtacacgcagcatccaggaccctggttgggaaggtctttaggtcgggttctactggccaacaacaaagagtgatgcagccgagttagtccagaggtgcgaagcctgctagtacttgtcaaaacagcagcatctaccagcacagcagctgcagactataccctgctaacggagcaatcggcttaagtcggcaacgacttaagacggtgcaacatgatcacgcttacttaactcggggtgaccactataccctgctaacggagcaatcggcttaggtcggccacgacttaagacggtgcaacatgctcgcgcttacctaactcggggtgaccactataccctgttaacggagcaatcggcttaggtcggtaacgacttaatgctcgcgcttacctaactcggggtgaccactataccctgctaacggagcaatcggcttaggtcggcaacgacttaagacagtgcaacatgctcgcgcttacctaactcggggtgaccactataccctgctaacggagcaatcggcttaagtcggcaacgacttaagacagtgcaacatgctcatgcttacctaac

SEQ ID NO: 106022 - DNA, 558 bp, Zea Mays
cttttttaacgcgggaccagtgctatctgcatttgaggccacatgaggaacaaaagcactttgacttgcactgctgaccatatttgactcagggaataagacctcaacgttattagcacgtccacaaccaccattaaaatctgaacagacaacacaaacacacaaagagagatgcatggttactactagtattgggctactgcctactgggagataccagatgactgctatcttccaggcgctgtagaggtaatagagggaagggagactaggagacaatcagagaagggagagcaggtgctaccttcagatgacgagctcatctttaattcttgactagctgacagacgccggagcactagagtactggacgccgctggacgactggagcacttggagcagagacgtcggcagaaaccagagaggacagaggagaggagtagggtttatggcggctaggagaggttctggcgggtttctagcggctgggaggttttctggcagctgggagggtttttggaggggtgggctactgtagatgggccaaaactagagtga

SEQ ID NO: 106023 - DNA, 422 bp, Zea Mays
agttaatactagtgaaatatattagaccttactccaaatttacttaagcctaaattggtgacctagatcaactcggccatacccaacaacttgacctacataacagatctatcttagcctcttgtcccaaacccggatggagacaccaaagagcaagactggaaaaggacaaggtcaatcttgtgaaggaaggatagagaagtcaaacttgatcatcaaaggaaattactacccaacaaaagttctttctcactataaacttttaccctaggctattattaccctaacctacccatctcttatattatacctaataagtagctggatacctatgctctcctaatcacccattattgactataaaataatctggatatttgaaacatttatagactaaaagttgaattacaatccaatccttt

SEQ ID NO: 106024 - DNA, 703 bp, Zea Mays
tacgacaaccacaatgcactcaatacttaatctgcaactaaaagtggaaaccctgacagtggttcgggaactcatgtgaaggcctagtaaaacctgcattctaaagacatgaataatcaagccaagatattccaaaatccaaataaccaagctaagaagttgcaacaataacatcctcaaaaatgacatttgtttgatacaacaaaaacatattgcgaagggtggacaagctcctagtccatctctatctgcttcaactaaaagaggtgcatgcttctatgggtgcagtgctactccagcaaactaaaccacttatccttatgttatagttttttgcttgatttcctgatgcaatcgtctacctaatatggctgctcaagtgcttaacaaaacaaagtttagagtcagtttccgcattcccaagcatcttgtacacttcagtaccagcaagagctgctggaatgtaccctcaagcaagatggctgccattattaactaataaagtgccagcattcactaaagatgtctatttttcaagacgactccacccataagctgaatcccagcatgaaaaccagaacaaagaacaattattggcaaaatgttgtagaaactcaaaccccctcacttggatagatccatgtcttgacagcctcgtggtccagggagacagcgcagagaccatactcaatctccatactgg

SEQ ID NO: 106025 - DNA, 520 bp, Zea Mays
tggattataggatctcaatccacctttgttggtgcaatgatgacttggcttgaagagaacgatgaagacatggtacgagttttcattttgtgatcaattcaaatttattgtggactataattgatacaaccttttaactattgtaatattgctccatgttcactctattcttaggatgaacctgagtcaacaattgtggactgaattaagtttccaacaaatcaagtgatggagatgttgctatccagcactacagcagatgctttttggactataatatgttggttgtgacattttggacagttgttttaatggcgcactttatgttggactgctggagtgctttttgtaatgtgctaaatagctggatgtgaagctacattagactgttatatgtaatgtgctatttggaatgtgttggactgctacttgtaaggtgctgcactttatgtaatgtgttggactgctatttggacctataatatgctctagtatgttgtgttggactgttatttctaat

SEQ ID NO: 106026 - DNA, 321 bp, Zea Mays
ctccaccagtgatgcaactgtagctccatcttgaaaacatgcacatggtgtcatttcatgagcgtgctaaagtaaatcatgttgtccaacgtccaggtgccgataggtcaatgcttacggcatattttgaggcaaataggctacacgaggaggctcgaggcatcctttatcgtgactttcctgagtggtacactttgcaacagggcaaggtgtggcaaaggaggaaacaaaacacgggtggacaggtcggtagaatagtctctgctcatccagctgagagggagcgcttttatcttcgacttctcttaaaccatgtgacgg

SEQ ID NO: 106027 - DNA, 433 bp, Zea Mays
gcaccctaggccttgcgatctgcacacactacctgcatttaatatgcggcgcacaccgccagccaccggtgtgaacaggtgggcatcctacccgtatttaatgcaggcggcccttgtgttagaggcccacgtcaagagacacctggctgctaccgcgatacaccttgggctacgtggtagcaccgcaccctcgcttgggtggagagcagtggctaagaacgcatgcagacatggcagctctagacctccctaggctgggggtctagaaggcacttgtggaggtccagttctcatccatgatggcccgaacacgtggtggaaccgacctcccctggccggaggtccggatagcacacacaggggtctggtaccgtcccacgagggtttagccctagactgtagatgacgaacaatcccaccgtcggaacgtgcg

SEQ ID NO: 106028 - DNA, 327 bp, Zea Mays
cttgatcataaaaaggtagaatgtccgtgcataggctcataagggtcgaaaaggcattattacaaaagttgaaaacattatcagcaatgttactgtatataaaagtgaatgaattggaaaactatgtggaagttgagtggtcccgctagcccaaaaacagtagtacaaacacacgaagtagtcgtggcgcaatttcaaagtcatcaaatcatacgacttatatagcacaggataatacttggaaatttgtgcaaacgccaaattcataatgctggaccttctgacaggagagctcagcgaccatttcctaacaacccaacaattcaa

SEQ ID NO: 106029 - DNA, 613 bp, Zea Mays
gtcaccacaggggccactacgggcccaaccacacatggagtagttttgctgcgatacataattaaaccaaaagaagacaagcactgcaacatctcagacccaagctgagacaaaagagacggctacgcattacagccccgccgagggatgcgactccgcgtcagcatccatatcagaagcgtccctttgctctgcagacggagaactcggctcatttgtggagcaagacgaggaacacgacctctgaatggcaacattggaggacctggagttgcttaaggagttgagacttagtttttgggggtccaccttgcagaagtcaacgcccaattccttgatagtcctatgggagagcgatggtggtgaaggagacccagcacaacacgagcaattatttttactgccaaaacaaggcttaaagcctttggccttctctctgagcctagcacttcttctcacttcagtgacgaccaaggctgcacgtttcttcctgttcacagctgcagaagtcacaggagattgagcctccacaagcgaatcctggctgggagggagcaagcattttgggggtatcttaaatggtatggtttccatgttgggctccatgaaagca

SEQ ID NO: 106030 - DNA, 408 bp, Zea Mays
gtttgtggcatttttctccatgtgccggaacattgctgcggatgtccatgaggtggcaagacgtcagcgggagactgacgacaaccttcgtcgtcaagcttcctctttgggtactcccttcgccccccgatcgcctgacgtgcctctccatcctcctcccccggagatcaacgagtggcaccagcaggcatacggggtgccttttatgacatcagacgacgacgaagaagaagaagcttattttgatgatcgtgagcagtttgtcccgcctccgtatcacggggatccgggtcaatcatcctctcaccctccgccccaggatccttctggcagtgctcctcccccggatcagtctggggaagaacactttgcctctcacctggcgcatcacttgtttgctcctcatca

SEQ ID NO: 106031 - DNA, 884 bp, Zea Mays
attgatgtatacaaatgatatagaaattacaaaccctaacactagggaagcccaagacccactagataataagtttggggtggtaagctagactaccaccaattgatgcttatttgactggattgaattgatttcccttattggtgtcagtttagagatgaagtccatgttgaactctcgttaaatgatactctagcctcatttttatagttcaagggagtggctaatcttatatgtatgcactacttgtgggctctaactatcatgggccagttgcccctatcctatgatagctttgtacaatgacatatcttctacagtgtagtcatgtagtgtatatcgaacattcacttatataatcatacctattgagagaccttctgggatgccgtccggagtgaggatgggtgcattaatagtgttcggtatggttcctcatacttgttattacgagaaagcataaccatgccatctagtcatggctatagggatttttccatcccctggcagccggtgtgattgcttgaccagatatcatctcaaatgtaagagcacacctttatagtggcattgattacacctatcccctgagtgcatgtcagggtgaaaatatgattgtaatgtcatttatcacatttaatacgacacataggcccggatgcagtcatctcttctcgagacaactgtcataacgtctacaggggcgagtacgataacctaaccttatgtacgccagaccatggggcacctggcttaatataattgatagttaatgtagcctcttatacttatattatatttcttggtacactccttgtgtgcatgtgcagctacatgatcgatagacatactgtattacggtctcgatagctctataatctaag

SEQ ID NO: 106032 - DNA, 1057 bp, Zea Mays
ccttcacttttttgcccttcagcacagcagtggtggccgaagcgacagcttttctctttttcccttgccttcgcagcgggtagtgataatcagggtatacgaagccgattgcatcaaataccctgttcaatcttttcttcccccggcccccgaaggctgcgaacaaggcatcatcttcggccttggaatatgttccaagcagctcgtcactggtagcttcaatacatttcaaccagtcatcatctggctcatcaaacttctccctaaatctgaaggtatacttcaattggactagaccaccttcactggatttggcagtagtttccttcggcatatgccagctctccacaagtggccacaccctgaaggatatgtgttcttgaattaaatccctcgtgccaatgaaggcacaaacagtactaaaggccttcagacatgcttcaacatcactatcaatatccaccttcggccttcggaggccgaagcgagaccagatggggcgctggataatttccttgatgtcttaccttttaatcagatcatttttaacaaaaaaccactcctccatccaggctccgggccatctttttcggtatgttggcactgggtagcttgcattagagcgggcaatgaacccgtagcagccgaagttgttgtgatattgttctttgccaatagccttcatctcgtataaaagctcgtgcatactacagaagcacttcgcgctcggctccagcccctggcttcttacagcccagacaaacatctccatcctaattatagcttcgagggtaatctaatggagaaaaatctgaaaaatctttgatacctcaaccacaaatttgctcagtgggaaccggagacctgctttcaggaagcttcggtaaataacaactttgttttcctcaggagcaggggcagtgttgtctcctccaaccctcacaatggacatatcgtggaaatatctccccctcatggcgtcaatataacttcgtttgatgctcgatttcccgaagattgtatggcttggccgccagggccgatcctcagaatcttc

SEQ ID NO: 106033 - DNA, 305 bp, Zea Mays
ctcatgcatgttacagaagcattttgcactcggctctagtccctggctccttatggcccaaatgaaaatccccatgatagcttcaagggtaatctgatgaaggtaaatctcaaatgttttcagaacttcaactaaaaatttgctcaggaggaaccaaagccctgccttcatgaaactcctgtagacaacaacttcgtctacttcgggcgcaggggcagtgctatcgcctccagccctcacaatagaaatatcgcggaagtatcttcctttcatagcatcaatgtgactctgcttgatggttgatt

SEQ ID NO: 106034 - DNA, 727 bp, Zea Mays
tggtttggagaccgattggttgttcccaagaactccgagctcagaaagaagatattggatgaagctcacctttaaaaattctccatgcaccccggcagcaataagatgtatcatgacctcagatctttatactagtggaccagaatgaagagggaaattgctaagtatatatctaaatgtgacacctgccagagagtcaaggccagtcacttgaaggtagcaggcactctacgaccccttcccatcccatcttggaactgggaggatatttgcatggattttatcgtgggattgcccaatacctcctggcaccatgattctatttgggtcatcgtggataggctgaccaagacggctcatttcttgccagtgcataccacccacaagacagagaaatatgcagaaatctatgttgatcaaatagtacgtttgcatggaattccgaagacgattgtatctgacagaggagcactgtttgtggcactcttttgggagcagctccaagaatcacttgggacccatgtaataagaagctcagcataccaccctcaaacagatggtcagacagaaagagtgaatcaaatcctcgaagacatgttgcgagcctatgtgctacactatgataagaattgggacaagtgtcttcctttggcagaattctcctataataacagctaccagtccagtctaaagatggcaccttttgaggccttgtatggaagaaggt

SEQ ID NO: 106035 - DNA, 417 bp, Zea Mays
cgagtcccccactgatcaggaggtagctgaggcaggggctttgctagctgaagttggactgctgaaagagaggggtctgactgctgaggctgtggttgctgattttgtttttaagaacattcagccgttgaaggacagggctcacccggcttatctgtaccgaggcctagctgactcaactcgggttaccaacagaagaattccctccgtagacttggtgaaccaacttgagatgattcttagaggcaaggtatcaaacgttggtgccccagtagcatactcggcctggaacctgcctccttccaaagccttcactcattttgtttcgaatccacctgttgctgatggcagtttgggccttagagtgcgaccctctgctgaagaagttaacgccttggttgcctcgctcggggaaat

SEQ ID NO: 106036 - DNA, 318 bp, Zea Mays
cggagatggaagagcctccaaacaagtgtcaaaacacttccttggagggctcgggggctactgtcagatatcgtaattaggggtacctagattacacccctaattcacacttaaccccaagaccaccatcaaaccatttccttgagatcacaagagcataaactatgcttcacccaaggcccctctcggcgatcaccatggctccacttcgctcgagcctgccctcagacaaggtacgctctcaagagaatcctcgcccaggccgaggtgtcctctccccagaactgttgtctccgcctcgaccgagcttgtctcggg

SEQ ID NO: 106037 - DNA, 614 bp, Zea Mays
ggagcaggactctgaggaggaggactccgaggaggatgaaggtggtagcggtgaggaccagagcggctatgacagcagcgatgagggtggcaatggtggcgtcaatggtggagggagcaggagcagtggtagcaacggcggcagcaatgacaagggcatcggcggcaagggtggcagcggcgacaaaggtagcagcaacgccggtggcaaggcaccaccgtcttaagtattagtatagtgtagtagtgggtagttgtagtattagaagtaatagtagtagaagtggagatcgtattttgttagggtcgatttatgatgaatcgatccttttttgatctataatggtccctttcccttatgaatgatgtctgatggctgaacgtgctccttaataccgagttacctttgatttgtatgctgcattttgagatcttgcttcttgttatattcagttttccattccgactgattgtgcataacagtctcctgtccgacttagtctgcccggctgaaaacccatacgacataaccatccgacttagcactttccccttcaactctgtgctgatgtctatagtaggtccacagcgtgtgcatatagacacccgctggca

SEQ ID NO: 106038 - DNA, 351 bp, Zea Mays
gtgcgtcaaccgcagacatgctagcccttgctactgtgcgatctaggtctcttataccgtgaacacaactttttttgccacttcgctaggaaagaaaaagaagactaccaagatccaatctactagtaatatgtcagacagtgacagatctaaagatgtagagaatcacattaatcccttcaatcctaagaacattaaccacctgccattacttggagagctactcgataagcttcgtcaaaagattctagccaagtttgatgttgagttggatctttcttggacagttgtaccaaagatcgacaagacaactaacacactttcatgagcttgactttggtaatgttgttg

SEQ ID NO: 106039 - DNA, 668 bp, Zea Mays
tcgagccctgttgccgctcagttcgtcatacccacttgcgcggcgacgtggccagacaatcatcgccgtggtggtcgtcgtccttcgcgattgcgccacgccgtgaccatttcaccatgtagctataaccgtggcaagcctagagttactgcccttgagccattgtaccggcgggcgccatgacgcattcatccagtgaaatattccccccaccattgtgatcgtcttcgtctcaaattgaagaagcacatagcggattcctttaaattgagcgctaccctcgctttgcatctctattacacgctcataccaccctcagttagcctctctcgtgcaccatagcccccagtcaccggatttcccccaaatcggtcactcgcgccaccgtgaggcatccttccatggtcagccatttccagctctgttcatccccctatgtgacatgttttagcatccttaaatgttaacgtagctcgtcggccgaactgattgaacgctaccgcgatagggcttcgagaacatcatctcgccgccgcgaaacacctccgagagcgcacttacgttgacccactcttccacccccgttctgtccaaattcacgcatgtaccccgacctttggtgaactagtgaaactcaccctagcttcaatttaaacgctaccgcgttt

SEQ ID NO: 106040 - DNA, 462 bp, Zea Mays
gttttcacgtggaagcggagctcggaaagggttgagacctcgacggagatgccttccaaacacgtcaaagtcatgcccgtggaagtttgtcacgtggacggctggcaaagggaaaaggccgggttctcggcccggaaatgtgctgccaaactggccctacttgttcagcctgcatcagtcgatgtttggtcggccattcaattttcttctccagaattcagatcgtgcacacattcccatttgctcaacacatgccgtaacagtgagggaaatctgcctaactgtggagggctggaggcggcactggggaacagatggagacggaccctgcttggcacagggatcactcacggctgcacactgacactgcacagcatgcatgtctcgctaggctggcactggcgctccaccgttgcggtatgcagtggcggatctaggaatttatctctgggtataccgaac

SEQ ID NO: 106041 - DNA, 600 bp, Zea Mays
caaaaatagcctagggtaagcaagtttatgatggggaagaattccgtgttgagtggtaatgcatttgaaaattgaatttgacttctctccttccttgacggggttgatcttttcctttttccaatcttggtctcattaattcgaggttaatgtgtatctcgtcggggttggggagtatggttatgatagatatgaatgagatagactacatgatgtaggtcaaaagtttgtttaatgttaggtgagaatagacagattatgcaatccatcatgactctattggttggatcagatctcatgcatgtggctgagttggtttaaggcactagtttagttttaagtgcacgaggggtatggccttatcttttataccagcattaagtaacttactctagattagatcataatagattagataaaatctagattaggttggatatgactagattagactagttaagatctaattaatttgcattagatcatggctgttaaactagggtggataagtatgcttattaggataagatggatccataaagataagatggaatcttttgaggttagtaagatctattaggatatgatagaatcttttcg

SEQ ID NO: 106042 - DNA, 282 bp, Zea Mays
atttagaatataacactgatgtaccgcaatacttaaaaacaattactatatgttgacatatcactacgtatcacaattacgtttctctgtcttaaccaaatctaacacaaacatcaaagaatattgaaccctacacaagctatgtattttccttaactagaacatagaatcgagagtcaagtaacaattcacgctcacaattattgaacacatctaaaacttagtatattaaaaatcatccatctaactttctaaaacattcctctagattaactatcaacg

SEQ ID NO: 106043 - DNA, 545 bp, Zea Mays
ctggttggttcgcacgacggcgagacgggtcgagttgttgggctgtgtgccagccatgtggttgcttagctggctactgggaatccggttgaagctttgaaattgatttcttaatttttgggtccccttttgcgacgcggtttctggttggtgagagggatctgcagcagtagaaaaaaatgtggtgggctgttcttcctgatgttaaactggaagtcgtcgagaaattactttcatggtggaaatttgaggattctgatcatagttttatttcctgattttgtttgtcagacgagctaagttgatttcggagaaaatatttatttccttggccgtggtagatttggtcacggcagaaattgaccaccatgagagcaatgttcactttgattggtggagaaaaaggttgcaatcattgacggcgaggcatgtcgagttgtcaacttggtgtctatgctgatgcaaaaaggtttgcttgcataaagtccaatggagccaagggtgcttgtttcttgtttgtgcccttcagttgcaacctgcaaagg

SEQ ID NO: 106044 - DNA, 415 bp, Zea Mays
cgaagggggataacttctgccgatggcttgaagatttggaaagcagcagagatgacccacgacgcctacattggtagacttcgctacaagatgcgtctatgtaacagagattaccatcagcatggcccacctgtaagtgtggctcgggagtgtatcaattgcagtgtaaccgagaaatctgtacttggtcatgtaattaccctgttgtacaatgcatggcaggaatatagttggtagcccagggcattacgttacttattatactaacccacgactaccttataaatactccgggcctgtaactgtccggacacgcttggtaatacaatctcgccaacaatttgtcgcttgattgtgctactcgctccccctgtacccgagagttgggttacggattcccgtgtcaacatttggc

SEQ ID NO: 106045 - DNA, 482 bp, Zea Mays
cggcactgggccgaacggtccacgacctgggggcaggagcggatcctcctctgcatactttcggacgatccatgcctggtgtcagactatccgcgatggcgcagaaggtcttcttttccgcgaaaaaccctagaactcgccctgtgagagatcacatcgaaggggagagttccaagagtcattgttcgggttggcaggtcgttaggtgcgtctctaatagttgtagagtcaaagagggatggttgtgtaaagctaaactaaatctaaacctaaggctagattacttctactcctagaaattgaatgaacgatgcaaataaggtaaaattaatatgtagatttaattgaatccattgtgggggcttcaattggtcgtaccccttcatctctataaaaggtggaggtctggacccgttacaagtcggttctcgagttaatcccgtggattttgctaacaaatcctgcaagaaatctagaaccct

SEQ ID NO: 106046 - DNA, 308 bp, Zea Mays
gttctagcagagtccacgcgagggggaagagacggtcctgacgatctgggcccacctgtaggtgactggaacggagtccgcgcgggtagacagtggctgacctggtggggtccacctgtcggcgcatggagttaggtgggctagggattgggccgagaagtgcagatttggcccaagaagccaacatgtttcatcttttcccttttcctgttttctattttgttttctaattcaaaacaaattcaaatataatttgaattctcaattcaattagaatgcatagtcaataaattccatcatggcttgag

SEQ ID NO: 106047 - DNA, 893 bp, Zea Mays
caaagaacgatgcagccgagttagttcagaggtgcgaagcctgccaatacttgtcgaagcaacaacacatgccagcacagcaactgcagaccataccagtaacttggcctttcgcatgctggggactggatatgattggacctttcaagaaagctcaagggggatacactcatgtattggtagcaattgacaaattcactaaatggatagagttcaagcccattgcctctttaacctctgctaaggccgtggaattcgtacaagacataatattcagattcgggataccaaacagcatcataactgatttaggatccaacttcacaagttcagaattctttgacttctgcgagcaaaagagcattcagatcaagtatgcatacgtagcccatccaagagccaacggacaggttgaacgagccaacgggatgatattggaggcactcaggaaaaaggtcttcgataagaatgaaaaattcacaggaaagtggataagggaattaccctatgtcgtttggagcctaagaacccaacctagtcgagccttgcatggaaacactcctttcttcatggtctatgggtcggaggcagtgctacctgctgatctcaagtttggggcaccaaggttgatcttcgaaagcatagcagaagctgaggccaccaggctggaggacatagatgtacttgaggaagaacggctaaaagcagtaatccaatcagtaaggtaccagcagactctaaggcgctatcacgacaaggctgtgcgacaacgattcttctcagtaggagatctcgtcctccgccgaattctaacgggggagggacgacacaagttatcacccttatgggaaggacccttcgtggtagcagaagtcactcggcccggatcgtat

SEQ ID NO: 106048 - DNA, 489 bp, Zea Mays
gaagggcacaagctctcaacgtgtcttccaatacttgattagtcctttcagtctatccatcaatatgaggtaggccgaactaaaattcaactttgcatccgtattctcatgaaaacttttccaaaatctgggggtaaactgtgatcctctatccaaaatgatcttccttggtacaccgtgtagagactcaatccgagacatgtataacttagccaattgtgatcccttataagtagtcttaaccgggatgaaatgagtcattttggtcagtctatccacaataacccatatagaatcatatcctttcagggtgtgaggcagtccagtaatgaaatccataccaattacttcccacttccactcgggtatctttagtgggtgcagtagtccagctggcctctggtgttcagccttaactctttgacacacatcgcacatagccacatgtgcagccacatttctcttctatccatacgaccaatgcttccg

SEQ ID NO: 106049 - DNA, 412 bp, Zea Mays
aaaatatgagaacagcagggggctcggggcaaaaatccccaaggcacagagacaagtcgtgcaggacggcgggttggtttctcagaagcctagggtttctttagcaaaatgcctggccgaagggttattgaccaatcttggccgatggattagaaacgggtggctcagattagatctaggcatcaagtgactcggtgcacgtcctagccactggatcaagatcgcgcggtcgagaataagcccaaccgaaccggtatgtggaagctaatcagagccgttcatccccaatccaagggcgccagttcatcttcttccactcgctactcccaccaggcggaccacacgccgagcggcaccatggacagagccgagttcgccgtactagcggtcccgccccaatggtcactctcac

SEQ ID NO: 106050 - DNA, 367 bp, Zea Mays
gctcgctcctcctataaattgagcccgcggctagcttcacaacatcatcacgcaccaagccacccagtattgcccccagccgatcaccagcgagctctaattccggatttcccccaattcgggtttccgccacccgaaaccgacctcatcgcggccagctcccttcccggtcagtccaaccctccctctccctcgtttaagctttctcacatgtctacgatgcttgccgaaccaccaatttggactgcgggctcaccaatcaccgggaacgcactcaattgtccgccacccattcggttcacgtggacagagcttgatagctcaccatttgtgcaattaagttaggggaaatgctctctgggtcatg

SEQ ID NO: 106051 - DNA, 348 bp, Zea Mays
tgaggttgttgttgcacctgctggatggctatcagggtctgcacaattgactgaactgcttgagtttgcatgaggaacatcttctccattgtcatcggggatgggggaggcaactgcgaatggggtgcctcatcctacgaatcatgttgctcttgctgggtacgtctccctcctctacgcctatggtcagacatctacaaaagtcaatcatacatcagaactgatcttgcaaacctttcagcataaaaaaggtagagttcttcacaacacttaataaacaagcatcttcattgactctcaacacggccaaactaatcttctcggataaagagaaaagtctaaaaaggc

SEQ ID NO: 106052 - DNA, 283 bp, Zea Mays
ggataaacttgtatcgcttttaaatcatgctacacgtgtgtactgagtaacatatgtgtgcaagcatgacatcttgtttagtccatgttcacatgattaccctattttggcactatgtgttatgcctctaatgcaccctctcgagctatgaagtgcataaacaatagggaacttgtggtaacaactggtgctctcatggccatacaggtaaaaggcaaaggtatggaaaatggaactatgcaatttcattaaatatcttgaagttccattgattgtgatcata

SEQ ID NO: 106053 - DNA, 463 bp, Zea Mays
ttcgaaagagatggcatggggcctggatgcaagagtggttctatgtgaagaacgacctgattgaaagggaagatattaagggaattatccaacgtcctatctggtctcgcttcggcattaggaggccatccactacccttgggaatgaaatacaagcatgccagtctgcttttgatatagtgtgcacttacataggcactagggacttagtccaggagcatattgcttatagagtgtggccgctcgcaagtgggtgggagatgccgaaggaggctgctgctggatctagccaaggcagtctagtttatctgaagtacaccttcatgtacaaaaatcaatttgatgaacgaaatgatgactggctagatgccatcgaagcaaccagtgatgaattgcttggtgcttactcgagggatgaagatgatactatgatgacaatgttagggggtcgagggaaaaagag

SEQ ID NO: 106054 - DNA, 343 bp, Zea Mays
gccacgccaggctccatggcccgccgcgccggggtcgtcgcgagatccatggctagcaagctgctggaagctagcgcaagtctgtgtggcaaaacactagcttgcaaggatcaacgatgtgcctgcacagttggagagatcaatgcaatctggcaggcaggaagagatcactgggaggagctgccagttgttctttggtgatgcatgatcttagccagggaagggatgggatggtttgggaggagcgggagaggtatttaacggagggaaaggtggcaaggatcggtcccacaaaaacacaacttaatttggaaggaagggttacttaattagcggtagttat

SEQ ID NO: 106055 - DNA, 340 bp, Zea Mays
taccaagttctgcaacaaagttggtcctctatagaagctctacaactttgttatagcaagcctaggtaaattctcactggatcttagtcgcaatggctctcaaacttggatcaaagtcactgttagtctgagattcagactgtattagcctgatagccagacgttagacttaattatctctagtttcatcttaacaactatgattacactctcaagcaaagttgttctcctttattaggtctacaagtttgatgtggtgacctagggcaaaaaccctagaatttgaaagttacaaggtctcaaagttgtgctcataacactgatttcagacttaggctat

SEQ ID NO: 106056 - DNA, 683 bp, Zea Mays
ggggtgatggaacattacaaggttctaggcacactatttccttggcattgacttgatggaacctgccatgaactttgatctggatggccctaagccaagcagcctgacatcaggcagccagagcacaaagacaggggtagaagggggctaagcctaatggattgcttatcttttttgctttcccctaatggttgccagctgctccttttataaagctaccatggccctaacagttcaaatataaccttatttctactggtaacaaacccctgagatctgaactaatcttatctttggctctttgctacccaattttttatttcctagctatagataacaaatagctaaattggctataaggctagagtacctttcctgtgaacaataatacactcagggacctgcacatgaaagcacctaggtgtccacaacgtcttaagacctcaatcatttgtagtgggaagaaatggagtaacaagagacgtttttctttctttcttatatatgtaaaaattttgtgtttaagctaagatgtaggcatctttaccgttttgcaacattagtaattactcaaatttgtttaatgaaattttaaatgaagcagttgtaggaatattatactcctgttgtccgatgtcattttgacatgtttccaaaatttcaattgtcagtagattttaatt

SEQ ID NO: 106057 - DNA, 303 bp, Zea Mays
ccagtgttagtcatgcagtatacaatagtgcaataagttgttgagtcaggaaaaataagaattttgtgcgatttaaaaacaaaacgaaatcattctgcatgcaaaagtgtaaaaagaataaatcgtaagctgctgttaccacttgagcacatattttccccttttgtaatgatttcatttactctgtcagattatgtgtcttttttattgtattaatgtggtatggtggaaattttatgtagggagcaaagatgtacagaagcatttgtaaaggactataaaaagatgaagaaattaaaaaga

SEQ ID NO: 106058 - DNA, 393 bp, Zea Mays
cacaagcacacaacatgtcttccaaggtttggatagttcgctccgactgaccatcagtctgagggtgaaaagcaacaataagagaaagcttggtacccaaagcactgtgaagactcccataatttggatacaaatttggagtcccgatctgaaacaatggacttaggcacactatgaagcctgattacttctttcatatacaagggaaccaactctgaagtggaatgtatggtcttcatgggaataaagcgcgcagacttaattaagcgatccactacaacccaaatagcatccctgcctcgaggagagcgaggtaagccaaccacgaaatccatagtgatataatcccacttccactcttgaatttccaacggcttcaataaacctgcaggc

SEQ ID NO: 106059 - DNA, 431 bp, Zea Mays
aaacaacactctcagattgaaatggaataagtgaggcaaaaaaataggtaaacatcatggtaaatatggagagaggtcaagggtcaaaggtgatattaggcaaggatataaaggaagaggtaaatgtgcataaaaaaccaggaatctaggtacaaccaagaatagagttaagataagtcttgcaagtggtaaagtataggatataaccacgggtgagataagtaagagaccacacttgaactaaggtgggagattggaggttttagataacgaacatagtgtaatcaccaaggtaagattgagagatgagaagggtaaaggtaataagaaacaaaagcacaacaaaagatgaggttacaaactcgcgagccaaagaagaggatacgaccaagagaaagaaggtatgagacggaagaggggcgattttaaag

SEQ ID NO: 106060 - DNA, 594 bp, Zea Mays
gagctcctatagagactaagtatggatgcacctacaagtcaaaagaatgtagttggcccctgctaagggcatgacagcctctaaaagcatgattccatggttcaagatctactttaatgatctcatgacaacccctaaatgtggtgtgcgacgttatggtctgataggagcattgttgccacgactttggcatcatacgtattcaagaccacgattcgatatgtgccatcgaccttgtagccatgcatgctaatgtactagtaagtattataaagtacttattgttacactggttaccaactacggtgtatccatacaccaatatcgtggactttgatgtccatcaatacggcatggcatacctacttcagcgatagatgtctgccactatagcaagacatcttcaacattgtggcacgaccaagagcatggctccacgaccaggataagcatagggttgttgggccacgattgaccaagaaccataatccagacaatatataatcagctttcctcccttggtctataaaagggattagagcaacgtaaacagggctacgaactagatccaaataaacttcagaattcccaatc

SEQ ID NO: 106061 - DNA, 647 bp, Zea Mays
tcgagtttagtagtccatttcccaatctagtcagtggattttctatttattataatgtctctcaatggttgaggcgaagccatgatgatgttgtatgactaaaaataatgacaaagctttctagatgtcataaggactccatgtaacactttctccatttccaaatagtttcacttagatggcccatgtactttagaaatcaagtacactaatacttgcttattgcatcagtcctctagcttctcctaaactagggctgcgcttacgatggaatgagaagcagaaacatataacagcagaggagcccctatcgatggtggagataaggttgttaattgaatcagatattgtttaaggtcttcgaaagcttgctgttaggctggtccccattggaatacttcagttgactttaacacctcggaaaatggcaagctttgttcagcggaccttgaaataaatctattcagagttgtcggtctgcttgctaagtgctaagccccttttcttgatttgggtggttccatacaaagtatggcttctatcttataagggttggtttcaattactttcgttcacactagactttcgaggaatttttccttcttgaccctaaacacacatttctcaggattaagctttaggcaagt

SEQ ID NO: 106062 - DNA, 391 bp, Zea Mays
gtcggtaggaggtgaaagaaacgaggtgagcacgtctcgtactggccaccactggcaacggtgagaaatggaaaggggaccgagtaaacgcgaagtggtggtggggactggcgctggccgacactccacgttgccttgacgtcaacctgcggtaactacctacagtacttgtactactaccccgcctggccccactcgacttcgttaaattccctgcgcacactcccaagtcccacctcacctcacctcatcattgattttttactttactgcatggaggacgtagtgcctgccaatgtgtcacacatcatgtccgcggcggtgtacatacatatacaagtacggagtactgctatgttgcagtaatattatcttttatcttatcttatcc

SEQ ID NO: 106063 - DNA, 558 bp, Zea Mays
atatcaaggctaggcaaaaagggcctaccgttctacaaattactcaagaaggtggacaagtttcagtggaccacagaagcgtaggaagctctagaagcattgaaaaagttcctgaccatgccactagtactcaagccaccacgccgagccacgtcgaatcagccggcagaagatcttttgttatacatctcctgcacgactcacgtggtgagcaccgcgttagtagtcgagcgggtggaggaaggacatacatatcctatacaacatccggtctacttcatcagcgaagttctaggaccctctaaaaagaagtatcccaagttcaaaaactactgtacgcggtacttctaaccactcgcaagctccgtcactactttgacgaccacaaagtcatagtagttaccaggtttccaataggggatatccttcacaacaaagaagccatcggaagaatagctaagtgggcctgcgagctgggagctcatgacatagagtttcggcctcgcacagcaataaagactcaagcactagttgacttcgtaacagaattgactgagc

SEQ ID NO: 106064 - DNA, 377 bp, Zea Mays
gtctcttcttcgatgtgactttctggtacttgctggcatttgcggagctaggacacatgaaacacgttgtggatatcacacatggattctggtaattcaagatggtatgctctgggtcccactcagccaatgatgggataggggccgacgaatcacggtgctagctttcctttaacttggaaccttttgacaccacacatcggggagaccttgaggtagacgaaatctccttcctcaaatctgagttctctccgcctgttgtccgcataacttttctgccgactctgagcttcaagtaatcgtttgcggatcagggcaactttctcttcagcctctttaacaaaggcaggtccttccagtgtcttttcccctacgtt

SEQ ID NO: 106065 - DNA, 492 bp, Zea Mays
cagagatctaagtcccgcgctactgatccacgtcagctacgataggacgcgtcaccatcaagccatgtccagagatgcgcgcatcacactgaatgggcaccagggtctctacaatgacatgtacatcggaaggatgggacaacgcgccataccgagtgtgcgcctgcgcacgctagaaggtgatgaagggcccatgatgacaggagaagccacaccccttatgaccacactttgagactgatccgtggaaccaattacaaagacgtcagcgatggactcgctacaagagccagagcagcgagaaaggatgacaccatgccaggagtacgactacgcatgaccctacgaaagacccacaacatcaacctagggagcatatctatattggggtgtggcactactgcaaaatgcctagcactgcaagagcccaacactagtggccttctgtgaggcattgtcgtgagctgtccaggtctctatgtaccattcttc

SEQ ID NO: 106066 - DNA, 483 bp, Zea Mays
cgatgattgacgagctgaactcgaggacacggcggcggtgaacgacaacgtgtgcggtggcggatgagagcgtgtcggcgacgacggagaaaacgtgtagacgagagaagggcgcatcgcataaggtgttattccctatctcggccctaagatctatggtaccaaggtaagagccacgtcaacgcctagtagtgcaaactgatgtcagcaaagccgagaccttagcgctatagaccatagcgccgagtaaagggtccaaaaataaaaatactttgtcaaggagctaaacgtgttttttttaaaaaggactaaattgtaaaaaacggtatactttccaccacaagccgctggtcgtatactcgtatgccgcaagggatcggcgagaacaggagtagcagcactcgatgggcgtcgtgatttcactaatctgcgcgtacgaactgcggagaccaacagcgttccttcgacagttaaatggtgaca

SEQ ID NO: 106067 - DNA, 639 bp, Zea Mays
aattgttcttgattgtgacttcattcagagctcgataatcgatgcacatccttctagtgccatccttcttctccatgaataggacaggggcggcccaaggtgaggtgcttggtctgatgtaacctttctctgacagctcatcgatctgcttcttgagttaaactaactctggtccagatactctgtaggctctcttaaagatgggggcggttctaggaagaagctctatggcaaactcaacttttcgctccggtggcatacctggtaagtccttcaggaacacgtctagaaattctgacaccactttgataatctcgagtggatctgcttcactgctatcaatagccatctgataacaactccctttccttcgctcaggcgggactaactcagtcatcacttcctctcctagtggggacatcaacttaattgtcctcttatcacaactgatgactgcccgatacttatctagccagtttatccctggataacatctattccctgagtactcattactatgaggttagcgggaaactctatcccccttatttccacacttacattcaagcaaacactatcagcttgaattctaccaccggttgaatcaatttgaatgggtgttgacatggtagttattgg

SEQ ID NO: 106068 - DNA, 419 bp, Zea Mays
gtgaatagtcctttctaaaactaattacgttggctaacacaaataaatactaattaatactattttggtttagccaagactacactcctcaaaactataacaaacacctgacaaaagattttaattgaggcaactaaggtgccaagttagtgaaagagatctcccacacaaatctagttagcaagggccatacaaacttatgcaactatatttctaagcacaccaagagctcctaaacattttagtaagcaaagtgcacaaagctttaagcactactagcaaaattcactagttgcactacacaagcacaacgagagagaaataactacttagccacacaagctaagcaaaacggattagctacacaagctaacaaatgagtaactatttcacaacaagtatgactagatatataagag

SEQ ID NO: 106069 - DNA, 512 bp, Zea Mays
atcagttctagtctggatgataaataggaaggcgcgctcgtccagtttctgcaagataaccgagacgtattcgcatggcaacctgcggatatgccgagagtctcgagagaactagccgagcacaaattgaaggtataccctcaggcgaggccgatccgacagaaactacgtcgcttcacgcccgacaagagagaagccatccgtgctgagttggctcgcttggtcgcgacaggatttattagagaggtgttgcatcctgagtggctagctaatcctgttcttgtactcaaaaagaataaagtggattggtgcatgtgcgtcgactatatggatctcaacaaacactgtccaaaggatcccttcgggcttcctaggatagatcaggtggtagattccaccgccggatgttctgtgttgtctttcttggattgctactctgggtatcatcagattagtctggcaaaagaagtcgaggaaaaaacagcattcatcactccattcggagctttctg

SEQ ID NO: 106070 - DNA, 1285 bp, Zea Mays
cttctcgagcagatctgtgattggatcaggaataaagctggtcggattgttggctatgagcatatcgcatgacttcttgatgatgtgttgcaccatccgaccaaagaggatgaagtctgtgtcacccatctcatcccctgcagtgagaagcagtttgtacctgaaacacatggcgataccgagtcaacacggtgaaaatgggtaggccgtgtgtataggaaatggaaacgttcaatcagggtgatgcatagggaagtagcttctgcatattagatgtgagtgggagtcaaaatagcgagagttgttgggaggcaaaggtataatggtggcaattgaagtgaagagatgtctcctaacctttggttgggcgtgccaatggtagcgcaaacttgatcgctgcacttgtaggaatccccatgagccacagttgtgcgggtgcattttttgcatgcattgtaccaccacctatcaccaatcttttttacagtgactgtcaccaagaattccctatcctgcacaaacatgtaaatatacgctcatgctatattcccagatccaaccaactatggcacgactgcaggaaaacagtaacagaagaccatgacagttgatgacagttggtaaggcaatagtgactaagtgaatgaaacatggaacataccttattctcaaatgggtgcagatctctgatgtaagcgattttctattcctcaggaacatgatgcataggctgattcgaagatagaacctcgttccacataatgggactatgcactttcctcgcactggtttgtacatacaatgagtcaagctcaagttagaacagagcaaagacaaacaacagtcgtatacgtgcagcaggcatagcagaatattacctagccatgagggcacctgcttcaggaacgtcaggattaatgtaccacttacagggtgagcctccagacaagcacagtccatctaaaacaaagggcattaggtcccaactttcaaaaaggactaaatgcaaaagttcaaagttagtatacccgcatatttcttgacaagcgtgccaacaaacatcaggatctgtggagaggactgaccatcattgtagatctgttctccaaggaataagctagcttgcccaccccagagaacaacatttaccgaactgttgttgctgtttttagtttaagtatgtaggaagagtcatataatgaagcatatgtagatgaaggcaaaggaaacaaacccctacgtggctaaacaaagaaaactgtaacagctatgtataacgaacctg

SEQ ID NO: 106071 - DNA, 466 bp, Zea Mays
gggggtgtttccatgcagagctcgactgggttgagttcttaggctccaaaccacataaggtaattctttgatccacttccctgcgaacttttcattcttgtcgaagactttcttcctgagtgcttccagtatcattccattagccctttccacctaaccattggctcttagatgtgctactgacgcatatttgatctggatgctccattgttcgcagaaatcaaagaattcagagctagtgaaattagatcccaggtcggttatgatgctatttggtatcccaaacctgaatattatatcttgtatgaattccactaccttggctgaagttagagaagcaatgggtttgtattctatccatttggtgaatttgtcaatggcgaccaacacgtgagcgtagcctccttgagctttcttaaagggtccaatcatgtccagtccctagcacgcaaatggccatgttacg

SEQ ID NO: 106072 - DNA, 335 bp, Zea Mays
gtggtacagcgtagaatcatcagaagttgtctgtcggacttccaatagggaaccagatagcacagttggttgcactccttgaataataaccgacttgttcgaataggagaaagataaccacttgtgtttccagtccacaaacattgggctaaaagcttctaaccaatccattcccaaaatggcatcatagcatggaagaggaataagcttgaatgtagacttgaaggagagcccttgaacttcccagtcggtatctggcagttcactggagcattgtaacttgttgccattagctactgtgatggacagtggctgcgccagagactaaaccccag

SEQ ID NO: 106073 - DNA, 519 bp, Zea Mays
attaaaatgaattaaacaagattctggaattttttatataagaaattatttttgaattatttcttgccaataaaccgacccaatggactgcgagcactattttgttgtattccagggagctttgtctaaattccaggacataaccatattaattcttaacttagtgtgtatcgcgggtttaatcctaaaaaatacatgggcttaaatactaaagtgtcggtgaaggggtttgcgatgatattggctgcccgattagaaaccaagtgccaggatccgatcccacttataatgaactggtatgctacatgggctcttggatctagatccaacggccaaggttttgcatagcgcagatcgctcagcacccgcctaatcattactaacggttgaaatcatcgatccccgaagatgagcttcgatccgcccaatgttgaatatgcagttcggatttcaaatagcgaacaccaacccagatccgcctgatccatgatccatgctccagatcaacctaacatgaac

SEQ ID NO: 106074 - DNA, 404 bp, Zea Mays
tactgtaaaatatgttaaatagtaataaattagggaactatgttagatttacttaaatgcaggcactggtctgtcaatttatgataaagaggatgtagggccctgcttttctaaaagaatttaccatctgctatctagattacacatcacacgttaacccatagatcatgaagagttactctttaaagactaaaaattttggtgtacaacttacattatcttgtgaaggaattagtttatatatctctatatattgctgaccatgcagtaaaagtgttgggtcatagctggagaacagaaacaagccaaattgttcaagtgtaagaatattggaagtaccctagcaaggattgacagagtagagataaaaaaatgaaggacaaatattgtgtagctttaatgaa

SEQ ID NO: 106075 - DNA, 559 bp, Zea Mays
gccgtatggcactaatgtgcggctgtgagggcgaggaaggtaatccatctttcttttatctgtcgatataatgcaaagcaatcaagggttccatctgacaaatgtagtagtagcacactccttgacctactttgttggattcgaatatgggaattgatatatttaggttggatggtttctgttcatcctctaccctgggttgttcttcaacatcagctgcacacagttcacatgtgcctctacctaccgttggctaacctcctttttctcggcacgtggtctcccgtccaccatgtcttgctttgttgttcattctatcacgctaaaacggcttgtcgtgttgtccttgtgcaatggcagggagagggggttgagacaccccctcacaagtcacacattctatgactcctatgttatatataattaatcactttcctactatagagttgcctaaatttagactctgtttagacgacatgttatgcacatttaagtgtgtctggtggagtttagtgttcaaatcaatgttgacccgttaacacccaatacatctgatatc

SEQ ID NO: 106076 - DNA, 408 bp, Zea Mays
ccccaatcgctgcaagggttcctctacttcgacgtcggaagacgcggcgacggccacgatgctgctgctgctaatgcctacggcggcgatctcgccggcagccgcgacgggatgctgcttcgccacggccacgggcgtttcatcgacctgcttggtaaacccatgccactcctcgacccttcgttcgcctttttgaaggagcagccgggcgtcaatgctatcgagctcctcgattcctgcaacggcctcctcctctttggacacaggcgggtttcagacacatacgactccctgggctacatcgtgtgcaaccctgtcaccgaacagtgggtggcgataccatcctccggctggactccgactccagcagaagaaattgtggacgaacacgtcaaggacccgcgtccc

SEQ ID NO: 106077 - DNA, 992 bp, Zea Mays
gaattatttcatgtgagcactgaaaatcaactagccgatatcttcaccaaaccccttgatgagactaggttttgttttctaaggagtgaactaaacatcttggattctcgaaacatgtcttaaaactaaaatttgaatcatgattgtttgatataaaattgctttatgcacaaaatgacatgcgaactcctgtttttattaccaaaattactcatgtcataaatattgattgtattttaggccttaccgggctatctctaaaaactggttgagtaaaccggctgagtaggccactcaaccggattttctctggtgagaaccggttgaaccggtataaaaacctgttgaaccggtttttcgtcgcctcagcgtccgcgctgtctgtcagccccgcagtctgcgccgtcagtttcgcagactgtgctgtcagtgtggcaggttttctgcgcagtcaacgtcgttttctgcgtgttttactgttcacgctgtagcaaaactggttgaaccggtttcagaaccggttgaaccgattttggtcagcctgaccagccgccgcctcctcttttctctcctccccttccctctttcactctttaccctttcatttgttactgccgccgtcgccttcactttttctctctccctctctcactcacaccacactccaaatccctttcgagccatcaaatccttgaggagtttgttggagacttgttcctcttggcctcctccatcaactccttcctctttgttgggatttctgtggttgaatcgccacatcgaggtattgtgttatttcctcatttttttactcgatccaacaccgttcttgattatcttgtgtatcttttcaaggatactatgtagtttaggtgcttggcacacttaaactgttttcaattgtctcgaacattgtttgagtttagtagtttggtattgttcgttgtagttgaaccgctcacatgaacggttgaagtgcatgctcaatatca

SEQ ID NO: 106078 - DNA, 575 bp, Zea Mays
gctcttgtatacccaaaacaaagacaacagttgtagccggcttggcctttcctttagggtcatatacagagggccaaagagagccaacatgctccatttttcacctacatgacccccacgtaagggtatatgcacagggaaacatcagaggtagtcaatcctcccatggacagcaaaccagcacagtaaataagcaggtgagtcatggctgtcaggctgcagattgatccaatccaaaaaaacccctgggctataaaaatcgttcctgtgaaccccccccccccccccccgttttactagaactaaattctttttgttttgcacttatccaaagtcatttggaaacagctagtggatgcagatctttttcctgagatattttcagactgcctgatctacctcagttcgactgcagaaccagattcaacctccattttctcctatttcttcataggaacagagctacccccacatcaaaattgttcactgaacattggtctttcactttgttgtaaacttccagggtcaataccttacaggtttcgagttatagagccctaaagtgaggcatatca

SEQ ID NO: 106079 - DNA, 1518 bp, Zea Mays
tgcttccataaaagcagcaggagcattagttaagccaaaagacatgactatgaactcataatgcctatacctggtgcaaaaagcggtcttctcaatatcctcctcacgaatcctcaattgatgataaccagagttcaaatcaattttggagaacacctgggcacccctcaactgttcaaagagaacctcaatacggggaagcagatatttattcttgattgtcacttgattcaaagcgcgataatccacacatagtcgcttgcatttatccttcttctcaacaaacaatactggggaagcccatggagacctactaggcctaatgaaacccttagccagcaaatcatccaattgccgcttcaattcaacctgctcctttggggccattcgatacagggccttatgaatgggctgcgtacccggaatcagcttaatctcaaaagttgcatcgcgctccggaggaatgcctggaagctctgtcggaaacacgtcagcaaagtcacacaccactcggatgtcctgcacccgcaaggcagcctcaccctccaccaccatggagaaaaagattcccgacttccttgaccagcgatccggaagcaattgcgccaacaaggataacatgaacttaggggaacttcccaagaataccacctccctacccgacggcgcctgcaataacactgtcttccaaaaataggatataactgcgcgatactgggataaccaatccatacccaagataacatcgaatgcccccaaggaaatcacaaccagattggccgaaaagacctcatcagcaagaatgacggaacacccctgacaaactgaacagctactaatggagccattagcagaactaaccaaaattgggtgacccaacctttgcaccaaaagaccagcccgcgacacaaagtcctccaaaacaaacaaatagctagcgccagagtcaaaaagagcatgggccacaaacgaatcaactgaaattgtacctgtcaccacgtttccttgctctctgccatccgcagcgggtagtacataagctccggaaatacccgcagaagaggaagttcccagagtgaaattaacagaagaaccccactgagccgccgggtgaggcagacgcggagctccaaactgagatgacataggggtagtcggtgcaggagtaggcgcagccagatactaaggaaaaccctgcaccggcacgaactgagaagtcccaggcacatcaaactgctgctgaggaggtggaactgaaaattgctgctcagcgcttgacatcatgttgatagtgccctgagaagaggaggaagtcattggctcccatctgagcttcccattgggattcctcctacacaccacatccttgtggtcttgactgcagattgaacacctgccattccactggcactctgcacggagatgcgcatcaccacaatggaaacacaccagccccagcccgggcttaggaacagcccgaaacctctgagtacttcctctcgaagtacccgagtcaga

SEQ ID NO: 106080 - DNA, 644 bp, Zea Mays
gcaaaataaccttcatcagaaaacatcttcatatcaaaaacaataaaaagttaagggaagaattttaccttaaagttagaataaaacaggctaccggcgatatgctgtcgtcggtatctgctgagatcggcttcgagcttcggaaaaccaacacttttcgacaaagtgctgacaacctttgccccagctcggtcccgaaggcatcctacactctcttcggcaacaccaccgaagagtagcgtccctggctggtacccgcaagatatggcatagtccctcagctcttctttttcagcctttgtcgattcttgcccaattatgttttgaaagttgaaattttctccttccgaagtatcttcggcaggctccttctctttttcaggcatcttctcccttttttcaggcactgcggccggggtttcctcatcagctgcagcagtttcttcctcagccatattcaaaatcatttcatcaatgtcaataagtgtgttttccaaatctgtggcttcggctgctgcagcttcggaagtagaagcttcggcacgagcagcttcggctgctgctgttttcggcgctgaggccgatggtggtgtttcttcaatagcctcaatgacagtaataattctttgcttttttggttcagc

SEQ ID NO: 106081 - DNA, 374 bp, Zea Mays
gactatgttggagaaggacagagtgtgccttggctcagcccagggccttggactcctaggtctacatttggcatatgtgaaagtgagaagggtgggagtaaggggacacccctggtcttggactcctaggtgtacatttgccatccgtgaaagcgagaagggtgggagtaaggggacacctgggccttggctcctaggtctgcatttgccatccgtgaaagtgagaagtgtgggagtaagcggaacgactgactgagatttgcgtaaaagtgagaagggtgggagtgatggatgacagagacagaccaatatacggaagggtgaagtgagggatgacaaatctagtgacagactaaataaggggtgggagtgag

SEQ ID NO: 106082 - DNA, 336 bp, Zea Mays
ccaaagtccatcaaatgtgataccttatgatcatttctcatgtcttttgaggttttaactaatttggccttcacttacctccataagccataatttagggttaagcactctaccctagggttaaccacatatcaagtcaaatcattacaacttatttgaatttttttacctagtgaatgcacttctaggtataacaaacacatgatatgccaatgctcatgatgttatgctcaagttttagtgatattaacaccaggggtgttacaaagatgtattttaagctcttgtgatcggtgtagacttggcacttagttccaattatatagtgcttccata

SEQ ID NO: 106083 - DNA, 368 bp, Zea Mays
tcctgaattccaattcttcggaggagagttgtctaatctcttgtgctttctccagaagagtgaggatgatctgaatgatagccatctgcactttgaagttgccaactgtattgcgtctccaggccaatagagccttggccgagcaagtcatctttacgtgaagtcgaaggatggcatcatcagtgtttactgtagaattccatgcttgatggactacctcgttgaacccctcaatctgtggccagaaagattcgaatctaaacccccggtagaagttaaccgaagagtggccttgcattaaaagcgggcagtggtccgatgtcatggtgcacatggagtgcaggtcagccgagggatacaggtcatgc

SEQ ID NO: 106084 - DNA, 823 bp, Zea Mays
cctttttgtgctagtagatgaaatatagctctgcacatcattccatgtgtattaatatttaatagtacttgtagaggtgacaactccaatgccgctgtcttaattattacttgcatgtctgaaagtgaaagttggaaaaataacattaaaacaagggtgtatagatctgaatacacacagttcagtggtaacttcctcaggtgttgtgatctggtaaccacatgtccacattttgagttgccccataattaaccattcaaaatgttacctggttgcagtagcttgtttatgtgctgccaattgtttcctttcccattcttcttgtctattactctatatatttaggcccctttcggggtagctctatctggccctggatagtttccttgacaaaccttgatttaatggcccatatcaatttcttgtgaaatgttagttgtgcaatgtgcttatagtatgagagttgcctgctaattcttctgaatatagcattggttcagcttgtagcttcatattacataaggcattggatggcatcagaactattctctgtaatgatggtataagagctcacttgctaattcttctgaacattccttgggttcagcttgtaacttttgttagatcaatggatatcatctaaactattcttttctttttttcttttgaaaaatgatctgaactattctttataaactgagaaagaagacagaagtcaataactttttttccttgctcgtccttagacttgtcaccttatattgtatgtacatagatttatcattcctcatgaaggttatcataattatgccagttcactgta

SEQ ID NO: 106085 - DNA, 624 bp, Zea Mays
ggagttaccagacaaagaacaattgattcttcagggccttcctgcagatattcaggaccttattcagcactatgcgccagtctttgaattacccactggcatgcctcctgccagagattgtgaccaccagattgagttgttaccaggcgctagtccggtccagatgcgaccttatcgatatgccccagccttgaaggatgaaatagaaaaacagatttcagagatgttacaatctggtattgtgcagcccagcaagagtgcattcgcttcatctgttattcttgtcaagaaaaaagataacacttaccggttttgtgtggactatcgacatttgaatgctcttacagtcaaaaccaagtttcctgtaccagttattgatgagtttctggatgagctacatggagcaacctggttttcgacattggacttgcgagctggattccaccaaatccgcatgaaccctcgagatcaacataagacggcttttcaaactcaccatggccattttgaatttagagtcatggcgtttgggttgtctggagctccggcaacgtttcaaggggcaatgaattccacattggcaccactattgaggaaatgtgcactagtctttttcgatgatat

SEQ ID NO: 106086 - DNA, 386 bp, Zea Mays
atcctaataaattattacattcttgaattcatcactcatatataacactaacttggcatctgccattccagtatcatcatcatcatctaataacaatatgctgagttataatcaaaacagttagctacaattatttatggcgttttgcagccagtggttgccggctaatccggccggtcacaaacaaccaagtagagctgcctcgtacttcatctcgcctggctatttttagtagcatggtactgaccgctgaagcaggcagatctggatctgtcctggctggtcgctaaagaaaggttgtttacaaggccgcagagcgatggctctttgtctttgtgcaatggtgactggtgcgaggtgtctggtttggttgcgcacaaaaccac

SEQ ID NO: 106087 - DNA, 444 bp, Zea Mays
ttgcttattttgttaagaatgtgacgagcaacatttgaaatctagagaaagaaggaaaacccaggaaaaaaacatcacctctcatagcaactccaacaacctatgtaaaacctccccacggcaactccaccagaagactaagatggctccagggaagaggtccacatggacctcacggaaacccgaaggtaatttactctttatggcaataccttcttaatttattttgtttcagtattgtatgcctttattttactttgtgttacattaacagaacctgtgccaactgattacgagaaaataagggctatgaatatgatgaagaacaatcaattgtttcaatggctaagccttggacaatgaaaatccctggtgactgctacagctacaaacaacaaagaagactgtcctcagcaatcagagagattatatgatggtgaaaac

SEQ ID NO: 106088 - DNA, 598 bp, Zea Mays
cagcctcggtggtgtcgtctgacctgaatccaatagactcggagtcaagggaacgccaacccggctgtagggggtgagcctccagagtcatacagactcggcaacgtggcactcgatgctcctcgtacagctgcaccgtgtagggtatccggtggagttgagcacctcccacaagatggaagggaaaccctcgtgggaaaggaaatcggaactgaaatgagtgtctcctccattggcggggtgagtgaagtcatctgtgaaagaggattagatgtaaacattacgactatggaaaggaaaaacatgtgaccaggttcttaaaaggaggtgggttagatttgattctactccttatgttacttatttttatcccgattgttacattcatgcttagatacatctttcctttaatttctaatcctttcatattttataatgcatgcatgctgaaaagaacgtatcctcaccgatcagaagggtgctttagggcatcattgtaatcctaagattggcctatatgggcctacctaattagccacctgttttccctactatttctaaggcctttcgtcctaggtctagcgttctagtccttacg

SEQ ID NO: 106089 - DNA, 397 bp, Zea Mays
gctgctgctcttccaatgcacgcatcctggtcatccaagcgggacggtctctctgaaagggcagaaagaatttgagcagggtgtcggccacttcttcatagatctgacacagggccctcaatgccttgcgatcgacgacttggttggtgtctttgaatctgtgccccagcagcagtgacactccattccacatggtgtggactggatccaatgtatacagtcacgacacacttctctgtgccatgctcgacgaattcacgaccatcggctggctcctgattccgaggcgaaactgtgcatgctctcagcaacttggggaaaccatcttcattctggcaaaagctggtttggcaatggacctccatctgacttctgagagaaggaaagggggaaagca

SEQ ID NO: 106090 - DNA, 966 bp, Zea Mays
gctttttcacctttacttggtgataagaatttacctcgcgttgggggcttggaaatcgggtcctttgctgattttgattttctatacccgaagatactgcttcggcataattgtgttttttataggggaactgtacctttattgactaggtataaatgttacatcttcggccccgttaaaaaacattatcccctttataaggaaaaaaggtgctgaagcttggcattagatgtgatatcttcggagttcattgacattccatgatcttggaatgtcgtttccttctatgtctttcaatctgtatgagcctggtctgttcgaagctgagacaaggaagggaccttcccacttcacttgtaattttcccgctgtgtctgggttagctacccttcgtagcacgaggtgtcctggtgctatgcttttgagtttcactttcctgtctctccatgttatggtttctgcttgatattttcttatgtgctcgattgcttcgagccttgactcttctattgtatccttggaaactttctcattttcatgatcttgagttgaagccgttactcttgcagaacccatcttgatttctttgggggtaacagcttcgtccacgaagaggagcttgaacggtgtgaaaccagtggatcttgatactgatgtgttatgattccacacaacttttatgagttcttctgtccatttgcccttcggcaatccaaccagggacttcgtgattcccagtaaaattatgccatttgctctttcaaccaatccgttggactctggatgtctgaccgaagtgaaatgtatgtttgttcccacttggtcacagaatactctaaatgcctcagagtcaaactgagtaccgttgttggcagtgatagacttcgggactccgaagcggcaaatgatgttttgctagaaaaacttttggatggtggccgaagttattgtcgccaaggcttttgc

SEQ ID NO: 106091 - DNA, 606 bp, Zea Mays
ctgctggctcggacaacagatcttctggtaccatgtcttcaagagtctgatcaaagttcgtcagagataattcttgcagaccgatgagggtagataaagctggagaaggaacaccactgctttccccgctggctacgtagcgtcggctgtttttccgaattagagggatttcatcctccccttcctcatcttcatcaacaacgcggacagtacacccattggggtcagcgtcatccaagtcacacccattggcattaacagcaggcaggttgcacccattgggattagcttcagcaaatgcaggcactggcacttcctcagcagcaggaacagaaggaccagcatcctgatccaaactagacactcgacgaagacgtctcttcctctgtttctcccctcagcaggagaagcaggctgattggctcggcgagaacgcttcggacgaacactgtcagacttctgaatatccaaagctttgctagcctctgggatggtcgctaccaccaatgttccagcagggactacatcagaagaatcttcagctaacatatccagcatgacacttatctctgcatcactcggattcaaaggcacctcaaaatgaac

SEQ ID NO: 106092 - DNA, 755 bp, Zea Mays
ccgaaggagaccatcaccaagtctaccgaaggtgaactggtccggctgaagtatacattcaggtatggggataagtttgatgagccaaatgatgactggctaaaatgcattgaggctacaagtgatgaactgcttggatcatattccaaggctgaagataatgcattatccacagccttcggaagtcagggaaagaagagattgaacggagtttttgatgccattggcttcgtctacctcgactaccgctacccgctgcggggacaggggaagaagagaaaagttgatgctttggccgccccagctgagcctatgccgaaggatgcgggcaaaaagatgaaggtacttacccaccagtcgcgttacattgaaccgactgtgatacctgatcttggcgaagggacctcctcatctgccaagacaaaggaaaccgttcctcccgagcagaggactgaagaatctgctacaatgccaaagatacctttggttaagctagctggaccgaaggctgacaaagataagactgaagggccaaaaattgtagagatgccaagaatgccagaagttttaagcccttcaacagaggcaacaatgccgaagatgcaaaaaggctccgccgcaactcctaaaagaagaaggatggcgaacgtgctagatgttgtactagaaacaacaagaaccttgaatcctactcctaccagaaagattgccgaaacttccaaggcgcatcccgaaactgaaacgaaacagtcaga

SEQ ID NO: 106093 - DNA, 912 bp, Zea Mays
gtgtgttgctggctgtcctcatactctgaggcaccgactcatataattgcgaattcggttcaacccgaatcgatggctcgctgcctctcttcacgataaaccctgagtcagaccattctgaggactcgaacatgagctggagatgcccttaacacttcacgcataagggtcctagccactaatgtgtgcccatcactggctgccccttgctccgttttttgccggagcggccgcgagcccttcgcggaccgacctttgaactctataattcgcgatagctcatctcgggtttctttctgttgtctggtctagcgcgtttccaaacaaaatagacgagttttggggtcttaccagagtgcgggccctcaatgctcactccatttcctaggtagggacaacttcgaaaggttgtgtggtctagcacgtcaatctcggacggcgctcgttccctttgatttttttcaagcacggggggtagccctacattaatcaagcaaacaacaagatgagacattagcgctataatgcctacaagaggcaagctatcttactttttctagcccccgttgttcccaaccctagtcactgttgtctcaaggtcgggtacagtactttgggtcggccacggatgtggagtctttgctaggggtagaagcatcatagctcctcgatgttccatgcattggcaagcatccttccttccttcctttcccttcagtttgtaggtgtccggccgtagtacctctccgatcacaaacggtccctcctaggttggagacaacttatgtcaatctttgttgctttgtacttatcggagcagcagatctcccacttccaaagttctttctagtacggaacggtcatgatacctttgtagtgtttattggtaccttgctaaccgtaggagcgata

SEQ ID NO: 106094 - DNA, 415 bp, Zea Mays
tggcatgtaactttttttggctcatcttctgagctactatcgtcatgatattcatcctgcaacttaggtggcctgctatctttatgttgaccttccatattaggacgatcacaggtggcttccggtatttcagatagtccgatctatgtggtcggatggtctgcacagggaccagacgatcgagtactatacacagactatccgaccgtgtcgggcatcgcctgcaagccttatggagggctcagtgcgacttcgggttgtccgacgtaaggtatcgggcggttcgatggaggaccagactgttcgagatcgtgtacggactgtccagccataattagagtcgatccaccatatagtgaagatgaccgcagcggctgtcccggatatgagttcactagcataccataatatggct

SEQ ID NO: 106095 - DNA, 528 bp, Zea Mays
gacttgaagagatcgcctttgctacatatgccgaaagaagggacatcaatgcaaggattgtcccattggtaaaaaccccacctctagtttgtcaattaattctcatgtaactaggcaacccaaaattgcaacttgtgctagaaaggtaatgagtttatcaagcgctaacacaaaggacttttgggttcctagatctttgttgactaaccttgatggacccatcaagagatgggtaccaaaatatgcttgacaagctttgcaggaaaaggagatgatatgaagctttgggatgcttgagaaagtcaattcaatttctattaactcaagctatcaatctttaataatatatatccataattgacccaaggttattttgaattattatatctaaaactcatatcatctcgagggaagatattgatgttgtaggaaacaaaggagtatcatgtgccgaaaaatcaagacctacaacatggaggaaagccaaaggatggtaacacttatgcttttaagtgcaagtatcttaga

SEQ ID NO: 106096 - DNA, 616 bp, Zea Mays
cgggcgatcaacttacttctagtcgaaggctcctatcacgtgcctacgtgccacgtggcggtatcagaccccagcctaagcgaagagagggaaccaagggtgcctggtggcttcaagacttgggtcccacctgttaggggtccagatgtcagatggagaggtctaggacccttgtgcgtaggtctgaacgataggcgtggaggcccgggacccatccatgtgggtccagactacatatgcgggggtccgagacccgcccatgggagtccagactatacacgttgaggtccaagacctgtctgtgggggcccagacccattggtgtactcgctgagcatttccccttccgggacacatggcagtacatgacctaatcctgagctaggagcaggttctgaggccagcgatcctatcaaatgggttcggtcccgtgggcccggctgctcggttccttagtacgtggttagagagctcaccacgcgagtccctatcttaacacagtaaaagtgggtaccctagttatggggtaccgaaaaggtgcttctcaaaggtatgttgttcccccactagtgcttcattgtttttttatagtttctaacctaagatttaccatata

SEQ ID NO: 106097 - DNA, 399 bp, Zea Mays
gtcgtatcatcccccctcttgaaaaggagtcgtcctcgactctgaagtgtcttcaattgtatatggtaagaggtcagcaacattgaacgtgttgctcacgccatagcttgatggaagatctatcttgtatgcattatcattgatcttggcaagaacacgaaatggaccatcccctcatggcatcaatttggatttgcgttgatcaggaaaacgctccttgcgcaagtgaatccagaccaagtcccccggttcaaataacactttcttcctatgctggttcatacttgcagccttacgcactgctttgagctcaaatgcgtccttggtcttctcatgtatcttttttatatatgcagcacgcttggaagcttccatattggttctttcctgcaatggaag

SEQ ID NO: 106098 - DNA, 484 bp, Zea Mays
tcccagctcaagtgacgacagaggaaaccacgctcaaggccatcagcaaagctcccaatcttcagggacgcaacaaagttcttacaggccaccagctccaagaggcagaggaggaataaacttcggaggaaggttcagctcccaacccagaagattgttctgtttattctgtggggaggataaggggcatacaacaaggatgtgccaagtcatgatctagaagcaaaaagaaatacctgaagccgaacacggcagaatcagccgaagctggtcccgcatactgcttcgtgcaattctccatacattcccgagtatgtgggcaaccagcagcccacagcgtcagttgcttcagcaagtcactctcaagctgcatgggccccgttaccaccaccaccatctatggcaccaaccttgactcacaatcagcagccataagggcaccgctaagcacaacaacaacgtgatacacgtgaagaatccgcag

SEQ ID NO: 106099 - DNA, 562 bp, Zea Mays
attttaataactttatttcttgtaattcgagtcaaagtgtcaagaatcttgataggatattccgtatacgttagatcatcttgaacactaagatcctccagcacttggttagccctctcggtctgcccatcagtttgaggatggtaggctgaactgaaattcaactgtgtgtccaagcactcgtgcaacttcttccaaaaccgagaagtaaactgtgatcctcggtcagacacgatgtttttaggcaccccatgtagacaaactatccgagtcatatacaattcttctagcttggctcccgtgtaattagtccttacaatatgaaatgagccactttcgtcaatctgtccacaatcacccaaatagagtcatatcctgcaggagtgcaaggcaatccagtaatgaaatccatgccaatttcttcccacttccattcgggtatctttagtggatgcagtagtccagctggtctttgatgttcggccttgactctttgacacacatcacacttagccacatgtgcagccacatctctcttcaatccataccaccaatacttctg

SEQ ID NO: 106100 - DNA, 327 bp, Zea Mays
caagccatatgacatacaaaatcagcaggtgtattagaaccacctaaattagcaccatattgttcatgatgtcagcagccgcacacatcacatggtgagactaatccctatcctatacaaaatagcatgggtttttgaaccacctgatagtacaccaaagtacagtttcgatggtgtacatacaccaatgagcaaacacaatcatagggaagtagtgttgttcaatgtatgcccaatatcaaataaaaaccactgacagaaagatagatccaatactgccaaaccaaccagatgatggtgggaggggaagggggagtgcaaattttc

SEQ ID NO: 106101 - DNA, 373 bp, Zea Mays
ttgttttaaacagctttagaccatcaccttttgatgtctccttttgtctgttattattttcctatgaatattttttttgggggggaatactattaagtttcccactaatctttgatatcctctaaaccaaacgatttgtgacagatgtttcttgaggttattgaatgaattggtcttgcacggacaagcagccctgaagctcaccaggaagcgacattattttgagcttccagcattgatttctctttgaatttcgtgattcattgatcctttctattagaagaacagtttcggaacagtattcagtcactacttttttacaattatgttatgtactagaaaggtttcggagaccatgaagatgtccaaaaat

SEQ ID NO: 106102 - DNA, 1995 bp, Zea Mays
ttcgttttgctacttgcgaacatgcatcctagttaagcaaaaatgttgtagaacagcaaagcatatgaaagaaataccggctgctgactggtttcttgaaatttcggttcagatacaggtgttgagtccacaactctatgatttttttcttttcttgttgagccagttaagttgaccagtggaatgtcatcccttcgttttgctacttgcgaacatgcatcctagttgttataagaaaaaatgttgtagaacagcaaagcatatgccagaaataccatgtttacctgaaacatcaatcaccagttattatttactgattcgtcgcaagccttgttcttacatatgcagtgaatgccctcaatgtgttctacacaaccatgaattcgccgccgcagctgacgaactgggtgtcccaaaatggggatccctgtgggcagtcgtggctgggggtcacctgctcgggttccagagtgacagcaatgtgagctagctgaaaccttcagacgggttggttgttttcgcgtaacggcgaccgatccttctcggctgattttccttttttcttgtcctgaataacgctcgacagaaagttatctgggatgaggcttaacggcaccttgggctacaacatgaaccagctcactgcactagttcagctgtaagtgagacctcacatgctcttaaatctcgatgctcggatgtttgcagacaacatgccattgttcggttttaatttaagtttggtgttctgcagggatatgagcaataataatcttggaggcagtgacattccttataatcttcctccgaatctccagagcttgtgagtcatgtagtcatgtttgtatgtgtacctaatcattcgtatttacgttttaaaaaatatttttgaggtcttacttacctggtatgcagaaatcttgcagtaaataacttcactgggactgtaccttactccatctcccagatggttgcacttagggatttgtaagttgcctatttgggattacctttctttgagcactttgacaagatttggacaaattatatctttcactctccttgctgtagaaatcttgatcataatcagctctcgaacatcaacgatatgtttagtcagctcacaaatttaacaacgttgtgagtgatttccctttctttctaactgcttatgcatgttactgttttcatcgctccacaaaccacagtggtaaacatgaactaactgttcaatttccagggatctatcatacaacacattctctggtgatatcccacatagctttaactccttgacaagtttgaaaacactgtgagtactccacatgttctgtttaacttcgtcaattggaaaacacatcacatggttacttacaaatccaatctcccctcttgccagttaccttcagaacaacaaatttaacggcacaatagatgttctcactgatcttcctcttactgacttgtaagttgacatgcttaccacctactccagctacaagtttaagttcttaatgcaacgtttaacaatccttgcagaaatgtcgaaaacaaccaactcaccggttggatacccgataaactaaagggaatcaataatctccagtaagtacctttactgcaaccattgcagtgattattatttaagtatatgggatggatacaacaatctactcatcattttacaggacaagtggaaactcgtttaacaatggccctgctccaccacctccaccatcaccattatcacctccatcgacaaatacccctcctccctctcggcagcatgctgttccaagtagcgctggtaaaaataccccatctgaaaatggtggaaaacactcgaaacttggtggtggtgcagtagcaggaatcataatatgtttgctggttgttagcgcaatagttgcattccttgtgatcaaaaggaaatcatggaggttatcacagggacaagaccctgaacaaaatgaacctctcagcccttttgcttca

SEQ ID NO: 106103 - DNA, 400 bp, Zea Mays
tacacaaggacatctccaacggcgttccaacacccatggaggaggacgacctactgggggaagacctggtcgactacgaagcttctccagaacgcccaggtatggacgtaaatatcattacattctccgccgattgcactattatcggtgacaatgcacttgtcgttgctcagttcaactttggtcctaaagaggccgccttcactaaaccaaaggaatcggtaaaccatttaaagccactctttgtgagcggtcacattgatgggataccgattgctaaaatgttggtagatggggggcatccgtaaatctaatgtcttattcattgtacataaaattaggtaaacaggacgacgaacttgtcaagaccaacatgacccttagcggcgttggaactgat

SEQ ID NO: 106104 - DNA, 546 bp, Zea Mays
gtagaagcctgggacgatgactaactaactcacacgacaccttacgacgtggtaatagggtctgtagcgtggcagattccggtgaatggtggtcacgatggcgatggccgtgcggccactttactaggcaagtgggtacggtgaggccaaccacagtgcccccaaactcatccgcggggaggatcgtttcactgccgagcgcaatccacttatccaaggcacgaatcatggtagccggcgcgaatccaggcgtggggtcaccggtggcgaggggtgatgcatctgccgatctttttcagtactgtaccatgggaactcaattcaggcacctgacagagcaagtttcagggtcttgatctcaaatttctatgtggtaattcgtcaatccctctataacaaagttcttatcctataatgcaacttcaattttgttatagttaccatacccaatccatcactggatcttactctaattcgatcacaaagtccatttgtcttcactgttagtcaatattcagtctctgaattgtctgatagagagacttt

SEQ ID NO: 106105 - DNA, 590 bp, Zea Mays
ccaagtgcccacgccggcgtatccagcggcgcgctggaatcccactcacggtgggtcctggaaccaggactccctgacgcactccttcaacaccatgaccctaactccgccgggccctgagtggtatgcagattctggtgctggctcacacatgacctcggatgctggtaaactctccaccatttccccgcctttttcatctactccttctatcattgtgggaaatggtgctttgcttcctatcactgccactggatctcacacattttctttaccgcatcgtaatcttgttctcaataatgttttagtgtctcccaacatcattaagaatttgatttctattcgtcgtttcaccaccgacaataactgctccattgagtttgatccttttggcctttctgtgaaggatttgcaaaccaggaacgtgatcgccaggtgcaatagctccggcgacctctacccgttctatacaccatccaccagcacctccgccttcctcgctgcacccacctccctttggcatcaacgtctcggtcatcttgggcgtgaagctttaaccaaacttattagttccagtgtcatttcatgta

SEQ ID NO: 106106 - DNA, 446 bp, Zea Mays
attccaatgcctcctagccaagttatcctttgttaatgttacccctcttttgaggtaccacataaaaatcttaattttcaaaggaagcctaagtttccaaaggtccttattatgcacccccatcccattgttgagagatgccagatacagagacttaaccgtaaacatcccgttggcggtcaagtttcatctgaacgagtccctctttgaattcaattcggtatgcgctacaagtgagaccaaatgaaaccattggaccctcaactgttgagccaaacccctacgaaaggatatatttaagggcaccgtggagaacacacatgcaacagttgagttcttcctcgctaggttataaagagacggaaaacgaagttttaacgctcctgacccaagccaatcatcctcctagaaacgcacctgggacccatcatgaatcacaaaggttc

SEQ ID NO: 106107 - DNA, 995 bp, Zea Mays
caacaaatgcgttaatcgaagtcttttatttaaaagacactccgcgcaaaagtcgtctaagggtgcagccggaatagcacaacaagtgcgttaatcaaagtcttttatttaaaagacactccacacaaaagtcgcctaagggtgcagccggaatagcacaacaagtgcgttaatcgaagtcttttacttaaaagacactccgcacaaaagtagcctaagggtgcagccggaatagcacaacaagtgcgttaattgaagtcttttacttaaaagacactccgcgcaaaagtcgtctaagggtgcagctggaatagcacaataagtgcgttaatcgaagtcttttatttaaaagacactccacgcaaaagtcgcctaaaggtgcagccagaatagcacaccaagtgcgttaatcgaagtcttttatttaaaaacaacgctccgcgcaaaagtcgcctaggggtgcagccggaatagcacaccaagtgcattaaccgaagtctctcataaaaaagacactccatgcaaagtcgcccacgggcgtagccagatcaacacaggcatacgaatacggccaacaaaccacattaccatacaaattacagttacatacacacggcgagggcgtcacatattacatcggctcaaccttcgggatgatacccatctccctgtaattgaacaacattatcctcaattcctcaccctcaaaaagattctgaagatccccctcgcctatactcgccccaatcggcgaggacaacaattctctcttaccaacccggtctactcgaagacggccatgctccatcccctaacgacggtgcctaccacttcgcgaaaattcacccacactatgttttcccaccacccttcgccgcctacacccagtactcgcacttggaagatccccggaaccctccacacgcggcgaagtctccaccgcagccacatccaacacaacaaaataatccaagccttcatccgaggactcctcc

SEQ ID NO: 106108 - DNA, 400 bp, Zea Mays
tatggcaccgtcgaggattgaagattcaatggcgcaacagatcgccatgattgagcaaggcaactgagaaactcaccgtctaatggatgtgatccaaacctccatggaaactatggagatgaccgtgaagggagtgatgaaggagcacgatgatctgctgaagtggtggttgaaggtggaaacaagggttcagaagatgaccgaggcgatgaagaccctgcagtcaacaatcgatcggttgccgctgaagcaaaaggtggaagaacctttgatcgagtttaaggatgcatcgactttcgcccacgtagaagtttcgcccatgtagaagtgtcgccatttggtccaatgcatggcaacctcgccacaggcctatcacaaaccactggagaccgagtgctgg

SEQ ID NO: 106109 - DNA, 349 bp, Zea Mays
ggtggtggtggtaactgagcccatgcagcttgagaatgacttgtcgaagcaactaatgtcgtgggttgctggttgcccacatactcagggatatatggcgaatagcatgaggcagtatgcaagacctgcttcggccgattctgccgtgcttcggcttcaactatctccttctgcttttggatcgtgacttggcacgtccttgttgtgtgtctcttatcctccccacagaataagcagaacaatctcatgggttgagtgttgaatcttcctccgaagcttcttccccctctgcctcttggagctggtggcctgtaagaggtttgttgtattcctgaagattgtgagcttt

SEQ ID NO: 106110 - DNA, 340 bp, Zea Mays
tgtgccattgctgccatttgattggaatcccatctattatttggatggatcaacctctctctcttcttgtttcttgacgtcgctttgcttctggaaaatgggaggggagacactggaggtcatgcatgggagaggtgaagaagaggcttgttttcattcggctattcttagttgtgtggatgagagggataatagacgggaacatgcatctaacgtatataaatttgagcaaaattagagatgcagcatccccgttttgtccggattttatcagttgggccaaactaataagtataggaggcaacaacgcccgctgggctgcggcccatcaacatagcac

SEQ ID NO: 106111 - DNA, 392 bp, Zea Mays
gccatataccatcaacctacgctttcttgaaaaattgcctaatctatctaaaaaagagagatagattctaatctaccagcttgatctacatatttccaatgatatatatcattgtttttccaagtccaacctaaaacaaagtcacccaactaaagtttgacataacacactcaacttacactaatctagagcttattcaatctagtgtgagtcacttaacaagttaacactagtgaaataaactagatcctacttctataaaccttgttctcccctcatgcacttaaacctaaatcagtgcattaaaccaactcaaccgtgagtagaagagctaacccaaccaatagagtccatctcacccataactatttcaaccatattcctcaactccg

SEQ ID NO: 106112 - DNA, 788 bp, Zea Mays
ctctgattcgtcgtatccccaaaagaatccagtttatcagaacagtccaagaagctttgatcaatagcagatgggtgaatgatatcaggggtagtctgccggaacaagttctacttgagtacttcaatatttgggatttgatttagggggttcagcttcatccagaggttcctgacaggcacagatggctacctacatcctcaagggaatactctgccaaatctgcaaataaccggtttctagttcgatcaactttgtttgagccagctgaaaggatatggaaaagttgggctcctccgtgatgtgtgtgtcatttcattaagaagaaaaaaataccacatacatcaaagagagaaaaaaacgaccgaaaacagccaagaccacaagacatgtacccatatagccagggactgagcaactaaaagctgtgacacctagaccacttgaatacaaaaaccacagagggataggccatcaaggcctacacattcctagctcgtgcccagaccaggaagtcttgcagtttggactttggaggctctagcctctagcccacctccagagccgacattcctcaacaatccttgtgatcaaagtgagtgtgttaggctctgaatactcagacacaagaattcatatgcttccatatctcccaggctgttaaaatgataagagaattcagcccttgcctcctttcttttggtactaacttgaccaccttcctctaccacttttctcgaacgcgcaggagagttacgcatcattatattaagaagaaataagaaggt

SEQ ID NO: 106113 - DNA, 806 bp, Zea Mays
acaacaccatcacatggttgttattattataagtgtagtaatataaaggtgttcatcgtctaacgcgaaatctaacttattacaatataaaaaaatctatagcagcctggtgatggatcctggttcttcatagcggatcctattgtggggaggggataatgccatggcagggacttgaacttcagggggattccttccatcaagccgagcttccagggctgcgatccttgagtgtgcatcctccagctccaagtgtacccttgagaggtccagggtagcactatccaggtcggtgttcagacctgccaccacaccagctagggtgttgaggtgatcttcatcagctccacctggaagaatgctggtctggctttctccacgaatacacaaaggaagatgcctatacttcgtgttgtgcttctgctgcaggtaggtgtggctgagggaccacagagttctcctagcagcatcgctgaccaaagcaacataggtggatagaggcgtcagagactcatgagctgacagagtcctgaaccctctatcacctgcatccatcaccctgacatgaatgtgagtgatgtaatagcaagcctgaggtggctcgtacactcaccttgtctcatacaggggtcggacgtatgttcccaacgcatgcagaacatcctgcagcaggttagggaagtgccctgtctcgaacattgatgtataatgttcagtgacaggccataaccccatgtagtggtcctgctgttcatcgttggcttcttcgtttacattctcctcctcctcttcttcttcttcttcgt

SEQ ID NO: 106114 - DNA, 310 bp, Zea Mays
gcaccggacgacactctaaagtcaagtcctgctgcacagcaattggttccatctcaatctgatggtccggatcccgcaagaacttcctcaacatagagacatgaaaaaccgggtgtacccctaccatggaatccgacagtagcaagcgataagctaggctgcccactcgggccaagatagtgaacggtccaatgtatctcgggctgagctttctagagacaccgaaccgaacaactcctttagtaggtgataccctgagaaggacttggtcacccactgcaaattccagatcccgcctcctcacatcagc

SEQ ID NO: 106115 - DNA, 952 bp, Zea Mays
ctttaccaatcatggggtcgaggctggagaaccattttgagtttcctatcatgtggcgtgaacaaccagagtccatgagccatgtgttctccaggcctccgtcctgcatcaatagtaagacactgggtgagcaaatggcacaatggggtaagtaaattgtgaggaataccagtgctgcggcatttgcccctgaaaagtgttagggaaaacaccaaacatccccggtcccgaagggaagcgatcaccacaagaagaaaattgtggtccgctggggaagtatgaaccaaaacctctgtcacatggttcttggccatatgatacacgaccaacattctgtcgggcacgaccaccatgtagtctcactgcctgagacctagcggcaagaggcaaaacacctctaggcctcccaggacgtctctgaacagactgagcatgaacaccatgagaggggcggttcatgtccttcctgctcgactcagaaacctgccactcatctctcttcctcctaaagcaaaaataagctagatgcccatccctctcacaatattcacaatggtacctcacctctctcttgggtggattttgtttgtggaagaggattttcttttcggatggctgaggggctctaggaaggggatcgctagagatgtcgggaaaggtgtcaagtgtgttcctaagatggttaggttttggaagccacacttgtttctgaggaggatctctcataggctcatcaatcacaccatctctcacaggggtgataggcttagcaaaggtggttttgataagcttgggagtggatgaaggtttctctgaaggtgtcaaaccactgcactcaccaaccttcccaaagcgagcgacactcccatccttagtagcaaagcctaaccccggtccgccagttcccctcttgaactgactgaccatcatgcccaactagggctcactgcac

SEQ ID NO: 106116 - DNA, 332 bp, Zea Mays
caggaatcgagtgcctggggcacccggctggtttggggtagtgggggtattgttggggcgaataatgattggctgtttgaaagggaatgagggtggacgagaaaaagtgcgattttggcttgaaggccggatcacaaaccgttgcctcttcgcctggccctgattaggcttctcaccactgaatcccttattcttcccagaacttgcgtatttttcttcaacagataaggctgtgctgacagcctttccatacgtcaagtcaatacaagcagccattttcctctgtagccgatcattgagtcctctcataaagcagttctttttctttacat

SEQ ID NO: 106117 - DNA, 342 bp, Zea Mays
gagaggggtcttggtggccagatcctttacaaaaaaaaccaaaggggtcaaactcaatggaacaagagttatcggcggtgaactgatgaacaaaaagaagattttaagtgatatgaggggctactagaacatcgttgagatagaatggcccaaggagaaccgaggcacctattgaggtgaccgacagagtggaaccattttcaacgatgatcaaggaggtatgggaggagtggaggagatgggagcaaaagagtgtacccacattgaaggtggtgtggtaggacacactgaagtcgaccaccaagtcagaggggttgggtcatcgccatggtgctgaaagcg

SEQ ID NO: 106118 - DNA, 547 bp, Zea Mays
ggcgagcatagcaagtccggcaagcagcaaccgagtctgggagcacaaggtcgtgggctgtgggttttataggccggcgagggggaagctagagtgcctggcagggagtaatggggaggagagaaaacagccggtttgaagaagattgaaggccattaatggttaattagacgctgttaatagagggaggccactcctcttgattcctcatagaaacggacgagcaagaaacttcagacattaatggtgtcgaagaaaggaagagtaacggctggacaggggagaggaaggggaagaggtaggggatggtggctggcgctccaatcaaacagggaaacgagcgaacgggtctcagtggcacgagctgaagaacaacggctcggaagcacaagcggcacacacaagccagacagaacagaggagctgtacaaaggttgaagacgagctgacattagggccccacaggtaagagagtgaaggaggagagtggagtggagcacggttaggctaattgggctggcgcacagcagatttttttttatttcca

SEQ ID NO: 106119 - DNA, 441 bp, Zea Mays
cccaaattggggagctgtgttggacaattagaggtgtgggctggttcactgggtgcacaactacttagcggagcaagttggggcacaaatttattgtatccaagggcggtggctcctaatttgggcatggcgtgctggcggccagagaggaagaaggtcactggtggctcagtcgtggcgttcaccggtgcagcggttcagaaatggtatgcctaggcattccacggttaatactgcacagtaaagagccacgatgtggcataattgaggtcgccggagtttccacgacgacaccggtggtctggccacgtcgtagggctacaagcgcggttgataagcttctccttgtgaccaaatccgctccccttctgatcttttcaccctcccggtactatcctgcccgagtccagcacgaatcaccgcgatcaccgtgaatccttg

SEQ ID NO: 106120 - DNA, 387 bp, Zea Mays
ctttgtaaatttatcggccaattgatcatccgtgccaatcgaatatatagtgatatctccctttccaacatgatctctcaagaagtgatgtcgtatatcaatatgctttgttcttgagtgttggaccggatttgtagccaattttaccgcactctcattatcacacatgagaggcatattcttaaaaatgatcccataatccaatagagtttgtttcatccataataattgagcacaacaattaccgaccgataaatattccgcctcggcggtacagagagcaacagaattttgctttttagaaaaccatgaaacaagagacctcccaagaaattgacaacaaccggaggtgctcttcctatcaactttgcaacccgcataatccga

SEQ ID NO: 106121 - DNA, 435 bp, Zea Mays
gccgtctgatcaaaatctcaggagttggtccatttcaccctactaagtggataggctaaatgtatctagtgatagtttagactactgaattcaccctcattacagaaaaaacacgaaaacacgtcgatcaggaaccgacgttcttactctaataggccgacgttcttaggatgggtggactgttgtggacaatcatctctctctttggctagcgcattagtctcttgtttagaaaaccctagtttcatttccttagtttagctcgagatccacggatgatttaaactcctcagtgtgtctttatattcttcatttcatcattcgaaggaagggtggcatattccatccatagagtttgttgaatcacgagttcagttttgtgcttgttgcagttttgattcaattttgttcttgctctcttatcctctcctctcc

SEQ ID NO: 106122 - DNA, 993 bp, Zea Mays
ggaaaagccaaattacttggagattggagaagaacgaaggaagccccaagttatgggaagtcagttgatgacttgacgaaggattatcaaccgaggcaatctgcagagcatcattggggaccaactcagcatcaccagcaggaatcaaaactctagcatcaggtgcgccagcctctaaggcgacttcctgacccaaagcacgtgctactgccatgcaatcagaatgtggaggggaagacccgacatggacatccatggaagtatgagaaggggaacccgctcggacaccctcggggactgggtcatagctcgcgctgcccacccgagccggatcattaccggcaacacccttgggggctgggtaaacgctggcaccatccttggataccgggttctctgtagcagccacctctaaggctgaaggattttcagccacttccatgtgaacagagcaatctagatcaacctcttgacttttaagaccgcgctccaaggtcgatgaggcacgagacgctattcgggataactctaacccgacatcaagcatatcagtgcaagcgcccatcataccatcatctgtcggctcggacagcagatcttcagggaccatatcctcgagagcctgatcaaaatttgccaaagacaattcttgcagaccaacgagagcagacaaagctggagaaggaatatcactactctctccactgactatataatgccgactgtttttccaaattaaggggatttcctcctcttcttcttcatcctcgtcaataatacgaatagcacacccattgggatcagctctggccggattgcacccattgggatcagcatcatcaaggtcacacccattgggttcagcatcatcaaggtcacacccattgggctcagcattagccgggtcacacccattgggatcagctccagtaaaaatctccactggcacttcctcggcagcaggagcagaagggccggcatcctgattcaagc

SEQ ID NO: 106123 - DNA, 646 bp, Zea Mays
aggtgtctctactctctactctctagcactgtgtatgacagacagtggactaagaaatgattcacctttttctaatctaaagaaaagtcatactcatagtttataaaactaaaccatacaagccactcgacagtgttggctaggattgctctaatcacacaagccagttaacaagtagtggcaggagtgttgattcactggaagtaagctaaacctaaagctgcattaaaatgatcacattaaacttattcacatagccaacaaagccattaaaccccaataaactggcagtttctttgcacaccaattaaactggcagttttcttgcacacctctggatgactcaggctttatctatgtttttcataatcataaatactggatgtctaggaatgctttccttggagtaaatgtaaaaaacaaattgctagtacttcaaagacacaactaaaccactgtgatgcatcaatgctactttgtggtagaattattctgaattccaatgtttatacttctaaatgggcttgattggatagttgcacatgtacggacaggttggacgcgccctggccggctggatatggtagttttaggcgtacagacaggtgcagattaatagctttaaaatgacttgttttgcatccac

SEQ ID NO: 106124 - DNA, 541 bp, Zea Mays
tttgagtgagacgatatgatcccggccgagtgacttctgctactatgaatggtccttcccataagggtgataacttgtgccgtccctcccccgttagaattcggcggaggacgagatctcctactaaaaaggatcgtcgccgcacgaccttgtcgtgatagcgtctcagagtcttctggtattgtgctgattgaattactgcgttcaaccgttcttctttgagtacatcaatatcctccaacctagtagcttcggcttctgctatgctttcaaagatcaaccttggcgccccaaacttgagatcaacgggtaatactgcctctgacccatagaccatgaaggaaggagtatttccgtgcagagctcgactatgttgacttcttaggctccaaacgacgtagggcaactcccttatccattttcctgcgaacttttcatttttatcgaagacctttttcctgagtgcctctaatatcatcccgttagctcgttcaacctgcccgttggctcttgggtgtgccaccgaagcatacttgatctg

SEQ ID NO: 106125 - DNA, 571 bp, Zea Mays
tgagaccactcctaatactagtgggagaaaggcaagttttagatcacttttatttagtatgctcgaattgtgtttcttcttttactcatgaagtgactcctgctgctgtcacaaataaagttaggataaacacactgctgtttttttttttgcttacatccaaaacatatatttgatattcttctatgtagatggatacagcagatatttactgtaaccataaacaaacaaaaaaagtagcatcaagtgaattggcactgaagcaatattcaattctacaacaacagtcaaagaatgttgaggtaacttctctatttttcactctattccttaacatctcaataacggttacataaacgtttatggttcttgttgtctctaggaacttaagagtgatttaataaatacaagggatggtatggagtatatgcaaatgaagtacgctgaggatctcaaccttcttggtaatatgtaatgtgcttcagaagttttggtgatttatgaactactttaacacataaaacaataatgaaagtacacatttgcaatttttgtttcaggaaggcacctg

SEQ ID NO: 106126 - DNA, 385 bp, Zea Mays
gttgtagtagcgctaatagccagtgtctgctccttcatcttccaatggcctcctccatgtcctttctttggagagcatatgtggccattggcatgcaggattcctagaagtcgaccactaattggtctagcatcagcttgatggcctcttacttcttctttagtagctcccactcaatgatagccatggtgtacatctatttcatgccttgtagtcccgcaatagtactatgcctagaggctatggagacctctacaaatgatatattatgttgttgcgagcttgctaatacatgaaacaacatccaatttggggggtcattgttggcctcgtagctgcggaacatagcagcccttcttgcctctatggtagtggcctcctaaga

SEQ ID NO: 106127 - DNA, 450 bp, Zea Mays
cttgtagccattgtgattcatgttatcctcacactgcactgctaaccatttaagtattttttgtgcatcgatagttttacctttataccagcatagaagagagataatttgggcagtgtaacaccaccgaatgtttgttttgtattaagattaacacctcaggcatgccatcatcctactttgacctcataccaaacacatccataatcttttagtattgacaacataataaggccacatgactgagaaagattgaagttaagctctgcaaccattgtttatccatttactgcatcaaaataatggaaatatttattaaaagggaagtatgtccaaacaatttcacaagagactaaattatgggcatatttgggatttaggaggtgttatgctgaccttgggtaagaatcattagtggttcacttgttcttgagctttatcatttgtact

SEQ ID NO: 106128 - DNA, 290 bp, Zea Mays
cttttctagctttgctggatcgtcttagaagccaattatgtagtgatctgcttgagttgtttgctctagcctttccattaagtccatagcattggactgcacattagatttactccctgtgcaatttgttttagttaatgaaattggcctttgagtgattacgatagtatagtggaacctttccatttagtccatagcattcgactgggtgttagattactcgtgtgcattttgctttagttattggaattggcctttgagtgattatgataatatagtcaagccttttc

SEQ ID NO: 106129 - DNA, 594 bp, Zea Mays
caggttcaatggtaggaggggcagctggggtagcacgggaactcctggcctcatgatcatgggagcgtggagtcacaggaggcggaatcccaaaatcatcatcatcatcatcatcatcatgaactgctgtgccctgagtctcgaactgatggaaagtcgtatcctctgcctgagtgttgatcactggatcaggtactggcactaggtcctcaggggctggacggtaggagccaaagtggaggcgtgaggcctcaagagtgccctggaactgcggtggctggatcagctgtgcgaagatgtagcagagataatgtgcatatggcagctatcgccgggcatgaagaccatccaataccgtgtcctcgatctcacatataaggaagtcaacaacatcaaactctgaatgagagatcagggcaccgagtagccagagctggatatgagttgtagcctctctataacccatccggggtagaagcattcgtctcatgagctgatataagtacttggccactggagtgaaatctgccggtgagcgtcgcgacccattatgaaaggcggtcagaacaggaccgcgacgtgagctgtagctgg

SEQ ID NO: 106130 - DNA, 638 bp, Zea Mays
aggtttgaagtgagagtctctagggcatacaccagagctgttatgaatagatttaaggaatcaatgaaatacgccactgcatacaagatattgaaggacacagacggttgtgctaaagattggatcgtacaacatacaaaaagatctaataaaattgtgtggggacaacatcaattcaagataacagcggacatagaagctcgagagtatacatgcgagtgcaaacagtaggaacatacaggtttgtacatattgtcttgattatacgaataaaattgcatattatataatttgttgattgtagtacaaaataatgtttatcattaaaaaaataacggttggtcttcatgatttcaggtctattatgtgttcatcttttaagagccttcatgcatctacaagttgaaaagataccttcaaagtatatattgcaaaggtacactgtctcatcaagacaagatgtaccgtttgaaagaattgataagagcttcaggggaaaggatagagttactaaatcatacagacagaaaatgttgctaacgaaaacaatgaaagttgttcgctaggtgtgtatgtcaaaagtagggtacgacaaggcaatggatgtgttggatgagctcgatggcattctatgccga

SEQ ID NO: 106131 - DNA, 494 bp, Zea Mays
gtgggagttctagtgaggatgtccccctttattgcatgtgctctcccttttatattctaaggggagcacgtccaagggagctgaaccccgacaagtgggcccaatgttctagtattaaatatatacaacctggtgtcataagtgtaatggtgggctgagatctcctcttcgtttaccatgtgtatccttcgaccaggtatgttctgcatcccatttgtcggcctgtgcccatcacgggatgtacctgatatgccgatgtcgtcggggctaagaacgctgacgtgtgtaggagttaatgtgatatctctgtgttgtcacctccagccctcactgtagcaggtgcatcgccgatcgagtggcacttcatgacatcatcagacacgcatccgagataaccgcctgagtaactcgtgttatcctgactaggctataaatgtgcatggcgcggtggttggcggcctacattgtcgaaggtcatgtaattaactatattg

SEQ ID NO: 106132 - DNA, 508 bp, Zea Mays
agatgagaaaggtaaatgtaatacccaaccggagcacaacaaaggatggcgttaaaaaaactcgcaagcgacaaagaagaggatacgaccaagagagtagtaggtaaaatacaatgctcagattgagatggaaaatagggtatttaatgtcgatataagataaacatcaaggtaagatatagaggtgataaggataaaggtgataatgatgaaaagcatagtccatggacagagttaaggcaagactcgcgaagtggagaaaataatcaagggtaagatagatatggttctaaccgatgggttgaagtaaaaattcattacacaaggaagttacaagaaaacaacgagatcaccaaggttgtttaaaataaaatgactgctcatggatcattaagaaacaagggtggtcaaagacatgtaaactgaaatgttttaaatagacaatagaaatttaggggcaagtatttgaaacaagagtatggaagggatacgagcatgtcaataccaa

SEQ ID NO: 106133 - DNA, 547 bp, Zea Mays
cggactagcacaacaagtgcgcaaaatcgaaatcttcctcaaaagactatccgtgcaaaagtcgcccaagggtgcagccagactagcacaacaagtgcggaaaatcgaagtcttcctcaaaagactatccgtgcaaaagtcacctaagggtgtagccggaccctccgtgcagaagtcacctaagggtgcagccggaccctccgtgcaaaaaccgactatgagtgcagccggatcaacacaataaacgcgctagatcaagtgcacaagtcccctacgggcacggccggatcagcgaaggcacacagcctcatcatacaaattatacttacatacatgcagcgagggcatgacaccttacattggttcaaccttcgggatgatacccatgtccctatagttaaacagcattatcctcagctcctcaccctcaaaaagattctgcagctccccctctcctacactcgccccagccggcgaggacaacaattctcgtttgccagccccgtccacacgaagccgaccatcctccacctcaccacaatgacgc

SEQ ID NO: 106134 - DNA, 643 bp, Zea Mays
acggaggcactagcagagaccaatatggagaagaagacaatggaggcacactagttgtcagggaaggcgacatcagagaccgacctaagtggtggttggggacgacataagtggagagtgtaggttggggatggcgtcagggcttcaatgagaagatgaacagagtgaaaacttgagcagtgtagaggttccactctttgaagcatatatttataaggggaagagtattttgtactagttgtacgaaagaaacaaaactaaatggtctttagtaccgattatttacaacgaccgatactaaatctactttttcagttcccacctagggggtgttgggggtggataacctgggtgtaatctggaccttgaatgacatgtcttacctaactcccgactcacgtgaacagtcctaccttgtgtttctgcctcgttcgacccctaccccccaagggaccgagggtaggatggaccaaccctgggtctatgattcgaatggctgcacgagagttggtatgtctacatataggctctaatgttaaggatagttcgaatgaccattctaggaaaggaacaaatggatgtgcatcgcctgcatgaaagttgaccattgctaaaccattccatggcctagaggacaaccaag

SEQ ID NO: 106135 - DNA, 336 bp, Zea Mays
cgctgtcgtatggggatggagcgtggccgtcttcgagtagaccggattggtaaacgagaattgttgtcctcgccgattggggcgagcataggtgagggggatctgcgaaatctttttgagggtgaggaattaaagataatgttgttcaattatagggagatgggtatcatcccgaaggttgagccgatgtagtatatggtgccctcgctgtgtgtatgtaactgtaacttgtattgtaatgtggtttgttggccgttttggcatgcctgtgctgatccgactgcacccgtaggcgacttttgcgtggagtgtctttttcgataaaagacttcgatt

SEQ ID NO: 106136 - DNA, 887 bp, Zea Mays
ccgagtggttaatcaagtgactcgagagggtttatactggtttaggctcacgccctacgtccagtgtagtgttaatcgttgtattactcttgagaacgtgttacactgttacagttggtgtgagtgtgagaatgagagtaatgggggagaactctagttgaatgctcctctatctcttgttcgtgttccaccaccgacttttatatttcaagggagcggcctcatacaaagcgtgggctgatctgaaatggagcggcctctacaaagcccttctgacgtagctcccctgacatcaccttccgatacgcgcataagcatatgtgcggtatggtggatcacttcgactttgctcagtatgtgggttacaatagagactccgatgttgaggccctccgtagcggagcttgactggtcccacaaggccaagttggggtacattaacggccatatgtggtgaagcctcatcacgtttacagagactccccgtcactccttcgatgcgtcgtgttgttggtccaaacgatgtttaatgacaacgtggctttattgtggctagagtgggtcaacagtgtctagctcgtttttataccggatgggtgcaagcatgcgcctacaaggtgtatgacgaggatgtcgtggaactagggtccacagatgtactggtccttatcgtgagcccttacttttctgtctcgtagagttgctcggtggagggtggctcagcttatccgtctagcaaggttgctcggcgagttgctcgacctgtctacctcacagttgcttaatgggaagatgtacatgttcacctcgaacagttgctcggtggtaggttgcttggcctgtccatctcacagggttgatcggctcgtcctcctcgcagaattgct

SEQ ID NO: 106137 - DNA, 271 bp, Zea Mays
gtgatatagcaatgatcagtccatgaatcagagcttcatactcggctgcattattagaggccagaaataacagctggagggcatatctgaggtgctcgcctccaggtgcggtaaagaggatccccgcgcctactccctgtagttttaacgagccatcaaaatacattcgccatacttctgcagtttctgggttatttggtatttgttgttcagtccattttgatacgaaatcaaccaatgcttgagttttgatggcagtgcgaggtcgaaa

SEQ ID NO: 106138 - DNA, 368 bp, Zea Mays
ggtaggtgaagtcatctgcggaagggtatcagatgtaaagattatggtggaagaggaaaataaaataacctgggtggtttaaaaaggaagcgggttagctcaaatttttacttcttcagttcttaatccttttagttttataatgcatgcatgctgaaaataacgtctcctctccgaataaaagggtgctttaaggcatcctctaagaatctaaatactggcccacaaggcctacttaattagccacctattcttcccactatccctaaggcctttcatcctaggtctagcggtctagtcctgacgattcacactagtttctaagcaagttttaaattttgaaaatcggtattcatggtttattgtcc

SEQ ID NO: 106139 - DNA, 1140 bp, Zea Mays
ccgagttaagtaagtaggccaattgacagcgaacaatttgagtgcctttgaagtctttttattgatgatatatttctcaatttacagaatacatcgtcgtcccaatagcttcagggatgtagctaggggtaaaaattcctgaggtgttctatgttccatgagttcccaatttccgtgccgtccatctgagtgagacgatatgatcccggccgagtgactttagctactatgaatggtccttcccataggggtgacaatttgtgccgtccctcccccgttagaatttggcggaggacgagatctcccactgcgaaggatcgatgccgtatggccttatcatgataccgcctcagagtttgctgataccgtgccgattgaatcaccgtgttcagtcgctcttcttcgagtacatcaacatcctccagcctagtagcttcagcttctgctatgttttcaaagattaaccttggtgccccgaacctgagatcagcaggtagcactgcttctgaaccatagaccatgaagaaaggtgtttttccatgcagagctcgactaggttgagttcttaggctccaaacaacatacggcagctctctgatccactttcctgcacacttttcattcttgtcgaagactttctttctgagcgcctccaatatcatcccgttagctctttcgacctgcccattggctcttgggtgcgccaccgaggcatatttgatctgaatgctcttttgctcgcagaaatcgaagaactctgaacttgtgaagttggatcctaggtcggttatgatgctattcggtattccaaacctgaatattatgtcttatatgaattctacggccttagctgaagttagagaatcaatgggtttgaactctatccatttagtgaatttgtcgatagcaaccagtacatgagtgtataccccttgagctttcttgaaaggcccaatcatatccagtccccagcatgcaaacggccaagttacgggtatggtttgcagttgctgtgctggtagatgttgctgctttgataagtactggcaggcttcgcacctctggactaactcggctgcatcactatttgttgttggccagtagaaacctgacctgaagaccttcccaaccagggtcctg

SEQ ID NO: 106140 - DNA, 920 bp, Zea Mays
gctatttggagcaggaagtttgatcatttcagtaaactcaacacggcatacattacattgattccaaaaacagatggggctgatcaggttaaggactttcgatgaatcagccttgtgcacagttttgcaacgctaattattaaaattctggttaatcggttggcaaaaagattgaatgcgatggtttccccaagttaaagcgcttttataaaaggaaggttcatccaggacaacttcatgttagtgcaacaaacctcaaggttgttccatcaacataacatgccaagactgtttttcaagttggacataaccaaggctttcgactctgtctcttggcccttcctaattgaagtaatgcagcaaatgggttttggacatatctggcgagacattgtctgtggcttattagcctcttccactactcaggtgttgctcaatggtgtcccgggtaaactgattacacatagaagaggactcagacagggatatcatctctccccgatgctatttatccttgctatagatgttttgggccttctgtattccaaagctgagggagctggcctactccagcaactatcaagaaggaaaaggcttcacagagtctcgatgtatgcagatgatgtggtgttgttcttacaccctacagctatagatatttcagcttctcttgacatcctccagctttttggcgatgcgtcaggcctttgctataatccacagaaatcaaatgtgtaccctatcaaatgccccgaggagactattgaggaactccggagttggatgccttgtatgattgcaacctttccttgcagatatctgggtctcctcttgtcattacacaagttatccaggaatcaggctcaacagtttgtggacaaaattgcagaccgcctaccaaactggaaggtcgatctgat

SEQ ID NO: 106141 - DNA, 337 bp, Zea Mays
ggacaggagatcatatttgaatcagcttgccaggtctcatttggtggcaccccaaaactagctcagttcagcgctcgctcgtggtaaaaggttaactaatctgcatcacaatccacattaacacgacatggattcaagcgaatctggatgaagctaagggcctgtctttacttcaaaaacttcagatttgattttccagcttcaccataaaataactccaacaaattattaaggtggggttttcaaaagcgtttggcttgcatatggactatagcttctatattacaattgatttacgtgagtttacttaattattcttaatgattagtggcctgtc

SEQ ID NO: 106142 - DNA, 464 bp, Zea Mays
gctaagagcacttagcagcccacataagataagagaagcgcacagatgaagccggggcggctttaaattttgtgaccacacatccgaacagagtacaccggctcaccatcgtctggccccttaacaagctcgcggacgtccccagtccgaaggtcgtttgctgccaccaaatgtttccagccctcggtgaagcccacaaataacgggcagtggtggtaaacgacaggccataatctcttcttggggtccttcagcattataacattacagccatgccttctctgtctaactacattggaaagtgcacttctatctgctccgtgcttcccgacccgatcctgctctggaatttagtccttcgtaggcagtaaagactctgggacctcacagttactagacattctgccttcctgtttggggaggaaaggagggacacagaggcgggtttgggctcgatttctttt

SEQ ID NO: 106143 - DNA, 588 bp, Zea Mays
cggcggaatccctcccttgtacaataccgtcgtgccacccataccatcaccaccaatcacaaccacaaccacttcactcccatccacctcaaccaaccttccaacgtcaatctcagccttgctgccacccacatctacaatacccatacccatccatcagatacccttcccacactccccatccccaatcccaggcttttccgaaccccaccataccgcttacccaccacagcaaaaccatccaaatcagcaccaccacaaccttccctttcccacatttgacgacaaagaggatcctgctggatggttgccccggtgtgagagcttcttctacaaccaagggacccggagggggacaaagtctagatggccacatactatctcacgggcgctgcacaagtgtggtccgtcatgctacagcgcgacgagcccacactacattggttgcgcttcaagacgttgtgccaacaacgttttaggcctcctctacgcacgaacacgttgggtgatatggcacgactgcctttccgctccacggtagaggactaacaggatcgatttctggctctcctatgccacatggagccc

SEQ ID NO: 106144 - DNA, 793 bp, Zea Mays
atagaagttgcaggctatgtaatttgattcctgaagattacaagcactaagtgactgacgaaaagagtaattgggaattcatgtttgtgttatgtaggttgaggggttgtcaataactaaaaaaaataagtggtgtgtatacataaatatctcataagtggacatttacataactataataaaaaatgcctggtgaattgcaatttcttttttggacattgtggaaaaaatagcagcttgtattctatttatagcagattacattgtatttatcggagaaaggatgtttgtctcggatggaagctgcaggatggccaacggatttggtgacgattggaacgaataaaaatatgagaatttattgtttgcacattgaggaggagcaagaattatattgtgatgcagcttgtgttaattgccttaacaattcaatatgcagatatgacgttggggaattatatggtggatgttcactaagaagcacaattgcgtacaaaatggggaggaacattccaggaacgtagatccaatttgaactagagctgaaggatgccatacgacaggcacagagattcgttacaccattattgctgggcacatccgctgatccgcatgtctgtaagaagcaaagaggcagacatagatatgaggattttgcatctcggggagggaagcatgagaaacgactgggttttgtggccattcttgtcccatgtctagagattacagtgggctctcaaaattacactataagatttaagtatcggatcagattaggatcgggttttatttc

SEQ ID NO: 106145 - DNA, 489 bp, Zea Mays
gtttggagaccgattggttgttcctaagaaccccgagcttagaaagaaaatattggatgaagctcacctttctaaattctccatgcaccccggcagtaacaagatgtatcatgatctcagatccttgtactggtggaccagaatgaagagggagattgccacgtatatatctgaatgcgacacttgccagagaatcaaggccagccacttgaaggcagcaggcaatttacagccccttcccctaccatcttggaaatgggaggatatttgcatggatttcattgtgggattacccaatacctcccgacaccatgattctatttgggtcatcatggatagattgaccaagacagctcatttcttgccagtgcataccacccacaagaccgagaaatatgtagaaatctatgttgatcaaatagtgcgtttgcatggaatttcgaagactagtgtatctgacagaggagcactgtttgtggcacgcttttg

SEQ ID NO: 106146 - DNA, 411 bp, Zea Mays
gtgtcttagcttttatatatatatataacggtaacgataatcactttcttgcaaagcctagatagaagagtcttctggatcaatgtcccatttagcatgtgcgccatgtttgtagccatctgttgatcttgacaaaagtcgcaaattggagtggatgaagactaatttatctgcagtggtagtgttcatcctgttgcgcttggtgttatggatatggctaaatgtgctccaaattctctcggtcgatgaactgctgatgggttgagataaaactttttttgcaacctcagctaaatccggagtctcagaaccataacttacccaccattcaatcggctccatgtttaatgcatccaattgaacgggtggcagcgcaaacattcccttcttcataataaaagcattaaattg

SEQ ID NO: 106147 - DNA, 432 bp, Zea Mays
cttgtcgtggcaacagcagcagcagagtaggcagagagaggtggtcagctatagatatcatcagatcagattgcctaccgggtctgtcatctcgcgtctcgacctcgctcctccgctccctctacacctgccgtagctaccactccacctcccacttcgccagctccagtcacccctgagccatccaccacttcagccatacctaccacctccaccactcccgcttccattgttcctcctcccactcccatctctgcaccacccattccacatgcccacttccgggagtgtgacgagaccgaggtgcgaccactggctgtcgatcctcgtctgatcgatctacagcgtgctactgcgacccgggtacatcggttcaaacacgtacccgtggagtctcggctacctgctcagagggaccctgcagtggcagat

SEQ ID NO: 106148 - DNA, 503 bp, Zea Mays
gttttacagtttcatttcttgttaataatatggtattgtatttccttctatagtgctcaaacgtaatgatgtttatccttctttgataaatatagacgatcataagtaccaatccatgatgctttatccttaaactcctccacaaactcatcttttctaataaaaagttggaaaggacgagttagaatttcatgtacagtcccagtgcagcagtaaaactctccggatcgtaagtatagtttgtagtaacctctacaatttctttacattcggattttgatccataacctttgtaatcaatttgactgaatcatttatccctaagatcctatgattaaacaaccttcatcgattatagaatcccaaggagcatgccaaatttgtaggcaaattttaaatcaacagtgttggcaaggaatgataatttatagttcatttgaaatactacattaaatcttattaattgcggttacaacaaactaaagccctactcctaatctttg

SEQ ID NO: 106149 - DNA, 495 bp, Zea Mays
aacgaacacttacttcttgggcctaaaagcacctgttggcacaagaccaaatagcacctcacacacacgtagaatctgccaacccagccaaacacagcacatggaattctttagtatttaagctatacgctaacgtcaactatgatatcattgatacgctgctgcggatctctggaagccgggtcctcccagcccatccttatcctgcgcgtatttttcctggcagcagcggcgtgccgtagcgagttccatagatcgcgggacgttgcaactacctcctcatatctcgctcgaccaccatcctcctggcttattcggatgtatatagcccgagcctgaagaacaagctcgttcctcgttagttgccgcacccaggaccgtaccgaagaagccgccgcctggtaggagccagtgacccggagggaaggcggccaccatcgccctccgcgtttgccgttgaggctcgtgctgcgtattccggtaagtgctcctccg

SEQ ID NO: 106150 - DNA, 656 bp, Zea Mays
aatctcatccagcaaaagtgctatttgatactggtgcaactcattcatttgtcactgcaacatgggtagaaatgcatgacatctcagtagagccaatgatgccacccatgagggttaattcggtcggtggtaaagtgcaagaagataagatatgctcaaatgtaagggtggaaataagggggatagggttccccagtgacctaatagtaataaacacccatggggtagatgtcatcctagggatgaattggttaatgaagtatgaagcgagtgttagctgtgacaagaggaccgtaacattgaagtgcccgcccggagaggaggtagtggctgagctaaggatgcctaaaacagcaaaagaagattgtcaccagatttcggttgatagcaaggaggccaacccgctcgaggttatcagggttgtgtcgaactttccagatgtgtttcccgaggaactaccgggcatgccacccgagagaaaagtcaaatttgccatagagcttatccctggcaccacccccatttctaaaagagcctatcgagtgtctgggccagaattggtggaactcaagaagcagatagatgagctgttagagaagggttacatcagaccaagtacctcgccttgggccgctccagtattgtttgtagagaag

SEQ ID NO: 106151 - DNA, 454 bp, Zea Mays
tgctttttgtgatgtgtgaaactgaaagaaaaagtgtcttttgagctgaaggaaacaccttcccttattttcacacatgacaaaagcattatacaatgttaggctatatattattcccttcttgtgatgtagacaaaggtcgaggaaaatggagaagcattgtatgcttctcactcgcatatgatgtgatcgatcttatggtcatatggaaggacatgaaatcatgaacatgttatagatatattgttgaaggtataatcgactagatagtgtgtgtgcccactatactcacaatccttctttacattgaagggttttggtatttgcttttttgactttgccttccatctgaaggacatcgaagtcttatcaccagtactggttgatttctttttgactctgccttccatctaagggactttagagtcttatcaccattactaggtgatttgtt

SEQ ID NO: 106152 - DNA, 466 bp, Zea Mays
ctaggtaaagtacaatgctcagattgagatagtaaagaggatattttaaagactggtataagataaacatcaaggtaagatatagaggtgataaggatgaaggtgctaatggtgaaaaacataatccatggacagagttaagaaaaaaatcgcaaagtgacgaagtggagaaaacaaacaagggtaagataagtgaggtcccgacagaagagttgaagtaaaaattcattaccgaaggaagttacaaggaattaacgagatcaccaaggatgcgcgaaataaaatgaatgctcatggatcatcgagaaacaagggtggtcaagggcgtgtaaaatgaaatatcttaaatagaccttgggatataaaggtaggcataaaaaggatgagagtatgaaagacttcaaggagatgagcataccaataccaagagacaagaaattgctaaaagatagtgacttaacaatag

SEQ ID NO: 106153 - DNA, 686 bp, Zea Mays
gagtgtagtggcttgacaccttcacagaaacctccaaccatttcctagcctatcaaattcactctaactaaatcttccacctcaactgtgcgagatgaagtgtttaaggaacctttgatatctccacctcaaaaactagtgtggtatcccaaacctaaccatcttaaaaacccacttgacaccttgccctacacctctagtgatccccttcctagagcaccacaaccacccaagttgactctttcccaaaaaagactccacctaagagagaggtgaggtaccactgcgagtattgtgagagggatggtcacttggttgttttctgttttagaaggaagagagatgataggtggggtattgaggtgagtattagggacatgcattgcccttctcatggtgtgcatgatcctcctattcaaagatgtgttgctaggcctagaggtgctttgccttaagtgacttggtctcaagcagtgagaccacatggtggttgtgcccggtggggtgttggtcatgttccatatgaacaaagatctcatggcggagggttcggttcccacatctctagcggaccatggtttcctcctcatgatgatagctaccccctatgggaccaaggatgtttggtgtttttcctaacacttttaggggcaaatgatgtaacactagtattcgtcataattttc

SEQ ID NO: 106154 - DNA, 492 bp, Zea Mays
ctagtaccatttttctatctcagaagatttatattgagaaagttcttgaaaagtataatctcagtaattgcaaatatgttgctacaccatttgcttcacattttaaattgtcatcgagtcaatgtcctatttactgaagatgagaaagaacacatgtctcacataccgtattctaatgttgttgggtatctcatgtatgttatgatctgtacaagacccgatttggctcatgttgttcgtgtggttagcagatttatgcacaatcctggtaaagaacattggaatgcagtaaagtggattcttcgctacttgaaaggtaattctcaatttggattattgtttgacaagaattcagtgaaggacattggtgttatgggatttgttgagggatttgttgattctgactttgctggtgatcttgataagagacgctccatatctggctatgtattttcattatgcggttctgcagtgagttggagggcttcactt

SEQ ID NO: 106155 - DNA, 278 bp, Zea Mays
catcttctcccatagagagcttcgaagggtgccatctttaggctggattgataattgttgttataagcaaactctgccaaggagaggttcttatcccagttcttgccacaatcgattgcacaagccctcaatatatcttcaagaatttgatttactctctcggtttgaccatcggtctgtgggtggtaagctgaacttctgattagcttggtttccaaagactcttgcagttgttcccaaaatctggcaacaaacggggctcctcggtcagaaataat

SEQ ID NO: 106156 - DNA, 636 bp, Zea Mays
ccggagagggagagaccagtctctcctcgagcccaagtacgaaagcgtatcaaaagaagaaaggaacaaggtgggggaaaaaaactaggggggccgtatcatatatctggtgccgaaaaacgcccttggaacggagaaaagcaaggtcgcggtgaagtgtgagcagcctctcctctagtggttctgctgggacgacaccaccagcactgcagtaccactactagttagtaagtacgctgctgcacacaacaatattcttttttctctccataatactacaaatactgcagtatcaatgtggctgtccctcctcttttccgctgatggagttgagatgttctgcactacttttccaccccgaatccggatggcacccgtaccgtagtgcttgtatgccttctttccctttcttctacttgtacctacatgctactacaggtgtactacgtattttgctccccccacttggttttgcaagcaagaccagcgtaaaagcagaggagactgtcagattcctctttcgctttattctcccgcccagcctcacacacacgtagttagtgttgggctactcacacatgacacaacttcgcctccctccaaatacccagagttttgaagcagggaggaaggaag

SEQ ID NO: 106157 - DNA, 565 bp, Zea Mays
cattgcatcactctattttggcttgatggctcatgtaccaagccgagtccattatgaacatgtcttaaagatgaagcatgaacccaacacccatgtaatagttcttacatctacttataagtctctagaaccaccaaaaaccatcaaagtgtttgtttatgaatgtgttttctaaattgtttttgtggggggaataggaaggcttttctctaccatataagtagatagtactacaatgtacgtgcgttgcgaccgcacaccgatcatatttgatgttatagcacaacgacagtacgacacgcgagggcccagtggcaagccattgtgatggatcctccccacagtagaataaattaaagtggacacgccccataaaaataaatttaaaattaaagtggacatatgacccacccacctaatattaaactgcatatactgcactttaacttagctaaaaggctgagaaatgtgtgagttgaaaaggagacctatcctattttatagctagctcaagcgctcgtcctccttcaactagcaaggtggtactatcagggaggcgctcgtg

SEQ ID NO: 106158 - DNA, 326 bp, Zea Mays
gactccaagactcagctccctacgcactggacggcgggttcattcgtataaaatataggggctcttttgcaactaatcctgggtgaaggggtattggcatacgtgatccacacgatcaaaattctacggtctagattaggtcaccaatgggaatgctcagcgcttgatcctggccgttcaatcaaatccaagagcctagaacagatcgcgaagtacgcgtccgaggccatcggatcatcatctaacggtattcactcaccccgaccaaccttatttaggcttctaatcatggtcgtccgactaggaatctacgattctggtttaat

SEQ ID NO: 106159 - DNA, 699 bp, Zea Mays
catggaactatcgggtgaccagcacgactcagggctagggaccaccatatgtggcctcgggccagctgggctataaaagaagctcagaagagatctagcaccaccagctctacccgacacctcaagctctgtattatagtaactcttgggcacacctatcgaggcctagttcctttgtagcgtgccccttggactataaaagggagggcacctgcgatgtagagggggtaagttacaactcacaggctagatacactcaagctctcaagcaatacaactcatagtggacctgtggatgtagggtattacgctccggcgacccgaatcactcgaaatctttatgttcttgtgttcgcccatccggtcagacaaacatctaggcccccacctcatctgaggaccaggtcgggtgcactccgctacccggtcggagggagaattttcccctccgacatttggcgcaacaagtagggacagggtccttagcttgacccccttcttgatatgacatcccactcatccactagcgggctcggcccgggtgaatccaccgacatttggcgcaaggcggggaagcgacgccttaagaggctcgtcgtcgacctcaaacgacgtgtcaacaggcgcagatccgccaccaagcagaaagcggtgggagcctcaaccatgacaattcaagctactgttgtcatccctcgc

SEQ ID NO: 106160 - DNA, 589 bp, Zea Mays
gccagggggaattctcctaggagcgtagagcacgggcgcgccttgcttacaggagcaggtgcgagtcccgtcccgggtgcacctcatcggagccggaggggaaaaggatagagacagggcgccgccatagtccgtgtccaggagacgaagatgacctggggtgcgtcggattggaactaaggttcgggattgaaaatgtgaaacacttcattcagttataccgtggttgtggatccttgatccaagggctagtatgtcttgcaaacatggggatcctcgatcgtccattgaagatccgatgatcaagatttcaggttcgatgaggttatgatctaatatgggccgtcaagctatgattgggtggttgtggtgagtggatacctctttcgaacgtgctcttttttaaaagagcccctgtttttatttataatcaacccgcagtccatctttgcataaaaactagtatatttggatcctgaaatttgtgttttcaaccccaagctcttgagaaatattaactataaccccaaattcggttattgatataaaataaaattggggaattgatttttagtataggaataaatct

SEQ ID NO: 106161 - DNA, 316 bp, Zea Mays
caaatacttcgatttgcacttcggaagtctcgccaaatttcttcggagtagtgcttgaagactttattgtctccaatacatccagtacattaaccattctttttctctttggggtcgtcattggcattggcacctcaatttttgctgaaggacttagaatttctgatgtctttgtttcttcagccctcggttcttctattttttccgtcgccggcacttcggccagcccttcaatattcggcagggggttggttctttagcttcggtggccgaagaggtctcaccgacaaactcaggcactgtggccggttcaata

SEQ ID NO: 106162 - DNA, 584 bp, Zea Mays
tgggtatggattggttatcccagtatcgcgtggttatatcctgtttttggaagacagtgttattgcaggaatcgtcgggtaaggaggtggtattcttgggaagttccccgaagttcacgttatccttgttggtgcaattgcttcctgatcgccggtcaaggaagtcggggatctttttctccatggtggtggagggtgaggctgccttgcgggtgcaggacatccgggtggtgtgtgactttgctgacgtgtttccggcagagcttccaggcattcctccggagcgcgatgcagcttttgagattaagctgatcccgggtacgcagcctattcataaggccccgtatcaaatggccccaaaggagcagattgaattgaagcgacaattggatgatctgctggctaagggtttcattaggcctagcaggtctccatgggcttccccagtattgtttgttgagaagaaggataaaagcaagcggctgtgtgtggattatcgtgctttgaatcaagtgacaatcaagaataaatatccgcttccccgtattgaggtcctctttgaacagttgaggggtgcccaggtg

SEQ ID NO: 106163 - DNA, 376 bp, Zea Mays
cctctgcgggggctgcacaaagcgattctagagtcgtcttgatcaaggaacaggacctgttggacaacgtgctatgtgatacccctttggcttgctggagtccctcggattctgatagttttgattctcagtcgtcaatggatgacgatgacttaggttctttcatggaaatggtttagtcatccgatgaggacttgacttttttgtcgtggtggatgtcgtgtccttggaggccttcggggttgtagggggcccttcaattgttgaggtggacgatgtgcgtcgaactcgtgctggtgcctctgagttaggggcccgttcacgagtggttggttatggtccgtcgatccgaagacgaagtgggggtcgatgccag

SEQ ID NO: 106164 - DNA, 274 bp, Zea Mays
cagagggttatcttgcatatgaatttataacattgtactcgaggtacttagatgatgtgcagatagtgcacaatcgtccgggatgaatcaatgatgagtctgattatggaaagttttctttaccaatattttcttgtgtgggaagatcacttggtgctcgtaagactcgagatcttgaattgcttgagttagaacaggctcatatatatgttctaaggaattgtgatgaggtgcaaccatttattaggtaattcttgcgggtaccttcaatttt

SEQ ID NO: 106165 - DNA, 450 bp, Zea Mays
cttcgcaagcgccaccactgcatttggtgtcaactgatgaacctgtaccttgaacttccgcaaaacctctactacaaatcgatgcgtcggcaggcgaagatcagcagcgaaaaaggcttcaaaaacaaccaattcctcctcctgctcagggacctcttctgcccctggagcccgcctgacaccattcccaaaataacctagccgctgcatctccaacacgtggcccaaaaatatcctcgaggtcccgaactcgacggtgtggacgggctacagttctaccaccgccaaatcactcaacgtcttctcaaacgacggcgtggccggtgatgcgctcgcagcagacgaagaagaggatgacattgtcacgtatcgtcggtggcggcgcacggtttgcttgacatgagccagatcaccgacggagaaggagcaaagagggcaggcgagcggttg

SEQ ID NO: 106166 - DNA, 500 bp, Zea Mays
caatggcaattgatctcccaacttatatcataaaagcaatcgataaaatcagaagagactttctttggagagatcgcaaagagataaatgggggggggggcattgccttgtttcttggagcaaagtttgtcgacctcttgatttgggcggtcttcgtatttcaagcattaaagagctgagttgggcgctgctgatgcgttggttatggctgcaaaacacggagcctggccgaccttggtcatccttgactatccaagttcctgacaaggttcaggccttctcagtatggtgatgcaaacggaagttggaaacggtgctaatactcttttttggaagaatcgatggattcaaggacaaagggtggctgatattgcgccaagacttcttcaagttgttccgaaaagaagaatcaatacaaggacagcgcaagatgctctaattggaagaacatggatgtcggatattcgaggggcccaatctatgggggcaattattgatta

SEQ ID NO: 106167 - DNA, 441 bp, Zea Mays
ttttcagggggaaaaaaaagaagggttttccttggaggctaccgagcgctacttcggccgtgtgggttgattcgtactcgtgtggtttgtttgttttgctcgctcgctcgctcgcttgcttttaccgagtgatctgaatgatgttgactgtttatctgagaaggtagcggcttatcaaggatttaataaggttccactcgtggatttggatttttctggccccctcttttggtctgtcctagtttgttaaggtggcttcggttcggacatttgcttgcaaaattgaagcgcctttgacgtgcagaagtagcgaaagtggttcgagttgcagcgctccagttttttttttcttttcttttttctttccattcacggtttatcgtcagaaccggtctggttaaaaggcaaagcttaatatcgtcgcccccctccccctttttc

SEQ ID NO: 106168 - DNA, 511 bp, Zea Mays
taaaaattcagcttttcttaaatttggcttttcggaaacttgacggaaaaactagctgtttgttttagctttcaggctgggaaactgtcagtagagtcttagtaaaatggaaggagaaggaagcaggtgtttatcatccgatttttttatgtctaagagctagtccgattgtttaggaacgatttttagccggattgcacgtgtaatttgaataggttttaatcaggcagaacgatttgaattagaatccggaagaaactaagaaggcctaatcgagaaggaaggaagcagatgtatcgagatcaatcgatgtttctgacgattcaatgcctcggtttcttggagacgaatcctcttcctctcctcgctgctctggcaacccgtgtggtcggtggtcctgcgtccgtagtactcaaatctcttttgccaggaattagccccgaccctgcgctggtttttgcatcatgttgcaattgcaagttatgttgtgtctgactgaatcattcgtcgc

SEQ ID NO: 106169 - DNA, 529 bp, Zea Mays
gttgtctgtaacttcttcgttctttctcatgcagagccaaagcagtaagtcgagtccagaagctaacagtacccaaagtcggccaagcatcaagcttgaggcctaaaccaagagatccttctgctcctaaatcttcaggtaagatacctctttgcacttctgttacaatttaatttcatgggaatgctaatcttgaggagctggtatttgtggcaaatggatctgagtctgacacggtagttttagggttgattaacttgatatgactaagagaacactaatagaatgtgccaaacggatgtctattttaacatttgtttgtatatggatttacctctagtttgtgcttgcattgccaacattacgaatttatgatcatcttgacaaggtttcttaaaacaaattatattgtccaaggtgcattaggctatccatactaagggctcgtttgggaaatacggtatcaagtgaccctggtcatttagcaccggcggggcaaacctgcaaataatttccccgtctctgtgct

SEQ ID NO: 106170 - DNA, 483 bp, Zea Mays
gttgcagccggatgtggaggataaccattttttagattagatagcaatggaaaatattcagccaaaatagcgtatgagtgcttgtttttttggctcaacacagtttggaccttttgaacgtatttggaaatcttgggcgccttcgaagtgcagatttttcatgtggctagcagcaaccaatgctggactgtggatcggttgtctagacgaggactgtctcacaatgagaaatgtattctatgtggtcaagaggaagaaacagtgaaccatcttcttttgtcttgtgttttctctaaggaattctggtttagattgttcaatcaagttggtctccaagggttggcgctgcaagctgacaactacaattttttcttatgatggaaacgggtctccgagaatgttgaaggatttgcctgaatgggtgtcaatacccttaccattctgggagcttggacgctttggaaaatcaggaatgaatgtgtc

SEQ ID NO: 106171 - DNA, 283 bp, Zea Mays
tcttggagataggctggacgaggtagctatatgcctatatctcacatgcattactctttgctaggctttggttttggatgtctaggataatgtaagtgtaaaataatctgggccatagaccgagtcaattgtgatgtggagactgacgaagttgtctgcattcatggattgaggccaagtcattctttgtttgcgaactgcaaggagaaacatgtcaatgctgctcgatgtcaatggcggctggtgcatgcatgtatctttcctacaggtctacaattgcatt

SEQ ID NO: 106172 - DNA, 441 bp, Zea Mays
atagtatcaagaccagcaagagtaataagcacaaactcttcatgacgtattggtctaacagtgtacctattgggcggtctaactacatgcaacgaggcttgttttgtttgcaacagctagttcacttcttagaggttatatatataccaccccaaccagtcatttgagagttatgggagctgagaaacattccaagtgatttgagacttattcctagtaactgtagacatccaaatgcacaaatatcactcgattattagcataggtactttacatagtgctaaggctagttaaacttctttaactagtgcttgctctaggttttgtcgtagtgatttgaagtgaggtaaagacacctcttgcccctttgtgttgtgtgtgccattgtattgagttgtgttgggaggagcttgtagttttgcgatatcacaccaattgtgg

SEQ ID NO: 106173 - DNA, 309 bp, Zea Mays
agagactgaaattactctaacactttaccatttattatagttaaaacaatcaaattaggaacaacaagtcgacttacaaattttattcaagtcatttagtgcactaaaattaccacatacattaagcaaacacattcaccacgtaagtagcatcatcacacatgacctcgacttaaccgcaggggaagcgatgactacttcggcatgtcaccacctctctacagaccaaatcaatattaactacatcgatcggacctcatatcacgcaacacttataattttactatctcaaatacaactatatcacgg

SEQ ID NO: 106174 - DNA, 480 bp, Zea Mays
gttgtgtgatgttttcgacaacaagtttatgtttctgcacttgacaattttctgaaatcgagaacaagtttatgtttctacttaatcatattgcacttgataatagtagacttgcttaatcatattgcacttcctgaattacagcatgacacattgaacaaccagaaatgtgatgaagaagttcatctgtttgcagtacacatagtagcttgggacaaacagaacctacgacattagacatgacactacgacattttattgatgatgcaaacataaactacatacttaagcagctcccgatccaagccgcgcccagtggtggtggattagatcaacctgcaactgattatatttaactggatcatgtagttggtcgtacctattgttgatgtactcattgcgctccgacatggaaccatgagtagtgtccgccaaaactccgatgttgtcgaagcttgtgttcaaagacgaaggaccttc

SEQ ID NO: 106175 - DNA, 666 bp, Zea Mays
ttggcatctagcactagcggttctaaaaacgctactataaataggttgagaactgctactatagagcttctatgtactagtgaccacctcctgcagcattgggtcgtcgcggattggctagaagtcatggctgggcaacacctcgtcggtgccattgctgatgtcatttgtgttgtcgtggagggagcgatggtgcccagggcggtggcggattgcctcctccagcgggtccaaggcgcatcaaatagaatagctcgtcggccctgcatgtcagtggcgatagagacgacaaggccctagatctgcttgcttctcccacagctgcctcccaccatcaactacgacacgttcatcgtggcgattccgagcttgcttcttccgacactgcctcccgtcgtggctcacaaggacgaaaagaagcgtggcaaacaggtcggatgtgcacgctctagataattgggggagactttccctcacgtaaatatgcgggacgaatcgccagagaaatgtcgcagcaaaaaaaattgggaaggttgtgggatctgttggaggcggagaaaatggagcccccccccaaatgtttttccagtgagttttggtgtcgtttttatagttgctctaactatttaacatccctaaccactccttttctctctcacatgcacc

SEQ ID NO: 106176 - DNA, 418 bp, Zea Mays
gtgggaggaagactgaatatcttgaaatccctctcaaagacagtatcaagggatggcgcttggagtggtttattgttgagaatcatggaaattctctccccctaggtcgggaagatagccgaatgttcgcactccaagttggaccgaatcccccactgatcaggaggtgactgaggcaggggctctgctagctgaagttggactgctgaaggagaggggtctgactgcagaggctgtggttgctgattttgttttcaagaacattcagccgttcaaggacagggcttacccggcttatctgtatcgaggccttgctgactcaactcgggttaccaacaaaagaattccctctgtagacttggtgaaccgacttgagatgatccttagaggcaaggtatcaaacattggtgccccagtg

SEQ ID NO: 106177 - DNA, 479 bp, Zea Mays
tgattgttaggagctcttgtgcttattccccatgagggatttgtaaagagaaactctagcggaatcatggttagttagagtgcctctctagtgtggttcttatggtgctcaagtattggatttagcatgtgataccaattagcgcatgaaccacctatcttggacttgccacaacgatgacgtaggttgttgccgaacaaccaaactttagagataagtcatggtgttcattcgcatgtcctattcagtttgatcattatcacacttaaagttacattcatattgttgtctcatgtgatagttgtccgagtaacattgtagaagtgtaggtccagtgaggcaaccagagggagggtgaatgggagccactaaaaaattcttcaacttgggagaacaacacttgtaacttgattccctgacccaatccaacctccagggactgcaaaacaatatgcagaagaacaaatccatcatggatc

SEQ ID NO: 106178 - DNA, 542 bp, Zea Mays
ctttatagcgacaagggggccgactgggattcaaatatccagcagtcacttgccgcgctagtgagtcggcgtacaggcaaacgaccacagcgacagcagaggaaaacgctttaacctgccagcgacacctacgtagtgcatgcgccacgtaaaaaaatttcttttacctgctcacagccagcccgagtaacaaaaatgaggcgatgtggcatacttttccatggttcagtacattgaacactggtttctacgcgcatacctgcttatgttcagataatccttgttccattattcgcaccataacttgcaaaccaatcctaatcaaaattacacactaaccaacactctttcactttggtataataatcatgccaaaactcttcacggattaggcaaaagatggggccaaagtttgctaaataacactgaatctcggattcagtaacagccaggtacactcaccgagtctcccttttttccatttgctctactaactgaagcacttcggggagcatgttactccaaaattcccacagtactgc

SEQ ID NO: 106179 - DNA, 518 bp, Zea Mays
ccaactcatgtagcctaatagtaatagggtttcctatatatgtaatcctccatcactcaatacattactctgtttttctccctctctaacatggtattatacgcctcctaccccagtacatattcaatgaacaacctaatgttacttatttggtaccataaatactgatacttttctatataaacttggtcaaacttagtgcgcattgactatgtactatgttagaatttgttagattgttatgtatgtgttatgggcctagagcccaactcatgtagcctaatagtaatagggtgtcctatatatgtaatcctccataactcaatacccctaccagttgtcgttgccattccaatggacgacccctgcccgacaccgctttcctccatggttggcaccacctttgcctcgtctgggcagtcttgggcctccgtggcttctctcttctcacctaagttgtcgcgcgaccttgtgctggccctggaaccggccagcaaccgatagcagccctctcttcc

SEQ ID NO: 106180 - DNA, 644 bp, Zea Mays
ttgtggtgctttgaggtgaggtgtttgatcttcttatacattcatctggtgtggatgtttccccattgaattaaaatgaattattgaagctggtaagggttgtgcttagtgcatattaccccttcataaaagagtgttgttttacgatattgatgttgatgtatagctgcatccaaattcgatggtgtgaaattgtagtgttgattgcatcaatgacttgctttgagcttcattgcatgttgtttcttgctggatatcaagttgtgtagtttccttagacaattagtccgaggtagaagttcttgtgttaattaagaccaataatggacccatgttttgaatggtggtgctatatggggtaccatggatgctttgcttggagtggtcgaattcgagaacgaattctttttaaggggggtagagtgtgataccccaattttctgaaaagaagttaaacttctttttctcttttcttttatgttctgtggcattgggggtttggagtttcaggaggcattcctcaggaaacagtatatcttttggcattttttccgctggggtcaggagctcaaatgggagagcgagtttgggccattgatcttgatccggtggatgggagccccctcttcccaaccctagccgcc

SEQ ID NO: 106181 - DNA, 394 bp, Zea Mays
ctaggccctacagatactcgccttttcataagaatgagatagagaagcaagtaaaggctctcttagaagcaggacttactgtgcctactgtaagtccctttgcttcaccagtactattggttaagaacaaggttggaacctagaggttttgtgtagattaccgaaagttaaatgatttgaccataaagaacagatttccaatgccattagttgaggaaatcttggaagaattggcaggaactcagtatttttctagtctatatctcacaactggttatcacgagatcagaatgggtgcggcagatgagttcaagactgccttcaaaactcaccatgggttgtaccaatttcgagttatgccttttggattgaccaatgctccagcaactttcca

SEQ ID NO: 106182 - DNA, 490 bp, Zea Mays
gcgcgatcccgaccgagctcgcctcgtgctcggccctccgcgtcgtgtctctcaagaaaaacaacctcagcggaggcatccctgctgctctcttcaaaaactgctattcgatccagaaggtcgatctccgcatgaacaacctcgacggcccgatccctgatctgctgccgtaccatagctctactgatactagtagtagtctgcaactacttggcctcacccagaacaacctctccggcgagataccgtcttccgttggcaacctctcctcgcttgtttacttcctggctgctcagaaccttctgaccggcagcatcccaggtagcctggcatcgttagcgagcatccaagtcattgatctcacctacaacaatctgtcaggcaccgtgcccagctccatcttcaacctctcctcgcttatatacctgggcttgggagacaacggttttgtaggggagctgccggcgacgatgggcaaccgtctcccaaa

SEQ ID NO: 106183 - DNA, 299 bp, Zea Mays
actccagtatgtagtgcttagctccacctcctccacaacaagatacttggtagaatctccattgtctcccgtccgcttgtaacccctactaagagcattaatcatcataggtgttggtagtgcattccaccgaagactggatgtagggacgttctgcccgaactagtataaatcttgcgcccactgtgtacaccgtccattgcccagaacacacacacaaagttacttgtcgaagctaggttcgaaacaccgacacttcggcattattttcagctttataacatcatcgtatcttcatc

SEQ ID NO: 106184 - DNA, 375 bp, Zea Mays
gcaggactgacattgatggggtacatacttgatttgttgtagttcaccttcaaccccgtcgaagttgcaaaagagttcaggacagctctgagaaagaagagctgtctagggcaagcttccaatatcagtagtgtgtcatccgcatattggactatcggaaaatcttgaccacaattctcgggcaatggtaacttgagtaggtcttgccgtcgcgctttattaatgatgctctgtaacagatccgccgcgagaacaaaaagaagaggcgagaggggatctccctgcctaaccccacgcttgcagtgaaaggttttcccaggaacaccattaagaagaactgaagacgtgccagaccgaagaatatccctaatccag

SEQ ID NO: 106185 - DNA, 615 bp, Zea Mays
gggacccgccgcgagggaatcctagcttaccgtcggtcgtgctctcagtattgaacccaggggctcctctaggccaggtggaagacagtcgcgtccgtattgcttgggattagccaccaatgccaccagaatttgtcgtcgtctctgcgaattcgtcgtgcgccgtggtcgacttcattcagtgcccatcttcagtgagtgtaccatgcgtccacgattagagtatgaggggtaagcgcctcggccgttagatgagatctgtgcggtggtgattgtgcgctcagagcgattcgcgggggttcattttggatcgtccgatctaatcggacgtgatcagagtaaggaggtcacaaagccttagatctctgatcctgtggttgagattcgcgtactagttcacgtgagggtaggcctgatctggatagttcatttcagatcgggcggttgtagtgaacccgtaagcgctcggtctagacattttgtgtatgagtccctgaactttagaggaataaacccgtcatccacacagtgtgataagtaattacagaaaggcctaattttttttgatttagacccctgagcttcctggtattcgtgcgcgcagtccagacattt

SEQ ID NO: 106186 - DNA, 800 bp, Zea Mays
gtgcttgggaggaaggggtatggacgtatgaccgagctacgaagacaaacttcaaaatgcatgtttggtaccagtactccatgcatgacttaccggcgtatgggctattctgcgcctggtgtgttcacggtaagttctcatgcccagtttgcaaggaagatcttaggttcatttggttgaaaaagggtggcaaatattcgtcgttcgataaacttaacaatttcttcctcctgaccatccattccgcctagacatcaagaactttacgaaaggtgtcgtagtgatagaccgcccacctgcaacgatgactggtgccgaaattcgtcaacagatagatgagctcgtggccaatacagaaggtggttttgtgggatatagtgagcaacatatgtggacacatgagtcgggcttgactcaactcccctattatgaggacctactccttccacacaacattgacgtgatgcacactgaaaagaatgttgccgaggcactttgggcaacaattatggacattcctgataagtcaaaggataacgtaaaggcaagagtggatctgaccaaaccaagagatgaagccgcctagtggtggaaagacatggagaaggcctaaggccgatttcgtcctaagcagggcccagaggaaggaattacttcagtggatcaatatgttgatgttctctgatgggtatgcagctaacctgagtagggggggtcaacttatctactctgcgagtcttagagatgaagagtcttgacttccacatatggattgaatggattcttcctgcaatggttcg

SEQ ID NO: 106187 - DNA, 578 bp, Zea Mays
gactggattgataactgttattgtaagaaaactccgccaaagacagacacttgtcccaatccttcccgtagtgtagtgcacatgctcgcaacatgtcttctaaaatttgattcaccctttccatttgaccatctgtttgagggtgatatgctgagcttcggatgacatgggtcccaagtgactcttgcaattgctcccaaaatcgtgccacaaatggtgctcctctgtcagatataatggtcttgggaataccatgcaaccttactatctgatcaacataaatttcagcgtacttctctgccctgtgggtggtatgcactggcaagaaatgagcagtcttggtcagcctgtccacgataacccaaatagaatcatgatgtctggaggtattgggtaatcccactatgaagtccatgcaaatgtcctcccatttccaagatggtatgggaaggggttgcaaagggcctgctgccttcaagtgactggcttttaccctctggcaagtgtcacactctgatacatacttggcaatttccctcttcattctagtccaccaatatagagatctgagatcatga

SEQ ID NO: 106188 - DNA, 397 bp, Zea Mays
gtaaagccgaacgcatgctccgcaccaccaacaatatgatccgcaccttgctgctccaagcatccatgcctcctcgctattgggtagacgctattcatacaaccacttatcttctaaattgccttcccactaaaactgtctgcgcctcttgtccctttgctaccctgtacaacacacctcccacatatgagcagcttcgagtttttggatgtgcttgctatctgaacctcgctgccaccgcaccgcataagcttgctccccgctctactaggtgtctttttctggggtattctactgagcataagggttatcgctgtcttgatctatccacaaatcgggtcttaacatctcatcatgttgtctttgatgaggcttgcttccctttcgcagcctcgcc

SEQ ID NO: 106189 - DNA, 388 bp, Zea Mays
gtggaatacaaattatgaagcgtcttaccctgctcttacaaggttcttactagcactgcaggtgacaaacggtgaccggtgtgactgtccatcgagcgtgggtgtgattgcaaaggagtacctattctgctcgagagaaagctggagctatgggaaggctgactaaatatatatatgtggcacacaagtcagtaacagatagcaatgctgaataagtgttccaagtactcgtcctagttgctggcctagaaaatgtaatagaacagttggaccaaggcacaagaaaggaggtacaagtatctaggtgcagcaagaaacaagcttggggaaaaataatcacagaggtgcacagaacactggcgtttctggttatgtgctacccttcttt

SEQ ID NO: 106190 - DNA, 410 bp, Zea Mays
gcgatcatcgtctatatgctaagttgtccaaatgtgatttctggttgaaggagatcaaatttttgggtcacaccatctctcaggatggggtatcagttgatcctgaaaaagtccaagaagtgatgaattggaaacctcctaccactgtacgacagatccgtagttttctaggtttggcagggtattatcgacgatttatttcggatttctctaggattgccaagcccttgactgaattgttgaagaaaggagtaaagcatgagtggagccagaaatgtgaggatgcctttcatacactaaggcagcatttgacaacaacacccgtattagctcagcctgacaacacaaaatcttttgaggtttattgcgatgcttccagtactggtttgggatgtgtcttgatgcaagac

SEQ ID NO: 106191 - DNA, 356 bp, Zea Mays
gtcgggattaagccgagagatcgtagagcatcggctgcccattaagtctgatttcagacctttcaagcagagagctagaacatttcgtcccgatcttctcccacgaatcaaggacgaaattcaccggctgctagaagctaattttattagaccttgcagatacgcagagtgggtctccaatattgtgccggtggagaagaaggagtcaggtaagcttagagtatgcattgatttttgcaatttagacagagcaactcctaaagatgagtatcccatgcccatagccgacacattaatcaataatgcatcaggaaatagaattattagctttcttgatggtaatgtcggatataatc

SEQ ID NO: 106192 - DNA, 923 bp, Zea Mays
cggttgaatcaacccggactgcaacatctcccgaagttggcgttcgatttcgtctttaatagctggaggatagcgatatggccgcacatgaactggtgtcgctcccggcaacaggggaatggcgtgatcacaagccctcgaaggaggcagccctttcggtggtgcaaatacctcagcaaattccttcaacactgactgcactgacaccggtaaattcaagtcatccaaagaaggagttacagtactcaccatggccacttcaaccattgaccctggcaacaaggctgctgacaagccttggagaagcactggcaatttgtgataagtgataaccatccacttatgcaaccaatgcaccttcatggggctatgaagtgccaaccaatccataccaacaatcaaatcgtacgaagataaccccaagacatgaaaatctgtgataaaggagcactgttggacagaccaagaagccccccagcaactgttgtgagcagcgcagacgacccccatcagccacttggaccatagaaggatttggcaattcagacagaccagataattgagcagccaacttagaagagataaaggaatgtgaactgcccgaatccaccaataccaatacttccctattctgaataattccagtgaacttcatggtatgcattgcttcaacgccctgaaccgctgctatagaaacaacaacaaacacttgatctttaggctgttgttcaccgtcaggaatagtagctgtctcttcattttgtagctgataaaggtcccacaattcttgcaatgcatgtaactaaactgtggcagaacactgatgatccttagaccacttttcagcacaccgataacagagaccgcgagctcgcctgtaagcacgcaacgccgccaacttgtcctccatgacgcgaggacag

SEQ ID NO: 106193 - DNA, 365 bp, Zea Mays
caatctattcttcgcacacgacacaagctcatagaccttgctaccaacttttctggtcttcggagtaaatgtgcaactcccaaactgcaccactttacatacaatagcattcgacgttaactaatgcagttgaacgttagaaggtttcaacacttcagtcacgaatggatggcatggaaatcgaagtccagcctcaaaaaaagcctcgaagacaacaaattctccctgagggttcgtagtcttcttgatgctaggcacgtggtcgatccccgccccaaagtaacctaaccgctcaaattagtgcgcatggtttgaggaaactgttgtccacttgttctcaattgctatgaatcaagagccaggca

SEQ ID NO: 106194 - DNA, 319 bp, Zea Mays
agagaacccccacaacggacggcgggttctattgttcagaaccccgagggttcttatgtaaaaagcacagcgaagcgctatcggttgatctgcaccgtccgatcgactatggagcgccctgattaaatccactaccctgcgaaccggtacgcaatctaagcctttcgatctaacttggacgttccagatttaaataacctaatcccactcacgtacgatcgatcggaatcgaacggcccacaacccccaaacccgaatcggtatacaggttctaatcgcagccgttggcttgacgatcgacggcaagcggtctttctcc

SEQ ID NO: 106195 - DNA, 682 bp, Zea Mays
catccaataatgcagcagaatacggagcactggtccacgggctgagcatcgcggtttcactcggcatcaagaagctgatggtgtacggcgattcactggtagtcataagtcaaataaacaaagattaggactgctcgaccgactcaatgggcaaatattgtgcaccatgtggaagttggaagataagttcgaaggattggagttccaccacgtggaaagggatcgcaatgcagcggctgatgcattgtcgaaactagggtccagtcgcgcccaagttccacctaggatacagaaaccaagcattgtcacagatcagatggaagaatgcaatgccctgagtcagccagaggcagatcccaatgactggagagaaccgatcatcaggtacataaggaacgaagaggaaccggatgacaaggtcgcgacagagcgcatcgcaagacagtcggcccactataccatcatagggggcctgctgtacagaagaggcacaggaggagtcctcatgaagtgcatccactcggctacctggagacagctattagatgagattcatgtcgggcagtgtggtgtgcatgctgcatcaaggactctagtgggaaaagcttttagatccaggttttactggctgactgcgaagaatgatgctatcgagttagtccagaagtgtgaggcatgccaa

SEQ ID NO: 106196 - DNA, 528 bp, Zea Mays
acccattatacaaaagttcaacctattatacaacagtacaccctacaataccctacaatatactactctacttttattacaccattattcctgctttccattagtcttggcggcctcatcgtcaggtgtgggagtccagacatcaaccaacctcaaagaaggagggggctcaaaaaggtctaactccccacccagcgcacgtcccgcaacgtgagatggtccagtttccgcctcattttgtgcaggcccacttgggtgtaattgtgagtataatatatggacttcctcatgcaaagtattgcagtaaacttgcaggtcatcgacagtcgagctaagttctttaattcgggcctgagcccttgcttccttagcacacattagcaagcgagactgtacagcccagtcaagtgctaagtctcgatcagcgagttgatcctgcaagtgtcggatgtcccttctcagttcattgattctatctccgtcggcgacccaagcatcggtcctatgttgcagcgctgcttgaagtcg

SEQ ID NO: 106197 - DNA, 801 bp, Zea Mays
ggaacactgagtagttcatgtaccccgaggtctggaccgcctacatcatcttcttttgctggatcctcgccctctccgtctttgggtgcgcccccaacattggcatggacgctcgtcaaccttggccactttgcagtacgtacaacggcattctctcgctccttgcttgtcttactgtctgccatgttacttgctccccttgctatcgttggttcgttcgtgtgcagaggctggaatggggtttcagctgttcctattaatgttagcatgaggagcatcttactgaagcggctccatgtttggtcgtctacatcatgagggattgagggctaagttctgatgcttgtgttggatgggattacatacctttacacttacatgcatttcacctattttggcacgttaataactttgggatttctaaactattaaacattaattcgaggttatgcatatgaagataatttaggtacatgttttcttaggccaattacaaacaaataatgttggggtgcataatagtgactttatcagtagtcaggtctgttcgcattgtctcaacagctaatagttccacaaatgatttggcaggaacaaagtgtgtattgccatcctatggtcctttcaagtttcagctattgatctttttgtgttaggtaccttagttcagacctcagcatgatccaccctcctgacgggactcaggaagatttgtgatgacactactgacatagataacaaaagtgcccatgaaacgtgcatgaaactatgatatatattctaccaatgttggacaattac

SEQ ID NO: 106198 - DNA, 794 bp, Zea Mays
cgcgtcgctacgaaaccataggttcgagaaccactaaaattggagttagaatgaataagttatggattttgcaagtttctattttattttgtattcattttatacttaaaaacatttattgtaagttttttctgtaatttcctaatttaattatttttgtttaatagaaaatggacgacatgtatcatttttaaggagcttagggtgttctacgctaattttaggatctaatttgaattattttctattgaatccggatggcgggttgaatcggtaaaagctcagggtctcttatggaaaaccaactcgctgaaggggtatcgtgtattcctagccgttggattcactatgtgtggtcatgattagatcgaatgcttaatgaacctcacatctgagatctaaggcttgtagcgctccacgtcacccttttcatctcacctacccgattagagatcggtggtcacggttaaagcaacgaaggggtatctcgttgcctaatcctcaccacatatcttcgaattgacggccacgctctaacaccctcaccccaacgatgccctataatggcggattgccagccacgacgacgctccactagagtgcgtgctgccgacgtcctggagcccggattccctggtctaatcggtgttatatgaagagtaggatgaggagaacgcgataggagggttcttacccgctaaccaaacaatgacgatgccgaccatggcgtagtgtagccctacgacagaggttggcctccggcgataaattgttgtcaacttgcttgatctctc

SEQ ID NO: 106199 - DNA, 561 bp, Zea Mays
gggaattcgagtgcaatctatagtgggactagaaactgaaggcacgttcaaatctccaaaaaaaagaagagccaaattagcagactacacaagcaacatcgtctgtgggggagcagcgatactcaagcacgcgcggatctagttgtagatgtcgagggagaaggccacgttgaacgctcagcttggggcagcagagcgaatccttgtgcacgacgacgaagggcatctcggtcgcggattcgggatggaatcaccacctcctcgctggatctttgccaacagtcttcaaatccaccccgagattcccaccgggcaaggaatcgccctctgctgaaggtcacttcccggcctcagtcccaacttcatccctcggacgacctaagtcttctggaatgcaaacctaagtctttctggaatgcaggagatgaagaggtcgggggatcaagatgccaggaacgcgggagatgaagagggaaatgggacgacctaagtctttttggaatgcaaacctcagtcccaactggtcacgtcgaccaatctttcctctgccctcgatgtcca

SEQ ID NO: 106200 - DNA, 326 bp, Zea Mays
tttcacaaaatcagatcaccttttgtgtcattttatatgcttacacaaataaattaatctatcataagattaaaaggggttttaaaacaattttagctctactaaaggggacatggcctttgctacctctatgaaagttgcctagagggggggtgaatatgcaagttaaaactttttcaacaaaaaaactagaagcaaactgggtaaaactgaattgatctcgaaattcacccagttaactttggaaatgagatgttctagataatccacagggttcaaagtagtagatctgagaagggcacttctcaaaatccacacaccaaaaa

SEQ ID NO: 106201 - DNA, 344 bp, Zea Mays
atttggtcgccttaccggtcctacataaataaagtttgattctttttctttcctttttgaaatctagaattctgtccttgtgacgacggtaccagctactacctgcttgagaccttgagcagttgagcgctgagaagcttctagatggagtgtaatcacgaagacaccaaccgatgatgattatgtctcaacctctccgcaacaagtaaataaatgtgagatgtcctagctcctttttattcccctcaacccaagcaaggcaagagaagacgtcatttcacatttctcctcggtggctctcctccttctccagctaaaaagatgttcgctttagattaaagctg

SEQ ID NO: 106202 - DNA, 697 bp, Zea Mays
cgctctccatgatttgtgaatctatgcatactgtgtggttgtggatactgtttagtggaagatagaggtgaaagcagcatggtaaattcccataccgtctgatattgttttctttattattataatgttttccaccgtttctgtctttagcaaacatgaaagtttgtcattttctttttttagcgcaactgtttccttattagttaattccataaatgtgggaaagtcctgtgtcgactgttttaagttttccgtattatagttgtacggtacagttcctgactgtttccattcattttcattcctagtggaaaaccattaacagccactagtagagtgcccgtgctaacgctacggcagtatttcagggatgcacatgaaaacaaccaaatgacgatatttatttccatagtttaagtttcacgcaattgtttgtaacagacaataaatagtagtgtggacgtgctaacgctacagtaaaatacaaaacaagataaaatttgcaaaaaataaaatgaataatcagattaattaaggttcacgtctcatatatctagttatactcatatatctaattatacaaacgggcgaacatttaaatctggaaaactctgtcaccagcaagttcaggtacatgaaagtacaagcctaggccaattataatgcataacaaggcaatagtaagtcttatttcgcc

SEQ ID NO: 106203 - DNA, 455 bp, Zea Mays
tcaaggtcgttgtacgcgggaaagtcggatcggcggtgtggatagcgcttaagtccaacgagccgcttgggcttgagtctgcttctttctcgcgttggcccattccaccaacagtttcctcctggcccacgaagggatggtctcatgagataataggctcaaatccttttgcgaggccttcttgccttctagtggacccggggatatctgtcccccacaagccctcaatctttcagttgattttgaaataatcagccccaaagattctaggtccagctcgcgagtttgtggcttgatttccactctggccatgggcgtgccgcaggtgcgcttattgtgcgttgctcctgaactttgagtgactcagtaaaaacggtcttctcaaaggtcctcatttgatgctttggagatcagcatcttgtcatcatatcatgctttagaagtcagcatttcat

SEQ ID NO: 106204 - DNA, 456 bp, Zea Mays
acctcagatacatcaatctacttcttccagcactctgactcgagccagccctagtgtccttcggcatttcctagtcagcagcccgggggccataccttgaaagctatgtgctcctgcactaagtcactagtactgatgtggatgcacacatcgttgaaagcagtcaggcaagcctgagatttttctgtgttcacaatagttggcctctttattccaaagcagaatcaaatatgccactggattacatccctaatatcacttcttttatctaagtcattcttcacgcaaaaccaatgcttcatccatgagcccgaccattttcccgaaaagttggcaagggttgcctagcatctgatcggtatgcaaaggtataacaaccaaagttattgtgatactgctattttctagtagccttcgtatgataggacaactcatgaatattacaaaagcaatcag

SEQ ID NO: 106205 - DNA, 286 bp, Zea Mays
ttgagctttacgactgtaactgcagttcaggcacattaaacatcaactggacctgcatttttaagtgaaatccaaactccatcacatctctcaaacatggctaaaaaagtccagatggtaactatagacgatttatgcacacaaagcatctattaaatcatatatcaagttaaatggtacaccccaacagcagtagcaatagcatagcatttgaaaggagaagaaaaatagattgctaagtatgtatatcgacaagctaatcaaagctagtcaacatgcacattcc

SEQ ID NO: 106206 - DNA, 341 bp, Zea Mays
ctatattgacacgttgcgagacaaacatggagatgacatggactcgatgacagttgagtttgacaccgcggccacttacaaggctggtggagtagtgttacataggaggtatgctagtctgtgttgccatttcatttagataattgttattctatttagtatatggtgtggtgctctatgtaggttttctatcgacgatgaggttgtggaccgctgaagttatagtaggcaattatcttcctctattaggagtattcggccccaatgagcatctgcacgagaggaagagatatttgaacaacagcgacaagatgtaacagcatatgcaatgacaagatgta

SEQ ID NO: 106207 - DNA, 792 bp, Zea Mays
ctaaacacaacgttcatgtaatatctatatgtattacttgatacatttattcaaaaaaatttatagtaccttagcagtttcgcacagaaatgtccgtgcattgactgcttactgttttggtattttcaaattgacagtaaatcataatatctggtttcaaaacacgagctttgtcaacttctacatatttgctcaggggaaaaaagctacttgaccaaggtataactcattacacattcatttttataacagtgtgctcaagttttactattttttcctaatagcgccctcctggttattctctaaaacgtgtcttatgtatcacatataattgcttaatagttggcttaaataaataggagctaaatttgtgatagtgcagctcaagtaaattatggtaaaactttgtatgttaatggttggtacgaatcataagtatagttaccttgcgatatttcttccttaattatgggtcagggttacatcttagcatcggtttcgttgtgaatatgtgcaaagagaacgcctagctcttaataatcagttatatgatttcgttttgagacgaagaatatttatcgcctaatttttggttgtagtggagttttgattatatacttcctataacttcacatttgcttctacctttgctcaccattgaaatacgacaacatgcattaccaaagcagtatgaaacacataacgggtatacaccagttattgattgttttttgcaaaccagatttccttttattacataactatatatcttatggtccctccttactaaac

SEQ ID NO: 106208 - DNA, 330 bp, Zea Mays
ccgtggtgcacctatggcgcgtggtgaagttgttcgtagactcggcagagggagttgatcgttggggcggagagaatttctcaccggagaaagaagatcacggcgaatcgaccattagtgcgggtgggactctctgcgccatcaaagccggtatgttgcccttgcctacactcgcacgacgattcgttaggttaaacactggtcggcttggggaaagtgcaccttggtgcggggtcagagttcatcggtggggtgcgcgattgtgtgtgcgctgcgccgctgtttggtgaccgccgtggagaaggataggtctgtcgtcgtagatccaat

SEQ ID NO: 106209 - DNA, 489 bp, Zea Mays
ggcctcaccgcagtgcccaagcgaaacggatctgatcgacggccttcaaattctgttgagtgacggcagctgttaccatttgttcaagcaacgcttgcttgcaaagcctactactagtctcttctctcttgtcgtcggttcagtcgatagggtcgtggtggcggtacttgcatcacgtctcaataggatgtatcatgacctgttccacgtccctatgtagtgtaggcctaatgatcgtgcccgggttcatgtgggcgtgaacatatgatgcaaagagcaatgcccttgggcgtttgatggacagggcctaaaaaaagctgttctccctcggtccacaaactagccatatatcaaagataaaaaaaatgaccttaacttctcttgaaaatcaatcatttatatgtcttcaaatacactgtatcaatttaaaatctatgtcttaaattatacggtatgtcacatccctcaaaaccatcaactccatctcag

SEQ ID NO: 106210 - DNA, 730 bp, Zea Mays
ttagattattgccttgtgtctcgctgtggtgtgttttgtgcagaaaactgctgctggatctgaagttgtcctagatgttgttgctcatatgataaaggtgctggtgtaaatggctgaggcaaaatccaacgagtcgaagagtgacttgccgaagcaactgagcccgagggttgtgaacttggttgttagttacgaacatattctggaatgtatggggaatagtacgaagtggtgtgaaagacttgctttggttgattatatcgtgctttagcttcgacaatttccttctgcttctggatttgacttgataggcacttcttgtatgccccttgtcctttccacagaaaaggtagaacatttttcttggttgaaagttgaatattcctagtccttcctcctcttccacctcttggggccagtgatctgaaggtattttgtgattgttgcttttgttgggttcctataggttgaggttgactctattgtccctaagtgtgattgtttttgtctttgttctaattcggattatgtatggttctgatatgtcttgggttgaaccgtccaccgaagcccctggtcatcttggaatatctcaagacctcctccttcctctgatgaaagtcattgtctgctctgatatatactcatccatcttctgaagaagattttctaagaactagggcagtttctggcaaagtattgagccgctggtcccgggcgaagccccttg

SEQ ID NO: 106211 - DNA, 351 bp, Zea Mays
ggcatttttaatcgcttcggcggcccagtgagcctgtaaaacaaaaatacaatttattaaaaattcaactacatgaaaatcaaaggacaagattcagcattcaaaagaaacctctccctcactgtctctgacagcctcatccgccatttgtcttccaccagcaagccagatgtcagaatagaatttttctcctagttcaacaactttggtcaaagggtctttaatatcattagtcgaaaccttgaactcctgttggatcacagactttgcgtgctcgcagccagctttttctagcaacaagactgctccccgtggacccatacaagcatagaaatctccctgactaataag

SEQ ID NO: 106212 - DNA, 503 bp, Zea Mays
gttgagagagttgggctgcgtagaggagttcacaggtgggctgaattgcaagccaaaggcccagtaagttatttaccccttttcttttattctattggaatttccctttacaaatttgaatttggttttcaattcccaaatccaattgaaattcaaagttcacagcaaatttgtcttcacatttatatgctcaattcctctgaacatagtatggataaattttatttatttctccatttattctattttgcataatatttcctttctctaactcaaaccctaattctctatttaggattccaatttcctctcattattatatttcttttattattattattattattattatattgtcacaaataatgcacacaaaataaaatttcatcatgatgcaatgatttagtggtatacatattttataattatctgttttaaaatatggtgttcacatgtgatggcacaaaaagttcaaactcccacatagataaagtgaacttgtt

SEQ ID NO: 106213 - DNA, 455 bp, Zea Mays
gacaaaaagttttcaaaaagggggatacctataatcaatgcgcgttcagcagcttcttcagcctcctttgcctccactcgtgcatcgtgagattctttttcactcttttttatagtttcatcggccatctcacgaccgcccttcatccagatattggaatagaatttccctcccatcaaagtagcttcggttgaaggatccttcatatcgtcaatagagaagatggcttctgcctgggctgcagccttaacatgttcacagccagttttctccaacactgctgcaacccctcgggcaccggtgaaggcacaaaaatctccacggtcactgagtatttcttcaaaagcttcgacctcgtcgtcgatccattgaataaccccttcaggatcgcctcggataaaatctttgctctgatgactatgcacccacctttgcaaagctatctttaagtttct

SEQ ID NO: 106214 - DNA, 444 bp, Zea Mays
cgacgggcccccagatcaagccatggtccgatccgaagacacgacctctccatgcccattcgacgatgccttctaacaccttgagaagactcactgacgttttgtttcgataccccccatcttttttcgccctcgtgggtcacctaggagtgcaccatccgaagtcaccggcgctttgcagggggtgaccctcaacggagactccactgtagttaatccaatgccgcaaaataatctaaatcatcctctgaggatttgtcatctatccaagaaaaagggctccctaactttccaccctccgaagaccacgacccaacatcagattccccaaacgcgttgttacaaagagacactgcatttccatccatcaaaatatcatcattcatgtcatcatcagggtttgcttgcgcaggctcagatgccggaacctatgcagcaaccgat

SEQ ID NO: 106215 - DNA, 663 bp, Zea Mays
ggaattttctgagactcgacccccgctctttattaaagcagaagaacctctagaagccgatgagtgggtaagagttatggaacaaaagtttgggttgattcgctgcacagagacgcagaagccattatttgctgcacaacaactaagagggtctgccagtacttggtgggcaaattttgcagcaattcaaccggctggacatcagatcacctgtgaggaattcaagctagcattccgagagcattatgttccagagggagtgctccatatgaaacaagaagagttcatccggttaaagcaagggtgagatactgtaatgcagtaactcaacaagttcaaccatctctcccagtatgccattgaccaagtgaatacagatctgaagaaaaagaattgttttatgaggggactcaatgacaggcttcagcggaaaatggcaacatgcttggaccttacctacagtagagctgcccgtacaacactggcagtggaagccaaaaatgcaggacacggaaaatcaaaggggtttggaggtgaaaggtcaaatcaagggcctaagaagagaaccaggttggtgatccgaccttttaatcaaaatcattctttgcctcgcccaccttcatatccattcaagcagcctatttttattcgtcccactactgc

SEQ ID NO: 106216 - DNA, 531 bp, Zea Mays
gatcccgctgctggtactgcatcgggtgcatcagtgggagcagattgctcaggatcaacagaggaaccgacatgggcaacttcctcggcaggatgatccggtgcagagggtaggattagtgcctcgtgtgcatgctcctgtacaccaagaccgtagctttctgggaagcaagcagtacgtcgagataagtcatgtacatcagaaaattcctgcacaggacaatcttcacgcaacagattagtagacttaggcattaaggacaaatctacagtatcacccccggtaacagatggattaagcaatgttggataaaggagagagatctcggagcgtaagcgggcaccagcattggggtgtagcgtagcaaaaggaaaaattgattcatcgaataccacatcacgcgaatataaacacgaacagtagaaatatcaagacatttgtagcccttgtgatgagaactataaccaagaaaggcacactgcttagagcgaaaagataatttatgagaattgtaagggcgtaagttaggct

SEQ ID NO: 106217 - DNA, 668 bp, Zea Mays
cgtggggtttagtggtagtggtgtagtgctatttatctagagctaggatagggtggctaggtccatgggttaagtttcaacataaagaaaatacttatgtgattgttcagatggtccgcggggttgaacatgaagatggtgtttttggtttggtcattgagtgttgttgtaggacattctatggcatgtcagaagatttgttagtatgttggagcatttcttagaatggtttgagcatgtaaaacttagtcatttttgtgttgggtgttctcatgaattattcaaggatatatcgtagagtctgtgggtgcaagattttgagagcatgctcttgaattctctaaaataaatattttagtcggttcaaggttctcaagggcggtttagagcgaggaacttcaaacatgggaaataggctatgttagtgaagtgagtgttgttagtgcatctagccccttagtgggttttggtgaattgagtaacaacacatttaaaggtctaacaagtttgctaagtgttgaatagaaaattcagtgtgttgaacatacttgaatagtacataatgatcaatgaacaaagcttcaacacaaggttaaataacattgagacaatgcaaatggatataatgtgatctctatgttggtttgaatatatgcacaagacttgag

SEQ ID NO: 106218 - DNA, 339 bp, Zea Mays
tacacacacactgacactaatattaatactgaaaaaaagagtagaggcagtacgagctgatgtatgcgttgtaaacaactccagcactaaaatataacaaagtgaacagaaagtgcttaccgattcaaagcttcaacgtcacaaaccacttcatcgtcaggtgcagtctttgcaagcaagcaacaacggacggttaaaaattacaagctgcaaaaaagatcagtaagtactgctagttgatccacaattccacatatacccaagcaaaagaaaagtaggaaaatgcggaacctcttgccacttccatggttctttattaagatccaaacaagggcaaaa

SEQ ID NO: 106219 - DNA, 568 bp, Zea Mays
tttttttttgaaagggacgggcaaaagatttgccggtccaatatattagagaaggagacaaacacttacaagacactcacgaagacgaacaagagaaaagggggggggggggagaaagcagaagagcaaaactcgactgactactgagactacaaatcctaagccactacactagagcgccaacaagctctctcactaaataagcgacctgatctgagttcttctgctgatttctgaagatcctgttgtttctttctaaccataagctccaccaaaagtagatcataagcccatcaaattttttcctagattgcctattacaaagacctcttagattcctccaccaatcatataacgactctgttgtctggtttcctcccagaaaagaacagtttccccatatcaatatttggctccacacctctctactgaaagggcaatctttgcataaatgggttaccgtctctaatgctgagttacaaagacagcaaactgggttgcattgccaatgtcttttctgaagattatcagcagtcaacactttattatgcaaaagagtccacgcaaa

SEQ ID NO: 106220 - DNA, 622 bp, Zea Mays
gttcctaagattcagtgagcagtactggtgaacggcgggttcatatatgtaaagcgcatggtctcttttagaaaacgctcggctgcggcaatgtatggattaacaggagtcgtccgatcctgatctgaggaacctgatataatgatgaagggtacgcgccatgatccataggattcggaatccacggtcccggtttaatacagccacgatcggctcatactcacccgatcagatatctacggcctagaatcaatcacgcgaagggttatcgctggcatctaatccgagccgtccaacgagatccaatggtgcccgatacttcctcgctttagacagtcgtgcacggcggcgccgccctcgcactatggcggttccattgccggagtagcgcccaatagacgttctagcgcccctgacccaatccaaagtgtgctacatgaagcgcatgccaatacgaacagcaggggagggtcattaccgtctttggccgcgagttgaagccggtccatggtgcgggcagaaacaacggcgcagttgatgctccggcgagcaattgatggctgcgcggtcgtcgattccacccataaactccacggatggtttcgcgctagctcggtgcagg

SEQ ID NO: 106221 - DNA, 336 bp, Zea Mays
tgatattgaacccaatgggtgtgatctggctaaagctgaccccaatgggtgtactgttcgcgttgttgatgaagatgaggaagaggaggatgaaatccctctagttcggaagaatagccgacgctacataaccagtggggaaagcagtggtgttccttctccagctttatctgccctcattggtctacaagaattgtctctggccaactttgatcagactcttgaagatatggtcccagaagatctgttgtcggagccggcagatggtgaaatgatggatatttgtgctgatgtgcctgatgtcgggctggagctatctcgagcagcgtcccgtgc

SEQ ID NO: 106222 - DNA, 518 bp, Zea Mays
ccaaggttgaattattgtaaaacactaatcccatgttcatctcaagtgaaataaggtgtataggtcctgaaccattattggtgaatcaagtaaaggactttgatgagaatctacaacgtgctctccaaaggacggtacccgtgtattttaagtacataattgcaatttagtattgctcttaaattggcttgttgtgtttcctgtctttggagtagttatgctttatgattgcctgtgttaaatgtatcataatgatgcttgcttaatcatgactggtgttatataggatatatcttttgaatcattcatgggtagctatttcatttgttatatccacatcgattaaccctcttggtgtatatggataaacatgtaactgtgtgtaagtcatgctatgtgcaaatatgacattttgtttagtccatgttcacatgattaccctggtttggtattgtgtgaatttcaaatccatgtcgtgcccttttgagctatgagatgcgtaaggagccctgaattag

SEQ ID NO: 106223 - DNA, 429 bp, Zea Mays
gagatagggaaacaaagcttctaccatataggaggaactgtgaggactaaggatgatcagaagaacatttctggacactggatgatgtagctagcattgccaccatgttagtgacgagtcctaaacaacgctattattaaactcactatcgtacctttctagaaatttaatctgatagtacatatttcagtattttgattatacggaatgatttgtgcatttagcctccaggacttataaattggactgcttgaaatgttcctgtattacatgatttttgtgacagtgtgatcctttgtagtagcattagatagggaattcgtttgatttgtaggcacgaaattgcaacgatagtacttggaatatctgcaattatctgttttgaggtctgtcttaattaactcagttctaaataagattagttgctag

SEQ ID NO: 106224 - DNA, 280 bp, Zea Mays
gaaggaggcacatgactcagtttactccatccaccctggtagtaccaagatgtaccaggacttgaagcagaagtataggtggtatggactaaagaaggatgttgcttcacatgtagcactttgtgatgattgccagagggtgaaagcggaacatcaaagacctgctggtttgctacacccgcttaagatacctgagtggaaatgggaagagattggcatggacttcattgtgggtctaccccgcacatctactaggtatgactctatatgggtgattgtg

SEQ ID NO: 106225 - DNA, 421 bp, Zea Mays
tcgcgctctaaggtcgacgaggcacgggatgacctcaacccagcatcaagcacatcagcgcaaacctccatcacaccatcatccactggctccgataacaagtcctctggaaccatatcctcaagagtctgatcaaagttggccagggacagttcttgcagaccaatgagagcagacaaagcaagagagggaactccactactttcaccgctggcaatgaactgccgactgtttttccgagtcaaaggaacttcatcttcctcctcctcgtcgtccacattggcaacacaagcagcaccccccattgggatcagcaacagatggagcacccacattgggatcagcagcggattgggtacacccattggggtcagcatcaacaaattcagtcacaggcatttcttcagcagcaggaaccgaa

SEQ ID NO: 106226 - DNA, 470 bp, Zea Mays
gacattagggaggctagaacaccacacagaagggtatgaactaacccgtagacgtctggccacgacgagctctctcacggcggcgttctgaccgatttgggggaaatgagaaattgaggggttttggttgatgatccgaggcaagggctggtgcgttggatgcgtaaatacctagtggaactcatgggggcagcaatttatagagttctactgcgatggcgtccaatttgaaggaagggtggtggcgtccggaaagaggggaagtcactggcgcaagtgctattgtggcttttaccgaggcaatgtcttaggtgatgaacaagctatctagagcggtctattgcgatgtggtaaggctttgaggcacgtagcgtggtcggataacggcgaactctggtgatgccaacgcgattgaccacggtgggacacgacggtcggtccggccagtgaccggattcaccccgcactgg

SEQ ID NO: 106227 - DNA, 495 bp, Zea Mays
gagacttcgtctacctcaaggtctccccgatgcgtggtgtcagaaggttccaagtgaaaggaaagctagcaccgcgattcgtcggcccctatcccatcattggcagagtgggacccgcagcgtaccgtcttgaattactaaaatccatgtctgacatccacaatgtgtttcacgtgtcccagctccgcaaatgcctgcaagcactataaagtcacatcgaagaagaggcaatacagattcagaaagatcttcagtaccatgagaagctaataaagattcttgactcagcaatccggaagacccgtaactcagaagtgagactctgtaaggttcagtggagcagagaaggagaagaggaagctacctgggagagtgagaactctttgaggagggaatacccttatcttttctcaaatccagtctaaatctcgagggagagattcctttaagtggggtaggtttgtaacatcccaaaatctcaacccaaggtttgga

SEQ ID NO: 106228 - DNA, 587 bp, Zea Mays
ttcatacggccctattcacaactgtgttagggcatcagcgtgcgggagcaccaactccggtaatggccaccaccgtgggaaccctgttcacaccgcagggcctaactgataggggtaggagacgagatggtatgcggtggttgcatctagtccactaatcatgagatgtgtgtcgagagttagatatcaaggtagttaaatctcggtcatcggtcgggcgatcgacggtggcgattagatgggcgataacgattcgactattacgatcgtgggccattgatcgggcgatggtcggttctaggtgcgttcgagtttggttgatatctcgccattgatattctatctggcggattgggtcgcgccccggtgtattatggatttgcgtataatctgggccgccagtgtccgatcggacggtgggcatatcacaataccccttcgactcgtctgttttgcaaaagaacctttcgggatttcagaaaataacccgtcgtccggggctgtgggaagagtcttgcagtttagtcctgaattttataagaaacaccctatgttctctggtattaatgcccacaatccaatgataa

SEQ ID NO: 106229 - DNA, 490 bp, Zea Mays
tattgtttatgtctttacttgttcttattatttacaattgttgcttcaggaatttgcaatgtgcttccccttctgcccacgtgctcgctccaccgaatatgctactacgaatcaggcatgtcgcaggttctgcatgctccatgttatttcctatgccttggttaattgttatggattacttgttatgtttgcacgtgcttcatacatccatactttgatttatcctgtatgcttcttctttttggccatcttggctttacctccctacttgctgttacctctggtggtattcagaactgattccaatgtgatacctattctcttgtcgcatacctagacactccatttgcgattctataaactgctgaccaatggaccatggaccatgtcagagtactggtcgctctcctggaaatgagaggaagatgagacctaccacctctggtttattcctttggtcacattttcttttctatttaatgacttgcgc

SEQ ID NO: 106230 - DNA, 309 bp, Zea Mays
cttcttttctggatggggacactaactttactatcctcctgtcacaactgatagttgcttggttcctgtgcagtcaattcatccctaggatgacatctaacccttgagtacccattactactaggttagcagggaaatctatccccctcatttcaatccttagatttgagcacatcttatcggactgaactttccccccgactgaattaactcttagaggtggaatcattggctctacggagatgttatgtgcttctacccatgatgtagaaacaaaataatacgtggcgtcagtatcaaatagtactt

SEQ ID NO: 106231 - DNA, 414 bp, Zea Mays
gtaccatgatctcagatctctttattggtggaccagaatgaagcgggaaattgccaagtacatatccgagtgtgacacttgccagaggattaaggctagtcatctgaaggcagcaggccctctgcaaccccttcccataccatcttggaaatgggaggacatttgcatggatttcataatgggattacccaatacctccaggcaccatgattctatttgggtcattgtggaccggttgaccaagactgctcatttcttgccagtgcacaccacccaccgggcggagaagtatgcagagatctacattgaccagatagttcgtctgcatgggataccaaggactatagtctccgaccgaggagcaccttttgtggcacgattttgggagcaattgcaagagtcacttgggaccca

SEQ ID NO: 106232 - DNA, 501 bp, Zea Mays
ttcagcatgagaccgaaaatgtccttccacgtgagcgaggaagatgcaccgacgaactgtgagttgtcctagctcattgtgccttgcaattcccccccaacgattatgtcacagctgaacttgacattaacaaacccctactgctagaataatatgctacccccttggtctgatcatcccatacttctctacctctttggcagatgcaggatgatccaaacactggagcaaattctcgctgtgtccctttctgatgagcaaccaaagctgacaccatgggtaccttgctctcatctctccactttttatttcgtaatttgctgtcactagtggacttcacacttttttccccctcgctgcagccattggcgcattcacttgaagacctcgaaatggtcagccagcaggtctccgcttccgttagtgaggtgacactagctcgagacgaaaaggccgaggtactctttaacatttggccatttggcgtttgcacaatcttgg

SEQ ID NO: 106233 - DNA, 430 bp, Zea Mays
gtcttatactagaaagctgcaagacacgtcaatctactttgtagacattcacagagaatgaggatctccattcataaggaatgcaggaattttaactgagcttgcagagcttgatggtttagctgtgcatggtggttatgacaaaggatcctccaaaagctaataaataaaaaggtatgtcaagattgtcatttagatttcatttttttgaggtatgggaggacggttgattatgcacctcattttcataaccgtaatatggtagaataagtctcgtgtctatcttagattttagcttatagtcaaacggtagttgatgcatatgacaacactagtgcgtcaccctgctcccccatatttaaatgttaacaaaagctaaaattatgtgtaaatgggaattcaagccgtggttgttggttccaaaatcttg

SEQ ID NO: 106234 - DNA, 386 bp, Zea Mays
aacaaacaaatcagcagtgcccgatgtcgacgaaccaactttcaaagatctcatcgacggagaccacgtcctcgccctacaggccctcgacaaatatcaggttcaaaccaaggcttggcgtcacaacgcagtcgtcctaagagaattcaacgaaggggacctcgtactcgtccggaccacccggacataatcacggggcaaccttaagccgaaatgggaaggtccattcatcaccaagtcgaaggcatcccccagtgcctacaggttggcaacgtcatctgccgaagacttagaacattcctggaacatcgataatctcaggaaatttttcgtttaagtctcagggcctacgcgcctttgtaattctgcaaacattgttgtttcgg

SEQ ID NO: 106235 - DNA, 701 bp, Zea Mays
tgcgcttggaggttgaaccaaaacaaaacaactttagtactctgcgtcaacaattaaattgttgtagtgtgaaaagatgtgttcatgtgtcagctagcactagagtcatagttacagccatactagaatctgttgctctttctcttctcaaggtccccagcatgatcactatctgaaaaacccagaagatcattttcagctcccttgacatacttacagccatactagaatgtgccagctacaaatctgataattcgtttgatagcactgcaatgttctgcatttggattctcagttttaggcgtggtgatcgcgttctggcgccgtgccacctgttcatctgtttgttgtgagtgtttccgagctcgtctgatcgctgtgagtgttcctagtttgggtgctggatactggagcgagcaacaacatgaccggaactagatcgctgctaacacaccttgatcagggagttcggggttcagtcagttttggtgatggctctcgggtgaaaatccaaggtatgggttctgtagtaagtttggcagctgctaacatagtaagtttgggacaattagaggaaaaaggttttacttatgaaagggggcaatgggagactgtgtgtgtatgatcaagaacacaaactgcttatttctgctcctagaacagcgaataggttgtatattgcaaaatttggtatgtcttca

SEQ ID NO: 106236 - DNA, 586 bp, Zea Mays
acttggtgtagttattaataaagtcagtcatttagttgggtaatccatttatttccactttcctctttatctgagaagctgtcagtgaagatggtcatttgttcagtactatggagatttctgtataccttttcttatgctgaaagactacagagtcagatctgatgtgtgtgtgctttctacagatgtctgagaacaggcatagaggtgcaaggcatgctcagccgaaacagcaggcaccccaggaagatgcaactcagcagcagcagttgccatcgccacccccgatgacagttgagtagatgttcatgatgcaaactcaggcagttcaagaaattggtcagaccctagcagcaatgtagcaggtgcagtagcagccacccccgcctcagcccatagtgcaagttcagatgccacacgtgcccagagacaagcaggcagaattcatgatgggccatccccctgtcgttgcccactctgttgatcccatggacattgaagattggttgcgtaccgtggaacgtgagttgcacactgctcagtgcaacgatcatgagaaggtgttgtacggtccccgacagctaag

SEQ ID NO: 106237 - DNA, 547 bp, Zea Mays
gtggattcttcgagccaaagatctgctgaacatcattctggacgaggtagtaggtagccggatactgccaggtttcagtagctacgcctaggggactcatggtttggttctgaatccggattgaactaatgtcaggaccagttcaggaatagggatctcgcgctgcttgtgtttgcaaacaagcaggaccggccgaacgtcatgagcgcagcagagatagcggacgagtttgggcttccgtcacggctttgcaaccgtagatggtctgtaccttccccaggtccctttccctcaactctcctttcagtaaaaatcgatcatccagattgcttccgcaggcacattcaaagtagttctgcgatctctggagaaggcctccacgaggggatggcttggctctgcaccaacattcgataggaccaagatcctcctccttcacaaaagactacagtacaaaaggggggcatgctgtttatgtttttgcaggcctaaggaattgtaccagcagatgagatacatgattatgattgctggacaaggatagttt

SEQ ID NO: 106238 - DNA, 366 bp, Zea Mays
cacagccttgtcgtgatagcgccttagagtctgctggtaccgtgctgattggatcactgcatttagccattcttcctcgagtacatcaatatcctctaacctggtggcctcagcttctgctatgctttcgaagaccaaccttggcgccccaaacttgagatcagcaggtagcacggcctccgacccatagaccatgaagaaaggagtgtttccacgcagggctcggctaggttgggctcttaggctccaaacaacataaggcaattcccttatccattttcctgcgaatttttcattcttatcgaagacccttttcctgagtgcttccaatatcattccgttggctcgctcaacctgcccgttggc

SEQ ID NO: 106239 - DNA, 439 bp, Zea Mays
attacatactagatgaacacatctgttgtttggttgcctgctttctggtttgtagctgtaccagttcgcatgcgctcacaccccccacgagccaggtttggaggaaacataatcaatcgtttccccacagccagactcagcagggcttgctgcatgccgggccgtgacatgtgttgtgcagcgaaccaatcgctatggagctgcatctcactggcctgtgctgggtggaaatggccaatcaatcacgaccactatggatccttgcttagacatagcatataagaccatgtctcacatacacgctatgaatcatgcttgcgtagacacagcatataagaccatagctggtgcagtagtttttaaggcatccataccatagaattgtgcctatatctatgagaaataggtcatgacttgtgaagtgtagtctctgtgtctc

SEQ ID NO: 106240 - DNA, 1727 bp, Zea Mays
atcataatcatcctatcagtcttgagttcgatctctttacatgtaaacaagaggcatcctcacaagcgtgtcaaaactgtttgtcaggtatgagttccacttttctccagactagttgatcaatctgatgcccctcctgaaaagctatcaccatgcctaggctaatgaaatatgttaggctgtacacaatggtttgaagaaacaacagctcctactttcagttatcatccagtataatcagtgaaggtaactaaaacaaggagtttgcatcatcatcaccaataatccctgcacgagcaaactccattcctgaagtggtgaaatctgttcacgtccctcacaacaatctcccgatctgtgaatttggagatgaacttggtgactgaatgacagtcctcacaaagcctgagattctttgtgatcctgatagcctctccactgccagtcttgataagcccgaaagcaacagccaacttctcactgtggccaagcaaaatcctctccttctcctcttcttcaatatcatacagaactgatctcgtgtcaggaacatagccctcatttttcatctgtgtcacaaattcaccaatcaatgcttgcagctcctccacctgtgggttcttgttgtcaactgaaacaaatgagtacagcttcttcttcacctctatccagctacagccaggcaccttctccagtgcatgctcctcaagtaactcctttagtacatcaacttggttctgcaatttagctcgggcataaatatctgccaagaggacatagtttccagcatttcggggctcaagatcaaagagatgagagcatgccatctcagcatactcaacatggccatgaattctgcaagcgccaagaagcgagccccaaacttgagggcttggttgaatacgcatgctctgtatcagctccacagcttcatccaggcgcccagcacgaccaagaaggtcaaccatgcaagcatagtgctcagcacgaggtgtgacattgtactccaccattgattcaaatagcttctttccctgctccacaagtccaacatgactacaagccccaaggacgctgacaaatgtgatgatatttggtgaaatgccttcctcaatcatctcctcaaacacctggagtgactcacgaccaaagccatgcattccatatccagatataagtgaattccacgacacgacattccttctgcgtcctatccagttgaagatgtagcgcccggtctcaaggcacccacatttcatgtacattgccatcaacgcattcagcactgaaacaagtaagtcaaaacccctccgaaggatatatgcatgcagtactttgccctgaccaagtgcatttaccccagcacaggcatgcaagacgctgacaattgtgatcgagtttggtaccaggtctgcatcagaggccatcatctcctgaaagatctgaattgcatcaccaggacgctcgttcttggcatagcacccaatcatagcactccatgacacaagattcctatcaggcattgaagtgaacacacgctcagcatagctgacaatcccaagcttcgcgtagcagtcaataagagttgtggcaacatgcgtgtgtaatccatagccgcggcggatggcatgagcatgcatctcccgtacacgggcagaggccggcaggtgcgacgctgacgctgcaatgcaggccttaagaccgtgcgcgtagctgtagctgtcgac

SEQ ID NO: 106241 - DNA, 307 bp, Zea Mays
aattaagttaagtgcattaaggatgaaacatagcaactcttgatgaaggagaatgtgattcgacgtagatggcgggagtattttgaaaaaaatgttcagtgggaagaatgaggacacaacctttcagttggatgactcttttgatggcaccagtaggcgctttgtgtataggatccaagaatctaaggttagatggacattgaaaaggataaaagggggtaagacgatgggccgtgatggtatcccaattgaggcatggagatgccttagggacatagctatggcatggctaactaagttgttcaac

SEQ ID NO: 106242 - DNA, 412 bp, Zea Mays
gaacaccgttttcacgtcctactgtgcaattccgacgtggatgagtgctaacagaactatgggatccgcgcgaactgattaaggaagggcttaccggtattggaatggctcgaggtgttggccacgatgtcacgcggggttgcggcggagtagaggctccggcgagcaattgcttaaatcgtggtactcttctgctccaattgccgccaccccagcttccgctgcgccttggcgactgcttgagtaccgcgttgaggtgaaaagatggtggcgacagtggttctcccaattctatgggctttcggcggcggatctggttcctatggtatgtgcggctggcgagattcgctagttgctcaccggttttatgtatgggacgggaggagtccgagctgggtcgattgaagacccg

SEQ ID NO: 106243 - DNA, 507 bp, Zea Mays
tagaatttgtaatcacccaatagggcagtatttagggttttagggttccaaattaggtttagagggttctagggtacatgtggcacttaagatttctaagcttaacgtttcttaaacatttctaccaacttgttgggatcataccttagtgcgcatctcacaaggccatatgtttctaatccttaaggagagatactctaacctagggtcaagaattcctttcaccaagtcacagcatcacacatgtttgttttgaaattttagcctcatggatgcatactaggtgtatcacacataatgtaatgccaatgcatatgatgtcataccaaagttttagttctggtaacaccaggggtgttacagaggtgaaagccggattatgttccattatctaaaaaatattgataacacacgtgaaaataatttaattgctcgtcatgacaagaacatggatatgtcacactgaaaccctatctgaacacacaaaaacaaggttttcagtcacag

SEQ ID NO: 106244 - DNA, 297 bp, Zea Mays
cctaagggtgaaagagctccaaagtcgatctgaagccattcctaagggaatgagcaagttggttttatgtcaaaactataggctatgaagggtgttcctttgtaatgtgtgaaaagaatggaaggtgtttttcgcctttgactaaaaaatgcacaggatgtaagtttcacacatcataaaggaaagggaaaatcaacgaaagcgaaggtatgttacattacatgaaattgacaaagtgagcttcgaatgtccattctctgtgccacagatgttataataaggctacatcaaatattt

SEQ ID NO: 106245 - DNA, 330 bp, Zea Mays
aggccctgtgggccagtacttaggcttttgaaggatgccctaggagcacccttttattctgagaggagacattactttcagcatgcatgcattataaaatttgaaggattaagaattaaagaagtaaaagcttgagctatcccacttccttttaacccatccaggctcttttatttttttccttccaccataatctttaccatctgatccccttctgcagatgaattcacccacccccgccagtggaggagacactcgtttcagctctgacttcctttctcacgatggctttccttccatcttgtgggaagtgcttaactccgccggtta

SEQ ID NO: 106246 - DNA, 471 bp, Zea Mays
ttgcaacaggaagaactagcaccaatttgagaagcttgtaaacaatgtcataccgaagaatcttatctgttttgacaagcatcatagataactctgctaggcttctcaaatttttgatgttttcatctcttctcacatcttcgatatagcgatttaattgaaaagggagttgtaccttctcttcaaactcaaaatcttgaggataaaacccagcaagcttaaccaatttctcagtattgaatccatcaaagttcttggatggattaaatgatgccatacatctaagtaactctgtgtttacctcatcaaacctattattaagctcaacaagttgcctatcaatgacacctaagaacatatcagcatgaaaccgatggtaattgatagcatttctatagaacttcttgtctctctgaataggcttatactttgcatccatgtcaacgattttaactttgtgcttctcagaaa

SEQ ID NO: 106247 - DNA, 610 bp, Zea Mays
gaattccctctacagacttggtgaaccgacttgagatgatccttagaggcaaggtgtcaaatgttggtgccccagtgtcatactcggcctggaacctgcctcctcccaaagccttcaccctttttgtgtcgaatccacctgtcactgatggcagtttgggccttagagtgcgaccctctgctgaagaagttagtgccttggttgcctcgctcacggagattcctgatgatgaacggcaggtccattttgaggtgcccctgaatcctagcaatgcgaagataagtgctatgcttgatttgctggctgaggattcttctgatgttgctcctgctaggacatcggtggtggcgcccctcccagaggctggtacgaccttagatactcaaaagcctgccagtactcgcccgaggcgcccttgccgagccagtcaacctgatccttctgctgatgagcagaaaaagaaaaagagacgcctccggcgagtatccagtttggatcgggacgttggtacctcggctcctgctgttgaagaagtgcctgtgactgaatttactgatgctgaccccaatgggtgtacccaatccgctgctgatcccaatgtgggtgctcc

SEQ ID NO: 106248 - DNA, 386 bp, Zea Mays
cgccaccatccttaccgtggcaaatcttctgactcaggtacttcgggaggaagtactcagaggtttcgggccgttcctaagcccgggctggggctggtgtgtttccgctgtggagatgcgcatcgccgtgcagagtgccagtggagtggcaggtgttctatctgcagtcaggaccacaaagatgtggtgtgtaggaggaatcccaatgggaagctcagatgggagccagtaacttcctcctcttctcagggcactatcaatatgatgtcgagtgctgagtagcagttttcagttcctcttcctccacagcagctttttgtgcctgggacttctcagttcgtgccgatgcaaggttttcctcagtatcaggctgtgcctactcctgc

SEQ ID NO: 106249 - DNA, 607 bp, Zea Mays
tattggtggatgcacacgtatggtgatgcgtggagcaagttggactatataccggtccaccaatactcccatgttcgctttggattggccgtggaatccgagttgaaaaatagcataagcacatgagcataaaaaaaatcgcaaatcaacttgggtgcttatttcagaaaactatatcctgcattagtgacacgaatatttcgttacgggcgacagaactgatgactcacgatccctggctgatacctgatgtagacgtccactccagtccttgacgaaaaaccacatgctttgcccacgggtatgcatgcttgatccatccagtccagccacgcacccacaactgaactcgcttttcggacattcattgcaacctcacaaacgtcccatttgtgataagcccacagatgtcaacaataccagaaacacatgtcatggtgcagctggtcgccccccaataatcccaacccctggacctataaatacacatatgtatgtcgacggagcaacatacccagcctgtttcagatccaacaatggcgtccatgggtttcagctatgcgcagatccacgtgcagcaggagagatgcaggatgaaggctcaaga

SEQ ID NO: 106250 - DNA, 972 bp, Zea Mays
tgagaccactcctaatactagtgggagaaaggcaagttttagatcacttttatttagtatgctcgaattgtgtttcttcttttactcatgaagtgactcctgctgctgtcacaaataaagttaggataaacacactgctgtttttttttttgcttacatccaaaacatatatttgatattcttctatgtagatggatacagcagatatttactgtaaccataaacaaacaaaaaaagtagcatcaagtgaattggcactgaagcaatattcaattctacaacaacagtcaaagaatgttgaggtaacttctctatttttcactctattccttaacatctcaataacggttacataaacgtttatggttcttgttgtctctaggaacttaagagtgatttaataaatacaagggatggtatggagtatatgcaaatgaagtacgctgaggatctcaaccttcttggtaatatgtaatgtgcttcagaagttttggtgatttatgaactactttaacacataaaacaataatgaaagtacacatttgcaatttttgtttcaggaaggcacctgtttagcttggctcatgctgcttctggttatcacaaagttcttgaagaaaatagaaaactatacaaccaggtgcaggatcttaaaggtgcgtttgttacattgaaccttcatgtatggagatcccagcctgtataggcaaagggttggtgtttaaaaaaacaagaaatgtggtcttaatattttatttttcttatctatataggaagtattagggtatattgtagggtgcgtccctttttgccgggacaagcaagtccgtccactgtggcttccattgacgagggcaacataacccttgtcatcccttccaagtctggaaaggaagtacggaaaacttttagcttcaataaggtttttggctcatcagcgacacaaggtactgtgccctgtcactactggct

SEQ ID NO: 106251 - DNA, 322 bp, Zea Mays
attttatcagagatgaaatccgtaagagatccattgatgcataattaaccctttcagtaatgcatcatataacggaatctaggtacggtgttaaatggataagggtcaggtcagcatcccttaatgacatgtgacgtcacaacctcgctatggtgtcaagtgagcgaggatcagatcactagttccttagtaccgcatcgcatcgatacccggatacagtggaaaatatgcaaggggcttcacatcactaccagatgtgaagggtatggaagctactcgaaccaactaggatccatttagatagttggaatgtagggccgct

SEQ ID NO: 106252 - DNA, 361 bp, Zea Mays
cctcacttcatccagcttatatggctctacaatacccattgctttttccatttggtgaacgtggctttcaagttggaatcctatacaatgacctaagtccagctcaaaacaatgcaagaagacatatgaccattcaggaatactattgctaccaatttcattacaggaaaaatcaaccaaatccatatttgtgttacggtttattatcaagtcaggctaaagtggatgccagagcatgcattgatgaaaatagattgaactatattattgccaatcaaaaaaacttgaggattgaaagcatacaaggtattacagatgcagttagccgtggttgtattagtggcgacgaaattgggaaaac

SEQ ID NO: 106253 - DNA, 273 bp, Zea Mays
gagaaatgtcattggatgcaaatgggtttacaaagtgaaacgcaaggctgatggcaccatagacagatacaaagctcggctggttgctaagggttttaaacaacgctatggcattgattatgaagacacgttcagcccagttgtgaaagctgctactatacggctgatcttgtctgttgcagtgtcaagaaattggtcccttcggcaacttgatgtccagaatgcttttctccatgggtatctagaagaagaagtatacatgcaacaacctcc

SEQ ID NO: 106254 - DNA, 316 bp, Zea Mays
attgcccatcaagatggcgctactgtcggtagcctgataagaagaaaataagtttagatcagaacaaacatgtacattggctccagtgtctaaccaccaatcggtgtattgacatgctaaaacaatttgagggacatacccagaattcccagcatcagcaatagccacatttgcagttttctgaccatcacctttcttgcccttcctattacgacattttctggctatgtgactagattcaccgcacataaagcaagtcaggtctgcaaggtttttcttcttcttcttaaaatcagtgttctgcttggcctttggt

SEQ ID NO: 106255 - DNA, 344 bp, Zea Mays
cccgttgtatgccctgcgtcaccttccatcatacgtggtacatacgctcgttatggtgtgttgtcccgtcttttccaatatgtgggccactgttgagacccctgtgctgaggtctcccatgactgaggctgaccgaccttacggggcaatcgggggcatgtttgaactgtttgcaggggcgtacaagtgtgatgatgatgaacccttggcgctcgtcctgtacagtgtgcgcatgtccgggcgtggctaggtgatggcgtgtcttgtcgcatctggtgtgggctcgtaccactaggttcggattttcgcctcgcgggtttgttcagtggagacttggttggccg

SEQ ID NO: 106256 - DNA, 295 bp, Zea Mays
gtttttaaacatcctcacttcaagaaacgcattaaatattccgacacaaatattattgtttcccggttctagaaaccacgacacatacttttctaaattgtaatctgttccatgcgggccgatagcaacaggcgtatgtagcccatggaccaggccacggcatgggcccttcaattactcctttctatatgggcctggacaaaggaaacagttgccgacccatctgatatcctctgggcctgccactggttgctggtgctagcccacctccgacaatgttcggagtggattgaag

SEQ ID NO: 106257 - DNA, 505 bp, Zea Mays
gacaaactgaacaactactaatggagccattagcagatctaaccaaaattgggtgacccaacctctgcaccgaaagaccagcccgcgacacaaaatcctccgaaacaaacgaatagctagcgccagagtcaaaaagagcatgggctgcaaacgaatcaactgaaatcgtacctgtcaccacgtctccttgctccctgccatccgtagcgggtagcacataagctccagaaatacccgcagaagaggaagcccccggagtgaaattaacagaagaaccccactgagccactggatgaggcaggcgtggagctccaaactgagacgacataggagtagacggtgcaggagtaggggcgacctgatactgaggaaaaccctgcatcgacacaaactgagaagtcccaggcacatagagctgttgcggaggaagaggaactgaaaactgctgctcagcacttgacatcatgttgatggtgccctgagaagaggaggaagtcaccggctc

SEQ ID NO: 106258 - DNA, 392 bp, Zea Mays
gaggtgcggggaggtgggtctcactcccttctccaccggcttctccttcagctcctaggggaaaccttgctccaatcccagaggcggtaggcgtggttttatctgaagccatctaccagggggagagaattactactatgcacatgccaatttttttcttcaaccatgttattttattcatcacacaagtttattacaagcatacagttaccacaagtcacactacacgcgagtgctctctaaggtgtttccgaactccctttctaaagtgtccccaaattccttgagaaggtcgtcaaggctagctagggacatatcctcaacgtctgacaagttttctatcctggagggagacagtgctggtggggcttcctttttctgctcagtctagc

SEQ ID NO: 106259 - DNA, 830 bp, Zea Mays
ctggccccggggccttattgtgttccatctggaaaattgcttctctaatgtcgttttcagtaaacactgtcgttagaaatgaattctcatccagagaaacttgcgggatatcatccattacagacgagtcaaaagacgccccagatgcttcaggtggaccaaaaagacctttatagtaggaagtgatatgctctttcaaaagtgcatcaccttgtataacctggtccccatttttaagatgataaattctcgactttctatgtttaccacttgccactaagtgaaaatattttgtattagcatcaccttgtaacaaacccttagtcttggctctttgataccattttacctcctcttctcttagtaattcagcaagtctactttgcaagtattgttttaagtcaagctcttgtgctgacaaaacagatacttctgcttttttatccaacacatccaaactgttcaaaattcctttcttttcttttttgtatgccccacttacattttttgtccaccctcttaagtgctgcctaagcttcctaattttagcttgccaattctccataggtgactgacccctagactcgtatgaccaaacttctctaaccatatcgtagaacccgtccctcagaagccaaccaagctcgaacttaaaagaatgttgggaggaactagagttttgttccccagaattcagtaatagaggagtatggtcggaaatgtcacagcttagggccctcacagaagacaaaggatatttttgatcccactctgtggttaccaggattctatccaacttttcatacgtaggtctttcgaggttatttgcc

SEQ ID NO: 106260 - DNA, 296 bp, Zea Mays
ccggatcttaactctcatcatcactatcaaccatttcatagtcaacaccatctgaaggcgcaagttcgtcattaatgtaattgccttcaaggattactaagtcattctcattttgcacctcatcctcctcctcatcaacaaccatttcaatatctacgtccattccgatagcttcggttaagtctatctcaaatcgcccttctagcccatcttcttggaagaactctccatcatatgtgtccgggtctaagttataatcttcatcgttaggaacaggtaatctaccgtgtggtgat

SEQ ID NO: 106261 - DNA, 361 bp, Zea Mays
cacaattctagtaccatggtttgtagtctatagcacacgacaaaaaagactacactaacaaaagctatgctatagagctaccgaggaaagcaattaaaactagccactattactaaaaccacacttaagctactctgttagcaagcagacaactactactcacaagtaatgtatgaaagtaataccaagtgagagtagtgatcaaaccaatgaggcaagagatgacacaagacttatccatgaggtcaatttgcttgtcgacaatctatgtcctcgttgtggtaagtccccacttgatagttcacgagctaactagtatgacaaggtagacccaccgagagttccataagaatcactcaaa

SEQ ID NO: 106262 - DNA, 295 bp, Zea Mays
gaaacatagaaaatcaagttccttagtggcatcagacatgtccagtgaggcactagataaaacaccggttaagagttgtgttgatatgtaccgagttatattcggtactggggtggcccgatcttcacgacagtaggttgataaataggatggttggatataaaagtaactgaataacaaggtaaaattgttgaagaacagcaggtaactgagtttatacctgatcaaggtcggaggtgaccaagcgacggggaaagagacaccgaaaccgtgtagactacgactcggtctccga

SEQ ID NO: 106263 - DNA, 589 bp, Zea Mays
aaaggagcaactctcagaccaaccagaggtctggtgggaattcacagaatcgtcaaggtggcgtcgtgaacacgcaggccagaagcaacaatgcaccagtccaacccaatggctgtttcaagtgcggtgagctgggccactatgctaacaactgcccaaggcgcaaccagtagacacctcagaaaagcaataaccagagaaatgaccagaacacccccgctcgtggatctgctcagaacaagactccgtagaacgaacgtagaggaagggtcaatcatgtcatcgcagaatcagtacctgaggatgccgacatagtgtatggtatgttccttgttaactccatacatgcatcaattttatttgactctggagcatcacattcatttataactgagtcatttgtggaaaagcacaacatacctaagtacccccttaagaagatgttacacattagttcaccgagaggtgacatgaaggccacacactcatgcccccatgttaatctcaagattcaaggaatagatttttcagtcaacccagtggtcctaggatccaacggtattgatgtgattcttggatgcaactggtt

SEQ ID NO: 106264 - DNA, 608 bp, Zea Mays
cctcaccccatccaactcaccttgattttttattggagttagactctctgttcccaccattggggccccaccctttgcatgtacatctccatcggcacccctgatgcctgcaccactggtaccacttgggttttagcctcatgtggcctcagctctcgcgttgcgtgctcccctggtcctgcttggcttccaaacccgagtggccacgatgccttgctcctctgtgccacgcgtggccacgatactacccctctctgacatcgctctctcctatgccacacacgtcttggagatcatcatctacacgcaccacctactcccgactctagtagccacctcactccctctcggcgtcgagcccgtcaccccgcttgtcaatcaccactctatggtcatgcgggccaagcatgacttccaatagcccgtggaccagttgatcctcactgcccttgtctcctgtcctgacatgcgtccacaacacccttgtcgatcctcattggcgccatgctatggcagaagagtacgaggcgctgatgacaaacgacacctaggacttgatgcctcacccacttggttccaatgtcatcaccacaaagtggatctccaag

SEQ ID NO: 106265 - DNA, 480 bp, Zea Mays
gtaaaacttcctgagatgttctatgttccatgagttcctgatttccgtgccgtccatttgagtgagacgatatgatccaggccaagtgacttctgctactatgaatggtccttcccatagtggtgacagtttgtgtcgtccctcccccgttagaattcggcggaggacgaggtctcccactacgaaggatcgatgtcgtacggccctgtcatgatagcgtctcagagtttgctaatactgggccgactgaatcactgtattcaatcgttcttcttctagtacatcgacatcttccagcctagtagcctcagcttctgctatgttttcaaagattaaccttggtgccccaaacttgagatcagcaggtagcactgcttccaaaccatagaccataaagaaaggtgtgtttccatgcaaagctcgactaggttgagttctcaggctccaaacaacatatggcagctctctgatccactttcc

SEQ ID NO: 106266 - DNA, 805 bp, Zea Mays
tgcataaaacagtcaccgcaacaggcagcctagactgcctctgcgtgcgacacgtccgagcaaaatccgcctaagggtgcagccgaacaaaagcacaataagtgcgcgacaccacccatagggtgcgaagtcttcaacgaagacacgtccgagcaaaagtcgtctaagggtgcagccggacaaaagcacaataagtgtgcgacaccacccatagggtgcgaagtcttcaacgaagacacgtccgagcaaaagtcgcctaagggtgcaaccagacaaaagcacaacaagtgcgcgacaccacacacagggtgcaaagtcttctacaaagacagcttcccagtagaagtcgtccaagggtgcagccggaaaaaccaaagaacacaacactcgcggtacgcgttctccactacataaacaacctaccgagaagatgtcgcctagggccgcaactggataagtgaaaaagactatgcagtcacctgtcaaaagcggagtcccctacggcacgtacacgattacaaattgaagccaactcgcaataggcacaacataattacatagcgcaatcacaaataaacaacaagcgaaggccttaatggcaccatcacacaatagtgcacatcacactatttaccctcgtagctctattgcgaagagggggagggcagcgttttcactcaatatcgcaacagagcagcgagggcaacaaaaatgtcacataggctcctccttcggaataagacccgcctcccaaaaattgaacaacatcatcctcaactcttccccctcaaacaggtcctgcaag

SEQ ID NO: 106267 - DNA, 832 bp, Zea Mays
aattcttccgctccctatattcttcaacggaaatccaacctcgtatgcatattgactataaaaattatacgcctcgtccacgttactaaatgtcataccgactttaggtatcaatcttatatcaatattgtccggctgcgcacagaaatttaacatttactattcaatagcgtctaaatttaacatggtatatgtacaacattacaaagaagtatgtaagagaataagagtatcatattagggagaacttacatggctttgaagaatatgaggtgtgtcctgttcatgcggcctaatatgtctcatggggatgtgcttctccgcgccgaccacatctgccgtttttgtttgctcatcgatatgtccaggtgccctcaatgctgccgggggagtaacggagacaccctctgtgtatggggcgatcacagacactacaggatttatgtctattgaaacagacgtacctgctggcgtatttacagatgctacaggtggcatgtcatcgccagctccggtgctcgacattttctcgccgccggccgtacctctaacttccgccgccgctaaacgccgccaatacctgagataaagacgtggacgagcgaacgtggacgagctaaccttgtatttgtttcctcccataactgcgcctttatttacgcgcacgtctttccttatctcaaaccggtgggagatttttaaatgttgcatggttttacactatcatgtctcacagcgttatgcaatcgtaaaccgacatgcacatgcaaatattcgttccgtgattcgtggcagaaacttttccatttatgcatgagttatgcacatttcc

SEQ ID NO: 106268 - DNA, 947 bp, Zea Mays
atttactataaattagtatgtcatcaaaagagacaacaacaaattttccaatggaagttctaagaacatgattcattagtctcgtaaatgtactaggtgcatttgttaacccgaagggcatcaccaaccattcatacaacccaaattttgttttaaaggttgttttccattcatctccctttttcatacgaatctgatgatagccacttcttaagtcaattttagtgaaaataaaagcaccactaagttcatcaagcatatcatctaatctaggaattggaagtctataccttacggtgatgttattgatagctcgacaatccacacacattctccaagatccatctttcttaggaactagaaggacaaggacaacacaaggggaaagactttcttgtacgtaccatttttaatcagttcttccacttgttgttgactctcctttgtttcttctgggttggtgtggtaggcaacatgatttgggagggaagcgccagacacaaggtctatttgatgttcaatccctctcttaggtggtagccctggtggtacttcatcaggaaacacatcctcatattcctataatgtatcaaagacaatacttagcaaagtagagggtaggtcgttagtagaaagaaggttgtccttgtacaggagcacaaagaacatggcattaggttcactcaattcttttagatccccttcctagtcatcacgactaatccctcttttttcctgtgtcttggttattggaggctgtggagttttatttggctttggaaacacttccttactatttttgtggatcactctcaagtgcttctcgctctctcgctgtttcttctttagatcatccttcataatttcctccggtatcaaaggaagcaaagagattcgcctctcccttgtacaagaaagacaactcgttggttcttccaaaaatctgg

SEQ ID NO: 106269 - DNA, 607 bp, Zea Mays
ctttagacgacatcaatatcctttcatatagcaggcgacaaaaaaactctaatggtgtcataggagctcacttgtgagtgttacaagtgtgtagtcctttaataataactatatttaaggtagaagttataaaagcccctattgtaggacatatgaggtatttaaagtttattgaagttactagggagttgatgctccattggagtgctttggccaccaaaagtgcttaaggaattattagatggatagcatagtactttatgaagtgtttagggtaattagaccaccacattagtgcattgctgtagacttaggttgagtgtttaataccttttgtcactcagtgcttgtgggcgttattgttgtacactagtggcttttagtctaataatatcaccactgtgtttatggagtggttgtcttgctcatactcgagaacaaggtccatagcatttgggacagaagcttgatagtgatattactcacttgcatgtgggcaatgatccacatgctccacgaagatatctgatcaaaatcttgacccttacgacaacatccttgcaaggggtcctaatgatgactaacagaaaatgcgagattttaaata

SEQ ID NO: 106270 - DNA, 645 bp, Zea Mays
acggaccacaaggggtagccgagaaagagctgttcctggaggaggtcgccgcggcgcgtgacgcctgcgaagggccttgggtcgtcatgggtgacttcaatctcattcttgacgagactgacaagagcaacggcagggttaaccgacggctcatgcaggagtttcggcattgcgtcagtgatttggagctccaggacttgcatttgcacggaaggttgttcacttggagcaacgagagggagtctcccacgctgattcgcctggatagggcattggtttcgctcgattgggatgagcgctttccagattccttcctccaagcactctcctcagatacctcggatcactgcccgcttctgctccacacaaacagagatgttggtcgcgggggcaaaccgcggttctacttcgagagcttttggcccaaactcgacggctttgaggacgcgcttcggcgcgggtggcaatgcaacgaccccgtcgccgatccgtacaaccggcttgatcagctcttccgcaatctagttcgagctctacatagttggtcggccaagaatgttggtactgttagagatcagctgctaatggcccgggaggtgatattgagactcgaacgggcacaagactcgcggctgctctccccgg

SEQ ID NO: 106271 - DNA, 571 bp, Zea Mays
ggaagttgtctttgtcctagctgtcgaaaccgagacaaatcttgtgtcaagtcgtgtcaaactacttagggttgggttcaaacttttccagggtgttctagaggtattttggcgccactttgtcaattgggccaagtggttttaagtttgggatcaaggtgaacatgtttgatctttggaaagggggtggttttggacttagaagaattctgatttttctcttatgctcaacccttttgtgaatcttttggggtttttctgaaatctttttggggttactttcttactattatttgtagggtattaagtgcactacatcttgtataattggctcaagacatgatcaagtggttttcataactttttggtcatagttacctatagtactccaattgtccacagggggtgcattagggttttgggcaatttctccccctttaatgtacatggtaagccaaggcatgacatctaagataggttgcacttacttaggatcttgagctcaaattttgttgtactttttcccaacttaagtcacatgtgatgatgggcttacttgtatagccttgag

SEQ ID NO: 106272 - DNA, 368 bp, Zea Mays
gtatatgttcattactgagttcatgttttagtgccctctgtaattgacaaatcgaattgcaattggagttagacatgtgtaactgaaatgtgcaaactgccacaataaagttgtgacatccagctgacggaaagtttgtcttttcgtgcatatactctcagtaatcatcactaaatttatcagggctcaggagttggtgttctcttgtaagctgccaatttatttgtttcttatgtcaacctatgaataaagctattggagagcatgatgatacaaaccagtcctccatgaagttccttagagaaggcagtgtgcagtcctcaccaaatggatttctatcaagtgatgttggtccaagaagcagacaa

SEQ ID NO: 106273 - DNA, 417 bp, Zea Mays
gtttcatatttataattaatttaaagtatcatatttaactatgattgaaagtgttgatttaatacatagacatcggtaggtaaatgttcatttttttgaagacatgttatatggtacaacaggtttactagagtgtaggcaatattattacgaggctatcgcaacttgaatggactaaatcagaattaaaacgtggaagatatgcattaaaaagttttaggatcattttatactagttttctagctccggggatcaatctgtaaaatccaggggcctataccgaattacttaacatggaaagggatggtgggttgataagtcaaaagggcgaaggttcttctgcaaaaccatcaagtcgaaagggtatgagcacatctcaaccgtcggatctatgcccgatggtccagattacttcg

SEQ ID NO: 106274 - DNA, 458 bp, Zea Mays
gtggtatgcattggtaagaaatgagcggtcttggtcaatctgtccacaataacccaaatggaatcatggtgcctggaggtattgggcaatcccacgataaagtccatgcaaatgtcctcccatttccacgatggtatgtgaaggggttgcaaagggcctgctgccttcaaatgactggctttgattctctggcaggtatcgcactcggatatgtacttggcaatttccctcttcatcctggtccaccagtataaggatctgagatcatggtacatcttgttgctaccagggtgcatggagaactttgaaaggtgagcttcatccaatatcttctttttgagctcggggtccttggggacaaccaatcgatctccaaaccatagaattcccttgctgtcctgacggaagcacttgtatttctctgccttctgcttgatcattcccttgataacctgaac

SEQ ID NO: 106275 - DNA, 551 bp, Zea Mays
ccgagtgtaatgtggctgagtctttaatatggctggaacagcgaaaagagttgcactaaaaaagaaacctactcggcagactctgcagtttgtgtcgtttcggctctaggtgacccgtcatatacaggtagcatggaatggaaataaacaagcagagaaaacaaaccattactttctttcctaacttggcataaactaacgtacatagctccactaaatagatacgataagttgtaccttgagaaagtatggtcgacgacggctgtgaggacggtgtagttggaagcatgttgccaccatccatttctgcgtttatagcattcacttggaaggaaacactgccataaataattgtgctttcggtgaagctaacattccactcgaaagacttttccagtagatctgtaatttctcttggaatgaaaccgggtggattagtcgagatgagggtgtccacattttttttaatgaggcgctgcgccattcgtccaaagaagataaactcggcagtgtcagtgtcatcttcagcggtgagggatatcttgtacctg

SEQ ID NO: 106276 - DNA, 298 bp, Zea Mays
ctttctcagcctttgtcaattcttatccaattaagttttgaaagttgaaattttcttcttctgaagtatcttcggctatttccttctctttcccaggcactgtggccatggtctcttcggcggctgtagcagcttcttctgtggccatgtccagaagtattttatcaatatcagaaagtgtactttctaagtttgcaccttcggcagttgcagcttcagcaggtgcagcttcggtagctgtagcgctcttgacagctggtgcctttgacgtcgaagctagcagtggtgtttcttcaat

SEQ ID NO: 106277 - DNA, 519 bp, Zea Mays
gagcatgtcgcaccgtcttaaggcgtttcgacttaaaccgattgttctgttagcagggtataatgatcaccctgagtcgtgtaggtgtgagcatgtcgcaccaacttaaggcatttccgacttaagccaattgcttcgttagcagggtatagtgatcacccagagccgtgcaagcgtgagcatgtcgcacctacttaaggcgcttccgacttaagccgattgctcctttagtagggtatagttatcaccctgagtcgtgtaagcgtgagcatgtcgcaccgacttaaggcatttccgacttaagccgattgttccgttagtagggtatagtgatcaccctgagtcgtgtaagcgtgagcatgtcgcaccgacttaaggcatttctgacttaagctgattgctccgttagtagggtatagtgatcaccctgagtcgtgtaagcgtgagcatgtcgcaccgacttaaggcgtttccgacttaagccgaatgctccgttagtagggtatagtgatcaccttg

SEQ ID NO: 106278 - DNA, 292 bp, Zea Mays
gccggatgtaacctttctctgacaactcatcaatctgcttcttaagctcaactaactctggtccgggtatcctgtaagctctcttaaagatgggagcgatgccaggaagaagctatatagcaaactcaacgttccgctctggtggcatacctggtaagtcctttggaaacacatctgggaattcggacacaaccttgatactctcaattgggtctgcttcactgctatcaacaaccatctgataacaacttcctttctttggctcaggcgggactaactcggtcaccacttc

SEQ ID NO: 106279 - DNA, 302 bp, Zea Mays
ctgttgtagtcgtagccagacccaatctcccacactgaattccacttctctgtgacgctgatcctggtaacttttcatagtgacttgagcttgcactagacgtgctttgatttcctcaagaaatgcatctctgtcctgcagctggacatcaatggctgctaccttggagttccctggctggtaggaaaccataggaggggggtccctgccatacactactttgaatggcgagcactttagagcagactgatatgatgaattatagcaatattcagcccatgggagccacttcaaccacgatt

SEQ ID NO: 106280 - DNA, 386 bp, Zea Mays
gccagcacgacttatagaatttcccagtaaatccatctcggccgggagccttatttgaaggaagagataggactgttttccagacttcgtcttcagtgaacgggctatccagcgatgtcagatcatgggtagggatgtcaagttgagctaggtcaatggtgtgcgcccggtcaggtgaacatcccagcagcttgtggaagaactcactgataacctccaacttttccccatgtgatgtctttatcgatccatcatcaaaaatcagattgccaacaaaattcttgcctttgcggtatttagcatggaggtggaaaaaggcagtgttagcatccccttcagccaaccatgtgatcctagagcgactccgagccatagaacgctgcagt

SEQ ID NO: 106281 - DNA, 444 bp, Zea Mays
atattgtggaagtctatattgatgatattgtagtcaaatcggctgagtttagctctcatatagctgatttgcgcaaagcctttgataaaatgcgtcggtatggtctgaaaatgaacccacataaatgtgcttttggagtgtcggctggtaagttcttaggattcatcattcatgaacatggtatatagatagaccttgaccgaatcaaatctatttggaatgtgggacctccaacctgtaaggtcgaagtgcagaagtttctcggcaagataaattatttgcggaggtttatttctaacctagccgggaagattgatgccttcacccctatccttcggcttaagaatgatgccaaattcacttggggggcagaacagcaggaagcgcttgatctcatcagaaagtatttgtcttcggctcccgtattaaaagcaccataggcag

SEQ ID NO: 106282 - DNA, 522 bp, Zea Mays
ctaatctacggccccctagccaaactccttatttcgtggcctgaagcatcttggtttggtgggccaacgctgtcggctgcttcctctccttgccgaatccatccagaagttgggcgcataaaacggcgaaggttcattgcgattagctcgaattgcgtattccgctgcggtataagacagcacggggcccttgctccatcctacggccgacgagttcacatgccgaggaagtcgagcgagaagcgtcgagttaggggagagaaaggagtagctgccgccatggatgaagctaatcaggctccagccgtggagtccttctactgcgctgagaaccggtaatgataactggaccttccttatgtcacgtggctagctttccgtagcgactccttgcactcgattccgttcacgggatcgcctagacaattgcccgccgtgagcgccaccatgggtcagcccgccactgcgggagctcacgctctgtcgctgctgattgacgggaggtggaagaaggtatccctg

SEQ ID NO: 106283 - DNA, 626 bp, Zea Mays
gcgggtaacacctcaaaccgttttcggtctctttctcggatatacctatcccggtttccgtaccgtttcacattttcctgataaaatgaaaatagacagttgtaaatgggaatacggaacgagacgggacggtataattttgttcgttttcatccgttgtaaatgggaatacggaacgggacgggacggtataattttcctgataaaatgcaattcgcttccgttggtagtacacgctccacaactaataaacaaaaaataggtgaaaatgatcttgacggcaatggtactgaagcatgcatcatcatccttggataagctctgcgctgttccccgttgcgaatcctcgcgtgaacgcaccaacggcaaaacaagaaggcaaatcatgtacgcttgtttgccaccatccgagcgaactagtgcgacaaaaatccgaaccgaggtccccacttatccccactacatcctgcaacattgatgtgatccacgcacaccactcgtttctgtatacatctctaataggtgcaggaatttgccgaggaaatgaacatatatagacatacgtacgtagcatttgccacactacctctcattagctataatgtggcagagaaacaacactgagc

SEQ ID NO: 106284 - DNA, 523 bp, Zea Mays
gagttttttgccttgataatggcagtggatcaatggagaccatatttgcaaaggtcatctttcactatcaggactgaccatcagtctatgtcttttttgtgagaacaacaactacagtctgaactgcaaaggaaggctatggccaaactcatgggtcttcatttcagaatagtatagaagaatggtaaggagaatgtggtggctgatgctttcttgagggtgggggtagctatcacagtggcattgatatttgaagtccaaccattatggcttcaggaaatcttgtattcttatgtcacagatgagcaagcccaacagttattacagcaattggtagtgcatagtcctaatgagaatggttattctcttcatcaaggggtaatcaggaaagactaacatatttgggttggagagaattcagcccttagaaccaaaattattgcagcattacatgattcttcattgggtgtacactctggaattgctgctacttaccacaaagttaagaagttattctgttggt

SEQ ID NO: 106285 - DNA, 497 bp, Zea Mays
caaaatccaaggggctctaggtcgtgaatagatatgtgtgtcgactactaagacatgcgggtaagctcaatttgttgtatataaggtgtatcatctaagtcggtgatgttatctattgtttggctcatggtcatatgtattgtagaggatgtgtgttgaatttgactataggactctataactggatcaactaactgagtctcaacagaggtgttctaaagtgctactagagtagattgaactagatgttataaaactaccaccgccatcatatctacagtctctacagtaggagtaattgtgacgataggaggctaactctctataggcactgatgagggggcatctctatgagcatagtggatgaattgttataggcactagcacatataactgaggagtggggtgcttagtgatctcaccaaagctggtagtcaaattcacaataactaaaaccaaggatatagactagctacatggagtttgagctaaggtag

SEQ ID NO: 106286 - DNA, 280 bp, Zea Mays
gtggtcgtcttcgtgtggacagggctggcaagcgggaattgttggcctcgccggctggggtgagcgtaggtgagggggagtagcgaagtctttttgagggtgaggagctgaggataatgttgtttaactatagggagatgggtatcatcccgaaagttgaaccaatgtaatgtgtggtgcccacgctgcacgtatgtaactataatttgtatgatgaggctgtgtgccttcgctgatccgaccgtgcccgtaggggacttgtgcatttgatctagcgcgt

SEQ ID NO: 106287 - DNA, 427 bp, Zea Mays
ccagaaatgagagattaggcagatcaacatccgatacttgagaacgagttatagcatataaccatataacggggcagaatcattaaatgattcggagatttggatggtaaggccacaacatgattcacaaggaaaaagattaccagattcggacaaaggagaggtaggaaaacaagatctgctaggatgagcagcagaaatgctatgaagattcgggacaggatctatggaaagaaacatggccttgatagggtttgtgcaattagacaccaaacaacaattttttttaacacaacaagtgcacaaggagacttgggttggtctagcggtcaagctgtgggggtctataagctgtgcaggtgcattaccaatagcgcaacacacaagggctagaaaacaccaatacaatcatgtgatttgatttttt

SEQ ID NO: 106288 - DNA, 1000 bp, Zea Mays
ggaggaagtgcaatggcatggcaaaggagcgccaggaagctctcctggtagccttaggtcgtcaatcaaaactggagacatgctgactcactctagtggttgctccggaggggagttccgcagcgctgctgacaaagctccttgaaacaaggccgtacgacgatgcccttgttttgttctagcatgtagaacctctactgggtgacaccggtgaggtggaaggagtccaaccaaaccttgtcgcactataaggtgtgttggtcacaaaagaagtgctcacaacagttgcaccagccgagggggttctccttcccatcgtaggtggggaaggacaacctatggaagtgtggcgtggtggtcactggcgccgcaaccgacatggatggtgcagggggctggtgagcggcaaaggagggaatggagtgatggtgagtgcgggaaggcgatttggtggatgagaagcaaaaggtgggagatagtggagggcgacgtgacgacagaggtgggcgtcgacaacatctgtggaagggcgacaatagtagatggtaactgggtggcgagtgatggagcggcagcgagtggaagggcaacagagagcaggagagtgggggtaggcgatgttggggtggatgtgggggaaatcctttgaagccaaggaggcgatagggaaatccagccggggtgacggaggaggacgcgatggtaggttggtcctccacgacagtgaggcatgcaaagagggaggagaaatgttgtgtcatctgttgttggaggtcaatgatgagctacttcatgtcccctgagtcggtggtggcgttggtggcagccacagcggcggccgtaacctgaggatcgatgtcacctcctggcatctttgataccagattgttggagcttgtgttcctgagaccgtagatgtgttgcacagaaggacgggtacaaagatcccagcgcttgggcgctgtcgtcttagggttgaaggaggaaggcaggatttggg

SEQ ID NO: 106289 - DNA, 580 bp, Zea Mays
ccacatttaatttgaatacaaatacgatatgaatattatcggatatgaatacaaaactagtacttcgaattcgaatttgcattcggatactcccctgacttggaacaacatcaatgttgcacacataaggaaagaactttaggtactgtggtaacatagatgtaataaagtccttgccagcggctagatgaataggctcacccctaggccactcaccctaggtaaacttcagcattcgcgttctcgcctccttcaaaactagcgtggccatggcctcacctggcttcgcacacgtcgcggctaggtcttcgcggaacccagctatcgtagtcaccgcatcacacccttcacctctagtagtcctggccgagacagtgaaagtcgcctggactcttttactccttttcttcgactatggggacacaacctcccttttcgaggtcccctcatctgtcggcgcacccttcgcgcaacgcttcttcttggttgctgcatcctcatcgtctttggatacctcttccggatacgggccatagggcagcccattcagcttcaacattagttcaaatgtatattcgac

SEQ ID NO: 106290 - DNA, 413 bp, Zea Mays
gtctcggcaaacatttatctctttactgttaggaatacagtaaaggaaatcatcttcattgtctcctccataaaccaaagacccttgcgggtatttcagttccttggcatagtgttgcacttcggcaatttgttccgataataactgctttcccgaagcgtggtgaacaatgtattctaaattaccctagggaggtgcttcgggagcaggcgatgtgcatttttctggaagactctcttccgtcaaccttactgttgcagctcccgaaggttcagctttagcaaaagcagcagcaacgcttaaagtaatcatttcctttgtatctccaattttcttgccagaaacttcggcagtggcagcagttggcgttttcatcgattccaaaatagtgtccaaaacactagccatcctcc

SEQ ID NO: 106291 - DNA, 637 bp, Zea Mays
cgcaacgcgggggccctgtgctccgccgctctgatggcggtggtggaagggaaggttggggaggcactctgtggtcgtagattacccagccaacggccgggatgagatcaagcgtcgcggcttggctggtgccgttggatctgttgtagaaggataagattagatcttggattcattaaagcttgtccgttcatctgcaatccagtggccacctgtgcgtaccgcttcgagatctactttaggccgttggatcagcgatgggtggataggattagctccctgtttcattaaatcatgaccgtcagatccagatctaacgatgggcgctgcgtaccgattcagtgtggtgaccgatctaatctaggtcgtccagtgaggatccgatggccagatttctcccatacccctttggcctgtcagtttcgcaaaagagtccctagtcttgttaaataataaacccgcggtccaaccagcagtgctttgtgtcttaggaagttttcccccgagacccctggactttccagaaattgggtcccagtccagggttcacaagaaatggataaataaaatctgaaaatgattttaatgagaaaaataaatgctagaactttaataaatcatagaaaattcatatgaa

SEQ ID NO: 106292 - DNA, 545 bp, Zea Mays
ttttaaatacgcattgtgaagcgcatgggcatatgactgctactgcactgcatggaattagaatccgacaggcctcagaagagcgcatgagcatgaatcatagcagtgatggttggtctgacgagcagcaaatccttgtgcaacttggcctctgcagactggttcgagtgccaagctagctcggaacagctagcactccatcagcacagtaatgcagagcttgtttatgtatatagccaaacctaagccctggttttcttccccgcgaatagaagaggacacgtatctcacgccacgcaaatgacggccagctgatgacctgcagcactgtgatgagcgtggtcgtctacttatctagtggcaaagctagagtaaaattgagtaggatgtatctagtctcgtggatgtctcgtggatgcataatattcttttatagaagtatatatatgatgaaaatttaactacatctatagaaattgcattttgtgggggtatatttacatccacagcttagagatggcaacgggtacaaacccgtcgggttt

SEQ ID NO: 106293 - DNA, 459 bp, Zea Mays
tggttaggctatctatagtagatcctgtatcacaacttctattttaaacttctttttataaatagtgtcaaacaatgttatttataattctacgttctctattttacatagtccactggagacagttttattgtattttaatttcttggtgagaagagaacctcattcattgctcttctaaatgacaacattcagtgccttgctccattaagaaaaccgagtacaatgggggttgtcaagtgtcaacgttatcgccgaagtttgctggttgggccagctgctcactaaagtctgtcgtcctctacagaaatctacatttgtctacagtgacaacgaaagtgcagttctctgcgcagatccggcgcaacattccaatcttaaccaaagggttttctactcttaaccgagtccactctactcccgattgacaccacggaggctgttatacgagcatctcta

SEQ ID NO: 106294 - DNA, 312 bp, Zea Mays
caggaaatggctagaagcctgacgaacgacatggagataaggctgagaacctggtaagcggtgtgaattttcgagagaatgaacgcgcggacacgttttcagagagctgagcggcttctaaattaagaaacggtgtggagataaggaatgtgagctgtaactataatttacaaaggctggtctagaaaagggagtagtacgttggttaaagacaaactttgatttctccacttttttaagagaaaatataaatacattcctagattttaaaattaggattttagtaatatataatggatcgacacgctatac

SEQ ID NO: 106295 - DNA, 824 bp, Zea Mays
gctgccgtcggagatgctacctaggcagaatttgaagccgccttccgagagcatcatgtgcccctagggatcgtccagctcaaggaagaagaatttcgggaattaacccgaggagggagatctgttagtgagtatgtccacaagttcacagaattggctcgctatgcgcttgatgatgtcagcacagaagccaagaagatggcccgtttcttgaagggactaagaccataactcaagactatcctcgccagccaagattttcttagcttctcgcacctctcaaacaaggccatacaagtggaaagggctagagaagaagaaaagggtcacctcaagaggaagtttcaagtcctccgagctcagcagcaggacaggcaccaaagagttcaatcttttgggtttcctcccaaatgaccaagcttcaacaaaccagcaggatctgattcgtcatgtttcagtcagcagggtcaaagttccctccaggccccctccgttgcaagcaaccatcctccagccaatgcttgttggcactacggagaccccagtcactacaagaataattgtcctcagttgaagacatcagtgcctacctaatccaactcggtgaatggccccaagagtgccccagcacccgcctccaaggcaccctcctccaacaaccatctaagcaagacccagtatcatggcagggcacgagtgaaccacgtcaacgctcaagaggctcagcaagccccgagagaagtactcggtgagttcctagttgaatttacccccgatgctgtactttttgattcatgagcatcccattcattcatagccactgg

SEQ ID NO: 106296 - DNA, 374 bp, Zea Mays
gttaagctatgaattacttggcaatattttagtttgcttctgagactgattgcactattatatcatgtgcttctgaatatgaattacttggcagtcacattttgtataatgaattggtggttaatctatgaatgatatcgtgtgcttttgaatatgaactgcgaggcaatatttcggtttgcttctgagactgattgcactattctttcttggtgtttagaactgttgcctgcacagtaccatagtttgtataactaagaaccaagttcctatttttttagaatgcaataccagtatctttttatttttgtcaaacatagcagcttggatctgggtgaaacaacccccattcttgattggtgtttataattgtt

SEQ ID NO: 106297 - DNA, 295 bp, Zea Mays
gccggtcattgaggcctctcataagatagttcctctttttcaggtcagtattgacctggtcaattgcgtattgggacaaatgattgaatttgttgagatactgcaccttgtttgagtctcatgaattcttcttgcttcatatggagcactccttctggaatgtagtgctcccgaaatgccaatttaaattcgtcccaggtgacttgatgttcggcaggctgaatggccacataatttccccaccaggtgttggtagggcctcttaactgctgagccgcaaataatggcttctggg

SEQ ID NO: 106298 - DNA, 553 bp, Zea Mays
tcttataacaatagttaccaggccagtctgaagatgtcgccatttgaagctttataggacagaaaatgcaggactcctctatattgggatcagactggagaaacatagttctttgggcctgaggttattcaagaggcataagaacaagtccatataatccgggagaacttgagggtagcacaaactcgacaaaagagctatgctaataatcgaagaagaccactggagtttgaggagggtgaccacgtgtacctcaaggtgtcaccacttcgtggaatgagaagattcaaagtcaaaggcaaattatcccctcgctttattggaccattcagaatctttaggcgagttggggagatgacatatcagcttgagctacccgatcatctatctgatgtacacgatgtattccacgtgtctcaactcaagaagtgtctccgtgtccgtgaggaacaactaccaatggaggaacttagtgtgcagggtgatctgacttacacggagtatcctattaagattattgacactttgacccaaggtacaagaaataaggtga

SEQ ID NO: 106299 - DNA, 306 bp, Zea Mays
atggaaatgggaagaaattggtatggatttcattactaggtgcctcgcacctcaaatggttatgattcgatatgggtgattatggatagactgaccaaagtggctcaattcattccggtcaagattccttataaaggatctcatttggcagagatatatatggctcgaattgtgtgtttacatggtgtaccgaagaagatcatttctgatagaggctcaaagaatacctcaagattttggaaaatgtttcatgagaatatggatacgaagttgagcttcagttcggcctatcatcctcaaactgat

SEQ ID NO: 106300 - DNA, 536 bp, Zea Mays
aagaaatacattacattaacatacatacaaaaacttgatgtttagttctttcaaaagacgaaagctatatacaagcattaagttctcaaatatacaaagttttagtcttctttcagcactttctcagcggcttcatttagcagtttgtcgatagcttcgtcaacagcttcattagcgatttttatcatatctaacgcttccttcatggccaggtcagcttcggggttatatggctccggtggaggtgaaagttcagctacattataaaaaatgtttgttaattccgaagctaaaaacgaattctgaagctaaacctcaataaaggtacctataagccctgcacgctcggtagcttattcaactcatttagcttcttcttgagcgtcatgagatttttttcattttttctaatcgcttcatcagctatctcacgggctgcccttcatccacacctcggagtaaaatctcccgcctagcgtagaagcttgagccaaagggtctttgatgtcttccgccgagaaaacaaatcctggcta

SEQ ID NO: 106301 - DNA, 560 bp, Zea Mays
gtttttgtcccagttttggtttcttgcatgctggtacattaactttggctaaacagccccgtgcacacagaaatcaaagagtgggctctctacctttctgtccttcataaggtattttatcacccttagctgatggaactcggtttagaacaatgcatctgactaaaatagcatcgccccaccatgacttaggtaaaccagaactattcaacatggtattaatcaagtctgtcaaagttcagtttttctattcagccaccctatttgattgaggcgagtagggaattgctgtagcatggatgattccatgttccacacaatattcaccaaattcattagaaagatactcccctgtatcggacttaatctgtttaattttcttttctagttggttttctacctctgccttatagatcttaaaacaattaagtgcatcatctttcgttttaataagatagagctgacaatatctagtagcatcatcaataaatttaatgaaatatttctttgctgctctcgtcaaaattccattcatttaacacaaatctaagtgaatgaga

SEQ ID NO: 106302 - DNA, 432 bp, Zea Mays
agagcaagaccacttgcaactagctataaccatggggagggaacccgcacaggaacaaacaacagcagacgtacagcggtgcaggcgcgcgcattgccctaacgggagagatctgcgcttcagggaatgaggtcaggaggcagtggggtggaccttgggggcctcgtcgatggcagaggagagctcggagaggaggtcgaagcagagcagcgcgtcgggggtcttctgcctggccgatgccactacggactccagctgggccaccagcgcgccgaaccgcgacagcggtatgggatccccgccaccgacgcccttcgccatgggagggtaggggcctagagggtgggagagggaatgcgtcactggtgctcgagtgttgtcttgttcaaccgagatctgggacttgcggtgtagagcagggtgattttggac

SEQ ID NO: 106303 - DNA, 321 bp, Zea Mays
tgttaatctaccgaccatgcctttacttacaaaatgtgcagctataaacaattttaggtgcaaagtgtgcatacattttagtccctcatatttaattttctgaataacttgccctgttaattggttcctgcaaatgataacacgtgttaggttagttctttattagttccttgggttgctaggtgttgcactcgttcctcgtgatgcattcctacttacaggtacatgaattagatgtcttatggtcctaggataccgcgagaaaatgcttctgttcatatttcacaatgttcttatatttttgctagcatcacattctag

SEQ ID NO: 106304 - DNA, 274 bp, Zea Mays
gggcagtggtgggacgaatgaaaacaggctatttgaatggataggagggtggacgaggtgaagaacgattctgattgaatggtcggattaccaaccttgttcgcttctcaggtacctgattggacctatcacctccaaatccctttgattttccttgtcctgtattcttggcttctattgtgctgtgctgacagccctgctataagtaagatctaggcaggtggccattttccgttggagccggtcgttgagtcctctcatgaagcaattcttc

SEQ ID NO: 106305 - DNA, 343 bp, Zea Mays
cgagactgacgcttcgggcacgggcattggtgcagttctcacacaggaaggccatcctcttgcgtttgtcagtaaggcactcagtaccaagactcaaggcctctcaacttacgagaaggaatatctggcagttctgttggcagtgaaccagtggagaccttatcttcagcactcagaattcattatcttctcggaccaacgcagtctgtctcacctgtccgagcagaggctccataccccttggcagcagcgcgtcttcactaagcttctcggtcttcagtaccaaattgtgtacaaaaaaggggtggataatggtgcagcggacgcattgtctcgccgcccc

SEQ ID NO: 106306 - DNA, 464 bp, Zea Mays
cggctgcttcttcaatcttcaccaatcatcactcatcaggtcgctggttcttttcttgtttcttcttcaattattcaccacgctggttcacctaacccaagtacccaactaccgaccgatgcaatgcagtttgtttcactaaatgaatgtcaaaatagtcacgcagtggatggctggatgcaatgcagtggaagcatccttgaaacagagagtaccacttgagaaaccttgcggttggcaggcatctttgactggatacaattccttgggtcaggaggacgtcaggtcatcagtctttgcccgtgtggattttagctaggcttccaggaaatgcacgagatatcctcacaaaagaataaccggaaatgcgtgatacaattcatgtgatcttttcgtgccaggactgatcaagactgggtgtctggactataaataagactggaaaaattcagacaagagacaag

SEQ ID NO: 106307 - DNA, 459 bp, Zea Mays
atcaaaagtgccctttagggctagaactatgtcaggatcatatggttccagggggagagaacttagctgcacaaaaatataactttatgtcagatacgaagctaaagcatttatgaagctaaaatatgacaaacgcacctatatgcctttcgtgttctgtggcttctttagcttttcttgcttcctctgaagcaagataagattcttcttcgctctgcctgatagcttcatctgctatctctctacgtcgttcatccacacatcagaataaaatttcacgccaagggcggtagcttcggctgaaggctctctaatgtcatttgatgaaactaagaattctggctgcattacagccttagcatgatcacagccagccttttcggacaatgatacaacccctcgagcacccgcacaagcacaaaagtcccctctgtcggttaggacttagtcgaaatcttc

SEQ ID NO: 106308 - DNA, 760 bp, Zea Mays
gtgattagcaattttaacatgtttggaccatataagccgccccttgcttttgattttgtaaatcgaccttgttttagaattctcatcttttgcaaatttaaaactcaaagagcagtacacttaacccaacacccccttcctggttacgccatgtggcacaccttgaaccccccgtacatggagccacagctaggagggacgaccacgatagtaagcgcacctcttaggtcctagtgtgtcggctaccaaggtgacccctagtaggttcctgcaatgacacatttctggcacgcccaatgggaccactatgccaacctccacattggccctagatcagtgatcgatgtcgacacatctccgaccttcataaactctacaccaccaccatgacacgcttgggaaaagagaaggtcatcatctaggacgaagaatagtacccaccaggcaaggatgcacctccatagctcggtgacttcagccccaaagatgtgatactgttacaactaaaaagttgctcgcttgcttcacctggacatgctccgggaacgttaggctcactagacactaggagttgctactggaggagatcaatctattgacattgtcgaccaaacgcattgccaccttgcgccaagagatgaactacatcatacaccatgctctggcacaacaaactgaggtgttggtcaacttcatggagaaagttatcgtaaaggtggctagacaaattatggtcgagaactacactgtcctgggaccc

SEQ ID NO: 106309 - DNA, 540 bp, Zea Mays
attagaactcacagatcagcacattatcaatgccaactgccatggcaatatactgtcacaacgcttttgcagaaacaggtaacatgcacagactgtaataaaataagaaaagcgaggaatgttacacaagtgacttgactagctccctaaagctaaaattatagaatggtaactgccttaggagtgtcaccagcatgacagagcacaagctccaagcatttcgaggaataaaaaaaaagcacttcaaacctgttgagttacctggtgtctgtcaagccattcgatgtaagacttggtccttttacgctacaaccatcttcctccagagatcctaactttttttagttgtagctaactagctatcgttgcagcaagatcagtttgtttggatgtgcctaccgatcaggtcaataattcaatgcacggtaaaaatgtgcatatgtcataaaacacaaaatgagattcacagtacaaaactagctgtctaattatttcatgacgggcaatgcagaaatgataggttttccaggtggagacatg

SEQ ID NO: 106310 - DNA, 444 bp, Zea Mays
atggttttgaagagagagaaaaagagagagagagagagagagagaggaagatggtaccaacatcaaaagttctagtgaaaggtgagggagggattcaaggggacacccagtgatagaggttcccacacaagtggagtttgagaaagggataaaccaaggcaagcctctgccagcaaaggcagagagattgctcgagacctgtgaactagtgactcaacgagatagctctaaccactgcatatagcttgcccttcttgggtagaacaccacatgaatgacacctcccatgcacggtcctagttcgaaaaaagttgacccaactatgactatgaaagttatcgagttagtgggcatgatatttggccctaaaacactaacttttttagcatggcacaacaaattctcaggttcatctacttgtaagctccaatgggctaactatgc

SEQ ID NO: 106311 - DNA, 353 bp, Zea Mays
aaaagaaaagagagaatccacttcagataaccacgtctctgctaggcagcgtgtggaatggccgagagcggaccaaatggatatataatccaagccgagagtggagttacgtgaacagtcgtctgatggaaaacaactttcacgttcggttcagagagcacttttttcgttgagaataagtccttcccttttgtgtgaattccccagcggcgaattaaccaacttgtggggccctatctattcaatctctcgagccccaagaaaacccccctctccctcggactcaatctctctcttgactctatatatgtggacacctgatatctatgagagttcacccaccctggtgacag

SEQ ID NO: 106312 - DNA, 772 bp, Zea Mays
cagtaatgcatgttgataataattggcatgtcggccggtcacttgttctcatgcagggaaaagaaaagagaggcagataaccgacacgacgacagaatggtggtcgccgcctaatcgatgaatttctcttggcatttcatcccacctggtaaaagtttcgtttgatccagataagtcgcctcctttgctcgccgcgtaaattagttttaagttacacttcagttcactcaatatatacgcgtggattgagatggatacgagagtatcgaaacaaggcctcaataggtggcgagacatacgcgcttaagcaaagctttgttttcagtatattcaggacctgcctagctagcctgtttcgctacggatttagttcaccggcttctgttttttctacggtattttgtatacatgtgtgttgtgcgagaccagccacgccgatacagttactgtgctcacgataaaattgaaaaggacaaccccattgttccagtcatttagtcatggaagaaatgatcctttccaacccaatctcctagccttttttcttcgaaagaaaggaagatctgcccgtttttatctattcccgcccgcaacaagatcgatgattacccaccagtaaaattccgagaagcctacacctaccacaaacttcctctttttttttttggttgttgttgtttgagaaaagaagaagtccataaagcaagattcccgtaggtgggcactgggcatgcgatgcaaggacaggtccatcagtccatccgtcagtcag

SEQ ID NO: 106313 - DNA, 576 bp, Zea Mays
ctcatttgttaatgactgtgattatttacgaaattaatctattctaaacttcttaaccagaaaacaatgcgtattgcaatagcacaaatacgaatatcgtacattttttaactccaaaaatttattgtatatgagttaaatagcttagttaaaacataaagggaagccaaatagtggaaatgattggataagataaatagggagagtaataaaagaggggatgtatttaaaaataaatagaaagtatgaatagagggaaatgagagtaggaatggttggaatcaaccttgtagcacttagcattcactatcgcaagttattattgctattgttacacccctatccaatacgtgaatagttatgtgacgatgtggatagtttcaataataataaaaatgctaaggtagtgatttggaccatgataaagaatgatagggtgattaatgatattatttttaactgtatgagaactagttgacatcataaaatataagacagtctacaacagtttactcatatgatcataaaaaactggtttgcactgtagattatactgtttacatagtaaagtttaaa

SEQ ID NO: 106314 - DNA, 277 bp, Zea Mays
tgatatatgaataaatttggagaatctctcacacctattgtgttttgccctttacaaagagaataaagtatggtgtcatcttctatatgcaaacaatgtgatactctagttgccctaaaatcccgctcaagtctttctctcaaatctgtgctcaaagaaatgctcttggatcagaaagatgatttggatatcgtgctctgtaatttataaagttcaaaagatttttgttaaggaatataacacttgtacgctcttgtagtatgatgaagctaggcgg

SEQ ID NO: 106315 - DNA, 540 bp, Zea Mays
tatcttccaaattatgaagtttttgccctaggtcaacacatcaagtttgcagagctataaaaggagaacaacttttctatagagattaagccctggtactatgaaaagttttgagaaaattgggcccaaagatgggctatcagactgccttaagtctgaattcagactgacagtgtgattgagccatctttgagctgggattcgagcctaatccattaagaatttaggagtgattgctatagtaggattgtagctggatcatcaggcaacaattttgttactggtggattagtaagttgccacatgaaaatttgagatctgagccctgcaaaatggtctgtcagacactctgatggtaaccaccatggtacagtaactgaaacagattacaagttcagcccccctcgccgccggtgacctttgcgccgtcgccgcgattcgctctctctggtaagtggataaccacggcggagtaaagatcttggcaccagatcagctcgggctcggtcgcggatgagtttcaccgtacccacttgctcg

SEQ ID NO: 106316 - DNA, 314 bp, Zea Mays
caccacaccaaatttgtagagcaaccaaaggagaacaactttgcttgagagtgtgagcacagttgttaagaaaatattggagataattaagcctgaagtcaggctgtcaggctaatattgtctgaaattcagattaacagtgggatgacatgaacttagggcttaattttaagcatgctccaatgtgtttttgtggcagaaatcatatggcaacattgtagatggcataatgctctacaggtttgctgcagagcttgacttatgttgccatttggaattaagataaaatctggctccaaagtgctctgttagac

SEQ ID NO: 106317 - DNA, 386 bp, Zea Mays
caaaattactcgacttcttaacagccaaaatctctcaggacgacaacagaaaaagagatcgagatggataatctagagtataaggattagaaagccagagatcaacaggtctatattctctcgtcgtatcaaaagccatgccgattaaacttgatattgtttatgaatactccagaaagaagcaaattccagataataagtatagtaggagctatatacgtaataattaatttcgattagacttgatattgcgttcttagtaaataattagtttttgtaatatattaagtagaccactagcttaagacttaaaattaagaggtcaaattttaatcatatcagtgccctctaattcatgtaggctgaaacggagacacagtttacgg

SEQ ID NO: 106318 - DNA, 1030 bp, Zea Mays
gaccgtgatatagagttttctattgaattattacccggaactgcacctatctcaaaaagaccttatagaatggatgtcaaagatttagttgaattgaagaaacaaatagaagaattactagaaaaaggtttcattcgcccaagttcatccccttggggagccccagttctataggtgagcaagaaagatggttcgagaagaatctgtgttgattatagaagtttgaatgaagtaacaattaagaataaacacccattacctcggattgaagatttatttgatcagatgaagggagctaagatattctctaagatagatctaagatcgggatatcatcagttaaagattcgagcagaagacgtacccaagacaaccttcactacgagatatggattatatgagtttttggtcatgtcatttggactgactaatgcaccggcatactttatgaacttgatgaataaagtattcatggaatatctggatcagtttgtggtcatattcattgacaacatactgatatactctccaaatgaagaaacacatgaagatcatctaagactagtcctacaaaagcttcgtgacaaccaattgtatgcaaagttctcgaagtatgatttttggctgaaggaagttgctttcttaggacatattgttactgatggtggaattaaagtagatccaggaaagataagtgaaatactaaattggaagcaaccaaaggatgcgtccaagatcagaagttttcttggattggcaggatacttcagaagatttattgaaggtttttccaagttagtgaaacctcttacctcactactggagaaaggtaaagagtttaagtgggatgaagcatgccagaaatgttttgaagaactcaagaaaaggttaaccactgcaccaatattggtaatgccagacattcacaaaggatttgatgtgtattgcgatgcatcacaccttggacttggatgtgtgctaatgcaagaaggaaaagtaatagcctatgcttcaaggcagttgagaaagc

SEQ ID NO: 106319 - DNA, 672 bp, Zea Mays
ccgccatagagacgagttgaaggtttctcagaatgaagtgtcacagcttaataggttactgtcttcaagagattctctcatcagagagctacgtgcttcgaagaaacttgtctcgcaggagttggaaattgctcgtcgcgatatcaaggtcttagaggatgaccgtggtattatgaaggcactgtgcgacaaagcgatggacaaggttgttcgcaccggccggatcctgataaagaggcctggcatcgtggtgcctgatgacattgttgctgacgtgctcgctgcgtctgttggtacgagtaaaccttctccttctagtgatcctatagacaaggtcccttgcgggggtgctcctgcacagtaattgtgtagtgaaaacaaattttgattcgttcgaacagaaaacacttttcattgagttgatatttttcattgagatggtgcacggtaaagttatgtatgcatgagcatgtcgcactgacttaagacgtttctgacttaggctgattgcttcattagcagggtatagtaatcaccctaagttatgtatgcatgagcatgtcgcaccgacttaagacgtttccggcttaggctgattgctccgttagcagggtatagtaatcaccctaagttatgtatgcatgagcatgtcacactgacttaagacatttc

SEQ ID NO: 106320 - DNA, 438 bp, Zea Mays
gacagagttgagcaagagagaccttctaaagggatacaaagtaaggagatggatttatgtgagtaatgtatttttggtaagcataagagggtaaaatttaatacttctattcataaaagtaaaggcatattggattatttgcatgctgatttgggggaccctctagaaaaacttctcttggtggttgtccttacgtgcttactattattggtgattactctagaagggtgtggtcttgttttctgaaacataaatatgatgcttttaaagattggaaagttatggtagaaaggcagccgagaagaaggtaaaggttccacgtactaacaagggcatggaattttgctcagatgcttttaagtctttctgcagacaggaaggtattgtgaggcaccataccattccatatactccatagcagaatggagtagcagaaag

SEQ ID NO: 106321 - DNA, 306 bp, Zea Mays
cgggtttccatcagatccggatggctagggaggataggaagcataccgcttttgtaatagtggacgagctctactgctatgttgtaatgccctacggtctgaagaacgccttgccaacatttgtacgagcgatgagtaagaccttcggggacctgattagggacaaggttgagatatatgtcgatgacatcgtggtcaagactaggagggggtcgactttagtaaaagacctgaccctggtctttgacaaactgcgggtgacgcgcacgaagctgaacccggacaagtgcatctttggcgtctccg

SEQ ID NO: 106322 - DNA, 440 bp, Zea Mays
tccgcgtggaggtcgagcttcatggggacgtaggactgcacagagatcgtggcgtagggaagcgccatggggagatggatctgggcagcaagaacgtcgtcgccgaacaggagagaaaatccgacggagcagtcggaatcgctgtcaccggcggaggagtccacgtgggtgatcgtggacatccaaggcttctgcgcagcagagggaggggcggcgcaggtaggtgccgcgccctaggtcaggcggcggcatatggtggtggtagaggaagcgggagggagggcacaaaatcagggagaccctggactcgtgataccatgtagagagatagaattgggaagacaccacacccaatgaggggggtgatctctcatatatatagccaaggtaacttggagtacaagtatacaatctcctaaacagggaaagctatatgccta

SEQ ID NO: 106323 - DNA, 427 bp, Zea Mays
ctggagtttagtagccgatgtgtacaacggctgaagcaaatcttcaattcggttggagccagctgtgaagaatttagcccttcgactgaagacttgccaggggcctttgaacatatcgagggtgaaattgatgaccttgatgaaatcatagccggacatggtgatttctatgccctggtagcttctcggggcacacctgtcgccttcatgaaatctggttgtacacacgaaaatattgttaataggcccaactttagtttatcaccagcagatctggtagatattcccaatctcgcccgaagcataggaaacaggtttatcaaactaaaatggatgaagggtggtcgaagcatagccgatgacgaagctcgaagtcatcttaagccggtaataaaatcataccttgtgtttacctttccctttaaac

SEQ ID NO: 106324 - DNA, 311 bp, Zea Mays
gccttggtgccatgaaatgttttgagataattaggcccaaagatgggctgtcagactgccttaagtctgaattcagactgactgtggaattggatgaacttagggctcaattctaagcaagatcctgtgactttttgtgggtgcacaatatagaaaaattggagctggtctattaggctacagcattggtctagttgccctggaaaattgggagggaatttgccctaaacattgactgtcagactgactgaagagggatctgattgtacagtaactgaaacagatcgcagattcacccccctcgctgccgg

SEQ ID NO: 106325 - DNA, 394 bp, Zea Mays
ttgagttccaccaactctggtccggacactcgataagctctcttggaaataggggcggtgcctgggataagctctatggcaaattcaactttcctttcaggtggcatgcctggtaactcttcagggaatacatcggggaattctgacataatcctaattgtttcaatcggattggacttcttatcatctattgataaatggtgacatgctccttcttctagttcaggtaagtatagcttggttactacctcctttttggatggggacaccaacttaactgttctcttgtcacaactgacagtggcttgatttttgtgtagccaattcatccctaggatgacatctaacccttgagtttccattactactaggctagcggggaagtctatccccc

SEQ ID NO: 106326 - DNA, 528 bp, Zea Mays
tgcgaattggtctgtcaggcgctctgaatagggattccattgtacagtagctgaaaaagatcccaagattcatcacccttcaccgctggtgatctgccgtcgcaatacgcgctcgcctgggagatttgtgccacaggaagagtggataacgtcgaacgtggtaagaatatccagcgcgaggtgaatccagtcactcgccggaccggtcgtcgtgtcccgccgtggttaatcacgctagcatcaccggagttcgtcgttatccagccaggctacgtgcctcgatgctttaccacgtcgcgatgagtcaccataaaccgctctatagtcctggctcatcgccggtgagtctgccccggtaaaggccacaaattaccgcgccagtgactcagtccctctctccgaccgcctcgcatcttcttaaaattagccgccaccgccgatggcatctataaattgccgccccagtgaactccgctaggtaattacgcatccatcgcaccggtccttacctcggaatatctaccagag

SEQ ID NO: 106327 - DNA, 1085 bp, Zea Mays
cttgaaccagtctaaatttggtgctgctactccagactttcaacgtccgtgcagtgtttgttcaatcttgaaccagtgtaagtttgacactgctactccagactttcaacgtttaagaaaaaaaaaatcgtagataagggcactctctttcaacgtctaggaaaacaactagacaaggacactctgtactttaatgagatgagatgagatgatgagatgtggctatgtggataagtcgatgagtgggatcttaaattatatcattagagtatatacataatataggacgcactagaccaccacctcaccttgagaccatagtaagatcggaaacccgatgccctttgcctgtcactcggtcaacaaatatgtagtggggcagatccagtgccatgcccggacgctcgtgctgtctgagacaaaccgaggcaactttcagcactgtactattgtttaattacgcacgtgtcatgctgtttccatcttacaacctgtggttggagggtggtctctttcatgttatttcttgacccgacattgttctgtatagagttagagaccatactagtgggttctgattctgattatattcagttgcctttgttggcacggtttcttgcttatgtaccttagttctgaaatgaacccaaaatctgatgtcacctttacaactgcactatgttcacaaactaacaataagaattgatggtgtttgttgcgtggtgctaccaacagtgctagagataccgactcatctctccaggaatagctaacttgcaacggattataccactgtttcgcatctgctcccttatttgggcatgaacatgctttcagtttgtactgacgattgtggcatttagttggattgttgtacatgtttaggatgttatgaaactgaaagattatacctactgactgtgatagagaatttaaagtggaactacaataatattttttccacaacagccgaaaccgatactttttttttataaacgcaacgaaaataaagagatcagtgcataaaggtactagcaaaagaacacaatccacgattccgatcaccaagggatcagccatcgagg

SEQ ID NO: 106328 - DNA, 636 bp, Zea Mays
aagtacgccaggtccaaagagctacatcagcacaagatagaatctcagcggaaacccaaggacactccgcagtccagcagaacatgggtcagaccagcgcagtccgaatacgacaggccaaaccgcaaccagcaacacgttaacaccatcgccaaccaacaccctaccgaagacacaactcgtcgccaggagtatcccacacaaaagggccacggtgccaacaccagaggaagaggcagaggctgagctccgcagccgcgaaggttctactgcctctttcacggtgaagactgcgcacatcccaccggggattgccctgaaaccaaggccaccaaagattgaatggccagaaatcagccagccgacaaccaacgagttatcgcgcatacttaccatccccagctgtaccaccaacaacaattccacaacaaaccaatccttcaccagcctaatcatatggaccacaaacaccaagagatccaagtcctccctccaccaccacatcatcaaaatcctccacctccaccagcacccaaacaagaggactttgccgagcaacctttctgcagggtcatccacatgattaccgaagggtcaagtgcagactttgacaccaaacggcagaagaaggatcac

SEQ ID NO: 106329 - DNA, 637 bp, Zea Mays
ctttttcttattttcttgaattttgctcatggggctcacttagggtttttaattagggttgaaaaattttatctttcaagagactcaattgttttgatcatgacacttttaagtataagcttggtgacttctttattacttaagttattttggtactcatacctactttagttcacataaaataatggtccttggtttggctttttaagagaaaccctaggtgacactggggtgtcacagtaccgaacccctatctgtgtggagggcccgcgccaaggatgtgggttcgctgaagccaacaccgaccgaggtccagaagccacgcaagaaggttcaatcatcacacttgtctgttcaagactcatcctaggtgaccatgtggcgttgtccctgagcatacccttatctggggtacatggttgcgccgggtcccggagcgagggactagtccaagaacagtggcctgattaggcggaattgggcctatacggttggcctgctgagtcccttagcatgtggttagggctaaccgcatgtgttcttgccttgacacagtagcgaaggataccccattcccagggtactgacagactcttatcttccttcacgtgtaatccccacgatacttagattctca

SEQ ID NO: 106330 - DNA, 713 bp, Zea Mays
gttttatgctaaattggattcatcctattcggttatctatcaaacactagctggaatgggttcgctcctggttggacctctgaacaaatcatagcaaaccccgcgtacattatctgtaataattaccatggaccttgaaggcgaggcaggcaaccactctgctcctcaaagtctattttttgtccacctctgataatgtatcctgtcgtggtgtcaagagctttgcccggtacttagtaacatgaaccgaaattaatcggggttattgtgttgttacacactgaagtggccggcctgtttggattagcggagttattaacaagccgattggatgacttcgcacgagcccgagggtggccggttagatacgcaagatttaggtgtatctatggatatggataaaataacttatcttacatccgctcatacagcttatgtctgtcgtatgcaggtaaccaaacaacgtatttgatggttcagaatgaacaatcaatcagacggtaattctccagttcgcattatttgcataaaggaaattaatatggattgaaagaaagaaaaattaaagattgaacatagcaaactgctggtggttgatgacaatttattgaggtgtgtccctgtatatactagtattatgtgtagaaaatttggtagccaaaagttgagacgataattttctcattgcccagatcttttgacctgactttagc

SEQ ID NO: 106331 - DNA, 778 bp, Zea Mays
gtgaaagaggccgactcatattgagtcggcttcaagtttgtgatgaattcccactttatgaataaagaacacagttatttcactttaccactgttgcatgctttttgttcgtgtgcttgaaggcttgccaacattttagaggtaatgcccgagtgatgattgtgattcttgcttttccgagttatgatctggcattttaggggtaatgcccgacttatggagccaacttatacttatgccgacatgtcttcttgagttctgaaccctaaatctcacttttctcctccgccgcttctctgttttcttaattctcgagcctgcccactccgtccgagagattgagatggcccccaagaggaagagacagagtgctgctgctccaatcattccacccattgatcccaatagccagcttccatttgccggtaaccacatgtctgtcatttctgagtccgatcttctacatcttgtggaaactggagttttgccattgaaagagttgtgttcttggtgaatctggcgtggggtgactattccgacagaggacactgtgacaccctagtgtcacctagggtttcttctcagtactaactcaagtgccatcatttcatgtaagccaaattaagcatgaagcaccagatcaatgtaagaataaaagatccactaagtttatatctaaagaatcatgtgtaaaacaaatgaggttgtcaaaagagggaaaaatgttgaaaccctaataccaaccataattaagctatttaagtagaaaagaagaaaa

SEQ ID NO: 106332 - DNA, 771 bp, Zea Mays
aagtcagcacgctccttagcatcactatgtacttgctcggtagtaggtagaggcaaaagatcaataggagcacgagggttaaaaccatacactacctgaaaaggacttaccttggtggtggagtgttccgcccgattatatgcaaactccacatgcggcaaacactcttcccacattttcaagttcttcttcaatattgctcgcagcattgcagacaatgttctattcacaacttctgtttgtccatcagtttggggatgacaagtagtagaaaacaacaattttgtccccaatttgttccatagagtatgccaaaaatgactcaagaattttacatcacgatctgaaacaatagtagaaggcataccatgcaaacgaacaatctctttgaaaaagaggttagcaatatgaatggcatcatccgttttgtgacaaggtataaaatgtgtcatcttagaaaaacgatgaacgacaacaaaaacactatcgctccccctcttcgtcctaggcaatcccaaaacaaaatccatagaaatatccgcccacagaactgaaggaataggaagaggcatatacaaaccatgtgggttcaatcgggacttaactttttgacatgtcgtgcatcttgccacaaagtgctcaacaacacgccacattcgaggccaaaagaagtgtgtggacagcacagcctccgtcttcttagcaccgaagtgacccatcaaaccatcaccatgcgcttcctgcaacaacaaaagacgaaccgaaccaact

SEQ ID NO: 106333 - DNA, 286 bp, Zea Mays
aggcagaattcacctcagcaaggagcaggcaatcatgttcagacacgctacaaccatgggaggctaaaccatctagaggtcgaagcaatccaggaaacaccaggcatgatagcaggtatgttcctagtcgaatcccatcttgcagaagtgttatttgatactagcgcaacactttcattcattactgcatcatgggtagaagcacataatctcttaataaccaccatgacaacaccaattgaaattgattcagccggtggaaaagttcgagccgatagtgtatgct

SEQ ID NO: 106334 - DNA, 1335 bp, Zea Mays
ccgaaaagagaggcaagagcttggatctgcacctgggaaagagatgtgctgaaaatgcgactatattcatccagcgcctcttgactcagagaatctccatcacggatcactcctagtgtcttcataatggtcttcttgcttttcttgatagaagataggcgttggtgacactcgaccccgatgccaacaacacgcctgttgcgcctaggagtagccacccgccccccaggcagtttcttctttctaggggggttgggggcagggttctccaacacagcatcgacctctttggtaatactggacaagaactcggacacccttgaagttgaaacatcaacagcagaagtcggttgttgagacggagagctccccaaggctgtttcctcaaccctcctcgctcctcgacgtcgtcgaaagtaaacttgaatagtctttgggcggaggagcaaaggaggggaggtggcagccacaggagactccatgggaggcaagacctcgcaggcagccacagagcccaattctccagctaaaacgaattcctgctgacttccaatctgattgtgatcctcatgacacccgttcatctgcccattgccaggacatttaagcacagaaaactgcccacccccctgctgacttccaatctgacagaaatctcatgcacagaaaactgtccacccccttgcaagctggagcaaagacgttgcaaaggaaggggctcgacagacctgctacaaaccggatcttgttgatggacatcatgttggaggaccattgttgataacagcgggtcagagacagcgagggaagaagccacatgactgtgattttggatctggacatcaacttctctgatctccacgttgctgaattccaccagctcaacctcatcggctaagacctgagaatcattcttccaaccttcagaacaatcattcggttgacccccattacttactcttggacctatccggtcgtgaactgaacgacgctccgatctctaacccctatcatgatgcccctgaacaaactcatgggaaggcgagatgagacgccttctacgaggagagtgatcctcatcatcagaatcctcagaacgaagaactggaccggagccatcctgccggagagtgatcgaaaccgcaatattcacagagtaaaccagcactcgttttcctgcaggatcaccctcaacagcaaaaggaggttctacaatcgaaagctctttagaagaaggaatagcagaaggatccaagcaccacgcggagcagcggaaaacagccacatccttcagattcaaagtatcagggtggacttgatgtatccacgcaaaag

SEQ ID NO: 106335 - DNA, 379 bp, Zea Mays
cacaaaaataaattaaacgttaaattttgaccagatcatgtggataaccatgtgttgtttgcactgatcggctcacttgagctgttcgacatctttctaggttagtaataatcaaatttagtaaaagtaattatgcattaaaagtgatagatgagagaaataaacttgtgaaaggatcacgatgtccaagtgtgggggacagatatccccgggtccactagaaggtaagaaggcctcgtgagaggctttaggcctgttatctcgctagaccatcccttcgtgagccaggagaaaactgctggcggaatgggccagcacgagaaagaagcagactcaggcccaagcgacttgtgggacttaagcgctatccacagcgccc

SEQ ID NO: 106336 - DNA, 448 bp, Zea Mays
gtcaggggagagctcactcatcgcagcgagacgacaaacttgctcggagagccatgggaatcaaagcgagagagtgcgggaggaagcaggagggcaggagagcgcgtcggctgggagatggcgagtcctgagagctagccaaaaatgaccagcgacggggagacgatggcgagccagatgcgatggcgaagttgatgaagagactgttggaagctttttgcacggagtttttcttatttttagagagcacgggctgtttagctagtctgttggagctgctcgaggcaggacaggagagcacgtggaagagaaggggagggagagagagacgtgactgatattatgaagttgcattgaccaattggtcgttgtcagttgaatctacaaactaacaaattatatactcctattatattattatgtgctctaaagcaatcggtgcttcgat

SEQ ID NO: 106337 - DNA, 602 bp, Zea Mays
gccgactgttctttcgagtcagagggacctcgtcctcttcctccccgtcgtcttcaccagcaacacaggcaacacccacattgaaatcagcaacagatggagcacacccattggggtcaacagcagatggagcacccccattgggatcagcaacagatggagcacacccaccggggtcagcgtcagtaaattcaggcacaagcacttcttcagcagcaggaaccgaagtaccaacgtcccgatccaaactagatactcgccgaaggcgtctctttttctttttctgctcatctgcggaaggatcaagttgattggcccggcaagggcgtctcgggcgagtactggtaggcttctggatatccaaggttgtaccagtttctgggagaggcgccaccaccaatgtcccagcaggagcagcatcagaagagtcctcagccagcaaatcaagcatagcacttatttctgcgtcactaggatccaaaggcacctcaaaatggacctgccgttcatcatcaggaatttccccgagcgaggcaaccaagacgctaacttcttcagcagagggtcgcactctaaggcccaaactgccatcagtgacaggt

SEQ ID NO: 106338 - DNA, 415 bp, Zea Mays
cttagcctgatccaaaagcttttgccagaatgaagatggtttcccaaagttgctgagagcatgcacagttcgtctcggaatcaggagccagccagagtatgatggtcgtgaattcgtcgagcatggcacggagaagtgtgtcgtgactgtatacattggatccagtccacaccatgtggaatggagtgtcactgctgctgggcacagattcaaagacacctgccaagtcgtcgcccgcaaggcattgaggaccctgtgtcagatctatgaagaagaagtggccgacagaccactcagattctttccgccctttcagagaaaccgtcccgtttggatggccaggatgcatgcattggaaggtcagcagttgcttaaggatgaccccacagtcgtgtacctcactgcatacctgctc

SEQ ID NO: 106339 - DNA, 422 bp, Zea Mays
acatctctgaacaggctgaccatgaacaccatgagaggggctgttcatgtccttcctgctcgactcagaaacccgccgctcatctctcttcctcctaaagcaaaaagaagctagatgcccatccctctcacaatactcacaatggtacctcacctctgtcttgggtggattttgttagtgggaggaggctttctttttggatggttgaggggctctaggaaggggatcgctagagatgtcgggaaaggtgtcaagtgtgttcctgagatggttaggttttggaagccacacttgtttctgaggaggagctctcacaagttcattgatcacaccatctctcataggggtgataggcttagtaggggtggttttgataagcttgggatgggtgaaggtttctctgaaggtgtcaaaccactaca

SEQ ID NO: 106340 - DNA, 600 bp, Zea Mays
tggccacctagggtttattttgtgggagaaaagaagtgacgcctcagatgacttctgatacagcatccaacggcccacaaccctttttcccatatccactcaccgaagatcaacttttgggtcaacatttttttgggatattacactctaccccccttaagaagaattcgtcctcgaattcaaccactctaaccaaaacatccaaggtaccccatatagcaccaccattcaaaacatgggtcaattattggtcttaattaacacaagaacttctaccttggactaattgtttaaggaaactacacgacctgacatcaagcatgaaacaacatgcaatgaagctcaaagcaagtcatagatgcaatcaacactacaatttcacaccatcgaatttggatgcaactatacatcaacatcaatgtcttaagacaacactcttttatgaaggggtaatatgcactaagcacaacccttaccaacttcaacaattaattttaattaaatggtgaaacatccccacccgacgaatgtataagaagatcaaaccctcacctcaaagcaccacgaaacaagtagttctattgaaacaaaactcctaat

SEQ ID NO: 106341 - DNA, 433 bp, Zea Mays
tttggtcatggtagaatgaggacgacggcggtgaatgcgctccgactaacaattctaggcggtctgaatcgcaatccacccaggagaagccacagtcttgaccaacgaggcttggtcaagctcataggctcgacaccaaggtcccgatgaggagtacgtgggtggacggcggcgacttaaaacttccctcacgtcttggtcggcggtcaatggtgctctcggtggatttggcgaatgcgcgtgacggtcacaaggtcacgggagcctggattttatactcctcaggggagagtctagctggaccacgatcgatggagggctcaaccgaaatcgtgctaaccgccttccattcgtaccgggctcgaggtggatgaccatccgacgcacaggtcccacatggaagcgaatgctggcgcgcggtgtggctatcctg

SEQ ID NO: 106342 - DNA, 395 bp, Zea Mays
tttaacgtttaacaaatgtgttgccatgttcttgattcacagtaaccaaaaacaagtgaccaacaagtactaaaagacccactttagtaccagttctaaactcaaccggtactaaaagttgatccaaagatattattctatgtatttatattctgttatgtacatatgtaccaatgcagagttcgcaacatgcagcatatatacattcaaaattaaaacaactcaaagttcacaatcaatacatagtttaaagcatcaacacccacacaacatcatctagctaagcatcaatggcagataagcgatagtcttttgcttcaggatcttatatcgtcatgaatatctgacgatgtcccaatcttcttttagtacagatgaagtaacttgcctctaaa

SEQ ID NO: 106343 - DNA, 501 bp, Zea Mays
agaggacttcgaagatacaagtcctaaggaaaattcttcttcatataagcttcagctttggaagcagccacttttcggccacctttatctcaaatattcataaagaaccatttaacaacattgaatacttccttctaaggcttctttatgtcttcaacatccatactgaagtcgtctttgctgattgccttgacatggtcgcaacctaccttctccagcacagaagccatgccgcaagatactatcatggcacagtagtcacctcgggcattaatgaaaccttcaagctcccctttttctttctccacccaagtaagagctccaccaacatctcccctagaataagagtcctctctcgaagtagcgccaatagaggaaaacaccctttttagatggtcacaatgacgagagtcaataccgaagcaattatcctaaagatggctcaaacactctagcaacttcatgttttcctcgcccttggcaccaatttcttccttcgcc

SEQ ID NO: 106344 - DNA, 523 bp, Zea Mays
attcactatggttgcgtagagcctatcgattaggtagttgcgtgctctggtggcggagtaattgctcgccggcgcggggcaccgtcgtggtgcccctgttcatcggcaccgccgcgcgcgtatcctggtttatggaaagtaatggggccgttgaatctttgatctacggccgagattagacgaccacgtattcgttcgcgctgtgtgatctgaaccgtcagatgatgatcgtgcgggcggcggtcgatagaggttactttcaatccggatcctcgatcctggatccaatggtcatagaagcataccggttcgtggagaatgtgatttaatctggaccgctagtggttgatcggacggctcaggttagtccggaccttgctagccgagtgttttctaaaagagaccctgcgctttactagaatcaacccgcggtccagtcctgggttaggctgagtctagggatgttgataggatagcccctagtctttctggaatttgatgcgcactccagagaatggaaaat

SEQ ID NO: 106345 - DNA, 387 bp, Zea Mays
gaaggtccagaaggatgcagaggatgagagctcccgcatagctcttgggaatctgcgttcagaagttatcacgctaagaaatgaagctcttgaaaaagacaaaatattactctccttagcagataaattaaaatctaacgaggccaagcttgcttccctagccgaagctcacaaattcgaagtataagagctgaataggaaggttgctgaagcaactgaaaaatttgaagttgaagtaatgaagcatgagatatgcgaaatcgaaatgatcaagagcgcataagaatgccaatgagcttcgtgctgccaaagaaaaatgttatgagatatccatggaatgcgcaagaaatctaaaaagcagctttgctaaagttggagccttctcct

SEQ ID NO: 106346 - DNA, 851 bp, Zea Mays
gaggaggtgattggctgcttgtgtgaggatctgtcggtagccttctgtgttgggcatgcaaggcaggccgttggtgatctgggccaaaaccccgccaacttgactcggcatttgcatgtctcgagcgaagttgggtagtaggtttcacggaagaggcaggtggttgcgccggttgctggcattgcgttctgctagttcccgcccatgatctcgaaggagatggcggtctcatcgtcgtgagttccattgctcgcgggacgcctgctcatccagggtttccctcgcttcagacgcctcgtcctgcgacacggctgagtggggtcccgttctccggccacatgacgatgcagggcattacgacactgattccggagaaggcgtgcctcgcgctgtgggggttcctccccttgcattgttggttcattgtcggagacggggacatcttatatccttccgtcgatgaagaggatgtcggggaagtagggtcgtggcaatgtccattggggcccacatgctgcctttgtaggcagggcaaccggggtggtcgttggatgttttccatgaccatgggagcaccgagggcctctgtcctcttcttccgagtgatctaggtccactcccgggtgggtgaagtggacaacaaagtctgccgctgaaacgatcatgatgcccaagaggggggggggtgaattgggcttttctaaaaataaacactaattaaaacctaagcaagagcccaacttcaccccaacaactagcactaagagaataatactagaaatacaataatgctaagacaatacttcaaatacttgctaaacaaatacacaatgtaaaatgcttgaattaag

SEQ ID NO: 106347 - DNA, 291 bp, Zea Mays
gatgactgaggaggttgaactcgggagcgctctttaattatgtttacttgtctcatatcttgaaacccctcttgctctgtctctgaatcctctttctacaattatcctaaaaaatccacagcataatatgagatatttgttggtttagatttgctagatactatcacttcaaagatttggggttgaagaaacaggtggtatgaaaacagtggcccatgcacttaagttcatggtgctatgctatttcctggtccttttcacaagactatgcacacctgaccgcttacttgc

SEQ ID NO: 106348 - DNA, 804 bp, Zea Mays
gtcggtctctattttgtaatgatctcccccctgtaaatgaagacatgctttcctgttgatctgttgttgcacactctgtttttgcatctgatggctcattagcattttagaggtaatgcccgagtgatgcttgcttttctgcgatccaaacttctcccgagctatcgacctgccattttgcacccaacttaacatgctaacccacacttctgctggcgtcctcttgagttctgaaccctagttctgctgaatccgtttgcatcgtttgagagatcatgatggcgtccaagaaaagaaaacagagtgctgctattccagtcgtcccaccaatcgatcccaatagtcaactccccttcgctggtaaccatgtgtctgttgtttctgaagctgaccttctgcaccttgttgagattggtgttctgtcgtcgaaagagttgtgttcctggtggatctagtgcggagttactgtcccgacagaggatactcacgaggctgttatcttcgtgtcattcctcatccggggactggccctcccagtttctcccttctttcgcggccttcttgacttttattctctgaacctcacccatttaaatcctaattctgttcttcaaattgttgtgtttgttcatctttatgaagcttgcgaagctttccttggaattcttccacactttgggctttagaagtactttaaccactgccggcccgggatggttggagggcaacatcagcttattggtggtgctagcctagaacattgtcgaggcaggaaagttgagtatcttgacatccccttgaaag

SEQ ID NO: 106349 - DNA, 1041 bp, Zea Mays
gtgagtgatgtatcaagggaatgagacaatgaacccaggtctcaactatcttcctagtggtgtacacctaaaggactatggttcataacaaacaggcactacaagagcggtctatgtacctcgtatcccgtatcagataaggatacccatggatatatggtggatacatatcatcaaaatatccatgaaaaataaatgagataattctagatacttagtcgatagttttggacttcctcgatgaagaaacacaccgcacacctattactggtggggtgacttcattatatagccagataagctagggttacattagggttacagtgtacatgggccaatgggccaggcgccccatatgggctgtcatagttacattccaacaccctccctcagtctaatcgggagtgtcatgaacgcaaagactggacctaaaatcagtaaataattgtacaggtaaccctttggtcataatgtcagcgaactgaagcgatgatggaacacggagcacccggacctgtcccaaagcaaccttctcacgtacgaagtgaatgtcaatctcaatatgctttgtgcgacgatgatggacagggttggcagtcatatagatagcactgacgttgtcacagaagacgattgtcgccgaagagatgggtgcatgaagctcctggagcagctgacgaagccaacaagtctcagccacagcgtgcgcaacagcacgatactcagcctccgcactcaaacgagaaaccatagtctgccgtttggaggaccatgagactaagttgtcgccgaggaagacacagtaccctgaggtagggtgccgagagtctagacagcccgcccaatcagcgtcggagtaggcagacaaacccgtaatgctgccggtgccgatgtgaagtccagtggagagggtacccttaacataccgcaggacccgcttgagcagcgccagatgaggctcgcgcgggtcgtgcatgaagaggcacacctgctgaacggcataggcgagatccggccgagtcagcgtgagatactgtagag

SEQ ID NO: 106350 - DNA, 1147 bp, Zea Mays
tgcagctttagctctagtaatgatctccaagggtctccaaaactgtaaatatccaaccaggctgctgtggatgcgctcaaagcaatctttggtatgatacatcctaaagtccaaatgctattgcattaagatcatcctcagttggaacaactctagcggacctgaaatgtgagatcatttggcttaaagtccctgattaacaaaatattgtgtatcattatatgatgtcctcatggatctttggtcgatttgcatgatttgaagcccctgtggatcctaggtcgattgaatcggaggtggagttcctccagatccttacaccgttgcaattttcattcaatataccactctacatttggagcacactcttacgacaaagttgctaaacacatccacctttttcttttgatatgcactacatccacatgttcacacaatacataacacaacatattttcagttttattcgtagagctacattttttctaagcaagcaaacacggttctattttaaggggcttgcattatacttagcagttagcactacagctagaaatcaaaattgacctcacaagcgaactctgcacaaggaagaacaaaaggtatatatgatgaggaatcaagtggtttaaaattttggaattgtctctatattgcccatgagtttatgaggcaaacaaagcaaccaagaaatgaaggaactgattgcttacattaaagaagttagacaatggaagagaccaccgagatgcctaaaatgtccatttatcaatatatatgcactatcttgtcccattttattttcaaaaaagttgtgtgtacaaagacgtttttatctatgtatcggcactgtcaaacaaaacatcagaatagctagatgctgttaaatcctgattaatcaaatgcagcattacttattgaaccataggtacatgtgttctgctttgataaatctatgtttatatgttacaaagtatagacactactgaatgtaaacttctacttgccggcatgccttgctagagacgaagaagatgatccctggaccactcaaacacacagaactcaacacaaactagactaggacaccaaactgcacccctgtgataggtgtattctattgatatgtttgtgtacataattacaa

SEQ ID NO: 106351 - DNA, 525 bp, Zea Mays
gtttaccgagccttctctaccgagtgccacactcggcaaaggttttaccgagtgcttcgggcactcggcaaagcgctcgtttccggtagtgtaacgatgcatcacctcttctagaatggattaattattcaaaccaaacgccccctatatctctcctgcaaattattgttggtccacaccacccgtggctgcacaccactgctaaaacagatgtcagattcataaatcaaatttaactgagtgtaaaaattgaaattggtggctaaataaaaaccaagtgtgtgggtcggttaaggtatccacatcactgagattattagcatgcaatcatgcaatggaagaccaatagtatgccgacccggccggtcaactaaacttgtcccaaaaatatcactatatatttttcctcaccaaaataaagaccatattattttatattatggtcggaaggaataataatatattccttctattttcaaatatttgtcacggttgatattttttctacaactttaattatctccg

SEQ ID NO: 106352 - DNA, 305 bp, Zea Mays
ctcgaaggctacgacgatggtcacagggtacccaaaaacttgcgaaaacccatctctatggaacgactgctatcaaagacgaaaagccaaacacaacccaaaaaaactaatgacgtttattaaaatatctcttccatacaaatattccataaaaattaatgctctaccttttctctttaggaaatgcgaaaaagtgagcggccgaggccgagctgcatgtcaccgacctccagcacatcgaaggcattctcaatttcacttgattgagtcctcaccgagaggccgagctgtgactaaggcatggt

SEQ ID NO: 106353 - DNA, 407 bp, Zea Mays
acagatgtaaggtactccatgggttttctcatgttgaaggaaagaatctaacacaagtagcattggttagaagttttgtccaccatttaaacaataattgtttcatcacaaggaagtcggctcaacgggatcacacaactctagctctaatcctagctagtcgcatcattgtctaggagcattcttctaaaggtaaggggcactcgcgggtaaccctgactaaatctcttggtgctctttaggccagatctagcatcaatctatataggctactggcatggcacgactgatggtcgatattgacctgcgttgctacaatgacgggcgatttgactgaccggtcgactgggctgccaatcaattggtgtaagggaaatggactttaagccatttctatattagttttg

SEQ ID NO: 106354 - DNA, 281 bp, Zea Mays
ctttaataggaaattgtcttctttccaaaacaaaaggtagcttgtaattcttcaatgataaacatatccttgggataagaacagtttttccagtttgaattcccgttattatttttgcctctaatatcagatctcccaaggaagtaataattaatcttgtgccgttgcatagtccttcagattgatttagatttctaaggagcattattggaacacccttcttcaacacaagtagatgttgtggaaagttattgccttgtagtgagtttaggaactccact

SEQ ID NO: 106355 - DNA, 765 bp, Zea Mays
gttagaaacaccggatccagccccgactgccctcatcaaagtaactgggggaaaacttacgcctgcggcagtgcagacggaactggctcgtttcattactaaggactggacttgggaggctttgccccatagtgaggaatccttcttagtggttttcccttcggttgaggaattacagagaatggttgatgtggacttcacccttaaaaatcatggtgtgactctcactatctcggaatggaaagatgctagtgatgctgatcctagttaccagcttgatgaggtatgggtccatatcaagggggttccccatgcttggagacactacctaggattttgggctctaggctcggtaattggagcgaccttggatgtggatatgtatacatatagaaaaatgggagtgattagagtgcttgttggaatgatgaacagagatcctcttccccttaccactgacattgtctttggcactaaaggatatgagatcacttttgttttggaagatgagaaattctcccctgcagaccctgtggtgttcacagatgtcccacgctgggatggcgatggtggcggggatattggagatgaccaagatgacaaaaacccaggtcatgcaaagaagaaacaaagaaatggatggagtgttggtgggtctggtgcttcatcgggtgggggagatagtgggggaaatgatgtacctatgcttgatgctgctgctcttcccctcacaacgactctacatggccctttctgtaatttgtt

SEQ ID NO: 106356 - DNA, 449 bp, Zea Mays
ttcggaagccggaagaagaaaaggctaaatagagtttttgatgctattgggttcatgtaccctgattaccgttacccgccacgggggcagaagagaaagagtgcaatttcgggaaggatgttgcttcagctgctccaagcgagcccgcgccgaagaggaaaaaggtgaaggttcttactcaccggtcgcgatatattgaaccggccgtagtgcccgaatttggcggtgagacctcttcggctactgaagccaaggatcctacgcctacgcagaagattgaagagccggctgcaatgccgaagacatcctcagccaaattagctgagccgaaggccgataatataggggtcaaaggaacaaagatatcagaaattacaagcccttcgacagaagtgacagtgccgaaggcacaaaaaggtcttacagcgacccctaagagcaaaagaatg

SEQ ID NO: 106357 - DNA, 434 bp, Zea Mays
catatagccttcagagtatggccgcttgtagagaactgggaaatgccgaaggagactgtcaccgagtctagcgaaggtgacctggttcgactgaaatacaccttcagatatggagataaattcgatgaaccaaacgatgactgctaaaatgcattgaagctaccagtgatgaactgcttggatcatactccaaggcggaagataatgcattatccacagccttcggaggtcggggaagaaagagattgaacatagtttttgacgctattggctttgtctaccccgactaccgttatccactgtgaggtcagggaaagaagaggaaaactgctgcttcggccactccagtcgatcttgcgccgaagggcaaaaagttgaaggtccttacccatctgccacactatattgaaccggtcgtggtgcctgagtttagc

SEQ ID NO: 106358 - DNA, 522 bp, Zea Mays
gtcagagttaaatatgagacaaaggcgatggcttgagcttattaaggactatgaactggaaattcattatcacccaggcaaagccaatgttgtggcagatgcactgagccgtaaggtttcctgccactgtcttacggtgaagacctctgacaataccttatgtcaggagatggagaagctaaacctgggaatggtccaacaaggaaccctaagtcagctaaagcttgagtcagtcctcttgcaaaagataattgatgctcaaggggataatgagggtatgaaacacattcgtgagaagataagggccggaaaagccaaatgttttaaagaagatgatcaaggtattgtatggtttaataaccgcatagtggtgcctaagaatgaagagatccgccagcaaattcttgatgaagcacatcttagtcgctattctattcatcccggaagcactaagatgtaccaagacttgaagcaacattattggtggacaaaaatgaagatcgagattgcacgctatgtggc

SEQ ID NO: 106359 - DNA, 360 bp, Zea Mays
gtgaaggtcaggaagaaaagagggtgtcaacatgtgtcgaacaaggcttggactatcctatggagggttcgaccatatgatcgagctaatactaactagttaacagctgaagtgtcagaccagcagtggtaagggcatcaaaccataccatctcatcgtacacacagaggtgtgttggactcaacgggcatcggactagcagcggtaagggcgttggaccatacgatctcattgtacacacaaaagtgcgtatcgaactcacagtggagacattgaaggactaaacaattatactatttacgctcagaccatcgaagatggagtccgactgtcactataaaggttcttgagaggagaaag

SEQ ID NO: 106360 - DNA, 863 bp, Zea Mays
atgaagatgcaagtcaagtcgtaaccgaggcaattggtagtattcaaacagtagcatctttctgtgcagagaagagggtaattacatcatacatccaaaaatgccaagcttcaatgaaacatggcattagaagtggaatggttggaggccttggtttcagtttatcaaacttaattatgtatctcacatatgctctttgtttctatgttggtgcactgttcgtacacgaaggaaaaacaacttttaaagacgtttttagggtaagagatacgcatttgggatcatttaaacaatgacattttgttcagcaactgactaaatttaggcaactggcaggtctattttgctctgattttcacagcttttggagtttcccaaacaagtgcaacggcaacagattcaacaaaagcccaggaatccacaatttcaatactaactattatagacaggagatctaaaatcaactcgactagtgatgaaggcgtgattatagaaaaagttgatggcaacatagatttcaggcatgtaagcttcaaatacccatcccgcccagacgtccaagtgctcagcaactttactttggccattccagcaagaaaggtactgcttgcttgatgcttgtcatcgttaattcataagttgtttgactggaggtggagggggtagttagttattcattgatcattgggagaaacaggggatgggaacttgggtggttgatcttgctaggttagtaccaagttagaccatgctagacacttcacaaaagcgttatggcaattcttgggcagcttaaataatagaaaattatcagatattggctacaaatacagtaactgtttgctacttttctcaggtaatca

SEQ ID NO: 106361 - DNA, 465 bp, Zea Mays
agagaaaagataaaggcatagaagagcaagtggtacgaatacaataacgaatggattaagtctaggcctacacgcggtaaagaagaggatatagtcaagggtgagataagtaaaacatagctctcgaattgagatagaaaagaggggatttcagcaagcagacctaagataagtatcaaggcaagatctacagattacaaaggtaaggatgatatcaaacaaaagctcaacaaaggatgaagttaaggtaagacaagacttgcaaagcgacaaagggaaaggaaacgaacaagagcgggatagggaaaacaacactctcggattgaaatggaataagtgaggctaagaaaataggtaaacatcatgataaatatggagagaggtcaagggtcaaaggtgataataggcaaggatataaaggaagaggtaaatgtgcataaaaaaccaggaatctaggtacaatca

SEQ ID NO: 106362 - DNA, 499 bp, Zea Mays
cactaggctaaaacttcaaaacaagtgtgatgtggtgacttgaagtgcttcttaaccctagagtagggtacttacccatgggattgaggtatatgggtgtgtgttataccaaattgagtattatctcaaaagttattggaaatgttcacaagagactaaatttgatggatttgagtggcacacaaaccctggagcactcaaaaccctaaagagaaccctggaaaccctaatttgtgcccttataaggtgattttgagttctaggaactttcggaccaaaatgcatatatcaaagtggtaaagtatcaaaaactaaacaacttttacattggaggattttaagtaatgtggaacaaattggactaatttgtgaaaaagccacaaggacacccatatggctaactctaaaatcattgtgattgagctgactttggaaccttgtatttcttaatccatgaagattttgccctaggtcactacaacaagtttgtataggtaat

SEQ ID NO: 106363 - DNA, 1405 bp, Zea Mays
cttgcctattgagaccaattaaccaaaataaggatcaggcacacaaggcaacaagccaatgtagtgccacctaaactgcctaaaatggcacatgctaacacccccgcaatcagatcgtcagccactgtgcacgttcagactggtcctgaattcggtgaagacagaggatggaaggcccttggtgaagatgtcggcatactgtgatgtcattgacacatgtaggacatgaagatcaccagcggcaacccgttctctgacgaagtgtagatcaatctcaatgtgtttggtgcgttgatgctggatgggttcagaggtcatgtagacgacactgatgttgtcacaatacaccagtgttgcgcggcgaagaggagcatggagttccaggaggagctggcgcagccatgtggcttctggaactccattagccacaatgtgatactcggcttcagcattagacctagagacggtgttttgacgcttggaggaccaggagatgagattgtcaccatgaacgcagtatagcccgaggttgacctgcgcgtatccgagcaaccagcccaatcaacatcaatgtagaccacaagatcagtcgttgtagatgggcacaacaggaggccaagataaagggtgccacaaatgtatcatagaattcgtttcagcgtggcaaggtgtggttcccggggagagtgcatgtgaaggaaacttgttgaacaacataggcaatatcaggtcgggtgaatgtcaaccactgcaaagcaccaacaagactgcgaaaatccgaagcgtcagttaccggcgcaccatctgctgaagcaaccttcagatttgtatcaaccagagtgaggcaaggcttgcactctgacatccctacacgatcaagaagttccaccatgtactgcttctgagagagaaggccatcacctgagggctgaacatgcataccaaagaagtgatgtagcacaccaagatccttcatggagaactcctgttgtagggccgaaatgatccgacacagaagggtcggtgaggaagcagtgaggacgatgtcatcaacatagagcagcaaataggcagtgtcagatccacgctggaagacaaatagtgatgtgtcaaacttggcctcaacaaatccaagggagagcaaatatgtggcaaaccgattgaaccatgtgcgaggagcctgcttcaatctgtagaggggcttgttcggtcgacaaacgagatctaggtgtgcatggtcttcaaatctagacgactgaacgcagtacactgtctcagacaaggttccatgcagaaagacattctttacatcaagctagtgtacacgccatttctgggagaggaccgtgcgaaccgtagctggctttaccactgggctgaatgtttcagaaaaatccacacctag

SEQ ID NO: 106364 - DNA, 429 bp, Zea Mays
ccaacatgcaaatggccatgttatagggatggtctgcagctgctgtgccggtaaatgctgttgctttgacaagaattggcaagcttcacatctctggactaactcggcagcatcactcttcgttgtaggccaatagaaaccagatctgaaaaccttcccaaccagagttctagacgtggcatgtacttcgcattgtccggcatggatttcatctaacagttgcttcccaacgaccaagtggatgcacttcatgaggactcctatcgcacctcttctgtacagtgcgttccctatgagggtgtattgagctgattgccttgcattgcgttccgctgccgccttgtcatccggttcctcttcattttttatgtacctgatggtaggctctctccagtcactggggtccaactctagttggctcaaggtgtt

SEQ ID NO: 106365 - DNA, 1004 bp, Zea Mays
gcatagtggtcgccttaagataggtagatgtgatcgtatcgtgtagacttaagtcgattgtcccgttagtagggtatagtggttcccctaagctgagtcagcgtgagcatgttgcaccatcttaggtcatcgccgacttaagccgattgctccgttagtagggtatagtggtcaccctaagtcgagtaagtgtgagcatgttgcaccatcttaagtcgtcgccgacttaagtcgattgctccgttagtagggtatagtggtcaccctaagtcgagtaagcgtgagcatgctgcaccttcttaagtcatcgctgacttaagccgattgctctgttagtagggtatagtggtcaccctaagttgagtaggcatgagcatgttgcaccgtcttaagtcgtcgccgacttaagccgattgctctgttagtagggtatagtggtcaccctaagttgagtaggcgtgagcatgttgcaccgtcttaagtcatcgccgacttaagccgattgctccgttagtagggtatagtggtcaccctaagttgagtaggcatgagcatgttgcactgtcttaagtcgtcgccgacttaagccgattgctccgttagtagggtatagtggtcaccataagtcgagtaagtatgttgattccaagtccaatcaaattgaagtcagttgatagtcaatagtttgaacgcccttgaaaatgaaaactttattgatgactgattctccaattacagagtacaatgttgctctgatagcttttgaggccttgctaagggtaaaaatttctaagatgctctatgttccatgaatttcccacttccgtaccatccatttgagtaagccggtatgatcccgaccgagtgacctctgacacaatgaatggtccttcccatagtggtgacaacttgtgccatccttcccccgttagaattcagcgaaggaccaagtctccctctacgaagtatcggtgtcgtatggctttattattgtagcgcctcac

SEQ ID NO: 106366 - DNA, 430 bp, Zea Mays
gccaattataaaagttgtagtacagttaataccctacaaatgatagtaagaaagtgaccccaaaacgatttcagaaaaaccccaaaaggttcaccaaagagttgagcataaaaggaaaatcagaattttctaagtccaaaaaccaaaccttttgcaaagatcaaacatgttcaccttaatcccagactcaaaaccacttggcccaattgacaaactggcgctaaaatacctctagaacaccttgggaaaatttgaacccatccctaagtcgtttgacacgacttggcatagcttttgtctcggtttggaaagctaggacaaaggcaacttctcacacctatatctccctaccccgaccgtatccttgcttgggactcacatcaaaatggtaggatttggtgcagggaagagaccgtacacgagtgttttg

SEQ ID NO: 106367 - DNA, 285 bp, Zea Mays
tgcttgggctgtgttatattagactgaccatggactgggatccaggttaaagtagaccaaggttgaggtgattgttagggattgtattgttacaacatatatgttttgttttctctcatttcttgccacagcaatagttttatttataatttacttcttcagaaacccacatgatgaagattggtccctaattactaacatcctggcttgtgacatcaaggaatttccatgttcctatttgggcctacccttgagcgttcataaactctcaagagctgaacttca

SEQ ID NO: 106368 - DNA, 514 bp, Zea Mays
cttttccgtagtgcagtacacatgcccttaacatgtcttccaaaacctggtttaccctttttgtctggccatctatttggggatggtatgctgagcttcgtattacatgggtcccaagtgattcctgcaattgttcccaaaatcgtgccacaaatggtgctcctctgtctgatactatagtccttggtatcccatgcaaacgaactatctggtcaatgtaggtctctgcatacttctctgtcctgtgggtggtgtgtactggcaagaaatgagctgacttggtcaatctgtccacaatgacccaaatggaatcatggtgccaggaggtattgggcaatcccaagataaagtccatgcaaatgtcctcccatttccaagatggtatgggaaggggttgcaaagggtctgctgccttcaaatgactagctttgatcctctggcaggtgtcacactcggatatgtacttggcaatctccctcttcattctggtccaccagtataaggatctgagatc

SEQ ID NO: 106369 - DNA, 732 bp, Zea Mays
tttgttctccagatcaggacaaaggtatctgggacttccggggttttgtgaataagtttgtaaaccctctgggatgagtacgtatctgtattgttggagcacatccatttgtctggcatgtctgatagttccatttcatgaagcattatgactagcataagcatttgcacgtatgctggggccgatagtggaagatggaacagatcatcaatcatgggtgccatttttgcctggtttagagttatatttgtattcactgagtatgagaacaattccaagaacttgtcacataatggggtgcccttccatctgtcatgctagagaaagattatggttccatcacctgttttgatattggatatttcaaggaatgccggaaggttcttcagaacatctttccactagaatgatccactgttgccatttgggggagcgaaccattgctgcctacttctccaaatcagttgcacccatggtatatcttgtttgttaagaaatttatgcaacatttttgtttgcagggcctcgttgtgttatttaagatctaagattctgagtcctcctttttgcttcggcctgtaggataaatgccatgttgcctgggatgaacgagtggcattgggccagctcctctccagaggcaatgccttctatatctgtctatttgctttatgactgtactgggaatcttgagcgtacagaggtaaaatgtgggaagaaaggtgaagactg

SEQ ID NO: 106370 - DNA, 531 bp, Zea Mays
aaaaggcctccagcccgaccgagccagaggctccttttatttcccagccagcacccgctgctctctgttcccggtgactccctctctcccaccggcgttctccgatcaccggcgtctctccggcgacctggtgctctccgtgatcctttcaactccggtgagcagtcctttcccctctccttccctctctcatccctgctctcggttttgaaaggcagtgtggcactcaattcaccccccattgtccatctctcaatttcttgtcaaatcttgcgaatccagttggtggaatgtgttcaattgtccctagtgtgtatccctgcaggttcttggctccttcgggagggttttcactcctcaaatagccatttcaccgaaaccctaattctccgcacgccacatgctcggtgaaatgcccaaaccagccaaacttgctcaaactgaacccaattttttcaggcaccttcacaacactttcagtaacctacttgccaaatttcacgccaatccgagattccaggcttaaatttc

SEQ ID NO: 106371 - DNA, 578 bp, Zea Mays
ctgatttccaggtaactcactactccattgaaaatatctgcctgattgtcatttactttatgtttagcgcgttaattggagcagtttgccttgcccagtagtaattggactaaagaattgtcatttttgaatctgggcgttcgcgtgatgatctgatatttttagttttctggttggctggggaaggaggagttggcatgttgatgtgcctgtctttggttgttgctgtgtccttgtgttcagacatacaatacgagacagatgcactgagatatgagacattataattccagtgtcagtcattcagtattcaatagagcaacaatttaatcagtcagaaatttaggaacattgtgcgagaaaaactaaacaaaatcatcattctctgggcaaaagtctggaaagaacagactccaactccaagttgctattaccacttcactacttcagggtctattttcttctctctagttatttcatttcttctatcagattgccttctcttctgtagtaaaactgttagtctgtgaagtcaattcagaccccagaactcaaaacagggtgtgtatagagaacag

SEQ ID NO: 106372 - DNA, 339 bp, Zea Mays
caaaaaggggatcagtcagcccatgctaaaatgcgtgaccgaaaccgaaggcattcaaatccttcgcgaagtccacagcggaacttgcgggtcccactcagggcccagggccctcgctgccaaggtaatccgtcaaggattttactggcccgtgataatctgtatcatgaatcgagtcacgaggtcttgcgaagcatgccagaagttttctcctcgctcgagcaccccttcgcagttcaccaagctgatcgcccacacatggccacttcaacgctgggggctggatattgtcggaccactacctacggctcaagggaacctcaaattcgccttcgtcgc

SEQ ID NO: 106373 - DNA, 1095 bp, Zea Mays
cgacaacattacgaccccaaagtagggactctattcctagggcatgttgacatgtccttagcactgacatatcaattaagactcccatacaacacatttaatgtgtaatgtatggcattatagtccggtaggtgcattgtcgccacgacttaggcagcaaagtactcaagatcactattcagtacgtgcatcaacgttgtagtcacacgtgcatatgtcagaataccatgaagtattatcaagtataaaaggccacaccgactaccaactatgtcgtacccaatggcacagacaccagcgtccatggaggcaatataacacacccgccgttacgacgggtatgacaataacaaaaggacatctctgacactgtgccacgaccaaaggcatggctctgtgtatgacttcacaaccaggataagatcagggtagttgggtactagttggagggacccatggtttaattgacataatctctctcctcacttcctttataaaaagagggactagagtaacgtttggcaggttcgatccagggttgaaattattctacacagagtgttggctcataagggattctttaactccaaattagagttaatgtttggcagtttcaatccagggattgaaatcactctatacaaagggttggctcataagggattatttcactcccaattagagactcaccacactcaacatcaaagggcaaacataaaggtggagtaggaccgataggctagaaataccaccagaaccaaaaggtaagggggagctaggaactcaaaattcacagttgagttatgagcttgtaatcttcttcacatttgtgttccagcgttgcccttcctttgttccagcattgatcatcgttgcccttcagcttgccatcaggggcacgggggacaagggcactagaccgagcagaggctacggatctaggacacccgcccgaagtggtgcaatcttcaaatcctcaaccctcacttctccaacactgcttacatcatcaccaactacacgattctgcctaactttgccacgacacacaacatactcaccctcaaggagttttgccttgtcaacgaatacaag

SEQ ID NO: 106374 - DNA, 458 bp, Zea Mays
ctcaccacctggcatgacattgccagatccgcgcccgcgcttggatctggaccgaggaggagtgtcttcacgaatttctggggcttcgtcacttgaatcggactcaacaaccgatggatttctacgacgcaccatccttaagattaaacaaagaagaacatatggtgagatattgatgtttaaggagtttaacgaacatgttttatgaaagacaagtataatattggaaatgaacttcaaccattcatatgagccatttagctacaatgaacaataccaacctacttaactcaaaacaatgttcgagacaatgataacagtttaagtgtgccatacacctaaactacacaatatccttgaagagatacttaagataatcaagaactatatggatcgagtcaaaaatagggaaaatgagacaatacctcgatttgtgaaatcatcaacgaaaatcccaa

SEQ ID NO: 106375 - DNA, 585 bp, Zea Mays
tattacaggaagtttgtcaggcattatggtactttggcaaagcccttgacaatattacttcaaggcaagaaggcatgggtgtggacaattgaagctcagagggcttttgaacatcttaataaggccatgactcaaacaccttttctggctttaccaaggtttgagataccttttgtggttgagactaatgcttgtgatgaaggcataggagctgttcttatgcaggagcacaaaccattggctttcttgagtaaggccctaggtatgaagaacaagcaactatccatttatgagaaggaatttctggccttaatcatggcagtcgacaggtggagaccttatttgcaaaggtcctctttcactattatgacagaccatcagtctctgtctttcttgggagaacaacatcttcagtctgaattgcaaagaaaagctatggctaagcttatgggtctccagttcaagataatgtacaagaagggaaaagagaatgtggtggcagatggtttgtctagggtgggggcagccatgactttagcactggtttcgaaggtccaaccggtttggcttcaggaaattttgaac

SEQ ID NO: 106376 - DNA, 719 bp, Zea Mays
gtcctgactagccaaagtagttgttagctcatctaccttagtggtgagatcattgacagaaagtgatacctcggaggtggagttgttgctaatgtccttgtcgttgttgcccaacgtgtcctcactaagtgccatggtgcagaggtctcctatagtgtcaatgaagaagaagagtccatagagcttgtcatcaacctgcctcttgagctccttgtgacttgagggaaaagaagtgttgtcgaagttgtggtcgaggtcactaagggaggcaaggaaggcacacaccttgatcttggctttgtggaggtacttctacttgagtgcctcattgtcaaacctccccttgggcttgtgcttgctcgaggtatactcgcgcttgcccttgcaccaaccagagtggtggttgtgcttcccagccaatagcttgctcttcatcttgggacagttgacgatgaagtggtcttggtctccatagttgaagcaaccatccttggccctaccatgttgccgattgataaggttattttggaaccgcgtgaaccaactggcaacaagtgctagatcttcatccacaaggcactcaacctactctataataaatagcaaagaagacaaagcaaatctagtaggtgaaggtttagatgaagaacctcttctagacacaaggtccatggtgggtgtaccagggttctcaatcttgtcccgagtctagtggtcaa

SEQ ID NO: 106377 - DNA, 698 bp, Zea Mays
ctgcagtcgactgatcagattctaggtatttcaaaatatctgaagaatatcctgacccactactttttctagcagattctaggcagcttgtagataaaactaacttgggattataaaggaaaatatttggagtacatttttactgccctgagaagagaaaggagataagtttggagcctgttcctgggagatgactcagctgctggtctgctttgctatcaacaacttgagccctcattcttttacccccctgtccagcatgcaaaggcatgcttcaacttgttcctgtgcttggggctggtgtgggttatggtgaaggtgtccacctgcatatgttcatgcactatctaggactcaagtccacccctcctggaggccaatagagtttaccctttttacttcttgccaccaccctcaactcccataaaggggtactttaaatatctctgttgtcctcaaccaccacctgatagagcatcagttgctatcacccttgtgcacaaggatggccaactgaaaccatccatccaccccagaaaaccccagtgcctctgaaaaacctgaaagtggtgaccacacacttgttcctctcagttcaccgtgaccagcaattcccgaggtgaatcctacacaattagttcatgtttcatgatctataggttatgatgattctcatagcgttgcccttttgaactcta

SEQ ID NO: 106378 - DNA, 456 bp, Zea Mays
gctcatcctacatgctaggatgagcgaagagggttccagatatgtagtaaggtagttcactacaaaccgggagataggagaatggattacgttttgtgcggggatagctatccttggtcgtgtatataaggccaagaggcacccctaccattttcatctcaccctcagcccaccatactcatagttcatagcttgtaatctcataccaataccaagatcatcataggacgtagggtgttacgccattctcgcggcctgaacctatataagcctatgcgttttcctatcgtgtcaccacacgaaccatcgactcacgatcaatgatgtcgtccttcccaaaagcatcacatgggtaaccccatggagcgaagtcgggtaacaaacactaacacaaggatacactacgtagcctttacaatgattcccctgttgagtagtcgcccgttaggattcgcc

SEQ ID NO: 106379 - DNA, 431 bp, Zea Mays
tgtctgaccatcatgaattagaacgacaatgaatccaacttgctggaaccctacacagttttataacttgcatcaggtggttccatgcatgcacatccattagttcgacatgtctaccggctagaaaaaagagaggccggcaatatagctagccgtcgagacaatctaatcccactattcatgggcggtcaggtacgattcttgcttccgatgcagcatcggattagttttacttttacagttgcaattatgatcagctttattgtttgccgcttggatggcagtcagtagcatatatgtatgttaccgtgtagatgttaaattaaagctgcagttcgtgagcaacacatcatggtttgcacaaacctatcgagctattgctacacactgtgtaggttcgaagaattatcttttgtaaagagagagattcc

SEQ ID NO: 106380 - DNA, 513 bp, Zea Mays
aagaacagtggtaggcccaaggcaggaagagatgtgtcatggctcagcgagggaagattagcatgaacaatctgaagggcatcatcaggggtgatctcagccccgccagcagacatcaggctcctcgcatctagctcgccgacctctaaggcgacttgtccgtttaaaactgtggaagcaggtacaaccgtcgccccatcggactgaggtggggatgacccaacgtggacatccatggaggcgtgggaaagagagtccacctgaacaccctcgggggctgggtcatagcttgcactactcaccagagctggatcactaccggcaacaccctcgggggctcggtaactgctggcaccaccctcgggggctgggtcttctgcagtagccgcctctaaggctgagggctcctcaatcgcctccatgggagttgggtgactcagaccagtgtcttggcattgaagactgccctccaaagtcaaagatgcgtgagacaccgccccagttacctcctgc

SEQ ID NO: 106381 - DNA, 301 bp, Zea Mays
acatgcccaatgctttatggatctccccaaaacatattgtagacttctgtaagtgtcatattcgatgcgtcgtccgatgtgatgtctagtgcacacttgtgtttagtctagattgtttgagtagtcgcccttctacaatacaataacacttttatctagtgcttatctagacatatctagtgttactaagtgttttgcctttcttcaattgttcatgtgtctttgtttgggtttcttccacctgtgtcttggactattgcatgatcttctaggtattcaatgattcttctagtatctttat

SEQ ID NO: 106382 - DNA, 331 bp, Zea Mays
ggcggacagaggcggcgcggcggccatggtggggcgctgtagtgttgatggcacaatcgtgattgcttatcagaaggtaggaggagcaattcagactggaatggaactctggattggatggtttatcaggagaaatggtatggcatggtatggaacagaaggtcgcggcggggcgggacgaagcgtgtataaatcggtggcggcgtggagggtggagacaagcggaggaggaggttctgggaggttcaggtgccaacgagcacttccgtggagtggagaaggggaggaagacgatagggaaaggaaggaccggaatagaaggggtggggcg

SEQ ID NO: 106383 - DNA, 575 bp, Zea Mays
ccccaacaaccctaattgagccctatgaacaaaattcaagaaaatggggaaaagagtgtgaaaaatttagaatcatggcttggtccaattataaacattgaagtatatttaataagcaacaataaagattgaggaagcttggccaaaataatttaaataaaaccccaagcaagcttctcatgtggggactcaataggaaattctgaatttcagaattctgaatttcagaccttgagccaaagatcaagcgtgttcaccttgatccctaactcaaatcctaatggccccattaacaaaaaatgtgcataactaacccctctgtcgcatgccagaagatggcattaggacgcgagccctagacacgacaaaaccctggatttgcctcgggtttgagcagggagacagaccagatttctgggctccatatctctgcaaccagtaggcaaaatcctatgacccccacacaagatcggtagcttgtagggaggagaagaggttttgtgcactgaccaaggcgagagcaggctcggatgagtgaccacacgcgccagaacttgggcagaacgcacgggcac

SEQ ID NO: 106384 - DNA, 801 bp, Zea Mays
gaggcggtaggcgtggttttatccgaagccatctgccagggggagagaattactactatgcatatgccaatttttttcttcaatcatgttattttattcatcacacaagttcattacaagcatatagttaccacaagtcacactacacgcgagtgctttctaaggtgcttccgaactccctttctaaagtgtccccaaattccttgagaaggtcgtcaaggctagctagggacatatcctcgacgtcggacaggttctctatcctggagggaggcagtgctggtggggcttcctttttccgctcagtctggcatgcttggctcttggtcctcttccggatcttcttagtgggggcgagcttctttaacttcttgtcgtaatccatcttcagggttcggtaggcttcacgagtgttggcctcttcaccttctgctatttcgagactttcttggagagacgccttctccttcttaagttccttgacctgttgctctaagctttccactcgggagtttaggtgggtgtagtgggaggaaaggtcgtcatagtggttatcaagggtgtggagatatccggccatgtagacgatggtggggtcatcctcagtaggatctcttcctaacagggcctgaagtcttttcctccaggtaggggtatttttgttgctaggtggaaagtattgaaggggggtctcaaagacctccctgctgtagttttggcatagctgtcggagggcttttcgggcaacattttggcaagtgtctgggaagcggtgtccagtgaaggtgacttggaagggag

SEQ ID NO: 106385 - DNA, 413 bp, Zea Mays
tgcgaaaattgaagttgtggctcagtgggttactcctaagaatgtgaaggaactgcgaagttttttaggcctggccggttattacagacgattcgttcgacattttggactgttagccaagcctttgacgaccttacttaagaaaggaaatttgtttatctggacaccatctcatgaagcatcatttgtggctctcaaggaggctttgatttcagcgcctgtgttggcacttccgaatttttcattgcctttctcgttggaaactgatgccagtcagttgggtgtgggggcagttttgatgcaagctggacatcctattgcatatcttagcaaggcattgggacccagatcgcagggactttctacctatgaaaaggagttcttggctcttttgattgcagtagatcattggc

SEQ ID NO: 106386 - DNA, 434 bp, Zea Mays
tggaaatgggaggatatttgcatggattttatagtgggtttacccaacacatcccagcaccacgattctatttgggtcattgtggatagattaaccaagagagctcatttcttgccagtgcataccacccacaagacagagaaatatgcaaaggtctatattgatcaaatagtgcgtttgcatggaattccgaagactattgtatctgacagaggagcactgtttgtagcacgtttttgggagcagctccaaaagtcacttggaaccattgtgattagaagctcagcgtaccatccttagacagatggtcaaacagagagagtgaatcaaattcttgaggacatgttgcgagcatgtgtgctacattatggtaagaattgggataagtgccttttcttggtgaagttctcatataacaatatctaccagtccag

SEQ ID NO: 106387 - DNA, 797 bp, Zea Mays
acatttgagctagtgagaaacataagggtaacatcttcttttcctctagttgtcttgttgaacaagccttgaggacttcatatatctccagcttgcatcatctgctacacatgtgcgccattagtctaaagatggtacctttgtctccgcaattgcgatggctctagtcaatgttgttcttaggaattcttcctattacacttcaaacatgctaaaaggtaactgttaagttagtgttttgaggatctttgggagaataaggccccaaaactttgctagatataaagttttgagtggcaagaaatgcactaacatggtgagacgatcaacaattacttagaaagaatcataccattttgtggtcttcggtaaaccgacaatgatgtccaaattgatattttcccacttccaaactagaatatgtaaaggttgcaatggcccgaaagataccgcacttggagacatagcgagcaaagtctatcttcattttggtccaccaaaaccgctattttagatccagatacatcttattacttcccggaagaatggagtaccaggacaattgagttccattaagaatttgttgatgcaactcaggtacttttggaactaccaaatggttctagaaccaaagaacactgttttcatcaacactaaaacacgtagccattcctgcttcaactcgttctttgatatgagctatacccttgttcactttttgagcatcaataatctagccctggatagttgattcaagagagtgattagctactaattcattctgaactatttccaaa

SEQ ID NO: 106388 - DNA, 315 bp, Zea Mays
ttttaagaagctatatggatagcaccttcacttgtctaacccaatagaatagacttagaagacaagttaaatatctataagaataagcaaaagtacacgacataaaataaaacaaagttgaatgtgaataccatgaataaattaagtaagaaaagggttctgcaggcatcagaccaaggcgtcatactattcctaacgggatgccaaaccatacgattgagcaaatcctagctgacatcaacaagagcatttgattaagtgtcaaaccaagcgtcagaccactagtggaggaggcaccaaaacatatgatcccac

SEQ ID NO: 106389 - DNA, 497 bp, Zea Mays
atcgggatagggaaactcaggagagtttgagcaaggtcatggagactctggtagtggtgagtgatcgattgaaagatgtcgagcgcgtgcaacaacagatgatgatgtgcatggatttggctgcgtctgttgcggagcaggcgacaaaggagcgagtcgagttatgtcgtaaggtggaagaaacagggaaggtggtggcccagatccgtttggaattgatggggaagcagttggaggattcttctggggcgcataatttccatcttcagctcatcaacatcatagtaaacctccaggtttcaggggaagacatgagcatgtggaatcccgtggcaaattcagaagtggtccttctagaccatctggtgatgttcatcagcattcagaccattttcatcaggtattgcccaaacttccatttccgagatttgctgagggtgatcctgtggtttggttggacaagtgcttggagtatttttctgtctaccaagttccag

SEQ ID NO: 106390 - DNA, 363 bp, Zea Mays
cctagagatgtcaatggggaattccccaccagggattaactccccagacccgtacccataagcacagacccgcccccatccccgaacccgaactcgacctcgggtacaaaaatcttcccatacccatccccgaacgggtaccaattacccatggggacccgtacccgacccgactattcagcatttcagaatttcagcatatggacacaacacaattcaacatttccgcatgcatgttttgtagtttcatcaacatgctcatgcaaaataaatagtgtcttctagtagccacatgtacacatatcacaaatatggtcaaacagtgaatagaaatatctcttagtacatgtttttatcatttaa

SEQ ID NO: 106391 - DNA, 812 bp, Zea Mays
gataacattcagttcagagaaggtggtggatgaatgttcttaattttttgctggatactccgctgatttattatagtgtccccatctcatgtcacgtcatttaagctcggtcctttgtttggatttttttaaagaaattgtgagggaagacatatctatgatcttcttgtgaacttgattatgttagtgccatttgaaactgttttcagaaactactctacatagaacacttcttatctagaacagttagacaatatatcaggcagagaaaacagttagacattatatcagacagagaaaatagtttctcttggacaaaatgagcgcaggttctatatatctacaacactgcttgtctagaacagtcaaataccaaaaatactgaaaccttattgaaacaccaaaatactgaaattgtagctgaccaacagaaattcataggaaaagaacagtctcactacacatgtctgataatcaaggattagtgatgcaaatagtgtatacaagatccggacgtacctggcagtagtatgaagagatgcattttataggcgcgaatctgtgtctgtcgcatcctacatggaaggtttttgatgggggcgaggccggtcggtgccaaggcgactcaccttcccttgagagcacggatcgagagccggtgcgtcgattgcggctgggattgtgatggagtgggattgcaatggagttcctcgcggccggtgcgtcgattgcggctgggattgctatggagttcctcgcgactgggattgcgggatgcggagagacgagatcgggatgaatggtagacaggc

SEQ ID NO: 106392 - DNA, 635 bp, Zea Mays
cgcaatgatgcgctgccggcacctgggatcgtgcttgatctttgctccaagatttcctgcgcacaagcaccactgttttcttccaaagaggtatcattaggtgcagaattttgggtattttgaatatcaggcaacaatgaatcagctacattagtatcccccggataattcatggtggtactggaaggaaacaagtgaggaaggagattgacttcagcccgtaaacgagcgccgacattgggatggaactcacggaaaggaaaaactccttcatcaaatatgacgtctcttgatatgtagactcgtcctgtactaacatcaaggcatttgtagcctttatgagatgaactatagcccaagaagacgcatcgcttggaacgaaaagcaagtttatgagtgttataaggacgaaggttgggccagcatgcacagccaaatactcgaaggaacttatagtcgggtttcttatgaaagagacgctcgtagggtgtcatgaagtcaatgactttggatggggttcgattaataagatatgctgccgtggcaaaagcttcatcccataattttaaaggtatagatgcatgtgcaagcaaggctagaccaacctcaacaatgtgcttgtgttttcgttcagc

SEQ ID NO: 106393 - DNA, 360 bp, Zea Mays
gtggaaaataataaccagaggatgaacatattttccctagaatacctaagtgataaagaacatagaaaaatacagagaaccctagtccagagctaatccaaggttatttattttattagacactaagaaatcaagaaaatacattgtgtaaaattataaggaccattgcaaaaatagcaagaaaaattcagtagaatcctaactaatagaacaccactacaaaaacgataaacaccacaacccatcacaataagtgagttgaataattaaaacttgaatttggcccatattttaaataaatcatgagaaagcctaaaattgtgcaacagtgggcaaacaaatttttacccaattacttat

SEQ ID NO: 106394 - DNA, 292 bp, Zea Mays
ctttgaaaacctagagatcgtatttctcaaaatattaaccttgccatcctttcccttccatggaattggcaaatatgccacagagagggacaatgcaacctcattgagccaacactttttgttccatgaagactcttaagattggctggttcaggatttggcaccccatcggcccatcccactgacatttgggatcatctgtgcaataaaagtgatccagggtggtaaatcatgaacagacaactgtataagtggtgagctctcaaattaaccccgtcacagcctagcccct

SEQ ID NO: 106395 - DNA, 605 bp, Zea Mays
cgggtggaaagcctggagcagaaagtcagggagctttcagaagaaaaagcgtccctccaagagagcctctcgttagctgaaggcgaagagaccaacacccgtgaagcttaccgcaccctcaaaatggactacgacaaggtactaaagaagctcgcccccgcaaggaaaatccgcaagaagaccaaaagccaaggatgtcagactgagcagcaggaagaaaacccacccaggaaccagtccgacgccgaggacatgtccctggccagccttgatgaccttctcaaggagtttggggacactttagagaaagagttcgggggtaccttaggtagcactcgtgtgtaataagcttgtggtagtggtatgctatgtaatgtaatggcttgatgtaatgaataaaataactagttaaaaaaaatggcatgtgcataatagtgactctcttcccatggcagatggcttcggatagaaccacgcctaccgcctccgggattggagcaagacttcctctaggagctgagggagaggctggtggagaagggggtgaaacccacctccccgcacctccagaactaccactagacctagcccagattctggccaat

SEQ ID NO: 106396 - DNA, 345 bp, Zea Mays
agtgttaattatgcctgatattcataaaggatttgatgtgtattgcgatgcatcacatctaggacttggatgtgtgttaatgcaaaaaggaaaagtgattgcctatgcttcaaggcagttacggaagcatgaaaagaattatcctacgcgtgatttggattagctatcgtagtgcacgctttgaagatttggaggcactacatgattggaaacaagtgtaaaatcttcacggatcacaaaagcttgaaatacatcttcatgcagaaagaactcaacctaagacagagaagatggcttgagttaatcaaatactatgatttggaaatacaatatcacccacgaaag

SEQ ID NO: 106397 - DNA, 308 bp, Zea Mays
atgccacgctttggaccaagcagaaacagatcccaacgactggagggaatcaattatcaaatacataaaagataaggaagaactagatgacattgccacagcagagcgcatcgcgagatagtcggcccactataccatcatagggggtatgctatatagaagaggtgcaggaggaatcctcataatgtgtgttcactcggctactggaaggcagctgctggatgaaatccatgcggggcaatgtggcgtgcatgcagcatcaaggacattagtagggaaagctttcaggtctgggttctactggccaa

SEQ ID NO: 106398 - DNA, 744 bp, Zea Mays
cgattgctccgttagcagggcatagtggtcaccccgagttaagtaagcgcgagcatgttgcaccggtttaagttgttgccgacttaagccgattgctccgttagcaaggcatagtggtcaccccgagttaagtaagcgcgagcatgttgcatcggtttaagtcgttgccgacttaagccaattgctccattagcagggcatagtggtcaccccgagttaagtaagcgcgagcatgttgcaccgatttaagttgttgccgacttaagccgattgctccgttagcagggcatagtggtcaccccgagttaagtaagcgcgagcatgttgcaccggtttaagtcgttgccgacttaagccgattgctccattagcagggcatagtggtcaccccgagttaagtaagaatgcaaattaatcatgaacaaactgagtatctttgaagcctctttttttattgatgacatacttccattttacagagtacatcgtcgtcccgatagcttttgaaataccgctagggataaaacttcatgatgtgttctatattccaggagttcccgacttctgtgccgtccatctgagtgagacgatatgatcctggccgagtgacttctgctactatgaagggtccttcccataagggtgataacttgtgacgtccctcccccgttagaattcgcggaggacgagatctcctactgagaaggatcgctgtcgcacggccttgtcgtgatagcgccttag

SEQ ID NO: 106399 - DNA, 414 bp, Zea Mays
gttctttagaccatagggcattacaacatagtagtagagcccatccactgttacaaaagcggtatgcttcctatcttccttagacatctagatttgatgaaaaccagagtaggcatctagaaaggacaagaggtcgtacctataggtagagtccacgatttgatctatgcgtggaagtggatacaggtccttgggacaagccttattcaggctggtgtagtcaatgcacatctgaagcttcatgtttgcctttggaatgatgactgggttggccagccacacggggtgatggacctcttcaatgaagtcagcatcaagcagtttccggacctcctcacggatgaagtcctaccgctcaacggactgtatccgaggcttctggctcaccggcttggcgtcggggtggatcttcag

SEQ ID NO: 106400 - DNA, 391 bp, Zea Mays
gtagtaatttgggtatacaaaccagataacattgaacactctattcaatctctttttgccccgagcaccgaaggcagttgtcatagcttcatcttcggccttagagtatgctccaagcagctcatcgctagtcgcctctatagcatctagccagtcatcattcggctcatcaaactggctcctgtatcgaaaggtatacttcatatagactaaaccattttggctcgagcgagcggcagcctccttcggcatttcccatccttttgcaagtggccacactctgtaagcaatatgctcttggaccaagtctcttatgccgatataagtacacagtatcgaaagcctcctagcacgcttgcatgtcatttccatgtgcaatgagaggcctcct

SEQ ID NO: 106401 - DNA, 381 bp, Zea Mays
cgaatgtagcacaggattcttggcaacacttatggcactcgtgctatcacaaagcagaggcacatgatgaaaatccaagtcaaagtcccgtaaggtagccatcatccaaagtaactgtgaacaacagctagcggcagcaatatactcggcctctatggtagacagggcaacattagactattttcgagaagaccatgaaacaaacgaagtacccaaaaactgacaagtcctagaagtagacttgcgctccaaaaggcaacccgcaaaatcagcatcagaataaccgcacaaggacagaacggacgatgaggagtaccagagaccaaactcgggagtgaaacgtaggtacctcataatctgtttcatagccattctgtgaga

SEQ ID NO: 106402 - DNA, 288 bp, Zea Mays
ccgtttttgagccaagggcaaaaaacaccttcccttcttttcatgtttcataaagaaaaatctcttttcgcccgaagcggccttattagatttgaaggtcttgcataagaaataccgttgccgaagacatgaatcttgcataagaaatatggttgccatagatcttgcataagaaatatcgttgccaaagtcctgtatcttgcattgttgaaacatcctttcataattctttgtcaaagatagacttaacctcatgagttagccaacatgtttgaaggagcaatttcc

SEQ ID NO: 106403 - DNA, 663 bp, Zea Mays
ctgcaattgaaaagtagcaggagatcctcggacagcaggtcgaaaagtaaactccaaactgagatttctgatatcgccatatataatgccaacataagtcatcagaagggattgcaaggcacaataagctaggacaactcacagttcgtcggtgcatcttccttgctcacgtggaaggacattttcggtctcatgctgaaggtactggagctcatcgtgcagctctgttatctgcccgatcaaaccatatgatgacacatattctggtgacgttgcttgggaacctacaaaaaaaattgaaaacgtgaatggattactccagcttggtagtcaaaagaacatcccaagcacatgtggatatccctcacagcatgaagataagaatcgctgtcgtcaactgatccctcttcaaacattttagatgctgcttgatcagtcaaattgtgccggccctatatatccatgtagtagatactctattttgtaagaacacaagtgaaaatgacaagaggctaaataatatgctgtcttaacggatgaactcaacaacaataccaggcggccatcaaaagctgagaagtagccctgcaattccaattctacagctttcagaaatgagtaggcactcgatatttttatctgttcttcgagctggcaggctat

SEQ ID NO: 106404 - DNA, 488 bp, Zea Mays
ctggtcttggtgctcgtgggctcacggctagctggttggtgacatgacgtagcgtggtgcgctctaggtgttcgctgaattacctgtgagcagaaaagtgtgtccttgcgataggtgtatcagtgtattgttcactctaccggctgcaaagtgtagattgcttggtagcctctagcctggcaggagcgttggtagggtttagggttcagtgtattgttcactctaccggctgcaaagtgtagattgcttggtagcctctagcctggcaggagcgttggtagggttctgcgttaggctaatacaacgggaccattgcatcctgtatcttaagtgggataattttaggggctggttagttcgaggttctttgcaaacacatatagttttgatacttctccataacttacctgaccaactgtttgtcatgcgttgtgattgatgattcgagcaaccaactgttcgttatgcgttgtgattgatgatttgag

SEQ ID NO: 106405 - DNA, 471 bp, Zea Mays
aaaaaatcttcagattcatccccctcgtcgtcggtgaccaccgcgcaaggattcgcggtgattcgtgcaggactcaggcaggatagtaccggggggaagatcggaagagaagtggatttggtcgcgtggtgaagcttatcacttgcgcctgtagccgagcgacgtggccggaccgccggtatcaccatggtactccgacgaccacaattatgccacgttgtggctctttactgcgtagtagtaactgtggcacgcctaggcctaccattttagaaccgctacaccgatgaacaccacgactgagccaccattaactttccttctctccggccgccaacacgccatgccaaaattaggagtcaccgcccttgtactctataaattgagcataccactagctcagttaggtaatcacgaagccagagcacccgctcctgcctccgattagtcaccatagctctccaatttctc

SEQ ID NO: 106406 - DNA, 306 bp, Zea Mays
cgtgctctggtgagccccgtcgccgtacacccccatggccggatgagaggaattggtcgccgtcggtgccctgctttcctagcgtcagccgggttccaaggagaagtcaagaagggtcgtgagcgcatgtggaagcttctgcaaccctcaattcgacgataagagagctggggcaccgcgaattgctcaccggagtaatttgcaccgccgcataccacacctcgccgtggccaacatcaaccagatggcaatccacggtaagaagtactccaccctgctcgcctctctcccctctgtctattgcac

SEQ ID NO: 106407 - DNA, 285 bp, Zea Mays
cttctctacaaacaatactggagcggcccaaggcgaggtacttggtctgatgtaacccttctctaacagctcatctatctgtttcttgagttccaccaattctggtccagacacccgataggctcttttagaaatgggggcggtaccggggataagctctatggcaaattcaacctttctctcgggtggcaagcccgttagctcctcaggaaacacgtccggaaagtccgacacaaccttgatagcctcgagcgggttggcctccttactatcaactaaaatctg

SEQ ID NO: 106408 - DNA, 606 bp, Zea Mays
ccaccgtattgctgagctgtcggcggaggttgatcggttgcagcaggagatcatggaacgagactgggctatagactgggccgtaaattcacgatctatagcctaggattgcgaggcgaatgctcgagcccgggtagtggagctaagcgtagccctggagaatatgcaagcatacaataatactttgcatgaggaagtgcacgtgttatacgaccagctgcatccaaacgtaccaccggaggttgcagtaatgggagtcggaacgtcaggagcagttggtagaggaccttatggggagttggatccctttggagccccttcttccatgaacttcgctgatgatcgttctcccaaagctagcagtggagcgggtaccaccaaggatgaagataactagagtagtatagtagtaggtggtttccttatgtaaattaaataaggaaagtggagttgtaccagggagtatgtatagttagtaccagtctgacataatgtaataaaggtggtgtacttgtggcctgtaataatcgagtatgttttgttgtttcttcttcagatgccatctaaaactcgtgctcaagacggggcgggaacttcccgtggtgg

SEQ ID NO: 106409 - DNA, 1075 bp, Zea Mays
attttcaccacacggtgggcatgcaaatttcccatggaccatatgagaagcaagcattcctaagccaggtagatcactgatggtcataagtacagcccctcgcaaagtaaaattctcatctctcgatgcatcatatgtgtccaatccaatctcaaataaatcctttaggtcatccaagagtggctgaaggaaaacatgaatgctatctccaggactttttggaccaggaataattaaagacaacataatgttgtgttctttcatgcaaagccaaggaggtaggttatatactaccaaaacaacaggccaacaactatgagtggagctcaacattgcaaatggattaaacccatcagtagccaaaccaaaacgaatattacgagattccgatgcaaattctgggaacttttcatcaaaccttttccacaccggtgcatcagcaggatgtcagagtgcaccatccttaatgcgctcctcatcatgccatcttagaaaagctgctgtttgtctacacataaattgtcttttcagcctctttttaatagggaagcatcgtaaaactttgcaaggtgttgctttccttctttccttctttgttaatacagactcaggttccttatccttccaccttgaagccttacaatttgagcaaaaatcatcatctttttttccttccaatacagctgacaattatttggacaagcatcgatattttcatatccaagaccaaatttagaaataagtttcttagcctcataaaagttcttgggcagttcctttccatctggaatagccatacgcaaaacctctagtagatcatcaaaagacttatcagaccacttattcatggttttgacattaaatagaagcacaaaaagagttagctcactcaactcacaccctgtccatagaggttttttggaatcttccagctgcttataaaaccattgtgcttctaaattaggcccttttagtggtatttgactatcgaccattgttgtgtcatcatacaaatgccctacaacatcttcaatcagttgatctatattaacgtgcatttcctcgctatgtgaat

SEQ ID NO: 106410 - DNA, 409 bp, Zea Mays
gcgcgtagttgcttattagggataacctttactgtttgttcctattttggtgtttccaatggtaggatccgatgacgagattgaggtagtcattcccacacaattttctaattgtgtcagccgcgaagacttcgatgttatttgcaagcgtatggaggaaaatatggaggaaacagtccacaagtctgtccatgatgcgattattgcaatggatcttggcaaagtgctagatagggtggagagacggataaccgagcttgtcgatcgggttgccatgttggagacacgtccactacatcagcagcctcctccaccaccacaaccccagcagcctccaccacaggctcaagatgacgccattttcgatgcacgtggcaattttgatgaggcagctaccagagacgcccgc

SEQ ID NO: 106411 - DNA, 515 bp, Zea Mays
tgatgggtggagcccgcctgtcaatctgcactgcctcgcttagggtcgatgacgcataggtccgagccgtcagatctttcacctccctccccacgttgagttcgttcgttcaaccgcaagatgtccgttggattttcttcatcagtagtataaatcctagccgccccaatcccctggccatcgtgcatcgtgaccatgcgccatgccgagatggcagtgctgccaatggggagcacatagagcttcaccagaccgccgcccgccaccatgcgcaactcacgcgcgcgtcgtctcgcaaaccttggccatggcagtcagaagttcgccaagttgaggagagtctatggagaacgttagggaacttcgttgttgagctaggcatgggaatttctcactgatgtcgaggacatcctccgtgcgatggctcagtgtggtcagcgacatctacgccatgaatcgctgtgaggacctccttaatcgtttggctctcgcctattccatgagtagaacccttc

SEQ ID NO: 106412 - DNA, 342 bp, Zea Mays
aacacaggatatctcgataccattgcaggaggggatggatcaccatgggagaaagtggggacgccgcgagcaggattcgttgagcacgacatcgtgatttccggtaacaacccctcccatagattctctttgagcctagctttgttttgatgtgtttcgcttagagcaccgggcaccgtatcggcaacggaccaatcaccggtgaagctctgtcgtatgggggcggcgacgccgctgctctggtcgtggcgggcaagggggaagtgccttaaacgtggattaaaggatgaacggttgagattaggcctgtgcataccattttgtggggtgatctgagctact

SEQ ID NO: 106413 - DNA, 410 bp, Zea Mays
actgagcatctacacatcgtgcttcagcgactgcgcgatcatcgtttatatgctaagttgtctaaatgtgaattctggctgagggaaattaaatttttgggtcacacaatttctcaggatgggatatcagttgatcctgagaaggtacaagaattaatagattggaaacctcctaccacagtgcgacagattcggagttttgtgggattggcagggtattatcgacgattcattccggatttctccagaattgccaagccaatgactgaattgttgaagaaaggagtcaagtatgattggagccagaagtgtgaggatgcctttcatacactaagacaacatttgacaacagcaccagtgctagctcaacctgacaacgccaagccctttgaagtttatttcaatgcttc

SEQ ID NO: 106414 - DNA, 435 bp, Zea Mays
atctattttatttcattcatgaagcattttttaactcaattgttatttgtatttcatatggtctgtacaatcattttacaatcaatttatggtctaaacaatctgggtactagtttctgcaattgaaacttgttgggtacttgtttatgcaaatgaagcttgctgggtacttgtttctgcaaatgaagcttgctgggtatctgtttacccttctgcaaatgtatcatcgagaccacatgtgcctttgcaaatatatcattgaacagaaaaatccttgttaaataaaatgcacttcgttcttgtattgccgatctacatgtgtcctaatggtttgtgttcagttggagttacctgaggtggtgggttctatgcttgatggcatgagttttccctcttttgtttttgcgcataccaatgtgtaaaaaacagctttct

SEQ ID NO: 106415 - DNA, 315 bp, Zea Mays
gtggtcaccccgagttaagtaagcatgcaggttgacagtgaacaattcgagtgcctttgaagtctttttattgatgatatattttccagtttacagagtacattgtcgtcccaatagcttttgagatatagctaggggtaaaacttcctgagatgttctatgttccatgagttcccaatttccgtgtcgtccatctgagtgagatgatatgatccaggccgagtgacttctgctactatgaatcgtccttcccatagtggcgacagtttatgtcgtccctcccccgttagaattcggcggaggacgaggtcttcc

SEQ ID NO: 106416 - DNA, 684 bp, Zea Mays
cagcgagctcccatcaagtaatgcctccacatttttaaggtgtcaagtacggctgccaactctaagtcatgagtaagataattttgctcatgaggtctgagtgctcttgatgcgtaggcaatgactcggttgtcttgcattaaaacacaacccagcccagtgccagaggcatcacaatatacatcaaatggctttttgttgttaggttgcgccaacacaggtgttgtggtcagatgctgcctcaaggtgtgaaaagcatcttcacatttctgaccccattcgaactttgctccctttttcaatagttccatcatgggtttagcaatcctggaggaatccagaatgaatcgccgataataccttgccaaccctagaaaactccggatctggcgaacagcggtaggtggcttccaattcatcatcttagacaatttggcactttattcagatcaaaaagccatttattcagatcaacagctatccctccatgagagatggtgtgacccaaaaatttaatttccttcagccaaaaatcacacttagacaatttggcataaaggcaatgctctctcagacgttggagtatgatatgtatgtgaccagcatgctcctcttcatttcttgagtatgctaagatataattgatgaagaccaccgaattcatcaggtacatgaagtatgcgg

SEQ ID NO: 106417 - DNA, 770 bp, Zea Mays
ttcactttctgttgtgctaaggcaagcctgcagaaaagtattggatgcattgggaatcaccacaaaagaagcaaaccaacctcctacgtgactgcgacaactatagtaccactcaaaatcagagaagtgcaggcaaaactgtgagcacatatagtggaatggactcacttcaatttcacctgactggaatcatcagtcaacagcaaaagataactctcctagttacctgtacctaaaagaacagcatataataagaaagcctactggatcagcacatcaccaatttctcaaggcaacaaacttatggatttagttacaaatgaatgcattccaataatcattttccatttagaagatacgtgagcaaaaggtttacaatgcaaggtttgatcatgccctaacaaaggaaaagaacagaggagagcaggtcaatcttttcttcattttcacctgctgcctgtatatcctttaactgttatcttgtttctctatatctatgcaccaaaagttttcacatgtgttggcaaccattgtttaaatgctttaaaatgttgtttgaaagagattggcagtgaaattggagatgcagattggtggaacgtttgaagattcaaatgcagggcaatgtaaaatcagtagtgcatacttgccttttgcttgaaaaatcagtagtgcaatgtaaaaacagtttcattggactggatattagcatgttttgttcaagaaacattctgatgaaatattcgtgtaacattcatgcgaaagatttt

SEQ ID NO: 106418 - DNA, 355 bp, Zea Mays
gagatcttttgggcgcgggcggtctgatctgtttcagtcgtgacactgtaccatggtgaacgcttcaaagagcaactgacggagcaagttcaagtcacattttctctctattttccttagcaactcatccaaggctctgcatcaaagttgtagtgctacataccagctacaactcgactataggacttgaacacatttgggtactaaatcaaggttgaatttatgctcaaagtcgaccctgttacactgagaagctgagtttcagaatgaatccagcctgacagtccaacttaggttgagattttcttcagcttttccttaacaacaatgcccacacctttaagcaaagttgttc

SEQ ID NO: 106419 - DNA, 468 bp, Zea Mays
caggaatagtagtacgggtaggtgtattttgctaggacttgttcataatgaactggttctgctcttgtaatgaccccctcctataataaagttgtcgtcttgctccctcttgttctctatgttatcctatttttgaagtttgatctctttcactgagtacgttctgtgtccttgcgttttaactttgatgactgatctctctcgactgaatctgtgcggcagcatgctttccttctgacttagctcatccgactcagcgtttctttgattcgatctaaaaacatttccctcgtgcttgtgcttgtggtaggtatggagcacatacgtatatacacgcccacggtccgacggtttctagcagaaaaaccttagaattattatttcaccgcaactctcctctttgaaattattgtgcctcagtgactccacgctcgattccacacttacgggaggtctcatggcgcctag

SEQ ID NO: 106420 - DNA, 295 bp, Zea Mays
ccgggttgtaagtaacttcgcaggaaactttcagttattgttggctcagtctgccaccatcttgggagattctctccgttaacaaaaggaattgatcgttgctgcatcactctattattgccctagaagatgcatggtatttaatctgggtccacacatcggcctgagatagttggtgaaagtaggcccgactgccaccatgctgtgtttttgtgtgtacgagttctaggtccttgtgggctatctcctgtctgttctgctgttggttgaccccaaattgttatcgacttatgat

SEQ ID NO: 106421 - DNA, 745 bp, Zea Mays
acataggcataagtatagacacataccttatctgcatcagtaaggccacttgggttttgtcgaagcacaaccgtcatgtaaccggcaaaggtagagcactgagttttgatactatcccacctgctcattagagatttcgtagacctttctggcattgatcctcttctagagttgtatgcctcggtaacccgattccaaaaaccttgacgcttctaacccgtgtttaccatggggccacaactcacagccaatcaagcatgacaaaccctcatgtcctcctcagacgtgaaatttgctagctttgtgcgttgaccacccttcttcactagaggtgcaggtgctgacccctgtgcgggtatatcagggtgaggaggagcaaaaccaatgttctgaaaccgagtgccatcttcctcggataggaaactgccatattgtgccattacttggttctagtcggtacccctgttgtacattgaaggtaggcacattaaataagtcatgaaaatccaaaactctagtactttgagccaaccatttcaaacaaataaaaccatgacatattagttaacaggacaaccaaaacaatggcacaagtgtcgaatactacaaatattgcaaatttcttaacattaaagataccacgtcaacatgaacagcacatcgacgatacgaggaacttgtggcacacaacctaggtgttttgttcacatacaaaagagtactaccacttccagaaacctaaaac

SEQ ID NO: 106422 - DNA, 703 bp, Zea Mays
gggttctattgacagtcaaaaagattcccaatttacagtggtggttttggaaaactgaactgcgaccaaactgaacaaaaaaagtaagaaaaatagactattatgaaaattggtgtataggaacagaaaataaacataataaagaaaaaattgaaataaaaataaaagctacacttactctttccattggctccgccccatgccacaaagaatattataatatcgcaatagcacattagaacatggaacacgggcgtgagcattttgaacttgtaaccaattttcaccaacatcattcctgactacatttccaacttctagttgattttccaaaaagaatcccccagcttctgactctacgttgaatatgctcatatcattgtatatctgatcaattgcagctgctgatttggatctactactaccatgtaaattagcgccaaccatattaacagcagcagtttgcacctagaaaaatacaacataatgtatgtttatacgataaattaaaaaagattgaaaaaagataacaaatatacagcagactacatgagagaataaaccaaaaaaatcacctcctgatcagcccctacatcatcagcaatgacaataacttcttcctttttgccacttattcctccggagtttctatgtctttcagttgagtttaactttgaataattcaatgctagtgtaggctcat

SEQ ID NO: 106423 - DNA, 461 bp, Zea Mays
gtgctggctgctccacgaaaggctcaggcccgatggtgattcttgaggaagtggattgagctgaggtggggtggacgccgtggcgcgtatcgcgacactggcagaagtcccctcgggcttttcgatcggaggaagtggtcccccgtcatgttggctatgaggcactcctagctggggttgcaactcgcctcaatggacgaggaggtgagtctgtcctctgatcctgataggaggatgtccaggaatgaatcccagacggggtccaacatccccacaaccttggaacgtgccaacccgaactcctcctgagggggcgagattgaggtcaccgatacctctggcaacactaagtaggtcactcagcgaaagagtcggggcttccgaggccttgattaactccgttctttgtgatgacaaatccagactcctaaaacggatggctgttccaggagtccaaactg

SEQ ID NO: 106424 - DNA, 432 bp, Zea Mays
ctcaagcaagacatattgaagacttactagaacatgcaaaagtctaggaaacaaaatggaaccaagtcggacgtgacacaaagtaacgaagagaagaagggtttgaacaagcattggactgtcctttggggaatcacaccatatgaccgagctcacactagccgataaacaacatgagcattgagccaacagtggcaaggacattagaccatgtggtgtcattatacacacacataggtgcatcaaacattgagttttgggctcatagtggaaatagtgtcagatcaaatggttataatatttaggttcacatgggcatctgattgatcctacataggagtgttgggacaatagagatggagtctgacgatcactagaaaaggcttttagaggaaaatgggcatcaaactgggccgacgatgggtatcaaag

SEQ ID NO: 106425 - DNA, 563 bp, Zea Mays
gaaatcggagtgcagaaggtagttcttcttgccacgagttgctcaattaatgaggatatcttgggagcttaggccccttgtccttgaccgtttgattctttggtcctgtcattgttagcacaaaacagagacaaaacgacaacaaacaatgtgaaccctacaactatctctcagggtggtggtggtggtggaatacaaattatgaagcgtcttaccctgctcttacaacgttcttaccagcactgcaggtggcaaacggtgaccggtgtgactatccaacgagcgtgggtgtgattgcaaaggagtacctgttctgctcgagagaaagctggagttctgggaaggctgactaaatatatatatgtggcacacaagtcagtaatagatagcaatgctgaataagtgttccaagtactcgtcctagttgctggcctagaaaatgtaacagatcagttggaccaaggcataagaaaggaggtacatgtatatgggtgcagcaagaaaaacaagcttggggcaaaataatcacagaggtgcatagaacactggcgtttctggttatg

SEQ ID NO: 106426 - DNA, 724 bp, Zea Mays
gttttgctcctcaccattttggaattgtccctgaacatgtgactccaaatttagaggtggcagactgggtgcgtgatcgggagctgatgaccagagtggttaaacttcatctgactcatgcacaagatcgcatgaagaggcaagcagataaacatcgttcagagaggacatttgctgttggggattgggtttatcttaaacttcaaccttacattcagtcattcgttgcaactcgatccaacaacaaattgtatttcaagttttttgggccctatcagattgtggagcgtattggtgcagtggcttatcgtcttcagcttcctccagccagtgtcattcatcctgtaattcatgttttcgcagctgaagcgttctgttggccgtaatgtgtctctttcttcacatttgcctcaggaggaggtgcctgtgcagattccattacatatttttgtagcggtgtatgattgagcgaggaggagatttcatcgcccaagttcaagtgctatggtcaggcatgtccaaggagctagcgacatgggaggacgaagcagccttgaaggtgcgttttccagatgcaccagcctagggacatgctggttctcaagcccaggggaatgttggtgacaaggaggtgtccggggcaacaggcgggaagactatagcacatcgccgacagatttttacaaattattatctccaaatttaaatcatgtcagatatatac

SEQ ID NO: 106427 - DNA, 326 bp, Zea Mays
tttacatcaacatcgagtgcaaaaggaacggcatgcaacacaaaaatgcatttaacccagttgcaaagaatccatcaaccagaaccaggttcacataactccacagttagccatcaatgtcaatggaagatgttatcaacaaggacaacataattggctcaatggtggatagcaccggtcccacttaataatttaaagcaaaggacaaatcatgacaatggaaactgaaatttgagcttgtatatataccaaaatacatctagcaacccagtagccactaatagtaaggcaaagaagagagcaaaataattggctcacaagatatg

SEQ ID NO: 106428 - DNA, 337 bp, Zea Mays
aattaaatcaagagcacacgcagtgacgccatggaatcggaagacttgttcctaggtgccgaatcattaatcaatcaaccccccgcccctgaaccacagcgaccatgctgatctcctataaattaccagctccctccatgctgtagccatatcgtcccttgaagaacagctcttggagcttaattagaaaccaagtcgagctagctagccatggctatccgtcgtctattcctgtttatttctatgctgttggctatggcatgctcttgtgccatcgcttcagacccgagccttctccaagacttctgtgttgcagacaagacgtctcaaggtatat

SEQ ID NO: 106429 - DNA, 952 bp, Zea Mays
aaaagttacagtcatatcttgttatatattcagtcctgttcctgtatcgattatgtagtgctctctgtctggatgaaaggaacaatcatatgaccgtgtcctagcaaaagctgaataacaagtgaaaaaagctggaacctcaagcaaagtttgcatcagtagagaatttataaattcttcctttgtgtgaaatcaccatactgtaagaatgttcacttgtgtttccgaataagaacttcaagggcagtgaatagttctatatgagcaatcttttgcttagtctaatctcaatattggaaacaaatttaggtagctgagctgatatatgggcaagatactaaactcgtgatcacttgtttgattgcttccctcaattcatgagcatggatctatatgctggtccaacaactgtaaagcctgtcatgaataacataccttagcaataggttcagcctaaaaatcaacaatgttggttctgtatgtatgtttggaattctatttagggctttatgttcctaaatgatttgtatcactgtggttcagtactatcaatatgcattgtgaattgtgatggtttttgcttctattttgctatacaggtggaggagcaaataagttagcagttcaaacaaattgcaccgttcttatgctagactgctgtaagaaacctttcccattgtaaccaaatttgtttctagaatctagatctgtggcaaaaatacaagaagccttttgcaactgaaactgaataaagcatatcttttggcgttttgtttctattcctgtcaacaattgaaaattcaatctaaaaagaacactacacgctgattatagcatattactaagcgacctattatcaaactggatgggttctcagtcttttctcacttggattgctgatggcttagtgggaaaatctgttactgcaaaaaagaatatatgttcacttgta

SEQ ID NO: 106430 - DNA, 322 bp, Zea Mays
ccttgttcaattccatcattaacattcatagtctggttgaacttgatttgagtggaagattgtacacttggtcaaacaacagggaccctcccacctttgaaaaattggatagatttctggctagtctagaatgggtccttcaattcaaaaatgtggtggtcactggtcttgacatgactttatctgaccatgttcctttatgtcttaaaactgactctcgagtgtttcttaagagagacttcagatatgaactgtgctagaagtttcgaccggaattcaaagatattgtttggaacaattggtctcttccggttagaagtcg

SEQ ID NO: 106431 - DNA, 431 bp, Zea Mays
gtttatatttgggattgttcttccagtatggtattcacgtcagagaatcatgggtttggttggcgggtgatatttatctgaattcaaccggatctaacatagtctacaatatcgaagttgatctcgtttggtttggtccatgtgtttctcgtccagatccaaaacttcggatataaataacggatgaaaattcatctgactccaaagtattcatcaaattaaatccggtccaaatattgttgtcgattttattttgttcgaccattttatacatcttttagaccctgattttataacctcaaaatattagcatttcgctttagtctaaaaatggaaaagaaaaaaaaatcccccaccaccttccctctcatcctaatcacgtcgtctctcctcccttatccgttggagctcatctccagcttatgccctcc

SEQ ID NO: 106432 - DNA, 588 bp, Zea Mays
ggcgggataaaatagtttattttgtatttgttcaggcagctcctgtagtctaatgtgtagtctaatgtggccaaccaaacggatccttaataaaagttaatacacacgatagtttaaaacaaaatgatgcgtgtaactaatgaggcattatctgaccatatccttgcagtttgctgcatctcggtgtgaaatttgactatatgccccgtttggttctagttttttacagactatggcgataataagttgtgtatctcaccctaaacgtctagattctcgattctcgggtagttgtcgtccgaagcgcgtacaacgaaggcgggttggcaatggtcagaaaaagcggtcatagcctctcgtcctcgggaagtcgagcaagttttctccctatatgtgacccatttgtcctcgcgtgttagggtttcgctctcatcctcttaccctgctcacgatgccactcctcggctcgtcgacgtcgcgccccactaggttctcgttgtttctccctctaggcttgcatctgtcactcataccttattggtgcaggtgtttgaatgcatttttgttggtgtggccaattcgtgcttg

SEQ ID NO: 106433 - DNA, 662 bp, Zea Mays
ggagcacgcgttctgtcctcgctggagcaccctcgaccctcccaccgatgtcaccagcttcgctagagctcaagaagtctaagacaagctccaccaaaggtctaccgacatcttatccatggacttcgtgacccgagctgaatgatgtcgccacaccattgactgccactcctcgacccacaccaagcgatcgaccagtacgaagcacttcacacgacgataacaaacaccctgtgccccaccctatgttttttgtgcctaaacccacatcaatgtcttgtcatagttgctccgagccatcatgttgagccccattcccgttggtatagggctaattcctgtcgtttctcggccgatgggaattacctggattcctattgtgtcccgctgattaagttcttcccgttgatcagctgcacctcaatcttactcatctgttttgccatggctagagaggccttggtggcaatccaccacccttgctaaatgccctagcatccgacgtaagccaagcgttgttgtgccctcgccgcccgcacactgccattttaatctccaacatacacatgtgatccaacggctaggaacaaccagtaatggtcagcgtcagttctaaccacgcacgacaatgtctgctttgcaaaagagcccctccatttagc

SEQ ID NO: 106434 - DNA, 360 bp, Zea Mays
gtgaagcttgccaattcttgtcaaaacaatagcatttaccagcacagcaacaacagaccatacctgtaacatggccatttgcgtggtggggactggacatgattggacccttcaagaaagctcagggaggctatactcacgtgttggtcgccattgataaattcaccaaatggatagaatacaaactcattgcttctctaacttcagccaaggcagtggaattcatacaagatataatatttagatttgggataccgaatagcatcataaccgacctgggatccaatttcaatagctctgaattctttgatttctacgaacaacggagcatccagaccaaatatgcatcggtagcacacc

SEQ ID NO: 106435 - DNA, 903 bp, Zea Mays
aaaggacttcacctggggcccagaacaagctttctccttcgagtctttgaatcaatatctgtctgacctagcaacattaataagcccagacctagggttacccctgctactcaacatcacagtttcgccctgcgcggtcagcgtagccttggtccaagaaaagaccagagatggcaagacccaccaatgcccagtatattttgtcactggagtacttataagctccaagtgcaacatgacagagctagaaaagatagcatacgccgtcatcatggcttcatgcaagctgagacattatttcgaggcacacaaagtacgagtcacttcagatcggggtctcggagagttgctcaggaatccggaggcgtccgctagaataaccaaatgggccgccaaactctccggttacaacttcaccttcgagcctagaacaacaatcaaatcccaggttttcgtcgatttcatagtagactggacagggccttcggagccaccgcagtgtcatgcaaaaactgtctagactatccactgtgatggggcatggtgtcacgcaggtgtcggcgctgcagcaatcatcacatcacccacaggactcaaatacagatacgctgcgcgtactcacttcgcactaaaatcagataagtgcacaaacaacatcgttgaataagaagcagacatcttaggacttcgcaagctgcgagccctcgaagtgaccacctgcatcgtcaaaactgattctaaggtcgtcgctggccagatcgaaaaagactactccaccaaagagccagtactattgtagtatctcactgctatctgaagcctagaaaaacaattcaaagtcttcacatcacaacatatcaagcggaacaagaacgaagaagccgacacactagccaaagcagc

SEQ ID NO: 106436 - DNA, 403 bp, Zea Mays
gtttggaagcgatcccgaccaccgttcgggccagcctgaccccggcgatcagccagtctccaaacagaggggcgtccgccctcaattgcagcttcgccaacaccagccatcagcacctgagcgaaagatcgcttgggagctacggagtatggggaaggcttcgcaagatcaggctgtgcaagaaactgtggccgaatattgtgtctggttctacaaaagagacgctgagaaagcgatcttagacctgcgattcgattaacgatggaattggaaggccggctcttagaaagaaatcgcatgtcccgagtaaaagacatgggcctacattgttccgggtccaccgtatttgaatttaaaggaaatattctatgagaaatttcctgcgaaggaaccggaccacgat

SEQ ID NO: 106437 - DNA, 615 bp, Zea Mays
ggatatcagataggcgttaaaattgccgtgtgaggtactggtagtagcaagagtgtgctggaaaaagttggggtcgatttgagctattttgactggtttgggcatttcaccgaacacgtggtgtgcaggtttttgaaacagtggtgaaacgactattttttatgtgaaaccctccctagggagctcaataccagcaggggaagcttaaggaacactcaatcacacatggatgaaaggatttcacaagatttttgagtgtatttgaggattttcaaagaggtgggaagagagcctcacaggagataaaccagagagagaggagggaagcgactgagatgtgctcactagagagaagagggaggccgagcctgggcaggggaagcacgccggagacctatgatggccgatcaccaacgggagaactgggggtgccgcaagggagaagccagagacagaagcggcgcgctagagaaagagctgcccttgggctcgggcaggggaaacctttttaaaaatgcatcatgggcacttcagacagtctatagggcttgtccggtgcacaccggacagtgcacagtagttgtccggtgaaccaccggacagggcagcacagca

SEQ ID NO: 106438 - DNA, 731 bp, Zea Mays
gaaccattgtgggtgacaaagtccatgacccttgctctccatgtataggaatttgcctggccatggtggaggtcttcacttgtggggagccccctggtgggcttctgccttcgcaagctgttggaaattacaggagcgaggaccccgttggtgagcctgtttgaagtctttggtttggcctggtcgtgcgatcatgtatggttagttatcgcctagaggcaagtttatgaagggccgattaaggtcaatgatattaggcttgtccttcgcccaaacagtacctcaaggcaatgactcatcctgatgagccgacccctaagtctttattgaagggacaaactcgaatgctgccctcgatcatcaggtgaacagcctgggggttgaaataactgttggaagcgacatggtaggcgaggttcacacgttttttggtgagaagactagttgcgatgcaaaagcggggcgttggccgtctaggggactacggcaagggagggctctaaagccagagcctaggaggtgttctcattaggattgcattgatggtgcggtgtctttgctagcttgttgctgttgcgaacacgctagcccccatggcaaaagtccaggaagaagtggttcccgcaaaagcggagtgtgcggaggccaagaggagacttgctccgaagaaaactgaggccgagcagtagaaaaaaagggcaaagtctactgaggctgaggttaagttccta

SEQ ID NO: 106439 - DNA, 307 bp, Zea Mays
agagaagtggtggcaacgagaagacgagtcgattggtctgtttggtctttcctccggctgaaggccccctttttatagaggggcacaacaacttacgatttcgatctactaaatctcaggaaccgctctttggaatctctctacacgtatgtgtccgtgcgttgctacgaggcgggggagtgtggggagtggcacctaggctgcagataaaattattctctatttctaaacattaagcagaggggcatgagttcgagtgctcgttttacactattttttgtagacgctgagcgtgactgcatgagga

SEQ ID NO: 106440 - DNA, 393 bp, Zea Mays
ctcaaaaagaggcaaggtgaaaccgagctctggtggagaccgagaggaagacatgtgctgtgagggagatggaatgcgcggcttccgtggagatatggaagagagaaaatatcacgagatggaggagtgtccggtagtttccagggctgaacaaagaggctacgtggaggggataaggagggatttgttgtagacgagaagacttccagccgagcactaattggataagaataggagcattccaaggatttaataagagaggagaacatatacgacttgggtaaaaataaatagagagggctgagcagtggacaacagtcagttgctgacttgaaatgacccaagggaaacacacaacaggcgtggagacccttgcttcattccctgactgag

SEQ ID NO: 106441 - DNA, 1449 bp, Zea Mays
ctcgtcgtcttctcccccccgtcagagcgagactgcgagagacagcgcgaaggtagagagagtgtgtggaacagtggaagcagcagcaaacgcgaccatggcgggtggcgccggcgggcgggacccgctcgtcgcctccgagatccacggcttcctcacctgcgcaggtcgccccgccccgcccccgcacgagggcggccttttctccctccgttttctcttcttctcctttggtactccggttctgttgctcgtcttggtcctgcatctcttcttggacgtggttggattgagctctggagtcttggggctgctgccgtctgatgcctggaactcgtaggttcttcgaagtttcgcggctgcacacgcgtatttgctcattttcctccgtatgagcctatgcggtgtcctgttagttgtttgagctctttatgcagtcgtgttgcttgattggattggaacagtagtggtatttctgtacttctgttggaaactgatcgaatgcactgtgggcgtttggctgctcagttttcttagttcacttcacctcatcacctgatttttttcccagcagttcctttcgcctgattttttctgtgctcagtttaagcacttattagcttatactttatacttggtgtttttgttgctcttgttgtcccgttgtttaatgacatgacgttcgaatctggtactgttcaaagcccaaatgaggaggctctgtgctgcctgcactgagttattgcctgtctgtgtttcattggcgattggtggacagacttgaactttgacaagctgatgatggaggctgggacacgctggttccggccgaatgagatctatgcggtgctggcgaactatgcaaggttcaaggtccatgctcagcccatcgacaaaccaattagtatgtgttccacattcgccataaaccccttaccttactgcaccctgcacatgtgtttgtttctcgaatacgcaggaggaactccatatccttatattaagaaagggtgaaacgagtccaaaatagactatcacatgccagaagcagtagcaaactgaaaaaaaactgaaactgaaaacaaggatagagaaaaaagaactacaattacgcccaaaaacttctaagacctaacgctcctgcaatttcccctccgaacagcgatgtcttgaatgtcttgcagcagcttatggacattgggagcagatttatcaaacacatgcatttctatgtctccacagcccccaggccaccaagattacaagcgaagttaaaataggaaacagaacaaaagcttgtgtgccaagtgccgagtataagatggttgtattgtttgaccttgagcctgaacaatttgatttgtatgtagaatgtaccacagtaattatcccgtagttcatagccagttgctttattgtttagaatgctatggttgatctagtgctggt

SEQ ID NO: 106442 - DNA, 1055 bp, Zea Mays
gggcgaaccaactgccgaagaccctgtagcgtcggtcgaccctttgcaggtggcggggtaggggttaggtctatcggatgtaggactttgtttctgagatactgaaactcggttgctgcctaggttctgacgtgtgggcctgcgcaagcaaccgctgctgacgatactaattttatggtggccgcaaccgcagtgcctcctaatgacaatttatctggttctgaatctggttctttttcgtctgatggtgagtttgggagtccgtttcctagaccgaagagtcttcatatgaagacttggattattttgaggcattagatgtggccacggcggagtccttgctgcgcgtggaggttagcgaggtgtctgatcctcctagtgcgaggaccaagtgccggcgacgaagggtggtgtcgaagcatagcgttggtgaggtttcgcgaagtggtaggcaccgtcggatggggatggagtgggaccgtcttagagtagatcggtttggtaaacgagagttgatgtcttcgccgattgggacgagcattggtgagggggatctacggaatctttttgagggtgaggaattgaaaataatgttgttcaattatagggaggcaggcatcatcccgaaggttgagccgatgtagtatgtggtgccctcgcgttgtccggcggtaatggagggcgtagttgtctttatttgtgcggtgggtctagtgaccattcgctgagtgtatgtaactgcaacttgtattataatgtggcctgatggccttctttgagtgagatacttcgtatcacacacttgttgtgctaattcggctgcacccttaggcgacttttgcacgaggtgtccttttagtaaaaaacttcgtatcgcgcacttgttgtgctaatccggctgcacccttaggcgacttttgcacggagtgtccttttagtaaaagacttcaattgacgcacttgttgtgcttatacggctgcacccttgggcgacttttgcacggagtgagacttcgtatcgcgcacttgttgtgctaatccggctgcacccttag

SEQ ID NO: 106443 - DNA, 524 bp, Zea Mays
tggtgatgaccaatgagaggggcacagaggagcttggcacagaggagaggggagaaaaggtagaggatacgagcttggcgtagaggaaaggggagcagaggagcctgctgccttagacaagcgcagagaaggaggaggatagcaaaggaaaagatggggatcaaggtgtgccgacgactaaatgaagaggcggacaaatttggtcgtcgcttcaaatgctaagccaaacaggcaatgtaaatgggccctaaaatgggctaaacgtcacttagagccacgtcttggctgttccgtttaggtcaaacaacccatttacacggcttgatgactgtttagacccttgacttgtttagaggacttcccagggcctaaactatacagttggccatggtttaccatttaaagccttttagatgaccgtttaattccatttaggataaaactaattgagaaccacgctgaacacgatttacgagcactaacgttaaagcatcacatatgcacacgaaagggagcaaacatcg

SEQ ID NO: 106444 - DNA, 534 bp, Zea Mays
gcggagcgaaggcgggagtgggagcagtggaagctagagtagtggaggtggtggacacaatgggtgtgtggatgactcgtgagcaacatgagttggtgaagtgtgaggtggagtggaaactaggccggaaggagtggggcgagcagtgaggagcgaggctgggacacgaggcgatgaacatggtaggaaatctgatcaaaagaaatccgtagctgacctccctgttcagcctgatctattgctgctgctgctgcaagtgctgcatgggcggctctgtccagatgcctcttctttctgccctcttgctgctcaagatagacagtcttgcccttgacctatctgaaggggcaaggagggtcctcgtcatctcctccccctaacaatgtgacattcttcatccgcaccatcctgaactgactactgcaagatagagagaaaagataagcgagagtatatagcagtagataaggcctcaaatagagtgatagctacctgggaacttctcgagagagaaaagaatcgggaaggccagga

SEQ ID NO: 106445 - DNA, 328 bp, Zea Mays
cttggccttcatagcctgggtctcggcgtgacttgtctctttgtgccctgcaggtactcgacgcactcagacctagccctgatatgttgttagtgcgccatatgttgggggcgtgcaggccataaatgtgcaccagttcgaggggttcgtaggtcgtgagtgtggtgcagcccgaggggcttgtagatcatgagtcggaggtagacgggctcctctattgcggctcgacaccaaacatagttagtatggtctatcatttacgacgagtcagtctcgggcgaggctatggatcaacaagacatatttcccttcgctttctagctctgcc

SEQ ID NO: 106446 - DNA, 384 bp, Zea Mays
tcaatctgtccacgataacccaaatggaatcatggtgcctggaggtgttgggcagtcccacgataaagtccatgcaaatgtcctcccatttccaagatggtatgggaaggggttgcaaagggcctgctgccttcaaatgactggctttaatcctttggcaggtgtcacactcagatatgtacttggcaatttccctcttcattctggtccaccagtataaggatctgagatcatggtacatcttgttgctaccggggtgcatggagaatttagaaaggtgagcttcatccaatatcttctttctgagctccgggtccttgggaacaaccaatcgatctccaaaccatagaattcccttgctatcctgacggaagcactcatatt

SEQ ID NO: 106447 - DNA, 399 bp, Zea Mays
cgcccagccccgaggctaacaaagctttggatgctcagaggtctgtcaatgttcgcccgaaacgttctcgctgagctgatcaagcctcttttcctgctgagggggagaaaaagaagaagagacgtcttcgtcgggtgtctagcttggatcagggtgtcggtccttctgttcctgctgctgaggaagtgccggtgcctgaatttgctgaagctgaccccaatgggtgtgaccctactgaagttgaccccaatgggtgtgctgtctgtgttgttgatgaggatgataaagaagaggacgaaatccctctgattggaagaacagccggcgttacatagctagtggggaaagtagtggtgttccttctcctgccttgtctgctctcattggtctgcaagaatt

SEQ ID NO: 106448 - DNA, 498 bp, Zea Mays
attaaatgcaaactaaaatgtctcggatctggtaggaaaatgcctccgaagcatgcgtctcttgtgaaaaaaactgcatgcattttgttaggatccaagtgtttattttgggactgttgtcatatttttttggtatatatcagaggactataatgttagaaatctaggcgatttcaacaacaatttaatcataaaatagataatcagcaggtttatgacgtcagatatatgcatatgtgatctaagcgtgacaagcatgtattcatgtagatgtagaaaatactaactaacatgaatttgaatatttgacccaaaaacttattgcacagtgagcaagagaaacatacccaggagtagagctagatgcactggtcaaaatagtgcctattgacatggttcttaaggcggtatggcgagacaagaaattgtccactgcctggacgcctaggcgagcaaggcgcttcacatagttttcagatcgcctgatccatgccactg

SEQ ID NO: 106449 - DNA, 473 bp, Zea Mays
gcacatattatgttttagctaataagtaagatttagaaaagcttaggataagagaaggttaggcaagaaaaacttctatcccggagggtggatcttgatgcatctagagatctggtttgacttttatccttgacgattacctcccttgacggtgactcttatcctttcctttatgaggttgatcttcttcatatttgtgtcttggttaagatagatctgtatgtaacacgtaggtagagcagctggtttagtagatggctatgagtttaatgaggttagttagaatctggtttggtcgtttgcttctagacgggtgggataggttatgtaacctattatgtaggtcaggttgttgggcatggccgagttgatctaagccaccaatttaggcttaaaacatttttataggagtgatgtctaatctatttcactagtactaactaatctgttacataactcactttagattggat

SEQ ID NO: 106450 - DNA, 444 bp, Zea Mays
ggcgttgtggcagaagagaggtcgtcctcgggagttatatccggatgtatctagtaagcatgctcctattcctcatgaactttctgtgcctaactggactgtatcagaccgacttgggtatgtcaatccaaacatccagacatgattgctcgctgcttctacctttgtggcggttttaacgtacgtaacttatgacttgtgagttaaaattgtttactagatgtgtaataatgctctgttccatttttgtaggagcacctgaggtgtttctttttccaatggatcgacggtcctgataaatttgaccctcgatatcttcttttcgctaattggttgtgtggaaggactagtcatgagcattttaaatgttgggtacctcctcccacgattcctccaccaatgacggatgcagagaaggaggtagcaacagaaagacgaatggac

SEQ ID NO: 106451 - DNA, 430 bp, Zea Mays
cgatgatgtggttcaagatagagtcatgacacctgagcgatatagatgaaccatcgacaatacaggcatgaagttcttgttttccattccatatgcaacttgtgtccatcaaagagagctttaggctatcctgatacacgagcatgggtatcgcaagacagcaacgaaggatttaaagtgatccaaatccgatattttggaagatgttctaacatcaatacgatgatggggtagaaccaataaacaatctagatatttagcggctaaagtcgcaacatgattcataaggaacaagatttctagatccaagtgagaagagaggtcataaaacacgatttttgcctttagaatgagcagatgagagatccacgaggatggggccaaggattctcgataagaactttggctaaagatggtttgcggaaacaag

SEQ ID NO: 106452 - DNA, 423 bp, Zea Mays
gaaattaataaaaactaatttgacgttgtaaacaacatgttttgcggagaaattaatgaaaacgaacttgatgttggagaaagtaatgcacttttgtgaacacaaagtggatatatacccatatatgagtgatgaatgattgtccagaggtgatcaaagttttgattgagtgtgtgtgacagtaaccatggtgtgagtgacacagactgcacacaaatatcttttgacttatggtatgcaggtattcaatcttgagacgatcaacgacaatggaaaagctcaaccgaaaaatccatgcgcgatggaccaaaagtggtgaaggatggattggaaaaggcttggaccaagttataatgatggactggctagcacttggacacatcgataagcaagtgtacatgcaatgatggtagtaaagacggt

SEQ ID NO: 106453 - DNA, 633 bp, Zea Mays
ttccaccaaacagttgctaataagtaggaatataaagaattcaaaacaataggtcatcttttaaactaaaaatgacgtttccctgatgtcaagggcattgtattcgcatgagaggatattagagtacaactagtggatgaagacgttatagggctagctaatgaccttttgtgataccaggtttcctgtaatcccctctattcaaggcatacctagatggtgtttatgtccacacaagaaaaacacatcaatatgccacatcgtttctcaaaataaaataatgaccatggaaaatttatccaaattgagtgagagaactatccaaacataggtaaaggttgtaaggcacattttttccaccataccattgctaaaaagttggaatatagagaattcaaacaatagatcaccttttaaaccgcaaatgacgtttctatgattttgagggcactatattcgcatgagagggtattagagtgcaactagtggatgaagacgttattgggctagctaatgacttttgtgataccaggtttccaataatcctctctattcaaggcatacctaaatggtgtttatgtcgactcaagtataacaccatacatcattatgccacaccattctcaaaataaa

SEQ ID NO: 106454 - DNA, 454 bp, Zea Mays
gcaccgtcttaagtcgtcgccgacttaagtcaattgctccgttagtagggtatagtggtcacctaagccgagttagcgtgagcatgtcgcaccgtctttagttgtcaccgacttaatccaattgctccgttagtaggatatagtggtcaccctaagccgagttagcatattgatttcaagttcaattgaatcgaagtcagctgatagtcaagagtctgaatgcctttgaaaacgacaactttattgatgatgaagtccccgattacagagtacaatgttgcttcgagagcttttgaggccttgctaagggtaaaactttctaagatgctctatgttccatgagttctccacttccgtgccatccatttgagtaagccggtatgatcccggccgagtgacctctgatacaatgaatgacccttcccatagtggtgacaacttgtgccgtccttcc

SEQ ID NO: 106455 - DNA, 349 bp, Zea Mays
atggattctcgcataaataccctatgtgatgagttgaataagatgaggattgaagtaattccttctggtaccttgtctcacatctccgtcaagccaaaccttgttagaccagattattatggcccaactcagtgacaaaggagtgcaaatcatcaaagagaatcttaatcagaaagtggagaagtacaagtgctttcgctaagatagtatggggttactatggtttgaagacagattggtggttcctaacaataaagacctctagaagaaaatcttggatgaggctcatctctccaaattctccatgcacccagaaagcaccaagatgtactatgatatgaaacccttg

SEQ ID NO: 106456 - DNA, 611 bp, Zea Mays
aaggttcgggaaatacgtcagaatattttggtagctcagagccgtcagaagagttatgctgatatgaggaggcgggatctggaatttgctgtgggtgaccaagtccttctcagggtatcacctactaaaggagttgtgcggttcggtgtctctgggaagctcagcccgagatacattggaccattcactatcttggcccgagtgggcagcctggcttatcgcttgctactgccggattccatggcagcggtacacccggtttttcatgtctctatgttgagaaagttcttgcgggatccggaccattagatcgagatggaaccaattgcggtgcagcaggatctgactttggagtgtcgtctggtgcgtatattgcaattctcggagcgtgcattgaggaagagatcaattaagtatgtcaaggtcttatggactaatcagtctgagcgcgaggctacgtgggaacttgaggagctgatgcggcagaagtatccagaactttttgttgtgggtaagtgtttttgattctttaatctttccttttgtcgttccgatagaagcgtcagaattcgaggtcgaattctttttaaggggggtagagtgtgataccc

SEQ ID NO: 106457 - DNA, 389 bp, Zea Mays
gaggagtaaagatcttagcgctcagattgggtcgggctcgctcaccgttgtgtccgccgtacccacttgaactgcggctggccggggtgatcctcaccgccgttagccgcttaacgatcatgcgccatgcgtcttggaagcttagcacgttgcaatgaacctgtgtagcaagcctgtccatcgcccgagaacttgccccggtgaaagccacgaatttgcttgtgctagtaacttcttccttctctggccgccaccgcgctatctctaattcacgggccaccgcccctggatcctataaattgagtgtgatgtcggctccgctaggtagtcaagcacccaatacatcaactcgtgcctcaaatcgtccaccatagctcgccaatttgaga

SEQ ID NO: 106458 - DNA, 569 bp, Zea Mays
ggtgattccggggttttgcggagggtttaagcccggaccgctctgttcgcgcatcgaggggaggaaaggatgagctggaagaggcagaagcaggataaggacgagatgaccgaggaatgctgcttcatttgcaaggacagcggccacgacctccgcgtatgtgactctaggtaagtcttcatcgtcctgtatacgtgtgactccacgaccccgatagctgtgtgagtgtgggtgggtcggttctgtgtctatcggttggctctttgggcgcgaaaaagactagaattcatcgcgattgctctttaaccggttgcgtgatttcgtgctgctggcttgttccagcgcatttggatggctgtgcgcaatgcagctaggtagatgttggtgcagcgattctgcgtggcgaatccacctgcttatacctctactggcttgggaaacgtcgcctggttcatcttattttttagtccaattgttgccagcagctttgcagctaattttgcgtcctggtcctttccaggaactgccccaaggcttaccatccacgctgtttccaaaacaaagatgag

SEQ ID NO: 106459 - DNA, 365 bp, Zea Mays
tatgtatagccattttattatgtaggataaaagatgtctttgaagcgtagataggtttgggtaagaaagagtagggtacggaaagactccatccaagattgtggatcttgattcttttgaagatctggcttgaatcttatccttccttgatttgatgaggtcgatcctcatcgatcttcattcttgaagttgttatccgaattagggacatgtagttaagataaagtagtaggtggagcagctagtttagtaggtggctatgagttaaatgagattagtcagaatctggttgggttgttttgcttctgaatggttttgataggtcatgtagcctattatgtaggtcaagttgttgggtatggccg

SEQ ID NO: 106460 - DNA, 312 bp, Zea Mays
cacctttgagttttgctaaactcacactggaggcttttacttttgcttatatttattatgtgtgtactgtgggaagatggcttcttcctaggtgttgtaataagttagcacatgaatctaccccgagcatgtactaataatacatactacttggtttgtatactttaaaatgctgatgtatattatcttattgtaaagtcttccgctcaactcctgtatttaaagtttatgttcctgtcgggttattgtaatacttgcaactatggtgaatggtccttgggaatgaacgagttcatcgaaactcggcacccc

SEQ ID NO: 106461 - DNA, 608 bp, Zea Mays
cgcgggggagccacgtgggtgggtggggcgcgctagggtggttcaggggaatggatcgttgggtccatcacctgggtggatgaatagatctgccttatatataattatgtatctgtgggtttgtgaaacacgcgggtcgtgggtttgggtagcatattatacttgacgcgggtaattggtaagggtgtgggtttgaaaaccctctacccacgggtttcaaacctgttgccatctctactaggaaaccaagtgaacgacgaggtctcccttcccgataagatcccgaacccgttcaattcctttggcagggatagaaaacctcaggatgaaccagtcgtgaattctagagtttgaaggttggtccacagagggctcacgactgctccagcaaaaatcatagcgaggggcagtaggtgacgggcacactagcagctaggaccgtgatgtgtgaaatgttgagggtgtcaccagccgtcagttctggtcgaacagaatcaacaactatgagttggtgctcgggagtttgaggaccgtccctagtagaccccaagcttggatcccgtgaaaagaaccaaggcctcactcagattagtcctttgtaactcacc

SEQ ID NO: 106462 - DNA, 592 bp, Zea Mays
gaggccttcacccagaactgttgaagacatcgaagcgaagggctacactgtttaaaagggggctacttgtagcttcgtgaaggtgaccctgccggctcgaatggttccaaacaacgacaattccagcaaggtcgaatacctgatatcgtagggcgaagggtaccacacgcgtgcgagggtcgcaccgcccaatggtggggcccaggccgcgttttgatgtcattcgggcctatctgtaagccctccttggggtagggtttgtagtacatttgattaggttgtacttaacatcgttgtaatgacctcgtaagggagaatattctggagctataacaggtaagagggcatacccacctacccggatacctataaatactcccacactatacacttatggcacatgcttaactagacgctacagtctctgcttactgttctgttgagcatcagagttccacctttcccgagtgattggtcccacttgaccacgtgtcagtcggtaccaacaactatattgacaagatgcagttaggggtgatgagttagtaccgagtccgaggaagtacgagttgttgtgtttcggtgtttgttg

SEQ ID NO: 106463 - DNA, 469 bp, Zea Mays
catgctgctcgcgtcggcaatcctcgtctatccccgtctatcctttcggcgcccacctcattatcttgggtccgcgagcccacctctgaccatcttcgtctaattttatctaaccctatctgccacctgcctaactcagtcaacgtcatacactgtatcgtgcaactcgtcgcgcgaccgtctccttcgcccggccaggacgcgatctgcgacaaattttgcaaccgtcttccgcatcctctcttttctataaatacattcctagccgtcgcataacccctcgtctctctcccagaaacaaatcgcgcaggagcaggcatcccagcggttaggcatcggtgagtcccttccatctccttccttccctacgctcctccccttcgttcctggcgatcagcaacctgcagcccctccccgcgctcctcaccccttacctgcgcggcaagcagatctcaagccagcgtccaag

SEQ ID NO: 106464 - DNA, 306 bp, Zea Mays
gagcagtggaggacacataagaaatagtaacacggtttattctactgaagttgttgatggttctagaaaaaattctgttggcacgggcttcacattcagatacacgcttcacattcagatgcctgtataggtgcaaaccgtgcatgcctgttttgttggtgagataatattgatgtaattttattccaatacaatgaagcaggctactgaaaatcttgacggattccatgcttgtggtgttattccgacaaaagctttactgagtaaattggtgacaacagtgatagccaagaccaactatttcta

SEQ ID NO: 106465 - DNA, 279 bp, Zea Mays
cttcgaccagcattctgtgcaggggaaatcatagcctagctttcataaaacttcagaaaatcactacttcgttttcctcaggaagaggaacagtgctctcccctccgactcacactatggatgtatcatgttaatatttgcccttcattatctcaatttgtcctttcttaacaatagatttccgaagacaacatggctcagcctccttggccgatcttcggcatcatctgcaccactatcaatatcaaaatcttcactgtctcaagagtcttcagacag

SEQ ID NO: 106466 - DNA, 978 bp, Zea Mays
gctaccgatggctactttggcgttttttgggctggggtctatattttttcttctggaatacgcaggagagctgcgcatctttgtattaatagaagaataagaaagggggagagaaccccattacaacacacacaccccaacactagagactaactaaggatcaccgactaacatggagaaacacgacccacaacgctgttttaagccagcaactcatcgacttggaggaaagacagggccttggctccagtcaaggaccaaagcaccgcctcttccctagccaccctaagggctgtgaccaagctaggattacatccatcaaagacacatctattcctatgcttccaaatggtccaagcacctaggattactaaagaattgaagccctttcttataagatcagatgcccgagagctgctagacttccaccacgactcaaaggaatcctcgtgagctggacacaactcctgcagccccactgaactaaggaaatcaaaccagaactgcttgacaaaaacacatttgaccaacaaatgatttatggtttcagcctcttggtcgcacaaggggcactgctctggtcggtctagtcctctttttctgagcctgtcagcagtccagcacctattatgttccacaagccagataaagaacttgcacttcccaggagcccaagatttccacacacgctctgctggttcgaactcaactgaaccaaggaagagagctttataagcagagctagttgtataatcctctgaagcactgaatttccatatatgtcgatcccttattccaggctgaagcacaactgcatcaagcacttcacaaagttccaggaattcagcaatgactctgactgaaattgctccatttacatcggagatccaatggaaattagggagagcatctttgaccaaccgtttattggcaagacgcaagggcaccatatcaaacattgcaggagctatgtcctta

SEQ ID NO: 106467 - DNA, 454 bp, Zea Mays
atcaagtacgcacagtatctagacaaatgaactgcaacgcctcggtcatcatctcgaggagtagtccgactccgattagtaggagcacggccagaggaaatatcacagtgttcagttgcgacgtgccaaattagaatgacttccagctgagagaggcccttgagtgcccaagaatacgtacggaacggcatctggtcctgccattgcgatgtttctacggcgtcgtcctccttgccgccatacgttgatatgagcgatctagcaacagctctcttcactgcatcagaaacctccactggatctttctgttctatcctgtttctcatcaatgagtgctgcttcatcctgtttctcatcagctgtccagaaaacgtgacccttctaaggaaagcgatgactgttccaaagatggatgggctgatttcataccattgtttcttgacgtgcatggtgg

SEQ ID NO: 106468 - DNA, 687 bp, Zea Mays
aaggaactccactactttcaccactggcgatgaactgccgactgtttttccgagttaaagaagcctcattttcttcctcctcatcttccacagtgacaacacaagcagcacccccattgggatcagcaacagatggagcatccacattgggatcagtagcagtttgggtacacccattggggtcagcgtcagtaagaccagttgcaggcacttcttcagcagcaggaactgaggtaccagcgtcctcatcaaaactggatactcgtcggagacgtcttcttttcttcttttgctcatcagcagaaggctcaggctgactggttcggctagggcgcctcgggcgagtactgacaggtttctggacgtccaaagttgtatcaacctctggaaggggcaccactgccaacgtaccagtaggagcagcgtcggaggaatcctcagctagcagatcaagcatggcatttatatccgcatcactagggttcagaggcacctcaaaatggacctgccgttcgtcatcaggaatctccccaagtgaagcaaccaaagtactgacttcttcagcagagggtcgcactctaaggcccaaattgccatcagtcacaggcggatttgacacaaaaagggtgaaatctttgggaggaggcaggttccaggccgagtatgccactgaagcaccaacatttg

SEQ ID NO: 106469 - DNA, 731 bp, Zea Mays
ctaccaatgaacacatactgtggattcaaatacttcgtgacaatgttaaaccaggtatgctcaaccatcctaaatgggtactcgtgtactataatcatcttggcaattaactttctaacttgctcatgattataatctctaggggatgtgatagtaggaagaccagaacctgattcacctgcatttgaaggagcaaagttgagaagagattgatcaagcttcttctccaaatgcttcgagtatgcctcacaacgcttcatatgtctcgacaatgtggatgttgtagacccttgtatgcaagcatacattttcttacaatacttgcactttgcttttaataccttttttccctcctcggatgcacctccaactgtcactttatcaaacacttcccaaactatggatttagagttgcagttgctgcccactttcttcctcttacgccttttcttgccttttcttttaccatcatcatcatctgatccatcaccaacatctcttccacctagaacggtgatctcatcctcagacatgtcatcgttcttatcaaatgaattgctttctgaatctatctcatcatcatgagtttgactcatctccttccctttcacagtagattccataacctagaaattaaaatgatcagataacaacaaatgagtacataataacaactataaagaacttaataaatagataaatgaagcaaacaacttggttgttgcatgacc

SEQ ID NO: 106470 - DNA, 852 bp, Zea Mays
caatggcgtacttacttgcaacattcaaaattcatcatctatacagatcaccgtagtctgtctcaccttactgagcaacgactccataccccgtggcagcacaaagtttttaccaaactgctcggcctccattatcgcattgtatacaagaaagggacagataacaccgctgctgatgccctgtcgtggcgaccacatcagatcgaggaatgttgtgccctttcagctgcttctccgctatggttacaggaagtgattgatggatacaaggcagacccacaagctctcaaactgctgacttcattggctgtgtctgaccaggtaccctacactctcaaagatggcatcatcaggtataatggacgcgtgtggttgggtcactcttctgagatacaatctagggtcattttagccctccacgctagtgctcttgggggacattccggatttccggtgacatatgctcggatcaaacaattgttctactagccacatatgaagcaacagatctgcgactttgtcgctgcctgtgtcgtttgtcaccaagcaaaaccggatcggtcacgctatccaggcctgttgcaaccactgccagtgcccagtcatgcttggcaggccatttcccttgatttcgtcgaagggttaccatcctcaggcaattataactctatcctggtggtcgtcgaccgcctcagcaaatatggtcatttcattccattacgacatcccttcactgccctcactgtggctcaggcatttatggctgcagtctatcgcctacatggtatgccagagtccatcgtttcggatcgtgatcgtattttcactagcaccttgtggcgtgagctgttt

SEQ ID NO: 106471 - DNA, 770 bp, Zea Mays
tgacatagttggtatcggtgtcacaatttgtacttgataatacttttgggtacactagcatgccacacatggctacagggtcaacaatgcatatcaaatagtggtcttgagtacgcatgctgcctaagtcatggcaacagtgcacctatcagagtataatgtcaaacatcacatttaatgtgacgtataaaaccgtatttgaagtgctagaaccataacatcattaagagtagaccttgaacatggtattgtacctttagtagtagtcatgccttagtgggggtgctacgttcctttgtcttataggtgcctcctcacttagccattgtaggagctccttcatcctctcaggaggctctagcctcggggccaagggcttcagagatctaggtgttggtagagggtcctaggcgactaagaatataatatgtatcctactatcaggagtgccctaggggtggtttttaggtcattcttgtgatagctctagcaaaaaaaactcaagtctaggagcatctcaaatcttagatccctgaagcctagagttttatattatactttttgggacacaatgttcagaacaactctattcctttgggggctaagagcaagctctctggagatagcaggccctacccttgttatgaactaaatttgatacactggcttggcggtgtattctctatcagatgtccatctctagctaatggagtcctctgtatctggttggaggtgaacctcttggatccaaatccaaatagatataaatt

SEQ ID NO: 106472 - DNA, 633 bp, Zea Mays
gtttacacctaattctacccacaacgactttaaaccctcaatcaattgcaaagttcgagctcaaaatctctctgtccacggtgatggcgcaaactgaggacaacccgaggtgttcccagcgatctaacgtggtctagttcaattggctgggccgataagaatccatagcacacaagggtgctgaaacgagggcaaggagggtatgaactaacctgtagacatctggccacgacgagctctctcatggcggcgttctgaccgatttgggggaaatgagaaattgaggggctctagtggatgatccgaggcaagggctggtgcgttggatgcgtaaatacctagcggaactcacgagggtggcaatttatagagttctacggcggtggcgtccaatttgaagaaatcgcgctggcggccgagagagaggggtgagtcatcgtggcgatctaccgtggcggtcactgggtactgagctacggcggtcactgggcagtctctacgactcgcgacgacgtggtaagatgtcctaaggcgtggtacaatcgcggtgaatggtgtacatcctggtgacgaccgctcggccacgtcgccagcgcaagtggatgagcgatagagcgcaacagtgccccccaa

SEQ ID NO: 106473 - DNA, 492 bp, Zea Mays
acgacgactggctgaagtgcatcgaagctaccagtgatgagctgcttggagcatactccaaggctgaagataatgccctgtccgcagcctttggtggccggggcaagaaaagattaaacagggtatttgatgctattggcttcgtataccctgactaccgctacccgctgcgaggacaagagaaacagatgaagattactgcttcggtcaccccagctgagcctgtgccgaagatcaaaaagatgaaggttctgacccaccggccgcgttacatcgaaccgaccgtggtgcctgaatttggcgcagggtccactttagcagccgaagcaacacagactgcttcgattacacagagcaccgaagagccaaccgtactgccgaagacacatacaatcaaggcagtcgaagataaggccgaagagccaaaagttgaagaaatgataaggatgccaaaaattctgagccctccgacgaaggcaaatctgccaaaga

SEQ ID NO: 106474 - DNA, 301 bp, Zea Mays
gaagggaggagaaattgatttacctgccaacccattcaaccggagggtacttagacagcaacaacagcaaaccaagatgaatcctccaccagccggagctgatcccgcagttgccgcccagatgcggataatgcaacagatggcagacaccatggtggatatgcacgcgcagatgtggcaggaatgccaggagatgcgcccaagagcgagaggagatgcgccaggagatgcgccaagagcaagaagagatacgccaggagagaagggcgcaatagcaacaacaacaacaagcaccatttcc

SEQ ID NO: 106475 - DNA, 279 bp, Zea Mays
ggaaattgatgacactgtcgaagcgtgtcagagggctttcagcactgtttgctccttcattagcataagagatttaattcaggaacatatagccttcagggtatgcccgcttgtggaaagctgggaaataccgaaagagaccaccaccgattctagcgaaggtggtctggtccgactgaagtataccttcagattcagggagaagtttgatgagccaaacgacgactggctgaagtgcatcgaagctaccagtgatgaactgcttggagcatattccaa

SEQ ID NO: 106476 - DNA, 1137 bp, Zea Mays
cctcagcctcctagtaccacgtgcaagaggtcgcctcttttgctagaaatgatcccgatcatcggcctcacccaacaccattcacttccatgcaggccccatgacccaggtacttcttcctccacatagcagaaaaacggtccaaatgcgcaataactgccaagaccaaagctaccgcaacgaactcgcgtccgtgattttcttacctgcccatagatctctcgtcgccttgtcccgataaccaaggccgtgaaccccgcctaagccttcaaaccctccacaccacatgaatccacaccatggaccgagagctaggagagaaatctcgttggccgacgccaaagccatgatcgtctagagcctgtccttgggttgctggggaatgccatcttcaacatataccacccctcatcatcatcttgccgagataggggtatagacgcacgccgctcaattcctcatcggggtcaataaatctgtgtgtgccgctgcactccttggaacctcatctacgaagttgattggtgtgcagagtgagaccatggagcatcgaggggacactgacgacctatgcagtgcattgacatgcgtgttgatcgatcataacccatggaattgttccccggacttcgaccaacgccgtcaaaccgcttgttaccgtggcccttcatcgccgcctcatagactcaggtaagacccttaccatcttgttttccataggtccctttatgtgtagcactgttttaccgataggattggcacgcgtgggcggtggtaaccgtacgatggcaaattccaccaccacggcatggcggcgccgtctcctgttgttcatcgaggaggtagagggtagaaaggtatagttcgagccgttgaatcaaaggagagcgactaggattaaaaggtggtgtaccgcttcagcgggggtccgtgggtcgttgattggtgatcgtacgggtgagtgagtgtgtcggtctcataaaattaggaccacagatcttgaatccaaaggataacaacacatactgcttcatgatctattgtgggtcattgatttgagatcttgtggccacgggtgacccacgttgtagcaactagggtcattttcttaaagaactttcaagattttaactcgca

SEQ ID NO: 106477 - DNA, 1186 bp, Zea Mays
tttgaacattattccattttgtttttcctttttaacctcatgaagaatctcatgtaaagctactacactatccaagatgtacctttccttgaggaagcctaactgcgaattactaatgaccttagtaatgcatgacaccagcctgttattaaggggttttgtgataattttatagctcacatttaaaaggcaaattggtctatagtttttcaattcttttgcttcctcggtcttaggaagtaaagtgattataccatagttaagtctttctataggaagcacacctttatggaagtcttcaaacatgtgacacaagtcaaacgaaatcacttcccaaaaatcttggtagaactcggccggtaatccatcgggactagggcgctgttatgtttcatggacttaaccacattatggatttcgtggatagaaaaagaagtgagaaaggacttatcctcttccccaagcctagccatatcgacattactcatagaaatatgagtatcgtcagaggtcccgaacagatttcggtagaagtttgtggctaacgcatttatattatcttccccttgtatcacatggtcatcctgaagcaaagataaaatcctcattttccttctaccatttgctttcaggtgaaagtatttagtattgttatcaccttccataatgattttttccctcgacttctgccttacttttgtttcatcctcaatcacaatatttctcaaacgagcttcatagacgattttctcctgtttttcatgatcaatcaggctattgacttcgcttttcacatctaactccttgattttaactgtcagatccttcttcaatttcttataccttccttcaatgctaatgttccaccctttgagttttttcctcaatcttttcaccttttccttccagatctccaagcttgaactgctccttacgggtttactccagcactctttcacaatctgaccaaagtcgggtctgtgtttccagcacagttcatatttaaaatccctcttgttataaattcttgtaccagaactcaaacaaagggggacatgatcagaaaacgttctattgaggcccctgacacaagtgtcatggtaagttaagtcccattccggactaactaagaatctatccagcttctcaaatgtggggtcatctctattattagaccatgtgtaga

SEQ ID NO: 106478 - DNA, 343 bp, Zea Mays
gaggaggtgaatgagatttactaaaaaattggaacaacaccgtgactttgatcccaatttcaacgaaaccccacgagacgattgaaactgcataacacaataatattcagtccaatgtcgtctgaatacatcaaactgctatataggggactagccaactatctgcaaaatcttagaatcaaaatcacaaaaggggtgagcggcagtgctgaccaactgagcagtagtgctagggagtggcagtgccgcgctcacaagcagtagtgtgggcgatgaaaaatgcctagattctgctaaaatttcacagggagtttgcttagagggaataagatggatcctaaag

SEQ ID NO: 106479 - DNA, 330 bp, Zea Mays
attgggctgaaactggcctgggttggcccatttactggcgaaagcgcgtccgcgcgcgccggcgctgctggttttgcagaaagacccctatcggtttgaataactagaaatgagtcacagcgctatttccatgtctcactgacacgttacaaaaacatcccccgagttctatttcttcaccgcccgaagtccacgacggcgaacagtgtagggtcgagctccggtgagcttgtaccggccggattacttgatgacgggtgctctacttcagttgaaaccaaattcaaggcctaacaatcgtttcccctcaactaatttcacgaacggcgc

SEQ ID NO: 106480 - DNA, 360 bp, Zea Mays
ggtaaaccgggttgagtcggcgacaccactgtataagtaagccgggtatgctctgtccttcagaggctgaatattcttaaaaacaaagtctgcaaccacagcttcagtggtcagacctttctccttcagcaaacaaatttcagtaagcagagccttggcctctgttacctccagggctgtaggagactcaatccaactcggagtgcacacatccggttgtctccctgaccgaggggggagggagttaccatggttttccacaatgaaccactctaagcgccatcctttaatactatccttaagtgggatatcgaggtactccgttttcctcccacgacgcatctccaagctcgcaccgcc

SEQ ID NO: 106481 - DNA, 363 bp, Zea Mays
cgccatcaggtagggaggtggtattcttgggaagttctcaaaagttcacattatccatgttgtcgcaatgcttccggatcgtcggtcaaggaagtcgggaatttttttctccatggtggtggagagtgaggctgctttgcgggtgcaagacatccgtgtggtgtgtgactttgccgacgtgtttccagcagagcttccaggcattccactggagcgcgatgcagcttttgaaatcaaactaattccgggtacgcagcctattcataaggccccgtttggatggctccaaaggagcaggttgaattgaagcggcaattggatgatctgctggctaagggtttcattaggcctagcaggtcgcca

SEQ ID NO: 106482 - DNA, 731 bp, Zea Mays
ctgggataaacactaggtcagtgtttgttagacgatatccgcttgacgactatctcttgtctggttcagtccgttcgtttttccggttcaccggccgacatcatcttgtggtctgctctggtccacgtcctttgctttgtacgattctcagctagcgtacctaatgagatacataatgcacacgtatgaacataagaaggaataacagactacataatgcttcatggaagcgaattaaacacttcatgatgatgcatcacaactcctttgagcacatactagataactatgactctacaataatcgtaatcttcgagaaaatcaaacttgactcaaacatcacacaacaataattaaacacaggtcttaagctatagcataacatcgatagattacaatacttaacggcgagacacattaccacacttataagcaaccactggccaacaacagatgactaagtacaacaatcatgcttctcaagattagtcaaatctaacacaactaccctaacaaaacatgtcagctagccgatttaatactaaacctattttttcacgtcgtcgatttaccaacatcgtatacgtgtctaccaaaaccccttttacctaaaccatatcttaaacccgagcttcacacgatgtgtctacgccacaattgcgattacaagcacattgcaaatatcaaattaattaaattaccctagacattcgtatccaccaccaaagcac

SEQ ID NO: 106483 - DNA, 293 bp, Zea Mays
ttcctgagctggagggtgagatagttgtgttcgaggcattttttactgccggccttcggttacctgcgcattgttttgtggcagaggtgttgcagaggtatgacgtgcagatccatcaattgacacctaatgtcgtggtggccctggcgaagtatgtctgggcagtgactgtcagccctccgtagaggtcttcgccaagaattattgtttgcactggtagaagagaaaagttggaagcaagattgcacagtttggatcatgcacctttacgccgaggactggcaagacttcgg

SEQ ID NO: 106484 - DNA, 273 bp, Zea Mays
aattcagttgggggaaaagttcagttcgataggatttgtccgaatctaaggattgaaataagggggatagacttccccgctagcctagtagtaatgggaactcaagggttagatgtcatcctagggatgaattagctacacagaaatcaagccactgtcagttgtgacaagagaacagttaagttggtgtccccatccggaaaggaagtagtaactaaactgtacttacctgaactagaagaaggagcttgtcaccatttatcagtagatgat

SEQ ID NO: 106485 - DNA, 443 bp, Zea Mays
aaatggatcagagagttgtcgtatgtggtttggagcctaagaactcaacctagccgagccttgcatggaaacactcctttcttcatggtctatggttcggaagcagtgctacctgccgacctcaggtttggagcaccaagattggtcttcaaaaacatagccgaggcagaggctaccaggttggaggatattgatgtactggaagaagagggatggaatacaataatttagtcagccaggtaccagcaaaccctgaggcgctatcatgataaggctattcggcatcgatctttcatagtgggagacttggtccttcgtcgaattctaacaggggaaggacgacacaaattgtcaccattatgggagggccatttgtagtagcagaagtcacccggccaggatcataccggcttactcaaatggatggcacggaaatagggaat

SEQ ID NO: 106486 - DNA, 509 bp, Zea Mays
aatgctcacactcttaagcaaagttgttctcctatgattgggctacaatgttgatgtggtgacctagggcaaaaaccctatattttaaaagttgcaaggctccaaagttaagctcaccaatctgaaattcagacttaggctgaaatcacaactaggggcctttttgcaaatgaatttaaatcttagggtttggcttccaaattcacaccttagtgaaccatgtgacttaagatactttactaacttggtttttgcactttagtccaaatgtgcatcaattttgcacataagcccctaggttttagttttaggattttccagggtttcaattagggtttttggtaccttaggggtataaaggtgattcaagtttattcttggggtcattttatgacttttcccctaaagcttttaggttttcttaatttgggttatgtcttacccctttaatccctatttagggttgagtttcctattccagggtcttgtttgcaaaacaccaaaacaat

SEQ ID NO: 106487 - DNA, 626 bp, Zea Mays
cggcgcccgggtgtagtggaaaatgagcaagggtctttgcatcttcctcggcgagtgcaaagggtaaggaagctagtcgagccaactagggtccgtgtaggtaattggaacgtaggttccttaacaggtaagttacgagaaatagtcgatgttgcggtgaggagatgggtaaatattttatgcatcaagagaccaagtggaaaggacagaaggcaaaggaaatggaaggtacaggcttcaagttgtggtacacggggactgcagcaaacaataatggagtaggcgtcttgatcgacaagagccttaaaattggggtagtagatgttaagaggctaggagatagaatcatcctagtcaaactggtcattggggacttggttctcaatgttatcagcgcgtatgctcctcaagtaggccttaatgggaactcaaagagggagttctgggaaggcctggaggacatggttagtagtgtgccagttggcgagaagctcttcataggaggagatctcaatggccatgtgggtacatctagcaccagtttcgagggtgtgcatggaggcttcggctttgggactaggaatcaagaaggagaggaaatcctgaactttgccctagcctatgac

SEQ ID NO: 106488 - DNA, 1180 bp, Zea Mays
gctttgaattatttggccagctcattcagttcatccttgcctgcattgttaggtttgtacaattggcattagttcggggtgggttgtggttgatcagcccactatgggactgagagttgttggctaatttagacaagaggacagctagtctttactgctggtttctcttttcttaaatgctgaaaatatgctgtttccttaaaagttactctttacagttgtctcctataatattattgattcaataagattgttatttttaaaatccagtaatactttttttgaggaacatctgtgtaacacagttttacaaattctttttcaagaaaaaatgacttatgtatgcattaagtgatagtatgtggttatgtttcttggctatttgtgtactgcgggttatggacaagggtttgcctaccttttattagaattagaaatctagagaagtaaaatttggaaggaggctgtgtgccgtgttggtcacacaacaattcagacctaaccaactacaaagatggacacaagtgtgattttagttatttaaatatgtgacaacttatttggaggatttcttcatgttaaacacacattaaattgtttcatgcttgctgaggatctggtataatagaagaaactgtgctttaacaaccaaactattgtaaactttgtgaatactggtgcaacatcagtgattctaacttgtaaacaaggaacgagtagtgtaaattcaaatttgtcactagtagagatttgttccttattacattgaggtacttttgctttatgatctagaagttcctttttgatgtacagaaacagtttccataactagaacttcattgtgctattctctgtattcacacagttactattggatgtgatgtgtgcattagttgccctgtaaaactgcatctgttcaccagtttatgcttggagctttctattttgttttgatattcccagtctttaatatgtttctactacagcagtttgcaaagtgagtattttatggtgcattgtgatttagtaaaattattttttgtcagccctgcaattttttcatttgaaataggacccggcttgtttagaggatgagcatcatacttttatttgcatgccgagcaacctacttcaatgttttgtttggtaggtgtctatgcctgtccatagtaaagtacgc

SEQ ID NO: 106489 - DNA, 508 bp, Zea Mays
gttgacccaacaatgctccgacctcaagaagtattctcagagtcaagtcgacttggcccaaacctctgcttctttggacgacgcatgttctttgaattcctccctcaattctcaacttgactctgaaaggacggcacatgaggtaaacttccttggttgactttgccacgctcattgttgactgggtgctgaatgttgcttcttgttcgtaggaggagagacgagcactcgcagcctctcgtgataatctggacagattataccgtgacgctagcaactccttgactattttggaaaggagccaccgcttcactatgtcggacctgcaccatcatcgtcacaagcttcatgtatcccaagatgaagttcagcagcttggacagctgttatcaaccaaggattcaaccattagagatcttcatgcttcaaagaaacttgttgcacaggagctagaagctgcccgactagctgtcaaagcttcagaggacaactgtgctgttctgaaggc

SEQ ID NO: 106490 - DNA, 429 bp, Zea Mays
gtggcaggacgaatgaaaacaggctgtttgaaaggataggaggatggacaaggcgaagaacgattctgattaaaaggtcatattaccaacctggttcgcttctcaggtccctgagtagacctgtcacctccaaatccctttgattttccatggcctgtgtttttggcttctacggccaatgtcgtgctaacagctctgctgtaagtaagatctaggcaggtgtccattttcctctaaagcctatcgttgagtcccctcatgaagcaattctttttcttcaagtaagtgttcatttggtcaatagcatattgggataaatggttaaacttgttgagatactgcattacagtatctcccccttgctttagtcgaataaactcctcttgtttcatgtgaagcactccctctggaacatagtgttcacggaat

SEQ ID NO: 106491 - DNA, 648 bp, Zea Mays
agagaaaacaacaaagggctgaatatgcagtggtagaatatatgccgaggatcaaaaggtgagtggtcaaattaagtcactagctccttcgacatgcctacctcctttccgtaatgctactaaacccatgggacggggatacataatccacgtgtgtgtttaattagcagtggtgtgaagagatcagagatggatgacatctgcaggtaggctcagttccaaccaagttacacacctcctcttgaccacgccacgcacgcccagtgggaaatgcagaatccttgggtgactcgaaatcatttagaaacccccattaccaccagaagctgttgcttgttaatccacagcgtttctgaacagcctttgttagtggggatcccactagaagcgtcaatagcagaggaattaatgcaaagtgccaccacccacgctgctttgttatagtgttgcattagtttaaaccagctacagatccaacatcactttctgtctcaagattttcagcaactatagtagtacataataactttttttttccaacaaaggttgatgataaaatctttctggtaatgattagagttcacatttggctataaaagttcagagttcagcacttgtacagaaccatgattactgcctccagcagct

SEQ ID NO: 106492 - DNA, 282 bp, Zea Mays
acccgctatgtgctttttgaacacgctggatgaaagtcctttaatgagctgatctgcaagtattagctctatgtttgcatgctcaacttcaatcatttgatcatgaactctccctcctttataatataatacttaatatcaatgtgtttaacatcaacacttgaacctatatgttgcataacctatatgttgcataactcttttgcttcttacctacgacgccacctgcatctgtgtgcattatacgaagctatatattcttgttgtgccttcatgtccata

SEQ ID NO: 106493 - DNA, 1347 bp, Zea Mays
gccgcgcgcatctctgcctaagcgccgctccgcccctcccctacgagagcactcttcgcccaaggttgcaggctgcagccaccaggcctctacggtggaggagaagaatggaggatgctgccaaacggtaggcttttgccggcttctacagttctacttattcaggaaacctacttgttacaaaagctcctgatattttaagccgttccatgaaactatctaggtcactgcgcagtgcgcacgtatttctttgatcgcttaactgcgagctctgctgctatacggctagacagacgcatcagtgccctactttcaggaagcagtgctagactgcgcagtgctcacccatccattgaaccatttatccctcagatccctgatttaacacaacccaccctcacattgcctatgcttcaggcaaagaaataagcatagagaatggagcaaccagctccagctattccgctcacagcgctccacatagcgatcgcgaactctagcctcagctccctggcattcatttcaaatgaaggaaattggaattttgtgtttagtactcatcaatttgtgattattgaagctccacaacttaaatatgataacaacttatggtgaaaataattgagttccaattcaaccacatgctaaaaactgtgaagcagcccttaacagataaccatagttttggtttcagtctgaatgttcattgaatggtgagagtcttttcttttagtctgaagtatggccttctggcatcggtggagaaattttgtatgctaaatttgcatgtatatcatggttcttagtgacaaatgccggttacaatctgttgttcaaatcttcattagagaacatgagctgtaccaaattctactatttacctatatgacattaacaagtggtgcttagatagccatattctagttttgatttatgtttttatgacccaagcatactgttctgaagttcctgtacactcgctcatctgattttgattcagtgaccctaagcaaactgttttggaccaggttgagatgagactccgcttcacaagacagtctccacggtttctctgcaatgggtagctcactgcagtctgatggaaattggagagatgcctgctgcttggacccttccctctgcaccaacttgacaatcccacaaatttgcatggtgagttggtgacctcaccctgcaagttgcacgtgccagcggggaattccccaagtatcacctctgtctccgctggatccatcagtgttcagtgaggctatttgtggtgatggcagcgtgggacgtcatttctttgaaccgcatgatcactggtttcattcgagatggtaccag

SEQ ID NO: 106494 - DNA, 875 bp, Zea Mays
ctaaggcacagggaaccgtctacgcggatggcaggttatttaagtataaatctgggggctgtttagcaaacttgacccgcgaaggggtatggacaaatactggccgtccgatctaaggcgtgcgcacaggattagacactaccctgcgcgaacccaaccgcagccgttggatcatgccccaactgcccagatccgatacgaacgttataagtcgatggaagatcgtgaccattgaatccatgatcaagggttcacaatccccccggctctaatcgtccctggccgtccatcccaagattagcggcgacaacgttttcttcctcccttacgctaggcacacagcagtcgaggctgccaccgcggtggcgatttcgccggtgaactgcacgaccgcgcccaaggagtccattccaaaatttgacagcatcgacacaatgcggagactacagtgaacacatggatggatgacataccggccctgacgtcgtagaggtacccggtcacgggggtgaagctgctcgcggcggagatcgatcaacggcgaggaattgctccccagtcccgcagacgccccactaattagcctttcacccagctgcaatgaggtcagcccaacacccgcaaaaccttgctggcgcccgaattccatcggcgatggaaatctctctctctctcgctgcactccctttctctgtctatgttagggttgcactgtggcggcgcagggggggggggttgagcaagaggcgagacttaatcgggttatatacccgagagagttcggatttgcgccaggctcagagcggtcatggcgccgcaagccccgccgagatccccgcggtgtcgttgaagacgagtctgaccccctgggccca

SEQ ID NO: 106495 - DNA, 353 bp, Zea Mays
agcgcaaccaaataatttcagcagtggtagtagcaagagcccggagctcggcttcagcactagaacgagatatgaccgcttgcttcttggatttccaggaaataggtgaggatccaagaagaatacagtaacctgtagtggaagaacgatcaacagaatcacttgcccatgtggcatcggaatatgcatgaagctgaagtgggctatcagaggcatagagtaaacatcttgatcttgtcccacgtaagtatctaagcacacgaagcaaatgaccataatgaactgaggtcggtgtggatacaaattggctcaaaatatgaacagtatgagcaatatcaggtctggtgatggtg

SEQ ID NO: 106496 - DNA, 793 bp, Zea Mays
aacaaacgggacctaaagatttttcactttgctagatcatttgatcttaatcattctgatgtatgaggatgcagtatggggttctgcaccttttgttacaaaggtggtcataaatactgtggttttttatttagataattatagatatacttggatttacttcatgaaacttcgatctcagttgtgttatggttattatgctcgcatggtgtacagttgtacacccagttttcaactcacattttgaggttttcattctgattctggttgagtaattatcccacactttttcatagtttttgacctcagaattaggttgttgaacgcaaacactgtcatattatagttggacactcttttgattgcttcttttgttccttctcatttctaggttagcaagtgtcctagtgaagttctattggtactcctagctagatcaccttagagtttttggatccatgtgctatgttttgcttgcacctcatgagcgggctaagctaactgcttagctgagcagggttttcaagggtatagccccggcacaaggcttatcgtcattgttagccttcttgccgcatttgtatttattgtaatggcacctttgttgaggaccatcctttcttttataactcttctgctctggcctcatcttttacgaagtccacgtctttatgtcttcccctatttcagttagtgataatgtcgctcttccaccatctctcttctatgtccacctactattcttgaagctcctccaccagatggtgttgatcctccatatgttgttcattag

SEQ ID NO: 106497 - DNA, 585 bp, Zea Mays
atttatttgtctcgcctctacgacgagtactctgcactgcactcacagagcttttggaggtcatcgtcgcgtcgctgttcttccgcctccagccttttcaattccttcccataaccgtgctcgtcgagttacttatatatttttgcgggtgtaaagtcttacccataaccgtgcttacgcgagtaattttacccgtcgagtaacccgtacccgttaaaaaattattaaattccaatataccaatcactcaaaatattaaataaacaaagagctttggaggtccgagtaaaatgcgtggatgctatatttggagtcctaaaaacgcattcgtctggcctctacgaggagcactgcactgagtgcactcacagagagcttttggatgtcatcgtcgcgtcgctgttcttccacctccagccttttcaattccttggtcacttactcacttcccttctcctcgctgaagcacctgtccctctctccctctgagtgaccctctctctctcgcacggactcccccatcactcaccctcacctgctctctcacttgtcagcttttcggccccccgctctccaccaaccacg

SEQ ID NO: 106498 - DNA, 715 bp, Zea Mays
acaatgcgtcagccgctgcattgcgatccctttccacgtggtggatttctaatccttcgaacttgtcctccagctttcacaccgctgcacaatatttgttcattgagtcggtcaagcaatcccagtctttgtttacttgacttatgaccaccagtgagtcgccgtacaccattaatctcttgatgctgagtgaaacagcgatgcttagtccatggaccagtgcttcgtactctgctgcattattggatgctggaaataagagctacaatgcatacttgagttgttcacctctgggagcgataaagagaattcctgcccctgctccttgcagtctcagcgagccatcgaagtacatcctccatatttcagtgacctctaggctttccgggacctggtgctcagtccactatgatatgaagtcgaccagtgcctgagattttatcgccgtgcggggtcggaactctatatcatcagctccgagctcgcacgcccacttggctattctcccaacaacttccttgttgtgaaaatatcgcctataagaaatcctgtgactactatgactttatggtcgtcaaagtagtgacggagcttgcgagcggttagaagtaccgcgtataacagcttctgaacttgaggataccttatctttgagggtccgaggactttgctgatgaagtaaaccgaatggtgcactgggtatgtgtgcccttct

SEQ ID NO: 106499 - DNA, 524 bp, Zea Mays
ctccaatgtcaactttatcttatagatgggggacactgatgatgttggtgttaatgaagtgaacgcaaaagaaccgataggacagatgcagacaaaggcaaggaagggcagcccaatgatgcaccaacagaggaggatggcaagaaaaggaaagctattgctccaaggtcagatgtatgggaacatttcagcaaagatagaactaaaggaggggaagacagagccaagcgtaggtattgtggcaagctctttcgctgtgacacaaggacaaatggtacatcttctctgaaaggtcatctaaaggtttgcaagaagaatccaaacaaactagtaattgataatcaaggtactttacagctacaaccttgtcctagcaatagcagtgttggtattgtttcaacatggaaatttgacatcgatgacttaaagaatagttttgctgaaatgataatagaggatgaacaaccttttgtcttgtctgaacgtcctggtcttagaaagtttctagctaaagcatgcccacg

SEQ ID NO: 106500 - DNA, 674 bp, Zea Mays
gggatcttgatcgtcagggccatcatcatcaggttcccttcccgacggaggtggaggaggaggtggtggggtagccgatgtcatctgtagggtcttaggtggaaggatatcaatggagatcttataggttaagaatctcttttcctgatcatctatcccagcctccaagatgtgtaaatccattttcctaaccagtttttcaggatcaaaacaccatgttttcaccatcaaggctgaaaaatccctcatttccatagcttctgaatgtaatgcttcaacccaacatgagtccctgagcaactgttcagttgtagatctacaccaagcatgttggggaatgcctgttaatctaacatcaaccaactcagccatcgacgatgaggacgcatgagcaaatctggaccatcttttgagcagcaaactgaaacggggtcccctcagaggtcttccttcgttgagaaccttggttgtcgtgtcttcatccggtagaaacaacaggaaatcttcagggtaggtctgatgaatccgcatgtcctccaacttgacaccaaaacaatgcctcacctccttcaactcgtcggaaccagaaaccccaggacgtgaaccagccacagagacgaacagagcacgacgaagggcaatttcctccctagcaaggtcttcagaaaaatcca

SEQ ID NO: 106501 - DNA, 871 bp, Zea Mays
cgaacttactaacatctgctctaatcttgtcccatctgctgctaagtgctctgttgactctacaaggaaacttgcccctctgttcgttgtatcttttttcaattctagcccaaaggccctccctacgttggccagtgtgcacaacagggtcattgcttatttgcaaccaggttgtgcaaaggagaagatcttcagggccagtaaagttttgttccttagacttcttgggtttatgtataggaggtgcattcttttcaggactattgatgtcatgaacactgtgttcagcatctgagtccaagttcacaggtaaggaaggtatagtattggaaccctgcaatggtgtactggtattggaaggtggaatggaatcaggaaatggatttacttcagctgacccaagaggattcctgacaaagttcaagtaatgattccagtacatagctgactgtgaggcgggaatcatggtagattgggaagaagtatttcctgtctgcatgggtgcccacattgttgtcggaccttgaccagggtttggaaaattgaggtttcccataaagttacaatccatagcactctgctgcatgtaacccgtaggccacaaagggggtggaggaggaaactgctggccaattgatgaatttgacatgggctgtgaagaagtggcattgtttgatgggtccattctagtaagtgtggagatggaacaaatttagttatatgctaataacttatgaaaatgtacagaagcatttgaacaaatgaagtgcataacaagcatttaactgagcaacagttataataacaggttcccattcacggttacagtactaaaccaagcacataacaaatagtactgaacatagttcac

SEQ ID NO: 106502 - DNA, 455 bp, Zea Mays
atttattctccagtcacttatttgatggcgagatgttagatcaagttcggatgtgtatcgggtgttcttttctttgttgtgaagtatgcccctcctcgttatttccaccagcaatcgaggtcagctctggtgttgtggcgatgttgttgatcgagttttggggcaatatatcggctgtcgattgagtttttgggcaatatatcagcatgttgattgttgaatataactcgtttatatgcgctctactctggtcgatgcttttgtcgtctgtgggacatacatgccattttttttgtttaaccttttctagctgattagcagccatctgagaacgtgagaagataggtgaaattaatcttggagttctgaatccatcctatcttgtagcttcacatttgcacattgactcctggtaccatcctattggtaacaacgtcctttatattcatctttta

SEQ ID NO: 106503 - DNA, 753 bp, Zea Mays
gtcaggagcacgattgttattaccttgctggttgtgtggcataccttctgtgttttgatgaagacggcgacggaggcacaaatctctggtgaccgcttcatcataattaccttcttcatcaaacaccgcatcatcgggaagacgtggatgaggaggtggtggtggcggtgcttgttgttgcgtctccaacacagcaagtctgtcgatgatctgggacaatcgtcgatccaacctctcataagtcttgccaaggttcatgtcaatgaaggcatcatgcactgacttgtggaccgtctcctgcatttgctccttcaggagcttgttgtttgcctcaagatcttggcggctaacacattcatcgaagtctgtagggatcctggcttcttcttcgttgcctgccatcgaaacacaaaaacaggaaacaaacagtgacggttatccctaataatttaactacacgctcctctcaggtggaacacatgaacacgctctaatgtatcttaccaagctcttacaagtgtctgatgaaatacaagcaaaggatggtacaatcggaggctggttcgtgatacttaccaagaggtagtgaaaccgcgattgcaaggtcaaatctgtattgatcagaagatataatatgtggagctataggacaggcacaatatgtatgtgaatgtggaacaaaatcgagtgcagatgagcgaagttcaataaatatccaaagcacaagtcacaattgctagctaagagatgtat

SEQ ID NO: 106504 - DNA, 364 bp, Zea Mays
gttagatactgcatttttattttgtgttggagcctttgcattgcaaagcataggtgtctaagcattggaaccactaagggcatggtctacaggacattttaagtgtatgaaactaatggcatttggtttcaaaatattggcaatatcattatcttacaatgctcaattatgttactaacttgtcacaagaaacggaaggatttatcaaggggaaaaggggcaatggaaggcttggttgttgcttcaaacggttttagcaagaagcatatgattcagataaccatagtaagcaccaccaattatgctacaaagtatactgaaacatcatcaggatcataggttccttataaatccttgatttaca

SEQ ID NO: 106505 - DNA, 454 bp, Zea Mays
aagactcctgctttggtgatttctagcacgccgaagctgaaaaaagttaaggttttaacacaccgccccaagcgctttgaaacggtcgaaatgccaaggcctattgaggggtcttcttccgtatctgagccaagtcactccgctactgccgaagctaggacataatcggtcgaagagccagaactaaagacggcatcagagcaaccgaaggctttgagtccgttgcgagagacagagctgccgagggcatcaaagattcctgcagcaactccaaagaggaggagaatggccagtgtactagacgctgtcatggaatctgtgaaggtacaaactcctgcttcagcacctaatacagggatcgaagccttaaagaaatctaccgaagattgtatagcacaagctacttctgaggctggacccttaggtcccaccgaagcatgccttttaggggctg

SEQ ID NO: 106506 - DNA, 435 bp, Zea Mays
gttggattgaattccagaaccaagtcatatgctctctgattggagaaatttttgtggctctcattcaccccttttggtcgccttgctcatccttcacatgtactggtgtggcaaaagattggaggatatagaggtcgataggtctgtcagtgcagcaccaaacagtctagtataatttctcgtacagtacgatgtgataatggacattctggtattgtttaccaaactgttcagtagacccccactgaacggtccagtgtatggcaatagacaatctggtgtgaccctagacaatctgataaccatgggtggctgccagatcataaaatcgtcggtggcggcaaccgttgcctaggatacgaaatcattagcatgccataaagtggctagatctatggtgatctgattgttgctgttgtgatgggcgcaaccatt

SEQ ID NO: 106507 - DNA, 484 bp, Zea Mays
accttttccaccctcactctctctctctcctctcccctctcctcgccctctctctctctctcaaattcattcctagctgtacccacatctctctcccccggcccttttgttttgtttattcacaactctcctccgtcctcgctctcatctggtccgcactccggaggagtgatttacctccccctccggcctccaatcttatatagagatgcctcaattccattgccccattcccatcgcctgacctccagctccaggcttttgaattgtgatcgtgagagcaagtagaacacggagagatttgtttgcacagttgcaggagagaggatatatacagggagtcggttctttggtttgctgatttgcttggggtggcattttgttacccaaccaaagactgatctagcgagaaggagaggcacacaagtgacggcagtgccgtgcgcgcggcgccacccccaccacaccatgttgagttcttgcg

SEQ ID NO: 106508 - DNA, 380 bp, Zea Mays
tgggtaaggacctttaacttttggcccttcggcacaggctcgtctggagtggccgaagcagcagttttcctcttctttccctatcctcgcagtggatagcggtagttggggtaaacaaagccaatggcatcaaaaacttgttcaatctcctttttccccgacctccgaaggctgtggataatgcattatcttctgccttggaatatgatccaagcagttcatcacttgtaacttcgatgcattttaaccagtcatcgtttggttcatcgaacttatccctatatctgaaagtatacttcagccggaccagctcacgttcgctagactttgtgacagtctccttcggcatttcccagttctctacaagcggccatactctg

SEQ ID NO: 106509 - DNA, 660 bp, Zea Mays
gccagtatcaaacgtcacccaatgcattagataaactaatgaaccagattgattcacctccaaaagcaaattctgagacagattgttgtgcccaaagtacgtcagatttggacctttatgacggacatccagtgacctgttttcttttccatattgctactgcaatgatacctgtacaccagattcaatgggccaaatgaagcaccccgcctgccgccttcctgtcatctgcgtgtcatggtgtcgcacaccatgagcaccaagccgtacgactcctttcgcttctcccatagttttcctcctggctctagcacccccactgtgcctgcctcctctgtctctagcggctcctgccactgcatctgtcatcactgctagtccctcgctaactagaatgaaacatacctcccccatcatcaattcccaccaccacaatgagcggtgccattgtcaagaacaaattcctccccaccaaaacccccagcccctaaccctaaactcctccgcagttcatggacttcatgagttttcctgagaatgagatcagctcgaattattttgcataatcgtgaggtcagtaatttgatcgatcttgcattctagaactgttaacagatatgtagcaattatcgtatataaaacaatacaaatctattaacc

SEQ ID NO: 106510 - DNA, 555 bp, Zea Mays
cacgagtgaatcacgtcgatgcccaggaggctcagtaagctccgggagtagtcctcggtgagttccttgttgaatttactcccgctactgtacttttcgattctggagcatcccactctttcatagccactagttttgtggagaaacatagcattccctctactcctctagagattcccttggtcacccgaaccctagggtccgaccttctatgccagctcaaatgctcccaagtcagaatccttttaagtggggtagtattcttggcagacctaatcgtcttgccatccagagggattgatgtgatcttagggatggattggttaactaaacacaagggtatcatcagttgtgcaagcaagatagtcctcctcaccgaccaccaggggaagtcagtctcttgtcaggcctagccacccgctaatgacccgatgatgttcaatctaacagcagaaagcatatcagtggttgaagaattcatggatgtgtttctagaagaattactaggaatgccaccagaaagagaagtggaattctacatagatctgatccctg

SEQ ID NO: 106511 - DNA, 685 bp, Zea Mays
tgcggtgcaacatgagccacatggctcttctgcatgttaaaaaaacattcttttctcgataataatgatatgtagctctcctacgtgtccgataaagaaaatatgatgcaacatgagataatttggacttcaggatgctcggtctgtgatagtatgatactgtgatgtaccagacttaacctttgtattgatttctccttttctttggactaccaagagagaactatacaagacttgttacatttcttctgactcctatcaaccagttctggatcgatcagcaaatgatggtgaaggccctatacacaaatcacgcaagaatttactgtagccagacgaacactttgattgctgccggctatccgtaacatgagtgatgcgtctgtgggtgcgtgtgttcgatcgatagtgcagtacggacaataatagtatatagcaataatggttgtcgatgctgtacggccgcctgtggacttgacccgaagaccaggctggccagtttgggagctaaggctcaaacggtgaatttttataacatgaagtctgcacactacccaaaaaatgcagcacaaagttgaatttttataacatgaagtctgcacgctacctaaaaaatgcagcacaaagttgatagtacatccgttttttaatatatgatacagttgaattttaaaaaactttgaac

SEQ ID NO: 106512 - DNA, 1053 bp, Zea Mays
accatttatgtgggagccctcgatcgaagtcttcatgaagcattactgtctccactggtagaagaagactgtgggtaacaagttggaccagttggaagcttcatgttcacgtcgaagactagcaagactgtgggtgaaaagtgtatgagttagtgccttgcacaaaaaatagatggggcagttggttgaagtcttggttttatgtaaaccttggcgaaggcggtgctgacttgccatggtcgcgcgaccggcagcatggtgccacatgctttctggctttccctgagttcgaagtcaaggaaagggatcaaggtgaggttgtgttgcgtcagacaagggttaaaagcagtggctaagacttagtggaggagtttattgcttataggttatggtcgttgagccatggctggccgtcggggaaatcatgtggcgattgatgccgtagaagagcgttattttgaaaagtgaagttgtggtgattagtccgcccttcactattgagcttggcgggcaggatggggtagccttcgttagcgaggtacaggcggaggccatcaagatcattggaaagtatgtcgggaagttggagtggtcagagtatggacatccgtgggggtaatattcgtttgaacaaagattttgagttcaatggtctggagtatgggccctatcccaaagatgggatgaggaagaggaggaagagactagtgccaagttaaaggggaaagaggtggcgaagggagcagtggggatggggtgcattgaaatgaaaagtgtcacccgctgatagtaagagaaagaagaaggcaaagaggctgaggtccctcgaccatgtggaggcgatgcctactacgcaagagaagagtttggccatcgggtcagctggcttcaccaaagacttggaggccacaagcctggcgaagctgtgtcgccttccagcctgtagacgacagggatgagggtggccacagttaccagggtgagtatcttaggggagaaataattcctagagctactagcgaagactttgaattgagtaggctagcttgatct

SEQ ID NO: 106513 - DNA, 670 bp, Zea Mays
gtggtggaaagggtcgcaatagcatgaacattactgagtctcaaaggagaaattgtccaagcaaagaaagcacacttctcgataggcaccggagaacaagcacccaagattttaagagaacgttgccttctgtcaaagaggaagtgtgccacaagagaaagataaaaacagaacatctaaaaacaaaccatatttttagtaataacatcttctaactttgttacatggtactgttgttcaggcagacagtgttaattctaaactctctaaagcattagcagtcaatttaggttacaaattggattgtcataggtgagaacacatggttttgtagccttgtgatttgtgaacaacatatagcacctcctcagatctaagttcaacttccaatgcttagctaaatggtactcatgctgcatcacaatttgttacttactatagttttgtgatatgaccaaatcgttcaaatttgcataacaaatcactgtcaagtgtacagttattaggaacacccattagataacttaagttgtctatactattgactgcaaagatgtaaagctaatttgcaaataccaagtataatgttaccaacagaagttctgaataaatcggtgactgctagtatccattcagctaatacagaaggtgcaacattgacctttctttt

SEQ ID NO: 106514 - DNA, 666 bp, Zea Mays
ctatttctattttatttttatctgattttcgagttgactggactgggtcgcaataaccagaaaactcaggggccctagcgcaaagtgtcccgagacacagcaaaaccaggccatggactgcgggttgaatctctaaacttataaggggttttctgcaaagtggttacgcgaaggggtatcgcggcatgcgagccgcacaatctaaatcggacgcgcgggattagatggagttccatatgaaccggtatgaaactacggtcgtccgattaaagatcgatggtcagggttttatgaagtgagatctaataggggtcgaacagatcgcatccaacggtccgaattggctcggaacaatgcctcacgctggatcaaatctgaaccattcgtccagatccgagggtcacacgctcatcttctagatctaatcctggccacacgtctacaatccaacgacactgatgccatccagccgaaccggtatctctagatctaattgaggccgtccatgcgatgatctacggcgagggctactatccccaatctcggtcacggtacccggcggcgcccaggtccgacggtggagaccatgccggagttacggtcaacaggagcctcgatctcgaatcccccacatacacccgtgattaacaaagagcaaggagagac

SEQ ID NO: 106515 - DNA, 540 bp, Zea Mays
tcgggaggggttgtaataggcctgcaggtttttggtgttcggccttcgttcgttggcagatgtcacattgggccacatactgagctatttctttcttcatccctttccaccagtatctggttttgaggtctaggtacatcttggtagttcctgggtggatggagtaggccgagttgtgagcttccttgagtaggacttctcgggcctccccttttggtacacacagacggtatttgaaccaaaggactccttggtcatctgtcttgaggtccgagagttgttccttgcgggctttctccacaagtcttgttgtctctgagtctagacgttgagctttgcatatgaggtcttctagcattggtttgacttcgagactgacgctgtttcccagacatgcatttagttgcgctgattctttcttccaatcctctaaaaagttggttccttttattccgaatggttttcgactgagggcgtctgctaccacgttggccttcccggggtgatagtgaatttctaggtcataatccttgatcagct

SEQ ID NO: 106516 - DNA, 766 bp, Zea Mays
ttcgttccctgcctttgagagtcgggccagtttggtgggaaaactaaaattcctggaccacagttcttggtttcgctcccccgcggagcctctgatcggtggacctcctagctatagctgcttcgaggagttcgcccgggttgtcctattaaaaaaatctaaaacgacacctctccagtccctgacactttctttgggtgtcacttcatcaaaaccccaaactgctccttcttggcctattggctggcgatcctcgcttccttctccaatggcgtataggcgtgttgatccggaaccttttcttcctccgagcttcagtgcaacggtggtcatgcatcgcgaggtcatggccaggtcagtgactaggcgtctccctccaatgcatgaggattgggctataatcaatattcaacctttgccggagcatgaagttattttcccagcggttagagatgtggtcagagaatatcttgtggagcaccggtggctcggggtgcgggacattcagcggtcgcacctgggtcaagttctggtgcagtttaacagggtgctagatagagacaatcttgtcttgcttggaccgcaacaatatcttgatgccaccttcactgctcagcggcataatgatgcctggaaccacagggcacttttttttaatcgtgagtgttggcttatgctgttgggattccccttagactatcattcctccgagtacttgcaggctgctattggctcttttggtagattaatcttgtgggaggaggac

SEQ ID NO: 106517 - DNA, 317 bp, Zea Mays
aattgtccgagcttcggactcttctcttacatcgcgttgttgcaaaatttggtgctgcactttaggctactggttgtgggacgaagttggagccatgaccagtggttgtggtaaggcccatgcagctagagagtggcttgccgaagctactgaaactataggttgtgaaaatggttgttgattgcccacatactcaggaatgtacagggaataacatgaagcagtatgtaggacttgcttcggctgattctgacatgctttggccacaactatctccttttgcttctgtattgtaacttggtaggtcctagttgtgt

SEQ ID NO: 106518 - DNA, 467 bp, Zea Mays
ttcccatctacaacctgggtgtctatcttcacaacgctattgggggacctcaacaaaacctctgccttccattgatacaacaacctaaaactatcatcccatgtaccatacattttttcaatgctttctgcagccctttatatgcagtgtcataagttatttgtaccttatatgttgcttgaagtctcttttgtaggtccttagcacctatagttggctcaatcctaagtataggaagtgccttctgtgctacccatccttgagtagcattcaacccatccaaccggctgcttgaggcacatgaatgctcattcaccaacaatgtgacctatatcacaaacccaaattgaatattagcaagtaaattaaaaaataaacactaaagtaaattaaaattaaacactaaagtaccatgacacttccatctggtttttttgaaccatttagtctccaaggacattggccac

SEQ ID NO: 106519 - DNA, 547 bp, Zea Mays
gtgagacctttgtccattgccattgtccatgcgaaaaccttgcacttgttttcagcatgtgctctccagattaggctggaccagaaaggcccgaaggagcctctaaactggatatggtatgctaagagagagagaagtatgttccgtctgtcgtccatctctagagaatggagtccctcatgccaggtgtaaggtgggtgtcctggggtctgatccaaagggagacgaactccagtatatgggttgtagtggtgattcagcctcacagcacattgatccagtgattatcccggacctccatgtagactgatccgtttttcatcatgaacatcgcaaataggttaggagctaagcgggtggtgcctccatcaagccaagtgtcatgctagaatcaacatttatggccatctccaacgatgacccttgttgaggcagtgaaaagtgctcgatcaatgtcatccattggggtatccatgccaacccaaggcttggtatcatccacccattcctgccacaaccatcgaaggcgtaaagccctgccaaattt

SEQ ID NO: 106520 - DNA, 645 bp, Zea Mays
tgcaggatcagatcagatgggatagaccatttttgtggaggaggagcacgacaacgacgattggggtgatcctgagccaactccatcggttgcactaggcgagcatgcttccactactttggctgctagactcgaccccgcttcttccactacttggggtccagtcaagcgtaagcctactaagcctagaggcggttaggctgctgttgagggggggccacttcctcgaggtaggctccgcaacacattcaacattgtcacccaccttagcagttgatcaaggagcttcacgagtgagtcactcgctccaggtcacaacaattttttcattttgctcactcagctttagtttctaattttgagccctaggatgttggacacgctttgtctgatcctaactaggtcaatgctatgcatgaggagcttgaaatttttgagagaaatcaggtttgggttttggtgccactgccttcaaactgccatcccataggtaccaaatgggttttcaaaaataaagagagtgaggatgggttggtagtgagaaactaggtgaggttggtagcccaagggttttgcataaagagggaattgattatgaggatacttttgccactgttgcccgtttagaggccattaggatccttt

SEQ ID NO: 106521 - DNA, 356 bp, Zea Mays
ttctctcactcaatttggctaaattttctatggtctttattttattttgagaaacgatgtggcaaattgatgtgtggtgttttacttgagtggacataaacaccatctaagtatgccatgaatagacaggattataggaaacctgttatcacaaaaggtcattagctagcccactaacgtcttcatccactagttgtactctaataccctcttgtgcgattacaataccctcaatatcatagaaacactatttttagtttcaaaggtgatctattgttttgaattctttatattccaactttttagcaactctaaggtggaaaaaaggtgtcttacaaccttaacctatgtttgga

SEQ ID NO: 106522 - DNA, 740 bp, Zea Mays
cttcatcttattcatttattgcttccaccttgaagcctgcatccttaaagttggactacaaatatctaacacagaatttgtgctcatattctaggaatacctcctcaattgcaggaatcattccctattaacaagaattcaaaaaaaattagtaccttttaataaatgtgacatgcttcaaaattaaacaattcaaggaaaatcacgttctgcttgtcaatcatgacaatccaaggttatgtgttttcaatacataaatcatgctttagtgtttcaagaaaccacttccaagttgactttgattcaacctcaactactcccaaagcaattggataaatccagtcatttggatctagaccaacaacagtgaatatttgtccaccaaattttgtcttaatatggcatccgtccaagaagattttgggcctacatcctttaagaaaaccccttttgcaagcatcaatggacatataacagattgaaaatgattgtccaccaaatttagaaagaaactacttcctgggttactcctcaattcaagtccaaaattccaaagcttgttgtatagttcactctcaacaccatatatcttctttagtgctagccttctgaccctaactaacttgcttctcataggagtgacattccatttccttttcactgtccttgaaaagtttgtcaaagtcattttatcatcacttttaaaggagtcaatgtacttctcagccagccatgtagca

SEQ ID NO: 106523 - DNA, 1391 bp, Zea Mays
agcaagaggcttcgtgacgcccgggctggattcaggcagggctcttgccaaaagaagaattgtttgttgtgtcaacacaagtgtgagggcccccctcactttcagctaaaactatcaggcgcttaggcgagcgcttttgtaatctgacagaagaggagttggctgacaaagccctgaagaaaaagaagaatccgcctggctgtgttggctccaacaagtcaggcaaaaaagataagggggacaagaaacaagactcttcagattatgacaactgatatgttaattctgcttcgggtgggtgtcttttgcaggtctcaacctcgccaggctttttggctgtctcggccctggcgattctatctgcttactgtgttcacgaacttggtggtttctggctgtgctctgtttcgtcttaacagatacacttttgccctcccagttattgggtttgggttccttcccatcgacgaacttaacccctatgatgaatagtcgcaatactattaattattctgactggtctgttttaagttttaatgtccgaggtattaacgccgtggttaaggggaatggtattcattgtgtgattagggaatccaattgcgatatcatctgcttgcaggagacgaagaaggaatcttttgttagggcagacctaagaaggttctgccccaattcttttgatgagtttgcttttgtcccttcgataggaaactcgggggggttcattactgtttggaatagttcgaagctggatggcagtgttatcttccaaaacgagtatgctctttcggttgaattttctgctatttcgtcggaggaatcttggattatcaccaacgtttatgcgccctgttccccaactgggaagattgaattccttcactggttttccaatattaatatgccctcggaaaagcgctggttgattgttggagactttaaccttacgcgtaggcctgaaaatagaaataccgctgggggagaaatcaacctgatgctgagttttaacgaggcaatcagccagctcgacctgttggaaatccctctccatggcctctcctttacttggtcgaacaaacaaagggagccccttcttcagagactcgattggtttttcatgtcgcaagaatggtcggtctgctaccctgatactctcgctacaacgctgcccagggatatttcagatcatgtgccctgcttgatttcttttaagtcaaaggtccctaagcccaagatctttagatttgaaaacttctggttacagtttaacgagttcatggcagtttttcaaaattcgtggacgggtctgccaagccttttggacaaagcgaagaatttaacagcaaagttcaagttcaccagaaagattctaaaagagtggcagcggt

SEQ ID NO: 106524 - DNA, 892 bp, Zea Mays
caaaattcataaacttccaaatatacaatttttgtaccttcagactgttatatgcgaggctatccgcaagatcgtccttcgtcatggcgcagaggccagcttcaagcttcgggaaccccgtacttctggccatctcccggcagacagataattctttgttgtctaggaggcaatataagaagtcatcttcgtctgtgccattgaaaactaaggcccctttcggttacttcagttctcgggcatagtgtttagcttcaaaaatctcttcttcaaataacctttttcccgaagcgtgtcatataatataatcaagagcttcggaaggcgcttcgggagtgggagtggcagctttttcaagcacaatttgtcctacaacttctttttctctggtttccaaggatttctccttggtaggctctgaaggcccagcttcggtgtcggcctggctctttgtagcttcggctttggtcagctttgtctcggtttcaatctgcgctttcgaagccttggcagttttccctagagtagagcttgaagcttttattgtctccagcacatctagtacactggccatcctttttctcttgggggtcgttgtaagacctttttgtgccttcagcactgtcacttctgccgaagggcttagaacttctaatattttcgtcccttcaactcttgtctcttcaatattatcggtcttcggctcagctaatttggctgagggtgccttcggcattgcagccggctcttcaatcttttgcgtaggaggagcaggttctttcacttcagtagctgaagaagtctcactgccaaattcgggcactatggccggttcaatgtagcgcggtcggtgagtaaggaccttcccagaagttgcacccttccttttctg

SEQ ID NO: 106525 - DNA, 1019 bp, Zea Mays
atggttgctgtaccaggcaagaagacataatgtgtatagttatagtgaaaattgttggatgttatcatgtatttgctatggtgttgttctcttgtggttgatgttctagatttttatgtcctgttactaattaaaggtttttttcttttactttttagtggatctgtagaggactttaattctctgaaggagtgcaatggtcaagttgcctgcactgagaatgaagaggatgtttcatggtgatgattgtgctaatgagttcaaaatcaggaccatgaaatccatgaaagtttcacactttcatgtcagcgagttagagcagtcagctatgtcgaacttatcagataaaactcctcaagatggtaagtaattatatgactggatgttcatagacttggctatatttcttggaatgtggtcgattgctattttgttttgcatgaagtttgttttccttttcttgcaaggacacctttaaattagctcaattttttgttggttatctttgatgccgtgtcactgggaatgcatttatcatttatgatacatttagaaagtctacaaacggtcacacaatgtttagcttgataatctcattaataattttcctcaaaaaaatctcattaatatttcacagttttttcttttaaaattgttaccagaaatttgctacaacaacaaagcctgttccgaacaatgtatttacatcatgcattgttagcaacatccctaggcatgtgctgatgtgtatattttatggattaacagcatctccttgttctgcagagccagacccaaccattcaacttgctgaccaggatattagggtaacagaagcttctggcttgcatgatctgattggaggaaaatccatgctcgaggtgcttcaacgccatctagtctcattaatcagtgatagctgataactcactgtgcacttatacttaatttatcttgattttttattatgatagttgcctcctttgttccactctttaaggatcaaactacattagcac

SEQ ID NO: 106526 - DNA, 634 bp, Zea Mays
gcagaatagagttgggattcagatgagtcagattcagatggtagaaatcaaggagaccgcgaaagaaaggagaaataggaagagcaaggccacggatgagaaaaggaatgtaaataacggactcgtgggtatcctccgtcgggacagtaacccacgacaaatccaccaagagcaaaactcctttggaggaagaactctgacagagacaagatggagaaggtctgactcggaaacaacagacatatgattacctgcgaaaggtaattggttgttgggatcgatgggaggaataatcgcagcggtggaattctgactcttccacttgggcgccatctcaatctcgtcggcgaactgagcgaaagcgagatcacagggaaacagagaaggtccggaagtagaaagtaaggctagggctcagaatgcagaggcatgcgacgggtcaggtaccgattctaaaagtgcccagtcatcactcggctgttacttctaaaacgccgacgtggcttgatgtaactcagctgttatttctaaaacgctgacgtcaccagtcttcactcggtcattatttgtaaaacgctgacatggctcgatataactcggctgttacttctaaaacgtcgacgtcactagtaat

SEQ ID NO: 106527 - DNA, 1655 bp, Zea Mays
attttatatccaaaatacaatcatatcctgctcttgccactgcagtttcgtcttgtattatgtgggcgcggattagttaatgaacagagcttagttcccactctacgcgatggatgtactaagcgcaatcaagcctcttaacttgttcgtaatcgtacctgtgccggcaattaattttaacacgccagtattactttaatccctcgttagatgtgctctcgcgccgtaacggcgacggtgcttcagacaacagaccccgcaataactgccaattagaaaatccttacagcttcggtattaccgctagggtttcgtccgtcgccgcatcgttattggcggtagacttcgaaagtctgcgtgccattaattgctaaacgccgattagccgaacctgtccatcaatgggcacattgatgggggtggaattaaaaagttgccgcgtacacttgacttggaatcccagttgcaaatgcagggtacggcagtacacacggggtttttttaaccgaacaggaataaccagcgcgtggaactgtcagtgtgaaacggtggggaagggggatttggtttcggtctttatagtggtggtatggtattaatgcgagtgggtggagggaattgaattggagaccacccgcacctaaccggggcatcgcaggtcaaatgccggtgggcccggtagtttagtggcaggcaggcccctcgcagtccaccacggggcaagggcagtgacagtgagaagggtggtgctggtgctggttgcgcctatgcgttgtatcttttcccgatacggtcaggtcagccatggggtgctgctagtgctaggggccagcttgctaccacaagtgcgcctccactccctagtgctttgattgctatccagcgtctgggctttggttggcttcgaattgatctgtggatgaatgggacaacgcgggtgtgtctgctggtactagtgtggagacgtcgctttgctccccgccttttaggcagggttcttggaatcttggtgcaggactgcgggccgagtgcgatggaggccttgttgaatggtgggtgttcttgtcggtctgccgtctgcgttctgcacagaggttgttctgtggaattttttgtgtttggattgtgacaacatgataaaaaagcagctactttttggccagaatttttaaaaaggctgatcaggaattgggtggcagagggggtctgattctgatttttttaattctttctgttcttacttggatttgtcgattaaaatgaggtggcttacagtgacatggtcctgtgttatcatgtaagttcagattggtcaccaagtagacaggttactatcgctggtcattgtatatttggatggtttttatgctgttagtactgactgctgagtagggtggtttctacaatcactttggacattgggtcaacaaaatgttaggcatagtcaatgattctcatagcggactatctttggtgtttgggggtggcggaggagggcgggatgggtttagaaaaagtttgtctggagtatcacagaaagtgattcacctggttggaggattgctgtttcactgggatgtgatcattgaaaaatatttagctcttctagatcgaaatcaaagaaagtgagaacttcatagacaatcacgctttgg

SEQ ID NO: 106528 - DNA, 278 bp, Zea Mays
atcttcttcgtcgtcactaccagcttcggcaataacatcatccttctctgggttaacctcttctccctcttgaacaaccatccctgaacatttcattacttctgagtttggagccatctcagttgctttagtattctcaccttcgtatgttagtctagcagtagacctgattctagctattttagtccttaagacgaagctaaattcaactagcttaggcttcagtaagggcacaaaaaacagaaagcttcgtcttcagtaaaaaatttcaacaacac

SEQ ID NO: 106529 - DNA, 363 bp, Zea Mays
atcgttgcaattttcgtacttgtttctgctgttcttgttaaggtccacatgaagaggcgatcacaagaaagagctgaactagactggcagagggagtatgggcctccatctttcacctacaaagaattgttggccgccactcatggattcaaggacaagatgcttcttggtagaggaggctttgggagtgtgtacaaaggagtgatgcctatctctaagcagatagctgctattaagcgagtgtcgccggagtcaaggcaagggatgagggaattcatggccgagatcaccatcctcggtcatcttcgccaccgcaatctggtgcagctgattgggtattgcagccataagcaacatcttctt

SEQ ID NO: 106530 - DNA, 502 bp, Zea Mays
tgggtctccaatattgtgtcggtggagaaggagtcaggtaagcttagagtatgcattgattttcgcaatttaaatagagcaactcctaaagatgagtatcccatgcccatagccgacacattaatcaataatgcatcagggaataaaattattagctttcttgatggtaatgccggatataatcagattttcatggccgaagagatgcgtctaaaacggactttatatgttcaggcttcattggtttatttgaatgagttgtcatgacatttggtctgaaaaatgctggtggtacttatcagagggctatgaatttgatcttccatgagctattgggaaacactgtggaagtctatattgatgatattgtagtcaaatcggctgagtttagttctcatgtagttgatttgcgcaaagcctttgataaaatgtgttggtatggtttgaaaataaacccacgtaaatgtgcttttggagtgtcggctggtaagtttttaggatt

SEQ ID NO: 106531 - DNA, 552 bp, Zea Mays
ctgtatttgagactatgccaccgttgacacaacatgacctaaaagttttttttggacttttctagtatgagaccgtttgacccgaagcatgattggtcctggaccaacccccaactcccagcactaactatagcctatagggccgggccaccgtaaaaggtgaggacaggcagcgcctatgcaactcacaaatgaagtcgctcaagcctaacatttaccttgtgtacgtgtgtaacgacgccattactcagatggagatgctactaataatcggctgtttatgcagagaagatgtatgggtatggcatcaggcatccatcctaaagtcaaccaagaatccaggaccactgccatccacgtcgacatcgtccaccactttgattttttataaaataacaacgccttcccccatccttttcggcaatgcacacccccactttgttttttgttttttcccccttccctttccatggcactgtagcatcccctcgaggaaagggaagcaccaaagctgtttcgcgtggaagctagctacaaagaatatctgcgagc

SEQ ID NO: 106532 - DNA, 543 bp, Zea Mays
tgcctcgaaaacctgcaagcgtactgcaacaccctacatgaagaagtgcatgtattgtatgatcggttgcacccgaacgtgccacccaatgtggcagcaatgggagctggaccatctggaacagtaaatggaggatctgatgggcgaattgacctttttgaagcccctccttccatgaatcttgcagatgaacggtctaagtagtgtacttatgtaaaataagtaagaaagtcgagttgtataatggagtatgtataattattactattgtgcaatgaaataaagatggtgtatgtttggcatgttatatttccaaatgtttctttgcctcagatgccatcccggacccgtgcacatgatggggcaggtacatcccgtggtggggaggacactcctaatccgccaccggtacctcctaccctagccaaggctatcgctgccttggtcaatgccaccgccgacaacacgcgctttctgcgcgaaatggcaggcaaccaatttcaacaacatgtaggaagtgttcccccacaaggaccacgagat

SEQ ID NO: 106533 - DNA, 386 bp, Zea Mays
cttaattgcaaaatggacctcatttgagttctatactaagtctgaaattcagtgttgagggctcaattttggggctttgtaactttcaaagtataggattttttgccctaggtcgccacatcaaaattgtagcccaattataggagaacaattttgcttaagagtgtaagcaaggttgttatgaagaatttggagataatcacactcaaattcaggctgtgaggttgttaaagtctgaatttcagactgacagtgcaattgcagtgactttgggcatgaattcaagcttgattcaataggaatttggctattgctgctatggcaaaattgtagatggtttgtagccctccaacttttctgcagagctttgggtgagttgccatgaa

SEQ ID NO: 106534 - DNA, 513 bp, Zea Mays
tccagggaaaaatgttatgaaaaatccttggactgcgctaaaaagctgaaagatagttttgcgaaggtgggtgcatactcatcggagcaaaaatttaacctaggcgatcccgaaggagtcattcaatggatcggcgaagaagttgaagcttttgaagaaatacttagtgaccgtggggatttttgtgccttcgccggtgcccgaggggttgcagcagttttggagaaaactagctgcgaacatgtcaaagctgcagcccagggagaagtcatcttctccatggacgatacaaaggaaccttcagccgaagatactctaatgggtgggaaattttattccaatgtttggatgaagggcgatcacgagatagctgacaaagcaataaagaaaaatgaaaaagaatcccatgatgcccgagtagaaacgaaggaagctgaggaagctgccgaacgtgcattgattataggtactatataatgccccttttcctttattatttgctcctagcttcga

SEQ ID NO: 106535 - DNA, 596 bp, Zea Mays
atgaggtcaaaggggcgagtagcacgggacatggaagaagagaagggtaagcgagtgtgacgcccgagctgacaggcatgaccaagtaaggtagcattactgctaggacaagggatggccgaggtgactgagagtctaaagaggatgtcgtgtctgggtggccgagacaatggtgccaagtggaggcaagggcgcagggtgtggtaacttgggcggaggaaggtgaggcaggaagcgaagatgatataaggccaagattgtttccataggagtcaggccagagtcctttgtagaccaagattgtttccaaaggagtcaggccagagtcctttgtaggccaagattgtttccacaagagtcagaccggagtccctacgatggcctatggaaactaaaaaccatctgcgtggagattttttccattatgaaacatggcacgctcggcttcatcgaaacggaggttttgggagggattcgacaatttggaaacccacacgatgcatagacgctgctatggactcaaaatctctcttaggcgccttgaacaaccattaatcctccgccatcaaaatcagtttgtgctggtgtagccgccg

SEQ ID NO: 106536 - DNA, 492 bp, Zea Mays
gcaacagagagagatccttaatagtgagactgcctccaacaaggatttgtatatggttctgtcctctatatttagcgtcttcactcatccggaatgcgcccaacaacgaccgctatttcatccactaaaatatagagggtgtcctttggccgctacatctagcgtcttcctgtgcatccgctatcacacgcggccaccggcgagaaggagacaacacagtcgtcgacatggagaagactgtgcaggtgccagcgtggaggagtagcgcgcatggctgccggcgaggaacccaagcgcgcgcagccaccaacgagatgaagcagagcgagcaacagatcgctcaccaggatgagcatgcacaccgtctgtagcgttggggaaggagaaaaggggaaaaggcattttttccttttttttatttcagttagaaatacattgaaaataactgggtagaaatttgtggttaataatattagtgaaaatatggaaaat

SEQ ID NO: 106537 - DNA, 350 bp, Zea Mays
ccgatgggcatgaatacgggtaagaaatctcgcccacgggtaaggatacgggcaacacttctcacccgcgggtaattgacggatataaaatttcgcccgtgggtattacccgttacccgcttaatttactagcccatcaaaatatccccatgccatcgacccacaggccacagcccagacgatcatgtttgtggaattatgtttgagacttatgtttgtggatgatcgatcatgtttgtggactttaaagtttgaactatgttccttgccattatattatgtctgtcaagttgttgatgttcttggtgaaatgaacatgaccacatactcgtatggtattttctggcggg

SEQ ID NO: 106538 - DNA, 444 bp, Zea Mays
ggtgtgctggctcggattgcgaatgacttagctcgcatgcccaacactaagggttaccaacagctcgtcactcgaacaacaaatcatcttcttccactagcccatcatgaggataacattcgccacctcatcaatatctgttgtgatgcacgaagcaaaattgaggcatcacacatccgatggcatgtagaagagctgaggcaccaagaggggtacgactagggccactgtgccctgcaacgaggagccagggtccgtgtagactctgccactacctcgaaaaatagtccgacaccacgtcgcacagctcgtgagcggctgcatgatctgtgatatcagttgccgccaaaggattgatgtcacgaccatacccggggcgagcacctggaagctcggggcatttttgtggtttcctccttcaccctccgacttcgtgcagtccag

SEQ ID NO: 106539 - DNA, 476 bp, Zea Mays
gttctagtatctcgttatgtcctttggattaacaaatggtccaacccatttcacatatctcatgaattcggtgtttgtgtcagagctcgacaagttcctggtggtctttattgatgatatcttgatctactctaagaacaaagaggagcatgcagagcatctacggattgtgtcaacacacttaacggaacatcaactttatgctatgtttagcaaatacacgttttggttggaggaaatccaattcttagggcatgtcttatcagctaaacgaattatggttgaccccagcaaagtcaaggatattctggaatggaaatctcctactattgtccatcaaattagaagttttctcggactagctggttactaccgcaagtttattccatatttctccaagatagtaaagcctatcacggagctgctaaagaacgatgctaagtttaattggacttccaagtgtaacgaggcttttg

SEQ ID NO: 106540 - DNA, 857 bp, Zea Mays
gaacggctccgcttggaacagatgaagccataagtcccaatggggctcgatccccaggaacccctcgtagacggcggcaaagatggccacctgagcgatggagttggggttgaagttgtgaagctccaccccgtagtagtgtggaagtgctcgcatgaagcagaccgccgacactccgaaccccctctcatgaaagggggtgaagctcaccacatagcccggggcacgagccggcacctgcttgtcacctggcacaatccactctaggtgtggcccatggagatgagggcagagcagcccggcgtccaccaacgcctataggtcgttgtcggtgatggaggagatcggccatgggtcacgaggaggaaggacacttactttctcagccattggagctagggaagaagacgaaaggagagcacgagaattttttgtggctaaggaagaaggcgactacgacaggaaggcgaaagcagaatgtaaagaaccaaacatcccatctcgagtgaatttataagggtggatggagtcatcgaggcttaggtcgagccaccttgatacaaaacctagagtgggttgtgtcgcttcgaattccacacgcacacgcgccacaacggtcggcctacgggctaaagcatctcgtcgcattaaattccctctcttcctgacgtcagccggccagcgccgcttcatgtaaagcctcaaaaggtgtatctctctccctcccgctctttccctctacctgtttttacactatgaaagggaaatggccttaaaccatttcttatactgattttggtgcttgatgaccatcacaactattcggactaactagtttgcttagtctttgattcaca

SEQ ID NO: 106541 - DNA, 722 bp, Zea Mays
cttcaatcttttatatgctgttacattgacatctctacaggaatatcattcaattgcgcattgtgctgctggtggctgctctagtattgcaacatcctttgtttttacacccagtgaatgcataaaacaacaaatgcaagtgggttcccattatcagaactgctggtattcaattttgaattttccttgcctctttttgggttgttcattcatttatttgctgtatttagaagcttcatttctggcattacaaatagtgatgtatacataaatctattagtttcatgtcatgtgcttgagtaggtaggatatcttcaaacgaatgcttcagtagggtgtcgtcctttcatcatcctctaataagagtttcatgccatcaggaatgctttagtaggatgcctcaaaaagggtggcattgcttcattatatactggatggggtgctgtcctttgcagaaatatcccacattccatagtgaaggtatcaaatcgaagtacttgcttttgagtccaataaaattcaaaatttctttaatttgataatttgtttctgcctttctggtgtttaaaggacattatcccttttctgaatttatagttctatgcttatgagagtctgaagcagtctctgttgaaatcagcacctgatagggccaaactcaattctggccaaacggttagttttttagacttaccttattaaggtatcattcttatacccac

SEQ ID NO: 106542 - DNA, 980 bp, Zea Mays
ctggaccctttgctcactttgattttcttcgtcgggtactgctttgatatagttttttagggaaatgtatctttattgacttcaggtactctttgtacaaatattacgccatcggccccgttaaaaaacttatcctctttataaggaaaagggtgccaaagcctggcattagatgtaatatctttgaagctcattgatattccatgatcttgtaatgtcatttccttccatgtctttcaatctatatgagcccagtctattcgaagttgagaccaggaacggaccttcccacttcacttgcaactttcccgttgtatctgggttagctacccttcggagcacgagatgtaccggtgctatgttcttgagtttcaccttcttgcctctccaccttatagtttctacttgatactttcttatgtgctcgattgcttcgagtcttgaatcttctattgtatcattcgaaactttttcattgtcctaatcttgagtcgaagctatgactcttgctgaacccaacttgacttcttcggagtaatggctttgtcccaaagagaagatgtgttgatatagatgtgttgtgattccactcaactttgataagctcttctgtccacctccccttgggcaatccaaccagagactttgtgattcctagcaaaattatgtcgttttctttttcaaccagcccattggactctagatgcctaaccaaagcaaaatgtatatttgtccccactcgattgcagaatactttaaatgctttgaagtcaaactaagtgcagttatcaatagtgatagactttgggaccatgaagcagcaaatgatgttttgctagaaaaacttttggatggttgtcgaagttatcgttgccaagctttcgcttcgatccatttggagaaatattccactgccactactgcatatttcaagtttccttgcgttgttggcatcgagactattatgtccattccccatc

SEQ ID NO: 106543 - DNA, 610 bp, Zea Mays
cacacatcgatacaactagaatatgtgtatatatattatacatgattcacttgtatatagatactacaatcacataacagggagaaagtggaaaagataacgtaagatgtcacaagcgcatagggcctgttgactactactggtttattttaaatcgtcctaataatacttagtgtaagaaagtctggtccacaatagaccatctcttaattagtctgtgtgacaagcatatacacacaagttaacgttgatgagaaaaggaatcagaggcatcggaaaatatgaacctggttatattggagaggtagtctctactgctccgaatgatgcacacatctaccacgcacggtgccaatctggatcgcagtcatcctagaaacgtagataagatgaggagtccgataatggttatgcagtttatagaatatagtagaacgtgggttcaagtgcacggtgctgtcggccttggcttctgtgacggaatcattttgttatggcgcattttgaaagggtaggatacaagtacgactactatattaagtgctaactctagcaaattaggaagatagatcatgcatgttgtggggatagcttatattttttacttagc

SEQ ID NO: 106544 - DNA, 413 bp, Zea Mays
gcgggcggagcctgacgtaaggcctctagggttgcacttcctctgcatttattgcagataaggcgcgtcgcctgtcaaactggcaggtgatgtgccgccttaatgagccctgtccactccaatggtaggcgatgtgccgccccagcatttaatgtgtcatgtccactccactgacgggcggcgtgtctgtccattccgttggcaggcagtacgcccatgctgccgcatgcgctgtactcatcatgactcgcgtgtttccaagggtgctgctccgagatatcaatattgtatgcactacggatattacggtgctcagagatctccttggcgttagaggcagtagtaccttccttccttccatttgtccctgggaccacatgtcgaggctcaatatccttgtatgtgcccgcttg

SEQ ID NO: 106545 - DNA, 471 bp, Zea Mays
cacaaaatcgaagtcttcttcaaaaagactatccgtgcaaaagtcgcctaagggtgcagccggactagcacaacaagtgcgcaaaatcaaagtcttcttcaaaaagactatccgtgcaaaagtcgcctaagggtgcagccggactagcacaacaagtgcgcaaaatcgaagtcttcttcaaaaagactatccacgcaaaagtcgcctaagggtgcagccggactagctcaacaagcgcaccaaaacgcaaagcgttacatccgtgcaaaagtctacaccaagaaactgtccgcgcacagaccaactacaaggcacagccggaccaacatatgaaatgtgatagaccaagcgcacaatgcccccatggacatagccggatgcgcgaaggcgtacaacctcattatacaaaccatatgtacacacgtacagcgagggcatcaaaccttacattggttcgaccttcggaatgat

SEQ ID NO: 106546 - DNA, 780 bp, Zea Mays
gtgaattatcccgaaggccaacaacaggggcaatgatccgagtcctgggaggccgagctctgaagcagcacattaggaaaaagcagttcccaactaactcagcaaaaaactctatccaatttaatcaacactggatcagtttgatgattgaaccatgtgaaacggcgtccatgcagggggatcttcttgagagctacatcctcaattaggcgtctaaagagattcatcatagcctggttaagattagagtgattcttatctgaagcttgtaaaatgagattgaaatccccagctagtaaccaaggcccattgcaagcctctctaatggctctcaagccatgtgaatgcaactgtagtatgcatgcttcaatttagccatgtgaatatagctgtagtatgctctcatggatttaaccatgtgaatgtagctgtagtatacgtgcttcggtgtgaccatgtgaatatagctatagtacgcatgcttggatttaaccatgtgaatatacatgtagtacttgtgtgtgattgatttttatctaattggtctcctgttgcttgtcaaatttggtacctgcatccccctcaggcatgtttctctggttgtcaagcacaagtgtgtgcctttacatatgacaagggctgcatgtgaatactcagtggtagctgccattaattgttgttgtgcaagcctgaacctgtagtcttgtagtattgtgctatcaccagtgcctgtcaatgatatgaagtactgatcagtatccagtgttcagcattcacaaa

SEQ ID NO: 106547 - DNA, 625 bp, Zea Mays
caggacaactgaggcccggaccccctttggacccgatccatgttttcggtcaagaaaggtttgggagtgccatgtccccgcatattcctggtcctgccctttgtccaagcagaggtctggtgtcgactaatggccatacgcacctgacgtaagccatcggatgatgcctggcgtaagcctctgacatagggcccgccagcattgagtgcaaatgggatgcatacttgcccgcaccagcagcaagcaacgtaaccacaacattaaatgtgtgcggcgcaccacgcctgaaacatgtggattttactgttaaccgcacgttatcgaggcaaaggcattgacccaatgcatcatttgtgcgcctttcgttatgacttcctctgttctttgtgcgttactgaggcatgaagagacgggtggaggagacgcaacgacaccccccacacctacgcacgaagcgtagcaggctataccgcaacctacaacaagggctacatatgaactccgattaaacgaaactggggataggatatcaggagccagcacgacgactaagaagggatacatgctcaggaagatctagcgtcgctaggcttattcgacgcctcacattgtactttgtaattac

SEQ ID NO: 106548 - DNA, 493 bp, Zea Mays
ggtctgagatgaatacaaagtttgcaaagaaagacctagacccgacgaaaaaatataaaatctcagcaggtcagtgggcagtatttctagagcagaggagcagccctgatttcatatcgctaagtgaggcaaattcggaactatctaagaagaacaaataccaccaccaccttggcacaggtggttacaagcgtcaggttcctaaatggagacaagaagacgccgagaagaaggctgcagggttgccgacgctgtccaagcaacttggtgaaaggacagctaattggatccgtgctagaaaaccaagggaaactgagtctggtgtatcttttgatgatcccactgtcgaagaagcggcaaaaaacatatatgcaattgcagctaagcagagccaaggaacatttaagccgcaaagggagagagacattctaatggctggtctcggtaacactaagcatcctggtcgtgtacgaggaatctcatctaaggaagg

SEQ ID NO: 106549 - DNA, 676 bp, Zea Mays
agggtggtgggtgataaatcctccactcaagcaaacccatcaacctcaagtcatccaaggcttgaagaaggtcatcaaccccaaaagatgccaaccctggtggaatgtgaacatgaaagtgtcgatgatgaagtgcctcttgatcaagtggatgatgaggaggagcaaattcaaagacaaccattagtgccccatcctcgagtccaccataccatccaaagggatcatcctgtggacaacatcttgggtagcatcaagagaggggtaacaactcgatctcgtttagtaaatttttgtgaattttacttgtttgtctcctctcttgagccacttaaggttgaagaagcgcttggtgatctggattggataatcgccatgcaagaggagttgaacaacttcacccggaatgaagtctggtccttagttcaaagacctaagcaaaatttgattgggacaaaatgggtctttaggaacaaacaagatgaacatggcgttgttacaagaaacaaagcacggttggttgcccaaggctatactcaagtggagggacttgattttggtgaaacatatgcgccggtagcaaggttagagtcaattagaatattaattgcctatgctactaaccatgatttcaagttgtaccaaatggatgtcaagagcgcatttctaaatggac

SEQ ID NO: 106550 - DNA, 552 bp, Zea Mays
cactggcacttcctcagtagcaggaacagaaggactggcatcctgatccaagctagacactcgacgaagactcctcttcttctttttcttcccctcaacaagagaagtgggctgattggctcggcgagaacgcttcaggcgaacactgtcagaactctgagcatccaaagctttgccggcctcagggatgggcgccaccaccagtgtttcagcaggagcggcatcagaagaaacctcagccaacatatccagcatggcacttatctgtgcgtcacttggattcaaaggcacctcaaaatgaacctgcctctcgtcgtcaggaatttcttcgagtgaggcaaccaaagcactaacttcttcgggagagggtcgcactctaaggcccaaaccgctatcaccggcaggaggattcgacacaaaactggtaaaggccttggaaggaggcagattccaggctgagtacgcaacaggagcgccgatgtttgacaccttgcctctgagtatcatttcgagccggctcaccaaatccatagcaggaattcttctgttggt

SEQ ID NO: 106551 - DNA, 275 bp, Zea Mays
ttacatgtccatgaacttctggtcttctgagatcccttcctattctgatgttaagttattatcctttgccttattccattcccttgtcttggtatgcccgtatccttggaatcttgcatgctcttatattcttatgtacacttattttcataccccaatgattgttcaaaacattttagttaacatgcccatgaccacccttgtctcttaatgatccatgattggtcattttacctttcatatccttcgtgatctctttgtctccttgtaactcc

SEQ ID NO: 106552 - DNA, 347 bp, Zea Mays
tttatcaatgacccgataagagagcttaaagcactcatgcctaggactttgttttggatccctttgcaatctatagaggcaagataggtgtcgacacatttgtctcccacatttaataatgatctctgccatttcctaaaacgaaagattcattgttctatattcccagcacaatgatattgcgcgcattgctaggaacttcatcatcaagatgaacctcttcgtgaggcaaatcaccagcagggcgagttcatcagaggagagttattacagaccacgtgaatctgcaatcagaacatatgctttgactaaggccaacggatcatattcgcaggcgtcctcgagaa

SEQ ID NO: 106553 - DNA, 295 bp, Zea Mays
cacttcacaaaccttacttgggtccaccatgattccaccataagtgataatgtgtcctaggaacgcaacttccttcagccaaaaatcagacttcaagaacttagaaatccactttcgagaataccttggctcctctcatctgatcaaatagatcttctatctaaggtaacaggtacttattcttaatggtaacttcattcaaatccatgtagtcaatgcacattcttatagatccatccttcttatccacgaaaaggaaaggggctccccaagatgatgagctgggctggataaa

SEQ ID NO: 106554 - DNA, 621 bp, Zea Mays
gtgtaagggttgttgggtgtaagtgttgttggggagaaggtctctcgtcaaaggtctatgttaatgagaaacatggtttaaaccgaatacatggctcaatcatatgggaaaatcttgggacagacggaattgatcaagtatatgggacaagcttcgtgacggacgaagttgatcaaagacgaagacaagctctgaaggtataactccattaaagatgtatggttgatgtacacatgtatatgatttggaatggattctttttcacatagaaaaggtatatgttatatgcatgcaatagttaagtaaatactatcctttagcactctgtcttagacattgtgatctttttaattggtaccagagcctcgtgttcattagtttaagcttaatagcttgagttaagatgttcggtggggatggaccttctctcgtctttgagggtgacaattttttctttgtcatcagttcttaagatgcttgtctccaagaatttacactattgtcggcgtttcggacccgcgaggactgtcaaccgatcagtaaatttgttgttgtgtgtccctgcccagatgggttgatgcgagatggaacacaagagggaaatgaggcttatgttatctc

SEQ ID NO: 106555 - DNA, 426 bp, Zea Mays
cgcagtttctggcaagcagtgggtcgctaggatggatttcagcccaatactgctccaagattttcttataaaagtacccttagaaggcttaaaagaattttagaaataaaaccataatacaaaaaataataaaaatttgtggaaaacttatttacccttagaatatcctctggtaaaaagctaagcatgtttggagtcgattagcttagagaaccataaactagctaaatatgggtaattaaaaccctaaaccttgaaagtactatatagggttagataaaacttaaaatcatacaaaaatagtaaacatcaaggttgacaagctttaaaatatgtagttctctgtttttctgaggtaagtttagtttgatcgcgttaagccaacattaggtaacctagaactaaaagtataatcactatatgttt

SEQ ID NO: 106556 - DNA, 681 bp, Zea Mays
cagtagtataggtcagataaaaaggaaaacaaaaatgtctactttttaagtgattagctacagtttatattgaacaggtcagtttagatgaagaacggaactctttcagaagaatcggataaactttccatgactcgctggcttcttctagacaaaaagttagagcttctagaaaatttcagactagagaagaaaaggccatcaaggatagatggaggtgattcagacttgagagtgagaccaagatcatgcctatctacacacaggcattcctttcagcttttttgctaaaagatgctaaccgaattctaaccaggacacaccatcacgtcaaatcaaaccagcggaaggtcctctagttcagtgttcagaggtcaagtttgttgcaaccacaggattaggacaggtccttgctcgacagcgactccagacctgacctacgaatgaatggatgaacggcacaatcagacaacagtgacgagttcactggtcagagtcagtggtacagcggcaaccgctgtatccttcgccctaagcacaatgcatgcggtcgccaaaagcagattaggagcaccgtaaagcagacgctttgcacctaaaatcggcaatgattaggccggcaaatctgtcattttgtggccgatgcatggtacgtgctccgaattttctttgacatgcata

SEQ ID NO: 106557 - DNA, 297 bp, Zea Mays
aaattgaaaaaggacttaggaggtggtagattccaagcagagtaggaaacaagagcaccaacatttgatactttgcctctcaagatcatgtctagccggctcaccaaatccttagcaggaattctcctattagtaacccgagtggagtcaataacaccattgtacaagtaagtcgggtatgctctgtctttcaggggctggatgttcttaaaaacaaaatcaacaaccacagcttcggcggtcagacctctttccttcagcagacagacttcagcaagcataaccttagcctctgtt

SEQ ID NO: 106558 - DNA, 465 bp, Zea Mays
gtatttagagccctgggctctctctagctaatggaagcgccgaccagaaaccgaccaggtgcgcggaccgctctgtaccgaccaggtgcgcaggcttttttggctcactgtaccatctacttacgtcaattataactacatgttatgctcaatcttgttacagtttatacacttttttggtgtgcgcatgtttcgtggcatccgggcccacgaaaagatcgtgtccccgcaatctgggcagccgtactagtccccacataaatattgatattacgatgtcttatgcttccatttatgatacagtaatccacgtgtcggtccatgggccttcgcgttgatttcgccagcagtttacgtgtatcgggcccacgaatccagcaaccgagcacgcattttttcagctcacctcacatgtaacgctcgcagcggccgaaccctagctcaatcgccgtcgtctgcttcttc

SEQ ID NO: 106559 - DNA, 351 bp, Zea Mays
ggcaagtataaactgatcggctgcacagctagataccaaaccacagacatgctatgttttcaccacgaagatgaaaattctgatccgttcatggctggcgagtttcaatttggttatgaacataacttttattatggtttagtatatttctgacaaaaaaattaagaggcaagtacacactcaattcaatcagcaacaccgttcacggggacggattgaaatgatggcgcgaacagatccactgaaccaaacattaacggaatgcatgaatacatacgctggtaaatccgaagccaacggccaattgaacggaatgcaactctcacgcaactactagatcgaacaaacaag

SEQ ID NO: 106560 - DNA, 455 bp, Zea Mays
ggtcaatttcttctctaaaacacctggtgactggcaaaagcaaaacctatgttgtacctttgcgttcacttgatccacatccaatgctttaagtctccaaggcatactttcctctatggtccaacctgcgttcttatttctccaagaattgttagtccacaaatggttgtcattaattaccaaaacattactaaggggcctagatgattcacagctcctaactcgacggcctcttgcttctctcgttggccgctctcagtcttcctggggtctttgctgatctactgattgctgggtttaaggggcacaggcggccgagtcttatagccatagccacgagagaatctcggcccggtgggtatatgcttgggcggactccaaatcctagagtaacaactcgatgatggtgtatgacgactcatatagacgacgatggttatatgattagacaggcc

SEQ ID NO: 106561 - DNA, 357 bp, Zea Mays
ctcaaaccttaagaaaactatgaccatggacatgacctataaattcctaagctagggtaatcattaatagactaacggagcataggcttagcacctttggacacttaaattcagaacgtgaatagaaacaacctaactggctcgctttccggactaactcgcataacacactaaataaaacatcatcaaagcaaagatccccacaaaaacataacctcaacagtctaacatacttatacaatttaatacatggtttctcagatttcgattgaaattgacttgccgacaccactcgcttccacttacttcaataggcaccaacatctatctacgacagctatcctaccacgagacaaa

SEQ ID NO: 106562 - DNA, 1930 bp, Zea Mays
cgtcaggcacctgaagaatatcacagtgatgtaagtacaagggtaactcactagctcctatagttcctaaactgcaaacatgtcaaaactggcacccactctagcagtctctattgactacaggaacatttccctcccctgaaaatgtggaacccagacgagtccctgaccgagatcactttaccggtggcagcagaggcgtgctccaagaaagagtgacagtccccacacatgcggatgttcttcacgacgcggattgtctgcccagggcctgccatcagaagaccgtacattgatgctagcttcatgctgtggtacatcaggaagtgcctcttctggtactcctcgacgtcgtgcagaacaaaggtggtgtctggctcgtacccggccttgatgcactcgaggattagcacatccaggccagcgtatatgtccctggactgtgggtgtgatttatcccgtgcgaaaaatgagtggaccatgttgccatgaaacgtccagctcctggccgggatcttgcgcatacccttttcatacatctctagccttgtgttctcagaggagcgccaccttgctgattcagatagtaggtttgaagtcagcacgtacgtggacgggtcttgtggttccaatgccagcagatgcttcatggcccgcctccgcacagccatgttggagtgcttgctgcagctgtctagcaaagaccgccaaactaatgcaccaggctgcaatggcataccacctataagctgctctgcctcgtcaaaacggccccagcagccaaggacataaacaaaggctgcatagtgctccatggctggttcaatgccatatgtgcttggcatagaaagaaagagttttctgcatttgtctgtggagtctgagcttgtgtgactgcaagcagatatgaccagaagaaaggtaatggaatcaggcctgaccattgatctctccatctcagaccatatcttcaatatatcatccccctgatgaagaagaagatgggcagtgatcattgcattccatgacaccaagtctcgacaactcatccgctcaaacaaactgattgcatctttcaactccccacacttgccgtacatactgataattgcgttaccaactccacgagcgctcagaagcccggattttgcagcaaaagtatgcatttgttttccaagttcagcaaaacctagactgccacatactccaaggacagaagtcaacatgaactcatcaatgaattctgcaccactgcttctaaacatctgaaggaaggtcgaaagtgctttctcatactcaccacctctgacacttgccagcagtagagaattccaggcaatgtgaaagctctcctcatgctgccattgctcaaataacagatgcgcgtctccagatcggccacatttgatgcacatgtcaatcaacgcagcatcactccatggactagacacacatccacacttgatcacaaacgcatgaacctgctcgctcaccttcctatccgcagcaatagcacaagcattcagcacgcctgtcaccgtgacatctgagatctccagcccatcctccaccatttgcctaaacaaacccagccctcggagccccgccttcttggcaaaagtggcgcgcacgccttccttgttccgacaaaacccagtgagaaccgcattgtatgtaacgaagttcctctgcggcatccgctcaaacacatccagtgccatgtcaacgagaccaaactccatgtacccattcagcaaaccagtccacgaaatcacgtccttcacgggcatcctctggaaaacgctcaccacgtcctcaacagaggcaccatgctccgcgtagaacccgatgagcgcgttgcccacactcaggtccgtctccagccccgacttgaacgacagagcatgcaccgcctccccttggagctgcc

SEQ ID NO: 106563 - DNA, 286 bp, Zea Mays
caagaattgtcttaatatggaggcaatttaggagatagctagcggtgtgtagattcttgacctagtaataagcagggactgaggcttgaaacaacaaggagcacatgatattgttggtggtctaaatcatgctgccaaccttaccgttctagagcgaggtgtacgggcatgacatccgtagctgaacaccgtgggaaagaaagaaatcattggaggaagagttattgaactcacctccattgtcacactggacaatcagaatggtgcgatccaactgagtggaaac

SEQ ID NO: 106564 - DNA, 964 bp, Zea Mays
acggagaccgcgtcttcgccctacaagctctaaacaaataccaagctcaaacaaaagcatggcgcgaccacacagtcatcccgagggaattcagcgaaggagacctcgtactcgtccggacagcacgaatagagtcccggggcaagctggagcccaagtgggagggccctttcatcgtcaagacgaaggcgtcccccagcacgtacaggctcacaacgccatccggcgaggacctagagcattcttggaacattgataatctccgcaaattttttgtttgactccttagggccagctcacccttgtaattcgcaaaaacaactttattccggcccacactcttttcctcccagggggtgaggtttttaacgaggcggagccatgtaatatatagacgaaaaatcccccgcaaaaatctacgtcgaaaaaagaccgcatcgacggtcttcggcattcgaccaatacgaagtcaccacgaggggcagcactggctaccctcgcgtgcgacaatccgcgcaaaagtcgcctaagggtgcagtcggactagcacaacaagtgcgcaaaatcgaagtcttcttcaaaagactatccgtgcaaaagtcgcctaagggtgcagccggactagcacaacgagtgcgcaaaatcgaaggcgcattacatctgtgcaaaagtctacatcgagaaactgtccgcgcaaagaccgactacagacgcagccgagccgacataataaacgtgctagaccaagtgcgcaacgcccctatggaaatagccgaatgcgcgaaggcgcacagcctcatcatacaaactatagttacacacgtacagcgagggcatcacaccttacattggttcaaccttcggattgattcccatctccctatagttaaacagcattatcctcagctcctcaccctcaaaaagacttcgcaactccccctcacctacactcgccccaaatggc

SEQ ID NO: 106565 - DNA, 403 bp, Zea Mays
gtttgatattgtcatgatgtggagctataatcgccctccatgttgaggaggtatcatttgttcacatcgctagagtcggagtcaccgtatcgtgcgcaccactttggttgatggcaaagtgcacgccacatatgctctagcttgaattcagtttgccgcttggagcagttgggcattatctgatccacttggtcaggcatagataagtgattgtagatgtcgttgaagagggtgacctttcagttgctcgcggaccattgatccttgagctacttgatggtacgctagtgaggaagctcggtgttggagttgtatgtggccgctatttggcaccaagaggccataccattgccatcaactggatcaacagggtgcattaacctcgcgtgcacctacaaatgta

SEQ ID NO: 106566 - DNA, 464 bp, Zea Mays
cttggcgtggcatggccatgacgagcctgctcctatgctctggttcccgtcgggaggttgaagatgatgtagcaaccgtcagatctaagcagagggccgagatttgttcgggtatctcccctcgatggttaaatcggggcggttggatcgcgatcgagcgatccagattgaataccgcgaaacccttcacccaggagtaatggtaggcgtcgatcttaaatcgagtggacgcaagatgattttggtgcatcgaatctcgactgttgatccttgatccgagggcagccagtgtgtaccgcttcagcattatgttgtgggtaatctaggtcataggatctgatctgggcggctgtggatcactcataccccttcgaccgcctatttttgctaaagagacccagtagaaccctagattcaacccggcagttcatgacagtggaaagaccattgtaaaaggccctaaa

SEQ ID NO: 106567 - DNA, 353 bp, Zea Mays
taccttcagcacagccgtcagagatgctacctgggcagaatttgaaactgcttttcgagaacatcatgtgccccaagggatcgttcagctcaaggaagatgcgtttcgggaactaactcaaggtggaagatctgtcagtgagtatgtgcacaaattcacagaattggctcgctacgcgcctgacgatgtcagcacagaagccaagaagatggcccattttttgaaaggactaagaccagaactcaagaccatcctcgccagccaagatttcctcagcttctcgcacctctcaaacaaagctatacaagtggagagggcaagggaagaagaaaaaggtcacctcaagagaaaat

SEQ ID NO: 106568 - DNA, 368 bp, Zea Mays
gaaggtgaaggcgctgatactgagcccgctgagcttaagcttcgtgttgactaggcccttgtgccgcatgacgtcggggtcaccgtgccaacaggctgtggcagaattcagggtggtagccgaacagatcagcaccagagatctagttcaagaatacttggctaacagaacatctccgactttgagcgaatttagcatgccgaaactaaaaggaacaaagaagggacttgagcttgtgcgacttccttatcggtttaaatttgagaaacaatttaaagaaccttgccaagagtggctggaaatgattgaaacagtgtgtaatgaagtgctaggaaattacaccaaaaaagaggatcaactgatgactg

SEQ ID NO: 106569 - DNA, 299 bp, Zea Mays
cagatctggaagaaattcttctccattggatatgaatatgtgtacgaagattttaatccctgagtacaaatttgggagattcttccgtattggatatataagtatggtatgaaaaaacagaactctgaacctaattgtccacggataatattcacacagtaataaaattaggtgtgtatctttataggaaacaagcctaacaactaaccctaactctctcaaccttttaagctaagcacctatataatatgattatgcttttttattggggataaggacgtattgaagatccaataccc

SEQ ID NO: 106570 - DNA, 461 bp, Zea Mays
ggacttgggctatgtctaagggtagaggtggcggtgcggggaggtgggtttcactttcctctctaacgacttccccttcagctcttcgggggaaacctgctccaatccctgaggcggtaggcgtggttttatccgaagccatctgccagggaagagagtcactattatgcacatgcaaattgttctcaaccaagttattttattcattacaccatcacattacaagcataagactactacaggggaagactacacgagggcgttcttcgaggtgctagcgagttccttgtctaaggtgtccccaaatgccttgagaagatcatcgaggctggctagggatacatcttcttcgtcggaccagtcatcgattctagggggaggtagggctagaggggccttcttcttcttctctgtctggcatccttggctagtggtcttcttctggatcttctttttggggg

SEQ ID NO: 106571 - DNA, 380 bp, Zea Mays
ctttccgccctttcagagagaccgtcccgcttggatggccaggatgcgtgcattggaagggcagcagctgcttgaggacgaccccacagtcgtgtacctcactgcatacctgctcaccctggatgcacaatatgatttcttggctcggcaccaccgtcaaatgattgcccgagcagaagatgcagagaagcgcaaccgtcagttgcatgtggatctcaccacagctcaagcccgtgcaactgccttggagagtcgtgaagtcattgctgttgaagctctgaagcaagccaaggatgagcatgtccagaagttgatggaggcctacttggtcacccataaccaacgtagagccatgcggatccaagagcccgctccatcca

SEQ ID NO: 106572 - DNA, 500 bp, Zea Mays
actagtaaccccttacctttgacctctctcgtcatcgcttgctcttctctagctaccatcttgtgtactaagctaccatgcaccaatcagtctctcactaatccaccatggctggatctcatccagctgatcaatagtgtttgtgcaggtagtagctaggagcaggaaaggggggaggaaggagggcaaaaatgatatgaagagaaggtagagagggtagggcagcaagcataagcaaggtagtgatgtgggaataaaataagggagagttggacacaggccttgtcctacattgaccggtgttgaacagtgtagcaggaaatgatgtctgcttcagtggactcgttcctttgtgtttagtttgtggcaatgcaaagctcacacacatatatatacacacgcacacatttgcgcgtacacgcacagagagagagaagagtcagagaaatagaggttaaacaaaagtagattaatcacagaaacgctagcagctaaaagaa

SEQ ID NO: 106573 - DNA, 331 bp, Zea Mays
tacatattaagattttgcttggactatttaggctctgaatggatatctcatgagttgatgctgaggtcacagttagatctcaaacggcctaagtctcgctgtgacaaatgtgcagaccagatgtgtgacgaaggaaattgaaatcttaaatgctggtgtttgttctgacagttttgactatagatgtggatctgctacatagatttaccctatattgtggtcaactgttttctgatccagtaaggtgcttgtcatataatttgctgttcctgtgacccaaaacacctctaaattggaagtggtacagaggtccgattataattaggtgtga

SEQ ID NO: 106574 - DNA, 344 bp, Zea Mays
gttagggcaagaatagcctagggtaagatagtttatggtgaggaagaactccgtgttgggtgataatggatctgaagatcgagttcgacttcctcctttcttgacgaggttgagcttgtccttctctggtcttggtctcattggttcgagattagtgtatatcagcggagttgggggaatatggttaagatggttatggaagaaatagactacatgatgtaggtcaaaagtttgtttgagtttaggtggggatagacagattttgcaatccatcatgactctattggttgggtaagttatgtaactcgttatataggtaaagtgttgtgtatggccaagttgat

SEQ ID NO: 106575 - DNA, 705 bp, Zea Mays
ctgacgctgccaccaatgctcgtcgtcgtgccaaatgttcgcgccttgccgccaatgcccatcgtcgtgcctaaggttggtgacatgccactgatgcccaatatgtggcccatgtctaaccgtcaatgccctccatcccgtcagcgtcggtctccattaggtcccacgaacgcgacacgaactcggtggacatgcctgtgaaagtgcctgtggagtcaatgagccagaaaatcatacgtacgtatgtgcgtaccttggaggatgtaagcgagtcggagtacctgtagaacatcaagccaccggcggcgagcagattaaccaccgctatcgcttgaggggtctcggtacgactttttgtagccaggttggtggcgattaggatgactaaaacggctccaccccgtagctactaaaacctctttccccgcgtttctatgcatggaagacgtggcgtgtgtgggtctgctgaaactactttccccgtcccctacggagcggcgtgaataggttgttgggctcctgtatcgatgcatttggcgcgggcgcacttgccatgtcggtcgatgctatcaacgaaagacacgacatgtgtgggtgactgatacgctcacgcaatcgtgaggggcgtggattcgctgaggatggggagtggataaacgaattgtattagatgcgatcgatgtgaagagaatgtgtcttgtgggc

SEQ ID NO: 106576 - DNA, 374 bp, Zea Mays
cagaagttctggagaggtatttcttcacaagtttgagcaccttgagccctaaatttcagttgtcagcaaaactggccttaactgaaactgacatacaatttaaccaaatcctgcagcacgactagctaaaaagatttttgagtatatgaagagagacgttgcttcaattaggatacaaaagcacgtgcgtgcgcattctgccagaaaagcgtacctgcaagtatatgaatcagctacagcaatacaaacaggattacgagcaatggcagctcgcaacgaacatagattccgaagagagaccagggcatccataattatccaattatccaggtttgcactattatgcctatcattatttgcaaatggtttttcta

SEQ ID NO: 106577 - DNA, 498 bp, Zea Mays
atatccactcatcttcctcacctattttgggtatgttagtgtttccttgacattttaaacctaaatgtgaagcttactcagggttttggtagggtttgcttaactgaatttacatgtgatatgggtgaagtgatggaattttgggttaacactctagctaacacctggggtgtcacaacctaccccttaaaatggaatattgtcctcaagattggatagactgtgcatgttatgggtacgtaccaacactcttaggtagaaactcggggtagttcttgttcaaaaattcctcggtttcccacgtgtcttcctcttcggtatgaaggctccactaaaccttaaacattttaattgccttcctccaagtagttctttctttgcaatccaagatctttataggatgctcctcatatgtcaggtctggctctatcataatatcttgctcgaccatgacttctgtcagtactcggatgcacttctttagctgagacatggaag

SEQ ID NO: 106578 - DNA, 283 bp, Zea Mays
tgggtctagtcgatgacccatcagtagttacatgcacatgaatgcatggctggggcctaggtctggctgcctctgcgacgaatgacgaattgacgatacatggacgggaacacgtggtggcggtggtggtggtgtacgaagcagcctccctcttgccattgatgcattgccagctagcactggagaatgtgatgattaaaaaatgaggccgtatagtatgcacataggccggcccgtgcacatatgcacacgtacaatcctgactcttgagaatccatccaac

SEQ ID NO: 106579 - DNA, 631 bp, Zea Mays
cgcgaagtgacggacataggaaacaaatgaataaagcacgcgtaataaagaatgcacaataatgaatccgttcgtttgcccaaaggagctgtgaagttacgcataaaagctattggagtactttgcgacaataaagaatgtgcagaacaaacaacggacatagggaacaaagcacgcgcagctgagaagacagaagaacataatacgacagagactaatagaaaaatgaaaagcgctcaggcgacgatgatttatggacagagggagtatttaaggctctgcctcaaatactctttggtcttgattggtgttatcaggcggtactaaaaagtatcgactggtgttatgaatcagtggcctctcctctttggcctcaaatgctctgcctcaaaaaatattcccctacaaacctctctcctctttctcacatgtcaatttttcatgtctcacaatctcactaacgccgcttcgtaatccccattgtcatacatgtgccctagccccgacttcatcctcactgccctggctgctaccaccctcgacgcatgagccacctcccattgtcagttctcattgccatcctcataagtcgtgcttgtcgtcattgccttaccggtgagccttgggttca

SEQ ID NO: 106580 - DNA, 502 bp, Zea Mays
caaaattttgaggtgaattgtgttcccctgcctgacattattcttcgcggaataccatgaagtctaactatttctttgagatatatccgggcgagggtggttcctccaaaggtagtctttacgggaatgaagtgagctaccttggtaagatggtcaattataacccagatagaatcgttccccttttgggtttggggccgtctgattacgaagtccatgcctatttcttcccacttccatttgggcattggaaggggttgcagtaggcctgcgggcctctgatgttatgccttagttcaatgacaagtatcacaccgggccacatactgagctatatcctttttcattcctctccaccagtatctggctttaaggtctaggtacatcttggtagatcctgggtggatagaataggttgagttgtgggcttcgtctagcaagatttctcatgcctctcttttcggtacacatagacggtttctgaaccaaagggctccctttt

SEQ ID NO: 106581 - DNA, 678 bp, Zea Mays
ctccagctcggattcgatgatcgaattaccgctctagccacggacaccacgtgtcctcaccgtgaatcatccaccgccgtcgtagtaagccaccggacgctctgaccatccacgcatctggttgggagctcgcgtaatgaaccgccgcaaagggttcgtggtaagtccgccacgttactggcctatggacaccgttgaggctaacgtggagcttctcgggctgtcaccgctgccgtgagtcagcgaccaaattgcccaccgtcgtggtgacttcctttaaattgagcctgtgctcagtctcgcctctccgttacgcactcaagccaccctttgtttccgtcgttccaccatcgatagccaagaacaccggttttccccatcggtggtcaccagcgccatcgagcagtgtaaccgcgtggtcagcctttcctaaggtcagtcattgttgttttactcgtgttttgcagtctatagatcatggtgaagctcatgcgcttgcccgcttgaactctacggcacaggattaacgggaacactgtcgtgtcgttcggtgatcgtcgccgaaggcagtgtccacgtcgaccgaccaacccatagctcctctagacaaacctaggtgaggattgtatgccttatgcattactgatactcgtagtgaccttggattgaaccctaccg

SEQ ID NO: 106582 - DNA, 354 bp, Zea Mays
gactactagagtttaaggagggtgatcacgtgtatatgaaggtgtcaccaatccggggtatgagaagatttaaagttaaaggaaagttgtccccttgcttcattggacctttcttgatcttaaagcgagtgggagaagatgcatatcaactagaactacccgatcacctgtcagatgtacatgatgtctttcacgtgtcccaactaaagaagtgcctcagggtacctgaggagcagctacaaatggaggaccttagcgttcaagatgacctgacttatgctgagtaccctatcaagattcttgatacactgactcgagttacaagaaataaggttataaagatgtgcaaagtgc

SEQ ID NO: 106583 - DNA, 684 bp, Zea Mays
gcaacctcagttacaccacgtcgtagctctttaccacatagtagtaatcgtggcgcgcctggacttgccatttcaagagccgttgcatcggcaagcgccatgactgaaccgccagtgatcttccttctctccggccgctagctttcatttccaaaattcggagccgccacttaacacccctataaattgatggcccggtctgcttcgccatgttgtcacaaagccagagcacccactccctccttcgattagccaccatagccagagaatttcattcttccccaaaccggttgtctgcgccaccgtgagacatcgcgccgtggccagccacctccaggtccgccctcgctttccctgtccgtgtttcagcacccacacgtgcttgtatggctcgtcggctcaacccattgagctagaccgcgctcaatcaaccggaacaccttgatttgtatatggtgtttgtcaccgtcgtgggtgggagaatccagggcaggattggttcgattaaggcatggtttaggttcgcctcaggtcagggatgctagtccgacacttagttgggtcagtcgacgccgttcatggtcagttttagcaaaggggtggtcgacgacgagcgcgccgtggccaaggatcgggttggagaagaaacagaagtcgaaggacctctgtgcaatcgtcagtgag

SEQ ID NO: 106584 - DNA, 473 bp, Zea Mays
acaagccgagacgtagagtgtcatgaacgtaacgaacgatgcgcttcagagcagctagatgaggctcacgaggatcatgcatatgaagacagatctgctgaactacataggcgatggcagacctggtgaagatgaggtaatggagagccctgccaggctatggaaatccacagggtcagccactggatcaccaacagtaccaggcaactttggattgacattaacgggggtggagcagggcttgcactcaaccatgtcgacacagtcgaggatgtcaatcatgtactggcgctgagacatgaacaatccatctgccatgtgttgaacctgcatccttaagaagtgatgaagtttgccgagatcctttatagagaattcttgctaaagcggggtgatggtgcgacagagaagaacaactgaagaagctgtcagaacaatgtcatcgacatataacattaggtacaccatatcat

SEQ ID NO: 106585 - DNA, 638 bp, Zea Mays
ccctggtagcaccaagatgtaccaagacttgaagcagaagtattggtggtatggactaaagaagaatgttgcttcacatgtagcactatgtgatatttgccagagggtgaaagcggaacatcaaagacctgccggtttactgcacccgcttaagatacctaagtggaagtgggaagagattggcatggacttcattgtgggtctaccccgcacatctactgggtatgactatatgggtaattgtggacaggctaactaaagtagcccactttatcccagtgaagaccacatattcaagagccaggctagcagagttgtacatggcatggattgtatgtctgcacggtgtgcctaagaatatcgtgtcagaccgaggatctcagtttacttctcggttctggcagaagttgcatgagtgcttggatacaagattgaattttagttcggcctaccatcctcaaactgatgggcagaccgagaggaccaaccaagtactagaggatatgttaaaagcttgcgctcttaaacatggtggcagttgggataagagtttattgtatgtggagttctcttacaataatagctaccaggccagtttgaagatgtccccgtttgaggctctatatggcagagagtgc

SEQ ID NO: 106586 - DNA, 1408 bp, Zea Mays
atttatgcgaagcctttcttggtgttttgccccactttggcctttggaagtatttgtaccactgtcggcctgggatggccggagggcagcaccagctggtgggggcacgagcttggagatgcgccgtgggaggaagactgattaactcgacatcccactcaaggatagcatcaagggatggcgcctggaatggttcatcgtggagaatcatgggaatttcctccccccacggtcagggagacagccgaatgttcgcacttcgagctggaccaaatcccccatagaccaggaggtggccgaggcaggggctctgctagctgaagttggattgttgaaagaaaggggtctgactgcagaagctgtggtcgctgactttgttttcaagaacattcagccgctgaaagacagagcatatccggcctatctgtaccgaggcttggctgattcaactcgggtgaccaacagaagaattcctgctgtggacttggtgagccggctcgaaatgatactcagaggcaaggtgtcgaacatcggcgctcctgttgcatactcggcctggaatctgcctccttcccaggtctttaccagtttcgtgtcaaatcctcctgctggtgatagcggtttgggccttagagggcgaccctctcccgaagaagttagtgccttggttgcctcactcggagaaattcctgacgatgagaggcagattcattttgaggtgcctttgaatccaagtgatgtagagataagtgccatgctggatatgttagctgaggattcttctgatgccgctcctgctgaaacactggtggtggcgtccatccctgaggccggcaaagctttagatgctcagaggtctgacagtgttcgcccgaagcgttctcgccgagacaatcagcccacttcttctgctgaggggaagaaaaagaagaagagacgtcttcgtcgagtctctagcttggatcaggatgccggtccttctgttcctgttgctgaggaagtgccagtgcctgaatttgctgaagctgaccccaatgggtgtggcccgactgctgtggatcccaatgggtgtgatcctgctgaagttgaccccaataggtgtactgtccgtgttgttgatgaagaggatgaaatccctctgattaggaagaacagccggcgttacatagctagtggggaaagtagcggtgttccttctcctgctttgtctgccctcattggtctgcaagaattatctctgacgaacttcgatcaaactcttgaagacatggttccagaagatcagttgtcagagccggcagatggtggcgcgatggatgtttgtgctgatgtgcccgatgccgggttggggtcatcccgggcagcgtcccacgcctcatcgaccttagagcgcggtcttgagggtcag

SEQ ID NO: 106587 - DNA, 309 bp, Zea Mays
cacggcgctggacacccagccactgcgccagtactcttcttcctcctgcgaccaccgcgcgtccccactggaattcccagccaccgccaatgatccctataaattaagcccaccgcgagctccgtatggtagtcaagtaacccgtacaccaactcgcgtctcgaatcatctcccagagagcttcaatttgggacttcccccaaatccaccaagaacaccgtgcggtgtgtgctcaccgtggccagcactgttcaggtccgttcataccatcttcttccccgtttacgtactctcatgtgtctacgatgc

SEQ ID NO: 106588 - DNA, 522 bp, Zea Mays
gcatattccattcactcaacgtcggaaataccccgttggctaggtattcttgcaccagatctctagtgctgatctgttcagccacaaccctgaattctgctacagcttgttggcatggcaaccccgatgacatgcggcacaggggcatggcaaccccgataactcaacgggctcatcaccagcatcttcaacttctccctcttcttctcatcggccttgatatagaaccactcacttttctagctagttggccacttggtgcggtagctgagcaccggggccttcatatacttgtggtacgcgaagttataacagccaaaaatttcatgaagcccgtcttccttgtccttcgtttgataatgtagctcatgcactcggcaaaaagcttcagcatttgggaccattccttggctttgaagggcccaaatgaagatattgagcctaacgatagcgttaggagtcagctgatgaagatagatttcataattatccaaaacttccccaatcatctcatgaagcgga

SEQ ID NO: 106589 - DNA, 289 bp, Zea Mays
gtttcatttggcaggaacatcagacatgaagaacgtagaccgacctccttccaatccaaaacggatcataatccagtctactcaggagtgcttcagcgttgacataccccgtgcttcggcggggactgttagacctgaaacaaggcaggctgctgatgaggatgatgactttatgccattatccaagaagcgtaacttgaacgacagtcctgggaaagttttgaaaaaggtagtcactaagcggaggaaagcagtgccccccgacaggttagagatttatgtctatggc

SEQ ID NO: 106590 - DNA, 535 bp, Zea Mays
aacgaacgacaaagaaagctacaaacccactaaccaatgttcaaggctttcagatcatctatttgtttctgaagcaggagaggattccactgtagcaagggtaaaacttgattggggacaggggcaccgcaagacctcaactgagccgacacagagctcaggacattctacaaatacaagaattagcaaaggagtcttttgtcaacaaaagtaaggaagggcaaaggttagctcacctgaaggttagaaaggaacaagggaaatcccaaagccaaaggcgccaacgtgctatcgaatgacaaggtactagcagaagcaatattaagagcaaactcgagccccagaggaggattagagctcacgcccaaggcaacacttagtgggacctcggctccagaagcgtgtagcgaattcccagcgcacgggtcactgacctctaaactgatcggaccaacaagagcagtgggaaggcttgtcaacattggctcctcagactgaactggtggtgatccaacatgaacatccatagaagcag

SEQ ID NO: 106591 - DNA, 345 bp, Zea Mays
agaaatttgaatttgctggaatcctatgctctcatgcactaaagatactggatatcaatagtattaaatcagttcctgaggaatacatactaaagaggtggacaattggtgcaaaagtggtacatatacctagcacacttaccatgcatgatgatcctaaagtccagttatcgaatcgcttcagtaacttaacacgagtttacaatcgtatactcgctcgagctgcagaatctgaagaaacttatagtatttgtacacaaacagatgagaaattggcagaagacatagagaataatttgaagattaagcctagctcaaacctgaacagttcctctactccacgag

SEQ ID NO: 106592 - DNA, 353 bp, Zea Mays
ttctggtagcgtgcaagataccaatccttttctgataacttgattgtgcatttttagcttgtgctgtttgtgtcatgttttggttttctgtatgatattctgcatattttaggtcttcattaaacagagttccacatattctatgcttctttaaaatcactgtttttattgtgaatgtgatactgataagcagcagttcatacaagcaggaacacttgaccctggccaaaccatgacttttgctagttttgtcttgtactttgtttcatatggcaaacaataaatgtgttatttagctagcttctacatgtgtttgtgagatagcaagcaacatgtaactccctacatttacg

SEQ ID NO: 106593 - DNA, 700 bp, Zea Mays
gaggagacagtactgcccctgctccggaggaaaacgaagttgttatttaccgaagcttcttgaaggcaggccttcagttcccgcttagtaaatttgtggtcgaagtattaaagatatttcaaatctttctccatcagattacccctgaagctataatcaggatggggatatttgtctgggctgtaaggagccaggggctagagccgagcacaaagttcttctgcaacatgcacgggcttttatatgagacaaaggccatcggcaaagaacaataccacaacaacttcggttgttacgggttcattgcctgttctaatgctaggcacccactgccaacattctgcaaaagatagcccggggcctggatggagtggttttacgtaaaaaatgatttaattaaaagagaagacatcaaggaaattatccagcgccccatctggtctcgcttcggcctccgaaggtcgaaggtgaatatcgatgacaatattgaagcatgctagaaggcctttagtactgtgtgtgccttcattggcacaagggatttaattcaagagcacatagccttcagggtatggccacttgtggagaattgggaaatgtcgaaggatactgttgctgaatccagtgaaggtggcctcgttcgattaaagtataccttcagatttagggagaagtttcatgagccagatgatgactggtt

SEQ ID NO: 106594 - DNA, 755 bp, Zea Mays
ctgaataccttgctctatgggatattgtcaccttggttcagcttagacctgaagtgaataacactcatttttttcgtctcgccgccaatgggaagtacttagccaaggcagcctatgagggtcttttccttgggtcgacgacttttgagccgtaccacagaatttggaaaacctgggctcctccaaagaccaagttcttcatgtggctggtcgctcaacgaaggctttggacagctgacaggttgcaaaagagaggcatggatcaccctacgagctgccctttgtgtgatcaggagcaggaaacacttgaccatctgctgattgggtgtgtgttcgcccgggatttctgatttaaactactatctcaagttaatctccaaagcatggcctcttagcttgttgatgcatcttttatggacttgtggagttggctgggcaatcagattcatggagtggcaggggaagcagtaaactccctggtaattttaggagcatggactctgtggaaacatcagaatagttgtgtcttcgacagaaacagacctaatgtgaatcttgctgttaggatggctgatcaagagcgagagaagtgggagctcgctggagcaagaaagctatccttgctaactaatcgcatcccgggtctgtaggctttgtgttagagtttgtacctttgggtgttttattcatggatgagtatcaatatgcttgtacttggcccccgcgaggtggctgttttgtattatctctgtttt

SEQ ID NO: 106595 - DNA, 549 bp, Zea Mays
cacacagttgccaccatggtccatggtcatagtctaaaacccttaagggctagtttggtaacacatttttctaaagaatttttattttcctaagaaaaaaatgaattattttttttttggaaaaaatgaaaataccataagaaaatatggttctcaaactagccctaaatgtcccaactcccaagacatctaggacgaagtaccatccgccacttttgacatgcgctttattgccgtccatcatgctgataactcgagctaggcattgctcttcgccccttggagtcttatggtatctgcctgctagtgctaggttacattacatgtggtatccaaaagctacaactgtctaacatgctgcaggtacggtctagtaatggagagtgggcatgtcgagtcatgccttggcctcccagccagttcccctttgcaagcacctctgctggtttagggttggtggcagagttgttagccgccagatgacgcttaattcctacattttctgcgcctctgcgtcctgtggcttcagcatagcttcatggccatact

SEQ ID NO: 106596 - DNA, 559 bp, Zea Mays
gcagaccaccatagtcagctccttaggggtgtctaccttgtggatcatgccaagcgcaaggaacgccatcccaggactggtgctgagccgcctatcttagagggaatcctgttgtactccttgtcccaaccacgcaggaggattggtgaatcagtaccacccacaccttccgcgtcaccccgtgaggctaaagacaaagaccccgaagacagtgtcgtaggaaccagtagtcaagtcgtttcggtcgacccttaaaagtcgagccacgttattgtaatctgttgtaccatgtatccctgtttgtatgcttgtatggtgcttgaatgaattgctagtgtgcattgtgtattttatattatacaaatataccccagtaggctactaggagaatcgcctaatcttgccttttttcgcattgagcaaagacgtctcgttgttcgagccgagtccatggactcaatgctcaggaagacgggaagtggtcaaccagggaaacctaggcgctcagaacgcagccgccgaagcaccagcaaatggacacctaccgccactgcctccc

SEQ ID NO: 106597 - DNA, 531 bp, Zea Mays
cctgaaaggagctctaactctgctgactgaaacgtgatgcagtgggtccagctggcttattgaagcttggtcccttgggtggaacccaaaggatcgagttctctggtgccagtcttgctgctgagctcggaagacttggaatttcctcttgaggtgacctttttcttcttcccttgccctttccacttgtatggctttgtttgagaggtgcgagagctgaggaaatcttggttggcaaggatggtcttgagttctggtcttaaccctttcaaaaagcgggccatcttcttggcttctgtgctgacgtcgtcaagcgcgtagcaagccaattctgtgaatttgtgcacgtactcactgacagttcttccgccttgagttagttcccgaaattcatcttccttgagctgaacgatcccttggggcacatgatattctcggaaagcagtttcaaattctgcccaggtagcatctctgacggcagcgctgaaggtatcccaccaggttagggccatcccggaaagttgatgagca

SEQ ID NO: 106598 - DNA, 1153 bp, Zea Mays
ctgccactgacccatatcctgctataaacttgcggtaataccctgtgagtcctaggaaactgcggagtactcggatgatcctaggtatggcccatgattcaactgcgccaccttggaagggtccatggcgaccccctgcgcagagacaatgtgtccaaggtaagtgactgcagatttaccaaatgagcacttagacttcttaagaacaaggttgttgtcccgcagtaattggaacacatgcttcacatgttgcaagtgctctgtccaggacgagctatatatcagaatgtcatcaaagaataccagggtgaacttccagatgaacggcttcagtatatcattcatcagagcttggaatgtggatggtgcattagtcaagccaaacgccatgactagaaattcaaagtgaccacaatgtgtacgcaaggctgttttgtggatgtcattcgggtgcatcctgacttgatgataaccactccggagatccagctttgtgaagaaacttgcacctcggagttcatcaagtagctcgtccaccactagaattggaaatttgtccttgattgttttttcattcaattcacggtaatcaatgcaaaatctccatgtgttatctgccttcttgaccaatagtacaggtgacgagaatgctgatgtgcactctcgaatgatgccttgtgccaacatctgatcgcactggcgctcaatctcgtctttaagcagttgagggtaccggtagggtcgtacagccattggttctgtaccagctagcaaccgtatgtgatggtcttggcgacgtgatggtggcagtccctgaggatcctaaaacaaatcagggaaagaggacaacagttcttccagacattccctgttcttgtccatggatgcaaatcccaacactgagtccccaactcctgtcaagtgtaccaaccttcccttcctccagaatgccattgtgtgtgtcaaagttgcagaccaccgatcctagagatcgcagccactgaactcctaatacgagatcgaacccatcaagaggcaaggaatagcatgttgtggtgaatttctcctgaccgatggtgagggttgttgtgacttgacccttgcttgagatgcgttctccattggcaacttttaccgatagacctggctagga

SEQ ID NO: 106599 - DNA, 687 bp, Zea Mays
cgagggtgccctagaactaaggaggcctgatcagctgcgcaaagatgtgacagaggtaatgagcatatggcagctgacggcgagcacggagaccatcccatactatgtcctcgatctcacaaataaggaagttaatcacgtcgaactctgaatgtgagaccaaggcaccatgtagccatagttgaatatgagtggtggcctctctgtatcccatcctgggtagtagtgtacgtctcatcagctcatataggaacttcagtacagtaggagatcgtcgcgacccaactgtgaaagaaggtctgaacagggctgtgacgtgagctgtagcaggtgcaactccgccgtgagggcgacgaggaggatccgaagtgccatagcacagacagtgaagcctagtcgtcgactctggaaatccaaaaggctgacgaatctgattgacatgcaaagtgacatcctctcactcgaaacggaatcacatccactgatggtcagggtcaatccatacggtagcatagaacactctgacccactcgttaatatacctgccactcgtggtcaatagtgaaagcagtcctggcagataggtaagatgaccctctgaattggcaccggtggctagcaaaaaagcaggtaaatccagaagccgatgcgctcgccaagcgatctgagctatcagctgtgcccgga

SEQ ID NO: 106600 - DNA, 491 bp, Zea Mays
gacgatatcaaatcagataaatacccagagttgttgtcatttgcaatcaacagaaacatcacattaaggcaggcgagattagacaacccccaagagatgtttcatactcctctatcagaagaagcttttcagcaactccattgtctaaatgcctccctggcggatcatcctaacaataaccagcaggatagatggctatgcctcgagggatcgcacctttactcatatcaaagggcgtataaacacatggttggggaggcctgtacccattatgtttattccttgatgtggaggacaaaatgccaaccaaaacaaaaaggtttatgattgctgctaaaagacagattgaacaccggatcattccttagacactagggcatgctcctggacccttacacatgcgaaaatttcatcttatagttggaagaaacggtatcccaccttttcctacgatgcaactttgctcgaaggtgttggcaccttattgaaat

SEQ ID NO: 106601 - DNA, 710 bp, Zea Mays
ggagatgctaatcgaaagaggggcgtagctccacatcaccctaggttagttcagtgacaaggtattgagacaatatttgccacttgggcaaggctggacagtccagccctgtggtctagacggctctgcccccgcgatcagattaacttgggcgagattacttatcccacatgtgttatcctaacctatccataggaatctgttagatcttgcctagaaacaggtacatacctcctccctataaatataagggatacgaccgattgagaacccccgaacacacttcaatcagaccaatctatttactttctttatcattcatgccataggagtatatgtagtgtaactctaaatgtagttcacatcccaatcatcatcctttttgactcaaagtcgtttggggataccctaggtgtcgtgtcgcccttgggcaccatcttcatctatgcgtcgtctagatgcatcttgggtgctccgtcgatcccaagacaaccctaggatcttgccctaatgaggtccccctctctagtcatccgctaggagggtgaatttatttagttctcttcctcaacctaatttcttaactcctaggtgactctacgccgtctgcggacgccctgggtggcatgccgaccctagagcaccctaagatctctctgcaagggtgagatctaagttcctgtgaggaagaagaaagctctacacctttg

SEQ ID NO: 106602 - DNA, 442 bp, Zea Mays
cgtcatcttggctgacacgaatgcacaagacggtatgttccagtttttccgtcccttgtgtccttgttatttctgtgctcacttgctcattctgttgctcttctgtgcagcttctgggctgaatgggattcaagattcctggaacaagaagccatcaaactggagggtgggcactgacccatgtggagataaatggaacgggataagctgcaccacaagccgggtcacggctatgttagtatcagcagctagaagatattatcacatacggtcgtttccttctagtcatccattttatagatgagcaattcatcactcattctgctgctgttgttgttgttgtttcgtggtggctgttcctgcagaagactctcgagtttaggattgtcaggatccctttcaggcgacatccagtccctgtccgaattgcagaccttgtatg

SEQ ID NO: 106603 - DNA, 533 bp, Zea Mays
cgcatgggaaatgtcgaaggatgttgaggctagctcaagccaaagtgtcgaaaagggtgggttagtgtatctaaaatatacatatcgttacagaaatcagtttggtgaactagatggtgagtggcttgaagctattgaatcaacctgcaacgaaatgttaggtgcttttgaagactgaagacgaagctttaaacattgcttttagtgggcagggaaaaaggaggttaaatagagtgtttgacgtcatcggatttatttatcctgaatattgctttcctgcacgcaaaaaggtggtgaaacgaaaaagtacaccaaagacctcctccgcgccgaagcaaaagagagccaaaactctgacttaccggccaaggacgtactatattgagagagcagcagaactgcctgccctgccagatgctaaagctagcaagtcaaaaactgccaaaataattgaagtggttgttgcacctacgaaggtaatgaattttgatttttctttaactttgaactgaattgttaacgctctaatgttt

SEQ ID NO: 106604 - DNA, 583 bp, Zea Mays
caacagtagccccttgcgaaatgagttcgtttcttcataacgagcttaaatcgcaaaatagaaaaattgggaggtcttgtgccgaaggtccaaaaaacaccttctcgaagctcgttatgaataccctgactggtagggcccagatctcagtgggtacaacgggtaagttaataatctacgggtataaaaggaagcgatacccgacggtgttagtacgacatttgctatctgctctacctttgaagcttactttgatcgcttttccacctccaaaccaaccttagctagttgaaaggaagacttattgaaagttccctatgcccgggaatatgatctggatgtcgcctagagggagggtgaataggcgattaataattatcactgtaaaaactggaaattcttactctactcgaaggatggattgcagtggaatgaaagacccttcgagtaggttgcagcggaatagaagttcctgtattaaaataccctacacttagaagatagcttgaaccacatataaatattgaagtgcaagtataaacagcaaataagacagagaaacaacgcacatcacagatcagag

SEQ ID NO: 106605 - DNA, 273 bp, Zea Mays
aggaagaacactctggtcatctatataaggcagagggggtacccctacaaaaaacatctcatcccgtcacatcccagcaccacctcatagctcattagccttattgtaacaatcacatgctactagatcgataggagaactcatcctccaccatcattagttcacttgtaacccatgtacactagtgaaattccaatacacagcctcaagaggaagtagggtgttacacattctagagaaccgaacatgtataaaccttcgtttgatccgacg

SEQ ID NO: 106606 - DNA, 448 bp, Zea Mays
gggttttgcctcaatccacttggtgaacttgtccacgacaacgattagatgggtgaagcccccaagcgcctttttgaggggctcgaccaagtccactccccaaaccaaaaagggccaagtgatgggtatggtttgcgatactttagctagcatgtgtgtctatcctgcgtagtactggcacccttcacaagtccagacaaccatctaggcgtcaaccatggtcgtgggctaatagaaaccttgcctgaacgccttcccaataagggaccatggggttgtgtggtccccgcatgttccaccatgtatgtcggtgagcagatgtcatccttcttcaattgggatgcatttctgcttgattcttgaggcactcttttttgtaagtagtgcctcatagacgagcacaaaggacttcgtcttacgagagagtcacctcgcctctattgtgtcc

SEQ ID NO: 106607 - DNA, 467 bp, Zea Mays
ctttagttcatttgtttgtaattgtgaatgatatttgtaattgtgaatggtatttgctaaatatataatgtgatgtgaatgatatttgtaattgtataatgtagtggagtagattgtttatgtttgtattgtttatgtttgtatttgtaattgattagggtattaaataattgtttaggtttggtccatttgtttccccaaaattcatttagaaagtaggccccaaaatatgataggagtgcacgtgatttcaccattactgtgaataaaatcatacaatgtgatggtgtatatgattagcaaaatagtttctatataatgtgatggtggatatggatgccgattagatgtgattggcggccatcgtgtcgtttgtatatctgcgtgtcggccatagtgctgatacttttatttgcaggttttgaaaacctcctcgtgcaggggaggtgctgccgaaattttctatt

SEQ ID NO: 106608 - DNA, 656 bp, Zea Mays
ggtttgttccttctgtcctgatatatatggttggtttggtaacaccaccagcagtcacatatatagctagggttggtgacatggacatggagcttgctcagatagttttggcatggcaccaacatggcatgcatatgcaaggctgcggcatgcagcacgcacatagggtgcctgcgatttgcgggctgggggttggcacgacaacaaaaaaagccttgcttccttgcttggattattgtgaccggtggtggtatcttgctaccaattgaagctttgttggctgcctaattaatttggtgccacccctccgtacgtgacataaattaaccagccggccggcctgccgcggcgatggttttggctccaaggaaatggttgcttaattgagcgcatatcacatcggtgtgggtcttactactgatttttgattaattagccaacctggttttacgcccccaatgcaatgacgatgatggccgcgtgtatgaatgtatgcgatgatgctttcagacaaggatagagatgtcttacacgacgacgttccagcgcaagggagagcgcgaggtttggcttaggttacgccatttggcaccattgccacaagtttcccgggccgggtaaggagacgcgcgcgcgacagtgcgacactaaggact

SEQ ID NO: 106609 - DNA, 398 bp, Zea Mays
ctctacaatgatgaacggtccttcccacggtggtgacagtttgtgccgtccctccctcgttagtactcggtagaggaccaagtctcccactgcgaaggatcgatgacgcaccgctttgtcgtggtagcgcctcaaggtctgctggtatctggttgactgaattaccacatttagccgttcttactccagtatgtcgatgccctcaagcctggttgcttctacttcggttatgcttttgaaggttaatctaggcgccccaaagatcagatctgctggtagcactgcctccgacccatataccatgaagaatggggtgtttccgtgcaaggctcagcttggttgggttcgcaggctccagaccacatatggcagttcccttatccacttccctgcaagct

SEQ ID NO: 106610 - DNA, 822 bp, Zea Mays
cagtccatggagcgacaagacttcatccgtgaggaggtccggaagctgttgcatgctggctttatcgaagaggttcatcacctcgtgtggctgggcaacccagtcatcgtgccaaaggcaaacgggaagcttcggatgtgcatcgactacaccagcctgaataaggcatgtcccaaggacccatatccactgccgcgtatagatcagatcgtggactctacctcggggtgcgacctcttgtctttcttggacgcctactctggtttccatcaaatctggatggctaaggaggataggaggcataccgcttttgtgacagtagatggactatactgttatgttgtaatgccctacggtctgagaaacgccttgccaacatttgttcgggcgatgagtaagaccttcagggacctgattcgagacaaggtggagatctacgtcgatgacatcgtggtcaagactagggaggggtcgactatagtggaagacctgaccctggttttcggcaagctatgggcaacttgcaccaagctaaacccggagaaatgcatcttcggtgtctccgcagggaagttgctggggttcctggtttcataccggggcattgaagctaacccggagaaaatcaaggctattgaggtaatgaggcctcccgcccgtattaaggacatacagaagcttacagggtcactggcagcccttagccgcttcattttaaggttgggtgagagggtgctgcccttcttcaagctcctgtggaaatcaggcccatttgcctggaccgaaaaggcggaacaagccttcaaagaattgaagcagcac

SEQ ID NO: 106611 - DNA, 450 bp, Zea Mays
ctctaagaggactatttccctgtgcaatgttaggttcgttatacataactgttactgttttttagccacgtagggatttgtttcctctgccttcatctacatatgcttcattatatgactcttcctacatacttaaactaaaaacaacaacaacaacagttcggtaaatgttgttctctggggtgggtaagctagcttattccctggagaacagatctacaacgatggtcagtcctctccacagatcctgatgtttgttggcacgcttgtcaagaaatacgcgggtatactaactttgaacttttgcatttagtgcttttttatagttgggacctaatgccctttgttttagatggactgtgcttgtctggaggctcaccctgtaagtggtacattaatcctgatgttcctgaagcaagtgccctcatggctaggtaatattctgctatg

SEQ ID NO: 106612 - DNA, 825 bp, Zea Mays
taatctctagttgtaagactgaatcgtacttattggctacctatttcctaatgaagaaataggggaaaaccctccccgtgaaaaaaaactggcagttaagtggatgcattacggctgtagtacaacattacacggacaaaacctttccgcatccaaaggaaatctgctatttccttaagaacaatgtaatgttttatatatggggatgtcagcaacttttaaaacattatatcatgttcgacttcgaacgcatcgggggaatttctaaacatgcatgtcgttttcatgcttgctcatcaagatagaaatattgggtggtcctcgtacgtgtgatcaccttcattctctgatatacaaaccctgtaaaaaatgatgtatcaagtcttcctaatgaaagtctgtctgacgctcacacagaaagaacttcaattgatccacacgcaaaactgcagcagaccaacggaaaatatgactttatattaaaggttagtaggtgcgtgcctctaggctctagctaagaacagagactaggtacttcttgttaaaactaacgcggagttgatctttctccctttcatttacaaactacttcgttccagcttccagtccaatattataaaaacaagctcgctctttcagatctccaagagaccatcacagcatgctacttaataatcttcccattgaatggtcgtcccaataatggccccaaataattaccattggcgataagctttgatttaataggactcagcaatggacgacataaactgatcagtctattccctgtcaacgatcgagcgcggaggatttttagatgcagac

SEQ ID NO: 106613 - DNA, 607 bp, Zea Mays
ccaaagtagattacattgcttctgatgtggataataatagtcataatgatagtgtggatgatgaattgtctgatcttgatgatgttatggtccttaggaaaggtcgcaaaattcgtcacagaaaaaaactgtgagaaagaaaaaaagactagtaaatctcccaataataggaacatccctattaagtggagaggtcagactgaagggcataccctgaattgttcagaatgattggtgtgatttggaattgtcagggtctgggtaaagaagtgaaaagtgaattcctctgggatattatcaggaaagagaaaattgactttattggtttacaagaaaccaacaagaaagactttgaagattcttggttgaacttcattagtggtaacaggaacttcgtttgggtctggtctccccctaatggtaggtcgggaggtttgctggtggggtttgattctgacatgtttgatgttagagagaaagagttgggtgaatttatgattcggactctggtgattcaaaaagaatcaggatttatttggaattttatcaatgtttatggggctgctcaaaatgatcaaaaacagaaattcttgagtgaattgtcttc

SEQ ID NO: 106614 - DNA, 321 bp, Zea Mays
gtttgatccgtagtcgacgactgagattagcagcaggttacccattggcggccattgaatcgtggccgttggttggatatcgtgggaatcatagtgatctggacacggggaatttggagcgtagattgcgtatcggaccgtcgggatcaagtagcgatccgtttatgtggtcgatctaatcggcgccgttgatttctaatctggcgtctgagattcttggataccccttcggccaccacgttttgcttaagagtccctgttctttttatgaatcaacccgcaatcctggcgccagtagttctgagtcttgagacgttttac

SEQ ID NO: 106615 - DNA, 667 bp, Zea Mays
acgagacatcagctaacttgagtcaagagttacttgcatgatcgagacatcagctaacttgagttaagagttacttgcatgatcgggcaagcatacgaggtaggcatgctaattcttatcagtttgctcttagtgatcagacttctagattttttgtgttgaccatggacaaataatacagagttgtgttcatgtggtttgcttaggcacagacatgtcaaagattagcatggtttattaaacatcttacgataaattgtattaattcatagatttcttaggcatgtactgtaattaaatatagctttgattttgttgtatcccatcttagttgcaagcttctattattgaactgaaattgaggttgacatattttcctttctgaattttgtgtcgcttgccatttggtaaggtctaaatctgaaagcatgaacacggttttcttcctctttttagattactgaatggatgagcaaccgatctataaaagagatataagaatgtatgatagtctatatttttcccactgaattttatgttgccaattttctcaagtatataagtgcaggagattcaaatattagtcagggtgtcttgatacatgttgagccttcgcttcaagttttatgtctagtaacatataaattttttattctagacaaggatc

SEQ ID NO: 106616 - DNA, 495 bp, Zea Mays
attttttgctgaacgtatcttgcacgagcctcgtttgcgatatagttcccggcacatccaatctctgcaaatataatgggacaaataagttaggaaaaacaagataaatacaatgtacaagcaaaaccaacacgttcttttctcaattacttgcactcagatgaccagcaagattgcccaccatttgtttctcggctctagctgcctctattttccttgcctcctatgctctcttctcgtttgtcgccttcaatttcctccgctcaacacgcattaggctgccataacccattgagtcggcgaacctacgcatctcctgtctacgatctttaatgtaggaatcgatgagctgagagttacatcgcatcttctgttccatgagtctcttcgattttattgtatgcatcacctcttctttgtcggcatatctctcccaactacattttctcgtctcctacacaaaaacaataagtaagtacagatgcaacattacaa

SEQ ID NO: 106617 - DNA, 620 bp, Zea Mays
actttcaatgcgctaatgaggctgctaatcacacgattatcatctcttaggatactcacttggcaaaggctctttctcacactataaaatgtttctttaactgatcaaatgggcaagagagtgagaatagactagttgaaatgtatttatacaacgcaattggccaactatctgttaaaataactctatgctaaactcacaggcgttggattacccaatgcctggccgttggatcatctgcctcggtccgacgatactcaatggtcatagtgatctagttgtctcagatatagccatcaagagtgtattataagggtgtatggtctgactaaccatcgtcggaccagtttgaggttctcgaaacctctcaaacctctcagttcaatatttggtcaacatagtctactcctatatgtattcttcctcaggtgtcagccatcacaattggttcttcggcttctctagtccctcggttcaagcctcatcgttcgtccttcatcgctcccgatccatatgcataaatctgcttgacttcaccttcgccatcaccatcgatcatcgtctctatgctccataccggcgtatggtacgccaagacatgttgcacaataccacacttt

SEQ ID NO: 106618 - DNA, 412 bp, Zea Mays
atcagtcttgcaaaaattagagactaaatcagattctgcacccaaagagactaaatcaacaccctgtatgttcctgctcatatctatctactcattcccacatttaatggttgaagcatttcacatgccttattagtcttctatttgttcttaatatactgaagctaccgggttggtcccaagcacaccacaaagggttggagttagctccaataatagatctgtcattgttcccagaactagctcagaaggggagttggctacggactctacaagtgatgctggtgatgtggcacttgttcttcgtaaggtaactataagggttgatcctgctagcgattctagaaaagaaagaaatgatgtggaacctattattcctagagcaaggtcaagactggaaatagcctctgat

SEQ ID NO: 106619 - DNA, 317 bp, Zea Mays
tctcggcttcggtgcttgaggcgcttggcctcgttgatgtcacttggatggtaatatccctgcaggaacagggtgattggcgcgcgccagtctttggtcatgatgaggttaacttgctgtggccttcgatgtcattggttatttgtaggccctctgggctgcggacggctggcgtgccgatgacatggtagaacacgtcggagggcaaggcctcgcctctggctgctgctttggccaacgcatcggcctcctcgttcttggcacggtctacatgttgcaaggtgaagcccttaaattgtctctcaagactgcggaca

SEQ ID NO: 106620 - DNA, 649 bp, Zea Mays
tctaagtgtttgtggttgtggtagtggatgcatatatgtttctgtgaatatgtattggttgtgaatatgtattgtttgtgggatggaacaaaaacaaggagagtttttgacctccctaggatttattatgtctgacggccactcctaagtcatcgaataagtaatatccgacagctacacttacaagacactcacgaagacgaaaaagagagaggggggaagaaagaagaagagcaaaactcgactgcctactgagactaaaaacaactccaaaaccactaggcccaaactaatccaatagagcaccaacaagctctctcactaaataagcgacctgatctgtattcttctgttgatttctgaagatcctgttgtttctttctaaccataagctccaccaaaagtagatcagaagcccgtcgaaatttttcctagattgcctattacagagacctcttagattcctccaccaatcatacaacgactctgatgtctggtttcctcccaggaaagaacagttcccccatatcaatattttgttccacacctctctactgaaagggcaatctttgcataaatgggttaccgtctctagtgctgagttacaaagacaacaaactgggttgcactgccaatgtcttttctgaag

SEQ ID NO: 106621 - DNA, 529 bp, Zea Mays
tagaatttgacctgtttggtctttctgtgaaggatcttgccaccaggacccttctcgctcggtgtgacagccccgggccgctctacacactccgcctgcctgcttcccctacatcgacttctgccccacatgtccttgccgcagccgcctcttctgtgacttggcatcgtcgtcttggtcaccccggccgcgatgtgatgtccaagctctccagcagcacctctggttcaggttgtcggggatcttttgagcacctttgtcatgcttgtcagttaggtcgccatgttaggctcccattccccacctcctcttctagaacagcagacacttttgatctgatacattgtgatgtatggacatctcctgtaatcagcatttctggatgtaagaattatttactcattcttgctgacttctcgcattatctgtggacttttcctttacgtcagaagtccgacacttatcccaccctgtctcacttcttcgcctgggtctccactcagtttgatcgcaccatccgaagcatcca

SEQ ID NO: 106622 - DNA, 485 bp, Zea Mays
gccagggtgagatccactgctagggtatctcatgaaggagaggagaccgaaaccgccgagacaacaccaatttcagaagtgatgaagcggttgggtctggttgtgtcagaagaagttgctgtcgaaggtgcctccaataccgaagctgaatagattgtagctggaggcgaaagtgacaatgaaagtgaagaagaaaacagcatcctgaatccaacaaagcctagtcacattgagtttgggaagtctacagtaacagaggatgacatggttatgatgaggaaacttggttattttggggaggttgagagcaagcttgtccggtttgctggagaggagattattctggaaccaaaagaggacaaagttgtcattttcaagagcttcttcagagtaggacttcgattccccttaaatgacatgataggggaagttttaaagaactttgagatataccttcatcaattgacacccaattgtcacacccg

SEQ ID NO: 106623 - DNA, 354 bp, Zea Mays
ccccgggccactctataaatataacgatttactactcgtcttttaatttttcgcactttaggggtactaatatttaaaacaatccagtggaactgtggcagatagggaaagggaatcagacattcgggaataattactcacaatagaggagaatcacaggcacatgacagcaagaagtcagcacacagcgctcgccgctcaggtggtcgctgcccattggccacggaggcgctccgccctcgcccataaataagaaaagaaagggaatcgggttgaggaatttgtatagtttgagagaagatgtaatggcaggggcagatttgggcggtggcgcggcgccaatgcaagccgcgc

SEQ ID NO: 106624 - DNA, 816 bp, Zea Mays
aatcgttgcaatcccttgccacgtccaaactcgagcctctggccaagctcgagaccaaaacagagagaggatcaagcgatgtttcgccgagtgagatagatgtggtcgtcgcacctccaattcgtcaacgtcaccgatctgtgaccttggtgtggcggagggagttcgtcagggtgcacgtggcatgtacgaggtcatcggagaggagaatcgtgtggtgctccgaatgaattgctcgtcgaagcaagcacatcaccacagaaacactagacgtcggtgccggagttattttgcggcacgattgaaggtaatgaggggtatgttgatttcacctaagttctctctatgtgcggtatccatccataggtgatttggggtactagggtgctctggcgcctatcggtgggggcgctccaccgcggggatcctggcgccgccgtttgtgcggtctgggggtgagagacgatggagctaccgtcactcatgggaagaacaactcagattaactcgagccatactggttcggctcaaggcacggttgccgttgggtcatacatcaatggtggggaaatcataccgtacacgttcggttgtttcatccgagtcgtctacattgtttgggacggttgagatcagagctcggttatttaaatcgtgaccgtagagactagatcggatggtccgcattgggtatctgttcacaatctttaggctccgatctggcgcgttcgtttctaatcgggcggttgataaaccaccttaccccttcgtccgcgccatcttgtaaaagagcccccgaggaaagtcaaaatcaac

SEQ ID NO: 106625 - DNA, 360 bp, Zea Mays
gggtctcttctgcaaaccggtaaagtgaaggggtacgggcgaaactgagccgcccgatcagaaacggagggctcagattagatctgggttccgcatgaaccggtacgcaatgcaggccctcggatccaagatccatggccagggaacacacaccctcacatccatccgatcccgatcggatggctctcgcgaatttggccgaatcgttatctcacttctaatcaggaccgttcgccgtgcatccaacggcgcccggacaccccccttctcctcctaccccacgacggcggcgcataccacccactcggcggagcatcgccggaggaacacaatccccggcaatatcgtaccaaattcccg

SEQ ID NO: 106626 - DNA, 315 bp, Zea Mays
ctatattccacgaatgctctaggtcttcgccagatgatgtggcgagcctgtaagcatttggcgaggtatggcccttcccactttggctcatgcttgccccgagactctgttctgatggttcttgtgagtactaggtctccttctttgaattctcttgggacgatattattgtcatgtcatgccttagtctgtgcttgatacttgtttagggcctgcacggcgagcacacagtctccatcgataagatctttggaagttgattcgtcgatgtcagggatggctaattggtttgttcgtggggatccgtgctttaac

SEQ ID NO: 106627 - DNA, 564 bp, Zea Mays
gtggacatgaacattgtctaagtatgccttgaatagaggggttataggaaatctgttatcacaaaaggtcattatctagcccactaatgtcttcatccactagttgtactctaataccccctcgtgtgaatacaatgccattgacatgtgggaagcatcatttttagtttaaaagttgatctattgctttgaattctttatattcctactttttagcaactgtatggtggaaaaaggtgacatacaaccttgacctatgtttggacagttctctcacgcaatttgtctaaatttcacatggtctttattatattttgagaaatgatgtggcataatgatgtgtggtgttttacttgactagacataaatgctatcaaggtatgccttgaatagaggggattataggaaacctggtaacacaaaaggtcattagctagcccaataatgtcttcatccattggttgtactctaaaacctactcatgtgaatacaatgccctcaatatcatagaaacgacatttgaggtttaaaaggtgatatattgttttgaattctttatattcc

SEQ ID NO: 106628 - DNA, 569 bp, Zea Mays
ctgaattactgttgctgctgctgctgctgctgctgtttctacttcttgctcaagaaaattgattgtaaattctttcctcctagttccttgcagtaacaggtgatccatgctagtgaaaatgtgcaaaagcccctctatgcttctgagtaaagttgtatttgtaatttcataggccacaacataagtgccatgggcatggatgtgttctccagcatgcccgtttcatgacacatttttttttttcatttgggcgtgagaggtacaaatgtcttcgtttggttattggtaagaacaacctagtgcagccttatccgtacattaagaccagattaatttggcaaaaaccatggcaaaaaaacaaaccttcctaatactagtactctcttatggaaaatctgcagactaggacggtattgatataaattagttggaaccttcaaatagtagcatatagatacatgagttcagtgccagaagaattactgaaattagttaatcatgttcacttttacaaatcgaaggctggttcagaacatggccctgctgttctgtataatgcatccttttca

SEQ ID NO: 106629 - DNA, 416 bp, Zea Mays
atgaagaattagatagctatggtggctaatcggaggcaggagcgggtgctctggcttcgtgataacccaacggagctagcggtatgctcaatttataggacccgagggtggtggctcttgaatttggaatggcacgctggcggacggagaggaggaagagcactggcgcaagagatgcgtggctttcaccgtggtaggcttaccagcgacgaaccagctatctagagcggcttactgcgacgtggtgaagcttcaaggcacgtggcgccccatcggtaggcggccaactccggcgaacttatctggaccggtcgtaaggcaagggggtacggcggccaaccccgagtctcatccgcggcgaagatcttttcaccttgtagcattatctgggcaccaatgagcacgaatcacctagg

SEQ ID NO: 106630 - DNA, 1108 bp, Zea Mays
attcgctctgattcagcctaagattcagttccctttttctttattttgtttcatgtttcttttggttcatatggatttgtgtagtgcaactattgaaacggacaacacacaagctccaatttctcagggtgagtttgcttgtagcacttatttgtttggtgattggatcccagatttgtcagtcaagtcattagacctggggctgctacatgttcacttagtgaagaatcatctagattaaacttagattataaatctttttgtgctttacaagggagcttagactaaaaggttcttaaattagttgttggaagtaatattttctttcaacagaatagcagtggcatcctttcagtcctagcgcttggaactatgtgcaagtgaacatgtaaatcacgaccaaagaccatccctggccctgattggcactttattcggtcatccaaactcgactgcaacgtcataaaattagaaggcataattaatgcattttagtgggaattggttccggaagctcacagtatgttctcatccagctcagctgtgccagctacagtatacatatgtgttactttctataataaagaatatttctgactgtagtgcttttctgcaacgtcataaaattagaaggcatagtatatgatttgacattgttaattgtccacaaaaacaatagtgctttttttctcagatctgactgtattgtcatatgcacactgttgtatgccatcttaatttgtgttgcctgggaactaatagtaatgtttctaaatctgttttctttttatagcaaccaattttttttgctcttattgctttaccgagaacttagataacatgtatttctatactactcctattaatttgtttgcttttctgctgcctatcaaatcctgatatttgtgtgtttgcaaacttacttggttgtttaattcattgctattgattgtcaggtattgtgcttgtataattacattttcatctggtttctattgcatttgtagcagattagttgtagtcattgtcctgcaagcatatagtccttgggaagtatatgtccagtcgagttttgcgttggctatgcgtgatgtgatttaggtttcct

SEQ ID NO: 106631 - DNA, 337 bp, Zea Mays
agcaaaggtgcctaaggcacgaccttccggggccgacgatgtacccgtgaacaccgtccaggttggaacggagccctcccaggttacctgtatagcggggaacctgggggacaaataggaaagcgcgctcgtcgcatttcactgggcaaatgtggatgcattcgcctaggaaccgtcacagatgcctgggatccccagggatgtgatcgagcacgagctaaagattgaccgtgacgccaagccggtccgacaaaagccacgcaagcagtccatcgagcggcaagccttcatccatgaggagatccgcaagctgctgcatactggcttcatcgaggag

SEQ ID NO: 106632 - DNA, 450 bp, Zea Mays
gtctcggattgcgataataataggcaagccgacgtgcatgttatttagcgggtatgtcattgctctagttagctgaattgttagatagtttggttaagctcgtaattacgataaaatgcttgttgtagtctagatgcgcatggttatggtcgtgagtaaaaattagtagtgctcatgtggtgtctaagctaaaatgcgaactagtgggtgaaaagcgtttcgatatacatatatgccggatttgatgattgtggtgaatgcgttgattaattgtgtatggtagttctagcgcacgaaataacttgtataaaaatttgtaagtctacttgttagtcctcattttattaatttaactctaacgaatggtaaagtgttaaaataattcaagtctctaaagcgcggcaattcttgaattatatagaagctgaaaatttattaattgcagttttg

SEQ ID NO: 106633 - DNA, 368 bp, Zea Mays
ggggtttctttgccgttttgcccactgtttagcagcagcgcgaacgcgcttgagcttacctgcgagccgggcagccgcgtcagaacagggaaaatcctggtgccatgcagggaggacctcagggaggaagagagggtgatgcagccaggcgttttcgaatctgaaaatttgggatttggggatggaggtagacatggagaccagcagtggtttatggtcggatgtttgcctgggtagggtggtgagagaggtggaggggaatgaggaggtgtgggagttgttcacaaaggctcgatccaggcgagcgagcgtgggaacagaacgcatgttggaccaggtgaagaggcagtcctgtagctggagttcgg

SEQ ID NO: 106634 - DNA, 463 bp, Zea Mays
cacacatacgcgtggagctgagacacaactacctgcctcggtaacacgcagcttattgtgcagcacatgtgcgcggcattgagacacaactgcccacctcgataacggacagcttactatgcggtcattcgagcatgcacgaccagtctaaagctgcacatgccttgcgctagcaatgcatgcctcagccacccgcattaaatgtaggcaggcaagcacgctaccagccgaaggttggtgccacgcgcccacgggccatgtggcaacactagacctctacctgagcggagagcgaggaccaagagcgcatgttggcttgaagagttgggcatccccttgccgagggtctagatagtacatgtggaggtccacgacccacctacgggggtatgtactcatggtagcagcccctgagtattttcacccttgggacatgtggtggcaccgggcctgttcataagcg

SEQ ID NO: 106635 - DNA, 369 bp, Zea Mays
gcgtgagcatgttgcaccggtttgagtcgttgccgacttaagccgattgctccgttagcagggcatagtggtcaccatgagttaagtaagcgtgagcatgtttcaccggtttaagtcgttgccgacttaagccgattgctctgttagcagggcatagtggtcaccccgagttaagtaagaatgcaagtcaatcatgaacaaactgcgtatctttgaagcccttttttattgatgacatatttccattttacagagtacatcgtcgtctcgatagcttttgaaatacagctagggataaaatttcctgaggtgttctatattccaggagttctcgacttatgtgtcgtccatctgagtgagacgatatga

SEQ ID NO: 106636 - DNA, 366 bp, Zea Mays
gtgaccgcccgcgcctagctcgttccatcggcaaaccctacgaatcaccatctacggccggagttgggagtgacatagtgtgattcccttcgtcaacgaccatgctcctatgctgtctaatactccggtaaggccctccttctcttatataccttctctagtttaattcgcgtcaaattgtactcggattagggtgccgcggcgtcagtgattgctcgtcgttgtttctcacaacatagattcgcgcctcaccgtggctcagcgtcaccgcgagccgattcgtaatatgatcacttccctggaacccgcactctccctactacgaatagcaactagctaatttttgaataaggcactagggcgtcg

SEQ ID NO: 106637 - DNA, 469 bp, Zea Mays
aattatttgagaagttgtacctatacttcatcaccataagtcgtgttacgacctaatgtatggtcacgttggtgccctcgtgcacttttgcttccgcggcttctagcaacttgtaaaactgttgcacttcctccgacgggggtcgatcggtctccattgctagatactcatgtcggatgtcatctaacatctcctccgttcgccctacgtcctcgtttgtattcgactccggaggagcatccacctctccatgctcgccccacactagatagtctagcttaaagccatatttgcaaataagaatggagaggtcaaacttgtccaatcggatcatgtttcgacacctagtacatgggcatttcgccacacggggctccccaacaaatgcacacgcaacgaattcgtcagcaaccttaacccatgcatcagagtgccacagaatgtcactgttgaatccatcatacatatc

SEQ ID NO: 106638 - DNA, 365 bp, Zea Mays
ttgggtgttgtgatgagctagcggccattgaaaaattggtaggagaaaacagaaaagagttgtatcctaattgcaagaaatatacacagctgcgtttcctagttagattgcttcacatcaaactccttggaggatggactgatagatctatgaacctgctactagatctacttaatgatgcactccccgagggttcaacattacctaagagcttttatgaagctaagaaattggtgaaatctgtaggaattggatacaatagtattcattcatgtgaaaatgattgtattctttattcgaaggataatgcaaaattgaattcatgtccaaaatgtaaggtttcacgttggaaatcaacaaggaag

SEQ ID NO: 106639 - DNA, 550 bp, Zea Mays
ttcttaggaatgatggcgtgtacccaagttcatgggacgatgatggattttgccttccaacattgtgatgatcagctctctctatgacatgctgatattgcagtgtgaaacttagaagaataatgatagcttggtgcttggacgtgcttgtgagaataaagggagaaggacagaccattcagctaccatgcagatgagccgtggatgtcaaataaatttgcgagttaagaagaggcagtcagcaaccaggttgctgtccacacacgtacaagcatgcagaagagtatcaaccatccaaagagttccattaggccaggctattaatagaaggagtgctacaacttcccgttgtgtgttcccatttattttatcaaaactgaaaacaccactagtgctatatgtatccatgtaatagatgatgggtggatcatttggctgccaattcagaaatacaaactctttgagttcattcaacgtgagtcttgagagacttgcagacttgttctttcaattcccgagggagttgtagaacaccgaactgcggttcacc

SEQ ID NO: 106640 - DNA, 822 bp, Zea Mays
tagagatggggataaggatgggaggactcacaggtgccgatgcgcgacttgtgctccctaaagggcgtggatgtgccgatgcgaagatcaacaaggagacgacgaggaggaagccccccccccctcaggctatgttcgtttaagcacttcccggccgagaacagggacaaaaccccgtggacctccctcgtctggaaagaagcccagcccatgaaaaaacgtgtattcggttaacccccgtgtggaccgtatcccgatatttcctcttcgttccataccgggaaccacgcccggtccctgcggggtggaaaatatcccacacgaaggatcgctgaggcatcacaaatgaagggcacgaggcgacggtggcggcgacggctctccggcgtcgatctaccctgcgtccatgtttttataggtctgcttcttcgtccctagtatatttaatcttgcaatacgttgggcggtcggtcctttgcagcacagttggagctttccgtccgcacgtcagctcgtccgatgaggtcgctccgttggcgtccaacgagggagctttctattcccttgcagggcagcaggtgaggtcactgcgtcttattcgttgtcgtgtgacctgattgcctctcctctcctgactgcctaggcgaaatctttgtcatgttctcaccatgtttatctctgcctctgcgctatgcctgctttatcgtcgccgccccgagaagcccttccatgtgcatgtcgtcaagcagcaaaaaaacattaatgacgagcaagactgtggactgctactaaaattcatcaggtcaccgcatctgaaatttt

SEQ ID NO: 106641 - DNA, 417 bp, Zea Mays
ccccattgtgggatatccactgccattgccatataaaccgtcatgctggtaaggacatgctgaactaggattcttctccctgctttgtcaataagtctgccttccaacttgaaagctgattagcaaatctatcagtaaaaggttggaagtgctgcctagataacttgtgcaatgatagaggaagattcaaataacggcaagggaatgaagatattccacaaggcatcaaaccttgggtctccaccatatcctcaattgaacatctgataggaatgacattagatttctggggattattgtgcagcccagaggcatccccaaaaagctgaagaatgccaagagtgatagataaatctgctgttgttgggtgaacaaaaagggcaacatcatcaacatataaggagatccgatggagct

SEQ ID NO: 106642 - DNA, 327 bp, Zea Mays
cctccgtgagccggccaccaaggcctaccctctctggccatcctctgctcaatctagccccacaatcatcttccccgagggcccgtagaaccttcccgagcttgagccagagctctaccatgccagagaagggagcttgacctcgccgaaatcctcacgcccgcaggtgaatgtggaccgagctccacagtttgtcgtcgtccaattacttggaccagcaactccaccatcaccccttgaagctccccggccagcccgaccaaatgctaccgcctccggctagcctaaatcgaagccgttgtcgagctccaccgcctggatacgtgg

SEQ ID NO: 106643 - DNA, 409 bp, Zea Mays
gagcaatcggcttaagtcggcaacgacttaagacggtgcaacatgctcgcgcttacttaaactcggggtgaccactatgccctgctaacggagcaatcggcttaagtcggcagcgacttaagacggtgcaacatgctcgcgcttacttaactcgaggtgaccactatgccctgctaacggagcaatcggcttaagtcggcaacgacttaagacggtgcaacatgacttacttaactcagggtgaccactatgccctgttaacgaagcaatcggcttaagtcggcaacgacttaagacggtgcaacatgctcgcgcttacttaacttgggactactactatgccctattaacaaaagcaatcgatttaagtcagcaacgacttaaggcgatttcacatgcttacgattac

SEQ ID NO: 106644 - DNA, 746 bp, Zea Mays
ctcaagccctgacgccccgaaataggtttgtggaagtagaatacaattaatgcacatctcggctggttaaagtcggtcccacgtttgatcaattattatccaagtacgtcaacaaaaggtcgttccccatgaccggccatcaaagtgacctctttcgagattggagagggttgaggtggaaattagttcatttccaccttgattatcttgtatgtttagggggtgggggaggactcgagctctttcaagaaatcagatcagttatgttgcactatggttgctacatcaagtcgagatggttacttctagtatggacgacaaccttggtcctacacaaataaatggacatgtgtcatctatatggcctcccttcttggcatggatacattatactttgtgcttcctcatctatacctacaccactattgatgactctcacctgcaacgatgttcccacttgtcaatgattgcacatttgtggtttgcctagtggtgcttgagctcaaccaacatatatcattctttcgtcgtgtgttgcacatcaactgcattcatcacaccatggtatacagatgtgactgacatcatgagcacatgcatagattggttggttgaggctatccgtagtgtaggttactccatatccttactctataccactattcatagtctagtcatcaagattccttactctatattacaatccttcacactcatgtccctctacatattccctctatatcaac

SEQ ID NO: 106645 - DNA, 923 bp, Zea Mays
gccgtcggccatctcttcgcgggaactcgccccaaacggagatgactgactaaatcaagcgttgcgctagcatccctgatcccaagcgaacctagttcatcccctaattgagcaagtctgacccagaatcccctctgctcaaaatgacaacaagtacagagggaagattgagctgttcccggcgactaggtatggtatcgttcaatttctaagtactaggagcatcactacaccctaaggaagctagaacaaatggtaattgggctggaaatacctcaggtgacgctggccacggaagagctatccacggcggcacggagaaccaatttggggaaaaacctgaattaaaatgctatggtggacgatcggaggcgagggagggtgctctggcttcgtgacaacctaacggagctaacgacacactcaatttatagtgtccgagagcggtggctccgatttttgaaagggaagggcggtcgaagagagggggcgagtcaccggcgcaggttatcgtggctttcaccgtggcaaagcctccggtgatggacggacttacagctatggttcactgcgacgtgttaaagctactaggcatgtggcgcacagatggtaagcggccaacgccacaaaggatcatctcgtccggccgtagaccaagtgggtacgatgactgggcggcttgatccatcccccttttagatcttttacccctccatgactatcccctcatcagagagcacgaatcgtagcaccggcgcagatcacgatgcgcggtcaccggcggcgaggtgggatgaatctgaagatcttttcgtgcattgtaccatggccatcttcttcagtcgttctgacagcccgagttgaggaacaattttctccaatttttatgtgatagcccactaatcctcctgtatcaaagttat

SEQ ID NO: 106646 - DNA, 516 bp, Zea Mays
aggagatcatgatcatgagagcatgcgcaatgggtgagagaaaggagacaaggagtgtgtcagtattggagttgagtgcaattaccgcgggggcaggggtaacgctggtggtgctgcaaggtgtaggagcgagtcgagcaagagcaaagagggcactgaaggtaggatcatgcctagacactcatcttcgagaaagctaggcttgcacgatttggtggtgcaaatgagcatggcaatgggtgtggcaccgcgtcaacaacgcagcgtaggtaagcatgggatggtagattgatcacggtgcaacacgacgcaggtgaggtgtgcacatgcatggcaatggggtaaggacggtgtcatgcagggcgaggggtggactgggatggtatagtaatacaattttttggagctgaatgtgcaatttactagtacgaggatgggaacgagaactcataagtttagggagccgagtgtgcaacttacaagtactgggatcaggttgagaccccttaagcctgc

SEQ ID NO: 106647 - DNA, 412 bp, Zea Mays
tttgtatttatgctatcgtgggaatgaaaatgagaaacaagtattctacatcttcttcacgcatttattgctaataggagtgtttgggatctagatttaagatctgaatgatgctattacataacatatccaacctctcgtccacgcatgggccaagcccatcgttcacctcctccctccccacgccgaaggccacatattgcacactccctccctctaagcttggaccacaattaggccaaggtcatcacactaagatccctcctccactcccctataggcttgggtaacgattaggctaaggtcatcaccctaagaccacaagacatccccacatatcactccctcattaggtcgttgcctcctagtctcacctctgcctagaccaagtggcccaaagtcccacttggcc

SEQ ID NO: 106648 - DNA, 851 bp, Zea Mays
aggatcttgaagggtccaataaagtgaggggacaacttctctttaactttaaacctcctcataccccagattggtgacaccttcagatacacatgatcaccttccttaaactctaactgccttctccgggtatcttctgccttgactgcatagttctcaagttctcccatatcaactgtacttgttcttctgcctcttgtataatctttggcccaaagaactgcctttcaccagtttgatcccaatacagagaagttctgcactttctaccatataaagcttcaaacgaggacatctttaaactggcctggtaactgttattgtaagagaactccgcatagggtaaactcttatcccaactgccaccatgtttaagagcacaagctcttaacatatcttctagtacttggttggttctcatggtctgcccatcagtttggggatggtaggccgaggtgatgttgaacttcatgtctaagcactcgtgcaacttctgccaaaaccaagaagtgaactgggatccccggtctgacacaatcttcttaggcactccatgtaaacaaactatccatgccatgtacaactttgctagcctggcacctgaatatgtggtcttcactggaataatgtaggccactttagttagcctgtccacaatcacccaaataaagtcatatccagtagatgtgcgaggcaaacccactatgaagtccataccaatttcttctcacttccattcatgtatcttaagcgggtgtagaaaaccggcaggcctctgatgttcagctttcaccttctggcaaacatcacacaatgctacatgtgaagcaacatctctatttagaccgtac

SEQ ID NO: 106649 - DNA, 407 bp, Zea Mays
cttgggaggttctgtcacaagggcagacggtctgcatgaaaattttggctgctacaactttgcatatcgcaaggatacgaaggctccagttcttagctactgcaccaaatggccaaccggctggaaaggtgaatggttttatatcaaggccgatgagaagaagagggggaaactaatgacgatggtcatgtgcccgctgactttaagcttcgaaatgaccaaacccctgtgtaacatgcagctagggtcagcatgccagccgaccaaggtagaattcagggtagtggctgaacagatcagcaccagggacttggtgcaggaatacctagccaactggatgtacccaacgtccagtgattgggtgatgccgaagatgaagggaacaaagaaaaaatatgaactcgttc

SEQ ID NO: 106650 - DNA, 1216 bp, Zea Mays
aaatgaatagccaagtgcagcatcacatcaaagaaaggaggaaatattttctcaagtttgcacaaaatgattgggatttcaactttcattctttgtaaaacatccaacttcaatgtcttagcacataactactgaaagaaaatacctaattcagcaagtgcttcatatatgtccttattcatgattcctctaatagcaacaggtaaaattctttgaagaaggatatgacaatcatgagttttcaatgcttggaggttgcatccataagtactaaaacatgttgctaagttagaaacatagccatcagggaatttcacacttctcaaaaagtcacaaaaagcaaccttttgtgttttattcattgtgtatggtgcatgcggaacactgtatgagtccccattatgctttaagtgtaaatgtttcccctattcccatgtcctccaaatcaagcctagcattaatggtgtcctttgtctttccaacaatgccaataaatataccaagaaagtactcacatatattttttttcaatgtgcattacatcaagattgtggtgcaacttcaaacttgaccaatatggcaaatcccatagacatgatcttcgcttccaacattgaccttctactttcctctttctctttttgcttttagtatgttttcctggtcttacatcttttaccatctccaattgttggagcaactcatctatgctaaattcctctgctagcttctcacgttgttcactatgaccatcaaaagttttatttctcctccaaagatgatcttttggaaggaaacgtcgatgataaacatagcatatcttgttccttattcttttggagcaaggatttttgtcacaatgcacacaagcgtaatagccttttgtgattcggcctaataatgtgcttagagctggatagtcgtgaatgcaccatataactgcagaatgtagttcaaaattgtttccactcaatgcatcccaagtagtgacacctttccaaagctccaacaactcttcaataagtggttccataaagacatcaaaatcctttcctgggcattctgggccaggaatgaggagacccataatgaagttggattgttccatacattcccatggaggaaagttgtacggtataaggaatattggccacatgctatatgatgagctcatttttccaaaaggattgaaaccatcactagcgagtccaagcct

SEQ ID NO: 106651 - DNA, 421 bp, Zea Mays
catccgaaaaaagcttgaattcatgcttccagttgggtccaccgtgattccaaaggttgaagaaagctctgaattccttacgctcaatgcatccagagttgtaaatatggaaacccacagccatcgaagaaaccgaaaaccgaaaaccccggtcagccagctgaagcacctcaaagcccgcggcgaacccaccaagggcagcctgaagaagatgaccaaccgagaccgaattcaacttgaagatgcatctgccaaaagagaccaccaaccagaaggacgaccgaagactggggcgagcagagcaaactgaagatgccaggagacccctgagggagtcctcgaaggccagccccggccgaaagtccaggagagagaagtccatggttgaagaacgagaagaccggggggaggaaggagcgag

SEQ ID NO: 106652 - DNA, 339 bp, Zea Mays
ctggttggatacgcgcttagatcgcgtctctatggatgcaagaaaagatgtataatttggctatgattgcaccagcacatccaggctctgtttgttccgtacagataagcaaacacaggatgaggtctggtcaatgcatgtgaagagcctgattgatctcaggcaggtaaccaaacatgaggtatatgaatcagaccatcaggaaaagaaattaaaaggaaaaaactaatccccacggcaacaagacaaccaaccagttcaaccctgcaactgcaggggtattattgtcgcaggctcgcctataaatccctcttgcagccacagctattgacagaacgc

SEQ ID NO: 106653 - DNA, 555 bp, Zea Mays
aaaacatataaaaacaatcttatggagcaataaaaattctgctcatatgcaacagccaattaatgtataagctggctctttcgtgcgtactggccctaaatgacttacctacttaacaatgaatgtacaacgagatgtttatggcataacacgttgacgtatatagcataattttgtgaacaaataagcataacacggtgttgtttagtgcataaacttgtgagacgttgaagattataaatttgtgtatccgtttaacaatgaatttatgctgatttgttttttgatatatgaaacaattgagttactataaggtgacactgatttacgatacaatttgtgtaaatatgcaaatgaaggagttagcggtagaggacttaccagtgtgtggaggggaatgaggaccgaccgattttgggtccctctgcaatggagaagaccaaggcgacggtggctcggtcaatgcgtaggagacgctgaagttgacggcgggttagactctgcgttggagacagtgaaggcgacgacgggtagaatctctagggttcggccgcc

SEQ ID NO: 106654 - DNA, 397 bp, Zea Mays
ctggcggctaccagcctggatttgttctcttcggtggcgtggatgaagagattttaggatgtattcgtgatcatgttggggcaaaaattgtgagcacgttgtcgaagagtatcggatttccgaagctagaaaaagacattagccgttataggagacaacatatcacatgcaacttattctactcaaattttaaggtatgatttttctaccgtttttcctttgtcgggttagttttagcatttcatcaatgaaggtctaactcaacttcgtcttttgacacagagtttactactgagcaagactctaaaaatgcagcaagatgatgaagatagaaaaaacgagtttgttatcagtggcttggagaagaagattgaagaacttgaaaattctttgaagg

SEQ ID NO: 106655 - DNA, 334 bp, Zea Mays
ggaagaagaacggaagaaatggacgaatattattctgttattcgacaactctattaccagcatcccatcaagtatttgtacaacaatatatttgacacggcccacggcccattagtcaagtcatccattcggctcctgtcacccgcgtattaggcctacgcacgcggcggcccatccttccaacagcagcttcattcgttcctgcgcttgccgattggtgttcagagtgtactgaagccgatggtatgctgacacttggcttctctataaatagctctgaccctagcttttctaaatgagtagctcctcggtagaagctagtgttttcttgcaa

SEQ ID NO: 106656 - DNA, 339 bp, Zea Mays
gtgatcgtgacagcaaccgcatgcaggagagccgtggacctggtccaggcagaggcagctaggggcattctttcccagtggcagtaggacagcagtaggacagcaggaggccggaaggtgctggtgttggtgcaagtgaactagtagtgaagtgagcaggtgcaaaggtggtgtgcgttaatgaaggggttcggtcatagtacgtaccttacccaccagtcaccaacaacaagaggtaggaagtgcatcctccactgctcctgcctgctagcagagttcgctactagtcgcactccaacggactgctgcatacctgctgaggcctgcactggcactgca

SEQ ID NO: 106657 - DNA, 328 bp, Zea Mays
tggacccgtttccaatcggttctcgagttaaacccgcaggttttgctaacaaatcccgctagaaacccggaaccctggggccggacaatgcacatgacaattatagtgttcaacatatgccccctgcattttggtgaaggttgacgagcaaaaagaatatgcactaagcctgattcaagtaaccggcttttcaatccaatagggtgatcattcaatagagctctaatgcataaaggatgtttcagattgcatctttctcggccatgaccatctgatcaaaggatcaaaatgtatagaatggaggtgctcccaagcttgaataggcaaa

SEQ ID NO: 106658 - DNA, 530 bp, Zea Mays
accagccttaataaggcttgccccaaggacccgtatccacttccacgcatagatcaaatcgttgactctacctccgggtgcgacctcttgtccttcttagatgcttactctggtttccatcagatcgagatgtctagggaagataggaagcatacagcttttgtaacagtggatgggctttattgttatgttgtaatgccctacggtctgaagaacgccttgccaacatttgtacgggcgatgagtaagaccttcggggacctgattagggacaggatagagatatacgtcgatgacatcatggtcaagactaagagagggtcgactctagtggaagacttgaccctggtctttgacaagctgcgggcaacgcgcacgaagctgaactcggacaagtgcgtctttggtgtctctgctgagaagttgttgggattcctggtttcgcactggggcattgaaacaaacccggagaagatcaaggcaattgaggcaatgaggcctccggcccggatcaaggacgtccagaagct

SEQ ID NO: 106659 - DNA, 371 bp, Zea Mays
gtatccatcacactacagattggggatcgaataaaggacctccttcaccatcagataagactacagattggggatccatagaacaaattgttttcttttccactcaactcggttcttccaggcaacagattcatatccatacaagagaccactgtggtagaacaaattgttttcttttccactcaactatgttcttccaggcaacagatccatatctgctgcccctaccaaagaagatccagtttatccagcgatagagatgaaccagccaacaaagaataaatcgggcatactctgttcttctaggcaaactaggctaaaaaagaaccagcctacaaagaataaatcggactccaaaataatcagcctag

SEQ ID NO: 106660 - DNA, 1613 bp, Zea Mays
ccttgcagaacatgttgatagagaaactctgaatcaactcgtgttgaaaaattgctgggggtttggcatcctgagcaactccaggaagggaccacttatgctctacaggtggcctaactgcttgtctttccctttttgcaggctttattttatctgtggcaggtgatttttcaccagttaggtttgaagtaaaaccacctgggagctttggtgcaaaaaggcttgccatagcaccaaatggattagcgctcggtacaggatttccttcattttctgaaagagtgtgttcaaataccgcctgcattgcaacaaagcaaaccatcaacctgctatgcgatcctagaggctgtcaaaattataaaaaacactaacattttcggattacctctatttcccgcacagctctaggaatatcatcaatttcccccaccagatataaagtggcatttgcagggtagtaccaacgctcgtgaaatctgcggatcttatcaggatcccatttatgtatttgctcttcaagtccaataggaaatctgttgctcagtttgttttctgagtgcagatgttgcaacaactgcagcaaacaaattataattaacataccaatatggcgccctcattcattaatcgatttagcacgagtcttcagaagcaataaggatatagcccgtctcaaatgaagtcacatacggataaaacaaaggacactaggtcggtgcaaacagttcacttgcctggcaatcaacccgatactctattgtgttcatcatctggagctcagaaagaattgctcttctctccttctcaacacgagatgaagaaaactttggatgaaaagctatctggaaaaatagatcggcaaatttgttatattctgtgtcacaatacaaaggatatgttataaagatttccgaacaccttggcaacattgacctaaaatcccaggtactgattggacatgcagaatttcaaataatcataaagatgaccaaaactgacatattccatatgatcgctccaaaaaagaatgctatttagaaacactttacctcactcaatgcatccagcacaaaaggaagtaagtcttcaccatattcctgcaggtggaagacaagcttataagatcataagttctaagaattataatttcagtcaacaaatacattcagtccatttacgtatgtgttttgtccaaggacaactaaacaagggaacaattttgggcttcaaaaaatacaaattgtcataaagtttatttctaaattgaaaatggacactgataaatgccacaaccacaaagaactgaataaagacagaaagtaaaaacctttgttttagttggagagtggatatggaacaccgtatgatggaagtcggtatatgcattagacctcgcaccggtccccaaaattttttcacgttttttactgccaagaaacgcaacatgttcaatcatatgtgcaattccctgctcgtcctcctcctcatcaattgatccaacatgaacttccatgtgagcctcgaatctgcaaaatagctagttgaaaccataatatacgaactccacatatatcatagcaatgtttggtcgctttacagttgcttgatttatt

SEQ ID NO: 106661 - DNA, 319 bp, Zea Mays
gcggtcgacgccgatgaagcggtcgcaccaccactcgtcgagcttcttagtccaggctccttgtctcctctccctttccctcaggcctcttcagggtgctgtgacgcttctcgcgtggcactggaggccaccgaggtcgaggctgagctacttcgcacctagctttctgaagtcgatggccatgtcattggtaaggaagttgccctccaacctattcttggcttcctcgtctcttcttcttaccttgtttgtcttttctggtagccttgggggctaagctagaaaaattatgtcatcgcatgggccagcttctggacta

SEQ ID NO: 106662 - DNA, 460 bp, Zea Mays
gcagtctatttataggggcgggaagcaaccgctcatctcctaccatggtcactgaacagtcgcaagtattcaataagccattcaaactgcttggaaacaagtcaggtggcagacgccgtctcacgtaacacgacaccattgggactgaggtcaactacttggacgatatgattacgccccgcggtcacgtcaagttactactcaagggcagtttgctaaacgctcagtgcaccaagccgtcccttggctacacccattggggggacgtccaggaattttcaatagattttcccaagcagccacacccatacagtatacgcaatgaatgtatcaagacagaaggaagatatcgatagagatcagaggatagccaaaaatagctactgaagtacaagtctaatcaacagaagcattaaagcacgaagtgaaatgaagaccagccaagagccatctaccggac

SEQ ID NO: 106663 - DNA, 481 bp, Zea Mays
gagacggtgatgacaggaagagcacctctggcgctgtcttcttccttggacagagcccggtcaattagcaatcccagaagctgcgtgtggtggcactatcgtcgtgcgaggcagaatacattgctagcaccaccgcggcgtgtcagggagtgtggctatcacgcctactggcagatttgttgaacacaaaggtcatcgtgtcgctgctctacaccgacaactagtctatgctcacccttgccaaaaacccggtgctacatgatcgtagcaaacacatcgacattcagtttcatttcatccgggactgcatcaacaatggcattttggtggtagatttcatcaggaccggtgaccagctagcagatttattcacaaagccactcccacgcgcacgactccaggagctacgcatccatagtggtgtctttagtatagaaccaacacaacaagattaaggcggagattgacaaggataatcttg

SEQ ID NO: 106664 - DNA, 471 bp, Zea Mays
aacatcgccatcaacatttcgaggtgagtcgagttccacacggcaccagcacgattctcactctaagctaaatatcaccactacagctagaagtaattcctataaacaggtgtgagggagaggtgggagacgacaacttactttggacctaaactccagtgacaagccgctgcacctacacctgcaactgcatcacaagaaatttttaaaagcaatccacccccatcccatcaggacaccagtagtgggcaaatcgaaccaacgagaataggctgattttacctggaaggaggcctccggtgcagagcaagaagagcggtagccggcggagttgagatggaggggacgccgcacctgcaacatgagaaattttttaaaagcgatccaccctcatctcaagatgttcgggttcctccattgaaccaaaatgagacttcaatcaacaacgtaaaaaaggcatcactattagaa

SEQ ID NO: 106665 - DNA, 541 bp, Zea Mays
actgatctcgccctcccacgcgggcgctccgatccactactcccccacccggccactcatccgtggtgctgtggtggaggcatatcacaacatatggatggtggtagcgcatgcatgcactgcatgcacggtcagctttacggtggtggtgagaatgagacgcccggccgagctcctgtctagctaacaagtgctgctacatgttatgtagtaatcatggtcatgcaagaaaacactgtcatggtgatagaaggtggtgcaaagtaggtgcctgttttgtttccaacacctattcaggaccatcaatatttacaaccatactcaggatgaatgaaagtgattgaaaggataatatatggaatctgttatatatgcatgctctggtgtgcgtggacgatgatgctccatgcatgcccacgagaaaatagaggatgcagctactcgaatgtggacagtaggcacgtggagaaatgcccagccatagaagatgcacacatgctgcaggaaaatctctgcgctgtgctatcaagctctccccgcg

SEQ ID NO: 106666 - DNA, 786 bp, Zea Mays
taggtctgagaagacgactagaataagcatgcatcatgattgtcgcattataaatgtctcttgtgcaccaatatgcttctctcacctttattccaataataagaaaatgtgaataatgtgtgtattgccatgaactgcaaaaaaaatgtcttatcctgtgtgtcatgatagtcttgactaggttgtgttatgtgcttctcttgtcttgctatctaggaaatgttttagttgttcaaacttttttttaaatatatataaaatgttgtttgtttcgctcatgaaaagacccccgcccaaacaaccttgagcttagcaagtgaaacctctttaaaaacaaaaaataatttcatgcttgtgttggcatttcctagtccttgagtgttttatccttgaagttacacctgcaccgcttatagacccccattgcttgaccgctagaccaacccaagtctccttgtgcgcttgttacgtcaaaaaaaattgttgtttggtgtctagttgcgcaatccctatcaaggccatgtttctttccataaatccttgcccctaaaacttcataacattcctattgatcatccagctgatcttgttgcctacctctcctttcgcattgatctggtgatctctttccttgcgaatcatgttgtggctttatcacccgaatctccggatcctttaatgattctgccctattatccggttatctgctaaaactcgttctcaagtatcagacgctgatcttgcctaaatctctcatttctggtcattctcataccctcttctcta

SEQ ID NO: 106667 - DNA, 467 bp, Zea Mays
gccggacgtgtcaaaaggaaaaaatataaatagaaaatgaagttggttatgttagttatatgtaaatgtatatttaatgagtagagggatatataggggaaaatttagggggaacggttgcgtgacgagtgaatataggggagggaatcttgctgacgtggctgcatagtaacatttagggggaaaatttagggggaacgcttgcggatagccttacattctcccaatcatagtcattgggatgaccacgtccttgcctctcttcagatagctcaattacatagttaagttcctatttagccattctcatgaacacctcatacacaattgtggccttcaacatctgatatgtgtaattccatcttgttgggacatcaagcttcaaaaatgctttgcaatccactttctcttcctctacaatttccttgaacttgatcaatcttgaagtcccacttttaatataccga

SEQ ID NO: 106668 - DNA, 413 bp, Zea Mays
ggagagagtgcgtgcggctcagcagcaggatcgtctattgcaggaagctcaaaagagggttggtgatggtaaaccccaggagttcaccattgatgagaatgatttggttcgtttcaggggctgtctttgtgtgcctcagaaatcagaggtgaagatggatatcttgagagaagctcataaaacgccttacaccgttcaccctggtgaaaccaaaatgtacagggatttgaagcaacacttctggtggatgcggttgaagattgacatttctaagtatgtggccgcctgtggagtatgtcagcgtgtgaaggccgagcatatgaggcctgtaggtttactgaagccattggaaattctagagtggaagtgggagcatatcaccatggattttgtggtgggcgtacctcgttctc

SEQ ID NO: 106669 - DNA, 537 bp, Zea Mays
ttcggcagtagtctccttcggcatatcccagttctccacaagtggccacaccctataggctatgtgctcttggactatatctcttgtgccaacgaaggcacaaacattgctgaaggccttctggcatgcttcgacgtcactttcaatagtgaccttcggccttcgaaggccgaagcgagaccagatggggtgctagataatttccttgatgtcttcccttttaatcagatcattttaaacataaaaccactcctccatctaggccctgggccacctttttcggtatgtcggcaccgggtaacttgcattagagcgggcaatgaacccgtagcaaccaaagttgttgtggtattgttctttgctggtagccttcatctcgtataaaagctcgtgcatattacagaagcactttgcactcggctccagcccctggcttcttacagcccaaacaaacatccctatcctaattatagcttcgggggtaatctgatgaagaaagatctagaatatctgcaatacctcaaccacaaatttgct

SEQ ID NO: 106670 - DNA, 561 bp, Zea Mays
tggaacaccgtcatgtcggtcggtgaacgtcgccgaaggcactgcccacatcgaccggccaatccatagctcctccggacaaacctaggtgagcatcgtatgtctgatgcattactaatacttgtagtgaccttgaattgaaccctaccgcgttttaaaccttggtacacctcaccggagctcgtcgatccaccgtcagcatggctagtgaagccctagatggtttaaggtcgattaacttaggggaaataggaagaaagtctcgaggatcacaattgtaggcttgttttcatcagaaatggtcgtcgtcgatgggtctaagcggcggatggctggcgctcgtcgggatgcgaccgtggactagagtttgtgaatagaacggaagccgagggcttatgtgcaactgttagtgagacacgtgaatagtatctagggttctttactgattattcgaacacctagggaccctcgtgaaaatctgcacgcggccaccagtgcgcgtgagtttcccctatcgtgggctgactcgggccagaatcggcccaaccctattcattgttt

SEQ ID NO: 106671 - DNA, 776 bp, Zea Mays
tggacacaacaatcgcacctgcctgtctatagaggaaaatacggttaaattggctagccttgctgatagaaaaataggacgaccgcctgggtctagaaacaagaattcaacaatggccccgcattggaatgagacatccacatcaaaaaagcataaacatattgattctggagaacatggttcggatgacgataatttgacatgattgtacaacatttatacagaaatatttgatgatattgaaatgttatgatcatgatactatttgatgaatatgaatatttacgttaaaagctcactgtatggattatatctattaatgtaacgtaattatttcttatgagctatgctaatgttgggtttgtttggccatataatcagatattcactgcatcacatacagtatttatattgaaaaaattaaacagtcggcgtactgaagtcaatatgtatgtactggcgcgtagcgtaaaaaactaaatgaaaaggcataaaccattacagatatttgcataatcaagacagagcagaactgaaaaagtgtacataactgaacattaaaaggcagctcattggcactaaatatacaggtgcataccgtaaataactatataaaaagacgtaaaccagttcagttatatgcataatcacgccatatcagaactgaagaacgtacataactgaacaaaaatagccgatgcatttgaagtactaggtatatgctgctaatatcgtaaaaaactacataaaaattcataaaccattgcagatagatg

SEQ ID NO: 106672 - DNA, 337 bp, Zea Mays
cgagtgacttctgctactatgaacggtccttcccatagtggcgacagtttgtgccgtctctcccccgttagaattcggcggaggacgaggtctcccactgcaaaggatcgatgccgtatggtcctgtcatgatagcgcctcaaagtttgctgatatcgggctgactgaatcaccgtattcaatcgttcttcttctagtacatcgacatcttccagcctagtagcctcagcttctgctatgttttcaaagattaaccttggtgccccaaacttgagatcagcaggtagcactgcttccgaaccatagaccataaagaaaggtgtgtttccatgcaaag

SEQ ID NO: 106673 - DNA, 299 bp, Zea Mays
accagggctcaaggcctttgcggtctccaagacaatgtctagcacattggccatccttctcctattgggagttgcggcaggagctttctgcacttttggaaattttgcctctgctggaggacttcaaatttctggcatttcactattttttccacctgtggctcttcggccttatcatcctcagcttcggctggcccgactgtaggcaccttcggcactacaatggcctcttcggcgctctgcacattcggagcaacttgttttactttggcagtagaagaagttccctcgcaaaattc

SEQ ID NO: 106674 - DNA, 350 bp, Zea Mays
gtgattagatgaataaccacgcacaaaataagaataatctcctgagttaatatataatggcgggggcacgaaccgtccgggccctaggaccatatcgctcaccacttttggtgttcaacacagacatttttgtgtcatgtgggtcaactgatgacgtgaacatttgcccgtcgacttgaatctggttccaatggtggacgtgatcggcccgcatacgagacttgcaacacaatgaggtggcgagactgaggctgcctggagcgccttgcgccaaattttcaacacaatggtccatggcctgggaatttgacgcgacaccggttaccaaatttttcggtattgtgaaattt

SEQ ID NO: 106675 - DNA, 1034 bp, Zea Mays
tcgccggtgaaggtggcaaataagtcgagggtgccaaaggtgatgcggctccctggtgtgaaggtttcacctccgatgaatgctaatgactgggccatcggagtggagagcgtctcttagtacattcacgctgcccctacttggcgcgccaactatcgtggtttcgaaaactaggggtagtaagtattgtgttcggcaggggtgctagcacagactcactcctagaatagtgaatcgctagggttcaaacgaaaggtttgagacaacggggttatactggtttgggttctcaccctactatagtgcagtgctgatagtagtattacagtgagtgtgttacaacaagtgtgctcatgtgcctatggaagaaagaaggtctgcccttctatagttcaagggtaggaccttgcaggggtgacttgttctctactttgtatgaggttggtctattgccccagcttgacgttgtgcacctggtgtcgtgctgcccataggaccatgcgtagttgtacccctagtatcgcgcaccgtctcgctcactcatcatacggatccatgtagcgagtccactgctaatatctttgtagtagtgtgtggtggatattgtggatcagtcccacgacacgatagcacgtagcgtagcttcacctgtcgtcatgggcatgcgtcacttgtcggcatgcatagacatacaccaggtatggtgtattcgttacatctttccagatattctggtcactgtatacatttagatgctgagatcccttcgactaggattgactggtcctatccgccggtggtagttcgcgtgaaacaatatgtggtgaggtgtcgtctaacatccgtcagagacccttgaacattgtacccaaggcctagacgaagtttggtgatgacccatcttgtcccactcacatgggctcgtgtcattgggtcggccttctcttacgctagtctttcgtaaggttgctcggcaaagacttggtcgtctgctccgcctcgcaaggtttactcggcagggactttgtcgtccg

SEQ ID NO: 106676 - DNA, 326 bp, Zea Mays
tatggggctttgaaactatagaagaatttgagacacaatggcattgttttgtcactaaatttcaggtcatgggtaatgaatggttctccactaggtttctcattcgtgaattgtggatcctagtatacttgatggacatacctctctcaggcatccttaggactacatcacgctcagaaagtgcaaattcctttttcaatcgtttcattcatcgaaaattatcgttcgttgagttctggctaaggtttgacacaactttggagtgccaacgtgaagaggagttgaaacaggaccacaaaagcttacacggtatttctaaattgatc

SEQ ID NO: 106677 - DNA, 452 bp, Zea Mays
atcaccaaaaaagggtgagactaaggacccaaccctgttagaaggtgtgcaacaaagacgacgtaggtcctcgacacaatgtgttgcaccgaccaggaggtaggggccaccttcccgctcaccactgggttcgtccaccccagcagcgtgcggtacaccgtgagcatcgtctcgttgctcactctctacacgaaaagtgcaatcttctttgccgagggtgccatcactacttctggagattatgaccagagaaggggagaagagctatcgtggaaggcaaatgggcactttggcagaaagaaagatgggtgcttaggtgcttgagtactcttattcgaacactcgattgcctatattgatgatctacccaaccgcacatgactcaaagacagcacaagaggtccgagggggaacatgtgtcggttcagcttctaatgcatgaccacctgcgc

SEQ ID NO: 106678 - DNA, 300 bp, Zea Mays
tattagattttatcttagccaacagggtaagaaagatatgagttgaaaagaaatctgatttctttttttatagctcatccggtcgcttgtacttttttcagctagcagtgtggtactacataagagcgttgcgttgtgtgcagcttcctatcatgttgggtttggtggtttctcacggctcatctgtaagttaacggcccaccggtaagcgagaaacaaacctacgtgcttcgcgtatgtcgcacaacatatgaaactgatgctttatatgagtagagaagacattattatgttctagta

SEQ ID NO: 106679 - DNA, 2119 bp, Zea Mays
ttcttatattattggttttaatgatttccccttgatcttctctggcaatcttcaagttttgcattttagctttgttttgcaattctctagatctttgttcttctgctttatgttgtttttgatttttttgggggagaagtcttggttttctttgtggtgttgtttttgtttacactaggtgttttcttctttgtgggtctaaccatttatggttgtgcatggtgttagcgagcccggttctttccgctagcactggcaatagacccttaaccagcactggcactgagtgcattacttactgaattacttactttactgcatttctagctggccttcctgagtacgagtatgggttcgttggatcattctattctttgtcaattggaagatgcattttagactctagaagccctgttccttctccttttaaggtcagcataaatccatcagtggtaggaatcaacgatccatttcgtaagagaagaattggggaagcacgcagttggcagttgacatcttcaatacagaactctttcttcgctttcttttcaggaaactcgaaatctcgaactagaaatctcgtaagagaggatcaagctctagtctcacaattgagaagtacggcacctttttgcccaataagctagtctacctttactgcggcacctcgaaggaatgaatagcccggccccttctctcaagaatccgttgataaggaagtgtaggagtgcaaatccttttagagactttctagtccagattcgacgtgacacttagcttattattcttctgaagatgcaattctggatctctgtacaagctttcaagattggctgcataactacaggagagttaccaaatacaaagttctgttctcctttcgttctcttctttcttttctttttattttatcaatatttgagaactctttctcaccataattgtactcatgttgttttgtttcattaaggcgggggcatatgtgtctttcctctgcctgatctgcagttttccttcttcgcgatccttctcttacctctaccggaaggtggctggaagaagccgtgggtggagttggcccatgcccatcttgcctcccttcatcatcctctagtaagtgaggagatgggatctcttggatgggcgagagggtgttccagtcgtcgtcgtcgtccatatggacgctggtctcttcctcctgaagacagagtttcgggtgagctagcaaagaaagcagcagtgccacctaatactcgtagactaaagtactttttatatctaggaacaagcgtcgaaaaacaaacggaggggaggatcgacccgttcagtagaattccgaagaaagactgttggcagcaggtggagacatttctttggcccccttccaaataaatgcgggcagggtagagctcggcagagggttcaagaatagggtagggtcatgtcctaataaagataaataaaggggtgggtccctttatgcatgcatcttcatacaagtggaggccggaaagatcaaaccaatagaaccgctcacatcacagtagtcgtagttgcgtaaaggccgtcagtcgggggggtgaccggcacaccaggactaattcaaagtgaaatactcgtagtatggatggtggcgaatgttataggggagttattactggggattggagcatcgaggcttgcggtcgagacagggtgaagtggctcggcggtcgaaagccaagtccagcgagcaattccgccctgccgcacgatctatcctccctgccaagcgacgaatgacaatcagtgaacccgagcgaacaccctaggtcgtcaggtgcaacgaaaatggccacgtcgacgagagtccctagtggcggcactgatttctccctcaaacccactctggcacccgaccgctacttctttcctagccctgatgaggatgcacctagagcgcgatggaccatggcctcggttttatactccgaatggagcgcaatggttaggagagccattctcgcagtggcgcgacatcaccgtagaaagcggcgagctgttgcaacggctcgcctggaagccatgaccggaatggagagaggatctgatgactgcgccccatgttgcagtggcttac

SEQ ID NO: 106680 - DNA, 474 bp, Zea Mays
acatcgaagaggaggaggactcggaggagttggggctagcctctaacctggacaccacgagcttgttctgttccggtggaccgccttcacctaagtctagtgtcgccttgatcgccctttgacttagtagtagaagtgtcaggaagtatgtactcctcacatcgcctagcttacgacctatgatgtaattggctagttggtagagtataatccagatgcagcccctttgatgaacatattttgtaagaaatgattatgatggttccaaatattttaagaaatgacccaagtttcactcctacatgagcacgaactcttaagtgtatgctacaatgttggacttgagtttctttggttacctgcttaaccattgaatcaaaattgtgaagtgtgggccatgagaataaccaaaaggattcctaaatttttatatggtaggaactgtatgctatggacaggactagcaagttccac

SEQ ID NO: 106681 - DNA, 543 bp, Zea Mays
ggatgcactacccttgtcctttatggatcttaaaaagctacattccttgagacgtataaatgtcactagatgtgaggaaacatttttgagaggactggatgatggtgttgtgctacccacagtccaatctctctaccttggacgatttacacctaccaaaaattatttgtcaaaattattcaaatgttttccagcactttcttctttgcatgtgatggcatcaccatcagatgaggacaacgaggaagtggtactgcattttccaccctctagctcgctgagagatgtcaacttcacagggtgtaagaatctgatcctacccatggaggaaggagctggattctgtggcctctcgtcgctcgagtcagtgaccatacacaaatgtgacaggttattctctcgatggtccatcggaggacgagcaactcagactcagagcatcatcaaccctctcccaccctacctgaggaaactcttcctttcttatatggaaactctgcctcaggaagctctgctcatgaatttgacatctcttgagaaact

SEQ ID NO: 106682 - DNA, 661 bp, Zea Mays
cagacaggtatccagcatcagcgtacccgataagatttagatcttgattttttcgataaaacaaaccaagatccttgcttccttgtaggtaacggaagatgtccttgatccctttccaatgccttttggtgggttccgcactatatcttgctagtaagttcacagcaaatgcaatatctggtcttgtgttatttgccagatacatcaacgctccaattgcgcttaggtacggatattcagctccaagaacttcctccccctcttccctaggtctatatgggtcttggtctacctgtaatgaccttccaatcataggggttttggcaggatatgccttctcaagaccaaatctttctaatactttttgagtgtaagttgattggtggattaatatgccaccttcaaaatgttcaagctgcaggcctaaacaaaatttggttttacccaaatctttcatctcaaattcagacttcaagtatgagcttgcttcttcaatttctttatgtgttcctatgatgttcaagtcatcaacatatgctgatataatacagaatccatttggggatcgctgtataaatacacatgggcaatcctcgttgtttatgtagcctttcttgcttaggaagtcactcaagcgattataccacattcttcctgattg

SEQ ID NO: 106683 - DNA, 413 bp, Zea Mays
cgccaatctgatcgctaagcctaccatagcaagtgttcgggtttgcatcacgcaacctatagtgtgtgtggtatctaacaaactcaagcatcgtcatgtgtattgtttgttcgttgacgtcatcatccgcatacctaatgccaagatggaattcatgttcaccatagggaaaaaggagtgggtattgcatagccatataacatggatgcaaatgcgaaacatgtttgagaccatggttcttagcatgaacaaggacatcatacatgtactgagcagatgagtaatcaccaacaattatgacagctatctcaccactcgaaggcaaattatattggacatcgtgtctagtattgcagcccaataaatgtaacgttatctcgctattgtgtgtttgttctatgtgttcacgagca

SEQ ID NO: 106684 - DNA, 280 bp, Zea Mays
gaatttttctctctgtacgcattgcttgatcaactagatcttgcaaggtacggtatgggaacatctcgacaaatctagaaatctcttcattgagtccgcctagaaatcttgccatggttgactcgggatcttctctgattccagtccgcactaacagcaactccatcttcttaaaatattcatcaactgatttctttccttgcttcaataattgcaatcaatttcgaagatcacgttggtagctggaaagaacaaatcgcctcttcatcactcgcttcat

SEQ ID NO: 106685 - DNA, 509 bp, Zea Mays
ccgacctagacaagttgaactgcccctcagggccggttcaatcgcatgtgccacagcctaccagtatgacatgcagaagggtggcagaatggctgtatgatctgcgagttcaacactagtcgggcagagtgtttggggagaaaacctggttgaactgcctagggctcggttcaatcggatttgagcagagaggtccactgctcaaggcaggttgaaatgccctgagggtgagttcaactgcttttgaccagggaggttctccaacccctaaaacctcgcaatagttgaactcgtagactatccagaaacttggtttttgaaatgagaaacttgagcgttgcaaacacgattaactttgtagatccctcttgattctacggtgacccctacaactaacgaaatataaaatttgaagtggctattgcacggaaatcacacaaagcgtgccatatgatgtatataggtaagccgcaatgtgttcctttttcgcttacaaatcaagcttgtgc

SEQ ID NO: 106686 - DNA, 1908 bp, Zea Mays
ggggaggccagttcttgatcactgttactttcgcagggtcagtggaaatacccccagcactaataacatgtcccagaaattccaacgtatcttgaccaaaacgacacttggactgcttaagctttaactgattttggtctaggatttgaaaaacctgttccaaatgttggacatgatgttccaaagtatcactgtaaacaagtatatcatccaggaaaaccactacacacttgcgtaataatggagacaatatgtggttcatgaagtcctggaatgtggctggggctcctgtaagtccaaagggcatgaccttgtactcataatgaccattatgtgtttgaaaggcagttttatattcttccccttcttgtatctgaatctgatgataaccagccatgtggtccaacttagtaaatattgtagctccacctagctcatctgtgatctcatcaaaaacaggcataggaaacctgttttttacagtgtaggcattgagcctcctgtaatcaacacataacctccactctccatctttcttcttgaccaagagtactggtgaagcaaagggacttgaactctgttgtatgatgccagactccaacatttcctgaatttgtctttctatctcattcttctggtgtggagtatacctgtagggtcgtaaccagaaagttgttgctccaggtaataggggaatagagtgatcaaatggcctctttggtggcagtccctgaggtgtagaaaacaattcctgatacttctctataactgctgcaatttccggaggtatttgcaccggaacaacttccttgttggattctgtgacagttctgagctccaacacatgctccacggcttcttgtctgattagtccagttagttggatactagacagaagagtacatgactgtaatttgggtctcaccccttgcagctgaactatcttaccttgatattcaaactccatccacttctccatccagtgtatggacatggggttaaatttttccagccagtccattcctaacacaatgtcataaccggccagtggtaaaaatttaaaatcagcgcagaaattgatgccattacataaccagggacaatcaggtacccaatattcactccacaaggtattaccatcaaccaccttcacctgaagcggatgtggcagtttctgaaccccttttactacctcaataaagtggttactcatgaaacttcccgagcttccagaatcaaccaacaccaacatctggcatccctgaatataagcccacaatctgatggtcttgttgtgctcaccaccatgtactgctgcttcagaaacagctaacacctcctcctcaacaaccttttctggagaatcatctgtttcctcggacttctcatcttcttcaccatgagacacaacagcccacatttcctccactacatgcagtggtacactttttaacagctgtggctaggattccattttttcccacatttgaaacaaaggccccttgctcttctataattcttcaaggttgtaagcttttggtcacccacccgactattgcctactagtggtttacgtcgatcgtcagggatcaccgggtttcgacctgttaacagggaacttgactgtccagccataggaggcattctcatgggagccttagaatataccaccacttctccttttctggtttcccttcttccagcatttcccattacttcttcctgcaatagagctaatgagcaggttgtgtccggttcagttggtcactggatagctaccactgctctgatttcatcccttaacccatcaatgaatctggtggtaaccatggctggtgttagttgtccctcatgagcaagtaactggtgaagaagaatatcaaactgttccacatagtcagtgacaga

SEQ ID NO: 106687 - DNA, 887 bp, Zea Mays
gaaaatctatgcgtagttcttcttctctctcccaagttgcttcatcttctccatcatgactccattgcactttgcacattttaatcactttactccttgtgacttgagtcagtgtatcgagaatcttgataggatactatgcataagtcagatcatcctgaacactaagatcctctagtggtagctgctcttcaggtaccctgagacacttcttcaactgtgatacatggaagacatcatgtacatctgcaagatgatcaggtagctccaattgatatgcaacctcccccactcgctttaggattaagaagggtccaatgaagtgaggggacaactttcctttgactttaaattttcgcataccccggagtggtgacaccttcaaatagacatgatcaccctccttgaactctagcaatcttctctaggtatcagcatagcttttctgccttgactgtgcagttctcaaattctctcttatttgatggacttgttcctctgcctcttgtataatttcaggtccaaagaaatgcctttcaccagtttgatcccaatatagtggagtcctgcactttctgccatatagtgcctcgaacggggacaacttcaaactggcctggtagctattattgtaggagaactccgcatatgataaactcttatcacaactaccaccatgtttaagagcacaagctcttaacatatcttctagtacttggttggttctctcggtctgcccatcagtttggggatggtaggccgaactaaaattcaatcttgtgtccaaggactcgtgcaacttcttccaataccgagaagtaaactgtgatccacggtgtgacacaatcttcttaggcaccccatgtaagcatacaatccgtgccatg

SEQ ID NO: 106688 - DNA, 458 bp, Zea Mays
cgggagcaccaccccgatagacagtgagcagtgagattgatcaatagaaggcaagagcagttagacagggatcgagagggaaataatccaagatatgaggaggaagacagacgatatgcaagatccaacagtggaaaggtcgtcggagagaggtgggaaggaagaaaaggctatcatatagtaggacgagaggagattaacaagatccggtaatgtagacatcattagagatagagaggacgatgagagaggtgataacaatgacagataacgacaagagaggcggatggggatagggtttggaggtgggaggctagaagggagaatggccacaacggcagggttgtatcccatctcctagctagctagcgcgccttgatttgtgccacctaagactttatccggtggttcatgtaaaatagggggacgcgaaactgtacatggcactgtttaaagag

SEQ ID NO: 106689 - DNA, 352 bp, Zea Mays
caagggacagactcttgaggaaattaaattcaagtctgagctgagcatcatcacctggtgggagagggaaaaaaaccctgaatcttcgatggatgtcagtagttcagcatgtgaaaattgggaagggtaaaattgaactgagtgattaaagaagtttaatccgtgtcgtcggtccaacatgcgagcggattgtatcgatcagctctgcatgtggcactccagttatagctaattcctcgtgcttcacaggtccgaactccacctaattaatgacaaaactaagctcttgtttcaccgacgaattgaaatctagttatatttggatgatatatgcatgaacgtgttaattgtt

SEQ ID NO: 106690 - DNA, 879 bp, Zea Mays
gtaaacaccctagagacgatcgcctccttttatttcaaaacccggaaagtgcaaacaataacacccatcatttcacacgtctagtcaacttttatttcaaaacccggaaagtgcaaacaataacacccatcatttcacacgtccagtcaactttttgacgcccctgatgcaactcaaactgatgatcaagggcagtgtttgcatccttcctggcaggctttgggacaggctcattaggttaagtctacccctcgggggctattgttggtacaatggcataatcagtcctcaatcacccttatgttaacctcatatcaaccttatctgcgaatgtagagcactaatatagtgtagacaagcctaaatggcggagactacgctaaatgtacgaagtccccctagcacgacactaaggctccataggccctagttgggtctacgggccacgaagatttggcccatggaaggggcctttgggccatgagatcgaagaccttggtacttcactcccgatggcctcattcctccctggattggcgaacacaaggacctcgagggctctaggacaaaggcctcgagggttcggcacaagaaggttgtgcggataacacaagttgaatgggcccacaaagaccaaagcaggctcatttgccagtctcactagtgggtacaaaattttggtgcggttgggtcaagacaatcattgttccgtaactatattgttgtacagtatattctgagaatgtagtaggtaaccaagggtacaaacgtacttaaggtccactacgccttggttaccctaaaaatacctccgtcaaattttcaaatgggacaccctaagaagacattgagcgctcatgcttctcattttgttaagca

SEQ ID NO: 106691 - DNA, 305 bp, Zea Mays
gtgccttaaacatccttgcaggttcctagctccttcgggagggttttcatacctcaaatggccttttccctaaaaccctaattcctcgccctccacgtgttcggtgaaatgcccaaaccagccaaaaatgctcaaattgaatccaaatttttcaggcaccttcacaacatccccagtaacacatttgccaaatttcacgccaatccgagactccaggcttcattttcactcaatttctcgttttgagcgatcgttttcgagccgagtgcccaaatctcgttttcttcgtctaaattcaaaccaag

SEQ ID NO: 106692 - DNA, 441 bp, Zea Mays
gaagaatcccaagaaaagcctcgcacagatgtacgaaaatggcaacttgcataattgagttcgggttcagatgcgtcagattcaactcatagaatcaaggaggccacaaaaaagggggatatggtaagagcaagcccgcgaatgagaaatggaacgtaaacgacagattcatgagtgtcctctgtaggaacagtgacaccgcgacagatccgctaagagtagagctccttcggaagcaaaaccccaatttcaacaagatgaagaaggtcggattcagagacgacagacatgtgattaccatcaaatggaagctggctgttgaggtcgatgggcgggatgatagcagcagcggtgctctgcctcttctgcttgggggtcgtcgcgatctttccggtgagacgagcaggctcggaatttcagggaagcacaggaatggccgag

SEQ ID NO: 106693 - DNA, 687 bp, Zea Mays
agagtttcgaatgttggtgctcctgttgcttattctgcctggaacctaccatctcataggtcctttttcgagtttgtgtctaatcctcctgcccgtgatggtggtctgggtcttagagtgcgaccctcccctgaggacattgaagctttaattgccccactccggagtctcccagagggtgagagacagactcatttcgagatgtcagctagcacggatgacgaggagatagatgttgttctcaacttgttggctggggaatcatctgactcgtcacatgctgagccaatggctatcatggacgggcaagaacttgttggaatggagaggatacgaaaacccgaagaggtccgtccaaagcatccacagcgagcgagccgggctactgcacccgttgaagtgaaaaggaagaagaggcgactttagcgactgtcgagcttggatcatggcgtgggtccttcggcgccggtttgtgatgaagtgccagcagaggtccttcctaaggttgatcccaatggttgcgcccatgctgaagttgatcccaatgggtgcgaccgtcttgaagttgaacccaatgggtgtgaccgtgttgtagttgatcccaatgggtgtgaccgtcttgaagttgaacccaatgggtgtgaccatgttgtagttgatccaatgggtgtgaccgtgcactggctg

SEQ ID NO: 106694 - DNA, 561 bp, Zea Mays
ggtgccgttcctgggcgctgcttcaaaggcatgaagctgcaaaggagaagctagtccaggcttgcagacatctggagaaagtggtgatgatggtgtttgcgcataatggatggtgtttctccaatcacattaatttgtagcttttttatgtctttgaagccctgcgtggtttccccttgtttcagtttcctgtgtgcttaactatggtgttcgtgtggatgttgtttatgtagttgttggctcggaccctctacggaggagaaggccggaactctttctccattatctaaaaaatataactccccttataatattctatatctatcgaatttgttatcgctctccctgcagtcctaacgctatgaccccaaaatgaaccaatacacatagcaaaagataaaaattataggaccagttaagtaatgtatgttaataaatatataaagttgactattttttccttcgaaacaatcattgatggtttcaaatttataaagtcaagcgttgatcttgtttgataacgaatcattttttttagaaatgaaaagcatcagtagattt

SEQ ID NO: 106695 - DNA, 441 bp, Zea Mays
cgagaagagagctcgtggggccgatcgttgggcaagggagaatgacacgcagagatttgaacagccaaaatcgattatcatccacaagtaggattttaagcaatggatctgcacataaaagggaaccagggaggaaggtggggcatgatgcagcaatcagtaacagagatgacataaatgcagttgcagttgcttctagatcatctacaaagcccgtgaccagagcttcgttgtcgcgaagcaatctatcaaagggtggatccccaagtaggctagcacatgagacaactcgcacacgagtcccggctcctgaaaaaggatgtgtcgaagcttcaccttgtgttatgtctacttctgaggaagatgaatttagcaggctgttgaaagcaaaaatcaatgagcttggcatgtcggacaggatcgagtgtacaccaaatgatt

SEQ ID NO: 106696 - DNA, 1227 bp, Zea Mays
aagaacacaacagcgtgacaaccaaccaccacagtggcgaccgtgcgtcctcaaccacggtgccctgacagccccaatggaagcagctccgtgtccccaagggcctccgccgcagctatgcgttcatgcttgttcatgctcaaaggcagcagcagtcgcgtgccgaggagggctgaggcagatcaggcacggctagagagggtgtggcaattcccgacgatggccacttagcaggacagcgtagagaatcaacaatgacaatagtagcgtggtaacccatggatgacggcgacttggcgagccatcctgatgatttgttgctgctcgacaataaggtggcagatcgattattggcgtattggcagtagtggaagcgttgactcaggatcaaaacctaaactcgtggttagtgaaagcaaacatgattgtgtataatgtgtggatatattgcattgagccctcgggaggtataaatggagtagaagacttagtaggtaaaacaccacctcaaaacacaggatttcaatatccttaccaaatatatactcgaacacacaggtttgaaatattggaagccggggccaaaaggtatatccatctcaagaaataatgagctgtgcttacattcccccattgcgcacacacatgtaatattgctatgagattagctgacccttactgccatggtatatccaggtctcacaggcttggccttacccaggctcagtgcttcaatggctaaaccaaaccatgtcaacaatgttaaaggagtaacatgttgattggattgctaatgttaattgggtagtgctggtgaagctccttttcactctaccgtaccacatgtaataacatatacgtaagacagcttcataatcccaccattgacagccaatccaaacgaagcccttcaaggaactaaaaaggcagtggtgttcattaactacagaccccttctgttcaaataaaattaccagtgaaactgaaaaacaaattctctcttttgtatgacctagaatatgaacctgacctgaagagttccagtttttattatgatgaaatatataatcagctttataaagttactaaatagtgaaaatgtgacacatatcaacttataaggataacgtgtgtgataggacaaatagagaaaattttcttaggtaacgtggatgtatagagaattaaggtatgaatacctaatgcaagaagcattctccactctca

SEQ ID NO: 106697 - DNA, 494 bp, Zea Mays
agctgttgaccatcttccggaaccactggtaccggatcttcatcttggggctggctcccagcaaggtttgctaaatgatttcacactgcatcgtccacgagtcaccgataaagccatcagcttccgaaaaaacaatgaactgcgggacctcctcgagagatgtgacccgaaccctaagcatagtcttgtaaacattgtgtctgtcttcttcccacaagattaatctgccgaaggaaccaatagcagcctgcaagtattctgatgaacacgataaattcagtttgctggcttctgccttagattttctgttcatgcaatcaagtaccactaacaaacagtatctgggatccaatcaaaacagttactgtactagctactatccgatgtccatcataaagagcaaggcgacgatggagatgatggtgcatggctccctataattaagcaccacagcgtagtacgtacagtcgtttactagctatacctgctgcgcc

SEQ ID NO: 106698 - DNA, 622 bp, Zea Mays
tcaggttcggaataccgaacagtatcataaccgacctgggatccaacttcacaagttcagagttctttgatttctgcgagcaaaaaagcattcaggtcaagtatgcttcggtagcacacccgagagccaacgggcaggttgaacgagctaacaggatgatattggaggcactcaggaaaaaggtttttgataaaaatgaaaagttcgcaggaaagtggataagggaattgccctacgtcgtttggagcctaagaacccaacctagccgagctctgcatggaaacactcctttcttcatggtctatgggtcagaggcagtactgcctgctgatctcaagtttggggcgccaaggttgatctttgaaagcatagcagaggccgaggcaaccaggctggaagatgtcgatgtactcgaagaagagcggctgaacgcagtaattcaatcgacacggtaccagcagactctgagacgctatcacgacaaggtcgtgcgacaacgatccttttcagtaggagatctcgtcctccgccgaattctaacgggggagggacgacacaagttatcgcccttatgggaaggaccattcatagtagcagaagtcactcggccgggatcatatcg

SEQ ID NO: 106699 - DNA, 460 bp, Zea Mays
acaataaagaatggaggtatgtcaaggcttacacgcggtaaagaagaggatattgccaaggataagataagtaaaacaccgttctcaatttgggataggagattggagattttagataacagaaataatgtcatcaccaaggtatggtcgagagatgggaaaggtcaaggcaacgctaaacaaagacacaacaaaggatggagttgaagattcacaagcgatgaggaagaggatacgaccaagggaaaagtaggtaaagtacaacactcagattgagatggaaaagaggagattttaaagggccagtataagataaacatcaaggtaagatatagaggtgataagggtaaatgtgataatgatgaaaagcataatccatggatagagtcaaggcaagactcaccaaatggcaaggtggagaaaacaattaagggtaagataggtaaggttccgacagaag

SEQ ID NO: 106700 - DNA, 437 bp, Zea Mays
gttgaggtcaaaataccaaagttgtagtttaccttttaagctttccggaaagtcctagtttgatatttttggattaatatttgaagagttatgattgaaacgagtgactgctgtgcttctgtcctaaaaatctgcaagtgtgcatttaattgtttagttcaccctttgactaaaaatgcttagttagcacttaacggacctagacttgtaatgtctaaacttaagttaacatgtgtccatgattaatgtgcttgcttgctgtagtttgctgtggataggagttccgtagttattgatgcctaggtactctgtgaaacttgtgttgtttgggatgattttgtatgatcactagaagaactactgaaaagccgtatccaaataaataaaatgcacgtacttgtgatgttgtagttgtgttgcgtaaataaataaaatgt

SEQ ID NO: 106701 - DNA, 315 bp, Zea Mays
caactttgcttatcgcaaagatatgaagactccagtggtcagttatcgcaccaaatggccaaccggttggaagaatgagtggttttatgttaaggttgatgagaaaaaggagaagatagttcagagcccactggtcctaaccttcgagttaactaggcccctatgcgacatgctgcaagggtcaccatgccgagaagctgtgggcgaattctgagttgtatctgagcatatcggtactagagatttggtgcaggaatacttggccaataaagtatttccgacattaaaggaatggaatatgccaaagcttaaagg

SEQ ID NO: 106702 - DNA, 280 bp, Zea Mays
gagaatttatacctcttgtcatattgattaaatttctctagtgtttttgattttagtcaaaactgtctattcacccctctagccggtgtcctagatcctacaaccactgcctcggctaggcaccgagacatctctaacacgatgtactccactctctacttcctcgactcggatatggactcagatcagttggagaagaagggggaataaagcagaaacccatctttcgccgaaggctcatccccaaatactccctagttcaaaagatgtgaggcctcac

SEQ ID NO: 106703 - DNA, 402 bp, Zea Mays
atgtcgttgtaagttgtaacaatgttcttccttggtaatcatgtcactccttatttgcagtatctgtatgtggcgcaattttccattttttgagttggttgttgtgagtgctcaaccatcataaaacagctcctgtcctggcctagtcccatgacattaggaccatccacattggtttcattaattatacaaatctatgagcatttcgtcgatctcaagctttggttgtcgttgttgtcctgttgtggggcgtcctgttattaagagaagttgtttgggcttgtggccttggggggcgttctctgcaatagatgcattgctatcataacatctgtgtgatccagttctgtggatcacgcctttctacatacgatttttatggcgacaagtcagcaaaatggc

SEQ ID NO: 106704 - DNA, 363 bp, Zea Mays
gttgccaagccgatacgaatgtttcttgtatcactggcaaaatctggatcaaagttgtcaagagccttccatgcatcaccatctgacgggtgcaccattaacccatcttgtatgtccgtacaatctttatgccacctcatgtgcataacggtcttcctcgagagaaacaaatgtttcactctaggagtgagaggcatgtaccgaagctgtttatgtgcaacctttgtcaccaccttctccccatcttcatttacaagctccacgtacctcgacttcccacattttaagcatttctgctctctgccatgttccttccaaaaaagcgtacaattgtcctggcaaacatcaatcttctcatactcc

SEQ ID NO: 106705 - DNA, 993 bp, Zea Mays
tcgagcgggggcacctgtgcggatggagatgacacgggcaggggcaggcgggggtggcggtaaagtgtggacgctaacgatagactcttaatagagtagtagatgtcgacaaatattttttaaaaaaagatcattggtacacattgggcgaagcaccataaacgctcgagtgacactagatgtaaattataagtatgtgtactttgtaggcttacgtagaacgagtttactatggttgactaaggacgtaatcgtttgggaattgggattggatgcttccataagtatttcgttgactatagtaaggacgtacgtagtcagtctgagctgcagcctctagcaaagcaagactccatcgtcgtgactttgtttcgctagttcagtttgtaaactttgactcatatctcccacccaacccaaatcacctattgattctaaatctaaatccaaatcctcacaaccctattgccgattggttctaacacacaaccttgacttagcaatatttcagtccatgcattgcatccgtgacttgtgttgagcaccgtttgtggtattgggtaaaactgtctggccccgaggaccggacggtccggcctgcggatgatccacccttaggcgcagacgacgcacaattacatcagaatagacataactaatcccttttctacgcgtgtttatctctttaaaatcgcgactgctgttggaaaacagctaggaacgggtctagacctctacctatataaatgaagggatacaaccaattgcaaacaccaacaatcgaaccaaaatcgatatatcttccgttctttacctttttcccttgggggtagacagtaatgtagctttcttcatctttattcgactctatgtcgtctggaggcgtcttgggtggcctgcccatcccaagacaaatcataggatctctcctcctcaacaggccctcctaggagcgagatctaggtgctgttggcgaatgccgccacctatgcg

SEQ ID NO: 106706 - DNA, 851 bp, Zea Mays
ctgaagagctggtagatgagtggtagaaccgcagaagaagtagcattcgacatgcgtgtttcatgattctggtttggaggcgcatcgttcttgttacgacaaaaaagaggggaaacagagtctttcatccaaacctttcctcttgtttggtgtgttgtccatgcctgcacttgcactgcacgtagttactgcactgggccgcacggcctgatgcggcgcagttaaagccacgccatcagagtccggagctggggagtggtggatgaatcggtgcgcggttggtggtttcgctcatgtttccctgtccgtcgtcctccttgcttgcctggttctttccgtggggggaaaggaagaaatcaggcgtgctttgtcctgtgatccaaccacgtctctgtctccctttgcttcctatggtatggtaccgtaccgctgctttgttcctttctctgttcctgccgctatgcctgaccgtctctgcatcgtcgcgtataaaaaaaaactgttcgctttagtatacgtattaaaagccaaaggaacagtctgttagctgtatgcgtgagtcttcctggaaaggcttgatttttggtgtgtccaatccaaatgcgacggagttgttggtcacgggcaggtcgttgcctcctctgctttcgctcttcagagtttgtgttttctttagcgctctgtgttcgcgacatggtttcgtctttcgatttctttttcatccttctttttttttgggtgtctctgaaagggtgtaaagtgtctggttctatcaggacgctgcgagacttttcctcccatgggaatctagcttacgcgaaacgcggcatttgtttgcagacggatggaca

SEQ ID NO: 106707 - DNA, 310 bp, Zea Mays
gtcacgcgtatcatggggaggatgaagatgagatgtgtgccattgatcgcttgttggacggtggagattagatctccagttatcgcattgaagctgggatctaggtcattcatttggagttcaacggagtagattagatcatgttaaataaaatcagggccatcgatgggtaatcttgtggtcaagattgtgtaccggttcgatctcgagctatatctaatcgggaccgtcaggtcgcaatcgtgtggctggcataacgcgccttggaatagtgcaaaaacgatcctctgttttcccaaaattaacccgt

SEQ ID NO: 106708 - DNA, 2816 bp, Zea Mays
gatggtttttccgcttatcacagcagctctttccacacctccggatatctggtgccaaatcgtcgcccctttccttatatattcgataatcgagtttgctatctttgtggcattgattgtacaagttcgtgaagagggctggacgagtagaatgagggaaagcggctcgatcgagaaaaaagaggagtagaccagcccccctagaactgaaaaaagtcactatcaatgaattcccgagcaattctaaaccaacatatgcgattcattcccgtaatgattataacaaacaaacagcagactccttgccttattttcgggatgagtgatacatccggcgagcgccggtgaagaacgcaagcaaagctggagctcgggcattgaactattccatcaagcaagagaaaggaggcaaacagggttgaaggcctggggagcgaaccgaaagctcagctttgcggactcttcctttatttagtataggcaagtcagtaccctcaagtaaactccctctccccataccgatcgagtactaaagctctatcctatttctgttcgatcaaagcgaaatagtggcttggctgtccgacgcttgattctccaggttcggtttatccacgctttgtttttagatatcggtgctcaatgcttgtgaccgccactcttcataaatagctttagctcgggttgactgtgtacccataggcttgtttattaggctcatacagacaaactggacatctcgccgacctacaaccataccaagaagatcccttgattctgcttccaggccatcccttatagatccgctcgtagttccggacagtaccttgatattagatataatatatacttactagtatctcttgccaggtaaccattcctggttctagtttccttgacggaatccgttccaccacttctggtcaaaccagctaactccaccactggctttcttatgagatgataaaagtggatctccccacggcgagcagcaaatccaccaactggaaaagaatagcggatcagggaggcatgagtgattccactcacttcctttgttcgtaacattatacgttactcactgaggagtgaatgaacagaggaaagaagatctcatatgaagaggaagtgaacagaggaaaggagtagtcgtactcgcattgagggaagcaagctgttcctgttgccgtgttcgtcactttctcgtaggaatgataggtttcgtaggctgactagatggattctttccacaggacacgaccaatagttgtagctccaagaaccggaccactgcttccaataccaagaatgagaatacgcttgactcctacgaccaatagccatcgatcgaactatggaaaatcttgattccggtttcccgatggcaccaagcatgggctttagcggagaatcaaaacttccatctcacttagctgcaaaagtcgtgactctgattttccctaaggaaactcgatttccaatgaaaaaagtgtatctcatatagctgcaaaagtcgtgtttttctcgtttcccgactacggattctttttttagctttatttttcgatcaagttgatctgcaaaagtggtactttcggaaggaggacagtcaaggaaagatcaagctatggatggaggagctctactctagagaaggtctggaaaggatggtcggccactaagaaagctatgcaactacaaaggttatacgaacccatctcgataaggaaaccaataccaggtaccctggcccaattgagagaaggaaagatcaagctaggaattcataagtagagctaagaaccagtaggttatatgcgaacctgtaaagcaatggatggctcctatccttgcatgcacactcaaagggatcccagaaacgtatgaaccgccaatggtgactacttgccctgcccggcaagaaagaaaagagatgacccggcaatcaagatacaagataagagaacgctgacccggaaagctatgaaccgccaatggtgactacttaggctagattctcaccggcaccagagagaatagaatagttgtctgtgtctgtctctttaccggatcccctatacctatcctgtcctgcaagcggcaagatatccagaactaggcgctgcctcgcattgcacctgtcaagcttatacctgttacgggtcgctcatctagatccggataagaagaacttttccctcatcctcttctttagcactggccatagctccatccatcgagggatgccggaagtcaatcgattctcgcaacataagagaaccaagtctacgagcacacagcacagggcttcacccaatctgtttctcatcctgtcctgttcctgtttgattgaaagcactggcctggatataaggatggttagatgaaagccaagcccaaaacacaaggtgacttagagagatatccagaagaaccaataaccctaaacggaacaagcaagggaagcttagatctatcctggacttgacttgtttcttaggttgctgtttcctttccgtaaggttcgatcatgtcacttatcccggcgaaatcctaattcgtatgcttctaaggataggtgcaatcgacggtaaagacacatcacgagaagaatcctttcaattgagactatgatgtttccatcctttccaataaaaagaagctagtctaccagctttcctaacaaccaacacaagaaatgtagacgaacacagaaatgagataactagaacgatgaaatccacggaagaaagaaagaagccttccctgaaacccgggctattcaactgtctttcctcgaaacaagagactaggaa

SEQ ID NO: 106709 - DNA, 624 bp, Zea Mays
accaagctcatcgcccatacatggccatttcaacgctgggggctggacatcgttggacctctgcctatggctcaagggaacctcaaattcaccttcgtcgccgtcgaatatttcacaaagtggattgaggccagagcagtatccacaataacatcgaagaccgctcaaaaattcttctggcaaaacattatctgccgcttcagagtcccgtctgaactcacagtcgacaacggcaaacagttcaacaaccaagacttcagggatttctgcttttccatcggcaccaagcctgtcttcacctcggtgtaccacccacaatccaatggcgtcgttgagcgtgtcaatggcaagatttttactgccatgaagaaaagacttctcgacgataaaaagggcaaatgggccgaccaactacctgaagtggtatgggccctaaacacgacagaatgtcgggcaaccgggttcacacctttctgcctattatatggattcgaggccatgacgccgcaggagataaagcatggatcacccagaacaaacacatccgcaatcctcgatgtcgatgaaccaacttccaaagatctcatcgacggagaccgcgtcctcgccctgcaggccctcgat

SEQ ID NO: 106710 - DNA, 556 bp, Zea Mays
tatggcagaacaagattagggtcctttggcaatatctaagggggtgggcaaagaactcagcagggttaataaaaaaagagaagcaacaactatcagagctgattgatgacctcgataaaaaagtggaatttacttacttatcgcctaatgagttgaatactaaagcttttgctaatgatagacttgccagtattttgagagaggaagaaattcgtcacttccagagggctaaagtcaaacacctccttgaagggaacgataacacaaaatatttccatttagtggctaacggcaagcaccggagacaaaggatttattctttggagaatgatgacggcacctgtatagttgatgaggaagagcttaaaatcacataacgaattactacaaaaacctctttgggaagccaaacgcaacatcgatcgaacttgatgaatctattatccatgacatacctcaagtttcggatccagagaatgaaattttaactgctaattttactatggatgaagttaaaaaggcggtatttaatatggaacataataaggctcctagc

SEQ ID NO: 106711 - DNA, 425 bp, Zea Mays
caaaggcagaagagaagtgcttctcatgtgcatgggtccatccaccacccatccatccaggtccacggcaccatcatggctacaaacgcagagcacatagctcaggtcgatccttttcacctttgttcgttttttttaaaacacgggtagcatcatgctagcatatgctcaagcaagtgatggtcagtcacattcagcctgcagccatgtgtggcgtggttgctgtaaacggcttccctctgaaccccagtcgaaaagcatgcggcagccttgctgtgaatacccagcagctgcagctcagctctgtggctgtgtttttgccaggacggtgaaagaggcaaggatgcagtgacttgaggctgcaaccatgccatgcccatcactccatcaggtgtattgggtagcatcaaagtctcgtgacgatc

SEQ ID NO: 106712 - DNA, 315 bp, Zea Mays
ctgaaggttcttatgcttgggtctggagacacgccaccggtgtaccgcatggggactagcatgtgaccaaaatatactaactatcttcagccgacgacataatcaggaatattgggtcggagtcatttctgagttttcagcgttgatatgcaaaatggtaaggacgagtatgtgatccggtcttgttgcgcccactctaggacgtggttacatggatggccccacagcaaaacatatccaaattggaaagaaatccatttagtatacatgacatgttagtttacgcaatattcagacatatttaagacactcacc

SEQ ID NO: 106713 - DNA, 395 bp, Zea Mays
gggagggagattgctggccaacggcggccaggtgatcgcctccatggcatggaagcttgaggggtcatgtccattagggagagcggaggagatccgatgagtccattctctagagtccagactccagaccaggatagaacaaggctgagacgtccggtttcatcaattcatcacgtcagttaccaggcgcacgccacatggttgattaccaaggtgggcctttcctatcctcttcacacctttcttgatgcagtgtccagctctcgaacggaaacaccattgaaaatgtgttcctcccttttaagaaagcgactctcctaagctcaacgttgttactgtaggctgtagcagactgtgagtcaacacttgaacacagagtccactcttgaatcaca

SEQ ID NO: 106714 - DNA, 349 bp, Zea Mays
cctggtagtaccaagatgtatcaggatttgaagcggaaatattggtggtatggattgaagagagatgtggctacacatgtggttatgtgcgatgtatgtcaaagagttaaggctgaacaccaaaaaccaattgaactattgtacccattaaagatacccgaatggaagtgggaagagattgttatggatttcattactggattgcctcgcaccccgaaaggatatgattctatatgggttattgtggatagactgaccaaagtggctcatttcattccggtcaagactacttataagggatcttaattggcagagttatatatggctcagattgtgtctctacacggtg

SEQ ID NO: 106715 - DNA, 397 bp, Zea Mays
ctatttactcgatctcgatgacttctcgcactatttgtggacttttcccttacgtcagaagtcagacacctttcccaccctgtctcacttcttcgcttgggtctccactcagttcggtcatcccatccagagtatccagtgcgacaacgggtgggagttttataacaatatgtcctgtgacttctttctttcccgtggtgtccaccttcgtatgtcgtgcccctacacgtcccctcagaacagtagggctgagcgcatgattcgcatagcgaatgatgtcatgcgctctctgctctttcaggcctcccttcctactcactactgggctgaggctctcaccactgccacctacctcctcaatcgtctgcccaccaaggcggttgctcaccccactcct

SEQ ID NO: 106716 - DNA, 1195 bp, Zea Mays
caggcggtggcgctcgctgattcgccatcatttctcttttcgcgcaacacaacacaggtctatcctaacggcggacggccagtggaaatggaaactgcgcttatccaatagaccgatacggagtaccacctgacgacctggtcaaccatgatgtgcatatgaagtggtcggagttggtgcgtgtgatgctggtgggtggtgctaggcatgctccattcctccctgtgttcctactgactgactgatgctgcagagatcctgctctgctcttcaccattgtgatgcactggagtaaccaaacaatagagagtataaagtcatgatgagcgaagatgatgtatctgtcttccactgaaaagtgcaattgccgctcagaacaaaattcgggtccatgagtgatgtatgagcatgtattagaactaagtacggattaaagtcaaatgaacaggtatgacttaaatattgtcttcagcctttttggatgagagatcatcaaaaatctttacgtctttaattcttggtgatgtcaatattagatgtgcgtgacatcgatttgaaaacgtgtgcacctgagcaacaagagcagccacaacaactttactaacttactgtttctctatggcactgtgaactcgaacaggttgaaatgacgacggggattgctgtgagaatacatgtggtgccactattaacctagcttgctcataggtagtgtgatagcctataaggtataaatacacttacctactattcatcctgcttggtcatttggtaagtgccccgacccaccatgtacaatctttagcctttggaatggttttccaagtacaagaggtagctaagagactgtatgatacaactctaagccactaggttataaatgcagtcaagacataatatgtacaaagagtcgtgtatctcatctctttgtttttttcacttacccctaaataatagggttgtacatgctcttagggtgtcgtcccagatagtcaccacccaacccatgccaccaccatccgtcgtttggtgctagcggcccccttctccatcttcttcctttcttcttccaactcatctccaataatttgtgcctccattgttgtctcctaccatggatttgcaatagatggatgcatcacccctccatgatgacaccattgtacatcgttgtcacgacgacagtagcctcctc

SEQ ID NO: 106717 - DNA, 323 bp, Zea Mays
ggtaggcggcttgtggctcataaattcccggtgcttgtcccagggtggaagtggtggtggcggtggtcgcaatggggcttgctgctgtcgccccatcctctgctgatgcatctcctctcgcatatctttcctttcctagcgcatctcttggcgttcctgtcgcatctgtgcatgcatatctgccatagtatcagccatctattgcgtcatctgcatctgggttgtaactactggaggatttggaggatccatctctgcttgttgttgttgtctaagtaccctctggttgtgtggattgggggtagatcagttcctccaccctt

SEQ ID NO: 106718 - DNA, 405 bp, Zea Mays
tcagactgttgtatgcgaggctgtccgcgaggtcagccttcgtcatggcgcagaggccagcttcgagcttcggaaatcccatacttttagccatcttccggcagacggataactctttgttgtccgggaggtagtacagaaatcatcttcgtccgtaccgttaaacactaaggcccccttcgggtacttcagttcttgagcatagtgtttggattaaaaaaattcttcttcggataatctttttctcgaagcatgtcgaatgatataatcaagatcttcggacggtgcttcgagagcgggcgatttggcttctgtggccacacttttctccagagctttgccagtatctggagattcttcttcggccctctgctcggttgcggcgagctttgtctcatcaggcac

SEQ ID NO: 106719 - DNA, 521 bp, Zea Mays
cgcgcacgcacgaccaccatatcacactactgtccggtgccgttccgaacgccaagtcccatcagcccacaaggatgagttagaacgtcaatgccaagccttgctctaacagggactcatccacccaagccagtcgacattctcctcatcggtcctcctcgtcaagaaagccgacggctcatggcgtttctgcatcgactatcgcacgctgaacaatatcaccatcaaggacacattccctattccagtggtcgatgaacagctggatgaactacacggcgtgcactacttcaccaagcttgacctccgatccggctatcaccaagtgcacatgttcccaagcgacatacacaagacgtcgtttcgaacccatgaaagactatacgattcctcgccatgccatttagcctttccaacgccctgactaccttccaagccttgattaacgagatcctctagccctttccgcgtcgcttcgtcctagtcttctttgacgacatcctcatctacaacaccacctg

SEQ ID NO: 106720 - DNA, 549 bp, Zea Mays
tgacggtgccgaggcacaaaaaggtctagcagcatcccctaagagaaaaaggatggccagtgtactagatgtgttggagacgataaaaacttcaagctctactccagggaaaattgccaagacttcgaaagtgcaaattgaaaccgaaacaaaactgaccgaagccgaagctacaatgagccaggctggcgccgaagctgggccttcagagcctgccaagaagaaaccctcagaaattggagaaaaggcaacgaaggaagaagctatagaacaaattttgcctgaaaaagctgccgctcctactcccgaagcgccttccgaagaccttgattatattattcgacatgcttcgggaaaaagattatctgaagaagaaatttttgaagctaaacattatgcccgagaactgaagtatccgaaaggggccttagtgtttaatggtacagatgaagatgacttcttgtattgcctcccagacaacaaagaattatccgtctgccgagaaatggccagaagcatgggcttcccgaagcttgaagttggcctctg

SEQ ID NO: 106721 - DNA, 669 bp, Zea Mays
ccccccgcctgcggtgcccccattggcccttgctctcgtgtctagcgtggtataggagcgtatcctttcaagtttcaacgaggtcctagccacggggggcactgtactcgccagggtcagtaaccggtcggcatcgagtaagatatcgtgtgatggtttttggcgcgtgctatttgttcgacctattgttgcaacggagaccgccgctaactaccatctccaagagactcctacaattgagtcctaaaaatcaaaataggacacggtttaaattatttaagacccaccaattcgttttactccaactgagttctataatcacattatttagttaattatccgcttcaccgcagcaatgtcatcgtcgctctgtcatcgtccatgttcgccagagacaatctttcacatgatctcgttgtcctgctgatggagtagtaggccttcacgtgatcacgttgtccggtagatagggtagcgggccagcagttgttggttactctccaccaacaagagagataggaatctattagaagccagagctccagcttgctagttcgatttgatggcagcaactaacacgacaatgacgctcagcatgatatgaagattgccatcgataggaaggctcatcacctgctgttcgcggaggcgagaaagaatgtggtcgac

SEQ ID NO: 106722 - DNA, 646 bp, Zea Mays
gcgtgaactactttcctcgacatcggggacgtgcattggagaaggggatttgtgggacctgtttgagggggaagagttgaggatgatgttgttcaatactcgggatgtaggtcttataccgaaggaggagcctatgtgacattgttgtcgccctcgctgctttgttgtgatattgagtgaaaacactgccctccccctcttcacaaaggagttgtgagggtaaaagccgtgttttgtattatttcgcgatggtgccgttgagcccttcgtttgttgtttatttgtgattgtgcgttgtatgttgtgcctaatgcgagttggcttcgatttgtaatcatgttcttgccgtaggggactcctctttcgacaggtgacaatgcaacatttcacttatccggttgcgcccttaggcgatatctgtttagtaggttgtttgtgtagtgaggatcgcgtaccgtgagtgttgttggttttttggctgcacgcttgggcgacttctgcttggaagttgtctttgtagaagacttcgccccctgttggtggtgacgcgcgcttatgcttttgtccggctgcacccttaggcggctttttgctcggatgtgttgtgtctcgcacttattgtgcttctgtccggctgcacccttag

SEQ ID NO: 106723 - DNA, 496 bp, Zea Mays
cgatgacagatatgatctaagcaaaatccaaaccctaatgtggtggccgcgaagcagcgtaggtggatagcggtgttagagactcatgtgctaatagagtcctgaaccctctatcacctacatccatcaccctgacatgaatgcgggtgatgtagtagcaagcccaaggaggctcgtacacttgccttgtctcatacaggggtcggacgtaggttccataggcatgcagaacatcctgcagcttgttagggaagtgccctgtctcgaacattgatgtataatgttcggtgacaggccataaacccacgtagtggtcctgttgttcttcgttggcttcctcgttgatgttttcctcatcttcttcttcctcttcgtcatcttcatcatcttctccagagtcgtccgggtcatcacctccaggagcaagggcatggattgctgctgctggcggtgctgaagctgacgatccagctatgaaggctagtgattctgccaa

SEQ ID NO: 106724 - DNA, 559 bp, Zea Mays
aatcagagcgccagctcagttaactcaccgccggcgaccgtgcgcccagattcacgcccgcagcagtgattcatgctcggcgcggttggataacgtagaggagtaagaaatatcacccagtggatgaactccgaccactgttcactctggccgtcgtgtccgcttagctcacggccgcttctgatctaccctcgctggagttagacacctcgcagccttgcgccacgtgcctcgacactttaaccacaccgttgttactcatattagcccatcctgtgatcgccggtgagcttgccacgataattgccaccaatcacttacgccagtgcacctccttctctccggccgccgcacgtttccttcaaattagccgccaccgctcaagggccttataaattgagcacaccctcggctccgctaggtattcaagcacccagcacacccactcgtgcctccaattgttcacctgagcccccgaattgctcatttcccccaaatcgagtttccgccaccgtaaaaaggtcctcaccgtggctagctcgattcaggtccgatcttg

SEQ ID NO: 106725 - DNA, 636 bp, Zea Mays
atcagagctgataatgaatttcaacaaagaagggaggaagcttacaagtactctgagttgaccaagggctttggggaaaggtttcattcaagacatgttagaacaatccacaacccaagtcaaagcgaagacaagaatagtcataaccaagggcagcaaagtaactcccaattaacaagggtgcaccaaagttccttcagactaccagccccaagaggcagaggaggtcgaagctttgaaggaagatacaactcccaaccaagaagattgtactgtctgttctatggagaggataagggacacacaacaaggacttgccaagtcacaatacaaaagaataatgaaatagctaaggccaaagcacgacagaatcagccgaagcaagttcttcacactgcttcgtactactctccatacatcccagagtatttacgtaaccaacaaccacttccacagtccacaacttcggttgcttcaacaagtcattctctacctaggtgggcattaactcaaccacccgcaccagtcccaacttcatcttacaattagcagcctcagggccagtatcaagatcagcaacaacgtgaagcaagataagagtccgaagctcgaaaagtcaacagtactgttctggaa

SEQ ID NO: 106726 - DNA, 412 bp, Zea Mays
gctcactacacactcattggggaaacattatacagaaggggtgcatcaggcgttctcatgaagtgcatcctctcatctactgggaagcaacttctggatgaggtccatgctgggcagtgtggaatacacgcagcgtccaagacactagtcgggaaggtcttcaggtcaggattctattggccaacagcaaagagtgatgcagccgaattagttcagaggtgcgaagcttgccagtacttgtcaaaacaacaacatttaccagcacagcaactgcagaccataccagtgacttggcccttcgcgtgctggggactggatatgattggacctttcaagaaggctcaaggaggatacactcatgtattggtagcaattgacaaattcactaaatggatagaattcaaacccattg

SEQ ID NO: 106727 - DNA, 294 bp, Zea Mays
gccagactctagccaacgagatcatgccacgtcgtctataatccgtgaaatattatttacgtaatatatttgcgttgtagatctatttcaaattgttccagttgagttagatttgtaataatatcgtctacttattagaaacattattttgtcacgacacatgttttgattaattaattaattaattgttcactcgaggattattaaaatgtagatttagttaaaactaagttatagttttaatatgcgctttataaatacctgttaatgtggttaatatcaactcaaatgttt

SEQ ID NO: 106728 - DNA, 446 bp, Zea Mays
aacctgctcctttggggccattcgatacggggccttatgaataggctgcgtacccggaatcagcttaatctcaaaagctgcatcgcgctccggaggaatgcctggaagctctgccggaaacacgtcagtaaagtcacacaccacacggatgtcctgcacccacaaggcagcctcaccctccaccaccatggagaaaaagatccctgacttccttgactggcgatctggaagcaattgcgccaacaaggataacgtgaactttggggaacttcccaagaataccacctccttacctgacggcgcctgcaataacactatcttccaaaaataggatataactgcgcgatactaggataaccaatccatacccaagataacatcgaatgcccccaaggaaatcaccaccagattggccaaaaagacctcatcagcaagaatgatggaac

SEQ ID NO: 106729 - DNA, 651 bp, Zea Mays
cccgcctctgccccgctcttgttcgtgcgctgaggtgcgcccctgctccctgtttaggccgagtgttggatcctgggcggcgagcttctgggcgcggtcaccatggtggagcgagcgccgccagagaaaaaccccaggtacgagaaggtcaaatccatttcaattcctgaactttctgaactagatggctgtgaattgtaactagtagctgaaactgagcctgtattttgtgcttgtgatcctgaaagtatagcttgagttcttgaatttttaggggtcacaggtgattgtggtagtggtgacactgagggtacttcaccacccccagaactctcaccctcctcacctgtaccagaaggatacaacatagcctgactgggaacagtgaactgaaactgaaaatttgagttttctgggccaacttcagtcaactgagctttgttattactgtcccagttccatgcctcatcttcttcaaacttcacatccctactgatgcacaatttttcagtaattggatcaaccattctgtagccttttgtccctggttcatagcccaataggaccattttagtggatctatctaccagcttatctactccggggcctattttcttgacatgtccaatacagccaaaagttctaaaatgt

SEQ ID NO: 106730 - DNA, 334 bp, Zea Mays
tcttgtgcacaacattgatgtcatgcaccaagaaagtaatattgttgaagccctcatacacacctgcacgcattttgaaaaaacaaaggataatctgaaagctcgaagagatctagcaatgctttgtgaccgaccaacccaagtgctcaatgacaacggcaagccgccacgtgccttgttctgtcttacctctaaagacaagatcgaggtaatgagatggatgaaaaaaattaaatttctcgatggttatgctgcgggcttgaaaagagctgtgaatttgaaaacgggaaaactaactgggaaagagcaatgacttccatatattaatggagag

SEQ ID NO: 106731 - DNA, 388 bp, Zea Mays
agtgagaatgagggtgtcgaagatcagccctagaggccaagccatgttgtcttcgagaaatcgacaatcaaaaaaggacagattgatgccatgaggggaaggtactttcatgacatttctattgtgcgggctggaggggacagtaatgtccctttgcctgaagctgacgaggtagttgtctatagaagtttcatgaaagcagggcttcggtttcctttgaatagtatgctggtcaaagtgctggaaaccttcgaagtcttccttcatcagcttacccccgagaccatcatcaagatagggttttatatttgggccacgatgagtcaaggacaagagccaaatgcaaaatgcttctgcaatatgcatgaattgtcttatgagatgaagg

SEQ ID NO: 106732 - DNA, 524 bp, Zea Mays
gccgcggtcgtggctgaagccgagcgggaacctgctggtggtgctggaggagtacggcggcgacctcgccggcgtcagtctcgcgacacggactacgtgaacaaggcaggcgaacgacacgcgttgcatctaactcgtacatgtatactatactccgacgtgcgagtatatacatcgattggtatttgtttagtgaggtgaggccatggcgaggaggagcaagcataccgaccatgccgtattcgcggaccgtatttatacacacgacaccgtacattacactcgcgtgatagcaatggttatactgcaaggggaaggtaaggatggcatttaagtgcagagcggagagggtgggtgcctgggtggtctccggccatcagtgcggcggcaggaccggcagctagctagctgcgccggcgcggcacacacttcgaggccaattcaattcaactgtttcaattcatgtaactggcactctggcagcgggtgtttgctgctgcttgctgtgtttttttgaagacgtg

SEQ ID NO: 106733 - DNA, 445 bp, Zea Mays
ctgatgtggcttggtgatattgatatgctcaactagtgtgatgaaggagttcattgcatatgaaaacataacatggtgtcttgtggatatatggaggagatcaagagacatggcttggcttcgatgaaccgagttgctagtgtgaatggcaagtcaaaggcttatgtttgagggaccgtgtggcagtgaagcaagagcaaggacttggcaccgatggaccaaatgcaacggtgaagagccataagtgatatgtgttcccacagacctcacatgtcatatgggtatctatggcctcgatgggttgcgcttcctttttaggtggcttttatattctttttagtaggacatccatttttgtagtaagcatgtcattgctctctagttgatggacctctcgggtatgggttttatcccttttctatttccaaccttgattgactgccat

SEQ ID NO: 106734 - DNA, 318 bp, Zea Mays
gcttgcaggcatttgcggagctgggatacgtgaaacacattgtggatgtcagacatggattctggtagttcaagacggtatgctgcgggtcctactctgcagatgatgggatagggaccgacaaatcgcggtactagctttcctttcacttggaaccttctgacaccacgcatcggggagaccttgaggtagacgaagtctccttcctcaaatctgagttctctctgcctgttgtccgcataactcttttgccgactctgagcttcaagtaatctcctgcggatcagggcaactttctcctcagcctctgtcacaccc

SEQ ID NO: 106735 - DNA, 443 bp, Zea Mays
ctctagtggcatacctggtaagtcctttggaaacacatatgggaactcggacacaaccttgatagcctcaattgggtctgcttcactgctatcaacagccatctgataacaacttcctttcttcggctcaggcgggactaactcggtcaccacttcctctcctagtggggacaccaacttgattgtcctcttatcacaactaataactgcctgatacttatctagccaattcatccctaggatgacatctattccctgagtacccattactatgagattagcgggaaacactatcccccttatttccacacttacattcaaacaaatgctatcggctcgaattctaccaccggctgagtcaatttgaatgggcgttgacatggtagttattggaagattatgtgcttctacccatgatgcagtaatgaatgaatgcgttgctc

SEQ ID NO: 106736 - DNA, 397 bp, Zea Mays
ctcgaaacgaagaattgaatgaaattgaagcctggtatattggattggcgtgaaattgtgcgaatatgttattgaaggtgttgtgaaggtgcctgaaaagtttgggttcaatcggagtaattttggctggtttgggcatttcaccgagcatgtggcgtgcggtgaattagggttatggagaaatgcctatttgaggtgggaaaccctcccaaagggagctcaaaacctgcaggagcatccaagagaggactagggactcattcatgcacttgattcacagagctttgacaagaatttgaattgggcaatcaaggggtgggtaggcttcaatgagcagtgaaacagagagaaaggagagggaggcagggctgctcactagaggagaaccaaggccgag

SEQ ID NO: 106737 - DNA, 875 bp, Zea Mays
gcaacatgtttcttagcgtgtggtgcacatgtgtggagtctagagatggtggtcaacaacaaaggtgaaagtcatgtgggttcgtgcagatggaccagaaaaataatgaaggatgagagttgggacttgaccaagagattagagaaattggatgactaactatggtggctaacacccgagggcaccaacagatgctaggacattgcagatcatgtcatcggtgtgtttgaggattgatgagacacatgttcaggatgtggctaacacaaacaccggtttggtggttgagcctaaaaaccacctagtgatggtttcgcaggtttggcctcaaaatccagggcgcgattatggtaggaatcatagatgacatatggagccattattgaggttgtatcgaagcaaagaaaatatgtgaatggatcatgaccgtcaggtctatggtttaggagttggaccataattcccctaggtaagtggtctagtcctaaaatatccatgggtatattgggaatgtgtaataacatctataaataataggagggttgccccccaccagccgtctctctaacatccatctaattgtttagttttcaagctctctcttgtagtccctccctcaagactgctagtgagatcctaggtattatagcagacaaatttttatttatgcaacttgaggtttagaaagtgtggccttaccacggtggttcatggtgaggtgaaatctattttggattttttttctttacaccctactctctttaatcttttattggatcttttgaatatgatttttgggggatttttgggatgaatagaaacatgcaaggacctctagggattatccccaccaagtggtttgggtaggttcaact

SEQ ID NO: 106738 - DNA, 519 bp, Zea Mays
ctagaattcacgaaggatgagcaagacacaatatggttcaagaactagatatgtattcctgatattgatagcctccattagattatattgaaggaagatcatgactctgattactctattcatcctgggagcactaagatgtatcaggatttgaagcagaagtactggtggtatgggctaaaaagagatgtggctgcacacgtggctatctgtgatgtgtgtcaaagagtcaaggccgaacaccaacgaccagctggactattacacccgtgaaaggtacccaaatggaagtgggaagagattggtatggatttcattgttgggttgcctcgcaccctgaaaggatatgactccatatgggtgattgtggacaggctaaccaaagtagctcacttcattccggtcaagactacttacaagggatctcagttggcagagttatacaaggctcggattgtgtgtttacatggagtaccaaagaagatcgtttccgatagaggctcatagtttacctccaga

SEQ ID NO: 106739 - DNA, 390 bp, Zea Mays
ctattgtgttttgcctctttataaagaaaataaaatatggtgtcatctgctatatgcaaacaatgtgatgctctactctagttgccctaaagtcccgctcaagtctttctctcaatttgtgctcaaagaaatattgttggatcagaaagatgatttggatatcatgctctgtaatttataaggttcaaaaggatctatgttaaggattataacacttgtacgctcttgtagtatgatgaagctaggagaaatatgaaaccacccttgttccttgactaatcttggaaattaaaaagttgtgttcgccctttatcttcatatcgtacaagcctcttatgtaatcttgtctcactatctcttttaccctttgactagatgatgaaccccaat

SEQ ID NO: 106740 - DNA, 350 bp, Zea Mays
gaagaaagcatggaccccgcactaactggtttctacgaaggcatggaaaggaccaatgttgagaaaattactgatcaaatgttagctaggttgtctgggggttctagtgatagtgaggattttgatgtggaggccaagtcatgttgtatttggaaaatccactattaagagaggacagattgaagcaatgaaaggcaaatattttcgtgatacaactatagtgagggtcgaaggagaaaacactgttcctcttcccgaagctgatgaattggttgtttataagggttttatgaaggctggccttcagtttcctcttcataaaatgctggttgaggtacttaaaagatttg

SEQ ID NO: 106741 - DNA, 389 bp, Zea Mays
ggggcggtgcctaggataagctctatggcgaactcaactttcctttcgagtggcatgcttggtaactcctcgggaaatacatcggggaattctgacacaattctaatatgaatttgcttggactccttgtcatctaccaacaaatagtgacaggctcctccttctagttcaggcaagtacagtttagttactacttcctttccggatggggacaccaatctgactgtactcttatcacaactgatggtggctttgtttctgtatagctaattcatccctaggatgacatctaacccttgagtaaccatcgttactaggttagcggggaagtctatcccccttatttcaatccttagattcggacacatcctatcggactgaacttttcc

SEQ ID NO: 106742 - DNA, 549 bp, Zea Mays
gagaagaccacttgccttgcttaaaggaaacttggggttctacttcaaaattgaatcttgattctcaaatatgggatcaatcactgaacatcacataaacaaacaagaagaaacaaacaccactcaataacatacaatattcaccgtagacaaaattaaaagaaagcataacaaaaagagcatttgcttttcaaaaaacatcacaagcaatggttataataaaagacgctattttgcaaaaagtttggttcatattttataaaacaagacttaagcttgaaaatatcttaattataaatttataaccattaggtgaaccaatttaatctttttagaaaaagttatatagaataactaaggctatgggctaaaggattataaaacacatttattaaacacttagttatgaagcattataaaacacattattaaacatttttagaaaagatatataatatatatctaatgttatgggttcacaagattatacacataataatgaacatcattagttatttacttttgaaatactaaggttatggcctaaat

SEQ ID NO: 106743 - DNA, 351 bp, Zea Mays
ctgatggtcttgacctgaagtactaccctcgccgttcgaccggcagtgctagaggtgtgattgcctcgccagttggtgagggcaatcctaggctgaacaacatggtcaacttggctgtcgtgctcacacagagttggatcacgcccttgacgagttgggcaaggttcgggcggaggttgcggaattgcgtgatgagtgtgcagcacaccactatctggatggtggttcacccgcccctgtcaagattcagcacccttaccgttcgccgccccgtggtcgcttcgactatggtaccccagactataggacctgcatatatttagatccatagatcgacagagtcggagtctg

SEQ ID NO: 106744 - DNA, 478 bp, Zea Mays
tgatcacatgcaaaatttggagtaaaatgagcacaaagtcggctgtcagtcagccctaagtctgaattctgattaacattgaagttggatgaacttggggatcgattttgagtaggatcatgtgactatttgatggtggacactataacaaagttagaaagggattatagggcaacaatttccctgcttgtcgaaggccaagttgttacacaaaaattgaagaacggagcactacaaatcgctctgtcagaaccactgatgactagcgcgatggtacagtgattggatcagatcgccaagatcagtgtacctcgtcgccggtgacctccacactgcaattcccgtcgatgccacgattcgtgccgataaagagtagataactgtgagggttaaaaagatctcggggaagaaggtcttggccggggctaagtcaccgtcgtacccacttgccgcgcggtcggtaaaatatcgtcgccgg

SEQ ID NO: 106745 - DNA, 471 bp, Zea Mays
cacacacccagccaccgaaaagcactagcaatcgttcgtcagagagcttgaattttagttttcccccaaatcaagtttccgccaccgcagaaccaagctcactgtggccagtcctccacaggtttaatcataccatccttgttcttgttttagcatctctgtgtgctggtgatgctcaccaactcgcccaattgagctaagatcccatcaatcactgggaacgtgtagattgttagttcatccgcgcgctcaccgtggccagagacattggtgtagttgtttatgaaattaacttggggaaaaccttcactaggccctgaatttggtttagaccaacgtagagcgccagtacttgccccaatcggccgacctacgtgcttgccggagctcgaccgcgctcgacgccgtcgtggatcaagcagtgtaaagaaatagaaacttagggtcctttctgcagttgtcagtgacgtg

SEQ ID NO: 106746 - DNA, 584 bp, Zea Mays
aaaggaactcctcaaattgctctgtcaggcacgctgaatgaacatcgccatggtacagtgaaccaaacaagattgagttccgtgtgctcaccgcggacgtccctccaccgtgattcgagctcgtgccatgatggtgtcactgagacatggatcaatggagtggtaaaaagatctctggctcggattcgatgatcgagttactgctctagccacggacaccaggtgtcctcaccatgtttcattcaccgccgctgtagcaagccaccggacgctccggccgtccacgcagctagttggagtctctcgtgttgaaccacagtaaagcagtcacagtaggtccgccatgttagtggcctatggacaccgttgaggctaacgtggagctccttaggctatcgccgccgccgtgattcagcggtcaaattgaccaccgtcgtggtgactccctttaaattgagcctactcccagtcccgcctctccgttacgcacccaagccaccctttgtttctcccattccaccgttagtagccaagaacaccagtttttccccatcggtggtaaccagcgccgccgagtggtgcac

SEQ ID NO: 106747 - DNA, 468 bp, Zea Mays
gatatgtgtccacttggtcaatagcatattgggagaggtgattaaacttgttgaggtactacatcacggaatctcccccttgcttcagacatatgaactgctccagcttcatttgtagcaccccttccggaacgtaatgttccctgaacacatgtttaaattctgcccacatgaccagatgtccagcaggctaaatggctaaaaatgtttcccaccaagtgctggcaggacctctcaactgttgagcggcgaataggggcttctgtttttcagtacatcggatcagcctgaacttttgttccataacccgtacccattcatcagcttccaagggttcttctgccttgacaaaaaacggtggacgggtttcagaaaattccatgtaagtagtgtctcgtggcccttgaggttgacctcttcctccgtgttgttgaaattgatttcccgccaattcacataggaaacgcg

SEQ ID NO: 106748 - DNA, 435 bp, Zea Mays
aaaaactttattcccaaattctcaaactttaagttttcaaattctgtaccttcaggctgttgtatggaaggttgtcctcaagatcatccttcgacatggcagaaaggcctacctcgagctttggaaatcccatacttttagccatctcctggcagacagatatctctttgttatccgggagacaatataagaaatcatcttcgtctttaccattgaataccaaggctccttttgggtatttcagtttgtgggcataatgattggcctctgcaatctctccttcagataacctctttcccgaagcatgacgaataataaaatcaagattcttggatagagcttcggcgccaggacatttcgcttcttcgactatttcttgttcagcctcttcctcagttgtagcgggcttcatctcaacagactctgaaggtacag

SEQ ID NO: 106749 - DNA, 293 bp, Zea Mays
acaaatgggtaatacaaacttctgactcattgtagcttttaagagccaactccaagaatgacatgcaaaagacccgaagaagtgtttttggggaaaactctgttttcttcccctccaacaggtctcgcaaggttccctaaattttttcgctatcacacattcccgactatccctcatatttttgtgaggcgaaatcctccccaatcccctcgcgcgcatccaccctgcttgttttcgtgtgtatttttgccatcttgtgcattggcgaagccatggcaagaggtggtggcggg

SEQ ID NO: 106750 - DNA, 316 bp, Zea Mays
gtgttccttaaaggtctacctggtatgccacctgagcggaaagttgagtttgccatagagcttattcttggcaccgcccccatttctaaaggagcctacagggtatctagaccagagttggtggagctcaagaagcaaatagatgagctgtctgagaaaggttacaacagaccgagtacctcaccttgggttgtccctgtcctgttcgtggagaagaaagatggcactaggaggatgtgcattgattaccgagctctgaatgaagtcacaatcaagaacaagtaccccctgcccggaatataagatctattcggcc

SEQ ID NO: 106751 - DNA, 420 bp, Zea Mays
gcccccctcaccgccggtgacctctacgcaaggattcgcgctgatcgcggtgattcgtgcaggactcgggcaggatagtaccgggcgggtgaaaagattggaaggggagtggatttggtcatggggtgaagcttatcaaccgcgcctgtagccgtgcgacgtggccggacagccggtgccgtcgtggaactccggacctcaattatgccacatcgtggctctttattgcacaatagtaaccgtggcacgcctaggcttaccatttcagaaccgctgcaccggtggacgccacgactgagccactagtgaccttccttctctccagccgccagcacgccatgccaaaattaggagccactgcccttggaatctataaattgagcataccactagctctgttaggtaatcacgaagccagag

SEQ ID NO: 106752 - DNA, 272 bp, Zea Mays
atgacgtggtaggcatacaacacatcgtcaggactcacttcctctcccctagttgcttccactcatgtaccttgagtacccttgtgtcatttccacgatattttgcgccattcgtggggacaaacacatgaccacggggcaaacgagctctccttcgtaggcccctttaggttcactgacatctataggctagggtgtgtacgcttggtaatagaggaaggcacgcctttgtccaactcataaaatataaaccgcctctgtaagtttcatcc

SEQ ID NO: 106753 - DNA, 481 bp, Zea Mays
ccccaatagcacaaaacacggaagaaaagaggaaaaaaataaacttcaatttcttttcagaaaattgggtaccacactctaccccttaaaaagaattcgacctcgaattccgacgcttctataggaacgacaaaagaaagattagtgaagacaaagaaactcacccataacgaaaagttcggcgtacttctgccgcatcagctcctcaagttcccaagtagcctcgcgctcagactgattagtccacaagaccttaacatacttaattgatctccttctcatgacacgctccgaggactccaagatacgcaccgggcgacactccagagtcagatcctgctgcacagcaatcggttccaattcgatttgatggtccggatcctgcaaaaacttcctcaacatagagacatgaaataccgggtgtacccctgccatggaatccggcaattgcaagcgataagccaagctaccaacccgggcc

SEQ ID NO: 106754 - DNA, 756 bp, Zea Mays
gataattatgttacttgggctacgaagacccagttgcaactcatggaggttgtggtgcggtcggttgtagtagaccgtcctcctgaagactatgatcgtgctgtggatgatgtgccaactgtgcctgatgctcaatctggccccaattgatcccattaagtcagccaggagatggcctgcagacagattctgttgcgtgtatccctttagcacaaaccaattgcagtaagtttcattggcattacatcttcattttggaccatgagcactttgctcattccatttgacatgggactgatgatcttgtacatgttgcaggagagaccgctactcttgtggttgatcctcagaccgtggcacgtggctgcttcggtgatggatttattgtctcgaacagtcctgagtttaggaatgaagaggagccatatatgcctttgctatggctgccgattcatatgatgatcgtccggttggtgaactcacagagagtgacattgagatgttgcgacgtgtttttctagacgcccgggatccaagagtgcatgagttcagcgatcttagtctttctcatcaggcaaatgcagaaggaagggatgatgagctgctatatgctcctgaggccagtcctagcatgatgattgaaagggtagggtcttcaaggacctgactgacttgaagaggttgttgcagcattatgcagtcttacgtaagaggccgtatagagtacttcattcgtacgagaaacaccactctcca

SEQ ID NO: 106755 - DNA, 557 bp, Zea Mays
tcaagttatggttttccagggcacaaattggtaggaaccgtagcggcggctatagaacacaggggcacaaacctcccaggtataagaaataggtaagcaccagatgatgaaacaaggagggctgcaatgcaatgcggcttgcaacctaatctagggctagcgtggcgagaattcacacaaggcggctagcgaggcaaatcgagtaatgtggtgtctcgacttgtaatctgggtaaggtggatgggatagcggcggaaacaaataacagcgatggagcggttgaactacgatgacgacacgacctaaaccagcaacaagactcgacacggacacaaactcaacaaagcaatctgaaatgaaattgcaaggctaaacaagggttctaggacagcggaatatattttttctatggcaattatctggagttataggatgaaaaacctaaactaaactagggtaagcctgacggtaatacctgagtctttgaataccacttgataggaacgagggtgcccgatcttccgtcaggtgaagataactatcgatttggtggagat

SEQ ID NO: 106756 - DNA, 389 bp, Zea Mays
ttttgcatatcagttgccaaagtctgatcctgaatgtgacacagatttatgtgatcagtccgaatcacaaaaggtcctctactcaaataacatctccacttctctactgccattaatattgcaagacattccttctcataagttgacagttggctgtttttgctcctaaagctttactataaaaagccacaggattccccttttgtgacaacactgctccaatgccagtgtcacaagcgtcagtttcaatgacaaatgtctcactgaaattaggtaaggcaagaacatgagtggtaatcatagcagccttcaaagcctcaaaggcagtttgtgctgatgatggccatccaaactatttttgttgcagtagtactgtcagaagttttgcc

SEQ ID NO: 106757 - DNA, 515 bp, Zea Mays
tcgtgcgaggacatggcatggtggccgttggatactaatctacggtagagattagatgtgggcttactcgttgggagattaggtctgtgccgtcgattctcagatgggtggccacgatctgatcaggcgttcctttcacctaattgaatcgtggccgtgtgtcgtggatcggatggatccagggtgatctcggcttctttaaatccgtgcccttgatcttagatccaagggttgctgctgcgtactgtttcaatattagggcatatctaatcagggccgttgagttccgatctgatgatcgagatctgtgcataacccttcgccgcaacatcttttgcataagagccctcgaggttttgtgaaaacaacccgccgtccagggaccctgttctctatgtctgggatatcttgcgcatagcccctgccttctctggaaattgaggcccagtccagtgatgtgataaattgaataaatggattagaaaataggtttttagtataaaaataaatccata

SEQ ID NO: 106758 - DNA, 600 bp, Zea Mays
cgaataatccactacattccacgtgagtacaagctccagcgtatctggcgtcaacgtgtgtgtggccatcaaggctacgacaacgaataagcctccgtaacaagcgcaacaggcgcaattgtggctcgatagtcggggtacaggataagtccacgcaacgtgcgcaacagacgcaattgtggctcgctgatcatggcggtcgaaccgtgcctgcagggcatgcaaaaaattcgcgactcggtgatggcggtccgactcaacgggagtggtccgactaagtgagagtacaacatagcaatcacatgacgcagccaagttcgtacgacacaaataatgtgtcgtgttgccagggcgcaaccaatgctcgccaatgccataactcaaccaattaacaacaaagtctgatcgacatgtttgagtacccactacagtttaatcgctcgatatgagtccaaaagctcaacataatataaatatttagagcgatttaaatatacacaatatagagtttacatgcattttaatattttctgctaaatatctaccacgataaataaaagcagaaaaataaacaccaaaattaatgcatgagcataacac

SEQ ID NO: 106759 - DNA, 358 bp, Zea Mays
tatacatcaaccatacacacacagattattcatcatccaatgtgatggacccctagatcaaaaggtctaattggaccaatccaccattgaaccaaccacacgaggaaattaagtggaccagggaccagtcgaacaggaactaaaatggactcacacgtgttaaacgggttgattcgcctgccgcccttagcgcgcaacaataaatatttatccatttaaggtttacttccacgtacagtagtaacaaaaactagtcattcaaggtgtacttcaactattcaatgtttacttcaaccatttaaggtttactaaaacgtacaacaaaaataattattcaaccattcaaggtttacttcac

SEQ ID NO: 106760 - DNA, 449 bp, Zea Mays
ttaacttcgtcaaaagactgagcttcgtcaaaactgcaaaaagaaacatcaacttcgttaaaaccgtaaaaaatccatcagatggccagagtgcgttcgactgcaagggtaactcgtgaaggagaagagaccgaggtcatcgagacagcaccattttccgaagttatgaaacaatcaggtctagttgtgacagagggaactactgacgaaggtacccctgttaccaaagctgaacagaccattgctgaagaagaagatattgaagaggatgaagaagattatagtattttgatcccaacaaaacccagccatctagattttgagaaatctactgtgtctgaagctgacatgcccatgatgatgaagttgggctactttggggaagctgaaaggaaacttgtccgatttgccggagaagagaccaccccagcaccgaaaaatgatgaagt

SEQ ID NO: 106761 - DNA, 405 bp, Zea Mays
cttcgtcctcccgatcgttgcagagatgccagtccctagtggcggtcgaggcggtctccgagatcgcggccgccttccttggcgcctcggtgagtccgtgtcctttcctcccgtgccccacatcggttctaggtttttctgcaatacaatggtcactcttatgtgctctgtatgtaactatttactggtcaatgtgtatggtgtttgccattgtaggtggaggtgggtgaagaggaggctctggtatgctcaggttcactggtcgcagaagcagttcggtgtgagttgcgctccatgatgcttgaccatgggtggaggtgtctgggagagaatatttacgtggactcgaagtttgatcagaatgatgggaggactgatctgtgcgctgtgaacgtggtacaatgt

SEQ ID NO: 106762 - DNA, 799 bp, Zea Mays
gccaatgtgattaactaaatgttagtcacgaatttaatctactatttgatcgagtgaatggttgagctagaacaaggatgacacgtatctcaccttgattttgattgatatcatgcgacaaagggattagtatgtgaatgtattaaggtttggctgatatgatctttatatacattcaggagttagtatgtcctgctaagtaccgctactgacttgtggttcggaaatggttcccgttcactgccatctacacatgaaccaaatgggacacacccttatggggatggaatattggaacttgcttatatgattgtctctagtgcaagtgggagattgttgggggatatgcccaagaagcaattataaacaatttagattagagtcttactcgtattaggattatagatttaatgggccacgacccatcaacatgctctataaatatatgggaaggggctagggttatgtcattccaccacacgtgcaaaccctagttgttgccttggacccgatcgcgagacccttgctgcacacgcggtgctagcacatagatgtacattttttgtccccgtacatgtgaactacatggaggcatgactatgactgatgtgctgatcggctacggaggaggagacaatcgtaatcaactatctcttcatcgacgtgtccctatgttggatcaatactctaagtcttcttctgatgtgctgggcgtctagtggtaacgatcttgatctcttacttgcaagtttcttaggtgacatggtagatgtggctagcccgttcccttacacatata

SEQ ID NO: 106763 - DNA, 494 bp, Zea Mays
gcgccttgtccggccctgtgtcactcgcctctctgacagagggaagggctggtgttagtgggacgtcaggcttgtaatgttaaaaccctactgtcctcttaatggaatactggcttctgttatattttttttaacatactagcttcggcctgctcgcgaaaaaaagactataactgctcaacttatgaactatgaaccacaggtaatgcctaattcactaggctgcctattaaggtgaatgcgagcttagtctatccttgatcgaaattggctcacacctactgactactgtatatggttttaagcaattccatggtcaagctaatgtgtttgttacaacttttaagctttaaccacttatggcataaaggctttttgcctagcatgactgtttgccctgttgatcatgttttttacactttgtcgtactcatatctgtggttttttgctcatatttgaactctttcctttttagttgacagccagaattcaag

SEQ ID NO: 106764 - DNA, 308 bp, Zea Mays
cgcaaccatgctaccttttaccatttgtccatagcatgaagttcctccatcatcatcatcaagccacttgatcaatagcccagatcaacacatggcttgataacactataatgatatgatccactccatattatcacatggccttcttgtttcattgatctcaacatagcttgctcttcaccgttgctttatgtccatcagtgctaagtccttgctcttgcttcaccgccgtgcgatccctcacacatgagcctctgacttgcccttcacactagccactcggtccatcgaagccaagccatatctct

SEQ ID NO: 106765 - DNA, 373 bp, Zea Mays
ttcactgtgacacttgccgcgcattggacagaggtgtcctcgccggagtttgccgtcaatcatagccgcgccacgtgcttagaagaactaccacgtcgcagtagatattcgtatgaggtctgttcgtcgctggaggcattaccccggggaacgccacgatagttcacgccggtgactcacctctcccctcgaccgccggtctccccctttcaaaattcggcaccaccgcttagcgcccttataaattgacagcacggtctgctccgctatgttatcaccaagccagagcatccatccctgccctcgattagccactacaaccgttgaatttgggttttcccccaaattggttgattgcgccgccgtgaatcac

SEQ ID NO: 106766 - DNA, 394 bp, Zea Mays
taagacgatgtaacacgctcactcttacaaacaaagggtgcacaccatgccctactaaggaagtcatatacttgaatcaagaagtggtttaactcggtgtcacgtacatgcatacaaacacacacaaaatgggtccgagcaaaaccccatcaacaagaacaaaacaaaaatccacggatgcccactatgttccccatgcacaattcatcacaatacagcaaagcaactccaaaaactcatattcaaactaaattgtcaaatacatttacaaaaaggagaagtgtctccaagtcaagcaacaattgttctactttccaagtttacaatgtatcatacaggagcatttccgagagtggaatcagccagaggaccactaagggcaggagccttagcc

SEQ ID NO: 106767 - DNA, 396 bp, Zea Mays
caggaatcggtacaaatatcacaagaaattgacaaaagatctaaaaaatagttacttgaattctgattaaaggaggaaagaagggatcgttaatgccctgcaaccgcaacttccaattttgggtcggactcaaaagctaaggaaactggctgatgcattatcgttatccatccaatttcgggtcggtctccaaaggcctgatctagatgcagtccagctgcttaaatccaacgccctcctttccattcccttctcctggcgcttcctctagtgcctactccgtgctcgctcgctgtcggcttccgcgatcaacccagtctctcttctcctcgccgatcgaatccatcccatcgacagctctcctccgcccgcgatggtgatgcatctgtattctcg

SEQ ID NO: 106768 - DNA, 276 bp, Zea Mays
atcttcaggaacgacatcatcaagggcccgatcaaaatctgctatggacaactcttgaaggctgacaagagcagacagagccggagaaggaatatcactatcccccgtactacctctgtaacgccggctattcttatgaattagcggaacttcttcttcctcttcttagtcctcataaaaaatacggacaatagccggtgcacggacacacccattgggttcagcttctgcacggtcacccccattgggttcagcttctgcacggttacacccatt

SEQ ID NO: 106769 - DNA, 395 bp, Zea Mays
gcttgttcgaagggctgcgtcctatttaggaaagaacacactgaggcaaagtactatccgaagtgtaaattgtctaggttcatggaggtagactctggtgatggacagaagaggcagctcaacatccccgtgacaatcctacgccaccttccgttcataccgaggatccagcgtctatacatgacagaggaatccgcgaaacagatgacatggcacaaaaaaggcaaatgatacaatcctgacaagatggttcacgcatccgatggtgaagcatggacccactttgatgccattcaccatgagaaagccgaagaggctcgtaatgttcgtgttgcgctggccacagatgggttcaatccctatggaatgaccactgccccatacacatgttggcc

SEQ ID NO: 106770 - DNA, 352 bp, Zea Mays
tgcatggataggcacgtcaggcgagcgaggagcaaaagggatacccgtagagatagactgatgacggagattatcatccgtctcccgctgccgcctggccagctcgtgaacatcagcagaaatattcctgcacatggagaaaaaagctgctatcccatgccgcgaccacgacctcgaccatgaccacgaccacgaccacgtggtgtgggagagccacgaccaggagaaggacgagagggaccagcagtagtttgctcacgagagcttgcaggagccttcctcaaccgccctgctggattattagggtcaatccagaaaggggtgtaggagagatgtctggtgcccttttcat

SEQ ID NO: 106771 - DNA, 449 bp, Zea Mays
tggatttatacccagggcggaaggagaaaatgtccgagcagggaagggcacatgcttcggtgatctcggtgatccgtttgccacaatcttcgaaccgagcggagccaggaaacgtccgccgagatctccgctgcatttgtttttctgctgcgttggcttcggggtgagcgtaagagggaaggtgtggattctgttatagggctatcgctgccatctcggccccgcatggaagtggcaggagcacaagagcgcagagtggctggtcgtggtgactgaggggagaagctagcgccaatggcccacctgtaagcgccataacaaaagaaaaggagaggagaaggagatgggctgcacggtgagggttaatgggctagccagttagaagcaacccaattagggttttgtttcctttattctttttcctgctttcttattccaaatttctattt

SEQ ID NO: 106772 - DNA, 545 bp, Zea Mays
attctggcttgatcaaattggcgaaccattccggatttctcgaaatcgaactgcagagtaaggcaaccttagcttactgttttcctgtgatccacgtttagttattcttcatgtcgttttgactcagaaaccattcccgaaaggccgaaatggaattgctatttgtccagtgggttgatttgtattttaactactgtctggctgattatttgtgagacaactgcagttttaactactgtcatagctaaaatgagctctgttgtcaatgacacatcacatcaatgagaccatagacatctaacatttttttttgctactatacatatagagacataggttggaaaattttctggctgtcgttctcctgattcggtcctccaattatatagagctaggcggctaggcccgatgctttggtcggcaggatataacataaaatatataataatgtacttatcgcgtcagaaaattgtgtggatgccaacgtcagtgcatctttatggtgccatataattacatagattttaaaaaccctgcccaccgac

SEQ ID NO: 106773 - DNA, 383 bp, Zea Mays
gcttacttaactcagggtgaccactatgccctgctaacggagcaatcggcttaagtcgacaacgacttaagacagtgcaacatgctcacgcttacttaactcggggtgaccactatgccctgctaatggagcaatcggcttaagtcggcaacgacttaagacggtgcaacatgctcacgcttacttaactcggggtgaccactatgccctgctaacggagcaatcggcttaagtcggcaacgacttaaggcagtgcacatgctcacgctcacttaactcggggtgaccactatgccctgctaacggagcaatcggctaaagtcaacagcgacttaagccggtgcaacatgctcacgcctacgcaattcagggtgaccactatg

SEQ ID NO: 106774 - DNA, 278 bp, Zea Mays
attcatctgtgattttaaactaatccttgcccttctatgacgtatgcgtgcaacttgatcaacacctcctcctgtcctagtattgaccatctgagttacagaaataatataagatagatttgcagataagacagatagctaggtacggaacacatgacttttaggttgagatctttgagtcattatagcttagttgggtaaagcactacctatctatcattactatactatagttatgttggtacattctagaatgtacccactatactaggtattat

SEQ ID NO: 106775 - DNA, 462 bp, Zea Mays
gcagtcttttagcataagaaaagacatatggaaatcttcatagcactgaacaattgatcatcttcactgactcccaacacaactcttcagataaagaggaaagtggaaatgaataggttgcccaactaaataactgactttattaataactataccaagttgtaggggatgcccacaccttggtgacaatcattacaaagatccaacttcattacaagttcatcacgacaagcatcaagacatatgacaagcaacctaactctaactaagactaagactaagacactgaattaagcattattaaattctccgactctatcgatctatggatccaaatctatctaggtcatgcagtcaggggtaccataatcaaagagaccatggggcggcgaacggtaagggtgttgaatcccgacaggggcgggagaaccaccatccagatagtggcatgctacgcgctca

SEQ ID NO: 106776 - DNA, 626 bp, Zea Mays
aaaggattgcaaagctggagcgatagtagagtgggacatgtgaactcccaacttgcccttgctcatgaggtgctgcataggttggagattgcacaagatgctcggtccttatcgctaagtgaaatttggctcaaaaataaattgaagaagcactcccttggacttgtctcattaaagcgcaccatcgctcgtctaagatctagagtttcttggctcaaagaaggtgatgctaatacgaaattgtttcatatgcatgcccgtcaccagaaaagaaaaaaattgtggcaagattggttgctgacaaccaggttttcactagacataatgagaaggccattctaatggatcaattctattccaatctgctgggtgtcagcattgatagagattgctctatcaatcttgaagctgtgggagttccgacctttgatttggctgctctggacttgcctttcttggagaaagaagtgtgggaaacagttaaattgctgccttcagataaggctctgggtcctgatggtttcacaggaggattttataaggcctgttggtctataattaaagtggatataatggcagcagtttcagcagtttggagcaggagatttgcgcagttcaataggctg

SEQ ID NO: 106777 - DNA, 468 bp, Zea Mays
tgctgactttgtgttcaagaatattcagcccttaaaggatagggtttaccccgcctacttgtatagcagcttaagcgactccactcgggtcacaaatagaagaatccccactaggatctgctgagtcgactggacatgatcctgaggggcagagtctcgaatgctggtgctcctgtggcctactatgcatcgaacttgccgccacttaggccattttctgagtttgtatccaaccccccctgcttatgatggtttcccgggtcatagagtgcgaccctctcatgtggacatcgaagccttgatcactccacttcagagccttcccaaagatgagaagcagactcacttcgagatgccagccaacactgatgacgctgagatagatgttgtgcttagcctgctggccagggaatcatccgactctacccgcaccgagccaatggccatcacgaccgggcaggaatttgg

SEQ ID NO: 106778 - DNA, 676 bp, Zea Mays
aactgtcaatctgcgtactcgcctagctcggggtgaccactataccctgctaacggagcaatcggcttaagtcggcaacgacttaagacggtgcaacatgctcacgcttacctaactcagggtgaccactataccctgctaacggagcaatcggcttaggtcggcaacgacttaagacggtgcaacatgctcgcgcttacctaactcggggtgaccactataccctgctaacggagcaatcggcttaagtcggtaatgacttaagacggtgcaacatgctcacgcttacctaactcggggtgaccactataccatgctaacagagcaatcggcttaagttggcaacgacttaagaacggtgcaacatgctcacgcttacctaactcggggtgaccactataccctgctaatggagcaatcggcttaggtcggcaacgacttaagacggtgcaacatgctcgcgcttacttaactcggggtgaccactataccctaccaaaggagcaatcggcttaagtcggcaaggacttaaggcggtgcgacatgctcgcgcttacttaattcggggtgatcactataccctactaacgggacgatcggtcgaagtcgttaacgacttaaatcggctcgataccctcacgcctacttagtccaacaccagcacgtttgcaactac

SEQ ID NO: 106779 - DNA, 928 bp, Zea Mays
tagcctattcataaggccccgtatcgaatggctccaaaggagcaggttgaattgaagcggcaattagatgatctgctggctaagggtttcattaggcctagcaggtcgccttgggcttccccagtactgtttgttgagaagaaggataaaagcaataggttatgtgtggattatcgggctttgaatcaagtgacaatcaagaataaatatctgctaccccatattgaggttctctttgaatagttgaggggtgcccaggtgttctccaaaattgatttgaactctggttatcatcaattgaggatctgtgaggaggatattgagaagacatccttttgcaccaggtatgggcattacgagttcatagtcatgtcttttggcttaactaatgcccctgccacttttatggaagcgatgaataggatgttgcatgagttcttggacgactttgtggtcgtgttcctggatgatattcttatttattcaaagactgaggttgagcatgggcagcatcttcgtctcgttctgggtgctcttaggaagaatcagttttatggcaagttgaagaagtgtgccttttggctgtccgaagtggctttcctggggcatgtgattaatcagcggggcattgcggttgatcccaagaatgttgcggctgtggtggagtggaagagaccctctagtgtctctggaatccaaagtttcttggggctcgctagatattatcggcgcttcgtaccaaatttttccagcattgctaagcctttgactaaactcttggagaagggtgttctcttcgtctggtccagcgattgcgaggtcagttatcagacattgaagaacaagttggtggacgcccctatcttagctttgcctgagagcagtaagcgtttcacagtttttacggatgcttctcgaattggtcttg

SEQ ID NO: 106780 - DNA, 540 bp, Zea Mays
tcagacttcaacatgacttatgtttgtgggtgaaacacatgttcaagcagacacatgttcaggcagagaatcatattacaaagtaaatgaacatgtcaggaattgtactgaacaataaagaacataaatgtattgcatggaaccacactgaattgtgacatactcaaggtgtgagttgaatgccatatattggtgaagacaacaatggtacaaaagggtcacattcctcagaaacgatacaaatagaatttgttaagtaaattaatagctgcttgagttgactcaacatcagtgggaaaatggaatagactggcatgggtaaggttaggcaactaacagtttcaaaaccttggttgcattggcaactacgggtcaactgatgtggttctactgtcgaccgtttgcatctcctacaaacatgacgcccaaatgtagggttccaagttgttccgaatgcccagaccaattagtgtaggtttggccatcccagcggttggtacagagaaaggttgttcttacgggggctaaatctgatgacca

SEQ ID NO: 106781 - DNA, 530 bp, Zea Mays
cagccactgctctccacccaagcgggggtacgatgttgccacgtggcccatggcacatctcagaagctgtcaggcatcgtttgacgtgggcctctgtcatggaggccacccgcattaaatacgggcaggatgcccgcatgttcacactagtggcaggtggcatgcgccccacattgaatgcaggtggcgtgtcagtccgcaaggcctagggcgcgccagtaacctgcgtattatcgaggcgaagaccattgacccactgtgccactatgggtaactcccatcatgacacccactgttctcactacgacaccaagcgaaaagacaggcggagggaacaatacaacaccgcctacctactcctctatgcaagactacgtgacactctatgccgcaacctacgccagagccttcacccacacgctgacaagacagcgcgaagtcgagtctggctagaggagcccacacgacgaacaagataagatacctgtccaccacgggggaagaccttagtcctccagctctatccgtcg

SEQ ID NO: 106782 - DNA, 373 bp, Zea Mays
gccggaccgacataacaaacgcgctagatcaagtgcacaagtcccccacgggcacgtccggatcagcgaacgcacacaacctcatcatacaaatcatcataccaattaaagttacacacatacagcgagggcatcacaccttacattggttcaaccttcgggatgatacccatctccctgtagttaaacagcattatccttagctcctcaccctcaaagagacttcgcaactccccctcacctacactcggcccaactggtgaggacaacaattcccgcttgccagccctatccagacgaagacgcccaccctccacctcactcactctacgcttcgccaccgtccttcgccgcctgcgcccagcactcggac

SEQ ID NO: 106783 - DNA, 365 bp, Zea Mays
ttagaatccaaattcagagcaacaatttcagttattcatactaatgtaaattcaaacaaccttatcaatttggaaataccaaaaacaaatttctcaaagtaatgcctctaccaaatgtgaacataccaatatacatctacttcgatagaaaagtcaaaatggtttttaagtgctttcgaataaataggctaatattagttctcatttcaacacgcccaaaggtgactcatgtacctctatttaactgacagtaaattagcaacatcattggtggtatataaatcctcgagaggtgactaaagaatttgtcgaagaagttcaacagcgaggcaacaatgtcaaaagatttgtggcttgaacagtgg

SEQ ID NO: 106784 - DNA, 698 bp, Zea Mays
gcctatttaccccctctaggtaactttcagtgcgattgatgccaaagactaagtttatgagggcggacctcatcgggctggcctggatttatgagggtggggttggagccctagacctcagataaatgttatcttcttacaaaggaagagttcattcacatgctaccttatgggtagaaggtatggggccgacctaaccactaaagcaacgtcgagagttagacttgaaggttaagcagctttctgtgctgtctccatgggggtcgagggcagagcttgatggtggccaatgacgacaacctcaaacgccatggagcctgatggtaggtcaatgcagaggaccgcataggtcgtggcgccgcccttgaaagcccaccggtgcgcgtggtaggcccccatggggcccctatggtcagcacacaacctcctatgaggtcaagttgatgaagacatagcccttgctggcctccttcctgaaatccattggcaggttgaggaagtcatagtgcgactttgccctaccgccaaatgttagagaaagagagccaactccgcccaggaggcgtaatgcattcgcccaatgtccatcgaatgtcggagaagccacttcatcggcggactggggaaatcatattccagatcccccctacatggcacaccagatactagtccttagaatagggctaacgacctagtat

SEQ ID NO: 106785 - DNA, 698 bp, Zea Mays
caatattaatacaaaattataggaactgtaatgggttaaaaaggattaaatatgaattttctatgatttaaatgagttctagtattattcatacactagaaattcatttttctaattcatttatcaatttcccatgggtcctggattgcacgcacaaatagcgggtagtacaggggccacggtgtaaatcttcccaagacacataaccctctcgcgatggaccgcgggttggtttctatataaagcaggggctcatatgcaaatgtacgggatcgaaggggtaccagtgaaccctggccgtcggatcagaactaagggcacagattagatccagcgcccgccaatcccacgagttaattcaggtcgtccgatccaagatccatggcacaagagacgaccgcgcgtctgacttaatcctatccacccgatcagctctgaacgccccatattaaatgaactaaaacagtattcgctgctctgatcctgcccgctggtgcttgatccaacgaaccggagcctttcttctcccccagtgctgaccaaggcagcgcagcccaccgcgcggcggcgagactgccggattgtgcatcccaccaacccgagcaccattctccgattagctaagccctcacccaatcgatggctccttgaacctaattccccaaccagttgcatccgccatcaagcacaggcccctg

SEQ ID NO: 106786 - DNA, 424 bp, Zea Mays
caacattaacaccatttaaaaagacgacaacatgttatttatttacgtaacacaattacgacatcacaggtatgcgcattcactatgttcaccttaatcattcatttgttctcctattgaccccacaagagcaacaagacaacacaagtttaaataggacctaggcataaatgtctatgaaactactatatcacaatcaactagaaaaaaacatataaaacatgacacacatgcattattaagcctagtcatggcaagtctatattaatttagtgctaaccaaccatttttagcctaaagggtgaactaacaatcaaataagcactagcagaatttttggacagcaatacaacagtcacttgttttaatcataactcttcaattattagtccaaaaataccaaactaggactttctggaaagtt

SEQ ID NO: 106787 - DNA, 680 bp, Zea Mays
aaagcatcgtcacatgtaagtttaacgcatccacgtccccgtttaccagtcagggagggggtgggaattttccccgtttacatcctcatgggaaaataaacttcctcatcacctaatggcatacgggccggtcgaccctctaggcacggttggaaaatcgggccaggtcttccaagtctgtgggctcattttcttgcaaaggcccgtcctgctacgggcctaaacgtgttgggtcggttcggtgagcacggataaagtggaccaaaaagcgggctaagcagacaaaaatggcaaaacgtgtgggaccagaccagcaccctggattcatttttgtatccggacctgatccacttatttgtcttgggccaaaccaggatcttaccagaccagaaaacgagtttcgggccgaactttgtggcttggggctttcatgtacatctatagtccaaacacacaatccggggttgggtgcatgtggtcgtcgtagctcgactacgctgtaaattggacttgcatcaaaagacaccaagacgcagggtagattcgcaacgttttcagcgccagctttcgcggcacaggccagtggaaacatgtctcgagaagtacgtgcaagattccttccttccgtgcgtcaccattcaccaccacgtagcccgccgtgcatatataggcaatattaa

SEQ ID NO: 106788 - DNA, 721 bp, Zea Mays
catggcgtttgaggcccgccaacttcagcatcaggccgagctacaacttcatactggttcatctgccaactatgccggacgtagtggtacaccgatgaatcgtggccgtggtcgtggtcgtggtcgtggccgtggccggttcccgcctcctcgtgttgatacttctcctcgttattcaggggataatcgaggatcagctactcgaccaacttgtcagatttgtggcaaagagggtcatactgcagttcgctgctggtatcgtcatgatgattcctacgacgaagtaccgtcgtcggctgcattagctgcttcatcctcctacaacgttgatcccgattggtacactgacacgggcgctactgatcatatcaacagcgatctagatcgccttgctgttcgggaacgttatcacaacaacgaccaagttcgagtgggcaacgacacaggtttgcacatcttacataccggtcagtcttcaattactactgctgctcgtcctcttgctttgcgccatattttacatgttcctgaaatttctaaaaatctcctttcagttcgtaaatcttctaaaaataattatgttttctttaaatatcatccatggcatttctctataaaggaccgacaatcgggacgcagcctgctgaccggccaatgtgagtctggtctctacccaatccgatcgtctgcagctactacactcaaacatgctcttctcagc

SEQ ID NO: 106789 - DNA, 277 bp, Zea Mays
cagattaaagctctgcctaagatccttcagtttatgaccagctactaggctatctattctgcctactaaattattccccttgcaaaactatcttaccatatgtctctagcctagatggttgataccagaaggggaggaggttgtagcacgaattcgtcgaagaagggttgtagctaatccggaaccagaaatgaatcctcctccgaatcccccgcctgctgatgacatggttgctgctcaaatgcgactactacaacaaatggccaacacgatgacg

SEQ ID NO: 106790 - DNA, 395 bp, Zea Mays
gcgttttggggagaatccaaaattggagctcactggtgatcgattgagagcaatacttggtggctgggtgcgtaatgaccctatggagctcatggtggcctcaatttataataggcaagagcggtggctgggaattcgagcgatgacgcgcggtggttggagaaggagaggagcactggcgcagtggattggtgtcctattaccgtggcaatctctccggtgatcaacggagagttacaacgggtcacggtgatgcggtggagataccagggcacatggcgcaaggtcagcaggcgaccgtcgccggtgaacttatctgcgccgaccgcaagacaagggggtacgacaaacctcatccgtgtttgaatccgagttaatccagtgcccagatcttt

SEQ ID NO: 106791 - DNA, 458 bp, Zea Mays
gggtgatgcacgagggactgcatttagaggggtttggaccactggccatggtgcgtaatgccttgcgtcttcttggttgctggttgtattacttggaagtctgaaatggctaagtgttgcgcgtgttcgaacatgtgttggttctccttagaaagggtcccctttcctttttattgtccaaggagatggggttacagatcatttgagactgatctggcagctattgaaggtgtcagtgtccatccacgaacttgtggatacgtcactaacatgtcgtgggcggtcaaagtcacccacaccctgtgggtggtggaagtcgtctctagacattgacagttgtcgtccatgcatgcgccatagtggcacactattgtcacgcccaggacatatgagcctaacacaaccactctctgactatcaactccttgattattgcggtgtgggcaactcggacatgt

SEQ ID NO: 106792 - DNA, 412 bp, Zea Mays
gtttctatgcagccaattcatccctaggacgacatctaacccttgagttcccattactactaggctagcggggaagtctatcccccttatttcaatccttagattcggacagatcctatcggactgaacttttcccccaactaaattaactcttaaaggtgggatcattggttctatggggatgttatgtgcttctatccaagatgtagaaacaaaagatgtgtggcaccagtatcaaataatacttttgttgggtaggattcgactggaaacatatctactgccacgtcctgagcatcctggattgcttcggcctctaggtgattcacctttccacgtttgtaggcctgaccacggcctcctagtgcttgctgtggcgttccttgtcttgctgaggcattgactgctggcg

SEQ ID NO: 106793 - DNA, 345 bp, Zea Mays
gtggaattgatgcgcgcgcgcaagaacaggggggacaccaacgcggtgtcctggttttgggcggggaaacgttcatgtggcaatatttataacgctagggcagtaagcagtatgggcaatgctgtactagccgtttgtatttaaaccccggtctgccctttttcatcgaattctaaatttcaaattcaagtgcttactcattcttgatggtttagtgctgtttgtgagcgatgatgtggttgatgaaaagatgagcacatgtgagcaaaggcagcttgtttagtgagcaacatgggcatcgagtagtggttaacaaaaaacaactataattagcatgataaaagc

SEQ ID NO: 106794 - DNA, 430 bp, Zea Mays
atgagtttgtcttgattcttgatgtcggtaatgacatatttgtgattttgtatcaattcttggttttggatgctgaagttatttatttggtacaacagattatatgaactgatagctattgtttgtaactctaaatttctttagcacatatgctctcaaataatttgaactgtttactatttattcagcagataattgcagtccaattttatttaatattataaagatgatgctctcaaataatttgaattgtttgttgtttttgcatgttttgtggaaaaaaatgcagtctggttgtcaagtggtatggagtttgctgtttttgctgcttgcagtttttcctgtcaagtggaaaaaattgcaggatgttctttttttcatgtttgttgtttttgcatcttttgtcaagtggagttgacacttgataatg

SEQ ID NO: 106795 - DNA, 435 bp, Zea Mays
ccattggactggaatcaaaaatattcttcgatacctccatggcacggcatatctcggtctattttacggaagaaaccaagatcctagcctcgtagtgtacacagatgttggttatctttcagacccccataatggaaggtctcaaactaggtttgtatttctgaatggtggaactgctatttcttggaagtcatccaagcaaactctagtaacaacatccactaatcactcagaaattattgccttgtatgaagcctcacgtgaatgtgtgtggcttcgaagggtgattagtcacattcaatcatcatgtgggattcattctattgaatcacccaccattatctatgaagataatgcaacttgtgttgctcagatgcaacaaggttatatcaagagcaatgtcaccaaacatatctcccccaagttattctatcc

SEQ ID NO: 106796 - DNA, 367 bp, Zea Mays
cccattatagagtacaatgttgctctgatagctttcgaggtcttgctaagggtaaaactttctaagatgctctatgttccatgaattccccacttccgtaccatccatttgagtaagccaatatgatcctggccgagtgacctccgatgcaatgaatggcccttcccatagtggtgacaacttgtgtcgtccttccttcgttagaatttggcgaaggaccaagtcccccattagaaaggatcgatgtcgtatagctttatcatgatagcgcctcaaggtttgctagtatctggctgactgaattattgtgttcaatcgctcttcctccagcacatcaatatcctctagcctggtagcttctgcttca

SEQ ID NO: 106797 - DNA, 428 bp, Zea Mays
cttgccacatagcgtgcaatttcaatcttcatttttgtccaccaataatgttgttttagatcatgatacatcttagtgcttctgggatgaatagaaatagcgactaagatgtgcttcatctaatatttgctggcggatctctttcattctttggcacaactatgcggttgttgaaccatacaatgccttgatcgtctttcctaaagcacttggcttttccggcctctatcttctcacggatgtgcttcataccctcattatccttttgagcatccattatcctttgtaaaaggactgactcaagctttaactgatttaaggttccatgttggatcattcccaggtttaacttctccatctcctggcataacgtagtatcagaagtcttcatcgtaagacagtgacaggaagccttacgactgagtgca

SEQ ID NO: 106798 - DNA, 757 bp, Zea Mays
gtccatatcattatggtcacgaatcctgatgcgggcaggtggtgctcctcgatggatggcggtacacgggagtgggtcctttagaaaaactacatgaggcgagactttggtccgtttggatctaattttttagtaggttttgtgtctgtacgattaaggctctctctaatagagccggtaaaggctcctctaccctaaatataaagaattaaacggttctctactttctccaataaagtcctcctcccgcccttcgtaatcctcgccggcaactccacgtcctatcaatcccccgcgatcggcgatcccatcccttccgaaaccagcgaaacaagtatccactcaccttgcccgacaaatgtgccgcccgcgtccaagatgcagtcgatgatctcttttttttccactcccctcccttcctctctccgcccgactcgcacgcgcccccgcgtctgactcccccgtgtgggcacgagccctgccatacgcgcgcgccgccgagggaggcaaggcacgacagctgctccacctcgacgcttgggcgcttggtttggtcggaggtttcgtgagcacaaagttcttgcctcgtctctttagtagtatcgatgcttgttctcaactttctagcgtgtgattaagctggggacggccgcctctcggtctctcacggtgaatttggcggcgaatttggtgggtatttgtggtctttttgtagcatgaacacgaggagatttcgtgaggagattttgccgagctg

SEQ ID NO: 106799 - DNA, 389 bp, Zea Mays
ccgcgttacattgaaccgaccgtggttcctgagtttggcgcagggacatcttctgctgccgaaagaaaagaaactgcttcaactacacagagtactgaagagccggctgtaatgccgaaggtgcctatagccaaggaagttgaaacgaaggttgataaggttgatgaaccaaaaattgaagaaataacgaaaatgccatatattttgagcgctctaacaagggcgacagtaccgaatgtacaaacgggttctatcgtgactcctaaaaggagaaggatggtaaatgtattagatgtattggaaacaaccgactccataagtcccgctcccacagggaaagttgccgaagctgacaaaacacaacccaaagctgatactaagcaaataga

SEQ ID NO: 106800 - DNA, 721 bp, Zea Mays
cttccactgccctagaatagctaacttagtactttctagtccaggtacctaaaggactacacctttttcatatccaagggccagatccaaaactctgcttggcaaaagcttagctacataactcgatagattgaaagcagcgaggtaaggatctcgagggtacaatgctaagcactattcctgaaccacactcaggaatagctctctggtctaaaaggtatcccagacatcaggactgcctccaaggagcccttacgccagggggccaggaaagggagatccttgtcttcaggccgagctaggagtacacaagggcaaggtccttttttgtctctccagcaatagcaacataccaacactccatgtgggaactacaagcgtggtgctgttgcattctgcataggactaacatctctaaaacaaaacgcaggtatggcccaacctgtgggttcgccacctcacccgaggtgggcctgagggcctctttcggttccctaaatgtggtgtacccactcctgctgggtcaaggggagaccccagtggctgctcatagccacgggattactaggtggctagcgtcttaggactaagacccaccatatgaagtcgcgggccagcagggctcttttcttagactcggccaccatcaccacaagtcccacaaaggactaatcagctataggactgggttcccataggcagaacctggacctccacacgg

SEQ ID NO: 106801 - DNA, 674 bp, Zea Mays
ccggcgtccttcggtccatcgtcttgggcgacaactataggtggacctccgccgtgggcgcatgtggtgtgccggtgaatcggcggtggtcctccggcgcggcagatcggcggctgggcgagggcgaccaccatatgacggcttggcggtagatcgactatgctcctccaacttggccatgggcactgggcagtgagcctctgtcgtgggtgcctgtgcggtggctcgttgccgtgtaaccacggccgtcaccgtggatggtggttcctacgacgctaggattggggaatggatactggggaagcaggaggctcatcagggctggcggctgcgagtctgcgaggggaacaggagcaggtgattcaggttaggtcaccgctacagtcagggagaaagatcgagcctgtgttctaatattataaatgttactgtactagcaacacatattgttgtcgcgtcctaattaatcaatacattcccatagcaacacatattaagtgttatcacatcctatttaaacaatggatggtgcttgcaacatctattaaatgttgccaccaccctaataacttaacagatgatgcttgcaacgcatatgaagcggtgcccgctaatttcttacaacacataaaaccatgtgttgttgtggatgcgttgctataggggagtttgtg

SEQ ID NO: 106802 - DNA, 356 bp, Zea Mays
gaagtcatggccagccatggccatggagaagttgctgctcctgcaagggctccctagagaagacagcaagggtgccggtcttcaccatggagagctcatgctcgatttttagggatgaaggggaggcaccatggtgaaatgttgcttcgccatggagcaaagagagatggcgtggggaaaacaacttagtggctggtggggaagagaagtgggggctagggttgggaatgggaaaagtctccaagtgaaagagaggggactcttatttatagcagaaattttagagttaggtttttaggttccttaggttacttctacactaagcaagggttacttagaagcgaagcaaaagattc

SEQ ID NO: 106803 - DNA, 1326 bp, Zea Mays
tgaacattacaaatggatcggtagaaaacataccagtcctataaatacaagtgtacagaagaatgtgaagacacctttatctcttgatcacatatgcacatttaccagccccttctgttcattaaacctataatcatgcaatacaccagaactatctcatattcaatgaaaaagacctcaacatagtgctactatgttaccgcctgtttcttggccagaccatgagcaaggcttcatgccaagtcctacatgccgatagtttggagagtatttggtattaatttttgaagacaaatatcaatgatgtagtgcttaaaaatacatatcatgggacaccgatgtcagagatgcagctccaagcaggagatttctccatgttcattacttccatggagcttctaatgtcctccacttcagcccatctatcacctcctgcttggatattactcagcaacacatgatagccaacattacttggttccaactccacaagtttctgagctgcaaaatatgcaagcttagagtttgagtgaattctacatgatccaagaagggcaccccaaattctgccatctgccttaactttcatgttgctgatcacttggagagcttcctctagattacctgaacgaccaagaacgtccaccatacaagtatagtgtcctagctcaggtgcgaatctgaacttttttgtcatgcaatcaaacaactcgcgagcttcactgacgagacctgaatgactacatgctgaaagtagacttaagaaggtcacttcatttggctttactccttctttcagcatctgattaaacaatgttagagcttgcttaccatgaccatgaattgtgaatgcttcaatcattgaactccatgagactatatctttctgaagagttctgctaaagcatctttctgcaagatgaatgtccccacatctagcataaagcttaacaagggctgtgtccaaggcacaactctcagattctgcagcatagttgtttcttatgatgtatccatgagttgctttaccacaccttaaagcatctatttcagtgtaactgactaggagacctcgtagaatgtcagcatttggaaagtaaaaggagcccatcattctctcaaatagatggattgcatccaagaacattccatgatagataaaagcccatatcatggctgaccataagtacttgcttcccccattgaattcctcaaacaactgaatcgatgacactaactcaccgcatttcgcatagaggtcaacaaatgatgctaccaagattgtgtccatgagcccactcctaatagcaaaggagtgcagcttct

SEQ ID NO: 106804 - DNA, 593 bp, Zea Mays
gtcatcccaagttaggtaggcatgagcgtgttgcaccgtcttaagtcgttgccgacttaagccgattgctctgttagcaggacatagtggtcaccccgagttaagtaagcgcgagcatgttgcaccggcttaagtcgttgctgacttaagccgattgctccgttagcagggcatagtggtcaccccgagttaagtaagcgcgagcatgttgcaccggcttaagtcgctgctgactttagccgattgctctgttagcagggcatagtggtcaccccgagttaagtaagcgcgagcatgttgcaccggcttaagtcgctgctgactttagccgattgctctgttagcagggcatagtggtcaccccgagttaagtaagcgcgagcatgttgcaccaacttaagtcgctgctgactttagccgattgctctgttagcagggcatagtggtcaccccgagttaagtaagcgcgagcatgttgcatcgacttaagtcgctgctgactttagtcgattgctctgttagcagggcatagtggtcaccccaagttaagtaagcacgagcatgttgcaccgacttaagtcgctgctgacttt

SEQ ID NO: 106805 - DNA, 621 bp, Zea Mays
aaccggttgggaggtcaacttgatagtatggtgtccaagaaccaaagtactttcatcaagggaagatttattcaagacaacttcatgttggtccaacaaacaacccgcttccttcattctcagaatcagccaacaattatgctgaaactggacatatcaaaggtgtttgattcagtatcttggcccttcttgttggaagtcttgcagagtctggggtttggtgctggatggtgtgacattgtgagtgggctgcttgccacatcctcctctcagattctccttaatggtattccaggggacttcattccgcacagaagagggctgcggcagggagaccccctctcccctatgttattcattttggtgatggacgttctaaacctcatggtggggcgagctgttgaagctaggctgttgcaacccctgtcaacttgttcctttctgcatagagtctctctttacgcggatgatgttgcacttttcatcaaacctacagtggatgaccttgttctggtgggaaatatactcaggctgtttggtgaagcttccggtctccaaacaaatattcagaaaagtagtattatccctatcaggtgctcacagtcggaggtagccactgtt

SEQ ID NO: 106806 - DNA, 466 bp, Zea Mays
cttttgtgaaatgtggtgatcggtcctcttgccttacttttctatttctcttatgcggtagaatgattggagtagattataagtatggtgctaatttcatataaataataataattgttgctaatttatggtcaagttagtaggataataatttagtccccagaacaaaatgtattgttaagtcttagcaaaagttttaaataaaattgggtgccatgtccgtctggatgcaaaaaagtgaccactttctgcttcgtgctcgcttgcgtgccgtggtggtgcagcacatttgtgcctagaagaagcgggtggcgatgaaggggctacagggtagcgacagttatgtgccttgttttcataattattgccgttgcaatgcacgggcaccgtactagttacatgatgatgtggaaagaaggtatgatccacattaattgcattgtatatcatacttttgtcatgcata

SEQ ID NO: 106807 - DNA, 652 bp, Zea Mays
cgttcatcgaatccacctcctcctgttagtcggctcctcctcttgttcgttggctcgtctcggggtccgtccttctggatgcataaccgaaagaactccctccttgcctagggtcaacacctccattttataggccaggaaggggtcagccagcagtggcttccctaggaaggagccacaaggaaagggtaaaaccaaacattctacctagggtcaagccacacatactcatgggctctagggtcgcctagttgtctcgtatttattatggcgaatgacgtgggatgtgtgggtcctaggcgccttcattcaggctatgatgatccttggccttcatagcctggggctgggcatggcttggcgtgttgcgccctgccaacggcctatgcactcaggcctagtcgtgataggtcatgagtgtcccgtaggccaaggggcgagcgggccataaatgcgtcgcggtccgaggggttcataggtcatgagtgggaggcagaccgacacccccgctgtggctcgatgccagacgtagttaatgccgatgatcatttatgatgggtcaggcttaggcaaggtgcgagatccacttgagtggccaccccacatgctcgacccccttgtcaggttctaccacgcccgaccccgggctccg

SEQ ID NO: 106808 - DNA, 361 bp, Zea Mays
agcccattctaactcgactgttatttctaaaacgccgacgttaccatcattcactcggcagttatctctaaaacaccgacgtcgtcttcagtcgcttggcagttatctctaaaagtccgacgtcatcttcaagtcgctcggcagttatctctaaaacgccaacattgtcttcagtcactcggcagttacctctaaaacgcgacgtcatcataagtcactcggttgttacctctaagagcgccgacgtggtcatcagtcattccgacgctgacgtggcttcgtcatcactcggacgctatttcaaaagcgtaaatgtcgacaataatagctcggcaatcacccctaaaagcgacgatatgac

SEQ ID NO: 106809 - DNA, 644 bp, Zea Mays
tgacatctctagtaagacccctcccctttctattctttacaacctgagaccctcagtcgtggacggcgacaggccgagctccggcgagctcctactggctggaatagacaacggctagtgctctagcttggctgacacttaattcaactcctaacaatcgtttcccctcgatcaattgcaaggttcgagctcttaatcatactgcccatggtgaccgcacgatcaacggacaaaccgagacgttcccggtgatcctacgggctctaatttatttggatgggtcgaggagcatcaagggtacatcagagtactgaaacgagggaacagagggtatgaacgaacctgtagcgcgctggccacgatgagctcactcagtacggtgttctggaccgattttggggaagtctcaaattggggcgcgctggtggacgatctggggcacgggttggtgtactggttgcgtgactacctagcgaagccgatggcacgctcaatttataggacccaagggcggtggcccatgaatttgacatggcgcggtggtggccggagagaggggagagcactggcgcaaggaattggtggctttcaccgtggagaggtcaccggcgaccaacagacatgcgtaatacgagttactgcaa

SEQ ID NO: 106810 - DNA, 927 bp, Zea Mays
agtgggtcgtgaccgctgctggggagaactggcggtggggcgctatgcaggagcatcagccccagctagagcctggagccctcttagatgccctgtagaggcttcgcaaccgtgatcttaccacagtcgaggtcgttgtcgcctttcaccattagagggtactgccactagttgagcgatgactgcgcttgcatgagatgacgctcgaggctgaggtggagagctctcggatgttgtcggccacccttaccaatgacgacctcctcaagcgggtcaagggcacggtgggaaggctgattacaatgcccttgtccaggtcccgatgcgtcccaactatggttacgtgttactggtaggccgcaaaacctgcctctggtttatcctcgtttcttcgtttcaacctgattatctggactttcgtttattcttaagggatatggggttacaggtctgcctttcctctggtcccataggacgcggtgggtcaagcggcacataggttcagaggaagaaggatgaggagaggaagcgagccaaggagaaaagggcggctcgtgacgagcccgagaagcaggggcggagccaagggggggccagcaggggccatggcccctcccaaggcaacgatgtgtatatatatattctaaatgttgtgtagtctaaatatatatactataaattttatcaacataattaatctaaggtttaatatagttgttggtaatatataatccataactcttgtagtatgccaaccaaagtctaaaatagacaaaaaaataagataaaatatttgttgaatgaccaattgatggcataagacgttaaacctaatttgattgcagacgctaatatctaaacctcacctctatatgattcttcttatcatttggctgggtagctaccgattgccgctgaccacttgac

SEQ ID NO: 106811 - DNA, 511 bp, Zea Mays
ttgtaaggttggagcatattcctccgagcagaaatttattcgtggaaatcccgatgaagtcaatcaatggataaatggtgaagtcagagctttcgaggaagttcatagcgacagaggggacttttgtgccttcaccgatgcctgtggggctatgtccatcttggagaaggttggctatgatcatgctaaggttttagctcagccagacttcgccttcttagctgatgatattagaaacccttcaggcgaagctactaccctaggtgggaaattttattccgaagtatggctgaagggtggatgagaaattgctgatgaagctatcaaaagaaatgagaaagaatctcatgatgctttagaagaagcaaaaagagctgaggaagctgcccgagcgggctagacatataggtatgcacttttaacttattttcgtaagtttttcagcttcgactctgatagatatttgtgtttcaatgcagctgagctttctccacctcttgaacaatacaac

SEQ ID NO: 106812 - DNA, 901 bp, Zea Mays
ctttatatctaactttctatctttaacgtacataccattctatatttaacgcaagttttttattattattattttcccggccggtcccccctcccctcatcaccaatgcttccgcgaaacaacgctccgaattcaacagtgccaaaattaagtgacacaaccctaaactttcatatgtctactatatagcatgtgttacacacgatctcgaggagatgatcgatgatggcggtggcacaagtgaggagagggggaagggaagggatgagggatgattcaaataaagtatttcatggggaagggagttcagttatccaactatctagaccgttgattttgatagtgtgttaaatttgagtacaatatgtttggtgaatttagtgggataatgagtatggggtgatttggttgtgtgacttttgcaaagtttaaactgatggattatataatggtaagagcataactcttttctattatataaatatatgtaactttatatctttaacatatactactttatatctaactttctatctttaacgtacataccattctatatttaacacaagttttttattattattattttcttggccggtccccccctcccctcatcacctgtgcttccgcgaaacaacgctctaaattcaacagtgcctaaattaagtgacacaaccctaaactttcatctgactactatatagcatgtgttacacacgatcccgaggagatgatcgatgatggtggtcgcgcaagtgaggagagggggaaaggagtggaagggatgagggatgattcaaataaagtagttcatggggaagggagatgagttaaccaactatctggatattttattttgatagtgtgttaagtttgagtacaatatgtttggtgaatttag

SEQ ID NO: 106813 - DNA, 492 bp, Zea Mays
cgagctcgccgtgaagattcgtgcacgacttagagtagatataaccggaggggtgaaaatatcatgcaagggatgagtccatgcgctggcttcgctgtatcaattgtcctacgacccgccatgctatcgacgctgaggatcaccatccatctctgcggtgccacataattgtgtgtttcaccacgtcgctgtaagtcgtggcatgtagccaattaacgcattgggccattactccatcgtatgccacggtgaacacgccctagtgaaagatcccaccgccgtcgtgaacaccttcgccccaaatttgcaaagcacacgatcggtttctttaaattaagcactccactcgctccgcttctctgttacgcgcccaacccaccctcagccagcccctcttatgtaccatagctcccagtcaccggaatcccccgagcatggtcaccggcaccgccgagttgagccccaccgtggccagcccttctcaggttcgtt

SEQ ID NO: 106814 - DNA, 348 bp, Zea Mays
gtttaacttggcgtgtctgtggccgcgaagccgtgaggcacagccacaacgtgcaggccgtgcagtgcaggtgcaaccgtctaggtgtgtagctcgtgtagtcgtgtctccgaacaagcaaatcacaagcacaacagaaagtagcaaagtggatataatggcaaaccaaaaaacatgttgaattccttgacttataaaacgggatctccacagagggaaaggtacctgcacattagattagagaatttttaaagaggagagcaatataccaagcacagcagatcgtagcatcaggaagcaaaagaagacatataccatgcacagcagatcgtagcaagcatatggaag

SEQ ID NO: 106815 - DNA, 833 bp, Zea Mays
agcgactgaacattagtcctataaaccaaacaccccctaagagaattctaggttgcattaacgcattaagaatgttctttttttttgtctataactgaccaagctcatgatactgaaatatatgatattgagttcgaatatgtttaagaggaaactaaaggtgtcgttgcaacttgcaagctaggacatttatcggcctcaaaatcagaccaacaaattgatctcattctagggttccgagttgcagaatatagttgtgagatggaaattgacgaacacgtatgcatgcgccccatttcagagtagcaacggcaaaactgtggctttgttttcactctggcagaatttcgaccagaattttgtgtgtgtggtgatttccgagataaggttgggtatatgcgagtgagtgcatgaatcgcaaggcgagaggagaagagagagataggggatcagcagaggatagtacactacgacgtagcttagtgctactgcactagcatggatcggagaggggtgggcatctgcagagcagagagaaggtggtggtggatctccgccacacacacacacccggccgcccggccctgcggctgcatgctgctgcccttctgttagtactgactgcatggtgaggtcaaatcaccaaaagtgaatgacgcctttgtttttcatttctgcatgcccttctctcttctctctctccatacgatacgcctgtgcagtattattattaataataatagcattcatgaatcatgagggcccatctatcacattgtttttggacacatacacttcatgaacagagcacgcgcccagctgctgctgcttgc

SEQ ID NO: 106816 - DNA, 357 bp, Zea Mays
aagtcagatcatcttgaacactaaggtcctccattggtaactgctcttcaggtaccctaagacatttcttcagctgagatacatgaaagacatcatgaacatccgcaagatgatccggtaactccaattgatatgccacctctcccactcgctttaagatcaagaagggtccaatgaagcgaggggaaacttccctttgactttaagtctcctcattccacgaagtggtgacaccttgaggtatacatgatcaccttcctcaaactccagtggtcttcttctatttttagcgtagctcctttgcctggtctgggctaccctcaagttctccctgattatacagacttgttcttctgc

SEQ ID NO: 106817 - DNA, 354 bp, Zea Mays
tgaccttgtcgatcaacttagctagattagggagggatttgagccaaccttggatcacttttcttgcccttttgaacttagccatgagccgtttcgctgggtccagctgaaacaacgtttgagtccaagagtcttgaaaagttgagtgaaagtcttcgagatgtaaccaataattttcaaacctgaaaatgggcggtttgggaacgttaatttggacgttgatcacccaagggacgtggtccgaagcacccctagccagagaatgggcagaagtagcaggaaagttggaagaccaagcctgtgagacaaaacaccaatccagcttttcaagcaaagggtgacgttgcatatttg

SEQ ID NO: 106818 - DNA, 326 bp, Zea Mays
caggaaaatcagcaagcaactcatcaaaatcagcactagtaatctcgttacaagatggagaaataacatcttgtaacatgtcattgtgagcaaaagttggaataggctaaatcgctaaacaattcagacctagctcaaatgtaccatcctctgctgaataacaagtgtcaagattaaaatctgcaaatacattggtaaactcatcctcctcttcagtttgtgaatcataagaagcgtcagcaagggcaataatagtacgacgattgggacattcagcttgtttatgcccgtgaccaccacacttaaaacactcaatcttgcttgtc

SEQ ID NO: 106819 - DNA, 674 bp, Zea Mays
ccatccggagttttcttctaggaagtatcacgtccaagtattccctcagatcaggcggaagaatgcaacaccttgagccaaccagaatcggaccctaatgactagagagagcctatcatcaggtacataaagaatgaagaagaattagatgataaaactgcggcagaacgcatagcgagacagttgcccagtacaccctcatagggggcatactatacagaaggggtgcgacaagagtcctcatgaagtgcatttcctcgactaatgggaagcaactattagatgagatccacgccggacagtgtggaatacatgcagaatccagaactctggttgggaaagtttttaggtctagtttctattggccaacaacaaagagtgatgcagccgagttagtccagagatgtgaagcttgccaattcttgtcaaaacaacaacattaccggcacagcagctatagaccatacctgtaacatggccatttgcatgcttgggattggacatgattggacccttcaagaaagctcagggaggctatactcacgtgctggttgccattgacaagttcaccaaatggatagagtacaagcctattgcttctttaacctcaaccaagacagtggagttcatacaagacataatattcaggtttgggataccgaatagcatcataa

SEQ ID NO: 106820 - DNA, 364 bp, Zea Mays
gagaaaacattagcacgttaaaatagggactgctggagtgttcgctcgttctctcatgtatcaaggctgggtcgtcatccgtctcaccccctgctatttcattgtcagtaccgactgtcaaacctcatgttcattccactctgacactgcagattaatagtctatactgtatatctgacagcgaaatctatcgctctataaattctgcagaccttttttcccccatagtattagcaaagagctgacagatgggttgtgatcgacgatgacgacggcttacctactacaggcctgaaaaatcagtttcgatcacctaactgtgttgtgatagaatcgaatgcaccgtgataagcatgcatggagg

SEQ ID NO: 106821 - DNA, 309 bp, Zea Mays
ggatgacgtggaggtggaaggtggtgttatggaaatgagaacatcagatgtggatgtagaagatgatggttcaacgataggaatggaaggaagacacatgaagtagattatgtgggataatatgaggagtgagtagattggttgtgaaagaagggacaattttcattgaaactctcatctctagaaattcgaatatgacgagtagatggatcataacaactatatcctgtgttcaggactgtatccaaggaatagacactctacagattgagcaatcaatttagtccgctcacgaggtggtaacaagac

SEQ ID NO: 106822 - DNA, 398 bp, Zea Mays
atttggtactaacaaatcgtcatcgcttctccagccagccggcccctagctactcgctagcttattagctgcttctttcggttcccacgtagtaccctcggccggccccatgcatgcaaatgggagagaccctaccatcagcagatagatgtccccctttacgtgcctttatttatctaggtttccccatgcccgacagtaccctcttttttctgctatagctcacgttaaaaacagcaagaaattgcagtgattgggttgggcgtgcattcatgcccttcttggatctacagagtggtaaatgatagcgagagagagatccaaaaaaatatcggcgaatgcctcgatcgatcgtccctgcaactgcaagaggtgcatgcaatggtgtttggactttt

SEQ ID NO: 106823 - DNA, 1065 bp, Zea Mays
attgcagctgccaacaactttgcacaagttgcatggatcaaatgcccaccaaggaagctttggcatgatggagccggccgcgaccagagatttaatccataataccaaagctgcatgccagtaaaaagatggccacggtagaggtctgacttgaacgccgttagcaggtatcaccaactgcatgggtggcggccatggttgccggtgcagcactgcatcccagccacaactaaatggatgcaagcaagaactctgtatgagactgaagcaattcctcaagcacctattggttaaggtgttgagaaccatgtccttaatctgaaggtcaatatgatgttggacgagccatgctgccacgtcttctccatcacaaacaacatcatattggagtgtccagtgcccttcaatgtgcttagcattcagaactgtatttgtttctgcaagaacctcagcagcattaagatcacatactgaaacatgcatcccaccaagttctgaatcaattcctatgcaacttgtgcaaagttgttggcagctgcaatatgagtaaacatgtagctgggaatattcagagccaatgttacatgagtggagtggcgtatcagactatgtggctgctagtattctttcagtatatctcaacttggcgctggtttccaactacactccaaaatgagttgaggatcatcaactgggcctgggaaaatgattgtgttttcaactggtctgcattccagataggaactagctccttgagcttgaacgcggacggctcggtgacaaacttgtagaagctgtagagacgcagttgtgcttcctcggggatgctgatactggaggccgcgacgaaggcggatgcagcgttgaactcccgctcgtccagaaagttgaagtcgcggcggtggaagttcacgaacctctgcatcgccatgtaggactcgaagacgaaatcggcgtcgccaatgtgccggagcgggatgcccaggtgcacgacggtggccgcggcgcccagaccccacaactgcattgatctcagcattgacttggagaagcagcagattgact
